United States Patent Application Publication US 2006/0134663 A1 - sequence listing, part 40

SEQ ID NO: 73341 - DNA, 1899 bp, Homo Sapiens
aggctggaccggtccggatttccgggataagagaaatcagcccttcaggcactggagatggaccggaaaagtgtagaagggaggccaatgtttgtttccccctgtgtggataagagcaaaaaccccgattttaaggtgttcaggtacagcacttccctagagaaacacaagctgttcatctcaggcctgcctttctcctgtactaaagaggaactagaagaaatctgtaaggctcatggcaccgtgaaggacctcaggctggtcaccaaccgggctggcaaaccaaagggcctggcctacgtggagtatgaaaatgaatcccaggcgtcgcaggctgtgatgaagatggacggcatgactatcaaagagaacatcatcaaagtggcaatcagcaaccctcctcagaggaaagttccagagaagccagagaccaggaaggcaccaggtggccccatgcttttgccgcagacatacggagcgagggggaagggaaggacgcagctgtctctactgcctcgtgccctgcagcgcccaagtgctgcagctcctcaggctgagaacggccctgccgcggctcctgcagttgccgccccagcagccaccgaggcacccaagatgtccaatgccgattttgccaagctgtttctgagaaagtgaacgggacgctgggagacaggaaatgccttacttcactctggcccggcggacctcccaccacccagcagtgcactggggatggacaggcctggtgtgctgcgtgctcgcaaccacagatggctcctcggctttagacagaaaggggaaggggttctaagtcaagagcctttcagtgctccctcatattgagggcagtggcagaaaagtgaccactctgcaggctgggcccaggatgtggtgtcctgagatagttttgtatcttaaagactgaggcacagaagcgaaacgagaacacactgtttttgagacacagttgtccaaatgtttctggccagctccggcccctttttgtatgacacttctcttccaccctgcacagcacatgtgcccgtcattcttttaattttaaaagatgaaatggcagatgctagtaattcacagaatggcctcttgtgggggtgggtctgagggaagtcagctataaaacatttgctggagttttgttcaatggggctgtgcatttttatattatgtgtttgtaaatgacatgtcagcccttgtttcatgtttcctaaaagcagaatatttgcaacatttgttttgtataggaattatttgtgccacctgctgtggactgttttctttgcctagtgactagtgacctgtgttgtctaaacatgagtttcagccctttggttttgtttaataccatgtcaaatgcaaacttcaattctccccatttagctttattaaactgacgttctcttcaaaacttcttgctgaatggtactcagatgtgcattcacatacagatgtgttttgaagtgggtgtaccttgctttacctaatagatgtgtaaatagaacttttgtaagtcaaatcccattgtcactttgatttaaattattccagctgtgatgtgtcttcattttatagcagtttgacactggagcttttgagcttttttacctcacatcttttatcaaataatatttactgctttgaaaacagcaacagcattggccagttcagtaggggaagcttgctttattaagacactctggagaaagacgtcagggaatccttgtatatgtcgtgggaatcaactcctcatttatctgttgcgtaagtttaagtttttgtgcatcagtcgggttttctatatttttttaacttaacattttttaatataaccgattaaaaagtagacagaacagtaaaataaactcctgtgtgcctaaa

SEQ ID NO: 73342 - DNA, 1135 bp, Homo Sapiens
ccttgctaaaatctttcccttctcaagactttgagcagttagaagtgctctattagaagttgtctgtgggtgatgttactgtagtggtctcagggaaaggattgtccagttactttagggggtttttggtggggtttttccccctgtgaaaacttactttgcccctagtctggctgctgctaggacttctgaggagcaatgggacatgagtgtccctgtatctgcgccactgccgcaagggaagcctcaggaaccagcacctggaggccaggatagccaagccctgggtgagcgagaggctggagaacacaggagctcacccagggctgctgcccaaccatgggccactgtgaacagacttcagtcctctgtttttgtttcataagccgttgagacatctgatggacttggcttaggccctgctgggacatcccacgtgtgatccctttcactccatcaggacaccaggactgtccttaggaaaatgtccttgagatggcagcaggagtcatattttctgtgtgtgtgtttcggaaagccgctgtgtcctgcctcagcacaaagacccagtgtcatttgctcctcctgttcctgtgccactccagaacctcagcagatctgagccaccgcctgccagtgtgagaggcggccactttcatggcagctcatcaggcgcagggccccagacagcttcccagccggccctagagcccggcctgggccaatgatggagggcggccgccagcccagggcctgcccatccagaagggactccccagggcctgggggaggagacccttggaaaagtcctctcttcccagctcctgattctggatctgagattctcagatcacaggcccctgtgctccaggccgaggctgggctaccctcagggagatccagagactcatgcccatggccatccatgcgtggacgctgtgtggagagtccaggatgacgggatcccgcacaagctcccttcagtccttcagggctgggccatgtggttgatttttctaaagctggagaaaggaagaattgtgccttgcatattacttgagcttaaactgacaacctggatgtaaataggagcctttctactggtttatttaataaagttctatgtgatttttta

SEQ ID NO: 73343 - DNA, 363 bp, Homo Sapiens
attaataccaagaaaatgtttaattttatacgttaaaagtagctcaaaaataactttaaaagaaaaagttgcatttaaaaggtctcagctaatagataattttacaagaaaaggtctgaaattcaccttcataaaaatatctaaagcatataaataattatcctttatgggaaaaaaaagaatattgggcttacaaaagaaaagcaacttaaatgaaattcagtggcttttaaagcattagttcagtgagtaatctttcccaattggttcatcatttcagctttgcttgtaaatatctgaatacaaatagttcacaagtcaagttgaaaaacaaacaaatctttattgtctagaaatatatat

SEQ ID NO: 73344 - DNA, 1127 bp, Homo Sapiens
atgaggccgggggttcaatcggcacgaggcggaagcggtccgagaatgaagagtgtgatctaccatgcattgtctcagaaagaggcgaatgactccgatgtccagccttcaggagcacagcgggccgaggccttcgtgagggccttcctgaagcgcagcacgccccgcatgagcccgcaggcccgcgaggaccagctgcagcgcaaggcggtggtcctggagtacttcacccgccacaagcgcaaggagaagaagaagaaagccaaaggcctctctgccaggcaaaggagggagctgcggctctttgacattaaaccagagcagcagagatacagccttttcctccctctccatgaactctggaaacagtacatcagggacctgtgcagtgggctcaagccagacacgcagccacagatgattcaggccaagctcttaaaggcagatcttcacggggctattatttcagtgacaaaatccaaatgcccctcttatgtgggtattacaggaatccttctacaggaaacaaagcacattttcaaaattatcaccaaagaagaccgcctgaaagttatccccaagctaaactgcgtgttcactgtggaaaccgatggctttatttcctacatttacgggagcaaattccagcttcggtcaagtgaacggtctgcgaagaagttcaaagcgaagggaacgattgacctgtgaattctttgccgtctaaggcagttgtttatgacagctgaaaactggacactccctaaatgtccacctttcagtgaagagatagttaagccaattccatttatagaccacctccagccagtgacgctccgagttgaggatgttgaacaacatgggaaggtcgcagcgtactaagtgaagaagtcagaggacagaggaatttctctttctaggagattttcattttgtgtgactcccatggggaggaacagactggcaggaagcacaccggggttaacactggttgacttgaataggattattcgatttttaaaaatacttttccatgttttctgagtgctctatgataaatcagttgcatctgtgataatacaatacatatgtggacataaacagggatcaaataaaggaggtattgctgc

SEQ ID NO: 73345 - DNA, 626 bp, Homo Sapiens
taggaaataaagccatcggtttccacagtgaacacgcagtttagcttggggataactttcaggcggtcttctttggtgataatgttgaaaatggtgctgtgtttcgctgtagaaggattccgtggaatacccacataagaggggcatttggattttgtcacgtgaaataatagccccgtgaagatctgcctttaagagctttggcctgaatcatctgtggctgcgtgtctggcttgagcccaacttgcacaggtccctgatgtactgtttccagagttcatggagagggaggaaaaggctgtatctctgctgctctggtttaatgtcaaagagccgcagctccctcctttgcctggcagagaggcctttggctttcttcttcttctccttgcgcttgtggcgggtgaagtactccaggaccaccgccttgcgctgcagctggtcctcgcgggcctgcgggctcatgcggggcgtgctgcgcttcaggaaggccctcacgaaggcctcggcccgctgtgctcactgaaggctggacatcggagtcattcgcctctttctgagacaatgcatggtagatcacactcttcctcgtgccgaattcaaacccagcctcgtacctagcctaa

SEQ ID NO: 73346 - DNA, 715 bp, Homo Sapiens
  misc_feature (43)..(43): n is a, c, g, or t
  misc_feature (104)..(104): n is a, c, g, or t
  misc_feature (153)..(153): n is a, c, g, or t
gtgcagtgtgcttctgaccagctgcatagacatggctccagtnaacagtccctgggactgagcagtggcccatgttggctgttggagctttcttttccctcatntgttatgagtcaataaagaagcagaaggtttggacgtgctagccagtgngaaagggaacctgagatggagctctctgatcaccctttcagccccagggcccggctctgtgtgagaagtctgtcccaaaattctgggacggaccacctcgctgaccagctgaccaggtctgtgtgttgcaggtgggtgttgggaagaataaatgtctgtatgccctggaagaggggatagtccgctacactaaggaggtctacgtgcctcatcccagaaacacggaggctgtggatctgatcaccaggctgcccaagggtgctgtgctctacaagacttttgtccacgtggttcctgccaagcctgagggcaccttcaaactggtagctatgctttgatgtcctgttgaggccatcggacagagactggagcccaggtgacaggagatggtgataccagaagtcaagggttggggtggcgacacggcctcccgaggaagaggtctgcttgatggtgactctgcaggagactctgaagtgactgctgggaaaccctttgggagacctgacctggggccaaaaataaagtgagccagcgtcatgaacgcatgctatttagggac

SEQ ID NO: 73347 - DNA, 1100 bp, Homo Sapiens
  misc_feature (950)..(966): n is a, c, g, or t
  misc_feature (1007)..(1007): n is a, c, g, or t
cagtcgacggtaccggacatatgcccgggaattcggccattacggccgggggagaccggaagtgagtgatcgaaagcatggcgtcggtggtgttggcgctgaggacccggacagccgttacatccttgctaagccccactccggctacagctcttgctgtcagatacgcatccaagaagtcgggtggtagctccaaaaacctcggtggaaagtcatcaggcagacgccaaggcattaagaaaatggaaggtcactatgttcatgctgggaacatcattgcaacacagcgccatttccgctggcacccaggtgcccatgtgagttgctccgttgctgcccccctttttccttttctaggttgacctctccttgcccctaagcatggtaataacagttgcatgtattgagtgcttaccaaatggcaagcattgtgctgattcccatgcctacacgatctcatttcttccttaccacatccctgtaagtaaggtgaaatgccagagacctagacggggtggaaggagcaagtgactgctgggatttgcaccaggtctgcctaactcccagatcactatgatttgccctggtgttgcattggcctggtattcttggttctcctttctaaccctcagttcttggaggacaagatacctggtgatttaaaatattattttagtcttgggaaactaatttcaatttattagtttttcattattctaagacttcttccttggtataaacttacttgcagatggttgaaagatagcttgaatttaatgaaatagaattcagtgtgccaggagttaggttcataccaggtgggggatttcagtttcagcaagttggcatcatttttataggggtaggacagttcttttgttacagagacataacgatactgtactctccacattatttttaaatattagttgccctttgtaaacaggttnnnnnnnnnnnnnnnnnttttttcgaaaaatttttagtaaggggacaaaaaagggtgnataggaaaccctgggatttaattttccaaggatggctaaattttgtgatgggggaaattggatataatgaaaggggaaaaaaaccctttttta

SEQ ID NO: 73348 - DNA, 926 bp, Homo Sapiens
gaacttacaggctaggtacgaggcctggtgggtgaatcggcacgagggtgatcgaaagcatggcgtcggtggtgttggcgctgaggacccggacagccgttacatccttgctaagccccactccggctacagctcttgctgtcagatacgcatccaagaagtcgggtggtagctccaaaaacctcggtggaaagtcatcaggcagacgccaaggcattaagaaaatggaaggtcactatgttcatgctgggaacatcattgcaacacagcgccatttccgctggcacccaggtgcccatgtgggtgttgggaagaataaatgtctgtatgccctggaagaggggatagtccgctacactaaggaggtctacgtgcctcatcccagaaacacggaggctgtggatctgatcaccaggctgcccaagggtgctgtgctctacaagacttttgtccacgtggttcctgccaagcctgagggcaccttcaaactggtagctatgctttgatgtcctgttgaggccatcggacagagactggagcccaggtgacaggagatggtgataccagaagtcaagggttggggtggcgacacggcctcccgaggaagaggtctgcttgatggtgactctgcaggagactctgaagtgactgctgggaaaccctttgggagacctgacctggggccaaaaataaagtgagccagcgtcatgaacgcatgctatttagggaccaaacaaatagaaaacacaaaaagggggggccgtctaggaggttcccccgaggggcccaggttaaggcgtacccggtttttggtacaagtggcccaaaaggaggcggataaaaacaaggagggggcgttaacaacgcggttgggacaacgcgcctgggcttgggaggccctccggggggccactgggcccccccgt

SEQ ID NO: 73349 - DNA, 947 bp, Homo Sapiens
  misc_feature (756)..(808): n is a, c, g, or t
cagtcgacggtaccggacatatgcccgggaattcggccattacggccgggggagaccggaagtgagtgatcgaaagcatggcgtcggtggtgttggcgctgaggacccggacagccgttacatccttgctaagccccactccggctacagctcttgctgtcagatacgcatccaagaagtcgggtggtagctccaaaaacctcggtggaaagtcatcaggcagacgccaaggcattaagaaaatggaaggtcactatgttcatgctgggaacatcattgcaacacagcgccatttccgctggcacccaggtgcccatgtgggtgttgggaagaataaatgtctgtatgccctggaagaggggatagtccgctacactaaggaggtctacgtgcctcatcccagaaacacggaggctgtggatctgatcaccaggctgcccaagggtgctgtgctctacaagacttttgtccacgtggttcctgccaagcctgagggcaccttcaaactggtagctatgctttgatgtcctgttgaggccatcggacagagactggagccccaggtgacaggagatggtgataccagaagtcaagggttggggtggcgacacggcctcccgaggaagaggtctgcttgatggtgactctgcaggagactctgaagtgactgctggggaaaccccttgggagaactggacctgggggccaaaaataaagtgagccagccgtcatgaacgcatgcttatttaggggacnnnnnnnnnnnnnnnnnnnnnnnnnnnnnnnnnnnnnnnnnnnnnnnnnnnnncaaaaaggctttttttaaaccatttgttttgggggggccgggccccattaaggccaaggggaacttggggtataaacggttttccctaagaaaaatccctgggatactgacccaacggctttggaatttctcacccaat

SEQ ID NO: 73350 - DNA, 1410 bp, Homo Sapiens
  misc_feature (22)..(22): n is a, c, g, or t
  misc_feature (1273)..(1299): n is a, c, g, or t
  misc_feature (1314)..(1358): n is a, c, g, or t
  misc_feature (1374)..(1374): n is a, c, g, or t
  misc_feature (1389)..(1389): n is a, c, g, or t
agtacgaggcctggtgttgaantcggcacgagggtgctgaccagttcctgcagagagctgctctccaggtcttcttggctttagtggaagaggtagaggaccgaggcactgtggttgcccaggaggcggcagggcgctgatcccgctggccctggaaggcacggacgtggggcagacaaaggcagcccaggcccttgccaagctcaccatcacctccaacccggagatgaccttccctggcgagcggatctatgaggtggtccggcccctcgtctccctgttgcacctcaactgctcaggcctgcagaacttcgaggcgctcatggccctaacaaacctggctgggatcagcgagaggctccggcagaagatcctgaaggagaaggctgtgcccatgatagaaggctacatgtttgaggagcatgagatgatccgccgggcagccacggagtgcatgtgtaacttggccatgagcaaggaggtgcaggacctcttcgaagcccaggcaatgaccgactgaagctgctggtgctgtacagtggagaggatgtatgagctgctacagcgggcagctgccgggggcttggcctatgcttacctccatgcggcccacgctctgcagccgcattccccaagtgaccacacactggctggagatcctgcaggccctgcttctgagctccaaccaggagctgcagcaccggggtgctgtggtggtgctgaacatggtggaggcctcgagggagattgccagcaccctgatggagagtgagatgatggagatcttgtcagtgctagctaagggtgaccacagccctgtcacaagggctgctgcagcctgcctggacaaagcagtggaatatgggcttatccaacccaaccaagatggagagtgagggggttgtccctgggcccaaggctcatgcacacgctacctattgtggcacggagagtaaggacggaagcagctttggctggtggtggctggcatgcccaatactcttgcccatcctcgcttgctgccctaggatgtcctctgttctgagtcagcggccacgttcagtcacacagccctgcttggccagcactgcctgcagcctcactcagaggggccctttttctgtactactgtagtcagctgggaatggggaaggtgcatcccaacacagcctgtggatcctggggcatctggaagggcgcacacatcagcagcctcaccagctgtgagcctgctatcaggcctgcccctccaataaaagtgtgtagaactccnnnnnnnnnnnnnnnnnnnnnnnnnnncctgagaggcggccnnnnnnnnnnnnnnnnnnnnnnnnnnnnnnnnnnnnnnnnnnnnnccactagaggaagacnaagaaagagaacacnctacctccccgggcgcggggg

SEQ ID NO: 73351 - DNA, 2354 bp, Homo Sapiens
  misc_feature (1816)..(1834): n is a, c, g, or t
  misc_feature (2110)..(2139): n is a, c, g, or t
ggcacgaggcccaggccacactgctgaccacctggctgacagagctctacctgagccggcttggggctctgcagggcgacccagaggccctgactctctaccgagaaaccaaggaatgctttcgaaccttcctcagcagcccccgccacaaagagtggctctttgccagccgggcctctatccatgagctgctcgccagtcatggggacacagaacacatggtggactttgcagtgatcatgcaggactatgagcgggtggtggcttaccactgtcagcacgaggcctacgaggaggccctggccgtgctcgcccgccaccgtgacccccagctcttctacaagttctcacccatcctcatccgtcacatcccccgccagcttgtagatgcctggattgagatgggcagccggctggatgctcgtcagctcattcctgccctggtgaactacagccagggtggtgaggtccagcaggtgagccaggccatccgctacatggagttctgcgtgaacgtgctgggggagactgagcaggccatccacaactacctgctgtcactgtatgcccgtggccggccggactcactactggcctatctggagcaggctggggccagcccccaccgggtgcattacgacctcaagtatgcgctgcggctctgcgccgagcatggccaccacccccgcttgtgtccatgtctacaaggtcctagagctgtatgaggaggccgtggacctggccctgcaggtggatgtggacctggccaagcagtgtgcagacctgcctgaggaggatgaggaattgcgcaagaagctgtggctgaagatcgcacggcacgtggtgcaggaagaggaagatgtacagacagccatggcttgcctggctagctgccccttgctcaagattgaggatgtgctgcccttctttcctgatttcgtcaccatcgaccacttcaaggaggcgatctgcagctcacttaaggcctacaaccaccacatccaggagctgcagcgggagatggaagaggctacagccagtgcccagcgcatccggcgagacctgcaggagctgcggggccgctacggcactgtggagccccaggacaaatgtgccacctgcgacttccccctgctcaaccgccctttttacctcttcctctgtggccatatgttccatgctgactgcctgctgcaggctgtgcgacctggcctgccagcctacaagcaggcccggctggaggagctgcagaggaagctgggggctgctccacccccagccaagggctctgcccgggccaaggaggccgagggtggggctgccacggcagggcccagccgggaacagctcaaggctgacctggatgagttggtggccgctgagtgtgtgtactgtggggagctgatgatccgctctatcgaccggccgttcatcgacccccagcgctacgaggaggagcagctcagttggctgtaggagggtgtcacctttgatggggggtgggcaatggggagcagtggcttgaacccacttgagaaggctgcctcctaggctctgctcagtcatcttgcaattgccacactgtgaccacgttgacgggagtagagtagcgctgttggccaggaggtgtcaggtgtgagtgtattctgccagcttttcatgctgttcttcagagctgcagttatgccagaccatcagcctgcctcccagtagaggcccttcacctggagaagtcagaaatctgacccaattccaccccctgcctctagcacctcttctgtccctgtcattccccacacacgtcctgttcacctcnnnnnnnnnnnnnnnnnnncacctttcttccgtctgttcactctgcggcctctggaatcccagctcttctctctcagaagaagccttctcttcctcctgcctgtaggtgtcccagaagtgagaaggcagccttcgaagtcctgggcattgggtgagaaagtgatgctagttggggcatgcttttgtgcacactctctggggctccagtgtgaagggtgccctggggctgagggccttgtggaggatggtcggtggtggtgatggaggtggagagcattaaactgtctgcactgcnnnnnnnnnnnnnnnnnnnnnnnnnnnnnnttggcctatctcggcctctcgcttcttaggaccgttaatttagtcctttattgggttaatattattaaaatgaaaattaatatcaaatttcgtgtccctatttcttttgtgattttcctttgttttgtctataaccgggtaataatttctaaaatctgtcctttggacaaatgatcacagtaaatctcatttccaaattttcataactaatttta

SEQ ID NO: 73352 - DNA, 1829 bp, Homo Sapiens
  misc_feature (1193)..(1211): n is a, c, g, or t
  misc_feature (1229)..(1761): n is a, c, g, or t
  misc_feature (1774)..(1774): n is a, c, g, or t
  misc_feature (1781)..(1781): n is a, c, g, or t
cagtcgacggtaccggacatatgcccgggaattcggccattacggccggggagtccttggctcttatcttggaagcacaggcgctgacagccgtcccagcccttctgtctgcgggcctgaaccaaacggtgccatggggaactgtctgcacagggcggagctctccccctcaactgagaactcaagtcagctggacttcgaagatgtatggaattcttcctatggtgtgaatgattccttcccagatggagactatgatgccaacctggaagcagctgccccctgccactcctgtaacctgctggatgactctgcactgcccttcttcatcctcaccagtgtcctgggtatcctagctagcagcactgtcctcttcatgcttttcagacctctcttccgctggcagctctgccctggctggcctgtcctggcacagctggctgtgggcagtgccctcttcagcattgtggtgcccgtcttggccccagggctaggtagcactcgcagctctgccctgtgtagcctgggctactgtgtctggtatggctcagcctttgcccaggctttgctgctagggtgccatgcctccctgggccacagactgggtgcaggccaggtcccaggcctcaccctggggctcactgtgggaatttggggagtggctgccctactgacactgcctgtcaccctggccagtggtgcttctggtggactctgcaccctgatatacagcacggagctgaaggctttgcaggccacacacactgtagcctgtcttgccatctttgtcttgttgccattgggtttgtttggagccaaggggctgaagaaggcattgggtatggggccaggcccctggatgaatatcctgtgggcctggtttattttctggtggcctcatggggtggttctaggactggatttcctggtgaggtccaagctgttgctgttgtcaacatgtctggcccagcaggctctggacctgctgctgaacctggcagaagccctggcaattttgcactgtgtggctacgcccctgctcctcgccctattctgccaccaggccacccgcaccctcttgccctctctgcccctccctgaaggatggtcttctcatctggacacccttggaagcaaatcctagttctcttcccacctgtcaacctgaattaaagtctacactgcctttgtgnnnnnnnnnnnnnnnnnnncctcgtgccgaattcttnnnnnnnnnnnnnnnnnnnnnnnnnnnnnnnnnnnnnnnnnnnnnnnnnnnnnnnnnnnnnnnnnnnnnnnnnnnnnnnnnnnnnnnnnnnnnnnnnnnnnnnnnnnnnnnnnnnnnnnnnnnnnnnnnnnnnnnnnnnnnnnnnnnnnnnnnnnnnnnnnnnnnnnnnnnnnnnnnnnnnnnnnnnnnnnnnnnnnnnnnnnnnnnnnnnnnnnnnnnnnnnnnnnnnnnnnnnnnnnnnnnnnnnnnnnnnnnnnnnnnnnnnnnnnnnnnnnnnnnnnnnnnnnnnnnnnnnnnnnnnnnnnnnnnnnnnnnnnnnnnnnnnnnnnnnnnnnnnnnnnnnnnnnnnnnnnnnnnnnnnnnnnnnnnnnnnnnnnnnnnnnnnnnnnnnnnnnnnnnnnnnnnnnnnnnnnnnnnnnnnnnnnnnnnnnnnnnnnnnnnnnnnnnnnnnnnnnnnnnnnnnnnnnnnnnnnnnnnnnnnnnnnnnnnnnnnnnnnnnnnnnnnnnnnnnnnnnnnnnnnnnnnnnnnnnnntacaagcgttccncctgganctcctcgtgcgccttctgttcgaccttgcgcttacggatactgtcggc

SEQ ID NO: 73353 - DNA, 928 bp, Homo Sapiens
  misc_feature (821)..(821): n is a, c, g, or t
  misc_feature (857)..(867): n is a, c, g, or t
cagtcgacggtaccggacatatgcccgggaattcggccattacggccgggggcaggcagtgggcgtggggtaaggcttcctgatgccccctgtccctgcccagaacctgatggccctcattagtccttggctcttatcttggaagcacaggcgctgacagccgtcccagcccttctgtctgcgggcctgaaccaaacggtgccatggggaactgtctgcacagggcggagctctccccctcaactgagaactcaagtcagctggacttcgaagatgtactggacattcttcctatggtgtgaatgattccttcccagatggagactatggtgccaacctggaagcagctgccccctgccactcctgtaacctgctggatgactctgcactgcccttcttcatcctcaccagtgtcctgggtatcctagctagcagcactgtcctcttcatgcttttcagacctctcttccgctggcagctctgccctggctggcctgtcctggcacagctggctgtgggcagtgccctcttcagcattgtggtgcccgtcttggccccagggctaggtagcactcgcagctctgccctgtgtagcctgggctactgtgtctggtatggctcagcctttgcccaggctttgctgctagggtgccatgcctccctgggccacagactgggtgcaggccaggtcccaggcctcaccctggggctcactgtgggaatttggggagtggctgccctactgacactgcctgtcaccctggccagtggtgcttctggtggactctgcaccctgatatacagcacggagctgaaggctntgcaggccacacacactgtagcctgtcttgccaacnnnnnnnnnnngccattgggtttgtttggagccaaggggctgaagaaagcattgggtatgggccaggcccct

SEQ ID NO: 73354 - DNA, 457 bp, Homo Sapiens
gctttctgttcccaaacaccgttcggttcaggcacgcagacagaagggctgggacggctgtcagcgcctgtgcttccaagataagagccaaggactaatgagggccatcaggttctgggcagggacagggggcatcaggaagccttaccccacgcccactgcctgcacaagcctcaggcctatgggggtcactggccttgggtcttcctgttttgaggttggatttggctggttgggactacactcaggaaaaaggtggggaccagaaagtgggcattttaccgaagtggaaagggagattgagaaaacagggggctttccagcaagtagagattttaccgaagtggaaagggagattgagaaaacagggggctttccagcaaggagagattcttcaagcacaaggaaggaagagaggggggctgggtgacttgtgaggcagagataagggaggtgc

SEQ ID NO: 73355 - DNA, 1941 bp, Homo Sapiens
ggcagtaactataacggttctaaggtagcgaggcctgggtggcgaattcggcacgaggcgcacgcagaaggggtgcgagcggcggcggcggcggaggctgccatggacgacgaggaggagacgtaccggctctggaaaatccgcaagaccatcatgcagctgtgccacgaccgtggctatctggtgacccaggacgagcttgaccagaccctggaggagttcaaagcccaatttggggacaagccgagtgaggggcggccgcggcgcacggacctcaccgtgctggtggcccacaacgatgaccccaccgaccagatgtttgtgttctttccagaggagcccaaggtgggcatcaagaccatcaaggtgtactgccagcgcatgcaggaggagaacatcacacgggctctcatcgtggtgcagcagggcatgacaccctccgccaagcagtccctggtcgacatggcccccaagtacatcctggagcagtttctgcagcaggagctgctcatcaacatcacggagcacgagctagtccctgagcacgtcgtcatgaccaaggaggaggtgacagagctgctggcccgatataagctccgagagaaccagctgcccaggatccaggcgggggaccctgtggcgcgctactttgggataaagcgtgggcaggtggtgaagatcatccggcccagtgagacggctggcaggtacatcacctaccggctggtgcagtagctaccgcctgacagcccctagaggcggacacacagcgacccccatccctgcaggacaaacgcccctgccctgccagaatccggcccccacagctctcacggctgctgctcctctggactccccaaggcaggtggcctccacccacgttctcccgtcctggggtgaggcttcctgtggcccagcccgccccattcacctgtggatttgtgcgagatgcagcctcagaaggaacaaggcccccagagggaggtcacctgggggcagctggtgccgggtcttcacccagaccacgctgggtcccctctgttgggggtttggggtccgggtctcccaccagccactgcttcctcctgggccctcggccttccacccctcgtcttccctccctcgggggccctgatgcgtggcggcccccgcccggcctcggctctttactccattcacagccgtgcacgcgctcaagccaccagggtgcgagatgccagctctggagttctcggttgttgtaggaggttgggtgttttcaaatggtaaagatgttttgagcaaataaatttgcttgatacagaaaccaggccgactaacaaggtttccagcaggtggccttgcctcacgccaagcacacgaggtcagcctggcaggtgtgccctcctcgagctggcttcaggggtcagtgtctccccaggccctcgccctgccctcccacttcgtgctccggggtaaggcgtgagcgtgtctgtctcttcccttcccgtgagggtgtggagttgttctctggcttgtgcagctgtggtttgcggccagttcctcttacagacgtttgggatctggctctacttcccgtttgcttactgtctgatttcagaaggcctcgcctgcgcaagtataagctaaccacggtgggttccctcacagtagctttattaagatgttaatcagcctcgggcggtcgggggctgtaaagggcccaatgtgctgggcgcagggtcccaaaacccgggcgggactggtgtttcatgggacagagggtctcctttttcgcaggtgctttttcaaatggttttcgaagaaggaacccaagggagagatgtttttgtgccattgggacagaaaactgagtggaggggtgaacgtatagcaatgagaggggacgtgagataggacagaagagacacaaaagaggcgtgttagtgaaagtagttagaa

SEQ ID NO: 73356 - DNA, 759 bp, Homo Sapiens
ccacgtatttgtcgttgatcccgggcctcctggtcctgccgggaggctgctggcggtgggttttcccttgctgcctgaaccttcgcgctgggcttcatagatctgattcgcagcgctgttttcaagctcacacatcagctttagcagctcaggctcccacgagtccagcgtcagggaccgcaccttggagcagtggacacccaggctcctgtggatgccgggagcactcaatgcagagcagcacgcccaggttgatgctggcccagcgggggtccggctggccgcagtcgccgcactggctgttgccggccacactctgcacacgctgcagcacactctcgcccttcacgccacgctcccgagtgtcggtggcggagtcgatgctgctcgtggacggggatgctgtgcggtccaccctctcgctatagcaactgtcagggctctcgcggtaggcggaggcgatgctggcctgcacagcctggacccaggcttgccgcagcttctcggagtcagcctgcagcatgcagctcttggtgggtgacagcacctcgaagcagaacctccgctcgatgtcctcacacggcttcacagagcacaggcggaggtcatccaccaccacggtgagggcatcctgtgggcggcaccaatgtggcccctgccctcagccaccaaacggccccgaccacccacttcctggttcaccttggagaaccggaggccgactgcctgagccccaagccccgtgtccagctctctgct

SEQ ID NO: 73357 - DNA, 1003 bp, Homo Sapiens
ggcacgaggcccatctggggccaacaccacttgtctgtaacatcccacatctgccagggaagggtctgggggccagtggaggcctgaggtgtccctccctctgagtcctttgggggctgcagcccaggggtttaccctagtgttaagagtgggcatggaggccctgctctctgtacaggaggcctctcgctgccctccaggcttcttcccttcttcaggctggcccaggtcccaggcctggtcaactcggtcacagccagtccagaggccagttgcctgccttcccggacccctccccgggttggctctccctggagacctctccatcattcccgaaaagtggatggagagagtgatggctccactgaagagacagacgagtcggagacttgaggagtccaaagggtcctgcccacagcgccctgtacctgctcccacccagcccttggtgtgcccacccagcctcctctccagcaccttgctgtgctgccctctgctgctgacaaggtgaataacagccccaagaccagccagaggggctctgatgatcagcccagccagtggccccggaaggtgaatggcctgctctccctggccctatcagcctgtgaacttcacttaggccccaagctgacagactgtgctgaggccaccttgtcacgccgtagcctgttagtcctcctaacctcttaagagcagtctcttctgagccagcctctgcgggtcccccaataaggttcatctcctcacagcaactccattaagggggagaacccgaatagccacgcagggccttgcaccatcaagggtgacacctgcgacgcaagtaccaggaggacataaccgctgtggcctgttggagaacagccagtagccttggtaatatgaagggtgggccagaagatgatttcacttgcaaaaactgcttcaagtcttgacccctttgtgtctaatagctaaacaaacatgtgaaacgaataaaaagtccctcatgtctggtaaa

SEQ ID NO: 73358 - DNA, 673 bp, Homo Sapiens
  misc_feature (196)..(264): n is a, c, g, or t
catccaccagccgtaagtggtcatcacatgatcagaagtcagctgggggaagagcagggatagatagagcaattaaggagcctcttttggggtaagccacatgacaggggctttgcaacagtctttcatgagtggccgaaatcccccactcactgcaaatgtgcttctcaaagatgcaggattttttaataaacannnnnnnnnnnnnnnnnnnnnnnnnnnnnnnnnnnnnnnnnnnnnnnnnnnnnnnnnnnnnnnnnnnnncacagaggaacacttggcatcagggagtctgttgtctgacccgcaactaggcagcctcatacattattttcactaagagaccagtggggctggaaagggacttgtgaggtgctaagtagccagtgagagcttctgggtcctgtcgcagttttgccctttcttccctcaaaaaaaggtctctccacttctctgtgggaaaggcttgggcaagttctctggtttccaatgaggccagagaacctgtgctgatccctaacatcttcacccatcgggggcaaaataagtaaaataaaagtaatgtagcaaatgtttttataaaagtgttaatttaaattaacggactattacctattcttagagctttctcttttgtttttggcattaaaatatcctttctattataaaaaaa

SEQ ID NO: 73359 - DNA, 1042 bp, Homo Sapiens
ttacggctaggtacgaggctgggtgttgaattcggcacgagggagcgtcttccggccgtgcgtttgtggccgtccggcctccctgacatgcagccctctggaccccgaggttggaccctactgtgacacacctaccatgcggacactcttcaacctcctctggcttgccctggcctgcagccctgttcacactaccctgtcaaagtcagatgccaaaaaagccgcctcaaagacgctgctggagaagagtcagttttcagataagccggtgcaagaccggggtttggtggtgacggacctcaaagctgagagtgtggttcttgagcatcgcagctactgctcggcaaaggcccgggacagacactttgctggggatgtactgggctatgtcactccatggaacagccatggctacgatgtcaccaaggtctttgggagcaagttcacacagatctcacccgtctggctgcagctgaagagacgtggccgtgagatgtttgaggtcacgggcctccacgacgtggaccaagggtggatgcgagctgtcaggaagcatgccaagggcctgcacatagtgcctcggctcctgtttgaggactggacttacgatgatttccggaacgtcttagacagtgaggatgagatagaggagctgagcaagaccgtggtccaggtggcaaagaaccagcatttcgatggcttcgtggtggaggtctggaaccagctgctaagccagaagcgcgtgggcctcatccacatgctcacccacttggccgaggctctgcaccaggcccggctgctggccctcctggtcatcccgcctgccatcacccccgggaccgaccagctgggcatgttcacgcacaaggagtttgagcagctggcccccgtgctggatggtttcagcctcatgacctacgactactctacagcgcatcagcctggccctaatgcacccctggtcctggggttcgaagcctggggccagggtccctggaaccccaaagtccaagggggggaaccaaaatcccccccgggggtt

SEQ ID NO: 73360 - DNA, 1049 bp, Homo Sapiens
cagggttcataagggccagcttgaatgcgctttaggaatagtcgttaggtcatgagcctggaaccattccagcacgggggccaactgctcacactccttgtgcggtgaacatgccccagcttggtccggtcccggggggtgatggcaagccgggatgaccaggagggccccagcagcccgggcactggtgcagagcctcggccaagtggggtgagcatgtggatgaggcccacgcgcttctggcttagcagctggttccagacctccaccacgaagccatcgaaatgctggttctttgccacctggaccacggtcttgctcagctcctctatctcatcctcactgtctaagacgttccggaaatcatcgtaagtccagtcctcaaacaggagccgaggcactatgtgcaggcccttggcatgcttcctgacagctcgcatccacccttggtccacgtcgtggaggcccgtgacctcaaacatctcacggccacgtctcttcagctgcagccagacgggtgagatctgtgtgaacttgctcccaaagaccttggtgacatcgtagccatggctgttccatggagtgacatagcccagtacatccccagcaaagtgtctgtcccgggcctttgccgagcagtagctgcgatgctcaagaaccacactctcagctttgaggtccgtcaccaccaaaccccggtcttgcaccggcttatctgaaaactgactcttctccagcagcgtctttgaggcggcttttttggcatctgactttgacagggtagtgtgaacagggctgcaggccagggcaagccagaggaggttgaagagtgtccgcatggtaggtgtgtcacagtagggtccaacctcggggtccagagggctggccaggctgaaacggtggctgcctcagctcccaggcacccagtctttgaccccagcccattccatgaccactggctccttctctgtcttctgggtggaaatctgcatgtcagggaggccggacggccacaaacgcacggccaggaaaacgctccagcgcgccgg

SEQ ID NO: 73361 - DNA, 935 bp, Homo Sapiens
atcagctcggtcccgggtcagtacggatgtggaccaatgtgctggatgcgagctgtcaggaagcatgccatgcgcctgcacatagtgcctcgggtcctgtttgaggactggacttacgatgatttccggaacgtcttagacagtgaggatgagatagaggagctgagcaagaccgtggttccaggtggcaaagaaccagcatttcgatggcttcgtggtggaggtctggaaccagctgctaagccgagaagcgcgtgggcctcatccacatgctcacccacttggccgaggctctgcaccaggcccggctgctggccctcctggtcatcccgcctgccatcacccccgggaccgaccagctgggcatgttcacgcacaaggagtttgagcagctggcccccgtgctggatggtttcagcctcatgacctacgactactctacagcgcatcagcctggccctaatgcacccctgtcctgggttcgagcctgcgtccaggtcctggacccgaagtccaagtggcgaagcaaaatcctcctggggctcaacttctatggtatggactacgcgacctccaaggatgcccgtgagcctgttgtcggggccaggtacatccagacactgaaggaccacaggccccggatggtgtgggacagccaggcctcagagcacttcttcgagtacaagaagagccgcagtgggaggcacgtcgtcttctacccaaccctgaagtccctgcaggtgcggctggagctggcccgggagctgggcgttggggtctctatctgggagctgggccagggcctggactacttctacgacctgctctaggtgggcattgcggcctccgcggtggacgtgttcttttctaagccatggagtgagtgagcaggtgtgaaatacaggcctccactccgtttgctgttcgacacaaac

SEQ ID NO: 73362 - DNA, 694 bp, Homo Sapiens
agaagaggttgcaagacagagcgcgcagcccggcaaggggcatgtgaccccgaaggaagaacgcaacagaagagtcctggtctgaacttggccgagtaggggtgggggtgggatggcaggaggagccgcaggaggaaggaggttgtgcagggtctggacctgcagggctgaagttcactcatcgaccgactcagccccaaccgggagccaggcagaaaaaccctgtgccgtaggaaagtgactggaagtggactccagagggacaggtgtggtggcacagtcctggtgtggtgctgaccacccaaatatgactgtgaattgtggaaagggcagtagatctctaatgtggaggtgggaacattattgtggtggaggcaattatgagggtagcatttctttcgagacaaaacacccgtctgggaaggccccaaggtcagcttatgaaggaccccacttgcaccccaccccagccatggaagagcagctggagggtggatggggaggccagagggagcaatgaggggtggtcccagctctgctattgactcggtatgcctttaggacattctcttaccgctcatgggcctcagtttcctaaagtgtgaaatgtcaggcacttccctctaactggcatgcaacagccccacctgcctgagagccctgaggtgacaataaaacatttatgctcaagggg

SEQ ID NO: 73363 - DNA, 1881 bp, Homo Sapiens
  misc_feature (51)..(51): n is a, c, g, or t
  misc_feature (1393)..(1469): n is a, c, g, or t
  misc_feature (1473)..(1474): n is a, c, g, or t
  misc_feature (1477)..(1477): n is a, c, g, or t
  misc_feature (1607)..(1626): n is a, c, g, or t
  misc_feature (1724)..(1733): n is a, c, g, or t
gcatcaaataaaagagtaaaaagaccacttatggcacgattccagaagatntggacaatttccattgataaaacagaagctggaattaaggagcttcagaagagtatggagcgctggaaaaatatggaaaaagaacatatggatgctataaatcatgatactaaagaactggaaaagatgacaaatcggcaaggcatgctattgaagaagaaagaagagtgtatgaagaaaattcgagaacttggatcacttccccaggaagcatttgaaaagtaccagacactgagcctcaaacagttgtttcgaaaacttgagcagtgcaacacagaattaaagaagtacagccatgttaacaaaaaggctttggatcagtttgtaaatttctccgagcagaacagaaaagttaataaagcgtcaagaagagttagataggggttacaaatcgatcatggaactgatgaatgtacttgaacttcggaaatatgaagctattcagttaactttcaaacaggtatctaagaacttcagtgaagtattccagaagttagtacctggtggcaaagctactttggtgatgaagaaaggagatgtggagggcagtcagtctcaagatgaaggagaagggagtggtgagagtgagaggggttctggctcacaaagcagtgtcccatcagttgaccagtttactggagtgggaattagggtgtcatttacaggaaaacaaggtgaaatgagagaaatgcaacagctttcaggtggacagaaatccttggtagcccttgctctgatttttgccattcagaaatgtgacccggctccattttacttggttgatgaaattggaccaggctctggatgctcagcacagaaaggctgtgtcagatatgattatggaacttgctgtacatgctcagtttattacaactacttttaggcctgaactgcttgagtcagctgacaaattctatggtgtaaagttcagaaataaggttagtcatattgatgtgatcacagcagagatggccaaagactttgtagaagatgataccacacatggttaattggaaaatactacctactggtttgggagatgtatatagtaatatgattctcatacccaggaactgtaaatttaaacctaaatatttggccaatagttttcagacttaaagcatcatagtccttttatatttgtctttgtattttataagatactctgtaatgtcatgtttgtactgatagtttaagaatttaatttcctgtacaactttttgtaaaatgttctgctcctattttaaatgttttgaaacatgctaaatattctttcctaattattttatcacttatactaccttttttatagcttcaattaaataatcggttttatgactannnnnnnnnnnnnnnnnnnnnnnnnnnnnnnnnnnnnnnnnnnnnnnnnnnnnnnnnnnnnnnnnnnnnnnnnnnnntggnnggncccttgggcgcccccatagccttttaaaaaatttttttaaacttttctttcgggcgggggcccgaaaaggaaaaaaactgtttccaaggtgtttccgaagaaaaccggggcttgaattcgccctggaatnnnnnnnnnnnnnnnnnnnngggggtcaccaaaatttctgaaaaaatccgaagggggttccgggggtcttccgggggtttccaagggggttccaaagggaatttaattcccaattttnnnnnnnnnnggggaaatgtttggaaattagtggagaaattcttaaaaactttccgcccaagggaaaaccccttcaaaaaaggttgaaattacacctgaaattccccgccggttatcaccctctctggtacaccctttggcaacaataatttttcccc

SEQ ID NO: 73364 - DNA, 649 bp, Homo Sapiens
caacatcgtgcatgacggcaagccctccgagggctcctaccggatccacgtgcttcatcatgggacaggcaaatggtatgaattacaagacctccaggtgactgacatccttccccagatgatcacactgtcagaggcttacattcagatttggaagaggcgagataatgatgaaaccaaccagcagggggcttgaaggaggcgtctagggctgatgatggtaaataagaacacagaagctgtagctgaacacaggctggctggtgggcttcctaggccagcccagcttgtatgggttctggctacaccagagcaccaagagcccacttgcctgggatggccccacactgtcactcagctgttctttgatcatttttttctagattgatgctcctttctcccatgcattgagctcccatctagcttcagcagggcagaacccttctccagatgtgtgtaacttatgtcttgagtatctgggagtagttgaagaacagataattccttccaaacatcaagccttgggattcttggagcaagcagaaagccagtaacttcgctctgttagaggtggaggattttcctatggttccccccatttcctgatttgtatttttagatggattaaatagtctcctgtttttaaacc

SEQ ID NO: 73365 - DNA, 786 bp, Homo Sapiens
gttgagaagaatccaactattgtcaatttccctattacaaatgtggatctgagagaatacttgtctgaagaagtacaagcagtacacaagaataccacctatgacctcattgccaacatcgtgcatgacggcaagccctccgagggctcctaccggatccacgtgcttcatcatgggacaggcaaatggtatgaattacaagacctccaggtgactgacatccttccccagatgatcacactgtcagaggcttacattcagatttggaagaggcgagataatgatgaaaccaaccagcagggggcttgaaggaggcgtctagggctttgctcccaagggctgtggctgatgatggtaaataagaacacagaagctgtagctgaacacaggctggctggtgggcttcctaggccagcccagcttgtatgggttctggctacaccagagcaccaagagcccacttgcctgggatggccccacactgtcactcagctgttctttgatcatttttttctagattgatgctcctttctcccatgcattgagctcccatctagcttcagcagggcagaacccttctccagatgtgtgtaacttatgtcttgagtatctgggagtagttgaagaacagataattccttccaaacatcaagccttgggattcttggagcaagcagaaagccagtaacttcgctctgttagaggtggaggattttcctatggttccccccatttcctgatttgtatttttagatggattaaatagtctcctgtttttaaaccaga

SEQ ID NO: 73366 - DNA, 1022 bp, Homo Sapiens
  misc_feature (43)..(43): n is a, c, g, or t
  misc_feature (57)..(57): n is a, c, g, or t
  misc_feature (117)..(117): n is a, c, g, or t
  misc_feature (157)..(157): n is a, c, g, or t
  misc_feature (160)..(160): n is a, c, g, or t
  misc_feature (179)..(179): n is a, c, g, or t
  misc_feature (182)..(183): n is a, c, g, or t
  misc_feature (188)..(188): n is a, c, g, or t
  misc_feature (198)..(199): n is a, c, g, or t
  misc_feature (224)..(224): n is a, c, g, or t
tagtgagattccattgataggatctgatgtcatgtgataactntcccatgcatgacnacaaggacctgcagagtagacttacagaatcagcggagagagtttacagtatatgattcnttacccacgagatagaatgaccgttagagatctatttctnacntggagtccaggagttaccncanngacangatagccaanngtgaaatccggagctcagcgatccnccaaagcagaagccatccgagacatgtccagatatgcacgcaacgtcattgaagagttccggaggcccaagcactataaatcccctagtgagctgctggagatctgcgagctcagccaggagaagatgagctctgtgtttgaggacagtaacgtgtacatgttgcacatgatgtaccaggccatgggtgtctgcttgtacatgcaggactgggaaggagccctgcaatatggacagaaaatcattaagccctacagtaagcactatcctttgtactccctcaacgtggcctccatgtggttgaagctagggagactctacatgggcctggaacacaaagccgcaggggagaaagccctgaagaaggccattgcaatcatggaagtagctcacggcaaagatcatccatatatttctgagatcaaacaggaaattgaaagccactgaaactatgcagcatttcagttttcatttaaacacttagttcagaaaccttaaaggatttgaatatttcaaattgcacacgtcactccagcatctctgtaaaataattggaatgaaaatacttcttgcacttaaacactgcacatgccgtactttgaggttagtctgaatcttgaactttaataccaaattaattttgaatgcttttgtttcctaagagataatggcatggtttcatatgttatactttggacagacagagttttaaaaatggaattattttttctttcatgcctcttgtaatgttctgaacaaacttgaatgatgaaagtattaaagagatatcagtaaaaaa

SEQ ID NO: 73367 - DNA, 1083 bp, Homo Sapiens
gcggccgcgccccgccgccaccatgagggccgagggcctctgcggcctggagcgcttctgcagcccgggcaaaggccgggggctgcgggctctgcagcccttccaggtgggggacttgctgttctcctgcccggcctatgcctacgtgctcacggtcaacgagcggggcaaccactgcgagtactgcttcaccaggaaagaaggattgtccaaatgtggaagatgcaagcaggcattttactgcaatgtggagtgtcagaaagaagattggcccatgcacaagctggaatgttctcccatggttgtttttggggaaaactggaatccctcggagactgtaagactaacagcaaggattctggccaaacagaaaatccacccagagagaacaccttcggaaaaattgttagctgtgaaggagtttgaatcacatctggataagttagacaatgagaagaaggatttgattcagagtgacataactgctctccatcacttttactccaagcatctcgaattccctgacaatgatagcctcggagtaatctttgcacaggttaactgtaatggcttcacaattgaagatgaagaactttctcatttgggatcagcgatatttcctgatgttgcattgatgaatcatagctgctgccccaatggcattgtgacctacaaagggaccctggcagaagtcagagctgtacaggaaatcaagccggggagaggaggtttttaccagctatattgatctcctgtacccaacggaagatagaaatgaccggttaagagattcttatttctttacctgtgagtgccaggagtgtaccaccaaggacaagtaagcactatcctttgtactccctcaacgtggcctccatgtggttgaagctagggagactctacatgggcctggaacacaaagccgcaggggagaaagccctgaagaaggccattgcaatcatggaagtagctcacggcaaagatcatccatatatttctgagatcaaacaggaaattgaaagccactgaaactatgcagcatttcagttttcatttaaacacttagttcagaaacattaaaaa

SEQ ID NO: 73368 - DNA, 464 bp, Homo Sapiens
caccatgagggccgagggcctcggcggcctggagcgcttctgcagcccgggcaaaggccgggggctgcgggctctgcagcccttccaggtgggggacttgctgttctcctgcccggcctatgcctacgtgctcacggtcaacgagcggggcaaccactgcgagtactgcttcaccagaaagaagattggcccatgcacaagctggaatgttctcccatggttgtttttggggaaaactggaatccctcggagactgtaagactaacagcaaggattctggccaaacagaaaatccacccagagagaacaccttcggaaaaattgttagctgtgaaggagtttgaatcacatctggataagttagacaatgagaagaaggatttgattcagagtgacatagctgctctccatcacttttactccaagcatctcgaattccctgacaatgatagcctcgtagtact

SEQ ID NO: 73369 - DNA, 514 bp, Homo Sapiens
gcggccgctggtgggcagaggttggccctaagcatggcagcctccggcttactgcacccagcctgtggggcggctcagtagccgctgacatggtggcctgttgtctcttctcttgttctagtaagcactatcctttgtactccctcaacgtggcctccatgtggttgaagctagggagactctacatgggcctggaacacaaagccgcaggggagaaagccctgaagaaggccattgcaatcatggaagtagctcacggcaaagatcatccatatatttctgagatcaaacaggaaattgaaagccactgaaactatgcagcatttcagttttcatttaaacacttagttcagaaaccttaaaggatttgaatatttcaaattgcacacgtcactccagcatctctgtaaaataattggaatgaaaatacttcttgcacttaaacactgcacatgccgtactttgagggttagtctgaatcttgaactgtaataccaaattaattttgaatgct

SEQ ID NO: 73370 - DNA, 2283 bp, Homo Sapiens
  misc_feature (1415)..(1424): n is a, c, g, or t
cctctcacgtggttgctgtgacagtttcgttttctgaatctttgtaatgctcttccaccctgctcgtgctgcccagaggctgatctgcaaacctgggcagtattccacactgaagctcagtttgcaaaccttctgctgtgttaattctggtcagtttcacacagaagtcacgagggcctctgcccaggaccttctattcacatttcaagaatccctttctgaaattctccaactctctggtcaggaggaggagcaccattggggcggggtaggcagctagaggcgcaggagcgaatccaggttccttgcgtggttcccagcctctgctgacagcacctcagctaccaggtggggagtggaaattcagcctgcttagaggactgacctctacagttcatatttgcagtgacataaaaggcaaagaggagctggcatggtggtacagaaggtatcagtcaagcgcaggctcttcagaaacctagaaactaaaaagagatgcaacatgtgactggccatcagccagacatgtctagggtgagaccagtgctcagcaccacccgccaaggaacactgatgagttgtgggacattatggtcggccaagtgaggaatgattgcagggaccagagaagaccaaagatgccagatgtccccagagtttcttgagggctgggtttcacgtctttgcttgtcctttttgtccccacttgcctgcaccgtgcctgactcatccagtggggaaggtgactcaagaagttgtttaagcctaggcctaggcagtccacttcgggaggtgggggcactccacactggggggccctgcagctccagggctggtgctctagcagatccgctcaggcacggttgggtgaccgtggggtcaccgattgcgtagattatttctagggcagtgctgggttagaaatgtctgtctggaaacaggacacatcttgccaccacaagtccacacctggccttggctgctgcccgctctctgcagcgtggatttcctttgcccatttgggccagaaggtcaccaggagttcatcactgcttagtgtcaacttgacatcttcagcttccagacagaaaacccatgctttactttgtacagccctgtcccagagttagtaagcctcggcttgtcacctgcttgcaaagggtatagacatcattctgggtagttctagaggatatcgcaacaagtgcgtttgaaggttcagcacagctggaattgtacggtagtgagctcttcaaaatgaaaacagaatgaccggatggccatctgtcctggaaactgtagaattgaataaatcactgaaaatagaacacttcttggaggctttcttcagaactgaactagaaacaaggtttccaaggctcccaggtcagtagaccaaaccaacttccttagannnnnnnnnnaagctgtttgcagaaaactgggtggtagcgtgtctgaaccaaacggaagaatagccagcggagcatggactgttccagcacgggccagatggccagctgtcgagagcagccctgcccagattgcggtgggggctgtgccagcggctccgcagggcccttccaactctggagtgtctgtagttcttgtgaaaccaaaacgttgactacctgcctctttcctcgggcatcgacgtgctcatttccaaagatgatggtgcaggtgaccttttccatcgtgagctaagagaaggttaggaggcctgaggggcgggccttgtgtcccctcctccccctccacagcccctgaggtggagcttccctcacagaccccatctggtcgagcctacggctgcccagtgtacactcagtgatgcttataccaaatagggcatgtgcgctggtgtctgttggggacagccccatccctaccttggagtcggcagagaagcagcaataagcattaggcgaatgattgaaagggctgctgcgccaagaggccttcagtccccttaacgtggctttccaacttcctgacgaggctacaaaggctccgctcacaaaagaaagccaataatgtaaataaatagaaaacgaagcctccacgcgtggtttttaaagggggatgatgaatgtgacaccacccacagaatgcattagaatctggtttttctgtgctttgtcattttactctgataggaatttttgttacctaactctgtgcataacttatttaatgtactgtataaatgaaccaaaactgttaaatatgtatttagtttgttctacttaaagtagtcaataaaaaggctatattccttaa

SEQ ID NO: 73371 - DNA, 695 bp, Homo Sapiens
  misc_feature (72)..(72): n is a, c, g, or t
  misc_feature (103)..(135): n is a, c, g, or t
tgacacttttcacccgtgtacagccaaaataatgtatatatggaaagtgacagacaaattctctaatctctntggtacctataacttattagaatcctctggnnnnnnnnnnnnnnnnnnnnnnnnnnnnnnnnnacatgtagaagtatcataaatgtgctacacatttatgtttgtggatttaattaaagtattttaatatggttttcagtgctaaaattggagtcagatacttcttggttttaagctgtctacctaattgctgtctcccagcagactggtggcatgcccagtggctttgggggcaaggatagaaatgccatcaggaaatagctgaattcattgtgaaacatgaattcagtcatggtgataattggaaactcctttcaggtttttgcaagtagattttgtaatgtttgtgtatgcagccttgctgttgagtcagtccaaggggttttacttaggacaagttgtaccttgccctctctccagctctgctcccacattttcacatacctagctgtttctacctcattgggtaagtcatttaccactctgtgcctcagtttactctgtagtttaccattagactgtgagctccttgagggactttgtcataatcactgttacatcccagtgcctcacaccatgcctggcccttaagaagtgctcaataaatgtctgaacaaaaaaaa

SEQ ID NO: 73372 - DNA, 1036 bp, Homo Sapiens
atacggctaggtagctgaggcctgggtggctgaattcggcacgagggcgggccgggcgacttgagtatccgcgggtctccctcctctttttccgtctgcgtcgggagctcccgggcacgtgaggccgtgccgcgtttactggcgggcgggacggcctagccgggcggcgcctcggaggaagccgcggaccccttaggtgctgggcccttggaaatcggcgcgtggggggcggtgctcgagctgagcgcgagagggcgggagagctcgtggggtgcgaggggagcaggacgcccggccgggcagcatgagtcagcagcggccggcgaggaagttacccagtctcctcctggacccgacggaggagacggttcgccgtcggtgccgagaccccatcaacgtggagggcctgctgccatcaaaaataaggattaatttagaagataatgtacaatatgtgtccatgagaaaagctctaaaagtgaagagacctcgttttgatgtatcgctggtttatttaactcgaaaatttatggatcttgtcagatctgctcccgggggtattcttgacttaaacaaggttgcaacgaaactgggagtccgaaagcggagagtgtatgacatcaccaatgtcttagatggaatcgacctcgttgaaaagaaatccaagaaccatattagatggataggatctgatcttagcaattttggagcagttccccaacaaaagaagctacaggaggaactttctgacttatcagcaattggaagatgcttatggcatgagttaattaacggatttgtgctcagcagctgttagaagttaacagatgaccaaagaacaatgacaagactaggcatatgtgacctatcaagacatttcatagcattcagtgccttccatggaggcagatcgtcattggaggttaacagctccagcagaaaccagattggatgttccaggtcccagagaagacttctatcaccagtggacataaggagaccacagggaccgattcgagggccaaattggggtgac

SEQ ID NO: 73373 - DNA, 1768 bp, Homo Sapiens
  misc_feature (1651)..(1683): n is a, c, g, or t
cgggaagatggcgggccgggcgacttgagatccgcgggtctccctcctctttttccgtctgcgtcgggagctcccgggcacgtgaggccgtgccgcgtttactggcgggcgggacggcctagccgggcggcgcctcggaggaagccgcggaccccttaggtgctgggcccttggaaatcggcgcgtggggggcggtgctcgagctgagcgcgagagggcgggagagctcgtggggtgcgaggggagcaggacgcccggccgggcagcatgagtcagcagcggccggcgaggaagttacccagtctcctcctggacccgacggaggagacggttcgccgtcggtgccgagaccccatcaacgtggagggcctgctgaaactcaaaaagtgaagagacctaatttagaagtatagctggtttatgtaactcgaaaatatatggatcatgacaaatctgctcccgggggtattcttgacttaaacaaggttgcaacgaaactgggagtccgaaagcggagagtgtatgacatcaccaatgtcttagatggaatcgacctcgttgaaaagaaatccaagaaccatattagatggataggatctgatcttagcaattttggagcagttccccaacaaaagaagctacaggaggaactttctgacttatcagcaatggaagatgctttggatgagttaattaaggattgtgctcagcagctgtttgagttaacagatgacaaagaaaatgaaagactagcatatgtgacctatcaagacattcatagcattcaggccttccatgaacagatcgtcattgcagttaaagctccagcagaaaccagattggatgttccagctcccagagaagactctatcacagtgcacataaggagcaccaacggacctatcgatgtctatttgtgtgaagtggagcagggtcagaccagtaacaaaaggtctgaaggtgtcgggacctcttcatctgagagcactcatccagaaggccctgaggaagaagaaaatcctcagcaaagtgaagaattgcttgaagtaagcaactgatggcatttgagaatttatgtatcactgagtttttcgggaatatcttcgtggagaattacgcatcaaatttgattctcagagcaataaattatccatgaagtgctctcgttctcagtagcggcatcatggccagtagtgtctttgaggagttcaccacttagattactgagtaattgtggtttccacatttgaaaacaactccttttataattattcactgctttttgtcagtgaaatagacatcttgcctcctgaagtagcttcatcacagagtgtcatgaagacagacagtcaggctgaaatggacagttctttgtggactctacccttcccttcaaggagtatgtcatatatcacaaaagaaattgccttacactggttcatgtttgcagttactgttgtacattgcatagatgtacacacgaatttaaatgtgatgtctttgtatatatctgtataatgttgagattacttacgaaatatgtctgagtgacacttttcacccttgtacagccaaaataatgtatatatggaaagtgacagacaaattctctaatctctttggtacctataacttattagaatcctctggnnnnnnnnnnnnnnnnnnnnnnnnnnnnnnnnnacatgtagaagtatcataaatgtgctacacatttatgtttgtggatttaattaaagtattttaatatggttttcagtgctaaaaa

SEQ ID NO: 73374 - DNA, 1467 bp, Homo Sapiens
  misc_feature (928)..(957): n is a, c, g, or t
ggcaggtagcgaggctgggtggtgaattcggcacgagggtcccccggaagtggagcccgggacttccactcgtgcgtgaggcgagaggagccggagacgagaccagaggccgaactcgggttctgacaagatggccgggctgccccgcaggatcatcaaggaaacccagcgtttgctggcagaaccagttcctggcatcaaagccgaaccagatgagagcaacgcccgttattttcatgtggtcattgctggccctcaggattccccctttgagggagggacttttaaacttgaactattccttccagaagaatacccaatggcagcccctaaagtacgtttcatgaccaaaatttatcatcctaatgtagacaagttgggaagaatatgtttagatattttgaaagataagtggtccccagcactgcagatccgcacagttctgctatcgatccaggccttgttaagtgctcccaatccagatgatccattagcaaatgatgtagcggagcagtggaagaccaacgaagcccaagccatagaaacagctagagcatggactaggctatatgccatgaataatatttaaattgatacgatcatcaagtgtgcatcacttctcctgttctgccaagacttcctcctctttgtttgcatttaatggacacagtcttagaaacattacagaataaaaaagcccagacatcttcagtcctttggtgattaaatgcacattagcaaatctatgtcttgtcctgattcactgtcataaagcatgagcagaggctagaagtatcatctggattgttgtgaaacgtttaaaagcagtggcccctccctgcttttattcatttcccccatcctggtttaagtataaagcactgtgaatgaaggtagttgtcaggttagctgcaggggtgtgggtggnnnnnnnnnnnnnnnnnnnnnnnnnnnnnngaggggggaggtagtttaattttatgggctcctttcccccttttttggtgatctaattgcattggttaaaagcagctaaccaggtctttagaatatgctctagccaagtctaactttatttagacgctgtagatggacaagcttgattgttggaaccaaaatgggaacattaaacaaacatcacagccctcactaataacattgctgtcaagtgtagattccccccttcaaaaaaagcttgtgaccattttgtatggcttgtctggaaacttctgtaaatcttatgttttagtaaaatattttttgttattctactttgcctttgtacagtttattttactgtgtttatttcattttcccaatttgacaatcgtattttaaaattgaaactgatggaacattctttcttggtcttcaccatctgacaaattgaatggcaagaggtggattttgccaggttcttttcactgatgcagatttgtgttaagatagtactgaatggagtattta

SEQ ID NO: 73375 - DNA, 977 bp, Homo Sapiens
cagtcgacggtaccggacatatgcccgggaattcggccattacggccgggggagaccagaggccgaactcgggttctgacaagatggccgggctgccccgcaggatcatcaaggaaacccagcgtttgctggcacaaccagttcctggcatcaaagccgaaccagatgagagcaacgcccgttattttcatgtggtcattgctggccctcaggattccccctttgagggagggacttttaaacttgaactattccttccagaagaatacccaatggcagcccctaaagtacgtttcatgaccaaaatttatcatcctaatgtagacaagttgggaagaatatgtttagatattttgaaagataagtggtccccagcactgcagatccgcacagttctgctatcgatccaggccttgttaagtgctcccaatccagatgatccattaccaaatgatgtagcggagcagtggaagaccaacgaagcccaagccatagaaacagctagagcatggactaggctatatgccatgaataatatttaaattgatacgatcatcaagtgtgcatcacttctcctgttctgccaaaacttcctcctctttgtttgcatttaatggacacagtcttagaaacattacagaataaaaaaagcccagacatcttcagtcctttgggtgattaaatgcacattaccaaatctatgtcttgtcctgattcactggcataaagcatgagcaaaggccaaaagtatcatcctggattgttgcgcaaacgtttaaagcagtggccccctcctggcttttattcatttcccccactcctgggtttaaagtataaaaccactggggaaaggaaaggtaattgtccaaggttaaccttgccaggggccggggcgggggattatggagtttaatttttacatatcaatatttaatttctttggagagggggggacaccccaaagcgataacattttt

SEQ ID NO: 73376 - DNA, 966 bp, Homo Sapiens
ccacgcgtccgcaaatggcctggtcagcttttggaatattcttcctcatcttccacctagcttgagaaggatgttctccatatagagtttagcgagtgcctaatccctccttttgtaagattttgttccctcagcttgaggaacaacttcatcttcaactttttatttctccctgatgttacagtttggtagatttcaaactggaatagctagcatgtgcttgctaaataattttatgccagccttatcctgtatcctagctgttcttaacagcaggtacaaaaatgcctgtttttcagcaaggttgaaattgggaatgtccttttgaatcagaagaaaataggccatagactcatctcccagcacaaatgggcattctatgaaatggtactggccctaggaggatttcctcaaccactctcctactcttggccttgaacctacctctgggttggatcttactattgtagctgctcactataccctcctgcatgcttagaataatgctttgaggggagcactggtaaaacacagtatttatttttttacctcctttaagaggacttggaggtaagttgcattcattcactcaagtttccctcttgctgtctaatagaagcttactttttgctatatcagcatttgttacagccaatatttaaggacaaaatttagaaaatatatcatttcctggcccatcatcaaactaatacagcttaaccttgcagctaccaacttttgtgtcaagctagatatctttatttgatatctaaggtgcaagaccaacaatatattaagagatctgtagacatgaaggcaaagctcttgtattttttttcatccaaacacctcaatttattttataaattcgttcatttttcctgttatgttttatataatatatggactaaacaaaataaaataacagtgcaaaagaggagaatatttcctcttgtgcttttcttg

SEQ ID NO: 73377 - DNA, 638 bp, Homo Sapiens
tggggcgcggggcgtcgtgggggtcgttgtcgttgagggtcgttgccgtgtgtggcgtcttagcctggcccctgggtttgccccacggacgcagtcgacccctctgagcgcctcgggagccccgaatagcagctgggagaaggggcgaggactgagcctcgctgcccgctgccggccgggctagagatacgggcgtgccccccattgtgcgcctcccgccctccggtcccctcaccctgcggccacctggggcgtggggcggtgctcctgcccgtgcacgtagccgctgcgagcggaggcctgctcacctggtgcctgctactcactcccccgggccggtgggcgaaggacacccgcaggaactcggcagaggagaaattcagacggctcccgagggtaggaaaagaccccggcccaccgtggaatctgaaacacccgaccactctgccatcccatgtttcaccagtcagacccccagggcagggcaggggaagcagaatgcaaactggggcaccgtttccctgaagcgtgttggccgcgtttgtcgtagtgctagaggtgcatacccttggaccccgaaaacccattcctgggaatttgctccaaggaagtaaagatgttacaaagatgggcccccg

SEQ ID NO: 73378 - DNA, 504 bp, Homo Sapiens
gtaactccgtctgagtctaccattttcttgctctccctccttccttgggcctgcctcagttccctttggcctccccctttacccagctcttggggtgtctctgttttttccatccccacttcctgccttctcgtggccctgtgtgagcacatgtgtacatctcagccttatctcaaggaggtgacaccttctctccttgtccccatctggccgtctctctgtgcttccctggccaggggcgtgcctgctggtcctatggggggaaggctactccgcatctcagccaccttcctcaggctcactccacctacatccccagtctgccacaccccatccctttgggcctcagccctgtccctttgatgtcctcctttccttcagcccctctgccctgtccctgcacacctccactgcctcccagcagatctgtggagacaaaacaagcaacaccttaaaagagttttatttctgaaaataaattaattttttgtaaataaaatgttt

SEQ ID NO: 73379 - DNA, 1026 bp, Homo Sapiens
tgagggggcggtgtgactgtatttaattgaacctcaagtgaattctgagaggccagagtgtgacttctcttgccctataaatcaggtcccctgcagcaagtcagctccatctttcacagggctgggctggctggatgcgctggcagccccggctggagtaagagcctggctgtcagccacgcaggtgccctgcacgggacctggggctgggacagggcaccaggcaggcaggaggcctcaccccggggtgcagaaggccccaggggtagcagtttacagaagatgtctcagtcctgtaagtaacaaacagaaacaagccccagcgcttcccggtcccctccccgtggcccgcaccaaaccctaagctgtctcctaaaacttcagctgtttccaccaccacgctgacgaccagaaagacaaaccaaaacccatatgaagggcaatctttcaattgcttaaaattaatcagtgcaaagtgaggtaaaagatccccgtttgtcagggccgaggcaggaggctcacacaagcctgcgtctcttggagtccctccccacgtccccctcctcgacatccacctcacagcccagtggggacaccaggttcagcagagggtcctcagaggcacggccgaagagcgccagcaggagggccacaccgaagcctgtggctcgctcaccagcatgcaccggtgcagcaatgtccaggtggacccagactccgggccagtcgaagccgatgtgtgaggcgataaaaaggccagcacaggagctggggctgttgtctcggtccgccactgagttcttcatgtccgccacagctgaggtgaactcgctgaagtgcagctcggggcagtagaccagcgggtgcaccaggtccccacacttcctgcccgccttcacacaggcggcctcccactcagcgctgttggtgagcaccgcggcgtggtacttccctgtggcaatgccctgggcgggcaggaacccgggaagcgtgtggacgggacggcaggagagaaacacccaaggc

SEQ ID NO: 73380 - DNA, 752 bp, Homo Sapiens
  misc_feature (19)..(19): n is a, c, g, or t
  misc_feature (314)..(346): n is a, c, g, or t
  misc_feature (618)..(627): n is a, c, g, or t
agcagagctgagttttgtnaggagtgctcatggtctgtcatttcttggacctctcctggctgagctctgattccctgtgagcacgatgctgatgcaatagtcctgtgtcatcactgcagcggtcctcaggagctgccagggccaattgctacagagtgtctgggtgtgtggcataggaggaaggtttgcttgtgaaatgaggctgggtgggagcggggagggactagatcagaagagatcaagggctctattcaggaacgttggtgggaggacagagcaagtgggaagggggtatggtgagtgcggcaatcccnnnnnnnnnnnnnnnnnnnnnnnnnnnnnnnnngagccaactgttatagaaaattggttcagaaagtgcaatcttgccagatttctagcaaataggttcagtgttaccataagcctttgctgtacttcttgaaatgtttctaggggagagcattggaaaatccccttcccccatctagatcgaaggaagatgagggagcagcttggattcttctcagttgtcccctgcatggggagatacactaacccccagaaatgactgctaagcctcttgccttgtctttagtagctaatgatcagagagannnnnnnnnnaaactaccatggtcccaggattccatcctgaaatttatttttctttgtatgaatatgtgtaaatgatttaaaaataaaactgtaaaatatttgtacgaagaataaatggaactgatgtgggtatg

SEQ ID NO: 73381 - DNA, 1133 bp, Homo Sapiens
cagtcgacggtaccggacatatgcccgggaattcggccattacggccgggggcttccggggccgccgccatcgctctcccgggcttagaaggcccggctactgacgcgcagtgccagaccttagccctcacggtccttaagtctcggtcgccctcgcctcgcagcctgccacccgcgctcagctgcccgcctcctcagccagccatgctggagcatctgagctcgctgcccacgcagatggattacaagggccagaagctagctgaacagatgtttcagggaattattcttttttctgcaatagttggatttatctacgggtacgtggctgaacagttcgggtggactgtctatatagttatggccggatttgctttttcatgtttgctgacacttcctccatggcccatctatcgccggcatcctctcaagtggttacctgttcaagaatcaagcacagacgacaagaaaccaggggaaagaaaaattaagaggcatgctaaaaataattgaggttttcatgattcagcacctgcttttgtttctgtgagatgagctaaattgctttcataccccagataagagctaaaaccacctaatgctcttatggcacagctgtgtatagatttagttctctttatacttcatttctagcccagttgggttttgatttatataagtagtttagaccttctcttcataatcttgctctgagatggggaacagaacacacaagtatgaagtttctttcaggtgtaaataatgaaaaataaatgcctcataaatgatagtacaatgtaactatcaaagttttataattcattatgagttaaccattttaatgtttccaattaaacctcatagtgcaaaaacaacaaacaaaggggggcggtctaagagtaatccttagagggggccaagtttacgcgttacccagttttcttgttcaagtggtcctatagggagttggtattaaagctaaggatgccggtgtttaacagtcgtgatggaaaatggtagttgggatttggggaaggaacttatttggcggggattttggcatcctaagagatttaggctagggattaattcaggtttcggtcaccgcttttggctcgaatgttcgttattaa

SEQ ID NO: 73382 - DNA, 951 bp, Homo Sapiens
gcggccgccaccaccacctcagctgccctcgcgggcagcacggcgcggcaaaagcgcacgtcgcctagcgatggcgcggggcggggacacgggctgtaccggcccgtcggagacttccgcttccggggccgccgccatcgctctcccgggcttagaaggcccggctactgacgcgcagtgccagaccttacccctcacggtccttaagtctcggtcgccctcgcctcgcagcctgccacccgcgctcagctgcccgcctcctcagccagccatgctggagcatctgagctcgctgcccacgcagatggattacaagggccagaagctagctgaacagatgtttcagggaattattcttttttctgcaatagttggatttatctacgggtacgtggctgaacagttcgggtggactgtctatatagttatggccggatttgctttttcatgtttgctgacacttcctccatggcccatctatcgccggcatcctctcaagtggttacctgttcaagaatcaagcacagacgacaagaaaccaggggaaagaaaaattaagaggcatgctaaaaataattgaggttttcatgattcagcacctgcttttgtttctgtgagatgagctaaattgctttcataccccagataagagctaaaaccacctaatgctcttatggcacagctgtgtatagatttagttctctttatacttcatttctagcccagttgggttttgatttatataagtaagtttagactttctcctcataatcttgctctgagatgggggaccgaacacccaaggtatggaagtttccttccaggtggaaattaatgaaaaataaatggcctccataaatggatagtaccaatggtaactattcaaaggttttaataaattccattatggaagttaacccattttttaatggttttccccatttaaaaccc

SEQ ID NO: 73383 - DNA, 675 bp, Homo Sapiens
taatgcctgagagttggtgaaagttcagctgaagctaatgtctagacatcagcagtaactaggcatccagaaagtagcttcaaccaaagctaatagagcccaagtttccgcaggaagtttggtgctgagctgtccagagcagttgtttatctgagtgttgctagcccttagccatgctttcttagctttattctcgcctgttcctaggcatagcctgaaccagagctatggctcactgctcgctttattctactccctagtcatgcggaacaacatagtctaaaaaggaagatgtggactggggagttaggagacctgatttctattccctatgcttctactaactagcctcgagatcttaaccgctctgtgcctcagtgttcccatctgcaaaatggggatagtgttaattgccctacctacctcacagggttgttgtgaggataaactgagacaatgaattcaaagcaagttgacaagtaagtgctatgcaaattgtaagaaatggaaacaatcatgttaaaagcaatggaatggacattggcagaagggttaatggattgtccagccctttctctgtgtggcttaaacccaggtcgccattgctttatacattttcacttagcacagatttgtaattatgcatgtaataaagcacagccttatccaccctga

SEQ ID NO: 73384 - DNA, 1320 bp, Homo Sapiens
ggagcccaggaggggccccaagaaaagaaaggcagatctgctctgtgattagaatggaagacatcactactaagaggaaactaacactgtagtcttgtgcagaaaaagggcagagactacagccactgcatcagggactggtggcagcccaacgtggctgaggggtggccgccaccaacagggaggtagacggccagcgagcgaagcgctggggacaccgctgcagtgctctttgcctgtctcgccgcgctcctacacacgctcctcatctatggatcctaccctccccgctcttgcaagcagtcactcagcgagtcgcctgttgaccctccttcgccacaggctcacagcagaggcagcatcgagcaggcatgaagacccccaacgcacaggaagccgaagggcaacaaaccagggcagctgcaggacgggccactgggtctgcaaacatgacaaagaaaaaagtctcccaaaagaagcagagaggcagaccttcatcccaaccctgcaggaacatcgtgggctgcagaatttctcatggatggacacggaacggagatgagcccatcacgcagtggaaaggaaccgttctggatcaggtgcctataaatccctctctttatctggtgaaatatgatggaattgactgtgtctatggactggaacttcacagagatgaaagggtttgtctcttaaaattctttctgacagggtggcatcatctcacattagtgatgccaaccttgcaaataccataattggcaaagcagtggaacacatgtttgagggagagcatggttctaaggatgaatggagggggatggtcttagctcaagcacctatcatgaaagcctggttttatattacctatgagaaagatcctgtcttgtacatgtaccagcttctagatgattataaggaaggtgacctccgcatcatgccagaatccagtgagtctcctccaacagagagggagccaggaggagttgtagatggcctaataggtaagcatgtggaatataccaaagaagatggctccaaaaggatcggcatggtcattcaccaagtggaaaccaaaccctctgtgtatttcatcaagtttgatgatgatttccatatctatgtctacgatttggtgaaaaagtcctaactgttagggtaaaatttggcacatgtgtggaaacaaatgtataatttgtagacatgcaaaaaatgttgcctttcagtgtactgaaagcttatggaatccctgataactaaacatctttgccagcattaactgttgttttgctctaaaaaatacaaacttgtgtgtacatg

SEQ ID NO: 73385 - DNA, 1780 bp, Homo Sapiens
  misc_feature (1722)..(1733): n is a, c, g, or t
ccggaattcccgggatatcgtcgacccacgcgtccgcagggaaggatgacaaaatggaaatttaaatgacatcctagaggtagagaaaccgtggagatcgcttttctcagactcaccaacttttaatgggatttcatggggttaggttgtgctgatagggtaaggggaggctgctttctgcccttctccccactcccatctgatttacttaattcagtctcagctgctgaaatttggaaaggaccaaattgctttacagtttttttctttgtgtagtatcttgaaatcctggaaaattctatggaatagttctgtatatagggcacaagtaaaggcattgtccaaagtttatttatttatttattaccctaagaatgctttgccataaccacatttaatgggaaaaacggcagtatcacagatgtaaattaactcaccagatttactgggcctgaactcattctcttcttgctatatgatttagcaagttctagaaggtctccaagacaataattacattggcacaatgtatacttcagtgctcacccgtaggcaaatctctttttaaaaaactctttggggcacaagtaacacatttggccacaaaacaccaaagaattgtaggcagtggcccctattgagaagttttccggtagaagttggaaatcagttgtgaatacattctttgctagttggagtgcttgtttactaagcatgtgccgtcgtaggtattagtgctagtctcaaataggtgcttcccctgaggtgcaggggaagaccaaagtttgcaactcgaactgctttcgtccatgtttctcacattgctgtattttagaaaataggggttaagactgataacaaccttttacattgtgactgtgtttgcattgtctaatgacagataaatccttaacatttctctccaccttagtactttagactaattgtgtttgtccgtccatgccatgaatgagtgggctgtagttgggcctaaataaatgagctgttggaagaaaagaatcacagtactttccagcagtcagtccctggttcctagatgtgttctaagcaatgcaaatgtctaattgtcccccagtgggcatagtcagtgtcgtttatattgtagcagttacagctctgtagtttatgatgcaaatctgccaagagagatgtatgtgtcactgcatggcttctgaaagcaggatgaattttctgcagctgtttcaaagttggggtctgttcttgaatcctctattaattactgtgtgtgagccagagggagctgtggtaagggttgggcccccagcctgtagggaactttctggactcccactctttgaatcgatataggcatttggtctcactacttgaccattctcaccctgtgaaacgtcccacactttgaagcaaatacaattcacagcacagtacacacaaaaaccttggcataagacagagaaggttcttcttattttgtgggctggttgctgtagaaacacataacaaagggcagccctccacttctggtataattgtgtagccccttttctttgggcttgacacctgtcttgaataagagtgattagagctgcataatgtccctctcttggctattgaccatgtggttcacgtacaaaactctgtataagttgaaggaaaatgttcatgttcatatgtacttgtttgctatgactacattttgaggttttgtaaaactgttannnnnnnnnnnncacaatgtgaaactgaaggtcaataaattattagagattttctcttc

SEQ ID NO: 73386 - DNA, 1383 bp, Homo Sapiens
  misc_feature (653)..(653): n is a, c, g, or t
gaaaatataaaaccccaatgagatatttatataaagttactcaagatttgggccgacatggcttatctgaagagtgcatgccgggtaaattcagggtggcttttttctcagggtctggaagtgtgagagtttctggggcagactttttccggggccgatctttgggaacggacagaaattcgggtgcgtctgtggagagaggggtggatggagcactagaaggcgcactgcggacggaagaaggcagcagggggatgctggagatagaaattgcaggtgggaaaatgccgattttcttgttggtggcttcctgagtggctcgttcaaattctcggacttcatccattgtcatgtacttgtttgggcatgactctctatgtcatccacaggggaggaatgctgattgcaaacttttatgttggtttgttcatgcatgtttttctcgtattcccgaacatcatccattgtcatatcataccactcatcaacccatgcaaaagcctgtctatgtccaatcagcagaatgtctcggaccaccttgtgtacaaattgttccactctggtctgaagcccccagacctcaaacttcacagtcaccagcttgtaggagcacatgataggctgatgactatctctccagccttccctcaacntgtccccgtcctgtcttctctgacttgaagtgcttaggatcctcagattctttgtagtagcgctctggaatttcatcgcaggcaatatcaataaagcaaacttctctctccacgtctttggcttcattgtcgaaaatggtgtcattgcttcctttgttgtcctcatacttggtttctatatgaatggagaatttcggcagaaaggaacatgtgtattctgtaattgtgtagggataatagttccaagccttctctgtcacataaaatattttggggacaacagctctagcccaactaggcagtttgctgttgagatacacccgcttctcggtgaactgcccattgccatggtgagggtcctcaaagggctcattctggacgacctccaccccttctccccggtcactctgttcatggctgtgtttgctgatcatgtacagctgtccaattttgtacgtctcaacaagatctcgaaatcttcgcttttctgataacgggtaagtttatgggcttcactgatgacacagcatagaaagtgatgcccggagaaccttgatgtccagaactcaatgtggtaaatgggattccagaattgtaaaagtcatgaattctccgtgtaaagaataccaagttctaagcagaataaattaaaaatgaatccatgcacacaggactgaggctccagaatttcaaagacaaagaggaagcctaaagaacagccagatagcca

SEQ ID NO: 73387 - DNA, 477 bp, Homo Sapiens
ctacatagtagcagttgaagccaaatggacagaaagcccgagacaacatgaagttgttctacaagttattttggagaaattgacttaccataccactcatcaacccatgcaaaagcctgtctatgtccaatcagcagaatgtctcggaccacctaaaaagtaaaagaaggagactgaaataatagcatctttgatgaaaactatctggaagacaagttgttaacaattctggggatcttggtgattacagagttcttaatccctctgtccataggtgatgacaattacaggctgcctataggtcctatagtgctcacacacctccagcccttccccatggtgtacacacacttgcagtatattcatctctttgtcttatttgagagtagggctgggtgtgtgtacaaactaatgacaaatacttgacagtcacacagcagtgatacaaataaatatctaggttaattaccttgaaaa

SEQ ID NO: 73388 - DNA, 547 bp, Homo Sapiens
  misc_feature (425)..(425): n is a, c, g, or t
ctaccaccctgttctgccgagcagagtggtccccagcgggtctccctccctgcctccctgactttgcaacaccgcgttccgggaggaccggcctcggcgagggaggaggcgggggagctgcgaacacccagacccaaaccctgacatgctctggggcggagaggaggaagccaggagctgagcgcgccgcgggggctgcttcgccctccggctccgagcgccgggctccgggcgccctgccctgcgcctgggcagcagccttgctggtcttgggggcgccccccgcttcccgccccgggggtccgcggccggcaggaccatgctgctgaaagagtaccggatctgcatgccgctcaccgtagacgagtacaaaattggacagctgtacatgatcagcaaacacagccatgaacagagtgaccggngagaaggggtggaggtcgtccagaatgagccctttgaggaccctcaccatggcaatgggcagttcaccgagaagcgggtgtatctcaacagcaaactgcctagttgggctagagctgttgtc

SEQ ID NO: 73389 - DNA, 967 bp, Homo Sapiens
  misc_feature (108)..(108): n is a, c, g, or t
  misc_feature (151)..(151): n is a, c, g, or t
  misc_feature (261)..(261): n is a, c, g, or t
ggctatccgtggcaccctgagggagcgagccagagcagcccgtcctacagagtgctcccagatgcatgcacatgattgttatccagagcccgagtgagttcccgaccncaggaggtcagctcagtggaccgccgccgcgctcgcctccagngataccgggcgtgcaggcgaccccagttctcctccagctcagaatgtgcgatcgagactctcccgcggctccagcagcggagcgtaagcagcggtgagcgcggcccgggnccgcgcgggacgcccgggtacccgccagagccccgacgccgcgccggacccacccaccgatggatagaccattgggagggcggagcccgctgctctcacgagcctgctggggcccgagtgccctccttccttgggatgggtgagcgtgggaggagatgggacaggaactctaggagcgcaggcccgggactgagccgcctcctaccactccggagatccgggtcaggagaatggaccgctttccagagcccagaagccacgtgcagagacctagcctgtcccccaaagcagtgtccaacaccttgggcccggccttgcatctcccggcgctgggccttggggggcggtcccttggctctgtccacacccccagaatcaggtccccgcccagctccgaggacggcggcgtctccatccaggctagttccccatgccctcagccatgggggaatctgtcccgggccgctgaggggctcccctgcccctcctgggagcttacctgggacccacctcggcgacggagaccgcagcagctggagaggaaggggtgaggcgtgggatcgccaggagtagggaggacatcgacgatgtgcccgtagcagtcgcccctccctcctcgcgcacggggtactgaggcggaaggtttgaaggttacggctcagggctgccccattaaagtcagtgttgtgttcgaaacagacccccc

SEQ ID NO: 73390 - DNA, 746 bp, Homo Sapiens
  misc_feature (91)..(130): n is a, c, g, or t
ttttttggttagtggttaccatagcttttactgtagttattcattaagctattcaactgttctgtgcagtttgatgttttattttacaatnnnnnnnnnnnnnnnnnnnnnnnnnnnnnnnnnnnnnnnntaagacttacatctcatatatatggacaaaggaccaattacctccaaacataaacagctcctagaaattactgcaaagatcaacaacccagtagaaaaatgaatgaagttcccagaacagaaaacacaagtggcccttcaaaaaaatgaagagaggctcagcctcttatggtaagacaaagagacaggattttaaaaacctaggcctcttcctagagttcccttaaatatctaggccagatcatttttacttcctggcttagaccctgccaagggctgcccagctactcaggtgtttgtgtccttgtggactcaagtcatattgtcctgatcttttggctgagtacggttttctcctccagcaaagacaatttggaggatgtactaagcatgaagcgctacttcctggcccccatctctcttcgcacagtgttccatcatccagccatgaaagcacagctgagtgatccaagaggcagttccaattgttgactaacgtgtacctgcctatgtgagtgtgtcctatgggaactcaggccttagaatggtttcacagtagtggctttcacaattactgtttgcctcttcaaacttcacacctaagggaaatggaaaca

SEQ ID NO: 73391 - DNA, 554 bp, Homo Sapiens
  misc_feature (37)..(37): n is a, c, g, or t
  misc_feature (422)..(461): n is a, c, g, or t
gtcgatgagagttgggccatgacgtagcgctcatgcnagtacatcctccaaattgtctttgctggagggaaaaccgtactcagccatatgatcaggactatatgacttgagtccacaaggacacaaacacctgagtagctgggcagcccttggcagggtctaagccaggaagtaaaaatgatctggcctagatatttaagggaactctaggaagaggcctaggtttttaaaatcctgtctctttgtcttaccataagaggctgagcctctcttcatttttttgaagggccacttgtgttttctgttctgggaacttcattcatttttctactgggttgttgatctttgcagtaatttctaggagctgtttatgtttggaggtaattggtcctttgtccatatatatgagatgtaagtcttannnnnnnnnnnnnnnnnnnnnnnnnnnnnnnnnnnnnnnnattgtaaaataaaacatcaaactgcacagaacagttgaatagcttaatgaataactacagtaaaagctatggtaaccacttactccaaaaaaa

SEQ ID NO: 73392 - DNA, 1322 bp, Homo Sapiens
  misc_feature (149)..(149): n is a, c, g, or t
  misc_feature (582)..(600): n is a, c, g, or t
  misc_feature (1201)..(1235): n is a, c, g, or t
  misc_feature (1239)..(1282): n is a, c, g, or t
catatcaattccaaatatacacatacccttgtatataaaaaatgatattagccagttgtaatactcatttagcatcttgattattagtggcaatataattatcttaacatagggcatgtaacaggacaaatgagataaaataatgacanccaagtaagttttatccagtccatttctaaactgacaagaataccttattcaataccttatataggtcatctgacagatacttgagggctgtttgcacacatcaagtgtgttggcaggcagggaggggagcagtaaaagctgagggtgctttctcactaactagcagatgcagtaatgccacataagaaaactaaggactgaataaatgactttggcatctattctattttccctttttacttacatgtaaattacttttacagcctactgaaggacaggcaattctcatccccctcccgcttcatacatacgtgccacaagcacccaaacttgtcacttatgcaatggactgaccaaaacaaaacaaaaaacagaaatgttttttgaaagacacggattacccacattttgggagtgtaacgtaagtgcaannnnnnnnnnnnnnnnnnnccctacatagacatagtaaaaggaaagaagatgtgcttggggagagggttgacaaaatgacaaaataaagaatgtacataaaaagtatttgtaaaaatgctggtatctcatgcaggagtctcttcctcaaatgtgttcaatcaatctgagctatctactgtgaacactctcccatttgcagaacttcacctttaatccacgctaaagaggataagagactaggctatttattttcaaaacagtttacaaaacaatgctttctacttcataaatgtaaaaagaaactaaaataaggagaatctgaagagtttcaagtacttaaaaaacctgaattcaatgaggcagaggtctcaatgttaaagtgactatttcgtacctgtggtaaaacattatccccccccttaccctttaccaggagaaaaggggttccctttctcctggtaccccaccccaggtaaaagttggtgagatttcagtatatacacatttccaacttttcagtatttgttaattcattgcaaagctgtctaattatagtattccctagtcccccggccgtaatggccgaattcccgggcatatgtccggtaccgtcgactgnnnnnnnnnnnnnnnnnnnnnnnnnnnnnnnnnnncggnnnnnnnnnnnnnnnnnnnnnnnnnnnnnnnnnnnnnnnnnnnnactaaacgagctagcgccctatagtgagtctatacatctt

SEQ ID NO: 73393 - DNA, 1691 bp, Homo Sapiens
tcactcttgtccagttgaaacaaacgggcaagattaccgagtccagaccaactccagcccccacagccactcccacagcaccttcgcccctacaggccacagctggaccatcttatccccggcctgtgatcccaccagtatcaactcctggacaacccaatgcagtgggcacattcactgaaatccccgccagcaatattcgaagagtcattgccaagagattaactgaatctaaaagtactgtacctcatgcatatgctactgctgactgtgaccttggagctgttttaaaagttaggcaagatctggtcaaagatgacattaaagtatcagtaaatgattttatcatcaaggcagcagctgttacccttaaacaaatgccagatgttaatgtaagctgggatggagagggcccaaagcaactgccatttattgacatttcagtggctgtggcaacagataaaggcttacttactccaatcataaaagatgctgctgctaaaggtatccaggaaattgctgactctgtaaaggctctatcaaagaaagcaagagatggaaaattgttgcctgaagaataccaaggaggatcttttagtatttccaacttggggatgtttggcatcgacgaatttactgcagtgattaaccctcctcaggcctgcattttggcggttgggaggttccgacctgtgctgaagctcactgaggatgaagagggaaatgccaaactgcagcagcgccagctcataacagtcacaatgtcaagtgacagtcgagtggttgatgacgaactggcaaccaggtttcttaaaagttttaaagcaaacctagagaatcctatccgacttgcctagtcctcaaagataagaagttggtgttcagcttagttgattcagtagttgttaccaagaaacatatgttataggaaaacaacttggtatttaagtatgaagtggatgaaatgtttatttatttaaggtgaaagcatttgacccagggtgtcttcatcttcaatttgggtttaatgttatagaaataaatgatgataaactctaactaataaaggaaagagaatatttggttactcagatccatttttaacctctggtgctgtataaagggaatattaaactagatgtaaatcaaagtatatgtttggctcatttgagcattttggaatatttgagaatgtatgatacatgtaaaattaaaaaaactattagaactgtaccataattatgttgaaggtagaagtgatcttcaaagagatggccattaacttagcagtgggacctcacttttacaagcactgctctagatatacttgaagaatttaatatgtacagaagtttattctggataataaataaataaggatcacactgtattaggggttatggcaacattattgaattttttatgtacataaagccatatgtttagggtggtttctatctgtcttgtttttcacttatataacactgtgaacttctaaagaaagaggataaaagaagcatgaatgaaaagaatgacatttcaaaaaaatggttcaatgaaaaactatagctaaaatatgtaaacctttctaggtaaaccgcttgccttcatcttgagtcggaatatatttaaataaattgtgttatctcttgccaaacattttgttagtgttcctcgtgccgcctcgtgcc

SEQ ID NO: 73394 - DNA, 2471 bp, Homo Sapiens
attagaactctagagttgtaggaatgtaggaagagctgtttgccacagttaggacgagggtttcaaactgtctgctgagccctggggcatctgcgtggaatgggaaactagcacagtctcgctttggctgcattctgaggggtttatgtgatggcaaacagccaagatgaagaagctgcctagcagtcgctgcagcggctgcagcgttatgtgggacttcagatagcttctgagtagtcaagcagtgcacaatcctggaggaagagaaggctcagcaagaagagcgcatgaggatggagtccagaagacaggccacagtgtcctgggactccggagggtctgatgaagcaccgcccaagcccagcagaccgggttatcccagtccgaggtccagcgaaggattttatcccagcccacagcacatggtacaaaccaatcattaccaggtttctggctaccctggttcacatggaatcacagccatggctggcagcatctatccaggtcaggcatctcttttggaccaaacagattcatggaatcatagacctcaggagatagcaatgtggcagcccaatgtggaggactctacagtattggacctgcgagggattgggcaagtgttgccaacccatctgatggaagagcgtctaatccgacagcaacaggaaatggaagaagatcagcgctggctggaaaaagaggaaagatttctgaaacctgatgtgagactctctcgaggcagtattgacagggaggatggaagtcttcagggtccgattggaaaccaacatatatatcagcctgtgggtaaaccagatcctgcagctccaccaaagaaaccgcctcgccctggagctcccggtcatctgggaagccttgccagcctcagcagccctgctgacagctacaacgagggtgtcaagcttcagccccaggaaatcagcccacctcctactgccaacctggaccggtcgaatgataaggtgtacgagaatgtgacgggcctggtgaaagctgtcatcgagatgtccagtaaaatccagccagcccaccagaggagacttatgtccctattggtgaaggaagtccgcttggccctgaggacattattggccactgtggatgagaccattcccctcctaccagccagcaaccaccgagagattggacgatggcacagaagctattgaactctgacctggggtgagctcatcaacaagatggaaactggcccagcagtattgtcatgaccagactcccagcaagagtacaaaaagcaaatgctgactgatgctcacgccctggctgtggatgccaaaaacttactcgatgtcattgaccaagcaagactgaaaatgcttgggcagacgagaccacactgagcctcccctaggagcacgtcttgctaccctcttttgaagatgttctctagccttccaccagcagcgaggaattaaccctgtgtcctcagtcgccagcacttacagctccaacttttttgaatgaccatctggttgaaaaatctttctcatataagtttaaccacactttgatttgggttcattttctgttttgtttttttcaatcatgatattcagaaaaatccaggatccaaaatgtggcgtttttctaagaatgaaaattatatgtaagcttttaagcatcatgaagaacaatttatgttcacattaagatacgttctaaagggggatggccaaggggtgacatcttaattcctaaactaccttagctgcatagtggaagaggagagcatgaagcaaagaattccaggaaacccaagaggctgagaattcttttgtctaccatagaattattatccagactggaatttttgtttgttagaacacccttcagttgcaatatgctaatcccactttacaaagaatataaaagctatattttgaagacttgagttatttcagaaaaaactacagccctttttgtcttacctgccttttactttcgtgtggatatgtgaagcattgggtcgggaactagctgtagaacacaactaaaaactcatgtcttttttcacagaataatgtgccagttttttgtagcaatgttatttctcttggaagcagaaatgctttgtaccagagcacctccaaactgcattgaggagaagttccagaaccatcccctttttccatttttatataatttataaagaaagattaaagccatgttgactattttacagccactggagttaactaacccttccttgtatctgtcttcccaggagagaatgaagcaaaacaggaatttggttttcttttgatgtccagttacaccatccattctgttaattttgaaaaaatataccctccctttagtttgttgggggatataaattattctcaggaagaatataatgaactgtacagttactttgacctattaaaaaggtgttaccagtaaagttcttgttgtaataaaaaaaa

SEQ ID NO: 73395 - DNA, 1431 bp, Homo Sapiens
cacggcaggtagcgaggccgggtggtgaattcggcacgagggtggtaaggtcgggccatggtggggcagaggttgggaagatggcgtggcgaggctgggcgcagagaggctggggctgcggccaggcgtggggtgcgtcggtgggcggccgcagctgcgaggagctcactgcggtcctaaccccgccgcagctcctcggacgcaggtttaacttctttattcaacaaaaatgcggattcagaaaagcacccaggaaggttgaacctcgaagatcagacccagggacaagtggtgaagcatacaagagaagtgctttgattcctcctgtggaagaaacagtcttttatccttctccctatcctataaggagtctcataaaacctttattttttactgttgggtttacaggctgtgcatttggatcagctgctatttggcaatatgaatcactgaaatccagggtccagagttattttgatggtataaaagctgattggttggatagcataagaccacaaaaagaaggagacttcagaaaggagattaacaagtggtggaataacctaagtgatggccagcggactgtgacaggtattatagctgcaaatgtccttgtattctgtttatggagagtaccttctctgcagcggacaatgatcagatatttcacatcgaatccagcctcaaaggtcctttgttctccaatgttgctgtcaacattcagtcacttctccttatttcacatggcagcaaatatgtatgttttgtggagcttctcttccagcatagtgaacattctgggtcaagagcagttcatggcagtgtacctatctgcaggtgttatttccaattttgtcagttacctgggtaaagttgccacaggaagatatggaccatcacttggtgcatctggtgccatcatgacagtcctcgcagctgtctgcactaagatcccagaagggaggcttgccattattttccttccgatgttcacgttcacagcagggaatgccctgaaagccattatcgccatggatacagcaggaatgatcctgggatggaaattttttgatcatgcggcacatcttgggggagctctttttggaatatggtatgttacttacggtcatgaactgatttggaagaacagggagccgctagtgaaaatctggcatgaaataaggactaatggccccaaaaaaggaggtggctctaagtaaaactgggattggacagtagtggtgcatctggtccttgccgcctgagagccccaggagacatcggctagagtgaccatggctatgctcccgtctggaagatgccagcatctggcctcccactgttttcagctgtgtcccccagtccgtgtctttttagaatgtgaatgatgataaagttgtgaaataaaggtttctatctagtttgtaaccc

SEQ ID NO: 73396 - DNA, 682 bp, Homo Sapiens
  misc_feature (35)..(35): n is a, c, g, or t
  misc_feature (53)..(53): n is a, c, g, or t
aataaatgcaggatataaaaaaaatgttcacttcntgctctcaccgtgtttcntggagcatgggttgttagatgcaagcaatgcaccctaataataccccgggtctgagatttaacatgacaactcacatcaaatcgcatcagaggtgtgtgctgccttcagtgcatttacattggtgaatcagtcaagatattttcctcccccaaataaacttagttgtaagtgataacaatattatgcttctccaagctcagtatctttctgattttatatcaaagtaccgcaacaatgcatcattgtagttaatttatttcaagaataaattcctcatatgtcctcaatagtacaattctaattttcttctattcataagatgaaagaaatggtttggagcatagaatagaaagtgcacaaattgagtacataaaatgggaagcaactgatttctcagctaagaaaggctcatttatcacagaacacaattgcttttctccccccactacgcttcccataattgaaaaagtgagtccctatttttcacactcatataaatctatgcgatttggatgctagtcttattgtattattttgtaaaactttctctttggctcataatccttcctaattgtaaattgataaactttgcggatgacatctgctcgtagaataaacacttcttcca

SEQ ID NO: 73397 - DNA, 615 bp, Homo Sapiens
tagcaatgatgcagatttttttattagagtttatactgtagagaaatcatatgaagtcaataaatgtgggaaagcctttgtcagtattaatcccttaattgacctaagtatactcacactaggaaaaatctgtgtacatgtagcaaatgtgggaaagactataggcaataggaatctcctgcaaactcctacaggagaaaagttgtatgaatgtggaaactttagaaattgaaggaatttttcagttccaagtgcatcccttattctataggaaataaactggagacaaatctcatttaagagatgcagcaaagtgttcactaagagtgtttatcttgccagacataagaagatgaatggtagagcaacctgaaggatttagaaattacatataaatctttgcagttatgctatttgtaaacaggattatataggagagcaaataaacataagtatgcatttcttagagcagtagcttgcagtttcagttgagttctacttagaaattctttttagctagtgggcatgtgaagatatttagtcacccagaggagccagtaaatgttataatgttaaaaattaaagctgcaaaagaaataaaatggtgttaataaa

SEQ ID NO: 73398 - DNA, 748 bp, Homo Sapiens
  misc_feature (118)..(118): n is a, c, g, or t
tcggtacccagatgatgcattacactccagccaggtccatccctgctccgtatgttggctgtgagtggtggtttccatttaaaccaagtttctcatttcttcacctttttttctctanagaatttggattcgtagacattgacatcccgaagaactgtcaaggaagcaagatatgctttcttcatctgcaaaagaaatactaacaacaattttcttatacagtttggcagaaagatgttaacataaaaagtttatatacctcaaaaatcactaaactttccagatctctgtcctattatttgtaacacaaggggcattggataaaatgatttctagggttccttttgcttcccaaattctctgattctaaagcagtttttagaatcattagctctttggaaacatatatgcatacatgtttgttaagcctattgaactaggtaggacatataaacaatttaattttagtgtcattgtttaatcacagacttagtgtttgaaaactgtgttttaaaaacagaaacagattgatgggtaacaggtaaaatatgacatgtatagcttacatgttattatttggtaaattttctttgtatacatttcaaaatctgggtatacttataatccattagaagtaatggttatggactaaaaagatatgttctttagtatgttatatatactcatattacatagcagtatgtttacaaaaggcttataaaaataaaatgaactatcagttacatag

SEQ ID NO: 73399 - DNA, 2317 bp, Homo Sapiens
tccgagacgagggaggaagtggccgggcggtcgcagggactccggggcgaccgccgcgagtccgcagtagttcgggccatggaggcggagccgccgctctacccgatggcgggggctgcggggccgcagggcgacgaggacctgctcggggtcccggacgggcccgaggccccgctggacgagctggtgggcgcgtaccccaactacaacgaggaggaggaggagcgccgctactaccgccgcaagcgcctgggcgtgctcaagaacgtgctggctgccagcgccgggggcatgctcacctacggcgtctacctgggcctcctgcagatgcagctgatcctgcactacgacgagacctaccgcgaggtgaagtatggcaacatggggctgcccgacatcgacagcaaaatgctgatgggcatcaacgtgactcccatcgccgccctgctctacacacctgtgctcatcaggttttttggaacgaagtggatgatgttcctcgctgtgggcatctacgccctctttgtctccaccaactactgggagcgctactacacgcttgtgccctcggctgtggccctgggcatggccatcgtgcctctttgggcttccatgggcaactacatcaccaggatggcgcagaagtaccatgagtactcccactacaaggagcaggatgggcaggggatgaagcagcggcctccgcggggctcccacgcgccctatctcctggtcttccaagccatcttctacagcttcttccatctgagcttcgcctgcgcccagctgcccatgatttatttcctgaaccactacctgtatgacctgaaccacacgctgtacaatgtgcagagctgcggcaccaacagccacgggatcctcagcggcttcaacaagacggttctgcggacgctcccgcggagcggaaacctcattgtggtggagagcgtgctcatggcagtggccttcctggccatgctgctggtgctgggtttgtgcggagccgcttaccggcccacggaggagatcgatctgcgcagcgtgggctggggcaacatcttccagctgcccttcaagcacgtgcgtgactaccgcctgcgccacctcgtgcctttctttatctacagcggcttcgaggtgctctttgcctgcactggtatcgccttgggctatggcgtgtgctcggtggggctggagcggctggcttacctcctcgtggcttacagcctgggcgcctcagccgcctcactcctgggcctgctgggcctgtggctgccacgcccggtgcccctggtggccggagcaggggtgcacctgctgctcaccttcatcctctttttctgggcccctgtgcctcgggtcctgcaacacagctggatcctctatgtggcagctgccctttggggtgtgggcagtgccctgaacaagactggactcagcacactcctgggaatcttgtacgaagacaaggagagacaggacttcatcttcaccatctaccactggtggcaggctgtggccatcttcaccgtgtacctgggctcgagcctgcacatgaaggctaagctggcggtgctgctggtgacgctggtggcggccgcggtctcctacctgcggatggagcagaagctgcgccggggcgtggccccgcgccagccccgcatcccgcggccccagcacaaggtgcgcggttaccgctacttggaggaggacaactcggacgagagcgacgcggagggcgagcatggggacggcgcggaggaggaggcgccgcccgcagggcccaggcctggccccgagcccgctggactcggccgccggccctgcccgtacgaacaggcgcaggggggagacgggccggaggagcagtgaggggccgcctggtccccggactcagcctccctcctcgccggcctcagtttaccacgtctgaggtcggggggaccccctccgagtcccgcgctgtcttcaaaggcccctgtctcccctcccccacgttggggacgcccctcccagagcccaggtcacctccgggcttccgcagccccctccaaggcggagtggagccttgggaacccctcggccaagcacaggggttcgaaaatacagctgaaaccccgcgggcccttagcacgcgccccagcgccggagcacggtcagggtcttcttgcgacccggcccgctccagatccccacagctctcggccgcggacccgggccgcgtgtgagcgcactttgcacctcctatccccagggtccgccgagagccacgattttttacagaaaatgagcaataaagagattttgtactgtcctg

SEQ ID NO: 73400 - DNA, 508 bp, Homo Sapiens
  misc_feature (68)..(68): n is a, c, g, or t
cgcaatgcggggagggctgagactggggtctgggctgttccggacttcaacactcaccccttgtcccncagcagggctatggcgtgtgcttggtggggctggagcggctggcttacctcctcatggcttacagcataggcacctcagccgcctcactcctgggcctgctgggcctgtggctgccacgcccggtgcccctcgtggctggagcaggggtgcacctgctgctcaccttcatcctctttttctgggcccctgtgcctcgggtcctgcaacacagctggatcctctgtgtggcagctgccctttggggtgtgggcagcgccctgaacaatactggactcagcacactcctgggaatcttgtacaaagacaaggagagacaggacttcatcttcaccatctaccactggtggcaggctgtggccatcttcaccgtgtacctgggctcaagcctgcacatgaaggctaagctggcgaagctgctggtgacgctggtggcggccgc

SEQ ID NO: 73401 - DNA, 518 bp, Homo Sapiens
gtatgagctaccacttccagccctaggcagggtttttacatcagcactgaagaacgagtattgagcaaattggtaccactgagtttttatccaaaatgaaaataaatgttaaaatttagtacaatattatagattaattttgctaaattcaagaaaggtcaggaatgaacatttgttaatggttatatgccaaacaaaataaatgctttccataaatgtatttaatttccaaaaaatccaggaggtagctattaatgttctcatgctaaaggaaagaaagctgaaattcaaataggttgtacactttgttccaaggttacagcgatatggaatattaaaacataaaagcccaggtctgatggcaaagttgatctctttctacttcacctcactgagcaagccttacctcttacaaggagacctcacagactagaaaagttaagaccaatctggggatcttctaaaactgactttcctaataccaaaggaccacattctcttcttatcttgcttaatcc

SEQ ID NO: 73402 - DNA, 750 bp, Homo Sapiens
  misc_feature (31)..(31): n is a, c, g, or t
aacacgagaaaactcggggttcgctggtgcnccaggctcaggcttggggccaggagctaaaggctctgctggaaaagtataatacggcctgccgggaagtgggtcggctgcgggaggcggtggccgaggagcgccgccggagcggggacctggccgctcaggcagccgaacaagagcgccaggccagcgagatgcgggggcgctccgagcagtttgagaaaacggcagagctgctgaaagagaagatggagcatctcattggggcttgccgagacaaggaagccaagatcaaggagttgttgaagaagctggagcagctttcagaagaggttctagcaattcggggagaaaatgctcgccttgccctgcagctgcaggattcccagaagaaccatgaagagatcatctccacctacaggaatcatctactgaatgctgctcggggttacatggaacatgaagtgtacaatatcctgctgcaaatccttagcatggaagaggagtgaggcagcctcactgtgtgccctcagggatacgagattctctgttggaataagaaaccctggttgacagaggcttcatcaggctgtggtgggcgggggtgttggccactaggcaatggtatgggcagggcttcacctgacattatggacctcagacctgagaacctggaccctggaatcagcatggatgagaccagaggaggtatggatggaaacaagctctatggaaaataaagcatgaggcagg

SEQ ID NO: 73403 - DNA, 662 bp, Homo Sapiens
  misc_feature (181)..(181): n is a, c, g, or t
atttgacgactacggggacattcacatccctgccgtgatcctgaagaccttcctgcgagagctgccccagccgcttctgaccttccaggcctacgagcagattctcgggatcacctgtgtggagagcagcctgcgtgtcactggctgccgccagatcttacggagcctcccagagcacaantacgtcgtcctccgctacctcatgggcttcctgcatgcggtgtcccgggagagcatcttcaacaaaatgaacagctctaacctggcctgtgtcttcgggctgaatttgatctggccatcccagggggtctcctccctgagtgcccttgtgcccctgaacatgttcactgaactgctgatcgagtactatgaaaagatcttcagcaccccggaggcacctggggagcacggcctggcaccatgggaacaggggagcagggcagcccctttgcaggaggctgtgccacggacacaagccacgggcctcaccaagcctaccctacctccgagtcccctgatggcagccagaagacgtctctagtgttgcgaacactctgtatgtttcgagctacctcccacacctgtctgtgcacttgtatgttttgtaaacttggcatctgtaaaaataaccagccattagatgaattcagaaccttctaatg

SEQ ID NO: 73404 - DNA, 2010 bp, Homo Sapiens
  misc_feature (65)..(111): n is a, c, g, or t
  misc_feature (1341)..(1358): n is a, c, g, or t
tttacttcatttattagaagagtttctaatatgtgtaggaatacaattttaaatgtaagattatnnnnnnnnnnnnnnnnnnnnnnnnnnnnnnnnnnnnnnnnnnnnnnnatgtcacaatatcactataaggcattccttcttccattctttttatatctccacagaactgctctcatgggaccctgtcctgccctgtaggtaaaagcccttcttattttccgctgagaggtctacccactttcatagggtgtccagtcaatttgtgagtacagtccactggagtcttcataacatcaaccctctaggtgagatctgtaatagctagttaattatctgggaatttttaaacatttggatattgcaaataatgtgaataaaatacttgaattttaaataattaaattgtttcttcaaatgttttagcgtttatgaaaaaataatgcaccaagattttggatttctaacatttctggctgtatgagagagtaaagggttggcactttattaacttgggggcaatgtagacatatgttgaagctggttctggaagtgcaccctggaaatttttatctgagttccttgtcaatcctacacaattgcatgcaatgagaacttcatgattgtagcgttgatctggcctagctctggactgcttgatgaaggagtttctttgaagtgagcaatactggcaaatatgaatgaattcacaccactagcaattgttggcagaacacccaaccactctacccagtttcagaatgtgaaatggcatgtattcagcagggcatattattcttgaagtcacaaaaatagggaaaatccaacaagcgcagtcagtgtttacctgaagaatacagtcacatagttgcttcactttcaatattcttaggaaataaccaaataaatgagctacaaatatgagaaactgagagtgtgtgaatgaaagagagcaacaaaaggaggaaatacaagactagacaatgtaatcttctacttaacatttcagaattttattaatcctttaaaaatcaccctatttcttttgagttaatatcctcatctcgattaccctcatacatggcttagtttgattctgttactaaattctgtgaatcattatttaatcaaatctactaaagattagaaaaaattctagcaagacttataatcatgaaatacagaattaaaagtttaaacctaccaaaagtcctatggcctattatttagctgtgaatgagacacgtcaggagtataaatctgcacttttgactgtaagtaaaatttgctaatgcaggaagcgaaatagtgaaggaatactggggttgctaaaagattacnnnnnnnnnnnnnnnnnngcaaaatgcagtgtaccttaaaagtgtctcacctagaaggcctctacctgtaatcacattaatttttctaaagacaatttggtgttttgaagataaatgtcattagtctatgataatagcatcataggacaattagccattttagacttgaccatattttctctttttagcatatagccatcttgatatttaggtgggagactactccaatggagcaacagtttcattttacatgattggatttagaaatttacaaattttaaactcataagaattctaaataatttgaaaatggaaacatttgacccacagtctagcagcataaatacatttataaaatacttcattgttgatcttaggtcattgatttaaaacagaatttggtgactatgggcaggtggagggggccagtgaggaaggtataaaagagaaatctttatgaattgtgttcagattgattttgtataaacataatatattcatggttgtatctcttatttataatacccaactaacatgaaggtggtccaagggaaggatcaatattttaaataacatatttgcttaaaatatcatacagtggctgcttcataaaaatcttataaacttttattaaccaagttcagaaataattagaggggtgatctccccc

SEQ ID NO: 73405 - DNA, 760 bp, Homo Sapiens
cggcacgaggattggcgtggacgaggagatcacctacgactacaagttcccactgggaagacaacaagatcccgtgtctgtgtggcacagagagctgccggggctccctaaactgaggtggggcaggatgggtgcccacacccctatttattccccctggtgccctgagctcccagcacccccccagccttagtgggctcagcagggcccacatgcccccatctccaagcgtggggttgggggccccaagcccagcgagggagcctcagtccctggaggcagcttctgcctctcctgtcgcccctgcccaccaccccctgattgtttttctttgcggagaagaagctgtaaatgttttgtagcagccagcagctgtttcctgtggaaacctggggtgccggcctgtacagattctgtcctggggggctacacagtcctctcgctttgtgttaatggggacttccccttacgccctgcgtgtacccctccccagtttaggggtctctggggcagtggccatgttctccccctgggggggctctgcacccccagtcctggggactccgtgcctggaaccctgcctcatctgttcctgccagaccctgagggtcacccttccaccctggtgtcactccccggctcagccaggccaggatggcggggtgggtcccttttgctgggctggactgtacatatgttaatagcgcaaacccgacgccacatttttataattgtgattaaactttagttggtaaccaag

SEQ ID NO: 73406 - DNA, 1059 bp, Homo Sapiens
  misc_feature (710)..(717): n is a, c, g, or t
  misc_feature (720)..(805): n is a, c, g, or t
  misc_feature (993)..(1004): n is a, c, g, or t
gggacagcgaggccaagatttcagctgcgggacggtcaggggagacctccaggcgcagggaaggacggccagggtgacacggaagcatgcgacggctgctgatccctctggccctgtggctgggcgcggtgggcgtgggcgtcgccgagctcacggaagcccagcgccggggcctgcaggtggccctggaggaatttcacaagcacccgcccgtgcagtgggccttccaggagaccagtgtggagagcgccgtggacacgcccttcccagctggaatatttgtgaggctggaatttaagctgcagcagacaagctgccggaagagggactggaagaaacccgagtgcaaagtcaggcccaatgggaggaaacggaaatgcctggcctgcatcaaactgggctctgaggacaaagttctgggccggttggtccactgccccatagagacccaagttctgcgggaggctgaggagcaccaggagacccagtgcctcagggtgcagcgggctggtgaggacccccacagcttctacttccctggacagttcgccttctccaaggccctgccccgcagctaagccagcactgagatgcgtggtgcctccaggaccgctgcgggtggtaaccagtggaagaccccagcccccagggagaggaacccgttctatccccagccatgataataaagctgctctcccagctgcctctcnnnnnnnnaannnnnnnnnnnnnnnnnnnnnnnnnnnnnnnnnnnnnnnnnnnnnnnnnnnnnnnnnnnnnnnnnnnnnnnnnnnnnnnnnnnnnnccgctccaaaattaccccctgggggggccaagttttacccggcacccatttttcttttgaaaaagggggccccctaaggggggcgctattaaaaatataggcccgggggccccttttttttcaaaccccggggattgggaaaaaagcgctcccttggggaatctttttgggaaaaaaccctctctttnnnnnnnnnnnnacaaaaattgggcaaaaaattccctccaaagaatatttataccccctccgggggg

SEQ ID NO: 73407 - DNA, 1077 bp, Homo Sapiens
cagtcgacggtaccggacatatgcccgggaattcggccattacggccgggcttcctggcgttgttttatcctgttattttctcaaaaaaagagcacggctttttcttaaatacatttaaattcagaattgcttgcaaaagattggcctggatagatagacatcctagatttaagatagtaccatcttaaaagtatgttgaaaggtaaaataaatcatttcaaaatacttaactttcctaataaggatgttaggttttctcctccttcattagctggccataagtcaaggtccttataacactaggaaattacctttttttactttcaaaattgcattatagtgaattactgtttacaaaatacacatactgtgaacagatataagtttctgtcttttataaggtttgtagaatgaatgtttttttaaagtgagtattatatgttaaatattttaagttttttataaatactagtaactgtttactaatttttgtttggtcaaatgcttgtaaatgtagctgaaagaagatagggagaaactgcggatcccaaactgttccctttttcatttcttgaaatgttaccactacagacatttttttaaggtgaataaacagttgtgatgtgctgtacctaaaatcatgtttaatcgtataaggaaacatttcaatacacttatacaggaagaaaactatagatgaagtacatgtgtgtgattcagtctgattcacagaattctgagagtaatatggaataaaacaactccacttagatgataactgaagcatttcctgccttgtgaaaatttggattttaaattgctgttagaatgggaaatttggacactttatatcattgtataatttcagaatttagtttctgtatcttttggaaaacatgattatagcaaaaacatagaaaataatctattactaaaacaccataaatgtaaaactagtatgcttggctgttaactctaaagatgttacttatgtctgtttttaaaacatgcatgtatttaacaattttatcatagtattgtcatggaaaaaataaatatattttcttacatcttaa

SEQ ID NO: 73408 - DNA, 410 bp, Homo Sapiens
caggccgcgaccggatgtacgagcaactcaagggcgagtggaaccgtaaaagccccaatcttagcaagtgcggcggaagagctgggtcgactcaagctagttcttctggagctcaaatgctactactttgattacaaggagcagctccccgagtcagcctatatgcaccagctcttgggcctcaacctcctcttcctgctgtcccagaaccgggtggctgagttccacacggagttggaagcggctgcctgccaaggacatacagaccaatgtctacatcaagcacccagtgtccctggaagcaatacctgatggagggcagcttacaacaaagtgttcctggccaagggtaacatccccgccgagagctacaccttcttcattgacatcctgctcgacactatcaggga

SEQ ID NO: 73409 - DNA, 877 bp, Homo Sapiens
  misc_feature (783)..(783): n is a, c, g, or t
cttaggctagtacgagggctgggtgtcgaattcggcaccgaggcggcaggcttctcgagctccgggcccgcggcaacctcgggcgctgttctgcaggccgcgaccggcatgtacgagcaactcaagggcgagtggaaccgtaaaagccccaatcttagcaagtgcggggaagagctgggtcgactcaagctagttcttctggagctcaacttcttgccaaccacagggaccaagctgaccaaacagcagctaattctggcccgtgacatactggagatcggggcccaatggagcatcctacgcaaggacatcccctccttcgagcgctacatggcccagctcaaatgctactactttgattacaaggagcagctccccgagtcagcctatatgcaccagctcttgggcctcaacctcctcttcctgctgtcccagaaccgggtggctgagttccacacggagttggagcggctgcctgccaaggacatacagaccaatgtctacatcaagcacccagtgtccctggagcaatacctgatgtgagggcagctacaacaaagtgttcctggccaagggtaacatccccgccgagagctacaccttcttcattgacatcctgctcgacactatcagggatgagatcgctgggtgcatcgagaaggcctacgagaaaatccttttcactgaggccaccggatcctcttcttcaacacacccaaaaagatgacagactacgccaagaagcgaggtgggtcctgggcccaacaactactacagttgcangcagcagcagaagcggaagacacaccattcctcacagaatgggcaacaggtcatcgagtatgccggagctggagatgaccgtctgagccccgga

SEQ ID NO: 73410 - DNA, 1512 bp, Homo Sapiens
agaggcggagctccaactgacatgttcattaagggcagggctccgagggcgccacctcgagagcgacggcgggctacccggggcgggctgaggcaggttgtagccccgccccgggccttgggctccacctctcggccccacttccgccgggcaagcgtttgtaggcggcgctgccgtaaatcaggcggtctgcttgccgcatcacgcaagatggcggccgcggcggtgaacggggcggcaggcttctcgagctccgggcccgcggcaacctcgggcgctgttctgcaggccgcgaccggcatgtacgagcaactcaagggcgagtggaaccgtaaaagccccaatcttagcaagtgcggggaagagctgggtcgactcaagctagttcttctggagctcaacttcttgccaaccacagggaccaagctgaccaaacagcagctaattctggcccgtgacatactggagatcggggcccaatggagcatcctacgcaaggacatcccctccttcgagcgctacatggcccagctcaaatgctactactttgattacaaggagcagctccccgagtcagcctatatgcaccagctcttgggcctcaacctcctcttcctgctgtcccagaaccgggtggctgagttccacacggagttggagcggctgcctgccaaggacatacagaccaatgtctacatcaagcacccagtgtccctggagcaatacctgatggagggcagctacaacaaagtgttcctggccaagggtaacatccccgccgagagctacaccttcttcattgacatcctgctcgacactatcagggatgagatcgctgggtgcatcgagaaggcctacgagaaaatccttttcactgaggccacccggatcctcttcttcaacacacccaaaaagatgacagactacgccaagaagcgagggtgggtcctgggccccaacaactactacagttttgccagccagcagcagaagccggaagacaccaccattccctccacagaactggccaaacaggtcatcgagtatgcccggcagctggagatgatcgtctgagccccccgggcactgggtggggcagggcacgagttatttaaaacagttacactgcagggtttcgcccaataaaggtggactgacattccctcttccaggcccttgtctccccagttgggacggcagagagacaagttcttatatctgaagaacttggaggttttggggcattcaggagttggagatagcctccaactgggtcagcctctgtctggtgggcattgctcagggtctcaaacatggacgcccactgtggggccccagcagcactgtggcctgcaggagggcatggccccaggtagggggactgttctagccagctgtggacacataggaatgctggaccagggtaccagattttttcaacaaagggggtgaagtgtcctactaaaaagaataaatgttggcagtgaattaaacaatttttcaaatgaaaaa

SEQ ID NO: 73411 - DNA, 1778 bp, Homo Sapiens
  misc_feature (1177)..(1226): n is a, c, g, or t
  misc_feature (1265)..(1336): n is a, c, g, or t
ggggttgtctcgctctggcgtcagagccgtcgtggctcgttccattctcggcggtggtacctgctcccggtggccctgaggacgtgtgggccaggggcggccccgaaattaggaagcggagggggagcagtctgcaggtctgcggggctaagtgtcgcggcggcgcacctcgcgtcaagaatccggaggaggagactgcaaggataggcccaggagtaatggagtccaaagaggaactagcggcaaacaatctcaacggggaaaatgcccaacaagaaaacgaaggaggggagcaggcccccacgcagaatgaagaagaatcccgccatttgggagggggtgaaggccagaagcctggaggaaatatcaggcgggggcgagttaggcgacttgtccctaattttcgatgggccatacctaataggcatattgagcacaatgaagcgagagatgatgtagaaaggtttgtagggcagatgatggaaatcaagagaaagactagggaacagcagatgaggcactatatgcgcttccaaactcctgaacctgacaaccattatgacttttgcctcataccttgaatcctaaaagttttcgctgaggttaatgtgaacactgctttacaagcttgtatttttgtgatttactttttctgtaagccttttggggtttacacttaccagtttctaatggaaattagaattctaattgaatattgttttgtctcagcctaaaagttacggtcagcatggcaattcacctattttaggaaaaatactcttttcataatatgaaatgcataaagcagttcaaaaagcagtctgtattccatcatcttcctttttcattccagtccttatttttgtaagtattacttttcctcctccggctacctggactcaaaatctcagttgtctttgacagtttttttcttgtccctgaccaaaaaagaatgatcatacccagaattcaatgtttgatattttaagaatgtatgttctagtgtttttcagagtgagtctaccatctgtataaaaacaccttgggggcaggcaggggcatttaaaaatgtaggacctatcgtccagactcacagagtggggctccagaatctccatttttaacaaactctcttaagtaattctgatgtgtaccaaaatcagtgccattggtgtgnnnnnnnnnnnnnnnnnnnnnnnnnnnnnnnnnnnnnnnnnnnnnnnnnncataaccgtaaacaataaacaatatcaagataaatctgnnnnnnnnnnnnnnnnnnnnnnnnnnnnnnnnnnnnnnnnnnnnnnnnnnnnnnnnnnnnnnnnnnnnnnnntctccccgagggggggccacatgatgcgcgtcacccaaggtttcgcgggcagcaacaggggccccaaaagggagggctcgactaaaacagcgtgacagagggggcacgaggccaaaaaccgcgccggcaaacgggggacaacaagtgccgccaaagccgcggggaaccacccacggagaaggagcgcaccccctcaaccagcgggagggagagacaacactccggggcgggaaaaagaaccccaagagagagagaatacagcgagcccctcgagacggaaaaaacaataacaacacccccaccgactgaggagaaaatcagggcggacaacaacaaaagcgaagcaaagaaagcggcgacggacgagaaagaaaaacgggaccccaacgggaaagcagcacaacaacaacaaaacaagttatcacaccgggggcccccacag

SEQ ID NO: 73412 - DNA, 781 bp, Homo Sapiens
gaaggagcagataagtggccgagctgtgcacatcctcaagcatcgtgacagagcagaaaggactgtccctcaggaactgttctggtgttctgtaatagctccagcactgtgaactggctgggatatattctggatgaccacaaaatccaacacctaaggttgcaggggcaaatgccagccttgatgagggtaggaatcttccagtccttccagaagagctcccgagacatacttctctgcacagacatagcctctcggggcctggacagcactggtgtggagctggttgtcaattatgatttccccccaacgctgcaagattacatccacagagcagggagagtgggccgtgtggggagcgaggtgccaggcaccgtcatcagttttgtgacccatccctgggatgtgagcctggttcagaagattgagctggcggctcgccgaaggagaagtcttccaggactagcatcctcggtgaaagagcctttgccccaagcaacctgattttgacaaatctgattaaaatgtgatgctagaacagggatctttcccagtatcttgagtgggtgaccacacttgtcagtgggaggctctgggctgccctgtcggctccttgagggcgggatgaactgctttgtgacttggaaaggtacgctgctggccagcattggagaagaagctgctgagcatggctttctgtagtctttagcaagacacaagtggattttgactttgtatcatgtcatgatttctaacaataaatgatgtttttatgtgcaaa

SEQ ID NO: 73413 - DNA, 736 bp, Homo Sapiens
  misc_feature (63)..(86): n is a, c, g, or t
aagaattcggcacggagggatgcattcatttctcttggaatgtgtattgtttttattttgcgnnnnnnnnnnnnnnnnnnnnnnnngcttggaactccatcacgtggaaaaactagatcctgttggttatagcatttgtgagttctccacgtctgtctctctcgctcatgtaatatactctgaccctgagtggaaaggggtttttgttctgtttttattttacctacatgtactatttagcttcagtgtactagtcctgccacctgtgtatttttagggtgctatggaaataatgaaaagaaacggggatttcagaagaaaattgtaaccaaattcatactttgtataatttttgatatcatgatcacaggtgattcacacgtacacacataaacacacccaccagtgcagcctgaagtaactcccacagaaaccatcatcgtctttgtacatcgtatgtacaatgcaatcatttcatactttaaactggtcaaaaaactaattgtgatttctagtcttgcaaagctgtatgtagttagatgatgtgacaacctctaatatttatctaataaatatgtattcagatgaaacctgtatattaggtgttcatgtggttattttgtatttaaagatcaaattatttgactattgctagacatttctatactctgttgtaacactgaggtatctcatttgcccatgttaatttttttctaaataaattgacaaaaacaaa

SEQ ID NO: 73414 - DNA, 689 bp, Homo Sapiens
  misc_feature (36)..(36): n is a, c, g, or t
  misc_feature (649)..(649): n is a, c, g, or t
cgccctgcctccccggatccgaccccaggtaggagngactgtgctgggcctccggtccaggtggagtgggatagaaagaagcctataccctggcgctcgcctatgcttcttatggcgatgtggggccctcaggctccccagtgtctctgcagaaaaagaggaagaggcgcgtgtataaagtgcgaacgtctgagacctcggatccggcgtcggggcctagggcccccagccgccgctccagctcgtcgacggattccgcggacgccagccctgtgcacgccgatggccctgccggcgcctaccactcggcgtcggcagagtccgtggacgagattccagtggcgcagacgcgcctgggcagcgccgctctggccgccccgcggggccggggccgacagcccacgctggcgcggcaggcgcgtgcgcccgccgttttcgtgagcccgagcagcggcgagcccagggcgccgggcggccgggaggctggtctggcttagctgggccgagaggccggagggccgagttagagcggccggcctgactctctatgcaacaccccatccttgccgcaccgagtgcactttaggggcccctacggccggcgggatcggcctccctcccccacgactcagcaatacccgccccaccnggctgtgatgctcccaataaacttttttatgcttttgcgg

SEQ ID NO: 73415 - DNA, 1272 bp, Homo Sapiens
cgcgccgaattccggcacaaaggaagacctgcactgcaacttgtgcaacgtggatgtgagcgctcgctccaagcactgcagcgcctgcaacaagtgcgtgtgcggtttcgaccaccactgcaagtggctcaacaactgtgtgggcgagcggaactaccggctctttctacacagtgttgcatccgctttactgggcgtcctgctcctggtgctggtggccacatatgtcttcgtggagttctttgtcaaccccatgcgtctgcgcaccaaccgacactttgaagtcctgaagaatcacacggatgtgtggttcgtgttcctgcctgccgcccccgtggagacccaggcccctgccatcctggccctggccgccctgctcatccttctgggcctcctgtccacagccctcctggggcacctgctctgcttccacatttatctcatgtggcacaagctcaccacctatgagtacatcgtgcagcaccgcccaccacaggaggccaagggggttcacagggagctcgagtcatgtcctcccaagatgcggcccattcaggagatggagttctacatgcggaccttcagacatatgcgcccagagccccctggccaggccgggccagcagcagtgaatgccaatccctcccagtttcttgccacccgtggccaagcggaacctccaccaccctcttccccagacactctcgccctgcctccccggatccgaccccagaaaaagaggaagaggcgcgtgtataaagtgcgaacgtctgagacctcggatccggcgtcggggcctagggcccccagccgccgctccagctcgtcgacggattccgcggacgccagccctgtgcacgccgctggccctgccggcgcctaccactcggcgtcggcagagtccgtggacgagattccagtggcgcagacgcgcctgggcagcgccgctctggccgccccgcggggccggggccgacagcccacgctggcgcggcaggcgcgtgcgcccgccgttttcgtgagcccgagcagcggcgagcccagggcgccgggcggccgggaggctggtctggcttagctgggccgagaggccggagggccgagttagagcggccggcctgactctctatgcaacaccccatccttgccgcaccgagtgcactttaggggcccctacggccggcgggatcggcctccctcccccacgactcagcaatacccgccccaccggctgtgatgctccaaataaacttttttatgcttttgcggaaa

SEQ ID NO: 73416 - DNA, 1512 bp, Homo Sapiens
gtggaaggccgggcggaagtgcgcgcctggggccgccttggttaccgcgttttccgctcctcgctacgtcatcgttgtgagcccgctatcagcggccagcgcgggcgcggccggagaccgtggggcccccggttgccgccccctcgggagccaccatgttggtgataccccccggactgagcgaggaagaggaggctctgcagaagaaattcaacaagctcaagaaaaagaaaaaggcattgctggctctgaagaagcaaagtagcagcagcacaaccagccaaggtggtgtcaaacgctcactatcagagcagcctgtcatggacacagccacagcaacagagcaggcaaagcagctggtgaagtcaggagccatcagtgccatcaaggctgagaccaagaactcaggcttcaagcgttctcgaacccttgaggggaagttaaaggaccccgagaagggaccagtccccactttccagccgttccagaggagcatatctgctgatgatgacctgcaagagtcatccagacgtccccagaggaaatctctgtatgagagctttgtgtcttctagtgatcgacttcgagaactaggaccagatggagaagaggcagagggcccaggggctggtgatggtccccctcgaagctttgactggggctatgaagaaacgcagtggtgcccactcctcagcctaccctccccgaagccgcagccgggaccgcagccatgagaggaaccgggacagagaccgagatcgggagcggaatcgagaccgggatcgagacagagacagagagcgggacagggatcgggatcgggatcgagatcgagaccgggaacgggacaggaatcgggagcgggatcgagaccgagaccgagagggtcctttccgcagggcggattcattccctgaacggcgagcccctaggaaagggaatactctctatgtatatggagaagacatgacacccacccttctccgtggggccttctctccttttggaaacatcattgacctctccatggacccacccagaaactgtgccttcgtcacctatgaaaagatggagtcagcagatcaggccgttgctgagctcaacgggacccaggtggagtctgtacagctcaaagtcaacatagcccgaaaacagcccatgctggatgccgctactggcaagtctgtctggggctccctcgctgtccagaacagccctaagggttgccaccgggacaagaggacccagattgtctacagtgatgacgtctacaaggaaaaccttgtggatggcttctagggaacagagctggattccttgtgcctcatatgccccaatgctggtctcagtaaaacactgaggtggaagcttacacatctccctcagcctctggtttttcagcacttgggattggggttaaacctttaaaaacggctgtcaggtttgatctcagtgtaacaacatggccagtgcctgttccccactcccttgccccaaaaggatctggaacac

SEQ ID NO: 73417 - DNA, 724 bp, Homo Sapiens
  misc_feature (23)..(23): n is a, c, g, or t
taactcagttgggcccagccttntggatagcttggggtaggccatgggcccacctggggccaggccagcccctggggcagctctggaagagcagtgtggaggagcacttgcttgcagcctggcttcagcctctggcactgctggagtggtccctgggagcttctgcactgtcggctgtggggacgtctcacccacttgggttacagtaggccttccccacccagagagaagtgtttccaccccagagacattgcctgtcagcccctgaagtgctcgcctcccccagtgcccgtcaccagcccttcctatctgtggggtccaagtcaggcttcccctgcggccaccagccatagggagcagccatcagcccccgagtcagaactgcttctgtctgtccatacctccaggctctcccggagagggggacggatatttatttcctaaagtttgcacttaattgtgaggattctcaggattgttgggggctactgaaaagaggaatgtgttgaatgtcgcgtttgctgtccactcgtcctagaagtttagtgtttttgtcactgtcatgtgtttctgtgggcagagctggttctggagggtgggtcagtgcacccgaggctcagagcatccatccaccccactggccctccttccagataccctctctctaattgggttcttgcatgtaaaatactccacaataaataaataattgaacaaattaaaa

SEQ ID NO: 73418 - DNA, 914 bp, Homo Sapiens
tggcagtaactatcacggtcttaaggtagcgaggcctgggtggcgaattcggcacgaggccggcgggttacagcggaggcctaggtggcagacagggggcccgggccgctgcgtgttgtccacccaagatggagttcctcctggggaacccgttcagcacaccagtggggcagtgcctcgaaaaggcaacagatggctccctgcaaagtgaggattggacgttgaatatggagatctgtgacatcatcaatgagacggagaaagggccaaaaggatgccattcgagccctgaagaagcggctcaacgggaaccggaactacagagaggtgatgctggcattaacagtgctggagacatgtgtgaagaactgtggccaccgcttccacatccttgtggccaaccgagatttcatcgacagtgttctggtcaaaattatatctcccaagaacaaccctcccaccattgtacaggacaaagtgcttgctctgatccaggcatgggctgatgcctttcgaagcagtcctgatctcaccggcgttgtgcacatatatgagcagccatcagcccccgagtcagaactgcttctgtctgtccatacctccaggctctcccggagagggggacggatatttatttcctaaagtttgcacttaattgtgaggattctcaggattgttgggggctactgaaaagaggaatgtgttgaatgtcgcgtttgctgtccactcgtcctagaagtttagtgtttttgtcactgtcatgtgtttctgtgggcagagctggttctggagggtgggtcagtgcacccgaggctcagagcatccatccaccccactggccctccttccagataccctctctctaattgggttcttgcatgtaaaatactccacaataaataaataattgaaca

SEQ ID NO: 73419 - DNA, 664 bp, Homo Sapiens
  misc_feature (198)..(207): n is a, c, g, or t
  misc_feature (584)..(584): n is a, c, g, or t
  misc_feature (644)..(644): n is a, c, g, or t
gggttcttaaaactttaatcaatctatattcataataatatccttcaatttcttttttagcattatacaggaaactggtagatactgagatggattttaatggctttatactgatgaaaatagcaccacataaaagcaggggaatattagaaataaaaataattgtctctaaagacccatacaaccctttttcccatnnnnnnnnnngatgcactgtaatacatgaaaagataagatctcttgtcaaaagtgtgagagaatgtccggtggttccaaatgacagttacctcttgccccccttctctgccagagttcctttttatctttgcaatcttccagttcttccgatcagcctgcctttagagggctacaaagcatttctttcaagccaccatagctaacacggtgacatgagtacttaatttgcacgcggccgcgctgcccctggcttcgcggaagccctgagtagcgcagcgccctcgccgcacgcaaggctgcagtcccgctccaggccagagtcccaggagagcgtcctccgcgctcacaggcgcctttgtcttcccgcttcccccttcctttttcanaagccaagaggtaattatttggtctttgtgcaaggccacctctccagatgccacttccanatataggctctcattaacac

SEQ ID NO: 73420 - DNA, 1620 bp, Homo Sapiens
  misc_feature (1213)..(1221): n is a, c, g, or t
atatggcaatgaccgtgttaaaaagcagctgtacggtcggaattccgggatatcgtcgaccacgcgtcgtggacaagaaccacagcagggtagtatatgatacaagcaatggaaagaaggtagttgacagtgataagaaacttgaagtcgttgggcccaaaccaagagaatgtagttcaaaatgaaataatggtctatccagagaacacagaagacaatatgaaaaatggagtgaagaaaacagaaatcaatgtagaaggtgttgcaaaaataacaacattgatatggaagttgagagaccatcaaactctgaggcacatgaaactgatactgctataagttacaaggaaaaccatctagcagcttcatcagtaccagatcaaaaactgaatcaacccagtgcagaaaagacaaaagatgcagcaattcagacaaccccttcttgtaacagtttgatgggaaacaccaagatcataatttatctgactccaaagttgaagaatgtgtgcaaacgtcaaataacaacatatcaactcaacactcatgcttaagttcacaagattctgtaaatacctcaagggaattcaggagtcaaggcaccctaattatacattcagaagatccgcttaccgtaaaagatccaatttgtgcacatggtaatgatgatcttgtgcctcctgtagataggattgacaaaaattccactgcttcttacctaaagaattacccactttatagacaggactacaatcccaagccaaaaccttcaaatgaaattacacgagagtatatacccaaaattggcatgactacttataaaatagtgcctcccaaatccttggaaatatcgaaagactggcaatcagaaaccatagagtataaagatgatcaggacatgcatgctttagggaaaaagcacactcatgagaatgtgaaagaaactgccatccaaacagaagattctgctatttctgaaagcccagaagagccactgccaaaccttaaaccgaagcctaacctgagaacagagcatcaagtgcccagttctgtgagctcacctgatgatgccatgggtagtcctctgaaacctgctcccaaaatgacaagagacactggcacagctccttttgcaccaaatttggaagaaataaacaatattttggaatcaaaatttaaatctcgggcttcaaatgcccaggccaaacccagctcnnnnnnnnngcgggtgcagaagagagtatcgggtcactatgtgacatctgcagctgccaagagtgtccatgctgcccctaatcctgctccaaaagaactgacaaataaagaggcagaaagggatatgctgccttctccggagcagactctttctcccttaagtaaaatgcctcaccctgttccacaaccccttgttgaaaaaactgatgatgatgtcatcggtcaggctcctgctgaagcctcccctcctcccatagctccaaaacctgtgacaattcctgctagtcaggtatccacacaaaatctgaagactttgaaaacttttggtgccccacgaccatactcaagttctggtccttcaccgtttgctcttgctgtagtgaaaaggtcacagtctttcagtaaaga

SEQ ID NO: 73421 - DNA, 614 bp, Homo Sapiens
  misc_feature (52)..(52): n is a, c, g, or t
cggcacgaggagttaaagaagaggcagctggccagagctctgctggagaacntaatgcccaagatggaccagagaggccaaacaacctgaggactcagcaggtgacaaccctgtagtattcagtttctgttgtaggaagagagcgaggcatccctgaattccacgcatctgctggaaacgagccgtgtcagatcgcacatccctgcgcccccatgcccccatgcccctctgagtcacacaggacagaggaggcagagcttctgcccactgttatcttcactttctttgtccagtcttttgtttttaataagcagtgaccctccctactcttctttttaatgatttttgtagttgatttgtctgaactgtggctactgtgcattccttgaataatcacttgtaaaaattgtcagtgcttgaagctgtttcctttactcacattgaagggacttcgttggttttttggagtcttggttgtgactccaagagcagagtgaggaagacccccaagcatagactcgggtactgtgatgatggctgcagtccagttttatgattctgcttttatgtgtcccttgataacagtgacttaacaatatacattcctcataaat

SEQ ID NO: 73422 - DNA, 2293 bp, Homo Sapiens
aagcaggctggtacgctccggtatcccgggatatcgtcgacccacgcgtccgaggtgaacataaaggatttggtgaaacatttgtaagggtaggagttgaaaactgcagttcccagtgccacggaagtgtgattggagcctgcagataatgctcagccatcctcccatcctgcactttagccagctgcagggcgggcaaggcaaggaaagctgcttccctggaagtgtatcactttctccggcagctgggaagtctagaaccagccagactgggttaagggagctgctcaagcaatagcagaggtttcacccggcaggatgacacagaccacttcccagggagcacgggcatgccttggaatattgccaagcttccagctgcctcttctcttaaagcattcctaggaatattttccccgccaatgctgggcgtacaccctagccaacgggacaaatcctagagggtataaaatcatctctgctcagataatcatgacttagcaagaataagggcaaaaaatcctgttggcttaacgtcactgttccacctggtgtaatatctctcatgacagtgacaccaagggaagttgactaagtcacatgtaaattaggagtgttttaaagaatgccatagatgttgattcttaactgctacagataacctgtaattgagcagatttaaaattcaggcatacttttccatttatccaagtgctttcatttttccagatggcttcagaagtaggctcgtgggcagggcgcagacctgatctttatagggttgacatagaaagcagtagttgtgggtgaaagggcaggttgtcttcaaactctgtgaggtagaatcctttgtctatacctccatgaacattgactcgtgtgttcagagcctttggcctctctgtggagtctggctctctggctcctgtgcattctttgaatagtcactcgtaaaaactgtcagtgcttgaaactgtttcctttactcatgttgaagggactttgttggcttttagagtgttggtcatgactccaagagcagagcagggaagagcccaagcatagacttggtgccgtggtgatggctgcagtccagttttgtgatgctgcttttacgtgtccctcgataacagtcagctagacacactcaggaggactactgaggctctgcgaccttcaggagctgagcctgcctctctcctttagatgacagaccttcatctgggaacgtgctgagccagcaccctcagatgatttccctccaaactgctgactaggtcatcctctgtctggtagagacattcacatctttgcttttattctgtgctctctgtacttttgaccaaaaattgaccaaagtaagaaaatgcaagttctaaaaatagactaaggatgcctttgcagaacaccaaagcatcccaaggaactggtagggaagtggcgcctgtctcctggagtggaagaggcctgctccctggctctgggtctgctgggggcacagtaaatcagtcttggcacccacatccagggcagagaggtctgtggttctcagcatcagaaggcagcgcagcccctctcctcttcaggctacagggttgtcacctgctgagtcctcaggttgtttggcctctctggtccatcttgggcattaggttctccagcagagctctggccagctgcctcttctttaactgggaacacaggctctcacaagatcagaacccccactcacccccaagatcttatctagcaagcctgtagtattcagtttctgttgtaggaagagagcgaggcatccctgaattccacgcatctgctggaaacgagccgtgtcagatcgcacatccctgcgcccccatgcccccatgcccctctgagtcacacaggacagaggaggcagagcttctgcccactgttatcttcactttctttgtccagtcttttgtttttaataagcagtgaccctccctactcttctttttaatgatttttgtagttgatttgtctgaactgtggctactgtgcattccttgaataatcacttgtaaaaattgtcagtgcttgaagctgtttcctttactcacattgaagggacttcgttggttttttggagtcttggttgtgactccaagagcagagtgaggaagacccccaagcatagactcgggtactgtgatgatggctgcagtccagttttatgattctgcttttatgtgtcccttgataacagtgacttaacaatatacagttcctccctcgtgccggggtaaacagcgtggctcgttggtggtcg

SEQ ID NO: 73423 - DNA, 1380 bp, Homo Sapiens
tgcggccgctccttctccgaccccacttccaagatgcgccacctggagacccacgacacggacaaggagcacaagtgcccacactgcgacaagaagttcaaccaggtagggaacctgaaggcccacctgaagatccacatcgctgacgggcccctcaagtgccgagagtgtgggaagcagttcaccacctcagggaacctgaagcggcaccttcggatccacagcggggagaagccctacgtgtgcatccactgccagcgacagtttgcagaccccggcgctctgcagcggcacgtccgcattcacacaggtgagaagccatgccagtgtgtgatgtgcggtaaggccttcacccaggccagctccctcatcgcccacgtgcgccagcacaccggggagaagccctacgtctgcgagcgctgcggcaagagattcgtccagtccagccagttggccaatcatattcgccaccacgacaacatccgcccacacaagtgcagcgtgtgcagcaaggccttcgtgaacgtgggggacctgtccaagcacatcatcattcacactggagagaagcctacctgtgtgataagtgtgggcgtggcttcaaccgggtagacaacctgcgctcccacgtgaagaccgtgcaccagggcaaggcaggcatcaagatcctggagcccgaggagggcagtgaggtcagcgtggtaactgtgtgataacatggtcacgctggcaaccgaggcactgacaacgacagccctcacacgtgaagaccgtgcaccagggcaaggcaggcatcaagatcctggagcccgaggagggcagtgaggtcagcgtggtcactgtggatgacatggtcacgctggctaccgaggcactggcagcgacagccgtcactcagctcacagtggtgccggtgggagctgcagtgacagccgatgagacggaagtcctgaaggccgagatcagcaaagctgtgaagcaagtgcaggaagaagaccccaacactcacatcctctacgcctgtgactcctgtggggacaagtttctggatgccaacagcctggctcagcatgtgcgaatccacacagcccaggcactggtcatgttccagacagacgcggacttctatcagcagtatgggccaggtggcacgtggcctgccgggcaggtgctgcaggctggggagctggtcttccgccctcgcgacggggctgagggccagcccgcactggcagagacctcccctacagctcctgaatgtcccccgcctgccgagtgagctggcggcccttctgactgtttatttaaggatggatggcaccctggaaccgggaagggtggcctgttccctagagagaataaattggattattttctaaa

SEQ ID NO: 73424 - DNA, 597 bp, Homo Sapiens
agtttgtcaggttatatatagaatttctattaaggattttttaaatggacaagcaatagggggttgaagtgtttatctgatttgtttaaaattttgtatatcaccaaatttttaaaaagtgatagtcacagtgctaagttatctagttggctactattacaccttaaaaattgagtttacacacacacaattacctgtttatatggtgctcatttgttattctcaaatataatgtgtgaccgtgatatagtgagaaagattctaccaaccactgtttcactactttttagttaaaattgggtatgttcttaatattcattagtgagaatcacaaagtattttgtagaaggcccaaatcacagaataaaggactaagagtggatttgctgacattccatactaatatacattgtttatgctttctttaaaataactagaagaacataaaagaaagagaatctcagaagtagtttgctgctaatatatacatatattgtataaaaaggtatattttggttttgttaaaacccctgttgacttttctacactgaacaattttttcaacttgatttaataaaaatgtttaatttggaaaaa

SEQ ID NO: 73425 - DNA, 916 bp, Homo Sapiens
  misc_feature (433)..(462): n is a, c, g, or t
tcgaggccggggttaatcggcacgaggcttctacatcccacatcaggtatattagagcttatccgaactggggaaagacggattgagattaactgctgggacctcctacctgcattatctcattctggcttccttgataattctgtgggcctgcagctttaactatagctcagctgctgcaagatttcagacttttgaggatgttgtgtgagggtgtttgactgtgactggggaagctcagactacttgtatgtgaatgcttcagggttttctttgtcgagaacaactagcaacaaaggcaacccatgtgtgaccagttctccccaaggtctatgctaaattatagcaagagccctgggcaaccccaaacctagtcctggtagctgagcaccctgtaaggcaggagcaggcagctcagcttgagcagacattnnnnnnnnnnnnnnnnnnnnnnnnnnnnnnaggcagcacagtgcagcaaatgtttcttgggaggaagaagcctgatccatcaccatctgcttgactatgtagcttggattctcctttgtacctatccctttcgatttggctttaccttcatctatcttgatcctttcctggccaaatatcctcttgggcccaaatgaacattgtaccatagtcttctggaaagcaaacatgcttcctgctatgtaattgctaacattcatattagatgatgtgctgtagcttgatcttccttagcctactgccactgaggcagtaggttttaggtggtatcgtagtgccttttgattaatttaagtatttaattttcatcttccttctttggatctatttggcctctcaaatgaactgagattcctgttaaaaaagattgatgttattgtctcttgtagaggaaactaataaagtgtgtgtacctgtgtgaaaa

SEQ ID NO: 73426 - DNA, 1173 bp, Homo Sapiens
  misc_feature (942)..(1041): n is a, c, g, or t
  misc_feature (1050)..(1064): n is a, c, g, or t
  misc_feature (1070)..(1089): n is a, c, g, or t
tttatcacaaggaaaactgcaatacccacttccttgacagagttactcctttcagaagctaaataaagtatataacttattagatgttatatagatacagggggactttgaatttcacatcttaaagcagttgagctactttgaatttaagcagtcgtactaatcttaaattgcatagcatttgttttgatcgaatttgctgctcaagtatgggaataatttttaatgtcttaatgattggtgctgctaacttgcgtgatttcagaagacataattgtgaatacacactgtcagaattgggggattggtttttaccctagacttcactcttaaaaagcaacgtgcaatcaagatcatttatggctcaaatgaaagcatataaggttttcttgaagttgtgccaaagcattctgtagagtaggatgagatggttgttgccctagtctgttggtagaaccagaaatcaatatgttgtcttttaggttaaagcttgtaccaaaatatttatttcccccatttcaagccctgagtcaaacatttttttctcttaataatagacctgaaatgttttattagtatttctgtgaaatcagttgattcttgtgccatttttgtatatgtaattgtaattttgcccatgttaggccctctaaaaaatgtttgacatcctttgagatattttattactaaaatctgatcttttttggctactgcaaaaatctattcagcaagaaggtatcagctgcataccttgcacagtggagctgactacctataaactctccctaaggcatttgtttacaggtgtattccattttagcagacgttctgatgctcagtgtatgtgctgcatacaaataaatgtgttctgaatcttttcatcttattgatagcatttttacaaatgtgtttccaaggaataaagattattcttgcttttannnnnnnnnnnnnnnnnnnnnnnnnnnnnnnnnnnnnnnnnnnnnnnnnnnnnnnnnnnnnnnnnnnnnnnnnnnnnnnnnnnnnnnnnnnnnnnnnnnnccttgtcgnnnnnnnnnnnnnnnaaaaannnnnnnnnnnnnnnnnnnnggcccccggccccaaaaggaaaggaaaatgggccaaacttttttccaaaaaaacccgggcaagaaaaagggtttgaattccccc

SEQ ID NO: 73427 - DNA, 1444 bp, Homo Sapiens
  misc_feature (79)..(145): n is a, c, g, or t
  misc_feature (1361)..(1371): n is a, c, g, or t
gcctctgctaggccagtatatttctgtacaaacaagataatgcaagatttgacagttaaggctttgaagcacagcacannnnnnnnnnnnnnnnnnnnnnnnnnnnnnnnnnnnnnnnnnnnnnnnnnnnnnnnnnnnnnnnnnngccttcacagaaagagactgacactcgactccccccctgctgaggtgtggccagtgagtctgggtgtgagctgccacctgacagccagctctgaggtatcaaaggagctccgagtgcaagttgaagacttcagcaagccagcccccggcccccacacccgttcataggcagtcggaatgcagatctcggtggcaggtggctctgcacagtccagagtgataaaacaatcacagatgactaaatgccagggactgtgtgaagtcagttactgcctgcagtctgggtcactctgcccttcatcagacactggtggcaccatgacagtgaggagaacggagccacagttccttccgtgcctcctgccggcgctgctcaaggtgtgcatggctgagtcctggacaagcattttgtatttttgtagttctcactccttaggcccaatttcaagttaagtcgttaactcatttagaatgaatattaaggatactgcctctaacatatcaatagctgtgctgagctgtctaggaagagaaattagtccagagaggtcctaagtatcaaagcagattttgtaaagaaaaaaggcaacacgtcagtgagaaaagcagcacaagatccgggctcggggactcttttccctctttccgaaacataactggttttgtatgtgctctgagtcctagtttttatgtcttggctgagaaccacagaaaggactagatattcatacatgcgagagcacactgagactgcatgtttatttggcataatgctagaaaaaagtccgcaaagaactgccagaaccaggcctgtgaccaagtttacagtcatctagtttctctcacaatttcaaaatgtcagatcagaagaatctttggcgattaatccactctccattttatgcgtgagaaaaccaaggccctgatggtgtccctggtccaagtccagtgcctttcacaatgaggcttttggctcttaccctctgaagtggggcagtggctcactgtgaggggagagggtcagatcttgttagtttgatcttaaggcactcacaaaatgccctgatttttcttgtctttgtgagaagacaaaaaacagtctggtagtttttcacatcatcgtgggaacccagaaatatatgtacagtactcagaatttaagggaatggaagaaagaagaaaatgagattctcttttgtgagtacagaattagaagnnnnnnnnnnngagggttgtgcagtgccagtggtcgaacgggcacagttcattactgcgtgtgtggctgagctacaagtctcct

SEQ ID NO: 73428 - DNA, 704 bp, Homo Sapiens
  misc_feature (100)..(114): n is a, c, g, or t
  misc_feature (251)..(260): n is a, c, g, or t
tatgtgccataaatagaagctctgcccccagagagaagagttctttagcagcaaaactccagtttattaagacaggtgtgacaagtaaaataaaattcannnnnnnnnnnnnnngcctctgctaggccagtatatttctgtacaaacaagataatgcaagatttgacagttaaggctttgaagcacagcacacaaaatgaaacaatttaaaaccccttcataaaaatgggaaaaattcccaggccaaaggnnnnnnnnnngccttcacagaaagagactgacactcgactccccccctgctgaggtgtggccagtgagtctgggtgtgagctgccacctgacagccagctctgaggtatcaaaggagctccgagtgcaagttgaagacttcagcaagccagcccccggcccccacacccgttcataggcagtcggaatgcagatctcggtggcaggtggctctgcacagtccagagtgataaaacaatcacagatgactaaatgccagggactgtgtgaagtcagttactgcctgcagtctgggtcactctgcccttcatcagacactggtggcaccatgacagtgaggagaacggagcacagttccttccgtgcctcctgccggcgctgctcaaggtgtgcatggctgagtcctggacaagcattttgtatttttgtagttctcactccttaggcccaatttc

SEQ ID NO: 73429 - DNA, 714 bp, Homo Sapiens
gtgtcccccccaggtggtcaccgtgctgatgaccacgctgacgaagctgccctcccggagccaagatctgatccccagggcctctttattgctgtcaaagatgaggaccctggctcacagtccagccaccagctccacgcacagcgaggagggcgcggaagccatccgtacccgggccacagagctgctgaccctgctgaagatgcctagcgtggcccagtttgtgctcacacccagcacggaggtgtgcagcccccgctatcaccgcgatgccaacacggccctgcccctggccctgcgcacggtcagccggctggtggagagggaggccggcctcatgccagggtgaagggacagtggccagggacttcggtgcagattaagagcctgggcagccagcttgctactgaggccaggctgataggagctcaggagggcgcgggagtcctgggagaggaggcaaggcccacggtgggcttggcaccctcacagacacgcggggctggcccccctgctcaccctctgggctttgtctccgagccttttgctcccaggcaacactgagctgagctgaggggtgccatggagcggctctgattggaggcttgaggccctgtggctgggtcgggtggaggctgctgggtctgtttcctagtcttttgtttttggacagttgatgggcaagaagagctgcagtaaaagtaaatctccttt

SEQ ID NO: 73430 - DNA, 955 bp, Homo Sapiens
  misc_feature (684)..(762): n is a, c, g, or t
  misc_feature (765)..(842): n is a, c, g, or t
  misc_feature (912)..(912): n is a, c, g, or t
  misc_feature (929)..(929): n is a, c, g, or t
ggaggaggggctagaaattaaaagattctagcccttcagattaaatcatgtaaaggtcagattttttttctgtgtgggaaaatgaattatcttccatctaagattgaaaaggctctacttttatctaggcaatgaccatgaaaagatcatattcacttcagaaagggaagaagcagcagggaacatagttcctttcagaagattttaaaaatatacgtatacagagaaatagattataaattcagtttcagaaaaaaaccctccaaaaccaaaaacaacactaaactttaatggcatactgtagatctgccaaaatgaggcaaatgcagaacataatgacggtatcacaaaaatacatttttaaatggtcaatttagaaagggtacttttgtataaaggttcagtaaatcatttgacaagtatttttaaacagtaaattttgtaaagtgtgaagtctatggaaatgtcaacacaaggcacattaggttctgaatgaccacaaaagtttaaaattagaaaaagggaaaataaataggttttaaagtggaaatgcagtaagttctgtatgttcactatttactttcttagttttcattccttctactgtaatgttatgctataatgtgagatctacatcagaattggtaggaaaaacagcttctctcttctgtcacctcaacaaannnnnnnnnnnnnnnnnnnnnnnnnnnnnnnnnnnnnnnnnnnnnnnnnnnnnnnnnnnnnnnnnnnnnnnnnnnnnnnacnnnnnnnnnnnnnnnnnnnnnnnnnnnnnnnnnnnnnnnnnnnnnnnnnnnnnnnnnnnnnnnnnnnnnnnnnnnnnncaatgatttattcacaaggggtagaaagatggctgctcctaaatgctcagaggagatgtacaattttctnttggagtttcacaccanaagggaaaattttatcaaggatttac

SEQ ID NO: 73431 - DNA, 3032 bp, Homo Sapiens
  misc_feature (22)..(22): n is a, c, g, or t
  misc_feature (48)..(48): n is a, c, g, or t
  misc_feature (51)..(51): n is a, c, g, or t
  misc_feature (101)..(101): n is a, c, g, or t
  misc_feature (103)..(103): n is a, c, g, or t
  misc_feature (109)..(110): n is a, c, g, or t
  misc_feature (120)..(121): n is a, c, g, or t
  misc_feature (123)..(123): n is a, c, g, or t
  misc_feature (131)..(131): n is a, c, g, or t
  misc_feature (147)..(147): n is a, c, g, or t
  misc_feature (160)..(160): n is a, c, g, or t
  misc_feature (163)..(163): n is a, c, g, or t
  misc_feature (168)..(168): n is a, c, g, or t
  misc_feature (193)..(193): n is a, c, g, or t
  misc_feature (225)..(225): n is a, c, g, or t
gcactgcggtgaagggaggctntgcggactgatcagaccatgccagantgntattcctggactgcccgggtgtgacaagagtgagggaggtgaggtatcgntnggactnncatgttggcnntncatgcgangagagctggaggggtnccagtgggggccncanggccncagtgacaaagctttgcctgtagcntctgcccctttgccactcactatcccaccacnctggccgggcacatgaagacacacagtgtgagaagcccttccgctgcgcccgctgtccttatgccctctgctcatctggataacctgaaacggcaccagcgtgtccatacaggagagaagccctacaagtgccccctctgcccttatgcctgtggcaatctggccaacctcaagcgtcatggtcgcatccactctggtgacaaaccttttcggtgtagcctttgcaactacagctgcaaccagagcatgaacctcaaacgtcacatgctgcggcacacaggcgagaagcccttccgctgtgccacctgcgcctataccacgggccactgggacaactacaagcgccaccagaaggtgcatggccacggtggggcaggagggcctggtctctctgcctctgagggctgggccccacctcatagcccaccctctgttttgagctctcggggcccaccagccctggggactgctggcagccgggctgtccacacagactcatcctgaactaggtccttcttccccatgttttatacagacggaccagaagccacctttttctcccccgctggccaggggctccacacagactaacgtaggcactataaggaccagcccaaccccatgggcgggggggcccatatggaccaggggaccttgccttgactgaggcacttcacgagctcagtgagaagggccctgtattcacctccactgcccccaggggctgtggacaaaccggctgggggactgcccagcctcccacctgtttatttaacttatttcagtgctttataataaaggaaacactaacaaagccatgtctatgctgaattggcaatggcaggcaatttggccttacccttagcatagtagtccatgctgtgatgggggaagcaggggcagtgagagggaaccagaggtaggcagcagtcaggctgagtttaatgatggggaactgggccagaccaaacacagacctctgcccatccccttggcctttggcccatggctccaagaggccagaagcggcccagagggagatatggttcctccccaaggcaggcagccatggtcccttagactttgtgcaaaatactaaatgctaatttggcatcgagggccagctctgaaaagagaaggggcaatcctctgtgcagccagcccaggggacaaggaaaggtaggatacgaggcccctggccaagagaaaaggggtaggtaggaaagaagaaggaaaagacccctccgcccctagcatgggggacacaggcacagggcaagtttctgtaaattcctctggggtagagggcagacatccaagcagtggagattacagatcctcatctccaatgccctcgaaggcgaaattgccgtggacatcactggcactggcatctgtgctgggactgccaattccccgcaagctcacggcactcagcttacttgagagtttgaccatagactcccgggtggcatcaggtgactcaagcagtggtggggacttcactgcttgctggctgtctgagcgtctcagagtaccccccacccgccggcgcagcatcttcctgatactgccgccagatttcttcaccatcagttcatcaaccatggactgcaagcagatgctcatcatgatagcctgggggctagtgatggtgacccactgtagccggtccttgctcatgaggtattcaaaagccagttccaggcgcacctcaccccggccccggcctgggctgctcgtgcttccactgggcaatggtacagaggaggtgacccgccagcatcgcatgcgggtgacccggaaggagccttctcggagttgctggccaggcaggcggagctgcaggctgagctcactgttgcccgcgctcaccaccacaggacagtccttttctgggaagtcagccacacaggcatcaaagcgcaagtagccatagtgccgcagcgtctgggccagtctcaggaactccttcttggagactttctcttgcagagatttgagttgccggtgctgttccttggtgaccaagatccacccacgctcaatatctgataccgtctgagcataaagcaggttcaggccaacccggttctccatgacatcgtcatcataggcagagtcccaataactcttccttagcacaatcttatactcttgactccgaaggctggtgacagacacataaggcagctcaaactcttgcaacttccgtacaaaagaaaaggctccatcctctttttctcgaactaagaatagactaaagtatccaatcaagtcatctggaagatccagctttgcagctacagcctccaggacatcctcagtctgatctgaagttagcacgttgaccagaactttctgcccgttgctgagcagcacttccaaggacacttcctctgtggggacctgctgtgtctcctgttgtgcccgacgcaggaaactgttgaaagtctcgctgctcccaagcaatgggtcttgccgaacagcttgcatgtacttctctaactgctctctcctctgttctacctcagcaggagtcagagagaaaagcttctttggggggaatgcaggaagcacattggccccatactccttccgaagcacgtaggcggagccgccgctgtccccgctgcgggactcggtttcgggaatggaaaagtgcatgttccctacggcacggcacggccgggctccggactgtgagggccgcagcggctctgcacgctccccctccgctgctcagcgagtccccgcagcctcactcgcccctcgtgccgaattcgccacccaggcctcgctacctt

SEQ ID NO: 73432 - DNA, 1070 bp, Homo Sapiens
ctgcatgagtgactatagaccactgttaataaagcaggctggtactggtccggaatcccgggatatcgtcgaccacgcgtccgcaaatggcgagtgaggctgcggggactcgctgagcagcggagggggagcgtgcagagccgctgcggccctcacagtccggagcccggccgtgccgtgccgtagggaacatgcacttttccattcccgaaaccgagtcccgcagcggggacagcggcggctccgcctacgtggcctataacattcacgtgaatggagtcctgcactgtcgggtgcgctacagccagctcctggggctgcacgagcagcttcggaaggagtatggggccaatgtgcttcctgcattccccccaaagaagcttttctctctgactcctgctgaggtagaacagaggagagagcagttagagaagtacatgcaagctgttcggcaagacccattgcttgggagcagcgagactttcaacagtttcctgcgtcgggcacaacaggagacacagcaggtccccacagaggaagtgtccttggaagtgctgctcagcaacgggcagaaagttctggtcaacgtgctaacttcagatcagactgaggatgtcctggaggctgtagctgcaaagctggatcttccagatgacttgattggatactttagtctattcttagttcgagaaaaagaggatggagccttttcttttgtacggaagttgcaagagtttgagctgccttatgtgtctgtcaccagccttcggagtcaagagtataagattgtgctaaggaagagttattgggactctgcctatgatgacgatgtcatggagaaccgggttggcctgaacctgctttatgctcagacggtatcagatattgagcgtggggtgggatcttgggtcaccaagggaacagcacccggcaactcaaatctcttgcaaggagaaagtcttccaagaaaggaggttcctggagactgggccccagaccgctgcgggaactatggggctactttgcggcttttggatgccctggggtggggctggactttccccagaaaa

SEQ ID NO: 73433 - DNA, 1212 bp, Homo Sapiens
  misc_feature (1030)..(1040): n is a, c, g, or t
ggcagtaactataacggttctaaggtagcgaggcctgggtggcgaattcggcacgagggagtgaggctgcggggactcgctgagcagcggagggggagcgtgcagagccgctgcggccctcacagtccggagcccggccgtgccgtgccgtagggaacatgcacttttccattcccgaaaccgagtcccgcagcggggacagcggcggctccgcctacgtggcctataacattcacgtgaatggagtcctgcactgtcgggtgcgctacagccagctcctggggctgcacgagcagcttcggaaggagtatggggccaatgtgcttcctgcattccccccaaagaagcttttctctctgactcctgctgaggtagaacagaggagagagcagttagagaagtacatgcaagctgttcggcaagacccattgcttgggagcagcgagactttcaacagtttcctgcgtcgggcacaacaggagacacagcaggtccccacagaggaagtgtccttggaagtgctgctcagcaacgggcagaaagttctggtcaacgtgctaacttcagatcagactgaggatgtcctggaggctgtagctgcaaagctggatcttccagatgacttgattggatactttagtctattcttagttcgagaaaaagaggatggagccttttcttttgtacggaagttgcaagagtttgagctgccttatgtgtctgtcaccagccttcggagtcaagagtataagattgtgctaaggaagagttattgggactctgcctatgatgacgatgtcatggagaaccgggttggcctgaacctgctttatgctcagacggtatcagatattgagccgtgggtggatcttgggtcaccaaggaacagcaccggcaacctcaaatctctgcaagaagaagtctccaaagaaggagtttctgagactgggccagacgctgcggcactatggctacttgcgcctttgaatgccctgtggtggctgacttccccgaaaagaacgttcccccnnnnnnnnnnnaaaccccggccaaaacatggaggcttcagccttgaacctcccccctgcctgggcaaaaaaacttcccaaaaaagggtcctttccgggggcacccccctatggccaaatgctgggcggggtcacccctccctttggaaccatttggccccaggggggaacaccaaacaacccc

SEQ ID NO: 73434 - DNA, 948 bp, Homo Sapiens
  misc_feature (322)..(323): n is a, c, g, or t
aaggtagcgaggcctgggtggcgaattcggcacgaggctcgctgagcagcggagggggagcgtgcagagccgctgcggccctcacagtccggagcccggccgtgccgtgccgtagggaacatgcacttttccattcccgaaaccgagtcccgcagcggggacagcggcggctccgcctacgtggcctataacattcacgtgaatggagtcctgcactgtcgggtgcgctacagccagctcctggggctgcacgagcagcttcggaaggagtatggggccaatgtgcttcctgcattccccccaaagaagcttttctctctgnnactcctgctgaggtagaacagaggagagagcagttagagaagtacatgcaagctgttcggcaagacccattgcttggggagcaagcgagactttcaacagtttcctgcgtcgggcacaacaggaagacacagcagggccccacagaaggaagggtcctttggaagtgctgctcagcaacgggcagaaaggtctggtcaacgtgctaacttcagatcagactgaggatgtcctggaggctgtagctgcaaagctggatcttccagatgacttgattggatactttagtctattcttagttcgagaaaaagaggatggagccttttcttttgtacggaagttgcaagagtttgagctgccttatgtgtctgtcaccagccttcggagtcaagagtataagattgtgctaaggaagagttattggggactcctgccctatgatgacgattgtcatggaggaaccgggtttgggcctgaaacctggctttattgctccagacgggtatcaagaatattggagccggggggttgggatctttgggtcccacccaaggaaaacaagcccccggccaaacctccaaattcttcctggccaagaagaaaaagtcctcccacagggaaagggac

SEQ ID NO: 73435 - DNA, 1030 bp, Homo Sapiens
  misc_feature (130)..(130): n is a, c, g, or t
  misc_feature (161)..(161): n is a, c, g, or t
  misc_feature (164)..(164): n is a, c, g, or t
agtgacacctgatttgcgtatggatggctctgccctatttcctctgcttgccctgatgcagctgagtcagaggctgttcatctcagcccctcagcagcactggggagaaagcatgtcacacagtcttttntgccctcaccaacagcctggcactgccctcntcntcctgacagcctcccccttcctgcaaaggacaggggcgacaggggttgtgttgggattggctcccgctgcctgacaaccacaagtttatttggaaggctagcgggaagcccagcggctggcgtttcccttgactaaggaacagggtgcccatcagagtggggcgggcagctttgggaaggacacaagaagcagtaagagtgtaaagaggatgctggcctgggcaggtcagtccagcctggccactagcagaatgctaagcagtccagtggattaccctcgtggctaagcaagtgtctgcaggagcagagatggctggaaggggcctctgcacacggaagatggcttgttcagcccattcacctcctgaggatgtgggcagtctcctccaagaacacatggagctgcttcctgatcccaagcaggtcattgccactggaaggacatggccccggtgatccatgcttcatgcccacccagaaacacacccctcagtgtgtgcctcagtttactttggagatcagttgtcgtttttagtgctcctttaggcttactaaaacagttttggaaacaaagctattttgaagtattcaagcagaggaattccctaacactgacccccttgtctttttttaatattcaggctgttttatatgcctaaatttttttcttaagatctaaacgaaaaatagtttcttgtttaaattcacataaggcaatgagatatggaaagatgacaagatacgtataaacattggtttgcattttattaaattattctaatgcaaatcttgtataaagaacccatgatgttttgtaactttctaattaaaatgttcaaaatgaggccgagcatggtggttcattc

SEQ ID NO: 73436 - DNA, 2376 bp, Homo Sapiens
  misc_feature (1853)..(1853): n is a, c, g, or t
  misc_feature (2090)..(2312): n is a, c, g, or t
gcttggcctggattttatcttgaaatacttttgacagctggctggttgagggtatctgctcacaggaacgccgcatttgctggctttgtccactagtgctcgcccctggctgctgatgcggagcctcacgtggccgcagcccaagagtagggactggcttggccacctacaggctaagcttcgggctcccaggtggctgggagggccaggggtgcacaggtgcatcagagcaggtgctgccttgctggagggccagggctcttctggccagggtccaggtcatcattgtccccagccaggaatccaaggggcctttccaaacctgcgcaccccagcagccttccgccctccgcctgggctcaggggagcagagcctggaagacggcaatgacagggtcctcgtgggtggtcaccaccagcacgctgcggaacttgtcaaacagcatgagcagctgggagcgccgcgtgttctcgttgtacataatctcctccaggtggtggcggccgcggaagtagtgaaggagcctggcaaacatgcggaggtcctcagggttctgggctgcgggtacactgaggatggctgcgcgttcatgctccgacaggctggccagcaggttctccgtcatcctctggttcagtggcgagtccccgctgggaagtagctctgcgctggagttgtccatgctggggctggtgagggtcatgtcatcgctgctggttggggagccaaagctgagggcgttgggcgtgctgaggctgcgaccgccgacccgggcagtgaaggggacgtcgtcctctcgcggacggggctcctcctcgctgggtgaggccatcaggcagacataggtgtgcagctggatgagaagccggcgctgcagcatccacaccaccatctggatgagctgggtctcctgcacagcgggggccaggggattcctaaattctgacaaggagaccggcaaggagaacttggcaagaacggacggcaggtcatgagatgggaactggtgggagaactgctcggccagcggggagtacagacatacgctggcattgggagacagcatgtagacgttgttctcacacagcgggtagatgatgatggccttgccccagtacaccagatgagctgcaagctggaaaacctgcagcaaggccaggtccgcatcttgggctagctgctgcaggttcttcacagcagatgtggtcttgatcacccgcactagggcaggggagcagtcaataggaagctcacccagcaaggacttctcatcactgagcagcagcagggcatggtaggggcggatggctttcaggctccgttcgatggcctctggggggatcagactggaggccgcatagtggatcttgtggggcaggcagaagctcacctccagccagctgttgatgtgaagccgaactacgcccgacgtgcacaggctgtcataagcttccttgaggtccctggccagcttgcacttgggcaggatgtgatggaatggggactgaggaccttcatttccatcagccatggcggacacctcatcctggagcgccaggatcagcttggcctcccgggtgaggtactggcagcggcgctcctcgtgctgcagcacggtggcgatacgacgggacaggttatgcagacagtttatcactgacgggtctgcgttggccctcagtgcaaacaccacattaaaaagaatcatagtaggtgcttccctcttcggggaaggatctgttttggagatctgccccagagcatgctgtagcagtgttgggtgcccaacaaatcgcacattatcaatcttcagttcaaatttttggccacacatttcagacttggttgccanaaattgttgccagaataacatctgaaaacctggaatcgccgtcttgctcatcagcatggtcgcccgtgttgctggcagcgtatctgctacgcggcttacttgtctgggacgccgggtgctcctggcttctctggaaggggtacctgaacagcagcttattgcccctgctccccgagctcaccagaatcacgctgatggggctggtgttgtcccgcatcccgccgtggggccggggcnnnnnnnnnnnnnnnnnnnnnnnnnnnnnnnnnnnnnnnnnnnnnnnnnnnnnnnnnnnnnnnnnnnnnnnnnnnnnnnnnnnnnnnnnnnnnnnnnnnnnnnnnnnnnnnnnnnnnnnnnnnnnnnnnnnnnnnnnnnnnnnnnnnnnnnnnnnnnnnnnnnnnnnnnnnnnnnnnnnnnnnnnnnnnnnnnnnnnnnnnnnnnnnnnnnnnnnnnnnnnnnttgtggtggagggagcagcgccaccctcgtgccgaattcggcgcgccgtcgacttcatactctc

SEQ ID NO: 73437 - DNA, 1140 bp, Homo Sapiens
  misc_feature (95)..(95): n is a, c, g, or t
caaggagcgagcctgggtggcgaatttccgacgaggccagaaccctgaggacctccgcatgtttgccaggctccttcactacttccgcggccgcncaccacctggaggagattatgtacaacgagaacacgcggcgctcccagctgctcatgctgtttgacaagttccgcagcgtgctggtggtgaccacccacgaggaccctgtcattgccgtcttccaggctctgctcccctgagcccaggcggagggcggaaggctgctggggtgcgcaggtgggcgctcgcgtctccccaccccagggctccccccgtgctgaggctgagccctcttggccctgaggcctggcattgggtggatgcgggctggccgtggcccagtgaagcctgcagagccccgctgtccttgcccctggtggttccgctgtggggctgctgccctctgtgttcctacgcttccctccagtccttgccgcacgcgtaggcatctccacgctggaggggggcctgccaggactcctgtctctgggtgaggccgcatccttcaaggcccatgtgggctgtgcgtttctcagaccctccttctgtccctacacctgctccttggaccccccagtctgtggccaccctgaagaatgtgcagaaacacttgtgtggcctgtccctgtctctctgacagccttccatttgtgaagtgccctgtggccccctccccagcacctctgtctgccatgcgcttcttcctcccaggctaccctgagcctttcctggcccagtcctcaccacagtccacagaagccacaaacaggctcatagccaagctgtgacctggtcctgaccatctggggcacgagggcctgggctggccctgctaggctggagaagccctgtcacctgtgcacatcttgctggtggaggcatggcccactgtgcaggaccccaccctcgggggctttcggctcccacactgatgattctccccagcatccacaccgggcctggcgctacgtactcaggcccccagctctcgtgtcctggaggaagagctagctccagacatgggttgatcacctagaggagctctggctaaggcacagttttctagaaataaaacatttattcggtttttaaacaatttaaaaa

SEQ ID NO: 73438 - DNA, 840 bp, Homo Sapiens
  misc_feature (781)..(798): n is a, c, g, or t
agattgaaggacaagttgtgccctgaccatagatgatatcgcttctcgctcaacaacaactcaccaaacatcagatattctgagaacgccgtgaggattgagccaaactccgtgagtctggaagactggttggacttctccagcaccaatgtggagaaggctgacaagcagcggaacaactccctgatgctgaaagccctggtggatcgaatcctgtcccagacagccaatgatctgcgcaagcagtgtgatgtggtggacacggcattcaagaatgggctgaaggatacaaaggatgccagggacaagctggctgatcatctggccaaggtcatggaagagattgcttcccaggagaaaaatattacagctcttgaaaaggccatccttgaccaagaagggccagccaaggtggctcatacgcgcttggagaccaggacacaccggccgaacgtggagctgtgtcgtgatgtcgcacaatataggctaatgaaggaggttcaagagatcacccacaatgtcgcaagattgaaggaaactttagcccaagctcaggcagagctgaaagggctgcatcgcagacagcttgccctgcaggaggagatccaggtcaaagagaacaccatttatatcgacgaagtgctgtgtatgcagatgaggaaatccatcccacttcgggatggggaagaccatggggtctgggctgggggcctccgccctgatgctgtctgctaatagtagggctagttccaattctcattaaaccacattgtaaacagtnnnnnnnnnnnnnnnnnngcctacagccgcggccgcaagcttattccctttagttgaggg

SEQ ID NO: 73439 - DNA, 1700 bp, Homo Sapiens
  misc_feature (1375)..(1390): n is a, c, g, or t
gataacttctcagtgggggaacggcagctcttgtgcatagctagagccctgctccgccactgtaagattctgattttagatgaagccacagctgccatggacacagagacagacttattgattcaagagaccatccgagaagcatttgcagactgtaccatgctgaccattgcccatcgcctgcacacggttctaggctccgataggattatggtgctggcccagggacaggtggtggagtttgacaccccatcggtccttctgtccaacgacagttcccgattctatgccatgtttgctgctgcagagaacaaggtcgctgtcaagggctgactcctccctgttgacgaagtctcttttctttagagcattgccattccctgcctggggcgggcccctcatcgcgtcctcctaccgaaaccttgcctttctcgattttatctttcgcacagcagttccggattggcttgtgtgtttcacttttagggagagtcatattttgattattgtatttattccatattcatgtaaacaaaatttagtttttgttcttaattgcactctaaaaggttcagggaaccgttattataattgtatcagaggcctataatgaagctttatacgtgtagctatatctatatataattctgtacatagcctatatttacagtgaaaatgtaagctgtttattttatattaaaataagcactgtgctaataacagtgcatattcctttctatcatttgggtacagttggctgtactagagaactggtttgctattagactgtaggaagagtagcatttcattcttctctagctggtggtttcacggtgccaggttttctgggtgtccaaaggaagacgtgtggcaatagtgggccctccgacagccccctctgccgcctccccacagccgctccaggggtggctggagacgggtgggcggctggagaccatgcagagcgccgtgagttctcagggctcctgccttctgtcctggtgtcacttactgtttctgtcaggagagcagcggggcgaagcccaggccccttttcactccctccatcaagaatggggatcacagagacattcctccgagccggggagtttctttcctgccttcttctttttgctgttgtttctaaacaagaatcagtctatccacagagagtcccactgcctcaggttcctatggctggccactgcacagagctctccagctccaagacctgttggttccaagccctggagccaactgctgctttttgaggtggcactttttcatttgcctattcccacacctccacagttcagtggcagggctcaggatttcgtgggtctgttttcctttctcaccgcagtcgtcgcacagnnnnnnnnnnnnnnnnccctcaaagtctgcaactttaagcagctcttgctaatcagtgtctcacactggcgtagaagtttttgtactgtaaagagacctacctcaggttgctggttgctgtgtggtttggtgtgttcccgcaaaccccctttgtgctgtggggctggtagctcaggtgggcgtggtcactgctgtcatcagttgaatggtcagcgttgcatgtcgtgaccaactagacattctgtcgccttagcatgtttgctgaacaccttgtggaagcaaaaatctgaaaatgtgaataaaattattttggattaagtaaaaaa

SEQ ID NO: 73440 - DNA, 4034 bp, Homo Sapiens
  misc_feature (3922)..(3956): n is a, c, g, or t
tgaggttgcagccgagagtgtgcgccagcccgcggccagcgaagctctttcccgccgctctccgcgcctcgcccaggttcagctccgcctgaccctccgcttggcacggtcccctgaccctcagtccggcctggtccggccttccagccgccccggggacgatgaacggaggataaatggtgcccaaggcagacagcggcgccttcctgctgctcttcctgctcgtgctcactgtcaccgagccgctgcggccagaagtgaccggggaggtgcgtcctcatcatgggaaggaggctgtggatccgcggcaggggcgggccagaggaggcgacccttcgcacttccacgcggtgaacgtggcgcagcccgttcgcttcagcagtttcctagggaagtgcccgacagggtggcaccactacgaaggcacggccagctgctaccgggtctacctgagcggggagaactactgggatgccgcgcagacctgccagcgcctgaatggctctctcgccaccttctccactgaccaggagctgcgctttgtcctggcccaggaatgggaccagcccgagcggagctttggttggaaggaccagcgcaagttgtggctcggctatcagtatgttatcactggccggaaccgctccttggaaggtcgccgggaggtggcattcaaaggctcttcagaggtgttcctgcccccagaccccatctttgcctccgccatgtctgagaacgacaacgtgttctgtgcccagcttcagtgcttccatttccccaccctgcggcaccacgacctccacagctggcacgccgagagctgctacgagaagtcttcatttctgtgtaaaagaagtcaaacatgtgttgacatcaaggacaacgtggtggatgaagggttctacttcacccctaagggggacgacccatgcctgagctgcacctgccatggaggggagcctgagatgtgtgtggctgctctctgtgagaggccccagggctgccaacagtaccgcaaggaccccaaagagtgctgcaagttcatgtgtctggacccagatggcaacagtctgtttgactccatggccagcgggatgcgcctggtcgtcagctgcatctcctccttcctcatcctgtcactgctgctcttcatggtccaccggctgcgccagcggcgccgggagcgcatcgagtccctgattggagcaaacttgcaccacttcaacctcggccgcaggatccctggctttgattacggcccagacgggtttggcacgggcctcacgccgctgcatctttctgacgacggagagggtgggactttccatttccacgaccctccacctccctacacggcatacaagtacccggacatcggccagcccgacgaccctccgccgccctacgaggcctccatccacccggacagtgtgttctatgaccctgcagacgatgatgcttttgagcctgtggaggtcagcctgccagcccctggggatggtgggagtgaaggtgcattactccggcgcctggagcagcctctgcccactgcgggggcctctctggcagacctggaagactctgccgacagcagcagcgccctgctcgtgccccctgaccctgcccagagcgggagcaccccagctgcagaggcactgccagggggtggccgccacagccgcagctccctcaatactgtggtgtagacggcctggcctgtaccccaacggtctgggagcacctgtctgttgtagaaaacaccggtccctggggagacttgaaaggcccctgtcccagcctggacgccacgcactgccgcacgtcactggcgggctcgcgtgtgtacatagagaccacagcccgccttctgccaaaagaagtgatggcctgcaccgagcttccttgagggcttcagaaacatgcatagctttggatcactgtcttctcctttataaatggcagaagagtgacaaaattcattcagaccgcacatgttagaggcagggaatgaagaaggtactgtgggccatggccacacctgatgcgtttttggtgggcctacttggtgcagtgtgctgtccagagagacctgctgacccagtctgggacaggcacagtgggagctgccacagtgcccccttgctggccgccctcaggagggggcctctggaccgtcagtgtggcgtaggcagtgggtctgcttcagggaggcaccctcttgactttgtcacaacggttgcactgaagatggcccccacaagcccagttgtgaatatcaaggtgaccctgcccctggctgggagctcccctggggctctggaacctgaagccctgagaaggagagcttggaaggaggttgagctcttcactgtgtctttccatctgggctctgcagcccagctctgtggcaggaggcctgaccccaccccatcagtccctctcccagcattgctgtgcatggctccctcaggaagaagctctggagtggggccgaggccccagatgctctgctggggtctggggactgagctgcctcctgtctctccactctggagccctgggctcttgcctcctgttgaattgcccctgggcctgcccccggccccatttgtgccataaagggttgcttcattgcaggaggggtggctgaaaccaccatcctgggctgcatctatctccttaaagtccactccttacatcaccgccactactgcagctcagtgcccagcggccgcatgcacacctcccggcccctcctcagcagcgcaggggctgggggcccttcctggcacccttttgcctgacggaccctgttgcctgctcctgggcagtggttttgttgcctgacacagggcctttaacatttctgaggtttggagattaagcgggttctgtgcgatttttagcacatccatatcttttctacgttgaatgtctggatctttcctttgtatgtttgtgtctctgtgtgtgtatgtggccaagcgtctgcaggtgagggtggcacatggaacttcacgggtcactgggggcccactcttccagggtcatcgatgcatcctgggctgtgctgaggcagtgctgtctcgctcagtctttccagaccagcggggcagcacctgggaggcctgtctgaagcatgcagttctgtggtgctgctcggggatggactccatgcacagtccacttcttgacacattctcacactgtggctggagacccattttttccatcccatgtggaatgagaatcttgagttgcccacagacagacttgacctttgtgccagaactgtccagagctgtgagttttgttactgaattgcctgtccctgagcttggcctgctggagcatgatgctggaggctgtgtgcgggcaggcttgtgctccccttggagaagggctgctacttaacaaggaagtcctggccacaagagtcccctactggctgcagaggacgaagcaggaagcatgccgtggatcccacatgcactggggcagggcagccaggttccagagcagcaggcatgtgcattatagggtgccaggtggccagtgagggccccttccccatgggcctccacaagcactcaggccactggcacgttgggccaggcagaaggtccacatggcagggctgcctggaacaccgctgccactgtggctccaggaggcccttgggagcatgaggagagctggactcgctcatctgttcttgcaccaccatccagaatgccccctttgcaaggcctgctgcagtccccagtctgaccagcaagtcccggggtcacccttgctgaaccttgtgctccaggggtcctcctcctctaggaccagcttgccacggtttctcagagcccaggtgccctctgacctgccatgcggaggtgggatttgatactgtacattgtcttgatgcctnnnnnnnnnnnnnnnnnnnnnnnnnnnnnnnnnnntggttgggttgacactaacttttcttaagatgctgtgagaatcatttcatccaaatgccaaataaacttgtgttccgg

SEQ ID NO: 73441 - DNA, 946 bp, Homo Sapiens
  misc_feature (830)..(865): n is a, c, g, or t
ctggagtcggtgcctgaggttgcagccgagagtgtgcgccagcccgcggcccagccgaagctctttcccgccgcctctccgcgcctcgcccaggttcagccccgcctgaccctccgcttggcacggtcccctgaccctcagtccggcccggtccggcctcccagccgccccggggacgatgaacggaggataaatgggtgccaggtggccagtgagggcccgaggaccacgcagcagagtcccccacgggcctgagcctgagagctcagaggattcctgccaggcctcagaactgtgtgtgcgggacagggtggctggcacgagatgtgtgggactgggacgcttcctttggggaccagaggaacattaggggccggtcagacacgtagggggcagtgaggaaacggggtaaagtggaccatgcaggctgcagagggtgggccttgggctggccggggttgctgggtggccccttccccatgggcctccacaagcactcaggccactggcacgttgggccaggcagaaggtccacatggcagggctgcctggaacaccgctgccactgtggctccaggaggcccttgggagcatgaggagagctggactcgctcatctgttcttgcaccaccatccagaatgccccctttgcaaggcctgctgcagtccccagtctgaccagcaagtcccggggtcacccttgctgaaccttgtgctccaggggtcctcctcctctaggaccagcttgccacggtttctcagagcccaggtgccctctgacctgccatgcggaggtgggatttgatactgtacattgtcttgatgcctgnnnnnnnnnnnnnnnnnnnnnnnnnnnnnnnnnnnngttgggttgacactaacttttcttaagatgctgtgagaatcatttcatccaaatgccaaataaacttgtgttccggaaaaa

SEQ ID NO: 73442 - DNA, 786 bp, Homo Sapiens
gtcggtgcctgaggttgcagcctgatgagtgtgcgccagcccgcggccagccgaagctctttcccgccgcctctccgcgcctcgcccaggttcagccccgcctgaccctccgcttggcacggtcccctgaccctcagtccggcccggtccggcctcccagccgccccggggacgatgaacggaggataaatggtgcccaaggcagacagcggcgccttcctgctgctcttcctgctcgtgctcactgtcaccgagccgctgcggccagagctgcggtgcaaccctgggcagtttgcgtgtcgcagcggcaccatccagtgcatccccctcccctggcagtgtgacggctgggcgacttgcgaggatgagagcgacgaagccaactgtccagaagtgaccggggaggtgcgtcctcatcatgggaaggaggctgtggatccgcggcaggggcgggccagaggaggcgacccttcgcacttccacgcggtgaacgtggcgcagcccgttcgcttcagcagtttcctagggaagtgcccgacagggtggcaccactacgaaggcacgggccagctgctaccggggtctacctgagcggggagaactacttgggatgccgcgcagacctgccagcgcctgaatggctctctcgccacttctccactgaccaggagctgcgctttgtcctggcccaggaatgggaccagcccgagcggagctatggttggaaggaccagcgcaagtagtgggaagggctatcaagtatgatatcactggccggaaccggtc

SEQ ID NO: 73443 - DNA, 1004 bp, Homo Sapiens
aggctggaccggtccggaacttcaaaaaattgcgcgcagctggagtcggtgcctgaggttgcagccgagagtgtgcgccagcccgcggcccagccgaagctctttcccgccgcctctccgcgcctcgcccaggttcagccccgcctgaccctccgcttggcacggtcccctgaccctcagtccggcctggtccggcctcccagccgccccggggacgatgaacggaggataaatggtgcccaaggcagacagcggcgccttcctgctgctcttcctgctcgtgctcactgtcaccgagccgctgcggccagagctgcggtgcaaccctgggcagtttgcgtgtcgcagcggcaccatccagtgcatccccctcccctggcagtgtgacggctgggcgacttgcgaggatgagagcgacgaagccaactgtccagaagtgaccggggaggtgcgtcctcatcatgggaaggaggctgtggatccgcggcaggggcgggccagaggaggcgacccttcgcacttccacgcggtgaacgtggcgcagcccgttcgcttcagcaggaagtgcccgacagggtggcaccactacgaaggcacggccagctgctaccgggtctacctgagcggggagaactactgggatgccgcgcagacctgccagcgcctgaatggctctctcgccaccttctccactgaccaggagctgcgctttgtcctggcccaggaatgggaccagcccgagcggagctttggttggaaggaccagcgcaagttgtgggttggctatcagtatgttatcactgggcggaaaccgctccttgggaggtcgctggggaggtggcattcaaaggctctttcagaaggtgttcctgccccccaaaccccatctttggcctcgggccatgtctgagaaacgacaaacgtggttttgtgcccagccttgcatgctttccatttctcccaccctggcggaaacaccaaacctcccacaattgggcacgccc

SEQ ID NO: 73444 - DNA, 932 bp, Homo Sapiens
ccgcgtctctcccaccatgcactagtacactatagaaccacgtttgttaaaaaaagcaggctggtaccggtccggatattcccgggatatgtcgaccacgcgtcgcggacgcgtgggggcggggcgcagccttgcgaagccctaacgcagcgctggggaggggggcggccgaaatggggtggcggtggtctgggccgcgcaagcggagatggaatggggcccgggctcagactggtcacggggggaggctgccggcgtggaccgcgggaaggcggggctggggctcggcgggaggccacccccacagccgccccgagaggagcgcgcccagcagctgctggacgcggtggagcagcggcagcggcagctcctggacaccatcgcagcctgcgaggagatgttacggcagctgggccgccggcgcccggagccggctggtggcgggaacgtctcagccaaacctggagcgcccccccagccggctgtctccgccagaggcggctttccaaaggatgctggcgatggagctgcggagccctgaccatccccgagcagaataccctgacttctctccctccccagggccggtggctggactctgaacaactcccttcagtaaaggggccagtcttcactggcagtggctggtacttggctctcagcctggagtggcagctctgctagcagctgggttcactcccacttcatcctggctgaaagcagtgctgtgctttgaaatgcagccaatgaatacccagtctgattacccagatttgggcagaccagcagtgctcgccagagtggtctggcctgctatgggggatccaggtggtgttacatgtccatttcatgttttgggggcttttagccccacaaaacaccttcagtagagccttgattaaaaggaaacctgcagactctcctggtgaaaa

SEQ ID NO: 73445 - DNA, 2653 bp, Homo Sapiens
  misc_feature (419)..(419): n is a, c, g, or t
  misc_feature (1015)..(1027): n is a, c, g, or t
gggtgtcccttcctgttttaattcctaaagatcctgacttttatctgaggaagtctaggtagttttccttttggatctggccattggtgcgtgtttcattcagatcacctctggaatctctgtggttgtgaaggcaattccttatgagactcttgcctcctgtggcttacgtgatgaattgttaatatggcagtaattaattagtatctacttaaatttagtggtcagaaatgtatttgaagtgccttaaagatgatcatggttcagaatatcttcagagaaagcaaaatctttaatattgcagggagcctagcaatacaagtacacatttctgtggcttgatttcttgaatatgctgagacccaatttggactacatttggcagaaatgatggagtaaacagcaaggctttaaattanattaatagttacaaggtaggttggctcttaggtgaatttagccatgtcaactaatagcttttatatggtatgtaacaaatctgaattatgttatgctgtgaattattcagtgcattataagaaatcttagttaatcatgcttttgggcttcattagtcaatgtgattggccttttattttctttccataacttatctgctattattagtttcttattccttattaataatccgttagctcattatcattagcttactaacttgaaagttagattaatatcaaaataagaatagcagcactatgaagagttaataaaatgcaatttcatgttagagctagaataaaagtaattgagcagtcatttgcaaatgcttcattataacatttatgtgcttaagatttctaaggttttaaaaagttacctttaatacaatccttagaaactcagaaatttcctgatattcattagattatggtgtttgcctaatttataccggttttcactgtatattttaatgaactttgattggttacttttccagacatacagatttaatttggaatatgaactttggttcttcatgagtgcattttgnnnnnnnnnnnnngtacacattcagaatctggccaatttaagtttgtattttaaaaatattttatgcatgttaagtatggtcgcagtaaatgaaattgtgtttaagactaaatttactaccgttttgaacagacattcccagatcattcttatattgtcagataacacttgtgtataatatcactttggaccatggacatgagctggaaaaatgatgtatttttgtagattgtatgtccagaatgactttagaaccgcatgatacggtggaaggagcactggactagtcgtcactaccctttttggattcagggcctcctcacaattaaaatgagtgtaatgaaacaaggtgaaaatatagaagcatccctttgtatactgttttgctacttacagggtacttggcattgctttatctcactggattctcatggtaggatttctgagatcttaatctaagctccaaagttgtctacttttttgatcctagggtgctccttttgttttacagagcagggtcacttgatttgctagctggtggcagaattggcaccattacccaggtctgactgaccaccagtcagaggcactttatttggtatcatgaaatgatttgaaatcattgtaaagcagcgaagtctgataatgaatgccagctttccttgtgctttgataacaaagactccaaatattctggagaacctggataaaagtttgaagggctagattgggatttgaagacaaaattgtaggaaatcttacatttttgcaataacaaacattaatgaaagcaaaacattataaaagtaattttaattcaccacatacttatcaatttcttgatgcttccaaatgacatctacagatatggttttgtggacatctttttctgtttacataaatttatccacttaaaatgtgataatgtggagacaaagcaagatttgattacataaacttttctctgcattggtcttttcactatcttatttgctaacttttcttatttttcttcaacctccccaccctccattttttggatattaaacagggaaagcttgctacattataaagattgttggcaccatttattttacacaaaggctaaaggttaacttttggaaatgatgagctacttttatatatgtgtttactcatgctttgtgatatttctggatcattccagtcataaagacttattacatgtactatttcttgctacctgtgaaaaggtatattttaaagaatgtataaccaacagtccatttactttttattagtatgtagaggatttgtatctaattcatgaatgtagttttacagtagtttgtcattgtaaatggagcaaagtacattatcttctaaaatgtacattatgtaagaattgtaaatatacttaagtaatttgtatgccaaaaaattacaataagtcaataaagatctcccctcggactccgccacaacccactatccccgcaatagcctgggggcccggcttcgcacccttcaaatagtttctctaaacacattccctttggacgacgcggggccctactaaggtaggggaccccgcggccttttaatcgtttcctaaagaagaccccggccccctgaacaaccggattgagatccaccaccc

SEQ ID NO: 73446 - DNA, 1004 bp, Homo Sapiens
  misc_feature (66)..(66): n is a, c, g, or t
  misc_feature (92)..(92): n is a, c, g, or t
  misc_feature (121)..(121): n is a, c, g, or t
  misc_feature (174)..(174): n is a, c, g, or t
  misc_feature (176)..(176): n is a, c, g, or t
ccattctacgagatgctcaaccccctgattgagctggacttacggagccactatatgatggactgnagcccatgagatgtcagacctgtctntaaagtggctattccctggagaccgctcntcacacccagacgtgcccaggcttgtgggtgcgcatcagctccccatcagcgntntacagaaacgagggagtacatgtcagtggagaaggtgatccaggtgccccccaagaaagtgaaaggctggctgctgcccgaaatgccagccctgatcaccgacatcctgctctccctggacgaccgcttcctctacttcagcaactggctgcatggggacctgaggcagtatgacatctctgacccacagagaccccgcctcacaggacagctcttcctcggaggcagcattgttaagggaggccctgtgcaagtgctggaggacgaggaactaaagtcccagccagagcccctagtggtcaagggaaaacgggtggctggaggccctcagatgatccagctcagcctggatgggaagcgcctctacatcaccacgtcgctgtacagtgcctgggacaagcagttttaccctgatctcatcagggaaggctctgtgatgctgcaggttgatgtagacacagtaaaaggagggctgaagttgaaccccaacttcctggtggacttcgggaaggagccccttggcccagcccttgcccatgagctccgctaccctgggggcgattgtagctctgacatctggatttgaactccaccctcatcacccacactccctattttgggccctcacttccttggggacctggcttcattctgctctctcttggcacccgacccttggcagcatgtaccacacagccaagctgagactgtggcaatgtgttgagtcatatacatttactgaccactgttgcttgttgctcactgtgctgcttttccatgagctcttggaggcaccaagaaataaactcgtaaccctgtccttcaaaa

SEQ ID NO: 73447 - DNA, 719 bp, Homo Sapiens
  misc_feature (518)..(557): n is a, c, g, or t
gccagtcggtcggtgtggacaaaacacagatatacagcagatagcggccaaaaacttcacagacacctctctcatgtacccagaggacacttgtaaatctggaccaagtacgaatacacagagtggtcttttcaacactcctccccctactccaccggacctcaaccaggacttcagtggatttcagcttctagtggatgttgcactcaaacgggctgcagagatggagcttcaggcaaaacttacagcttaacccattttcaagcaaaacagttctcagaaatgtcatgattgccggggtgaaggcaagagatgaattgcattattttatatattttttattaatatttgcacatgggattgctaaaacagcttcctgttactgagatgtcttcaatggaatacagtcattccaagaactataaacttaaagctactgtagaaacaaagggttttcttttttaaatgtttcttggtagattattcataatgtgagatggttcccaatatcatgtgannnnnnnnnnnnnnnnnnnnnnnnnnnnnnnnnnnnnnnnagactgtgcaatacttagagaacctatagcatcttctcattcccatgtggaacaggatgcccacatactgtctaattaataaattttccattttttttcaaacaagtatgaatctagttggttgatgccttttttttcatgacataataaagtattttcttt

SEQ ID NO: 73448 - DNA, 1699 bp, Homo Sapiens
  misc_feature (1489)..(1489): n is a, c, g, or t
  misc_feature (1652)..(1652): n is a, c, g, or t
aacttaggctaggtacgaggcctgggtgttgaattcggcacgaggggggtcatcagcctgtatcgcttcctttcttagattctcagctgatgaaaatttgggtctggcccatttcaggccatcttcagttgaagaaacaccctcttaggctgtgcaaggcatgggttatcaggggattgaggtcacctgggacttcagggaggctcagcttgctccctgccccagacctgtttcttctaagggaggaggacatggtggagaccagggacaggagagccagcagggtggatgcaaggggcctctacccacacctggacctccgtgccctcaccccagccctaggtgtgcacctaggcctcattccttaccccccagcccctgcccaccttcagcaggatgaggccctgggttgccgtgctctcgctgttcccctctcggggctgggctggggccgctcttggccccaaggttgccccgggccagcagcccagccagcagcacagtctctatggtgctgaggaagagcagcagcagcaggatggtgaagtagtaaactgggggaggcagggcacagggagatgctcaggggccagtccctgtgtctctggtgcccagcgagctgagcaccagtgggtgaccggggagaaacagggcagactgggtaagggagcagggcttactgagcagtgggttgcaggaggaggagctgggcagggcctgcaccagggaggagtggaggacgaggtaactcagcagcaatgtcaccttgtagcctatgcgctcaatggcccggaggggcagcaaccccccgcacacgtcagccaacagcagtgcctctgcaggcaccaagagagcgatgatggacttgagcgccgtgttcttcagcctcagctggaaggggaaaagtcagggccttcccggcgggggggaaggaggtgggcatcgggggcatggggcctggcctctggccgtgcatcctcactcccacccgcctccagcagccctctgtcggcctcctcccgacttgactcaccgtcacctggaagcagggcaccagctgctggggtgggacttgggtcttcagatcataaactacgtattccctcttgacactcacaatctcgttcaccacgtgggcctggaactctaactccatcgctgaggggtgggaatgagaactatgaaccaggaaggagagatcccagctgccaagtctgggggtagcagactggagcccaggggtgatggagacttttgatggcttttggcagggacagacttggacacaaaaccgatccatagaagggcttcccaaaccttgttttgcaacatcccaaattgtctccagttgaaggaaggcctttatcagattcatagatgagctttcattgtaaaaataaatgtactttgcaccacttcatgatggagggagaagtggtcacaggctcgtcagtctatcatctcacagctgaagcaggatccccaaggntaccgctgtggtctctcatggagggaagggtaggacttctctgccaagttagatgtcacctgatgggtttatacagggtggctgcaccttcaggtggtttccaggagtgaggccatggcaaccttgacctctggccttgctgcaagggccgagccactgcagntcgccatggctgtggagggcagttgctctggggaggacagaagactg

SEQ ID NO: 73449 - DNA, 580 bp, Homo Sapiens
  misc_feature (307)..(307): n is a, c, g, or t
  misc_feature (320)..(320): n is a, c, g, or t
ggaagcaaaaaatagggccccacctatttaggacgagattgaagactgacccttgaggcacacttgcactggagatgggtttatttcacgctctgtgcttgtgtgctagcggagggagagctcagggtggcttaatccagaggccctgtcatggcccgcccccagccatgggaaagcaaacttcatcctagggttgcaagccccaggccctgccccctttacagtttaggccgcctgccatggggtgcagcctctccaggggctgcgtcagacttgcacgctgcccacatccagattcctgcaaagncgaattgggtgcncagccaccccccccacatacacgaggaagaagatgcgctcaccagtctcagcccagcttctctgtgacccctttactcctctggagggctctgtggggagagatacagggaaaggagctgttcttcaaggtcccctcaacatgagcggaagagcgaaccccaggggtcatcagcctgtatcgcttcctttcttagattctcagctgatgaaaatttgggtctggcccatttcaggccatcttcagttgaagaaacaccct

SEQ ID NO: 73450 - DNA, 1163 bp, Homo Sapiens
attgtgctctgtgctgtgcgttgtgtgttctcttttcctgtgttgcccgtttacctggcggttctcgagtggacgtgcgctgtctgtccccaaagccgattttgtttctttgtcgccgccgagtatatccagtccagtgatccctcatcggaccctcactaagtctcaggcctccatcctgcacaggtggaccgccactgggtctgcggctctgccctcacatatctgagagagcccctctcagtgctactggaagttctctccgcgctggtctcagctcctttgcacagctgggctcatctcccgtcctgggaggtggaccgaacttgtctaagatgccaactctggcctcctgggctcatgtacggtccctctccatgcggactcgatcacctgcaggctctgtttgtgtgcttggcgtagatgttatagagctgcttcttgagcttcatgatctcctctgcctggatggcatgtctgtggcttggccccgggcgcctcctgagggctggtggatcatgatacgggagttggggagcgagtggcgcatgcctgggtgccgcggcgagaagcagggagcccatgctggcggcctggcccacgcaccaggtgcagatcgggttgaggatgtactgcatcgtgtcgtagatggccaggcccgcggtcaccacaccaccagggctgttgatgtacatgtggatgggcttcttgttgctctcggattgcaggaagaggagctgtgcgataacaaggctggcaacgctgtcatcgatcgggcccatgacgcacacgatgcgctcccgcagcagccgcgagtagatgtcataggcgcgctcgccgcgacccgtctgctccaccacgatgggaatgagcgggagagcccgggtcgccgtcgcgtgcaggcaccgctgcagggccaggccgttctggagtgtccgctgcggcggccgctgcgctggaaagtgagcggcgaggcgaggccccagcgcggggtacctgcatgacgccacccgggccccccctaccatattccgggccacatccctccgcacgccccggcctcgtgccgaattcgccacccaggcctcgctaccttaggaccgtatagtactgcctcgttttaaccctgcttttgcctggccgtctcgtgggtgcgtcgtgtg

SEQ ID NO: 73451 - DNA, 1126 bp, Homo Sapiens
cgtaactggcagtaactataacggttctaaggtagcgaggcctgggtggcgaattcggcacgagggacggaagccgaccggggcgtgcggagggatgtggcccggaatattggtagggggggcccgggtggcgtcatgcaggtaccccgcgctggggcctcgcctcgccgctcactttccagcgcagcggccgccgcagcggacactccagaacggcctggccctgcagcggtgcctgcacgcgacggcgacccgggctctcccgctcattcccatcgtggtggagcagacgggtcgcggcgagcgcgcctatgacatctactcgcggctgctgcgggagcgcatcgtgtgcgtcatgggcccgatcgatgacagcgttgccagccttgttatcgcacagctcctcttcctgcaatccgagagcaacaagaagcccatccacatgtacatcaacagccctggtggtgtggtgaccgcgggcctggccatctacgacacgatgcagtacatcctcaacccgatctgcacctggtgcgtgggccaggccgccagcatgggctccctgcttctcgccgccggcaccccaggcatgcgccactcgctccccaactcccgtatcatgatccaccagccctcaggaggcgcccggggccaagccacagacattgccatccaggcagaggagatcatgaagctcaagaagcagctctataacatctacgccaagcacaccaaacagagcctgcaggtgatcgagtccgccatggagagggaccgctacatgagccccatggaggcccaggagtttggcatcttagacaaggttctggtccaccctccccaggacggtgaggatgagcccacgctggtgcagaaggagcctgtagaagcagcgccggcagcagaacctgtcccagctagcacctgagagctgggcctcctctccagaatcatgtggaggggccagaggcctgccagacccccagctgggccctgctcaccccttgttgctgggcttggaggggcctcttgaggaacttttaatttgcaggggtgcccgctatggacggggcattccagctgagacactgtgattttaaattaaatctttgtggtctttacaaaa

SEQ ID NO: 73452 - DNA, 1068 bp, Homo Sapiens
  misc_feature (147)..(147): n is a, c, g, or t
  misc_feature (988)..(1009): n is a, c, g, or t
ccagtgagcggccatcactggctttctcccacggtaccttaacctccctcacaccgtgccagttccgttctcctagctactctcccatttgccaacaattcctgtacggatgctgatacctgactcatcagccaggtggtcctgccntcctgatgaatggtgtccgacagcccccagtttgtccctctgccccgccaagagtctccgggtggccagaggagcaaaatgcatcccaagtacctgtggtgcctggggaacacagcaggagtgtctgcgccccacagcgcagtgcatgtgattccaggcgctgaacaactccccttgaccattgggcctgcatctgactcccggctgccagaatcagaagctgagtccaggcaaccgctcggccactcccggtcactcctctctggacacccagttactaaagtcagcaaagaagatgcggtaatcaccgcctgatctccacatggtgaacacaacactctcactaacacctccttgaccagtcagtcttcagcactgggggtggacaggcaggttttctgtgtttaccagaatcgcacaggctaagcacaaacatggaaccagagttccaggtgaggaaacctcactcgcagaagcccaggctgcaccccaccaggtgatgcagtgcgcctaggctgtgggtgctaggagccaagtgctagggactcgtcatgagtgggaatccccacgttcctgtcactgctgtcaaacagaaggtaaacagtcttacgaatgtaattccttaggaagacttgtacaaacttttattaggatatctatttatttaatactgaactttggcctactttgtgataagactataaacaaattgaggaaatcactatttctcacttctgtatttctcaaaaaataattttgttacagagttcaatatactgtgtactactgatcttctattgtgaaagcaaagcatttcatcaaaacaaagtattttaaattnnnnnnnnnnnnnnnnnnnnnncctgagcaggcggccgcaagctttttccctttagtgagggttaattttggcatggcact

SEQ ID NO: 73453 - DNA, 1526 bp, Homo Sapiens
  misc_feature (1433)..(1462): n is a, c, g, or t
tttttttagttcttaaagagttttatgttgactgaatattgcacattgagtccccattgagtccctggtgggaaaagtccacaatttcccattgatagctttttactgttgtgaaaaagggaagcgtcagccacacaaaagcctgcatgaccgctgcttcggagaagctctcgaccctaactgcagtcactgttacttggatcagatcaagcgcagtgactttttgggattcagtggttattctccacacttcgtagccatttcaaccaactctgagcacaaaatgcagccatcctctatgcagcaagccctgcccagtcagtgaccctactggacagatccaaggccagccctggttccctgctgcagccaccgtcctgacgttcatcggagcaggccggggcctggccttcccggcacaagtggctgttctgacaggcccccagtttgtcccatctgaactgctgggaggtttccgggtggccagaggagcaaagctgccttccaagtgcctgtctgtgcctgggagaacagagcaggagcgtcgtgcggtccaccgcgcagtgcatggcgattccaggcgctgaacaactcccctggacccttgggcctgcatctgactcccagctgcagagtcagaagctgagtccaggcaactgcttggccactcccgatcgctcctccctggacacccggttaccaaagtcagcaaagaagatgcggtaatcgccgcctgatctccacatggtgaacacaacactcccaccaacacctccttgactggtcggtcttcagcaccgggggtgggcaggcaggtgttctgtgttgacgagaattgcacaggctaaacacaaacacggaaccagagtgagaacacctcactcacggcagcccaggctgctccctaccaggtgacggagcgcgccggggctgtgggtgccaggggctgagtgctagggactcgtcatgagtggggatccccacgttcctgtcactgctgtcaaacagaaggtaaacagtcttatgaatgtatttccttaggaaaacttgtaaaaacttttattaggatatctatttaatactgaactttggcctactttgtgatagactataaacaaattgaggaaatcactatttctcacttctgtattttctcaaaaataattttgttacagagttcaatatactgtgtaccattgatcttctattgtgaaagcaaagaatttcatcaaaatattttaaattatgagtgaaaattgtgtatgttaattttgcagctataatattaatcaaattttgtgtaattctaatcacaaaatgacgtgccttaagtgcccctccagctgtgggttggcagtgtccagacagggagggcccatcaccgaaatcctgaacgattactagaccaattctattaaaaacatttcaaggcnnnnnnnnnnnnnnnnnnnnnnnnnnnnnngaccgcgtatgcggccgcaagcttattccctttagtgagggtaattttagcttggcactgcccg

SEQ ID NO: 73454 - DNA, 1029 bp, Homo Sapiens
  misc_feature (70)..(70): n is a, c, g, or t
  misc_feature (82)..(82): n is a, c, g, or t
  misc_feature (258)..(259): n is a, c, g, or t
  misc_feature (271)..(271): n is a, c, g, or t
  misc_feature (280)..(280): n is a, c, g, or t
  misc_feature (305)..(305): n is a, c, g, or t
cagaacacttactgatcgattatcgactcttagggattgcctgagccagaatcgcacgagggccccgagnccaatcgcagcnggcggcgggcgcgacctcgatgtatataggttgagactgctcggaagctgtgtcagttgtggtgccacctgtactgtgcccatgtttcatcagtgctgagacacgccagaacggcaagagtgtccagtatgtaagctggatcagcagagagaagttgtcccgcttatgggcgaggnnagccagaagccncagagtccncagattaaaaactccaccccgcccnccagggccagagaccagctccggagagcagaggggattccagccatttggtgataccgggggcttccacttctcatttggtgttggtgcttttccctttggctttttcaccaccgtcttcaatgcccatgagcctttccgccggggtacaggtgtggatctgggacagggtcacccagcctccagctggcaggattccctcttcctgtttctcgccatcttcttctttttttggctgctcagtatttgagctatgtctgcttcctgcccacctccagccagagaagaatcagtattgagggtccctgctgacccttccgtactcctggacccccttgacccctctatttctgttggctaaggccagccctggacattgtccaggaaggcctggggaggaggagtgaagtctgtgcatagatgggagagccttctgctcagaggctcactcagtaacgttgtttaattctctgccctggggaaggaggatggattgagagaatgtctttctcctctcctaagtctttgctttccctgatttcttgatttgatcttcaaaggtgggcaaagttccctctgactcttcccccactccccatcttactgatttaatttaatttttcactccccagagtctaatatggattctgactcttaagtgcttccgccccctcactacctcctttaatacaaattcaataaaaaaggtgaaatatattgatggg

SEQ ID NO: 73455 - DNA, 1146 bp, Homo Sapiens
ttttgaattctttgtgactggcaggcattcagaccaatagtgattaggaaaccttgaagcctgcccaacgatcgtgggcaggaggtggtttctggtttgttggggcgtgtgtatgtgtatttggggggactgaagggtacgtggggcgaaacaaaaccggccatggcagcagcggaggaggaggacgggggccccgaagggccaaatcgcgagcggggcggggcgggcgcgaccttcgaatgtaatatatgtttggagactgctcgggaagctgtggtcagtgtgtgtggccacctgtactgttggccatgtcttcatcagtggctggagacacggccagaacggcaagagtgtccagtatgtaaagctgggatcagcagagagaaggttgtcccgctttatgggcgagggagccagaagccccaggatcccagattaaaaactccaccccgcccccagggccagagaccagctccggagagcagagggggattccagccatttggtgataccgggggcttccacttctcatttggtgttggtgcttttccctttggctttttcaccaccgtcttcaatgcccatgagcctttccgccggggtacaggtgtggatctgggacagggtcacccagcctccagctggcaggattccctcttcctgtttctcgccatcttcttctttttttggctgctcagtatttgagctatgtctgcttcctgcccacctccagccagagaagaatcagtattgagggtccctgctgacccttccgtactcctggacccccttgacccctctatttctgttggctaaggccagccctggacattgtccaggaaggcctggggaggaggagtgaagtctgtgcatagatgggagagccttctgctcagaggctcactcagtaacgttgtttaattctctgccctggggaaggaggatggattgagagaatgtctttctcctctcctaagtctttgctttccctgatttcttgatttgatcttcaaaggtgggccaagttccctctgactcttcccccactccccatcttactgatttaatttaatttttcactccccagagtctaatatggattctggactctaagtggcttccgcccctcactacctcctttaatac

SEQ ID NO: 73456 - DNA, 964 bp, Homo Sapiens
  misc_feature (34)..(34): n is a, c, g, or t
accaccagcagcccagccccaccagcgtcctgcntacagaggtggcagcccctccgcttgagaaaattttgtctgtggatagcgtggcagtggactgtgcctacaggactgtgcccaagccagggcctcagcctggcccacatggatcactattgactgaagggtgtctcagaagcctttcgggggacttgaaccggttcccctgtgggatggaggtgcactctggccagagagaactggagagcgtggttgctgtcggcgaagccatggcttttgaaatttccaatgggagccatgagttactgtctcagggacagaagcagatttttattcagacttccgatgggcttatcttgtcccctccaggtacaatagtgtctcaggaggaggacattgtcacagtgactgatgcagaggggcgtgcctgcggatgggcccgctagaaggagttcctctagaagctgtggagtcggtcgtcaccgtggagccagagccctcacagtgaagtggagtcagatcctagattcgtctgattttatccagagaaggtctatggcaagcaatgtatatttttctaatgtgaatattgcacagatgaaccttttatttataaagaataatgtctttctgccctgctgtctacatttttctatggagcttgtcataataatagcagatattacctgatcaggaatccctgtggcgcgtctgacgctcatgagtttttcatgatggtgatgagtagcactgcactgtcacctgatgattggccctgctccgtttcccttctctcctgggagatatgctgcttttccaccagacttgctccatactaaaagcttcttttgggttcaattaaaaagaaaataagctagtcattctgggcagcattttattgataaaagggggaaaaagtcatttctacttgcatgattttttaaattaaattaaattaaattaattt

SEQ ID NO: 73457 - DNA, 761 bp, Homo Sapiens
acgcacatgctcagagacccttgcagagtcccgcacagctgtcctccagcagagaagagctgctcagctacctggtggccctgctgcggcaggagagcagagggcgtcgccaagcaaagccaggctcaaggagttcctccagcagtgtgaccgggaggatctggtggaattggctctgcctcagctggctcaggttgtgaccgtgtatgagtttcttctgatgaaggttgctgagtcattaggaatcacagaattcctacggaagaaagaaatacacccagacaaccttggacccaagcacctcagccgagacatggatggggagcagctagagggagctagcagcgagaagagggaacgtgaggctgcggaggagggactggcctcagtgaaaaggcccagaagagaagccctgtccaacgataccactgaatctcttgctgccaacagcagaggccgggagaagcccaggcccttgcatgctttggccgctggtacaatagtgtctcaggaggaggacattgtcacagtgactgatgcagaggggcgtgcctgcggatgggcccgctagaaggagttcctctagaagctgtggagtcggtcgtcaccgtggagccagagccctcacagtgaagtggagtcagatcctagattcgtctgattttatccagagaaggtctatggcaagcaatgtatatttttctaatgtgaatattgcacagatgaaccttttatttataaagaataatgtctttctgaaa

SEQ ID NO: 73458 - DNA, 944 bp, Homo Sapiens
aaaatttagggctaggtacgaggcctgggtgttgaattcggcacgaggagagataccaaggatctagaagacgcgcatgctcagagacccttgcagagtcccgcacagctgtcctccagcagagaagagctgctcagctacctggtggccctgctgcggcaagggagcatgagggcgtcgccaagcaaatgccaggctcaaggagttcctccagcagtgtgaccgggaggatctggtggaattggctctgcctcagctggctcagagttgtgaccgtgtatgagtttcttctgatgaaggttgaaaaagatcatctagcaaagccttttgttcccagctatatataaggaatttgaagagttgcataaaatggttaagaaaatgtgccaagattacctcagtagttctggtctgtgttcccaggagaccctggaaataaacaatgcataaggttgctgagtcattaggaatcacagaattcctacggaagaaagaaatacacccagacaaccttggacccaagcacctcagccgagacatggattggggagcagctagagggagctagcagcgagaagagggaacgtgaggctgcggaggagggactggcctcagtgaaaaggcccagaagcagaagccctgtccaacgataccactgaatctcttgctgccaacagcagaggccgggagaagcccaggcccttgcatgcttttggccgctggtacaatagtgtctcaggaccgacgacattgtcacagtgaactgatgcaaaggggcgtgcctgcggatggggcccgctagaaggagttcctctagaagctgtggagctcggtcgtccccgtggagccagagcctcacagtgaagtggaggtcagaatcctaaaattcgtctgatttatccagagaaggtctatggcagccagtatattttctaatgtgattg

SEQ ID NO: 73459 - DNA, 1329 bp, Homo Sapiens
  misc_feature (730)..(843): n is a, c, g, or t
  misc_feature (853)..(865): n is a, c, g, or t
  misc_feature (904)..(1059): n is a, c, g, or t
  misc_feature (1211)..(1257): n is a, c, g, or t
gcaggcgccgccaccgcccccaccgggacccggcggcccccagcacgcgccgttcgcgccgccgccgccactagtgcccatccccgggggcgcggcgccccctcccggcggcgccccctgcaagctgggcagccaggctggagaggcggctaaggtgtttggaggcttccaggtggtaccggctcccgatggccagtttgctttcctcattcccaacggggccttcgcgcacagcggccctgtcatccccgtctacaccagcaacagcggcacctccgtgggccccaacgcagtgtcaccttccagcggcccctcgcttacggcggactccatgtggaggccgtggcggaactgagggggctcaggccacccctcctcctaaactccccaacccacctctcttccctccggactctaaacaggaacttgaatactgggagagaagaggacttttttgattaagtggttactttgtgtttttttaatttctaagaagttactttttgtagagagagctgtattaagtgactgaccatgcactatatttgtatatattttatatgttcatattggattgcgcctttgtattataaaagctcagatgacatttcgttttttacacgagatttcttttttatgtgatgccaaagatgtttgaaaatgctcttaaaatatcttcctttggggaagtttatttgagaaaatataataaaagaaaaaagtaaaggcnnnnnnnnnnnnnnnnnnnnnnnnnnnnnnnnnnnnnnnnnnnnnnnnnnnnnnnnnnnnnnnnnnnnnnnnnnnnnnnnnnnnnnnnnnnnnnnnnnnnnnnnnnnnnnnnnnttggggggcnnnnnnnnnnnnnaaaaaatttttaaaacctttttttggggcccggggcccnnnnnnnnnnnnnnnnnnnnnnnnnnnnnnnnnnnnnnnnnnnnnnnnnnnnnnnnnnnnnnnnnnnnnnnnnnnnnnnnnnnnnnnnnnnnnnnnnnnnnnnnnnnnnnnnnnnnnnnnnnnnnnnnnnnnnnnnnnnnnnnnnnnnnnnnnnnncccagcggagtccaatattaaattacgccccccccgggcatttttgggaggaatggtggaattttttaaccctttccccccaggggaaccccctccaaccggtttgggaaaaccttaaatcccccgggggatattacccccttgggcccctnnnnnnnnnnnnnnnnnnnnnnnnnnnnnnnnnnnnnnnnnnnnnnnttttccccactttggcgcccccctttaaaacaaaaaggggggggaaacctccccccgggggtttggggtgtg

SEQ ID NO: 73460 - DNA, 782 bp, Homo Sapiens
tcatgaacaagtggtcaaaaaagcaggctggtacggtcggaattcccgggatatcgtcgacccacgcgtcgatcctttcgaattttgctgaaaatccagatatgttgaagaaacttctcagtacccaagtgccagcatcatttagttccctctataattcttacgtggaatcagaaatccttattaatgcccttactctatttgagattatctatgacaatctcagagcagaagtgtttaactatagagaattcaataaaggttcccttttttacttatgcactacatctggagtgtgtgttaagaaaattagagccttagcaaatcaccatgacctcttagtgaaagtgaaagttataaaactagtgaacaaattctgattggttatgtaccgtcaaaagacttgaagaaatttcatgattttgcagtgtggaagcgttgaaaattgaaagttactgcttttccacttgctcatatagtaaagggatcctttcagctgccagtgttgaataatgtatcatccagagtgatgttatctgtgacagtcaccagctttaagctgaaccattttatgaataccaaataaatacctcttgtactgaaaacatatttgtgactttaatcgtgctgcttggatagaaatatttttactggttcttctgaattgacagtaaacctgtccattatgaatggcctactgttctattatttgttttgacttgaatttatccaccaaagacttcatttgtgtatcatcaataaagttgtatgtttcaactgac

SEQ ID NO: 73461 - DNA, 1280 bp, Homo Sapiens
gcggccgcccccttgcccgcaacgcctactggggctgcagcacctactggggctgcagagtctcctggaacttctggttcccctagaacagcggtggttcctggaacatcagctgccaagaaagcaacccctggggctcacactggggctataccgaaagccacatcagcgactggagcggtacccaaaggtggaggcaagggtgtaaccaggtcccggaatgggggcaagggcaagggcaagaaaagcaaagttgaagtagacgaactggggatgggcttccgtcctggagatggcgctgcagcagctgctgcagcctctgctaatggcggacaggctttcctggcagaggtccctgattctgaggaaggggagtccgggtggactgacacagagtcagattcagactctgagcccgagacccagcgcagagggaggggaagaagacccgttgccatgcagaagcgcccctttccttatgaaattgatgagattctgggtgtccgcgatctcaggaaggtccttgccttgcttcagaaatctgatgatcctttcatccaacaggtagctttgctcactctgagcaacaatgccaattattcatgcaatcaagagacaatccgcaaattgggaggcctcccaattattgcaaacatgatcaacaaaactgatccacacattaaggaaaaagccttaatggccatgaataacctgagtgagaattatgaaaatcagggccggcttcaggtgtacatgaataaagtgatggatgatatcatggcctctaacctgaactcagcagttcaagtagttggactaaaatttctaactaacatgactattactaatgactaccaacacctgcttgtcaattccattgcaaactttttccgtttgctatctcagggaggtggaaaaatcaaggttgagattttgaaaatcctttcgaattttgctgaaaatccagatatgttgaagaaacttctcagtacccaagtgccagcatcatttagttccctctataattcttacgtggaatcagaaatccttattaatgcccttactctattcgagattatctatgacaatctcagagcagaagtgtttcactatagagaattcaataaaggttcccttttttacttatgcactacatctggagtgtgtgttaagaaaattagagccttagccatcaccatgacctcttagtgaaagtgaaagttataaaactagtgcacaattctgattggttagaccgtcaaaagacttgaagaagtcca

SEQ ID NO: 73462 - DNA, 994 bp, Homo Sapiens
cacccaacatgcatcggatttacttgagttccaaatgtgtttgaggaaaggagagaataaccatccgggacagctgttgccctttctccacacaggagctgggggagccaggtctgcggcccccttagccatctgtcggtcttggaggcagggctgcctgagaaggggcttttggggtttccacatctccccatcttgtccactgacctcctccagcacctgccccagtcgctccttgcgggaacctcctggggccccaggacggagaccactcccaggctctccacaccctggagccagccctaggcccaccttcctcccccgctggggccatgccctccatgcaccctggcccagggtggggccagcccccaacacagacactgcacccaggaacacatgagcatctggtccacgccctccggcgggccctggtccaggcctctcacatccagccccaggtgcccaggtggtaccctccctccctgggctgatggatggtgccttcctccacccaagccaccacctgcccccttctctgcgcctcggagccggaaatgtggacacctggtttgggcagcacagggaccaaccagccggacacaggccctgagaagctgccaaatgaatcccagcccatcctgcagaggacagtgctggtgacctgcctcgccttccaatgtcacagtcccaagaaccgtcaacacggccaccctggccaaggcagggctcccacctcggtatcaggacaggacagggcaggctggccctgggtcggggtgcaaggacccagagcggccaccagagggcagcgcaagagcacgcgggagccccatcctgggcagcagcccaggatccagacagcagcctctggggcccccaggccaccagcccgccccgcctgacgctgcagcccactccacacacacggccaccctcgtgccgaattcgccacccaggcctcgctacctagggaccgttagagttactgccg

SEQ ID NO: 73463 - DNA, 1073 bp, Homo Sapiens
tacaaagagccttcatgtttttatatatttcatagaaatttttatagcagttgcaggtaaactgtcaggattggttttaaaatatttttgtaactttaaaatattctataattatgcatgtgattttaacatttaatattcaaaaataaatctcttgctggatttgagagtattgcatttttaaagtctctcttctgtaactggatgttttggcaactttgtggggagagactgctggatttcttaaagcaacgtattcctgacactggccacagaatgcctttggaaatcggatgtactgttctcttgttcacgtttagtggtgttttgctgttttgttttttaaacaaatgatgctgagaataaggagagaaatgaatgtagagagaggtagagagagaaatatgaactctaacaaaggactgaggagtgcagtctgctggttcaggctcttcaaaagatgtagaaaaagagatagaaggaaccacctatgcttaaaatactgtaaatatgcagtgaggtttggcaaaatctattccatgtgtgatttgcttgtagaaacaattttgaaagccccttgaggaaaataaaaatcaagaagaacacttttctcccttttccatacaaattaaaacttaacagcatcaaattattgggaccagaaaccaagtaatgtataatgtggcttttgttgagttaaataagatgctatataatggagaagaatttgaaaatgcacaaaaaaatcaatctacattatcagaacctgcagtgaaattaaacttatgttaaataaaaccagtttgcaggtgcacaaactatgagggtcttgtatccacgtaacacaggtagttacaaaaacatgttattgtactgtgtaaagatgcatagtcatctcatttggttggctttgtaccttgtaccttttttagccttggcttttgttgaactagaaccctcagcacatactgtgttgtacttttgtaaatgattttttaaatggaattttgcacataatacattgtaatactgtatgataatcatgtgtgaaaataatttttgaaatatcaaaa

SEQ ID NO: 73464 - DNA, 1156 bp, Homo Sapiens
ggcacgaggccgaagtgctcctgagtgaggagacaaaacgcattttccttgaccgtttaaagcccatgttttcaaagcaaacaatagaattcaagaaaatgcttaaaagcacctcagatggtctgcagataacactggggttactggctctgcaaccttttgaattagcaaatacattatgccatagttaaggtacaagcagaacaataccaatagattaattttaagagttgtcttagaatgatttctttcgcattaagtctggatgcaaactgtgcagcccttaggttcctgctgtagttttgtacgacctggcagacttaaagtaaattgagtttaaattcaaagccagttgatgcggaaggaacttttttggcatgtgttaaattgtgctttaaaagacatataaagaattgggaaacatttcaggagacgatcatagcctgtataaataccagattagaacatacggatttaccatgaagttctgtcttcaacatccattctaaagggctactgtcccaaatcctgtgtgtccttttgacttgtctgatcacccaatggaagtggatacttgtaaagtctacaccactgtacttggcgttaaatcttgctgaattcgtggtaagctgttaccatgtctacattttgtagaatgattttggtctgcagcaaaattcgatttcacttctcatacccctttccttccacttgaaatgcaatttagacagaggccctgtggtgaaagttgcaatattaagtttacctttagaagatcccttctcaaactcagaaccctagcagtgttaccttaaacaaaaatgagctcgagaaaaaagtagctcagttacagagaagcaaatcgagttatttcccacataaaaagtttcccagattctaagaattgcagtatcctgtaccctaaaatttttcaaggtgactcctgttgtcgtctgttgataactttaataaaggtcatttaaggacataagtttttaaagactcccaaagtgaaacttaaacattttcgggattatcgattgcatatatcagtttatgctgtgtgctgaattactatgccatgtgctattttagtgtttggggaaaatgaaaaataaaatttgttctttagcttaataaatatgtcttattttat

SEQ ID NO: 73465 - DNA, 698 bp, Homo Sapiens
tcacagatttaccattcctgttataaactagtatttgttgtttagccaaaacagaaaatgatttccactggacagtagaaaaatatgtgtaaaatagggaagaaagttagtattggatcagtgtgagtcctgaagcactttcagtgctgtgagaacgacatccactttgggtttcattcgtttgtaagcagaggagctgtcagtcactcgtgcttctcggtggcctctgagccatggtgtcgagtgaagagtagttcttgtttgttacaacctttgtgagtcagccatgcccgcaaagcgtgctgtgttttagtcctggtaggaatatttatcagagttcacactatataaaacccaacagcttcaactattgccctttcaacagttttgccactgaccggatagaaacggtttcagtctctggatggatgtgtttgtggtttgtaaccattacggtttaaaccatggtttaagaatttgcccaaataacagaaattttgttcgggaagggataaactagatatagcatacagagcctgtttttgagttttagatactttatttgtaaataacttaaaatagctttctgaaaccgtgcattctgtagtttcttcctttcagtgaaattgctaaatgtcaatgtatttttggcactgcgattttaaccatttattaaataaaaattttgttaaaagaaa

SEQ ID NO: 73466 - DNA, 2282 bp, Homo Sapiens
  misc_feature (2223)..(2242): n is a, c, g, or t
agaacaggtcatgagagcaagtcagagagagagagggacaagctgcgcgctggccgtcatgcaccgcgtgcacccccccaacgtgcgctggctggtacaggtgccccgcctcttgtgagtgtccctggagtgggaggggaacctgcggggtcatattcaaggggtcagggcctgcctcctgccctcctaggatggctgagcctcccttgtccctgccaacccctctgagtgcaaggaagggcttcctggtcccatccatggtctgtccagcctggcccacctgggtatccttgctttcccaatatggttcagatgcgcccctgcgctcttgggccaagctctgacccttgctggaccgctgggtttcctcccactggccctgacttgcacatacctgcatgttgtctcacctgcagtgacgtgtaccgtaccaagggccagctggccaacttccaggagatgctggagaacatcttcctgccactgttcgaggccactgtgcaccctgccagccacccggaactgcatctcttcttagagcacgtggatggttttgacagcgtggatgatgagtccaagcctgaaaaccatgtcttcaacctggagagccccctgcctgaggcgtgggtggaggaggacaacccaccctatgcctactacctgtactacacctttgccaacatggccatgttgaaccacctgcgcaggcagaggggcttccacacgtttgcgctgaggccacactgtggggaggctgggcccatccaccacctggtgtcagccgtcatgctggctgagaacatttcccacgggctccttctgcgcaaggcccccgtcctgcagtacctgtactacctggcccagatcggcatcgccatgtctccgctcagcaacaacagcctcttcctcagctatcaccggaatccgctaccggagtacctgtcccgcggcctcatggtctccctgtccactgatgatcccttgcagttccacttcaccaaggagccgctgatggaggagtacagcatcgccacccaggtgtggaagctcagctcctgcgatatgtgtgagctggcccgcaacagcgtgctcatgagcggcttctcgcacaaggtaaagagccactggctgggacccaactataccaaggaaggccctgaggggaatgacatccgccggaccaatgtgccagacatccgcgtgggctaccgctacgagaccctgtgccaggagctggcgctcatcacgcaggcagtccagagtgagatgctggagaccattccagaggaggcgggtatcaccatgagcccagggcctcaatgagcctggtccatgaagtgcccaccacatcgcagcacttttaccacgttttgtcctcagaccccgcccatgctgtgtggtctctgcatgtctccattcttctctgtctctgtcttgcatgtctcctaccatgtcactgtccctgggccacccagtgaaagcaaagcctgggaatctgctcattgttgtttgggctcaggtattgagcctgatggcccagcgtattgaagggcctcccctgctggtggccctgtcctgggatcctcagaagcctgactgtcctatgggcttctccagtgtccacaggggcttgggatggttgtggggggctggcccctctagcctttccggtccttcctgggcaaatctaagccttggccagggccgaagtttaggcccctgtcttgttcatgtagccgaggggcaggcgggggatctctacacctctgctgtgggcacggggctgctgagggtctgtggaactccagcagctctgcactgggtagagctgggcctagagctcagtcacaggcctgggcttcctggcctgagtgggtagacgcaggcggcagaggtgctggaccacatctccgccaagtcactgcccagcagccttctccgtcctgtccccagcccacgtgctccttgggtgtcagcttcctgtgcctctgtgggagagggcagctgccttgtgttatgtctggggccacagttgctgcaaagtcctggatctgccactcaaccccgggagtggtgttcccagtgtggctcccagagctttgaccagattgtgatcccagctggcccctatgttgtgttctggactgaggcctttgctgtgaactgcagtgtttcatacgaaccatctttcctagtgcatgagaaataaagattatttaagtnnnnnnnnnnnnnnnnnnnncctgagcaggcggccgcaagcttattccctttagtgaggg

SEQ ID NO: 73467 - DNA, 1240 bp, Homo Sapiens
  misc_feature (589)..(590): n is a, c, g, or t
  misc_feature (592)..(599): n is a, c, g, or t
  misc_feature (601)..(603): n is a, c, g, or t
  misc_feature (606)..(607): n is a, c, g, or t
  misc_feature (792)..(804): n is a, c, g, or t
  misc_feature (814)..(822): n is a, c, g, or t
  misc_feature (1038)..(1046): n is a, c, g, or t
aacgtgcagtaactcataacgggtctaaggtagcgaggctgggtggcgaattcggcacgagggggagggatgcgcgcctgggtgtagttgtgggggaggaagtggctagctcagggcttcaggggacagacagggagagatgactgagttagatgagactagggggcgggctgggggtgcgagaaggaagcttggcaaggagactaggtctagggggaccacagtggggcaggctgcatggaaaatatccgcagggtcccccaggcagaacagccacgctccaggccaggctgtccctactgcctggtggagggggaacttgacctctgggagggcgccgctcttgcatagctgagcgagcccgggtgcgctggtctgtgtggaaggaggaaggcagggagaggtagaaggggtggaggagtcaggaggaataggccgcagcagccctggaaatgatcaggaaggcaggcagtgggtgcagggctgcaggagggccgggaagggctaatcttcaacttgtccatgccagcagaccctttttttccagaccaagggctgtgaacccgcctggggatgaggcctggcaaanncnnnnnnnncnnnccnncaccaaaaacatggtcggccgccctcggcccctcgaggaagccttcctaaacccattccgtttggccgcgccgggcccccacgtagggtaaagtggaaacatgggttcataagcctggttttccctagggaagaacccctggggccatggaactaagagggccttggggaattccccccaccccnnnnnnnnnnnnnccgcgccccnnnnnnnnncaaaccccgaagggggtttccttgaaaccacaaattccccaggaattgggggatgttcccttggaggggcgcccttttatacctggggaaattcccaatccccacaaccgggggagaggttccccaaagcggcaggagcctccctcataatatatcaaaattttaacggcccccccgccgcccctgggccaccttttcattttgaaaagaaaactnnnnnnnnnaatattcctccattaaagacaatttttcttcgcccgaacattggtgaaaacaccccctctccaccaaccggggggattggagagagaaaccccgtgaatccccgcccccgcgggcaatttaaccccccttgtggcgcgcccctggtgcggaaataaatatttttccccccgggggggagaaacacggggcggac

SEQ ID NO: 73468 - DNA, 274 bp, Homo Sapiens
cccttgaggcaacgtgggctgtgcagagggggcggggaccttctcacacagaagtgtaggcaatgccacttgtgctcagataaggttggggaggagactgggacaagatcaagggcagggggcagggggcaggaggctgggctagtgctgtggcccagatatgggccagaagtacagggaggatctcagacagggagagatgactgagttagatgagactagggggcgggctgggggtgcgagaaggaagctgggcaaggagactaggcctagg

SEQ ID NO: 73469 - DNA, 663 bp, Homo Sapiens
ataaatgtaatgagtgtgagagaagtttcacacggaatagaagtcttattgaacatcagaaaatccacactggtgagaaaccctatcagtgtgacacatgtggaaaaggtttcactcgaacttcataccttgttcaacatcagagaagccatgtagggaaaaaaactctttcacagtgacccatggtattcatgccaacattggtgctcatttgtcactgaactgaagccaccctggagcccttaatggttacagaaattgtggaccagggctttatttaccactatacatcatcgggtattagaaaatgtagtctggctgagatgatgagttatcttctacattctagaaagtgattggaagaagtcatttgataagaggccatgggagagtggtctggaagttgtaggacctaaaatagtttgttctcacccagtgtatttaaatggccttctggacttgttaattgccctcagccagcactttaggacatctggttggatggctctgatgtggggggctgctgctctgaccattcattttgcctctaatgaatctttcacaaattggtcagatccatgaggtcttttactcttctttgtgccttgtatgataggtgctaataaacatttattaaatgtaccagtaaaatggcatttgtac

SEQ ID NO: 73470 - DNA, 490 bp, Homo Sapiens
ctcccgcagtacccggggtctatgttacagacaagggatatcaagctcccgctggtgaaggagggggagccgtgccggcaggggcaggcgcgacgggcgcggccctcatagcaccttgcagcagttgatgcagccgttctgggagccgtagcgcttctgcagcgcggcgcgcgtggccgtctcgaagacctcgcgcacgcctaccttggtcttggcagagcactcgaggtagtcgtaggcttggatgcgcacggccatggcgcggccgtcatccgtgcgcacgggttcctgcttcatgcgggccagctctgtgcggacatgctcgtcgctgcgcaggtcttttttgttggccaccaggatgatgggcacattgggacagaagtgcttcacctcggggacccacttctcggggatgttctccagcgagtccgggctgtccaccgagaagcacatgagaatgacgtcggtgtccgggtaggagagcggccgc

SEQ ID NO: 73471 - DNA, 853 bp, Homo Sapiens
  misc_feature (581)..(594): n is a, c, g, or t
  misc_feature (724)..(736): n is a, c, g, or t
gggccgctctcctacccggacaccgacgtcattctcatgtgcttctcggtggacagcccggactcgctggagaacatccccgagaagtgggtccccgaggtgaagcacttctgtcccaatgtgcccatcatcctggtggccaacaaaaaagacctgcgctgcgaaccctccaccagctaccggagggaggagggaggatgcgctgtggggttgtttttgccataagcgaactttgtgcctgtcctagaagtgaaaattgttcagtccaagaaactgatgttatttgatttatttaaaggctaaaatttgtttttttattctttgcacaattgtttcattgtttgacacttaatgcactcgtcatttgcatacgacagtagcattctgaccacacttgtacgctgtaacctcatctacttctgatgtttttaaaaaatgacttttaacaaggagagggaaaagaaacccactaaattttgctttgtttccttgaagaatgtggcaacactgttttgtgattttatttgtgcaggtcatgcacacagttttgataaagggcagtaacaagtattggggcctannnnnnnnnnnnnnccacaaggcattctctaaagctatgtgaaattttctctgcacctctgtacagagaatacacctgcccctgtatatccttttttcccctcccctccctcccagtggtacttctactaaattgttgtcttgnnnnnnnnnnnnnaaataaactgacaaatgacaaaatggtgagcttatgatgtttacataaaagttctataagctgtgtatacagttttttatgtaaaatattaaaagactatgatgatgacatttaaaa

SEQ ID NO: 73472 - DNA, 462 bp, Homo Sapiens
gcggccgctctcctacccggacaccgacgtcattctcatgtgcttctcggtggacagcccggactcgctggagaacatccccgagaagtgggtccccgaggtgaagcacttctgtcccaatgtgcccatcatcctggtggccaacaaaaaagacctgcgcacgacgagcatgccagcccgctgcgaaccctccaccagctaccggagcgaggagggaggatgcgctgtggggttgtttttgccataagcgaactttgtgcctgtcctagaagtgaaaattgttcagtccaagaaactgatgttatttgatttatttaaaggctaaaatttgtttttttattctttgcacaattgtttcattgtttgacacttaatgcactcgtcatttgcatacgacagtagcattctgaccacacttgtacgctgtaacctcatctacttctgatgtttttaaaaaatgac

SEQ ID NO: 73473 - DNA, 1770 bp, Homo Sapiens
  misc_feature (116)..(128): n is a, c, g, or t
  misc_feature (133)..(133): n is a, c, g, or t
  misc_feature (256)..(268): n is a, c, g, or t
taaaagtcatcatcatagtcttttaatattttacataaaaaacctgtatacacagcttatagaacttttatgtaaacatcataagctcaccatttgtccattgtccagtttatttnnnnnnnnnnnnncaagnccaatttagtagaagtaccactgggagggaggggaggggaaaaaaggatatacaggggcaggtgtattctctgtacagaggtgcagagaaaatttcacatagctttagagaatgccttgtggnnnnnnnnnnnnntaggccccaatacttgttactgccctttatcaaaactgtgtgcatgacctgcacaaataaaatcacaaaacagtgttgccacattcttcaaggaaacaaagcaaaatttagtgggtttcttttccctctccttgttaaaagtcattttttaaaaacatcagaagtagatgaggttacagcgtacaagtgtggtcagaatgctactgtcgtatgcaaatgacgagtgcattaagtgtcaaacaatgaaacaattgtgcaaagaataaaaaaacaaattttagcctttaaataaatcaaataacatcagtttcttggactgaacaattttcacttctaggacaggcacaaagttcgcttatggcaaaaacaaccccacagcgcatcctccctcctccctccggtagctggtggagggttcgcagcgggctggcccgcaggagaggctgtgctgaagctgtgtcctccccaagtcagttgcaaatgtcttccccaggggttggaaagatggtcaagtcctgttcatgcttgggcgggagtctggcccagcctgggccagagcgctcacccatcaccacccttaaataacaccatcttagctccgaaaataaaattatatctatatttatataacatccccccatcctccccagcagccctcccctcccgcagtacccggggtctatgttacagacaagggatatcaagctcccgctggtgaagggagaacatctgatggggcgcggccacactcccgcgccaatctcgcccccggggatcagaggcgggggtggggtgaaaatggggcgaggggagtcgaacagacacacagccacacactctgaggcccggctcttcagaaaagcatgctcaggggacccttggcactcagtggggagcccaggcctgtgcaacacagctggacgcacacagacactgggatgggggcgcccggtgcccacgccaagtcctggcgcaagccagaggcgtcagcagacagatgccaggcaggccggtggggtccttgtgggacacgggtctccccttctccgggctcgcgggggactggtccaggagggggagccgtgccggcaggggcaggcgcgacgggcgcggccctcatagcaccttgcagcagttgatgcagccgttctgggagccgtagcgcttctgcagcgcggcgcgcgtggccgtctcgaagacctcgcgcacgccttccttggtcttggcagagcactcgaggtagtcgtaggcttggatgcgcacggccatggcgcggccgtcatccgtgcgcacgggttcctgcttcatgcgggccagctctgtgcggacatgctcgtcgctgcgcaggtcttttttgttggccaccaggatgatgggcacattgggacagaagtgcttcacctcggggacccacttctcggggatgttctccagcgagtccgggctgtccaccgagaagcacatgagaatgacgtcggtgtccgggtaggagagcggccgca

SEQ ID NO: 73474 - DNA, 636 bp, Homo Sapiens
tggccaaattggcccatgggccgtatttggtgaaccctgttctatgagatcacctaggcttcagccttaaacagtggaagccatcccctgaatgacaagtcacaagggtatcaaagaaagacccctgaattttcatggaaaaagctattcagacccctgcttggaaagctaaggcacactgccacgaagcagcaaggacgccttacaagtctcagtgcaacagagatggacacctgggctgggctggacaatgtttaaggttccttttagtccatgactcaagtgatactgttttaggctatcaggtagtaaacacgatcttagacatccccatctttgtaagcagaacagtacggcacttcaccacatctgcttcccaccatgcttctaagcagctgtcttccccctgctaatgttacaaccaaagcagccaccccacctcctctcgtgttgagcctcacgaccgctgacccagctggaaagccagcgccctgccgcgtcaccctgactctgctcagagccagcattccagccacaaagagggcctccttcctttcctctttcataaaaatgttttttgaagagttagagtatattttaggctttttatctttattaaaatttcatgtgcaaaaa

SEQ ID NO: 73475 - DNA, 1279 bp, Homo Sapiens
cagtcgacggtaccggacatatgcccgggaattcggccattacggccgggggcagacggctgctgtaacctccagaagcaaattcagatcactcagctctttggggttcccgttgtggtggctctgaatgtcttcaagaccgacacccgcgctgagattgacttggtgtgtgagcttgcaaagcgggctggtgcctttgatgcagtcccctgctatcactggtcggttggtggaaaaggatcggtggacttggctcgggctgtgagagaggctgcgagtaaaagaagccgattccagttcctgtatgatgttcaggttccaattgtggacaagataaggaccattgctcaggctgtctatggagccaaagatattgaactctctcctgaggcacaagccaaaatagatcgttacactcaacagggttttggaaatttgcccatctgcatggcaaagacccacctttctctatctcaccaacctgacaaaaaaggtgtgccaagggacttcatcttacctatcagtgacgtccgggccagcataggcgctgggttcatttaccctttggtcggaacgatgagcaccatgccaggactgcccacccggccctgcttttatgacatagatcttgataccgaaacagaacaagttaaaggcttgttctaagtggacaaggctctcacaggacccgatgcagactcctgaaacagactactctttgcctttttgctgcagttggagaagaaactgaatttgaaaaatgtctgttatgcaatgctggagacatggtgaaataggccaaagatttcttcttcgttcaagatgaattctgttcacagtggagtatggtgttcggcaaaaggacctccaccaagactgaaagaaactaatttatttctgtttctgtggagtttccattatttctactgcttacactttagaatgtttattttatggggactaagggattaggagtgtgaactaaaaggtaacattttccactctcaagttttctactttgtctttgaactgaaaataaacatggatctagaaaaccaaccagcaagttttcagtgccagataaaactctgcgctctagaggtaactcctcatgggaggcagctaggagtgttacctgacaccagtttcctagaaaactgtgacaagcaaagcaataacacacgtcgagaaatatctgatcaagcgggaaatcttctgactgtcggggatctctagtaagatctcttggaatgaagtgcactgtgtatccaaaactaaa

SEQ ID NO: 73476 - DNA, 518 bp, Homo Sapiens
cctgagactatagaccgtggttaaaacagcaggctggtacggtcggattcccgggatatcgtcgacccacgcgtccgcatagatcttgataccgaaacagaacaagttaaaggcttgttctaagtggacaaggctctcacaggacccgatgcagactcctgaaacagactactctttgcctttttgctgcagttggagaagaaactgaatttgaaaaatgtctgttatgcaatgctggagacatggtgaaataggccaaagatttcttcttcgttcaagatgaattctgttcacagtggagtatggtgttcggcaaaaggacctccaccaagactgaaagaaactaatttatttctgtttctgtggagtttccattatttctactgcttacactttagaatgtttattttatggggactaagggattaagagtgtgaactaaaaggtaacattttccactctcaagttttctactttgtctttgaactgaaaataaacatggatctagaaaaccaaac

SEQ ID NO: 73477 - DNA, 554 bp, Homo Sapiens
  misc_feature (116)..(124): n is a, c, g, or t
  misc_feature (330)..(376): n is a, c, g, or t
cggaccggtccggaattcccgggatatcgtcgacccacgcgtccgtgccttcaaagttttggtttttttaagaaaaaaaatatatatatatttgggttttgggggaaaagggaaannnnnnnnnctctttggttttgataaaatgggatgtgggagtttttaaatgctatagccctgggcttgccccatttggggcagctatttaaggggaggggatgtctcaccgggctgggggtgagatatccccccaccccagggactccccttccctctggctccttccccttttctatgaggaaataagatgctgtaactttttggaacctcagnnnnnnnnnnnnnnnnnnnnnnnnnnnnnnnnnnnnnnnnnnnnnnntttaccccttggaggaaataagatgagggagaaaggaaaaggggaggaaacttctcccctcccaccttcacctttagcttcttgaaaatgggcccctgcagaataaatctgccagtttttataaatgctacaacacaacacctcgacacaattaaaactaccctgtcggcccgtctct

SEQ ID NO: 73478 - DNA, 1220 bp, Homo Sapiens
  misc_feature (785)..(793): n is a, c, g, or t
  misc_feature (806)..(806): n is a, c, g, or t
  misc_feature (814)..(814): n is a, c, g, or t
  misc_feature (831)..(839): n is a, c, g, or t
  misc_feature (1045)..(1095): n is a, c, g, or t
tgcatagtgaatatagaaccaagttgtcaaaaagcaggctggtacggtccggaatcccgggatatcgtcgaccacgcgtcgggagaaggaaagccacgcaagttggggagaaaacccccaaggatgaatctgccaatcaggaggagccagaggccagagtcccggcccagagtgaatctgtgcggagaccctgggagaagaacagcacaaccttgccaaggatgaagtcgtcttcttcggtgaccacttccgagacccaaccctgcacgcccagctccagtgattactcggacctacagagggtgaaacaggagcttctggaagaggtgaagaaggaattgcagaaagtgaaagaggaaatcattgaagccttcgtccaggagctgaggaagcggggttctccctgaccacagggacccagaagacccgcttctcctttccgcacacccggcctgtcaccctgctttccctgcctctacttgacttggaattggctgaagactacacaggaatgcatcgttcccactccccatcccacttggaaaactccaagggggtgtggcttccctgctcacacccacactggctgctgattggctggggaggcccccgcccttttctccctttggtccttcccctctgccatacccttggggccggtccctctgctggggatgcaccaatgaaccccacaggaagggggaaggaaggagggaatttcacattcccttgttctagattcactttaacgcttaatgccttcaaagttttggttttttttaagnnnnnnnnntatatatatattntgggtttntgggggaaaagggaaannnnnnnnnctctttggttttgataaaatgggatgtgggagtttttaaatgctatagccctgggcttgccccatttggggcagctatttaaggggaggggatgtctcaccgggctgggggtgagatatccccccaccccagggactccccttccctctggctccttccccttttctatgaggaaataagatgctgtaactttttggaacctcagnnnnnnnnnnnnnnnnnnnnnnnnnnnnnnnnnnnnnnnnnnnnnnnnnnnaccccttggaggaaataagatgagggagaaaggagaaggggaggaaacttctcccctcccaccttcacctttagcttcttgaaaatgggcccctgcagaataaatctgccagtttttataaatgc

SEQ ID NO: 73479 - DNA, 1637 bp, Homo Sapiens
ttaggggggagagagtatgaagtcgacggcgcgccgaattcggcacgaggagcatgtccatcagctcagcagagctcgacagccacaagtcctgagaagctttgaccttgaagggcttctgggagaggaggaatttctgcatggggcgtgaaggcacactgtcccaccacaactgaaccagaagagagtgaagactcccctcttcccatcctctgtgccaggtgccagactgtgctccttggaacttatggcccaatcttacctgttctccagggactggtcactgcctcaggacccccaagcctatgccctgagccatggctgctgactgactccagccaaggtgcaaagacgagattatgagacaggtcctcaggcctgtgttccaagtactcacaggggctctgggtgcccatcgccgggagtatggttcagctgccaccggcactgtccatttgcctgtctgtcaagctcagagcatggataagccacacagcagggcagtgcaccctggcaccatgcacggccagcaagaatcaaggcccgcagatgctaagagggcctattgtcaggggaaggtccccgctcctgcacactctctatggatacttgggttgtgggggctctcttggagagtaagtttgtggtttgtttctggtttacagtggtggctgacaccccttgtaagaaagcattcctgggaagtcttctgtgggtccaaacatgttgctccgatcatcacaggagagcaaaaggccctagataccccctttggaatgtgagagtcttgttgtctgatatttgccactgagctggtgaagcccctctaaagagatctcgaccctggggagcagaattcttgtcatctatgaggggtcctgagaaagacttgtcattttttttcctggagttcttcccattgaggtcctaggatttgcacaccactgtcccacaagagctttcctgcctaatgaaaggaggtcttgtggtgtgtgtctcctctcttctctatagttcccgagttggcccccattgcagcccccaccctgtgggtagtcttccagaagtgatgcagtggtgtgagatgccctacaccttgttatttgggagactttgagagtcattcacttccatggtgactagtgtttgttttgcctgattttatattctgtgttgcatttctccccactccctgccctgctttaataaacagcaaaccaatatctaggaagaatgactgagggatagtattgggtattggccccatggcaggaacagccacttgcatctggtcccggtgccacactgcggtgcttggtgtggttgtggagcctgtccctgcgcgccttgctcccgttgagccacgctgtctggtgggtgattctctgccctgagccaccaccctggactggcccagtctccagagctggcacaccctgcctgttttctctttttagacacaacagccgcagtttggccagccactaagtcccaccagctgaggtccgaggaaagcggggtgactcatttcccttgtccagggcccgaggagagtgaggtgtccagcctgcaaagctattccagctccttggtgttggtttgcaataaattggtatttaacctcgtgccgaattctt

SEQ ID NO: 73480 - DNA, 1347 bp, Homo Sapiens
  misc_feature (72)..(72): n is a, c, g, or t
  misc_feature (224)..(455): n is a, c, g, or t
  misc_feature (488)..(508): n is a, c, g, or t
  misc_feature (1195)..(1204): n is a, c, g, or t
cccccttgattactcgattttgtgtgtcagggcggactatgaaaacccacacgcgcctttacgtctgccctntgtgcatttctccattctttctgcgtatccctgatctgtgataccgtataccgccttgatgagctgtccgctcccgcaccgaagaccgagcgcagcggtcaggagcgagaagcggaagacgcccatacgcaaacccctctccccgcgcgggnnnnnnnnnnnnnnnnnnnnnnnnnnnnnnnnnnnnnnnnnnnnnnnnnnnnnnnnnnnnnnnnnnnnnnnnnnnnnnnnnnnnnnnnnnnnnnnnnnnnnnnnnnnnnnnnnnnnnnnnnnnnnnnnnnnnnnnnnnnnnnnnnnnnnnnnnnnnnnnnnnnnnnnnnnnnnnnnnnnnnnnnnnnnnnnnnnnnnnnnnnnnnnnnnnnnnnnnnnnnnnnnnnnnnnnnaagaattcggcacgagggccgcggctgtaggcnnnnnnnnnnnnnnnnnnnnncaatgtttagtaatagtataatccatgttgtttgatatcaaaagtagaattacttttaatgtagtttttcttcattattgtcattgcgtgttcttaagttttacccctattagatggtaagaacaattaatgcagttttgcacaaatatttttacattctgatcattcagttctgtcattgtaatctttgttgttagaaacaaatgatgaaaacataggggttctgtaaacttttgtaatgctatgaattctgtttaaattttgggctgtctattttctgctgaaaccatgcaaaattgagctttggtggggctgggagggggttatgtattcatgggacctttaatttgtacagaacacagaacttatttctgtcagttatttaatacattgaaaatttagtgaaatgttcaaagagaatagatgtttcccaaaacaacaatctttatgttaaaaatagtcattaaaagatctgttgtaatatatggtggatatttttctttaatttcaaacattacctctgaaatgtgtatcttttcttttttatcttaccattaattttaaatctagtggattggttttcaacatcgtgcctgccgatatgcctacagaatcatctgtaagtgtcaaaatgaacccacgttgttagccataattttgattatgcctttatttctcctttcttgnnnnnnnnnnggtgttattttgacaattaggcataacattgttttgtagattatcttttaatgaactattttaaatgttaaattaggtgccacttaaatttattttattacaccatgaatagctgattaaaagaaccaaatatttctagtaaa

SEQ ID NO: 73481 - DNA, 982 bp, Homo Sapiens
  misc_feature (866)..(892): n is a, c, g, or t
gggacccctacagagcttgagagccacagacgcctggcttctccggcctcccctcaccgcacagttctggccacagctcccgctcctgtgctggcacttctgtgctcgcagagcaggggaacaggactcagcccccatcaccgtggagccaaagtgttgcttctccctttttgcggccttcgccagcccaggctcggctgccacccagtggcacagaaccgaggagctgccattaccccccatagggggcagtgtcttgttcctgccagcctcagtgtcttgcttctgccagctccttcccctaggagggaagggtggggtggaactgggcacatgccagcaccacttctagcttccttcgctatcccccaccccctgaccctccagctcctcctggccctctcacgtgcccacttctgctgggcctttagccctagaacctgcaggtggtgggggcggctaccaagaaggaacagaggtctctggggaggagtctgggtggtccagccctgatgattggccccacctcctgctgccccataaccctctcttcatttcggctttttcatttaccctcatttagagccatttgcagagatttagaaagatttacagtaacgaatggattcctatataaagattatttttatactttttgcagcaaaaggaaattgtaatatttgtacagtgttcaagtgaataaaaaccatgcctaagggtggtacgggccttggcggcccgccggggtgggcgccgactcccgcccccgccgaatgcggctccccccccgattttagctagcgcggcccccttgtgcggggggccccgcggccctttgagaaagcttttctagagagatttgtgtnnnnnnnnnnnnnnnnnnnnnnnnnnnctaacgtggacccggggccccggaatcgggccctcggcaacaggagcgttgtgggccacagaacaaacgggtctgtgtttttccgccccc

SEQ ID NO: 73482 - DNA, 883 bp, Homo Sapiens
  misc_feature (392)..(430): n is a, c, g, or t
  misc_feature (467)..(476): n is a, c, g, or t
  misc_feature (796)..(807): n is a, c, g, or t
gcaccctttagcacggagcccaccccaaaggccttcccaccgtgccatgggacagggcagcccgatgccagctgggcctacctgaacttgtgcccaggccctgcccccaccctctcaggatggcctagacttggggaacagagccgggtggggttgcagcccggagtgtctgtcaaaggcaccaggtggagagggcccggcacaggcccaccctggtccaaaccctcacactacagaaaaccccaatggtgctgaaactgtcgcccggccacgcctggcccctccccacccaggagggaggtggcacttcttaacctgtacagttttattgtaccaagagactcgccccgcccctgtatcataagcctttaaatggagtcaactttttaatnnnnnnnnnnnnnnnnnnnnnnnnnnnnnnnnnnnnnnnactttttaaaactgtgaaaaatagctatgaaattatnnnnnnnnnncattctgacgtgcagaatattattttttatttcctgttagattatagtgtctagcaccggcttcaccggcctcccagtccccagcacaccccccgcccaccccgccaagtgtactgtactcaccccccaggatagagaagtgtttgttagggagagaagagggagaggcaggagccggcccaagcccagggtccctgcttgggccccagaaagcacttaaccaggccccaagccttcaagggaaaccaaggcctcaaccagacaatcttgagggaaggaaaagccagactttgggtttgttttttgggggaattattggnnnnnnnnnnnnatgtttcttttggaattttgtttgttggcaaattctgtgtgatcttttttcataaaaaataagatatgatttaatt

SEQ ID NO: 73483 - DNA, 703 bp, Homo Sapiens
accctttgtggaaagaacctgggtgtgagtgaataaaaagtaaagagcgacgcgctatatcggccattaaatactcggggctgtccgtaacaccctgtgcttcccaattgtagcaccatgttctgtgtgaatatgcataaccagagtgaccccccccagcacccagcatgcccggctgtgcccctctgggtatgctcacatgcacatatatggacatacagtttcgtagcagaacgtggctgcccaggggctgcctatctgggcgagtagaccgcctggctcagcccacaggcctgcagcatcccatagcaccccgcccttgccccatcaccctgtgggctacatgcaggacacggcatgggcctgctccccagaggcacctgtttggggtcttcttgaggcttgtgctttcacagctctctttgaagcagatgtcttggtgaactcggtagactcttttatacctgttgtcacaagaaagctttgtaaaaccagacagtgaagcaaaatgttgccaactgcttaacctaggctatgtgaacccacagtaaacctgaaggtgtttgagggaaaaactgctattttctgaatgaaacgtgacctcctattgatgtattaaaatgtctaacataaaggtcatgtgatttgtaataaatttattgcggtacagtaatatgcataaaataaacccattttaatgtgc

SEQ ID NO: 73484 - DNA, 741 bp, Homo Sapiens
cagaaacttttaatgaactgttctcttaacattgacctctcaatgaagttatgttcttaatctcttgctaataatgatttttacttttaagtcacttttgggttcactagtggactaaccagaagtgattgtagttgagtccagttttgctttttaataatgtgttgaagttttagtttttactctttgttgactttgctgcttattggcaccagggacagagtttctagatacaattttatggattggttttaatttttatgagtttgtctctgcagtgattcggtttctcagagtctcatggcatcatagtttttccagaatgacacagtagccaccggtggatgacagcccacgggcggcacagtcacttctgcctgttgctctgacaccaacccaggcagctctgctgtggcttctcctgggctctggcattagttggtctgtgtcacattgtcagaacaggtggctgctgtgtggtgccatcgagtccctgctggttccccttgtcctgggagggtcacccattgcccaaggaagtgcatccacctggcaggtgacctggaggagtagcttccccgaggacccccaggcttggcctgtgattgcgcaaacccacatttcctaagcacactggacacccttcgagtgtgggttttaacatccctgtgagattgaatacttgtgccacacatgtcacaaaagagtatggaaataaaagaaaatttatccgaaaaaaaa

SEQ ID NO: 73485 - DNA, 1167 bp, Homo Sapiens
  misc_feature (72)..(72): n is a, c, g, or t
  misc_feature (283)..(292): n is a, c, g, or t
gtggaagtaagttccacccggtgtataagccccttccaggaactctccctttttggcgtattgtgttttccnaaaacggtttgggattaaccgcccgcgggcgcgttcttttatcgtggggaagaattccaaagcccgtgtgttcactgagccaggattttccttagggaagacaaggtattggcccaaggttccattttcccttctggggcccggggcgccaaagcaaaatgttttggaaaagttttttggaggggcggaggggcccggccatattaataannnnnnnnnnaatgggtggggttagaaaatactggatttaatagaaaatatcacattgtaaacaaatccattgatccatgagcttaaaacagaatgacggcacaatcacatagaaaagctaaagacaaaatactggtaccaaacatagcccttaggcctgggctaggctctcaaaggtctttcccagaaatggaggcagcagtagcttcaaacaggcacaaaaacagccaggaggaggcagcatccactccatgaaggcctaagacaatgaaaggaagccagagcaacagaccaccttgggatccggggagaagggtaaatgggcaaaagggttgtatttcctgatgctctcagaacatcagaccacaccatgtgaatttaagcaggactattttaagtggggaaacaatactagaagcatttggtgtattttcctggcactcacctcctaggtaagcaggagagcgggacactcaggagttgtgactaaactcacacttaagctgcctgtccagaccgtccccttggctgaacacaacactgaaattgtggcagtgtctgttgccccagtggacctcccacttactaatgagtatgtaaaacagaggagccacagtgaggcctttcacaaaaacacagggctctgggggaaaaacggcttccaccttctgccttttggtgctggagagtccctgagggagagaagtttgacgtggctgggccccttgaggctctggatttatcaatagaagcctcctctttggccccacccacccaaatccacccccaggttctcctagttcagagaaaagctgtgaaagtggaagaaggaagggatcgttttctttccattgcacttgttactgaccaaagagactgcttccc

SEQ ID NO: 73486 - DNA, 842 bp, Homo Sapiens
tttgtgagcatttatgaatggtcacactgggctggatcagcagagccaatatcccttacttaacccctttctggatgcaatactagaaggtaaagtgaggaatttatctctttagttagtgattataattcaccccatctctcagaaatcatctcctgggcagaatgatgcaggttcaggtcccctttcagagatataataagcccaacaagttgaagaagctggcggatctagtgaccagatatatagaaggactgcagccactgattctctcttgtccttcacatcacccatgttgagacctcagcttggcactcaggtgctgaagggtaatatggactcagccttgcaaatagccagtgctagttctgacccaaccacagaggatgctgacatcatttgtattatgttccaaggctactacagagaaggctgcctgctatgtatttgcaaggctgatttatggtcagaatttccctctgatatgtctagggtgtgatttaggtcagtagactgtgattcttagcaaaaaatgaacagtgataagtatactgggggcaaaatcagaatggaatgctctggtctatataaccacatttctaagcctttgagactgttcctgagccttcagcactaacctatgagggtgagctggtcccctctatatatacatcatacttaactttactaagtaatctcacagcatttgccaagtctcccaatatccaattttaaaatgaaatgcattttgctagacagttaaactggcttaacttagtatattattattaattacaatgtaatagaagcttaaaataaagttaaactgattatatttgaaa

SEQ ID NO: 73487 - DNA, 577 bp, Homo Sapiens
  misc_feature (93)..(93): n is a, c, g, or t
tcttggaacttctgtttcttccccatctgccaatcatcaatactcatacccacctcctcacaaggaggccataaaaacctatggtcatggctntgagtccaagtcagtgtggatgcagccagtctgtcatttttgggtgtttcctctgtagccgggtctgccatatggtgatgtcccagctctcgtgctatgaagttaaagcctctttctcaacaggctgcagatgatcacccaggaagagaatgcagaatgcccaaagcaaaccatctcagctggtcactgcttctgtgccaagaagggaggcctggcgaggggccagtcaggaagcagcatggcatcacatgctcatgacccacatgaaggtccctttagacttgtgtcaacaagatccattttctgaaacaactatttttgttctgattataaaagtaacattggctcattggtaaaacttggattgtgtgagaagtctacagaaataaatacaaatcctctagaattccatccccaaaagtaaccactcagacaaatgttctaatgtcatgtaaaaccatattaaaccatcttttctagctgc

SEQ ID NO: 73488 - DNA, 1495 bp, Homo Sapiens
  misc_feature (1322)..(1383): n is a, c, g, or t
gggctctctgctcgccgccgccgctgtcgccgccacctcctctgatctacgaaagtcatgttacccaacaccgggaggctggcaggatgtacagtttttatcacaggtgcaagccgtggcattggcaaagctattgcattgaaagcagcaaaggatggagcaaatattgttattgctgcaaagaccgcccagccacatccaaaacttctaggcacaatctatactgctgctgaagaaattgaagcagttggaggaaaggccttgccatgtattgttgatgtgagagatgaacagcagatcagtgctgcagtggagaaagccatcaagaaatttggaggaattgatattctggtaaataatgccagtgccattagtttgaccaatacattggacacacctaccaagagattggatctgatgatgaacgtgaacaccagaggcacctaccttgcatctaaagcatgtattccttatttgaaaaagagcaaagttgctcatatcctcaatatcagtccaccactgaacctaaatccagtttggttcaaacagcactgtgcttataccattgctaagtatgggatgtctatgtatgtgcttggaatggcagaagaatttaaaggggaaattgcagtcaatgcattatggcctaaaacagccatacacactgctgctatggatatgctgggaggacctggtatcgaaagccagtggtagaaaagttgatatcattgcagatgcagcatattccattttccaaaagccaaaaagttttactggcaactttgtcattgatgaaaatatcttaaaagaagaaggaataggaaaattttgacgtttatgcaattaaaaccaggtcatccctttgcaaccagatttcttcttagatgaatacccagaagcagttagcaagaaagtggaatcaactggtgctgttccagaattcaaagaagagaaactgcagctgcaaccaaaaccacgttctggagctgtggaagaaacatttagaatcgttaaggactctctcagtgatgatgttgttaaagccactcaagcaatctatctgtttgaactctccggtgaagatggtggcacgtggtttcttgatctgaaaagcaagggtgggaatgtcggatatggagagccttctgatcaggcagatgtggtgatgagtatgactactgatgactttgtaaaaatgttttcagggaaactaaaaccaacaatggcattcatgtcagggaaattgaagattaaaggtaacatggccctagcaatcaaattggagaagctaatgaatcagatgaatgccagactgtgaaggnnnnnnnnnnnnnnnnnnnnnnnnnnnnnnnnnnnnnnnnnnnnnnnnnnnnnnnnnnnnnnctaatgtttgttttctttcctgttatattataaggatatgcacgtttgttctggaaaagatagaatttgtctctaaaagacttgaaattgtaattaaaatggcaagctaatc

SEQ ID NO: 73489 - DNA, 967 bp, Homo Sapiens
cagtcgacggtaccggacatatgcccgggaattcggccattacggccgggggccgcggctgctccgcccagccggggtcggtggccgcatggcttcggtctcctctgcgaccttctcgggccacggggctcggtccctactgcagttcctgcggctggtagggcagctcaagagagtcccacgaactggctgggtatacagaaatgtccagaggccggagagcgtttcagatcacatgtaccggatggcagttatggctatggtgatcaaagatgaccgtcttaacaaagaccgatgtgtacgcctagccctggttcatgatatggcagaatgcatcgttggggacatagcaccagcagataacatccccaaagaagaaaaacataggcgagaagaggaagctatgaagcagataacccagctcctaccagaggacctcagaaaggagctctatgaactttgggaagagtacgagacccaatctagtgcagaagccaaatttgtgaagcagctagaccaatgtgaaatgattcttcaagcatctgaatatgaagaccttgaacacaaacctgggagactgcaagacttctatgattccacagcaggaaaattcaatcaccctgagatagtccagcttgtttctgaacttgaggcagaaagaagcactaacatagctgcagctgccagtgagccacactcctgagacactctctaaattgctgcactcctgtaacaaacattatttttccatttcattgtattgtgttttgccattgttggtctgttgatttccctagatgtgagtctgtttgttttcaattgtctgaacttcagcaagaaatgtgatacaacttgggcactaaaagaagccacagaacaggaagcggtcatgaaagtgccatggatgaacactggaggtggcagtgcctgtttatgaactaaataaataaatattaaacacctaaaa

SEQ ID NO: 73490 - DNA, 1000 bp, Homo Sapiens
  misc_feature (97)..(174): n is a, c, g, or t
agctttggtaactataaacacgtttcaaaaagcaggctggtacggtcggaattcccgggatatcgtcgacccacgcgtcgggaagaagaagaggggnnnnnnnnnnnnnnnnnnnnnnnnnnnnnnnnnnnnnnnnnnnnnnnnnnnnnnnnnnnnnnnnnnnnnnnnnnnnnncttcgccgcggcctgctccgcccagccggggtcggtggccgcatggcttcggtctcctctgcgaccttctcgggccacggggctcggtccctactgcagttcctgcggctggtagggcagctcaagagagtcccacgaactggctgggtatacagaaatgtccagaggccggagagcgtttcagatcacatgtaccggatggcagttatggctatggtgatcaaagatgaccgtcttaacaaagaccggaagctatgaagcagataacccagctcctaccagaggacctcagaaaggagctctatgaactttgggaagagtacgagacccaatctagtgcagaagccaaatttgtgaagcagctagaccaatgtgaaatgattcttcaagcatctgaatatgaagaccttgaacacaaacctgggagactgcaagacttctatgattccacagcaggaaaattcaatcaccctgagatagtccagcttgtttctgaacttgaggcagaaagaagcactaacatagctgcagctgccagtgagccacactcctgagacactctctaaattgctgcactcctgtaacaaacattatttttccatttcattgtattgtgttttgccattgttggtctgttgatttccctagatgtgagtctgtttgttttcaattgtctgaacttcagcaagaaatgtgatacaacttgggcactaaaagaagccacagaacaggaagcggtcatgaaagtgccatggatgaacactggaggtggcagtgcctgtttatgaactaaataaataaatattaaaactaaaatattagaata

SEQ ID NO: 73491 - DNA, 483 bp, Homo Sapiens
tgcggccgcgcgttgccgacggtggacggaggaagcagccggcgggacaggctggccagctggggcggcccggagtctgagcctagagcctggcgccgcgagagagtcccacgaactggctgggtatacagaaatgtccagaggccggagagcgtttcagatcacatgtaccggatggcagttatggctatggtgatcaaagatgaccgtcttaacaaagaccgatgtgtacgcctagccctggttcatgatatggcagaatgcatcgttggggacatagcaccagcagataacatccccaaagaagaaaaacataggcgagaagagggaagctatgaaagcagataacccagctcctaccagaggacctcagaaaggagctctatgaactttgggaagagtacgagacccaatctagtgcagaagccaaatttgtgaagcagctagaccaatgtgaaatgattcttcaagcatctgaatatg

SEQ ID NO: 73492 - DNA, 864 bp, Homo Sapiens
gcggccgctggctggtggacaccgggggacatcgtgggtatgtgccggctgggaaactacagctgtaccatgtggtccccagtgcagaggagctcagaaggcaggcggggctgaacaaagacccccgatgtctaacaccggagcccagcccagctctagtgccctctattcccaccatgaaccaggtcatagccgcgtacccttttgtggccagaagcagccatgaagtgagcctgcaggcaggccagcctgtgaccatcctggaggcccaggacaagaaggggaaccctgagtggagcctggtggaagtgaatggacagaggggttatgtgccttctggcttcttggccagggctcggagcccagttctgtggggctggagtctgccctcttagggtaccctctttggagcctacattgccaaatgatgggggaggcttagaggctctgaccctggggggaaaagaagcaaaggaaaggtggaggtggaagggaagaccaggccagggtgggtgaagcacactcaggaggcagccagaagacatgggcgggcctcgcagagtgcttggtgtggtgggggcacaggaggctccagccaggactgctcattatgtctgcataaagaactcattccgacctggggtcacaatgcacttggacagcaggtcacagctgattggccaggactctcgataggttatggccagtcttagctgtgcctgcatccgggcctgcctgtgggcgtgggtcacacgggataatgttacctgcgtgctgtgtggttgcaggaagcgggttctggaggagtccagaactgcctggtcagacagttcacttcctacacatggtatcaggagacatcat

SEQ ID NO: 73493 - DNA, 876 bp, Homo Sapiens
cagtcgacggtaccggacatatgcccgggaattcggccattacggccggggagacccacggggctgccctcccctgcgcactcccctcgctgcccgggcccggagcgcagcgcggccgcacagattcacaatgttgaaagcccttttcctaactatgctgactctggcgctggtcaagtcacaggacaccgaagaaaccatcacgtacacgcaatgcactgacggatatgagtgggatcctgtgagacagcaatgcaaagatattgatgaatgtgacattgtcccagacgcttgtaaaggtggaatgaagtgtgtcaaccactatggaggatacctctgccttccgaaaacagcccagattattgtcaataatgaacagcctcagcaggaaacacaaccagcagaaggaacctcaggggcaaccaccggggttgtagctgccagcagcatggcaaccagtggagtgttgcccgggggtggttttgtggccagtgctgctgcagtcgcaggccctgaaatgcagactggccgaaataactttgtcatccggcggaacccagctgaccctcagcgcattccctccaacccttcccaccgtatccagtgtgcagcaggctacgagcaaagtgaacacaacgctgttgccaagacatagaccgagtgcacctgcaggggacgcacaaactgtagaagcagaccaaggtgtgcatcattttacggggatcctttgcatgtcagtgccctcctgggatatcaaaagcgaggggagcagtgcgtagacatagatgaatggaccatcccctccatattgcaccaaagatgcctgaataccccagggctcattttattgcccgtggcaggtccctggggtttcaa

SEQ ID NO: 73494 - DNA, 2708 bp, Homo Sapiens
gggggctgccctcccctgcgcactcccctcgctgcccgggcccggaacgcagcgcggccgcacaggtatttttgctgtgctgtgcaaggaactctgctagctcaagattcacaatgttgaaagcccttttcctaactatgctgactctggcgctggtcaagtcacaggacaccgaagaaaccatcacgtacacgcaatgcactgacggatatgagtgggatcctgtgagacagcaatgcaaagatattgatgaatgtgacattgtcccagacgcttgtaaaggtggaatgaagtgtgtcaaccactatggaggatacctctgccttccgaaaacagcccagattattgtcaataatgaacagcctcagcaggaaacacaaccagcagaaggaacctcaggggcaaccaccggggttgtagctgccagcagcatggcaaccagtggagtgttgcccgggggtggttttgtggccagtgctgctgcagtcgcaggccctgaaatgcagactggccgaaataactttgtcatccggcggaacccagctgaccctcagcgcattccctccaacccttcccaccgtatccagtgtgcagcaggctacgagcaaagtgaacacaacgtgtgccaagacatagacgagtgcactgcagggacgcacaactgtagagcagaccaagtgtgcatcaatttacggggatcctttgcatgtcagtgccctcctggatatcagaagcgaggggagcagtgcgtagacatagatgaatgtaccatccctccatattgccaccaaagatgcgtgaatacaccaggctcattttattgccagtgcagtcctgggtttcaattggcagcaaacaactatacctgcgtagatataaatgaatgtgatgccagcaatcaatgtgctcagcagtgctacaacattcttggttcattcatctgtcagtgcaatcaaggatatgagctaagcagtgacaggctcaactgtgaagacattgatgaatgcagaacctcaagctacctgtgtcaatatcaatgtgtcaatgaacctgggaaattctcatgtatgtgcccccagggataccaagtggtgagaagtagaacatgtcaagatataaatgagtgtgagaccacaaatgaatgccgggaggatgaaatgtgttggaattatcatggcggcttccgttgttatccacgaaatccttgtcaagatccctacattctaacaccagagaaccgatgtgtttgcccagtctcaaatgccatgtgccgagaactgccccagtcaatagtctacaaatacatgagcatccgatctgataggtctgtgccatcagacatcttccagatacaggccacaactatttatgccaacaccatcaatacttttcggattaaatctggaaatgaaaatggagagttctacctacgacaaacaagtcctgtaagtgcaatgcttgtgctcgtgaagtcattatcaggaccaagagaacatatcgtggacctggagatgctgacagtcagcagtatagggaccttccgcacaagctctgtgttaagattgacaataatagtggggccattttcattttagtcttttctaagagtcaaccacaggcatttaagtcagccaaagaatattgttaccttaaagcactattttatttatagatatatctagtgcatctacatctctatactgtacactcacccataattcaaacaattacaccatggtataaagtgggcatttaatatgtaaagattcaaagtttgtctttattactatatgtaaattagacattaatccactaaactggtcttcttcaagagagctaagtatacactatctggtgaaacttggattctttcctataaaagtgggaccaagcaatgatgatcttctgtggtgcttaaggaaacttactagagctccactaacagtctcataaggaggcagccatcataaccattgaatagcatgcaagggtaagaatgagtttttaactgctttgtaagaaaatggaaaaggtcaataaagatatatttctttagaaaatggggatctgccatatttgtgttggtttttattttcatatccagcctaaaggtggttgtttattatatagtaataaatcattgctgtacaatatgctggtttctgtagggtatttttaattttgtcagaaattttagattgtgaatattttgtaaaaaacagtaagcaaaattttccagaattcccaaaatgaaccagatatcccctagaaaattatactattgagaaatctatggggaggatatgagaaaataaattccttctaaaccacattggaactgacctgaagaagcaaactcggaaaatataataacatccctgaattcaggacttccacaagatgcagaacaaaatggataaaaggtatttcactggagaagttttaatttctaagtaaaatttaaatcctaacacttcactaatttataactaaaatttctcatcttcgtacttgatgctcacagaggaagaaaatgatgatggtttttattcctggcatccagagtgacagtgaacttaagcaaattaccctcctacccaattctatggaatattttatacgtctccttgtttaaaatgtcactgctttactttgatgtatcatatttttaaataaaaataaatattcctttagaagatcaaaaaaaa

SEQ ID NO: 73495 - DNA, 713 bp, Homo Sapiens
tcctgttctcatgggtatgccaaaatgtattaattctgggctaggaggccctgaggaatttggtccttccctcctcccccctcgttttctgtgcttcgccctcactggcttgcctttcttttccttaaatacatcatgttctctcctattttagatccttttccccgaaggtttggaaacattatttctgtaaggttatttttttatatagatggggaagtttttaaatccagataaggttcctaagggcatgtggacaatttaccgttatcatagtattgttcataacgtccatcattattctgtagactgtaagggcttacttagctcgtgtaagaattatccttcaaaaagcatttttaaggtattagtattgctaatctataaactttgtgcaagaagtcctaaagtcaatagcaacatttatttaaagtacagtttgtcatacttaataaacctctggtatattttcctttattatgcttgttaaaaacacagtataaatgggagaaatcattaaagatcattaactccaaggctgctggatgttaggacccttaagcatacttaaaagattgattgtaatcaagaataacttgtatcagattgccttccagtgattcacatttattagttcaaccagttacatacctgtagcaagagaccagtttatttggcaataaaattggggaaggaatcaagacttaaaaaaa

SEQ ID NO: 73496 - DNA, 1046 bp, Homo Sapiens
  misc_feature (93)..(204): n is a, c, g, or t
  misc_feature (333)..(333): n is a, c, g, or t
cgattcataatgcagctgcacgacaggtttccgattgaagccggcagtggcgcaacgcaataatgtgagtggctcactccatagccacccacnnnnnnnnnnnnnnnnnnnnnnnnnnnnnnnnnnnnnnnnnnnnnnnnnnnnnnnnnnnnnnnnnnnnnnnnnnnnnnnnnnnnnnnnnnnnnnnnnnnnnnnnnnnnnnnnaatatgccactcgagcccaagaattcggcacgagtgctctccagcatccgtcgtctatgcagcactccgggtctcctccagagcgctagtcccaggagctcggaatgttcgtgaacttaataacctgcntaacaccacccccgacagggcggagcaggggaaactgactctactctgtgatgccaagacagatgggagtttccttgtacaccactttctctcattctatctcaaagctaattgtaaagtctgctttgtggcactcatccagtccttcagccactacagtatcgtgggacagaagctgggtgtcagcctgaccatggcgcgggagcgtgggcagcttgtgttccttgagggactcaagtctgcagtggacgtcgtcttccaggctcaaaaggagccacaccccctgcagtttctcagggaggctaatgctgggaacttgaaaccattgtttgagtttgtacgggaggccctgaagccagtagacagtggagaggctcggtggacgtacccggtgctgttggtggacgacctcagtgtgctcctgagcctgggcatgggggcggtggctgtgctagacttcattcactactgcagagccaccgtgtgctgggaactaaaggtactcatggaactgccttctctgcgcccacctgtgacctccaagaactcagacaggtccagacctcacttgcttgctgtgatctttttatttgcttggggttttggctttactctggcaggcccagaaagcttttgcagccaccctgttttcccttacctgccattgctgaaaagtaaagccccccaaaataaagggatgatcaacaaaaaaa

SEQ ID NO: 73497 - DNA, 1372 bp, Homo Sapiens
ggctaggtacgaggcctgggtggctgaattcggcacgaggcttgcgcgagccgggctgtcgggtgtgttttgctctccagcctccgtcgtctctgcagcactccgggttctcctccagagcgctagtcccaggagctcggaatgttcgtggaacttaataacctgcttaacaccacccccgacagggcggagcaggggaaactgactctactctgtgatgccaagacagatgggagtttccttgtacaccactttctctccttctatctcaaagctaattgtaaagtctgctttgtggcactcatccagtccttcagccactacagtatcgtgggacagaagctgggtgtcagcctgaccatggcgcgggagcgtgggcagcttgtgttccttgagggactcaagtctgcagtggacgtcgtcttccaggctcaaaaggagccacaccccctgcagtttctcagggaggctaatgctgggaacttgaaaccattgtttgagtttgtacgggaggccctgaagccagtagacagtggagaggctcggtggacgtacccggtgctgttggtggacgacctcagtgtgctcctgagcctgggcatgggggcggtggctgtgctagacttcattcactactgcagagccaccgtgtgctgggaactaaagggaaacatggtggtccttgtgcacgacagtggagatgcggaggatgaggagaatgacatcctgctgaatggcctcagtcatcagagccatctgatactgcgggctgagggcctggccactggcttctgcagggatgtgcacgggcagctgaggatcctgtggaggagaccatcgcagcccgcagtccaccgggatcagagcttcacttaccagtataagatacaggacaaaagcgtgtccttttttgccaaaggaatgtctcctgctgttctgtgacctgatttcggagcagctgaagctacataggactgtttttggacgtggaagatagagcaacatagcaagaatgggtctttctcctctgtagtaatatttcaggctggaccggcgactccactgtgaccagagggttgagtgctgcagtgatggcatgccttggctgccctgggccctgttcagaaaacacaagggaccacaatcctgcctttgctgagagagaggctggatgctagacccaagtgaaaggggtcctttggagcctttgtttaaatatgccttagccccagctgcccatttttggttgacaagcctttcagagccagagtgggtatagatgtgccagccaggagatggcaccggatggcaggtgtgcaaggtgacaactaggataatcatggctggaataaagtaagtttccacactggaa

SEQ ID NO: 73498 - DNA, 863 bp, Homo Sapiens
cctcttgttgaaagcactgcagttgttacaggaagtaaagtaggaactgttgtgtgagcgagacatgagcctgtaggttcagtaggtagagaccaagcatctatctgatagaagcacatggagtgcaataggacattgtgagaaggaatttttcagggattcatctactagtttaaaaaccccactctggccctcttgtcctttcagaaaacatgcaaataccaagatccatacaaaacaataatttattccactgatcaaccaagactggttctggttggacagctaatctgatttggggattcactgtttcagaggacacagacaaaagctgttgcatcaaaactggactttaggagtaatttctattgaactcctgtcaatatgtttatttcctctgtctacagcagatgggagtcttctcttttagacaggggctttttgtttttaaccccaattgtaataaagggtgttctttttcctctttagagtttacaaaactataaatatttgtgtctccacataccatcttcatcttcacacattcactgtgctttcctccccatagtgggagctgtcatcaccaacagggtttactctcccctggagaggttatttaaatagctgtccataagccatccagatcaacaccctttcttccatacagaaaagggctaaccataccacagctggaatctctgaatatttcctattaaaaattttttctatgtgttgttataatttttgtttgggataaagactctatccattgtactagcaaatctatggggggtaattttatctccatctttaacttttaaagtacttcttccccttatcccctcaataaagaaaggaaatcc

SEQ ID NO: 73499 - DNA, 1070 bp, Homo Sapiens
gggttcagagaggccttttgtttaaatataaatgtttaaatataaatgtttgtctggattggctataacatgtctttcagcattaggcttttaagaaacacagggttttgtattctttactaaagatatcagagctcttaatgttgcttagatgagggtgactgtcaagtacaagcaagactgggaccttagaaatcattgtagaaacacagttttgaaagaaaaataccatgtctctaagccaactttaattgcttaaaagacatttttatttagttgaaaaatctagttttttttgtaaactgtatcaaatctgtatatgttgtaataaaacttatgctagtttattggaagtgttcaagaaataaaaatcaacttgtgtactgataaaatactctagcctgggccagagaagataatgttctttaatgttgtccaggaaaccctggcttgcttgccgagcctaatgaaagggaaagtcagctttcagagccagtgaaggagccacgtgaatggccctagaactgtgcctagttcctgtggccaggaggttggtgactgaaacattcccacagggctctttgatggacccacgaacgctcttagctttctcagggggtcagcagagttattgaatcttaattttttttaatgtacaagttttgtataaataataaagaactccttattttgtattacatctaatgcttcaagtgttgctcttggaaagctgatgatgtctcttgtagaagatggactctgaaaaacattccaggaaaccatggcagcatggagagcctcttagtgattgtgtctgcattgttattgtggaagatttaccttttctgttgtacgtaaagcttaaattgcttttgttgtgactttttagccagtgactttttctgagcttttcatggaagtggcagtgaaaaatatgttgagtgttcattttagtgactgtaattaatatcttgctggattaatgttttgtacaattactaaattgtatacattttgttatagaatacttttttctagtttcagtaaataatgaaaaggaagttaatacc

SEQ ID NO: 73500 - DNA, 1067 bp, Homo Sapiens
  misc_feature (1041)..(1041): n is a, c, g, or t
tgaagcaagtggtcccacaaatgaatgatttatatatcaagctgtcacccatgccatctatagacgatacggaacggtgggtggtgggatcaacctactacctcagtaagcctgtttgcagatgctaggtgttcaaggagcatgcaaagataatcctggggaaaatgcccggacagcttgcccgaattgtgtgtgggacctgtaatggctggggaattgtcatcttatggcagcattgtgcagcaggacatcttgtcaaagaagtcacatgattcacaacaggtcgaagatcaatttacaagacctccaaggagcttgcaccaagaagacagcctgaatagcccgacagttctgaactggaacatgggcattgggttctaaaggactaacataaaatctgtgaattaaaaaagctcaatgcattgtcttgtggaggatgaatagatgtgatcactgagacagccacttggtttttggctctttcagagaggtctcaggttctttccatgcagactcctcagatctgaacacagtttagtgctttacatgctgtgctctttgaagagatttcaacaagaatattgtatgttaaagcatcagagatggtaatctacagctcacctctgaaggcaaatataagctgggaaaaaagttttgatgaaattcttgaagttcatggtgatcagtgcaattgaccttctccctcacccctgccagttgaaaatggatttttaaattatactgtagctgatgaaactcctgattttgtagttaatttattaagtctgggatgtagaacttcaagaagtaagagctaagttctaagttcatgtttgtaaattaatacttcatttggggctgggctatttttgatttttgggggggtaatcagcattattcctcagaaggggaactgttttcttcaagggaaaaaacactcttattcccaaactacagaaataatgggttaaacatggctaaatagttctatcaggaaaacaaatcactgtattttatctcccgcaggctattttgttcaanaagaggccttttggttttaaatataa

SEQ ID NO: 73501 - DNA, 1598 bp, Homo Sapiens
  misc_feature (386)..(386): n is a, c, g, or t
agattcacaacaggtcgaagatcaatttacaagacctccaaggagcttgcaccaagaagacagcctgaatagcccgacagttctgaactggaacatgggcattgggttctaaaggactaacataaaatctgtgaattaaaaaagctcaatgcatgtcttgtggaggatgaatagatgtgatcactgagacagccacttggtttttggctctttcagagaggtctcaggttctttccatgcagactcctcagatctgaacacagtttagtgctttacatgctgtgctctttgaagagatttcaacaagaatattgtatgttaaagcatcagagatggtaatctacagctcacctctgaaggcaaatataagctgggaaaaaagtttngatgaaattcttgaagttcatggtgatcagtgcaattgaccttctccctcacccctgccagcttgaatactgtagctgatgaaactcctgattttgtagttaatttattaagtctgggatgtagaacttcaagaagtaagagctaagttctaagttcatgtttgtaaattaatacttcatttggtgctggtctattttgattttggggggtaatcagcattattcttcagaaggggacctgttttcttcaagggaagaaacactcttattcccaaactacagaataatgtgttaaacatgctaaatagttctatcaggaaaacaaatcactgtatttatctccgcaggctatttgttcagagaggccttttgtttaaatataaagtgtttaaatataaatgtatggctggattggctataacatgtctttcagcattacgcttttaagaaacacagggtttggtatactttactaaagatatcagagctcttaatgttgcttacatgagggtgactgtcaagtacaagcaagactgggaccttagaaatcattgtagaaacacagttttgcaaagaaaataccatgtctctaagccaactttaattgcttaaaagaccatttttatttagttgaacacatctacttctttttttgaaactgtatccaatctgtatatgttgtaataaaactttactgctactctattcggaattgttcacgaaataaaaatcaactcgtgtacctatcccacacccacgccctgtctttttgccccctgtccggcccccctcgaccccttacaaaacttttttatagcaccacttcccccccggccagtcgggccccccactggggaaaccttcaaaaatgggtccataagcccgttccccatctggcaaaccccttggacctcgccactacttgtcttgggaaattcttcccccaataaaaacataccccccctggtgggcactacgagtaacctgttcttataaacaaactccccaggaagggaaggccccgtggagggccctttaaacgggcgacctttatccaacgggacgagccctacattatgcgctctcggataatccacacctatatcagcaccgggcgctgggaaaatcatcatcccaccgcacgttggtacgcgaattcttattacaccgcgttcctctagctaaacatcgaaagaactccagactccgagc

SEQ ID NO: 73502 - DNA, 1062 bp, Homo Sapiens
cattggttccccttgtacgtggtgaagttttcttccctgtcgctgactaggcttctctcttgtgctatgggccccatcgaatcttcggcgtttatgaaaggatatctttaggtctcacaatatgatagttaattagttcttccaaaggggaacctttttgaggcaagcaagtgtagtagcattcctaactgtgcaaccgtcgcatagccagagcccatgtaggcgtctgtctgtctaatgcagcgtactgacgtatgtccggaatcttcacagacgtgtcaaaacacaggcagtattctaaaactagcacggaacagggactcacgagactattgtctcctaaacccaggactagagttccctcgttactgtcacttcctttggtcagtaaatgcactgggcttgcccgcactttggccggtcctagaacgctgcttcataacctcctctgtcctgacatgtctgcatctccttccaggtcagctcattcacaagagttgctcccaagcctggatgagttgcaccttgcatcttgagcatgcatttctcacaataattattaagctgtgtgataatttctgctttcaggacactcatccattatcttggctgtgagctccttgggtacgggtaccttgtatgtttaattttatatccctagcacaaagcaagtgcctggcacatagtcagtgccctaagtatttgtagagtgaagaatgccagcctctcttgtccctggtttccttatgtgttgaatgtggttgagtttgtccattgctagggagagacttccagtaataaaatttactattctagatgcttctactgttatgttttatctgcccatttatctttcttagttaccaggagaaatgtgtgacacctatattataatgaaaacaatcttattacttatagtttatctatattaaacaaatttaattgcatttaaagcattctttgatattgttgcttttgcaataaatatggataatcttggttataagggagttaaaacaatgctgtaataaataaagtgtttcatgtgatcaaaatcaaaaa

SEQ ID NO: 73503 - DNA, 3181 bp, Homo Sapiens
gagtatgaagtcgacggcgcgccgaattcggcacgagggctgtgtcccagctccgtctgcaggggagctgcttctgtcacggccatgctgatcgctgcgcacccaagcctggggcctctgcaggcccctccaccgctgtgcaggtccacgatgtctgtgtctgccagcacaacactgccggcccaaattgtgagcgctgtgcacccttctacaacaaccggccctggagaccggcggagggccaggacgcccatgaatgccaaaggtgcgactgcaatgggcactcagagacatgtcactttgaccccgctgtgtttgccgccagccagggggcatatggaggtgtgtgtgacaattgccgggaccacaccgaaggcaagaactgtgagcggtgtcagctgcactatttccggaaccggcgcccgggagcttccattcaggagacctgcatctcctgcgagtgtgatccggatggggcagtgccaggggctccctgtgacccagtgaccgggcagtgtgtgtgcaaggagcatgtgcagggagagcgctgtgacctatgcaagccgggcttcactggactcacctacgccaacccgcagggctgccaccgctgtgactgcaacatcctggggtcccggagggacatgccgtgtgacgaggagagtgggcgctgcctttgtctgcccaacgtggtgggtcccaaatgtgaccagtgtgctccctaccactggaagctggccagtggccagggctgtgaaccgtgtgcctgcgacccgcacaactccctcagcccacagtgcaaccagttcacagggcagtgcccctgtcgggaaggctttggtggcctgatgtgcagcgctgcagccatccgccagtgtccagaccggacctatggagacgtggccacaggatgccgagcctgtgactgtgatttccggggaacagagggcccgggctgcgacaaggcatcaggccgctgcctctgccgccctggcttgaccgggccccgctgtgaccagtgccagcgaggctactgcaatcgctacccggtgtgcgtggcctgccacccttgcttccagacctatgatgcggacctccgggagcaggccctgcgctttggtagactccgcaatgccaccgccagcctgtggtcagggcctgggctggaggaccgtggcctggcctcccggatcctagatgcaaagagtaagattgagcagatccgagcagttctcagcagccccgcagtcacagagcaggaggtggctcaggtggccagtgccatcctctccctcaggcgaactctccagggcctgcagctggatctgcccctggaggaggagacgttgtcccttccgagagacctggagagtcttgacagaagcttcaatggtctccttactatgtatcagaggaagagggagcagtttgaaaaaataagcagtgctgatccttcaggagccttccggatgctgagcacagcctacgagcagtcagcccaggctgctcagcaggtctccgacagctcgcgccttttggaccagctcagggacagccggagagaggcagagaggctggtgcggcaggcgggaggaggaggaggcaccggcagccccaagcttgtggccctgaggctggagatgtcttcgttgcctgacctgacacccaccttcaacaagctctgtggcaactccaggcagatggcttgcaccccaatatcatgccctggtgagctatgtccccaagacaatggcacagcctgtggctcccgctgcaggggtgtccttcccagggccggtggggccttcttgatggcggggcaggtggctgagcagctgcggggcttcaatgcccagctccagcggaccaggcagatgattagggcagccgaggaatctgcctcacagattcaatccagtgcccagcgcttggagacccaggtgagcgccagccgctcccagatggaggaagatgtcagacgcacacggctcctaatccagcaggtccgggacttcctaacagaccccgacactgatgcagccactatccaggaggtcagcgaggccgtgctggccctgtggctgcccacagactcagctactgttctgcagaagatgaatgagatccaggccattgcagccaggctccccaacgtggacttggtgctgtcccagaccaagcaggacattgcgcgtgcccgccggttgcaggctgaggctgaggaagccaggagccgagcccatgcagtggagggccaggtggaagatgtggttgggaacctgcggcaggggacagtggcactgcaggaagctcaggacaccatgcaaggcaccagccgctcccttcggcttatccaggacagggttgctgaggttcagcaggtactgcggccagcagaaaagctggtgacaagcatgaccaagcagctgggtgacttctggacacggatggaggagctccgccaccaagcccggcagcagggggcagaggcagtccaggcccagcagcttgcggaaggtgccagcgagcaggcattgagtgcccaagagggatttgagagaataaaacaaaagtatgctgagttgaaggaccggttgggtcagagttccatgctgggtgagcagggtgcccggatccagagtgtgaagacagaggcagaggagctgtttggggagaccatggagatgatggacaggatgaaagacatggagttggagctgctgcggggcagccaggccatcatgctgcgctcagcggacctgacaggactggagaagcgtgtggagcagatccgtgaccacatcaatgggcgcgtgctctactatgccacctgcaagtgatgctacagcttccagcccgttgccccactcatctgccgcctttgcttttggttgggggcagattgggttggaatgctttccatctccaggagactttcatgcagcctaaagtacagcctggaccacccctggtgtgtagctagtaagattaccctgagctgcagctgagcctgagccaatgggacagttacacttgacagacaaagatggtggagattggcatgccattgaaactaagagctctcaagtcaaggaagctgggctgggcagtatcccccgcctttagttctccactggggaggaatcctggaccaagcacaaaaacttaacaaaagtgatgt

SEQ ID NO: 73504 - DNA, 998 bp, Homo Sapiens
  misc_feature (291)..(291): n is a, c, g, or t
ccaggtcttccattaggttcccgttctggaccactggccggaatggctgcagccgttgcacatcaaggccacccaaaagctttcccgaacagggggcactgcccctgtgaactggttgcactgtgggctaagggagtggtgcggtccgcaggcacacgggttcacagccctggcccactggccagcttccagtggtagggagcacactggtcacattggggacccaccacgttggggcagacaaaggcagcgcccactctcctcgtcacacggcatgtccctccgggaccncaggatgttgcagtcacagcggtggcagccctgcgggttggcgtaggtgagtccagtgaagcccggcttgcataggtcacagcgctctccctgcacatgctccttgcacacacactgcccggtcactgggtcacagggagcccctggcactgccccatccggatcacactcgcaggagatgcaggtctcctgaatggaagctcccgggcgccggttccggaaatagtgcagctgacaccgctcacagttcttgccttcggtgtggtcccggcaattgtcacacacacctccatatgccccctggctggcggcaaacacagcggggtcaaagtgacatgtctctgagtgcccattgcagtcgcacctttggcattcatgggcgtcctggccctccgccggtctccagggccggttgttgtagaagggtgcacagcgctcacaatttgggccggcagtgttgtgctggcagacacagacatcgtggacctgcacagcggtggaggggcctgcagaggccccaggcttgggtgcgcagcgatcagcatggccgtgacagaagcagctcccctgcagacggagctgggacacagcatagtaggcgctgggagggtggtagcccctttggggcacaggggccagcctggtgaaattgactctcaagtttgtgatctcccccacctcttgattttttgacatttgagttgctg

SEQ ID NO: 73505 - DNA, 355 bp, Homo Sapiens
tggttagaagctttggaattgcagttagtctatttttgaaattggtttgttattaatttttgtatttaaattcatttgtttgtattgttcatcttcaaagcttacaatctgaaggtgtccgttcctacactggtcagaccactgtccttggggcagctggggtctttgggaccctccaccgggctcgccggtccgtcggacttttggctgagatccgtgtcagactcctccgaatagtcgtctgttggcatcgagggctgaacccctgaggtgctgcatgaacttgaggtaaccgttgaagatgaggagagaggaggaaaagaagggggcttcgctgccgaagcccgggagacca

SEQ ID NO: 73506 - DNA, 1268 bp, Homo Sapiens
  misc_feature (227)..(227): n is a, c, g, or t
  misc_feature (299)..(299): n is a, c, g, or t
  misc_feature (302)..(302): n is a, c, g, or t
  misc_feature (329)..(329): n is a, c, g, or t
  misc_feature (719)..(1022): n is a, c, g, or t
tatatgaccctccccacaagccggcggggtataggggagggagcccaatcccaaccccttccgcggtgcgatataatgagtgcacacagttccgatgaagcgcagtggcgcacgcatatgtgatagtcatcatagcaccccgcttacacttatctccgctgttgtgtgtggattgtacggatacaattcacactgaaagcttgactgatacgatttatacgactcanttaggaattgccctcgagccagaattcggcacgagccatttgcatcacagaggagagataatgagctacacntantacatttcagcccccatgcacaatttnttccctgcaaagaatgaagaatacttgggtgctgctgcatgccatcccatgatgagagaaaggccaatgaatcctgctatgtggcatgcaaagaatccagtaggaaaggttcaccatcaatacgaccaatatcttgccccatgattcatatttagggctgggaaaatttatctatctttgggaggcagctcttgtgtaaaaggaatcaatgtccagttgtgcccaaattggtctgcatggtcaatgtcaacacaccaacaaaggttctggaagttcctttaggatagcccatgggagtcattaggggatggagcaggccactgaagcttagctgatgctttactaatagaaaagcattatacaactaaaataaattgatgtgtgtgtgtnnnnnnnnnnnnnnnnnnnnnnnnnnnnnnnnnnnnnnnnnnnnnnnnnnnnnnnnnnnnnnnnnnnnnnnnnnnnnnnnnnnnnnnnnnnnnnnnnnnnnnnnnnnnnnnnnnnnnnnnnnnnnnnnnnnnnnnnnnnnnnnnnnnnnnnnnnnnnnnnnnnnnnnnnnnnnnnnnnnnnnnnnnnnnnnnnnnnnnnnnnnnnnnnnnnnnnnnnnnnnnnnnnnnnnnnnnnnnnnnnnnnnnnnnnnnnnnnnnnnnnnnnnnnnnnnnnnnnnnnnnnnnnnnnnnnnnnnnnnnnnnnaatcttttctttgcacataaaatgagccagtgcatgttgcttctctgagtacaagacaaaatttatggcaatgggcaattagacttatacttttctgcaagaaaattaacgggaaaattctcctcttagttttctgttgttttcccattgatctgatactgtaggcttaagaaagtgctttttcatgggcatgccataaaaagtaccggacgcgtgggtcgacgatatcccgggaattccggaccc

SEQ ID NO: 73507 - DNA, 1006 bp, Homo Sapiens
ataaagacacattctcagatctgattacagactagtgtaaaaacagctacatgtatgtagctggttggggatgatatgcctgtatgtggacttgctttgaatatatgtatgcaggatatcatcaagtttcaacatcttgacttgtgacccccaatgtcaacagcttttttaaaaaacaaattcctgcagtaatgaccaaaacccattttaaaaattgcttgacaactgcactcaactgcagctcttacattaacttcaccatggaaaccagttccaactccaggaagtcaccattcaaagaattagatcaactagcccaaccacttcattgtacagatgaagactgaaagccaaagatgtgaagtggtttccacagtatgatacagcctataagggtaaagctgggttaaaaatgcaggtttcctggatttggggccccatggccttgccagtgaaaaggttatttttggactcagagggctttaaaataaattttaagatgtatcagatacacaaacatttaatgggcacctatgggttggacactttgagaattcttaaaagtataagtgggagcaaaatgtatgcaaatttatcacaaactatttaaagcaacttcttggaggcttacaaaccacaatttaacagaaactgtagatggttgaactactagtgacttttttccccttttcccagttacaattatactttcagctaacatatgccagtttcacagaactattaagtccccttattgtactttttatggcatgcccatgaaaaagcactttcttaagcctacagtatcagatcaatgggaaaacaacagaaaactaagaggagaattttcccgttaattttcttgcagaaaagtataagtctaattgcccattgccataaattttgtcttgtactcagagaagcaacatgcactggctcattttatgtgcaaagaaaagatttcaccattaaaaaaattaacttggctaggtatggtgtctcacac

SEQ ID NO: 73508 - DNA, 1716 bp, Homo Sapiens
  misc_feature (101)..(135): n is a, c, g, or t
  misc_feature (1278)..(1297): n is a, c, g, or t
  misc_feature (1501)..(1511): n is a, c, g, or t
cccaccacctccccaacccgtcaatactggagcatcatatggcgcatggcgttcattccgaacgacgagcgcagcgaggtagctagcgaggaagcggccgnnnnnnnnnnnnnnnnnnnnnnnnnnnnnnnnnnncagtcgacggtaccggacatatgcccgggaattcggccattacggccgggggtgacggagcgccggagcggagggagccggggctgggagttctcctgagggaagaggagtggagtaggggggacgcggcggcggcgttgacaatgagttttcttggaggcttttttggtccaatttgtgagatcgatattgttcttaatgatggggaaaccaggaaaatggcagaaatgaaaactgaagatggcaaagtagaaaaacactatctcttctatgacggagaatccgtttcaggaaaggtaaacctagcctttaagcaacctggaaagaggctagaacaccaaggaattagaattgaatttgtaggtcaaattgaacttttcaatgacaagagtaatactcatgaatttgtaaacctagtgaaagaactagccttacctggagaactgactcagagcagaagttatgattttgaatttatgcaagttgaaaagccatatgaatcttacatcggtgccaatgtccgcttgaggtattttcttaaagtgacaatagtgagaagactgacagatttggtaaaagagtatgatcttattgttcaccagcttgccacctatcctgatgttaacaactctattaagatggaagtgggcattgaagattgtctacatatagaatttgaatataataaatcaaagtatcatttaaaggatgtgattgttggaaaaaatttacttcttattagtaagaataaaaatacaacatatggagttacagctgatcaaaaaagagatcacaggaattggacccagtaccacaacagaaaacagaaaacaatcgccaaatatgaaataatggatggtgcaccagtaaaaggtgaatcaattccaataaggctatttttagcaggatatgacccaactccaacaatgagagatgtgaacaaaaaattttcagtaaggtactttttgaatttagtgcttgttgatgaggaagaccggaggtacttcaaacagcaggagataattttatggagaaaagctcctgaaaaactgaggaaacagagaacaaactttcaccagcgatttgaatctccagaatcacaggcatctgccgaacagcctgaaatgtgaactgaacaggagnnnnnnnnnnnnnnnnnnnnctcctgtaacccttgagattaagttcagcaggttaaagatggttgcagctggagggggcggaaaaaggccaaaactccatatatgttagtcttcctttatcttacagcgcagcatttattttatgatataatgaaatgttcgttcatgtatatacatttttaaaagtgctttctttgaaacactggaactttgttaagctgccnnnnnnnnnnnaacttcctactttgatgataagcactcagatatatatcagcgtaaacatgaaaaattttcatgtgagtaggctggtatttgtaattttgctttctttctgcataatgttgattataaatcctctcttttcaggctaatgattacctcttattctctacatgcaaaaaattaaatattttgtgttcaaataaaattagaaaacctg

SEQ ID NO: 73509 - DNA, 556 bp, Homo Sapiens
aagaacattttctcctgctgagcagaaggcatcatcccctgcaattacctcttgccacgtttttctcccctggtaccaaaaggaaccctgtacttttcttcctcctcctccctcctgccagtgcagtggccttggtcttggaaactgaagggagaaggtctggcccccagggtggggctctcctttccctcccccagccccgccgtcagcactggccctctgtgaggttcgatacttgaacgccccctgccctgtgccttggacctgggcaaagctaggaggaggaaacagcacaactcacagtttgagctggggggtggtcttggcaaggctcctgtctgtacccctccctaaccttctcaaaagaggtgcacagcctctcgggtgacttggaaactcctggacaaattccattctaacttattttgacatgtatacaaaccaactgtttagagattccacttgtgcaaagccctactgtgtttttatgttcctgtttaaaagagaagtttacttagcaataattataaataaatgaatattctttagtgaggtg

SEQ ID NO: 73510 - DNA, 1043 bp, Homo Sapiens
gggttccacacacgcggcataggggcctctccccttgggctgtggccgcccgcgaatcgggcacggactcttgccccggaggccgtcaaccccagggttcggccgacctagcggacctccggccagtaacccttcccagccacccaataaggactagtaacggtcgagctcagcctcccggcagcccgcgctccaacactgcaggggccgtgccccggcttctggacaagacacccagctccgaggggccagggctataggagggccgaggcgtgcgctgccctctcagccctggtgcaggcgggggacaatggccactgtccctacctcactgtgccttcctgtgctccggccacaggagcgtcggcccaggggcggctcctgggggctccaggggcaggcgagactgggaaaggcccagccctggagctccagccgaccccaccgtgcccctggcatcctggccctggccgccacctccctggcaccgtctgcctgcagggattctgtgtttttggcttttttaatgtcttaaaatcttttactcaggtaattttaatttcagagagaaaaactgaagtaaatgtcaaaaaacaccagccttaaatccaaagggacagaattcgtgttcttgggtctgtcccgagtgggctcgcgtgcagccaaacatcagctctgggtccaggcgtggcctcagctgggagcctgtgtcctgagcccccggagcgaaggggtgcctggggcatcttggccctctctgggcagacaatgtgtgcacctatgtggaaggccaaggacatgggctgtggccaggcctgtcccgctcaggccccctgcccggcggccgtctgtgtgcggggcctccctcctggctgtccaggacacagcccgtgcagccccagcctggacccaggccatctctggttgtgtctgtgccgactcggtgttgaatcaaatcaggtgtgcgtcaggagccggctgtgtccttcctgccacactcggggattcattccttagaaactgaaataaattctaatttttgg

SEQ ID NO: 73511 - DNA, 917 bp, Homo Sapiens
  misc_feature (684)..(691): n is a, c, g, or t
  misc_feature (696)..(770): n is a, c, g, or t
  misc_feature (772)..(772): n is a, c, g, or t
  misc_feature (776)..(781): n is a, c, g, or t
  misc_feature (784)..(829): n is a, c, g, or t
  misc_feature (831)..(840): n is a, c, g, or t
  misc_feature (848)..(864): n is a, c, g, or t
agagaggaaatgtacatcttgtataacttagggagcgaagaaaatgtaggcgcgaaagtgaaaagtgaggcagctagttcttcctattccattctcgaccaacctgccctttcttaatatgactagtggtcttgatgctagagtcaacttactctgttgctggctttagcagagaataggaggaaccatatgaaaaagatcaggctttctgacttccatccccaaaacacatttaccagcatactccaaactgtttctgatgtgttccatgagaaaaggattgtttgctcaaaaagcttggaaaatactacacactccctttctccttctggagatcaacccacattagagtgtctaaggactcctgagaattcctgttacagtaaacaaaactaacgtaatctaccatttcctacactatttgagcatggaaatcatagtccccactctgtgaaaacttaacgctttttggaagacatttctgtagcatgtcagtttggagaaatgatgactacgccttgatgaaagaaccgtgttggtgctgctaagtttagccattatggtttttcctttctctctcttaagccttattcttcaactaaaagatgaggattaagagcaagaagttgggggggatgtgaaaataattttatgaggttgtctaaaataaagagtagtttcttnnnnnnnnaaaannnnnnnnnnnnnnnnnnnnnnnnnnnnnnnnnnnnnnnnnnnnnnnnnnnnnnnnnnnnnnnnnnnnnnnnnnnanaaannnnnnaannnnnnnnnnnnnnnnnnnnnnnnnnnnnnnnnnnnnnnnnnnnnnannnnnnnnnntttggggnnnnnnnnnnnnnnnnnacaaaaaattttttaaacccccctttttggggggggcgggcgcccccacaaag

SEQ ID NO: 73512 - DNA, 1624 bp, Homo Sapiens
gcgtgagccacgtgcgcccagccttacttatttttaaatcagattttttaagtcaactaaaagcagctatgagttaagtacctgccctgcaaaaattgttagaaaaagttttaggattatgaagattaagaagttattttccttaacgtggaacagttctaaacatttatctgatacttctctaacaagtgagtgatctcatgtaaccccagttggtatctgtaaaggctgcagcgatagaattgagctgtataacagtgttagaactgtcaagtgataatcacagaacagtttgtatcggttttataattctcatgtcttgatcagatctgaaggaaataggcataccctccaacattctaaaaattatttatttgtattaggattggtttattaaagttccacgagctgctttatggtcagttgggctgagtagtagatatcttaaagacatgcagtgaaagtgaaccctgtcatatcatggtgcctctttcaaggttcctctgtaaagttcctcatcttgcagaattatttcaataccaaggtatggttgaaccagctgtccagccttaactctatttagtgccccattactaatgttcttttaactggttagtatgtgtattaactgtccagtgttcggattttacctcttgatagctccatttgtccctggtgctgcttttaaggatgtagggccatgtgatcaggtatcaagttgagtaggtacgcagttggcctggtgatgtatctgtgcctgttttatcttctcccaggaagagctgctttggtatagttgtttacttggattcatacaaagaacagggcagcaatcttggaaagctttctgaagcttataagaacctgaaggggtttggagggggaacagtaacaaaggctgcctttatgtctttggtcacaaagcacatagatgtatgttctgtaaagactaaagtgattgttataccagggcttcctgaccttcgggagagactcaaaaaagcagagaggagcacaaagtgaagttaatttggttggcttgctttatctggtttctcattttctttcaatttaaacctgaacataacacccttctccgatacctatccagcagactcctggttgggaagccctgtattaaattttgagaatgtacacagttttcttttgtacagtgctttacaactgctaaaagttaacttgtttaaagcaaaacaagaccttgaaaggtcaatcatattaaagctggtttgattattaatagttatcttttaggaagaagcttttttccctatgtaagatgtcatactgcagatttaaaatatagactatcaataaaatgcatgaagtgatcatttgtgcttgatcatctctccttgggtttttctttaaaaaggggaatctgctataaaggttctgttgcttcaaaccaatgtcaaatagacttgatttttagagtcatggaattacagtgcaaccttgatttttattcccctcactgctatgagtgtgggcaggtactggtttatatgttataacttccgttttatctgtgttgtgtagttgaatggcttaatcgttgagtggtaaaataaaagattatattccaatacaagaatcctgg

SEQ ID NO: 73513 - DNA, 1945 bp, Homo Sapiens
gcttcgtgcgcccctgccgaactgcacagccagacacggctgccaacgtcacgtcggcggcgcagccggtcaacggggcaggcatggtggctcccgcggtagcctcggtggcagggggcagcggcagcggcggcttcagcgccagcctgcacagcgagccgccggtctacgcaaacctcagcaacttcaacccaggcgcgctgagcagcggcggcggggcgccctcctacggcgcggccggcctggcctttcccgcgcaaccccagcagcagcagcagccgccgcaccacctgccccagcagatgcccgtgcagcacccgcggctgcaggccctgaaggaggagcctcagacagtgcccgagatgcccggcgagacaccgcccctgtcccccatcgacatggagtcccaggagcggatcaaggcggagaggaagcgcatgaggaaccgcatcgctgcctccaagtgccgaaaaaggaagctggagagaatcgcccggctggaggaaaaagtgaaaaccttgaaagctcagaactcggagctggcgtccacggccaacatgctcagggaacaggtggcacagcttaaacagaaagtcatgaaccacgttaacagtgggtgccaactcatgctaacgcagcagttgcaaacattttgaagagagaccgtcgggggctgaggggcaacgaagaaaaaaaataacacagagagacagacttgagaacttgacaagttgcgacggagagaaaaaagaagtgtccgagaactaaagccaagggtatccaagttggactgggttgcgtcctgacggcgcccccagtgtgcacgagtgggaaggacttggcgcgccctcccttggcgtggagccagggagcggccgcctgcgggctgccccgctttgcggacgggctgtccccgcgcgaacggaacgttggacttttcgttaacattgaccaagaactgcatggacctaacattcgatctcattcagtattaaaggggggagggggagggggttacaaactgcaatagagactgtagattgcttctgtagtactccttaagaacacaaagcggggggagggttggggaggggcggcaggagggaggtttgtgagagcgaggctgagcctacagatgaactctttctggcctgccttcgttaactgtgtatgtacatatatatattttttaatttgatgaaagctgattactgtcaataaacagcttcatgcctttgtaagttatttcttgtttgtttgtttgggtatcctgcccagtgttgtttgtaaataagagatttggagcactctgagtttaccatttgtaataaagtatataatttttttatgttttgtttctgaaaattccagaaaggatatttaagaaaatacaataaactattggaaagtactcccctaacctcttttctgcatcatctgtagatactagctatctaggtggagttgaaagagttaagaatgtcgattaaaatcactctcagtgcttcttactattaagcagtaaaaactgttctctattagactttagaaataaatgtacctgatgtacctgatgctatggtcaggttatactcctcctcccccagctatctatatggaattgcttaccaaaggatagtgcgatgtttcaggaggctggaggaaggggggttgcagtggagagggacagcccactgagaagtcaaacatttcaaagtttggattgtatcaagtggcatgtgctgtgaccatttataatgttagtagaaattttacaataggtgcttattctcaaagcaggaattggtggcagattttacaaaagatgtatccttccaatttggaatcttctctttgacaattcctagataaaaagatggcctttgcttatgaatatttataacagcattcttgtcacaataaatgtattcaaataccaataaaa

SEQ ID NO: 73514 - DNA, 491 bp, Homo Sapiens
ggctccacgccaagggaggtcgcgccaagtccttcccactcgtgcacactgggggcgccgtcaggacgcaacccagtccaacttggatacccttggctttagttctcggacacttcttttttctctccgtcgcaacttgtcaagttctcaagtctgtctctctgtgttattttttttcttcgttgcccctcagcccccgacggtctctcttcaaaatgtttgcaactgctgcgttagcatgagttggcacccactgttaacgtggttcatgactttctgtttaagctgtgccacctgttccctgagcatgttggccgtggacgccagctccgagttctgagctttcaaggttttcactttttcctccagccgggcgattctctggacactcccgaaacaccagcccgggagccacaggcgctagctctgggcagttagagagaaggtgaaaagaaaataagatttgcagttcggactatactgccgacctg

SEQ ID NO: 73515 - DNA, 1732 bp, Homo Sapiens
tatgcgggggagaggtatgaagtcgacggcgcgccgaattcggcacgaggcgcggagtcaggcagacagacagacacagccagccagccaggtcggcagtatagtccgaactgcaaatcttattttcttttcaccttctctctaactgcccagagctagcgcctgtggctcccgggctggtgtttcgggagtgtccagagagcctggtctccagccgcccccgggaggagagccctgctgcccaggcgctgttgacagcggcggaaagcagcggtacccacgcgcccgccgggggaagtcggcgagcggctgcagcagcaaagaactttcccggctgggaggaccggagacaagtggcagagtcccggagcgaacttttgcaagcctttcctgcgtcttaggcttctccacggcggtaaagaccagaaggcggcggagagccacgcaagagaagaaggacgtgcgctcagcttcgctcgcaccggttgttgaacttgggcgagcgcgagccgcggctgccgggcgccccctccccctagcagcggaggaggggacaagtcgtcggagtccgggcggccaagacccgccgccggccggccactgcagggtccgcactgatccgctccgcggggagagccgctgctctgggaagtgagttcgcctgcggactccgaggaaccgctgcgcccgaagagcgctcagtgagtgaccgcgacttttcaaagccgggtagcgcgcgcgagtcgacaagtaagagtgcgggaggcatcttaattaaccctgcgctccctggagcgagctggtgaggagggcgcagcggggacgacagccagcgggtgcgtgcgctcttagagaaactttccctgtcaaaggctccggggggcgcgggtgtcccccgcttgccagagccctgttgcggccccgaaacttgtgcgcgcagcccaaactaacctcacgtgaagtgacggactgttctatgactgcaaagatggaaacgaccttctatgacgatgccctcaacgcctcgttcctcccgtccgagagcggaccttatggctacagtaaccccaagatcctgaaacagagcatgaccctgaacctggccgacccagtggggagcctgaagccgcacctccgcgccaagaactcggacctcctcacctcgcccgacgtggggctgctcaagctggcgtcgcccgagctggagcgcctgataatccagtccagcaacgggcacatcaccaccacgccgacccccacccagttcctgtgccccaagaacgtgacagatgagcaggagggcttcgccgagggcttcgtgcgcgccctggccgaactgcacagccagaacacgctgcccagcgtcacgtcggcggcgaagccgaacaacggggcaggcatggtggctcccgcggtagcatcggtggcagggggcagcggaagcggaggcttcagaaccagcctgcacagcgagccagcaggtctacgcaaacctaagcaacttcaacccaggccgcgctgagcagcggcggcggggcgcccctcctacggcgcggccggcctggcctttcccggcgcaaccccagcagcagcaagcagccgcggcaccaacctggccccaaccaaatgcccgtgccagcacccgccggctggaaagccctggaaaggaggagcctccagaaaggggcccggaaaaaggcccgaagaaaaaatcgccccctgggtcccccat

SEQ ID NO: 73516 - DNA, 576 bp, Homo Sapiens
  misc_feature (126)..(143): n is a, c, g, or t
  misc_feature (228)..(343): n is a, c, g, or t
gcggccgcctgcgggctgccccgctttgcggacgggctgtccccgcgcgaacggaacgttggacttttcgttaacattgaccaagaactgcatggacctaacattcgatctcattcagtattaaannnnnnnnnnnnnnnnnnttacaaactgcaataaagactgataattgcttctgtagtactccttaagaacacaaaacggggggagggttggggaggggcggcnnnnnnnnnnnnnnnnnnnnnnnnnnnnnnnnnnnnnnnnnnnnnnnnnnnnnnnnnnnnnnnnnnnnnnnnnnnnnnnnnnnnnnnnnnnnnnnnnnnnnnnnnnnnnnnnnnnncgagtggtaggaaagagaagtagaaagtggaggaggggagtattgaggggagagggatgagaggggagtggatgtataggaggctgtgtggcgacggtagaaaaagatggaggggagcattaaaatggacgtcagaagatagagtgtgataaagatggataagttgaagaatgattcagtggtaatacggaaaaggtgagatgtgaatgaagagggatacggaaggaaagtgt

SEQ ID NO: 73517 - DNA, 888 bp, Homo Sapiens
gcccttgcgagggttgtctcgaggcagaggtcatgttcccagccaagagtatgagaacatccagtcgagcagaggagattcatggcctgtgctcggtgagccttaccttctgtgtgctactgacgtacccatcaggacagtgagctctgctgccagtcaaggcctgcatatgcagaatgacgatgcctgccttggtgctgcttccccgagtgctgcctcctggtcaaggagaagtgcagagagtaaggtgtccttatgttggaaactcaagtggaaggaagatttggtttggttttattctcagagccattaaacactagttcagtatgtgagatatagattctaaaaacctcaggtggctctgccttatgtctgttcctccttcatttctctcaagggaaatggctaaggtggcattgtctcatggctctcgtttttggggtcatggggagggtagcaccaggcatagccacttttgccctgagggactcctgtgtgcttcacatcactgagcactcatttagaagtgagggagacagaagtctaggcccagggatggctccagttggggatccagcaggagaccctctgcacatgaggctggtttaccaacatctactccctcaggatgagcgtgagccagaagcagctgtgtatttaaggaaacaagcgttcctggaattaatttataaatttaataaatcccaatataatcccagctagtgctttttccttattataatttgataaggtgattataaaagatacatggaaggaagtggaaccagatgcagaagaggaaatgatggaaggacttatggtatcagataccaatatttaaaagtttgtataataataaagagtatgattgtggttcaaggataaaaa

SEQ ID NO: 73518 - DNA, 1293 bp, Homo Sapiens
gaaagctgacaaaatgaccagatctcataaaaatgttgccgatgactatatccacaccgcagcctgcttacatagcctggctttagaagagcccacagtcatcaaaaagtacctattgaaggttgctgagctatttgaaaaactaaggaaagtagagggtcgagtttcatcagatgaagatttgaagctaacagagctcctccgatactacatgctcaacattgaagctgctaaggatctcttatacagacgcaccaaagccctcattgactatgagaactcaaacaaagctctggataaggcccggttaaagagcaaagacgtcaagttggctgaggcacaccagcaggagtgctgccagaaatttgaacaactttccgaatctgcaaaagaagaactgataaatttcaaacggaagagagtggcagcatttagaaagaatctaattgaaatgtctgaactggaaataaaacatgccaggaacaatgtctcccttttgcagagctgtattgacttgttcaagaataactgatatgccttcactcagaagaaaagaaatgaatgtgaaagaaagccaagcatcacttgcacttaaatcattaccacggaagatatattagcttcaactttagtttaaaattatgtgaataaatattttgatttctacaaatcttaacatttaaccatgttggtttaaaaatattattgcttgctacttggacataactaatttttccttgtgcatttaatacctctgggcagaatccaaatactgggttctcccgtagttcgtctttagttactaagaaagggtgtaggacacattagccttctggaaacaagtagaagccatcacctggcccatgtccctacaaacccatgattgtcagggaggtgccagttacagcaggtgattcagctacttgaggtcggtaacagaccttccattcctcactgaaggtggggtttgtgtttttgttttgccctgttactccactggtagtcatctggtgtttgtactataacaacagcaagaaaatctcatttatctttatatactctttgcacctcctttttttagtcgagatataaatatttgaggggagagaaatatctacaggtatatatggaaacaaataatgtggtctgctttataagatggccagatctacattaggaaaagtataagccccctccctaatggccgctggggggtgagggcggtgtgttgtatgtctttgggtgtttgtttttttataaagcatataataaaataatcgtgctactaaaaaa

SEQ ID NO: 73519 - DNA, 975 bp, Homo Sapiens
  misc_feature (65)..(65): n is a, c, g, or t
  misc_feature (69)..(69): n is a, c, g, or t
  misc_feature (139)..(139): n is a, c, g, or t
  misc_feature (149)..(149): n is a, c, g, or t
  misc_feature (176)..(176): n is a, c, g, or t
  misc_feature (191)..(191): n is a, c, g, or t
  misc_feature (266)..(266): n is a, c, g, or t
  misc_feature (271)..(271): n is a, c, g, or t
acacttcctgtgagcctgtcaccagtggctgtaccagtcattgtctcccagcgcaccaagcctanttcntgactcatacagacgagagatggacacgggtcctgatgcatcccgatgtgtgtgagatgccgagcagacntcggccctgntatgcagagagtgcgcccctggggccntacatgagtggacgnctgaaagtgaagggcgacctgctatggcccatgaagctggagctgtcctcagggccttgaagtagcagccttgcntgacntttccagagcccagtcccaagcctggcaccaagccctgaggggcctcttggaggaggaggtgttcatctgcaccacagagagttgaggccctaacaaatttcaggcccagccaagagcccatgaatggaggctgcaggaggctgagtccggctgccatgcacgtctcccctacagtggttctctggacaaggctttgtccatcccggtccccagctgagtgcccagcgctgagctgggtgcacggtgtgattccaggaggagagccaggcctgccctgccctgctggcttcctgactggagagacaggacccacagaaacagcctgacagcagctggtttggtccttgtgtgagggaccaagcatgtggcccaggctctaagctctgcggggattggagagggatggggagggaagggaaggcagctccaagaagaggtccctgtggcgaagttacctggggatcctggctggcccaccttcctggctgcagtccaggcccgtgctggcgggattgggcatgggaaggagcagggcctgctgcttccctggcgctgctcccaaagatttctgactcatctgccagctctgtcctgcatgcctggcgagctggggcccagggcagcatgaaggagagccctgcgttctgtgcttcttaccagaggtttgcaagcctcagacaaataaatgtggtgtttacaatgt

SEQ ID NO: 73520 - DNA, 2089 bp, Homo Sapiens
  misc_feature (81)..(115): n is a, c, g, or t
  misc_feature (464)..(509): n is a, c, g, or t
aacattgtatgactcatatgggccctacgctctgcagcgaacgacgagcgcagcgaagtcagtgagcgaggaagcggccgnnnnnnnnnnnnnnnnnnnnnnnnnnnnnnnnnnncagtcgacggtaccggacatatgcccgggaattcggccattacggccggggaggcgtgaggcgggcctgaagcggcagcgggcggcttcgtccggcgagagctaggccgaggacccgctgccgtgctccccggcacctcacctgcgttcttcacccggactcccgcggcgccgcggccgcggcgtggggtaagggcgggcggtggtctcctccaaggctgcgcgctcggagccggcctgctgggcttgggcggggcgcaggggtccggggccgcctacccggctccagtcctccccctgtgggacctggcgacggcggcggtagggaagaggggagcgtgcgcccggtnnnnnnnnnnnnnnnnnnnnnnnnnnnnnnnnnnnnnnnnnnnnnntggggctcgggatccgcatcgggatcgggccgccatggacgacaaggcgttcaccaaggagctggaccagtgggtcgagcagctgaacgagtgtaagcagctgaacgagaaccaagtgcggacgctgtgcgagaaggcaaaggaaattttaacaaaagaatcaaatgtgcaagaggttcgttgccctgttactgtctgtggagatgtgcatggtcaatttcatgatcttatggaactctttagaattggtggaaaatcaccggatacaaactacttattcatgggtgactatgtagacagaggatattattcagtggagactgtgactcttcttgtagcattaaaggtgcgttatccagaacgcattacaatattgagaggaaatcacgaaagccgacaaattacccaagtatatggcttttatgatgaatgtctgcgaaagtatgggaatgccaacgtttggaaatattttacagatctctttgattatcttccacttacagctttagtagatggacagatattctgcctccatggtggcctctctccatccatagacacactggatcatataagagccctggatcgtttacaggaagttccacatgagggcccaatgtgtgatctgttatggtcagatccagatgatcgtggtggatggggtatttcaccacgtggtgctggctacacatttggacaagacatttctgaaacctttaaccatgccaatggtctcacactggtttctcgtgcccaccagcttgtaatggagggatacaattggtgtcatgatcggaatgtggttaccattttcagtgcacccaattactgttatcgttgtgggaaccaggctgctatcatggaattagatgacactttaaaatattccttccttcaatttgacccagcgcctcgtcgtggtgagcctcatgttacacggcgcaccccagactacttcctataaatttctcctgggaaacctgcctttgtatgtggaagtatacctggctttttaaaatatatgtatttaaaaacaaaaagcaacagtaatctatgtgtttctgtaacaaattgggatctgtcttggcattaaaccacatcatggaccaaatgtgccatactaatgatgagcatttagcacaatttgagactgaaatttagtacactatgttctaggtcagtctaacagtttgcctgctgtatttatagtaaccattttcctttggactgttcaagcaaaaaaggtaactaactgcttcatctccttttgcgcttatttggaaattttagttatagtgtttaactggcatggattaatagagttggagttttatttttaagaaaaattcacaagctaacttccactaatccattatcctttattttattgaaatgtataattaacttaactgaagaaaaggttcttcttgggagtatgttgtcataacatttaaagagatttcccttcatttaaactaaattactgttttatgttgatctgcatatttctgtatatttgtcatgacagtgcttgcatcctatttggtgtactcagcaaataaacttttcattttaaacaa

SEQ ID NO: 73521 - DNA, 1587 bp, Homo Sapiens
ataattttctcccctacactattaacgacaccactatggtccggtccggaattcccgggatctggcgctgattatcctgctgctgccgccaccgctgctgctgctctgcaaaattcagctgctgcctctgtcttgaggaccccagcgcctttcccccggggccatgctgcctgcagccacagcctccctcctggggcccctcctcactgcctgcgccctgctgccttttgcccagggccagacccccaactacaccagacccgtgttcctgtgcggaggggatgtgaagggggaatcaggttacgtggcaagtgaggggttccccaacctctacccccctaataaggagtgcatctggaccataacggtccccgagggccagactgtgtccctctcattccgagtcttcgacctggagctgcaccccgcctgccgctacgatgctctggaggtcttcgctgggtctgggacttccggccagcggctcggacgcttttgtgggaccttccggcctgcgcccctagtcgcccccggcaaccaggtgaccctgaggatgacgacggatgagggcacaggaggacgaggcttcctgctctggtacagcgggcgggccacctcgggcactgagcaccaattttgcggggggcggctggagaaggcccagggaaccctgaccacgcccaactggcccgagtccgattaccccccgggcatcagctgttcctggcacatcatcgcgcccccggaccaggtcatcgcgctgaccttcgagaagtttgacctggagccggacacctactgccgctatgactcggtcagcgtgttcaacggagccgtgagcgacgactcccggaggctggggaagttctgcggcgacgcagtcccgggctccatctcctccgaagggaatgaactcctcgtccagttcgtctcagatctcagtgtcaccgctgatggcttctcagcctcctacaagaccctgccgcggggcactgccaaagaagggcaagggcccggccccaaacggggaactgagcctaaagtcaagctgccccccaagtcccaacctccggagaaaacagaggaatctccttcagcccctgatgcacccacctgcccaaagcagtgccgccggacaggcaccttgcagagcaacttctgtgccagcagccttgtggtgactgcgacagtgaagtccatggttcgggagccaggggagggccttgccgtgactgtcagtcttattggtgcttataaaactggaggactggacctgccttctccacccactggtgcctccctgaagttttacgtgccttgcaagcagtgcccccccatgaagaaaggagtcagttatctgctgatgggccaggtagaagagaacagaggccccgtccttcctccagagagctttgtggttctccaccggcccaaccaggaccagatcctcaccaacctaagcaagaggaagtgcccctctcaacctgtgcgggctgctgcgtcccaggactgagacgcaggccagccccggcccctagccctcaggccttctttcttatccaaataaatgtttcttaatgaggaaaa

SEQ ID NO: 73522 - DNA, 1101 bp, Homo Sapiens
  misc_feature (62)..(72): n is a, c, g, or t
  misc_feature (113)..(113): n is a, c, g, or t
  misc_feature (223)..(223): n is a, c, g, or t
  misc_feature (295)..(304): n is a, c, g, or t
  misc_feature (395)..(409): n is a, c, g, or t
  misc_feature (546)..(559): n is a, c, g, or t
  misc_feature (905)..(913): n is a, c, g, or t
acaaaaaagaaaatgcgtgtggagggaccccagttgattagcttctgtgggggccccccctnnnnnnnnnnnagaaacccttctttagaaaaatgggggtcccgctcccccantaagtattttgttttgtttatagattattgaaaactgcgcaaagtaactgtgtggttgctgcagacagagcttagtcagaggatttctgtctgccttagggggggaaacntaaaaggtggctcccctttaaacaatccccattaaatttttaggcatttttgcattaacttgggggaaaccnnnnnnnnnnggtggccaatttaaaatgtactataccgtagaatatggccataacagtcccaaggggaagaacaggatgaagaataacatacgtgaggggnnnnnnnnnnnnnnnccttcaattcttataagtatagcatttcccatttttgaaataccttcttggaggattcaatcattttttttctgtatgtgattctaactacagtgattatttttcaccggctgtattccacacacgtggaattttcnnnnnnnnnnnnnnaaagagggtttgctttgtccgtcagcttcttcctcaggtgaacacatataacttgcttctcatatttagagctcatatccccaagagtgagatattgacagtaccttttaagtacagaatccaacataaagtcctattgttaaaaatttctcatcatcaattaggattttttaaatgtgccaacatgcttaaaaattaggataactaaaatatattatgacagaaggaaatataaaaactatccttgggatttaaaacaatacagaacaaaaaataacatgtttccttttgaaatactctaatttgaaaacatctggtacattctcctttctggttgtgctgtgannnnnnnnngcccatcaacaaaacatgtaccagttgttttggagttccgattccacctcttcccctcttgggcatatgaagcacatttcctgttttatgataccattttcacattcccctcagcagtttgaaagcaacgccctaacgttccttctaatactttgcaccttttccattttttcaacaagatatatcag

SEQ ID NO: 73523 - DNA, 652 bp, Homo Sapiens
  misc_feature (197)..(213): n is a, c, g, or t
cttttaacacagaaatctgtttattaaaccaaacaaaacagagaaaattataccagccctcaatttttgaattttcatttaaataagcaaactctaaatccacatcttaaaagatgtttgtgcagctatgtatttccaaaatactcatatttcaataagatttttcacattatattcaccaacagtatcacaaaagnnnnnnnnnnnnnnnnngtttacataattgtaaggaacagtaattctagaaacactagaagaaaaaagcatagcaatgtccacagttacaagaaaaagtgcacattactcggtcacaatcacagtcattacttgaaaaactatatgtaacaagtagataagaaatatcactgatgcctcaaactcattgtcaaaaactgaatgacataaattttacatgaaataaggcaaattcaggaatgcacaaagaatttgtaatccaaccaaagctaaacaacagaaaaaagttgtataagaagcatgaactaaagtacttctccctaaatatttaaaaaataggcttgtctcagtgcacaaagaaaacatcactcatgtgtatcccacactataaaataagaaagaagggtaaagtatgggggataggagggcacagttcattgtaagttgcagctgcatc

SEQ ID NO: 73524 - DNA, 1164 bp, Homo Sapiens
gcggaccagaaactgtccgctgttggtgaaaagcaaaccctgtctccaaagcaccccaaaccatccactgtgaaagattgccccaccctgtgcaaacagacagacaacagacagacagacaaaagcccgagtcagccggccgccaacaccgacagaagggcggaagggaagaaatgcactgaagcactttatgctccagcagagggcgacaagctcgaggccggcctttcctttgtgcatagcgagaaccggttgaaaggcgcggagcggccagccgcggggtgggaaagggcttccttgaggccagagggaaagggcccggtccccagaagccaccgacggaggcagacaagcccaatggcatgaaacggaccccctcagccactgggcagagttctttccgatccacggccctcccggaaaagtctctgagctgctcctccagcttccctgaaaccagggccggagttagagaggcctctgcagccagcagcgacacctcttctgccaaggccgccgggggcatgctggagcttccagcccccagcaacagggaccataggaaggctcagcctgccggggagggccgaacccacatgacaaagagtgactccctgccctccttccgggtctccaccctgcctctggagtcacaccaccccgacccaaacaccatgggcggggccagccaccgggacagggctctctcggtgactgccaccgtaggggaaaccaaagggaaggaccctgccccagcccagcctcccccagctaggaaacagaacgtgggcagagacgtgaccaagccatccccagccccaaacactgaccgccccatctctctttctaatgagaaggactttgtggtacggcagaggcgggggaaagagagtttgcgtagcagccctcacaaaaaggccttgtaacggggagggcccaggggcaggactgtggagacccgtcctgaacgggcgactgtgtcttgactacctttcaaaaccagcactgtgtgggaatgtccgccaggcagagctcggagcctcattgagacaggggagagagaaagacaaagaggggaccttcttccagatgccttcccagttgtaaccggtaaaactgttaccagatagtgtttgggaacagtgaggatcctgctagaccgcc

SEQ ID NO: 73525 - DNA, 992 bp, Homo Sapiens
tcggctaggtacgaggcctgggtgtcgaattcggcacgagggtccagcccggctgccaggcagcattgcagttccccaagccacgcttctggcagagagccgggggccaagcccagcactgcagagcccagctcgagcccccaggaccctcccaagcctgttgctgcgcacagtgaaagcagcagccacaaagggcaaagagcctgccaccgacggaggcagacaagcccaatggcatgaaacggtccccctcagccactgggcagagttctttccgatccacggccctcccggaaaagtctctgagctgctcctccagcttccctgaaaccagggccggagttagagaggcctctgcagccagcagcgacacctcttctgccaaggccgccgggggcatgctggagcttccagcccccagcaacagggaccataggaaggctcagcctgccggggagggccgaacccacatgacaaagagtgactccctgccctccttccgggtctccaccctgcctctggagtcacaccaccccgacccaaacaccatgggcggggccagccaccgggacagggctctctcggtgacttgccacctgtaggggaaaccaaagggaaggaccctgccccagcccagcctcccccagctaggaaacagaacgtgggcagagacgtgaccaagccatccccagccccaaacactgacctgcccatctctctttctaattgagaaggactttgtggtacggcggaggcccgggacagagagtttgcgtagcagccctcaacaaaaggccttgtaccgggagggccagtggccggactgtggagacccgtcctgaacgggcgactgtggtctgactacctttcaaacagctctgtgtgggattgtccgcgggcgagcctgggagcctattggacggggcgctcgtacgacacggggcctcttccgatgcttccggtgtaccgggtagttcccgttgtttgtccac

SEQ ID NO: 73526 - DNA, 399 bp, Homo Sapiens; identical to SEQ ID NO: 8744

SEQ ID NO: 73527 - DNA, 1418 bp, Homo Sapiens
  misc_feature (48)..(87): n is a, c, g, or t
  misc_feature (91)..(125): n is a, c, g, or t
  misc_feature (704)..(819): n is a, c, g, or t
cggggagaaaactgatatactactatagggcgctagcggcgtaatagnnnnnnnnnnnnnnnnnnnnnnnnnnnnnnnnnnnnnnnnccgnnnnnnnnnnnnnnnnnnnnnnnnnnnnnnnnnnncagtcgacggtaccggacatatgcccgggaattcggccattacggccgggggcatttcggggcggtaccaagatggactcctcgcgggcccggcagcagctccggcggcgattcctcctcctgccggacgccgaggcccagctggaccgcgagggtgacgccgggccggaaacctccacagctgttgagaaaaaggagaaacctcttccaagacttaatatccattctggattctggattttggcatccattgttgtgacctattatgttgacttctttaaaacccttaaagaaaacttccacactagcagctggtttctctgtggcagtgccttgttgcttgtcagtttatcaattgcattttactgcatagtctacctggaatggtatagtggaattggagaatatgatgtcaagtatccagccttgatacccattaccactgcctcctttattgcagcaggaatttgcttcaacattgctttatggcatgtgtggtcgttattcactccattgatgtcgtttacccagtttatgggggtcgtcatgtttatcacactccttggatgatttccgaannnnnnnnnnnnnnnnnnnnnnnnnnnnnnnnnnnnnnnnnnnnnnnnnnnnnnnnnnnnnnnnnnnnnnnnnnnnnnnnnnnnnnnnnnnnnnnnnnnnnnnnnnnnnnnnnnnnacatgtaaatttgaagtgaatggttaaacatccagctagctgaaagcatggcagaccctaacagaaaagctacagtgtgtttttgcagctatgaagtgaatggtttcctggggaaaattgtgactttgtataactgttgttgaaaccagaataaattatatttcacttgcatatgcataaattattaaaattttcagaagtcagtgatacagaagtactattttgcaatgttaatctgtttgagtctttggagaaagtggtttcattgtaggtacatagtgcactgttaatattttaaacaagtagttcactcttccatttaagggatagcagttccttgtataaaatgactggatgtgtataaaggaattatgttgtcatgtgcctttaaccagctttagtaattactataatctcatatttatgatagttttgttaggtgacaggaccaaatgaaaatattttatgttttctcatcactttagattttatcattatgtacattactgggtttttagcatttcctaatgtgaagttttaatcacttttaagtatacatttttttctgtatcatttaaataaaatatttttataacttt

SEQ ID NO: 73528 - DNA, 753 bp, Homo Sapiens
ctggcgccggctctggcgcggagaggcgcaggcccaggctccactccccagtctgtgaaaggcttcaacattgctttatggcatgtgtggtcgtttttcactccattgttgttgtttacccagtttatgggggttgtaatgtttatcacactccttggatgatttccgaagatcaccccatcctgagatctgctgccttacacagtggaggctgttttctgagtgtcggataactctgttattaaataagtgcatattgagcaatactcactccagatgcttagaggcatgttgagaaggacaaagatagtgcctcctgtcaggtcacttacatcagaacttgcaggaaacctgctttatacagcagttgacagcgtgtggacaactgaacgctcatgcgacaataaacagttaatacactaaattttcaaggagttaatgaaacactgacatttctgctaaaaacagcatgttctccctgtgggattttacacagcgaaggtcaatggtaactgtacaaagaagaaactggacatactctcattgttagcagtctgaaaatagttgctagcacctccatgcccacgccaatgtctccagcctccttcaagcaccttgcttgtgtcttggaaccattgggagccctcacaggaggcccttcgttcctgtatgcttgtggtgccactagctgcctttgggcccggaggattcctacacatctccgaacacttcctcacctgacccttgtcacca

SEQ ID NO: 73529 - DNA, 610 bp, Homo Sapiens
  misc_feature (386)..(423): n is a, c, g, or t
gcggccgcctgccgagaaactctcccctaacccacccaacctcaccaagaagatgaagaagattgtggatgccgtgatcaagtacaaggacagcagcagtggacgtcagctcagcgaggtcttcatccagctgccctcgcgaaaggagctgcccgagtactacgagctcatccgcaagcccgtggacttcaagaagataaaggagcgcattcgcaaccacaagtaccgcagcctcaacgacctagagaaggacgtcatgctcctgtgccagaacgcacagaccttcaacctggagggctccctgatctatgaagactccatcgtcttgcagtcggtcttcaccagcgtgcggcagaaaatcgagaaggaggatgacagtgaaggcnnnnnnnnnnnnnnnnnnnnnnnnnnnnnnnnnnnnnnctccgaatccgaatctcggtccgtcaaagtgaagatcaagcttggccggaaggagaaggcacaggaccggctgaagggcggccggcggcggccgagccgagggtcccgagccaagccggtcgtgagtgacgacgacagtgaggaggaacaagaggaggaccgctcaggaagtggcagcgaagaagac

SEQ ID NO: 73530 - DNA, 1078 bp, Homo Sapiens
  misc_feature (835)..(849): n is a, c, g, or t
tgcggccgcctgccgagaaactctcccctaacccacccaacctcaccaagaagatgaagaagattgtggatgccgtgatcaagtacaaggacagcagcagtggacgtcagctcagcgaggtcttcatccagctgccctcgcgaaaggagctgcccgagtactacgagctcatccgcaagcccgtggacttcaagaagataaaggagcgcattcgcaaccacaagtaccgcagcctcaacgacctagagaaggacgtcatgctcctgtgccagaacgcacagaccttcaacctggagggctccctgatctatgaagactccatcgtcttgcagtcggtcttcaccagcgtgcggcagaaaatcgagaaggaggatgacagtgaaggcgaggagagtgaggaggaggaagagggcgaggaggaaggctccgaatccgaatctcggtccgtcaaagtgaagatcaagcttggccggaaggagaaggcacaggaccggctgaagggcggccggcggcggccgagccgagggtcccgagccaagccggtcgtgagtgacgatgacagtgaggaggaacaagaggaggaccgctcaggaagtggcagcgaagaagactgagccccgacattccagtctcgaccccgagcccctcgttccagagctgagatggcataggccttagcagtaacgggtagcagcagatgtagtttcagacttggagtaaaactgtataaacaaaagaatcttccatatttatacagcagagaagctgtaggactgtttgtgactggccctgtcctggcatcagtagcatctgtaacagcattaactgtcttaannnnnnnnnnnnnnnattccgaattggggaacacacgatacctgtttttcttttccgttgctggcagtactgttgcgccgcagtttggagtcactgtagttaagtgtggatgcatgtgcgtcaccgtccactcctcctactgtattttattggacaggtcagactcgccgggggcccggcgagggtatgtcagtgtcactggatgtcaaacagtaataaattaaaccaacaacaaaacgcaaaa

SEQ ID NO: 73531 - DNA, 1067 bp, Homo Sapiens
  misc_feature (918)..(976): n is a, c, g, or t
ggcacgaaggaatggaagactggcatcctgaaccgaaacgcctccaaccatgagcggggcgccttcctgcaggccatcctggagcacgaggagcaggatgaggaggaagacgaggtgcccgacgacgagaccgtcaaccagatgatcgcccggcacgaggaggagtttgatctgttcatgcgcatggacctggaccgcaggcgcgaggaggcccgcaaccccaagcggaagccgcgcctcatggaggaggacgagctcccctcgtggatcatcaaggacgacgcggaggtggagcggctgacctgtgaggaggaggaggagaagatgttcggccgtggctcccgccaccgcaaggaggtggactacagcgactcactgacggagaagcagtggctcaaggccatcgaggagggcacgctggaggagatcgaagaggaggtccggcagaagaaatcatcacggaagcgcaagcgagacagcgacgccggctcctccaccccgaccaccagcacccgcagccgcgacaaggacgacgagagcaagaagcagaagaagcgcgggcggccgcctgccgagaaactctcccctaacccacccaacctcaccaagaagatgaagaagattgtggatgccgtgatcaagtacaaggacagcagtggacgtcagctcagcgaggtcttcatccagctgccctcgcgaaaggagctgcccgagtactacgagctcatccgcaagcccgtggacttcaagaagataaaggagcgcattcgcaaccacaagtaccgcagcctcaacgacctagagaaggacgtcatgctcctgtgccagaacgcacagaccttcaacctggagggctccctgatctatgaagactccatcgtcttgcagtcggtcttcaccagcgtgcggcagaaaatnnnnnnnnnnnnnnnnnnnnnnnnnnnnnnnnnnnnnnnnnnnnnnnnnnnnnnnnnnnaaggctccgaatccgaatctcggtccgtcaaagtgaagatcaagcttggccggaaggagaaggcacaggaccggctgaagggcggccggcg

SEQ ID NO: 73532 - DNA, 687 bp, Homo Sapiens
  misc_feature (510)..(518): n is a, c, g, or t
ctaatgcgagagagtatgaagtcgaggcgcgccgaattcggcacgaggttgagaatgccaagcaagatgtcgatgatgaatatggcgtgtcccaggccctgtgcacgtggcctgcagtcctactatgccgtggcccatgctgtcactgagagagtggacaagcagtcagaacttatggtcaatggtgtcctcaaacagtaccagatcaaaggtttggagtggctggtgtccctgtacaacaacaacctgaacggcatcctggccgacgagatgggcctggggaagaccatccagaacatcgcgctcatcacgtacctcatggagcacaaacgcatcaatgggcctttctcatcatcgtgcctctctcaacgctgtccaactgggcgtacgagtacatcctcaagaacagcacatcctcgccaagatccgttgaaatacatgattgttgacaaaggcaccgcttgaaaaccacactgcagccgaaccgggggctaaacacccaattgggannnnnnnnnggtggtaaggggaaacccttgaaaaaaacttccgaattttgggcgggtaattttttgtggcccaattttaaaaatggaactttaaaatggtgttaccccctttccctccgggaaaggggcttataagaagaaaatttttttccggggtccaaaattggggcctcttttc

SEQ ID NO: 73533 - DNA, 2543 bp, Homo Sapiens
  misc_feature (2213)..(2213): n is a, c, g, or t
  misc_feature (2249)..(2306): n is a, c, g, or t
cagaccatcgcgctcatcacgtacttcatggagcacaaacgcatcaatgggcccttcctcatcatcgtgcctctctcaacgctgtccaactgggcgtacgagtttgacaagtgggccccctccgtggtgaaggtgtcttacaagggatccccagcagcaagacgggcctttgtcccccagctccggagtgggaagttcaacgtcttgctgacgacgtacgagtacatcatcaaagacaagcacatcctcgccaagatccgttggaagtacatgattgtggacgaaggtcaccgcatgaagaaccaccactgcaagctgacgcaggtgctcaacacgcactatgtggcaccccgccgcctgctgctgacgggcacaccgctgcagaacaagcttcccgagctctgggcgctgctcaacttcctgctgcccaccatcttcaagagctgcagcaccttcgagcagtggtttaacgcaccctttgccatgaccggggaaaaggtggacctgaatgaggaggaaaccattctcatcatccggcgtctccacaaagtgctgcggcccttcttgctccgacgactcaagaaggaagtcgaggcccagttgcccgaaaaggtggagtacgtcatcaagtgcgacatgtctgcgctgcagcgagtgctctaccgccacatgcaggccaagggcgtgctgctgactgatggctccgagaaggacaagaagggcaaaggcggcaccaagaccctgatgaacaccatcatgcagctgcggaagatctgcaaccacccctacatgttccagcacatcgaggagtccttttccgagcacttggggttcactggcggcattgtccaagggctggacctgtaccgagcctcgggtaaatttgagcttcttgatagaattcttcccaaactccgagcaaccaaccacaaagtgctgctgttctgccaaatgacctccctcatgaccatcatggaagattactttgcgtatcgcggctttaaatacctcaggcttgatggaaccacgaaggcggaggaccggggcatgctgctgaaaaccttcaacgagcccggctctgagtacttcatcttcctgctcagcacccgggctggggggctcggcctgaacctccagtcggcagacactgtgatcatttttgacagcgactggaatcctcaccaggacctgcaagcgcaggaccgagcccaccgcatcgggcagcagaacgaggtgcgtgtgctccgcctctgcaccgtcaacagcgtggaggagaagatcctagctgcagccaagtacaagctcaacgtggaccagaaggtgatccaggccggcatgttcgaccagaagtcctccagccatgagcggcgcgccttcctgcaggccatcctggagcacgaggagcaggatgaggaggaagacgaggtgcccgacgacgagaccgtcaaccagatgatcgcccggcacgaggaggagtttgatctgttcatgcgcatggacctggaccgcaggcgcgaggaggcccgcaaccccaagcggaagccgcgcctcatggaggaggacgagctcccctcgtggatcatcaaggacgacgcggaggtggagcggctgacctgtgaggaggaggaggagaagatgttcggccgtggctcccgccaccgcaaggaggtggactacagcgactcactgacggagaagcagtggctcaagaccctgaaggccatcgaggagggcacgctggaggagatcgaagaggaggtccggcagaagaaatcatcacggaagcgcaagcgagacagcgacgccggctcctccaccccgaccaccagcacccgcagccgcgacaaggacgacgagagcaagaagcagaagaagcgcgggcggccgcctgccgagaaactctcccctaacccacccaacctcaccaagaagatgaagaagattgtggatgccgtgatcaagtacaaggacagcagcagtggacgtcagctcagcgaggtcttcatccagctgccctcgcgaaaggagctgcccgagtactacgagctcatccgcaagcccgtggacttcaagaagataaaggagcgcattcgcaaccacaagtaccgcagcctcaacgacctagagaaggacgtcatgctcctgtgccagaacgcacagaccttcaacctggagggctcccctgatctatgaagactccatcgtcttgcagntcggtcttcacccagcgtgcggcagaaaatcgagannnnnnnnnnnnnnnnnnnnnnnnnnnnnnnnnnnnnnnnnnnnnnnnnnnnnnnnnnctccgaatccgaatctcggtccgtcaaagtgaagatcaagcttggccggaaggagaaggcacaggaccggctgaagggcgtgccggcggtcggccgagaccgaagggtccccgaacccaagcccgggtcggtgaggttgaacaatggacaagtgaagggagggaaccaaggagggagggacccgcctccaggggaagtttgggccagccgaaaagaaaggaactgagagccccccca

SEQ ID NO: 73534 - DNA, 463 bp, Homo Sapiens
  misc_feature (334)..(334): n is a, c, g, or t
  misc_feature (341)..(341): n is a, c, g, or t
  misc_feature (364)..(364): n is a, c, g, or t
cgcgcttcttctgcttcttgctctcgtcgtccttgtcgcggctgcgggtgctggtggtcggggtggaggagccggcgtcgctgtctcgcttgcgcttccgtgatgatttcttctgccggacctcctcttcgatctcctccagcgtgccctcctcgatggccttcagggtcaatagtagtaaaataggacagccagcacccaggtcgacaagcagaggccgcgacgcaatcccaggggccgggctgggacacggaggagggcccccgcacccgctctcccttcagcttgactggctcggggcataacacacactgggactcttcaaggggcctgngctgcantgaaagaccagcactgcccccancaggcaccccacccaagctggtctttaaaaaactaatggttgaatttcttgaccaagaaagaagaactatcttctctgtacagaaaagaacgtgctcct

SEQ ID NO: 73535 - DNA, 945 bp, Homo Sapiens
ggtgggggagtcgcccagcgccttgggcaatggacccgggattttccgtacggagatcagggttgggcccatggttcaccttccctagcggggtcccggggggccaaagggaaatggttttgaaagcttttttgaagggggcgaaggcggccgacaagggtttacgggtggtgtgagtcggggaaagggggggtaaaaatatcttcaataataagacatcctatttttggggggttagggatagagataaatatgaaaacttttttttgataaaacacctagtaaggacatgtttccaggtttaaagttcatgaacatataaaacagaaattgggtcctgccaccttgagtgcaggattctgaggtcctaaatctggttctgaggttctgtgtttgattctggggtacagacagctcaagtaggaggtctccttatgtcacaaaactacacgatgcggaggttctgttccccaccaaaggcttgtctggggcccattggctgcctggggaggaggccccagcgaggctcatgggtccagcatggctcctggggggacccctactctcaccacgcaagagcccccagccaggagcactgggccagccagctgcgggccgatgagggggcttctggcccgccctgcacctggaggcccgccctgcacctggagttcctgcttggccacgggtgggcagacccaggagacacagcactccccactgggtctaggaccgtctccgcgggtggggaccccagccggccaggcatgtgccctgacagccctgccgacaacaacacctgaagggaacccagagtcggccgtaggaagcggcggggtctgtgctgcttggggcggcctaagccttcgaagaagactgtgatggcccctgcagcagcagggcacggtaggtggtagagctaaggaacggggggtggagttcccg

SEQ ID NO: 73536 - DNA, 1427 bp, Homo Sapiens
  misc_feature (62)..(96): n is a, c, g, or t
  misc_feature (1327)..(1362): n is a, c, g, or t
tctatggggctcggcgtgagccgaacgacgagcgcagcgagttgtgagcgaggaagcggcgnnnnnnnnnnnnnnnnnnnnnnnnnnnnnnnnnnncagtcgacggtaccggacatatgcccgggaattcggccattacggccggggagaactgcgtctcgcgacccaggcgcgggtttccggaggacagccaacaagcgatgctgccgccgccgtttcctgattggttgtgggtggctacctcttcgtgctgattggccgctagtgagcaagatgctgagcaagggtctgaagcggaaacgggaggaggaggaggagaaggaacctctggcagtcgactcctggtggtctagatcctggccacacagcggtggcacaggcacccccggccgtggcctctagctccctctttgacctctcagtgtctcaagtctccaccacagcctggcagcagagtgagccggacctgtcggcgacctggtgctggtcgatgaacactctgcggcgcatccaggcgtccatggcacccgcggctgcccgtgtccacctgtgcctaggcccacctgcagcccccagtgtggctgacaacttactggcaagctcggacgctgccctttcagcctccatggccagcctcctggaggacctcagccacattgagggcctgagtcaggctccccaacccttggcagacgaggggccaccaggccgtagcatcgggggagcagcgcccagcctgggtgccttggacctgctgggcccagccactggctgtctactggacgatgggcttgagggcctgtttgaggatattgacacctctatgtatgacaatgaactttgggcaccagcctctgagggcctcaaaccaggccctgaggatgggccgggcaaggaggaagctccggagctggacgaggccgaattggactacctcatggatgtgctggtgggcacacaggcactggagcgaccgccggggccagggcgctgagccctcgtgctggaatggttgtctggtatctgaactgagcctgctggctggaccaactgtcctcgaaaagacacagctggcttccctagtacagagaacagggcttgggccactttggagagacagaatctagtcctgggcaacttcacatccgtcctcctgtctcagggctggcagggggagcctggaattaccccctagtgatggaatgacagggtctggtggggactgaattccctggccctggggtcatagcttgggctgttccttctctgatacgggaagagaccccaatcagatttttcaaattaaagccagtcctgggaaatctcnnnnnnnnnnnnnnnnnnnnnnnnnnnnnnnnnnnnacctgagcaggcggccgcaagcttattccctttagtgagggttacgattagcttggcactgaccc

SEQ ID NO: 73537 - DNA, 771 bp, Homo Sapiens
ggggcgactatgggagctccggggggaaagatcaaccggccccgaacggtgactgtgtggggggccgcgacttggtttcctcaagcgttcctgagcccttttatctcgcacgagatgggatcagtgaggggccggggctgcctggtggaggggccccgggtcgcggcgagcccactccatctgattcgcatctttctccccggcaggagctgaagaagaagctgttcaaacgccggcgggtgttgaatcgggagcggcgtctgaggcaccgggtggtcggggctgtgatagaccaagggctgatcacgcggcaccacctcaagaagcgggcgtccagtgcacgtgccaacattacactgtcagggaagaagcgcagaaaactcctccagcagatccggcttgcccagaaagagaagacagccatggaagtggaagccccttcaaagccagccaggactagtgaaccacagctcaaaaggcaaaagaagacaaaagccccccaggatgtagaaatgaaggaccttgaagatgagagctaaacctcttccactagaagattctcaactggagccagccttcagactcagtggttgtttcagaggactttgacaaaagcaaggccccttttcactctccagatttcctcctacctaatggcctactgacctcccctagagggatgtctttgggagggaagaaggtacagaagaaagattggagaaggctctctctagcagtcaactccatttgtaataaagccctagcactctg

SEQ ID NO: 73538 - DNA, 408 bp, Homo Sapiens
ggggaactggagtggaatcgcgactatgggagctccggggggaaagatcaaccggccccgaacggagctgaagaagaagctgttcaaacgccggcgggtgttgaatcgggagcggcgtctgaggcaccgggtggtcggggctgtgatagaccaagggctgatcacgcggcaccacctcaagaagcgggcgtccagtgcacgtgccaacattacactgtcagggaagaagcgcagaaaactcctccagcagatccggcttgcccagaaagagaagacagccatggaaggtgaggctgggacagaggtgggtgaggggaatcctggatttatttgggttaatacttccttcttccctttactcagtggaagccccttcaaagccagccaggactagtgaaccacagctca

SEQ ID NO: 73539 - DNA, 657 bp, Homo Sapiens
gggacggaccgtgaactggagtggaatcgcgactatgggagctccggggggaaagatcaaccggccccgaacggagctgaagaagaagctgttcaaacgccggcgggtgttgaatcgggagcggcgtctgaggcaccgggtggtcggggctgtgatagaccaagggctgatcacgcggcaccacctcaagaagcgggcgtccagtgcacgtgccaacattacactgtcagggaagaagcgcagaaaactcctccagcagatccggcttgcccagaaagagaagacagccatggaagtggaagccccttcaaagccagccaggactagtgaaccacagctcaaaaggcaaaagaagacaaaagccccccaggatgtagaaatgaaggaccttgaagatgagagctaaacctcttccactagaagattctcaactggagccagccttcagactcagtggttgtttcagaggactttgacaaaagcaaggccccttttcactctccagatttcctcctacctaatggcctactgacctcccctagagggatgtctttgggagggaagaaggtacagaagaaagattggagaagggcctctctagcagtcaactccatttgtaataaagccctagcactcgcggggggaaaaaattgattt

SEQ ID NO: 73540 - DNA, 689 bp, Homo Sapiens
  misc_feature (22)..(22): n is a, c, g, or t
  misc_feature (136)..(241): n is a, c, g, or t
cagagtttcagaagctgagttntggccaggacagcctgtacttctgttgaggagtttcaagtttttaagaagctcctggctcgggaggaggaggagtctgagagcagcacatctgatgacaaaagggcaagtctgnnnnnnnnnnnnnnnnnnnnnnnnnnnnnnnnnnnnnnnnnnnnnnnnnnnnnnnnnnnnnnnnnnnnnnnnnnnnnnnnnnnnnnnnnnnnnnnnnnnnnnnnnnaggacgacgacgaggaggaatagctgtgatggaaggactagagcgaaagggcccagagatatcaaggaagcttttcattctcttaaagcttttgggtcctttacttgaatcttctcaagttattttttattctaaaactggtctcttgatgaaaaaaattataagtcacctgagaggcagacagatcaaaccaaacaggaaacaggaaatgcatgtttgatctgttgtcacgtgtctgtggggagggccctgtcccatcctgaataagatacttatgttgagctattcacatcaaggggactcaatatatcaacaattggttttatttttttctcttttgaatatgttggtgataattccgtgacagttggaagatggggttcattcttccggttcaggaatcactatgtatttccttcttgtgataaaaataaaattacgagaaggc

SEQ ID NO: 73541 - DNA, 698 bp, Homo Sapiens
  misc_feature (46)..(46): n is a, c, g, or t
gtataaaacgaggcagcgaacccacacgtggaagtctgataccgcntgcagaagggaattgaatagatgtctccctattgctgtttctgataagcacttgtgcagccccatcagcacctcgatttcttcttggtgagtccatgggaacagccccactgcaaacaacccattcctgctctcctctttcctctaaacctcaacctcctcctacctggcagtccacaggcctacagcttctcctcagtgggaaagacatcagcttggaaaaccacttggaaagccaacgttatcctagaaaagctttttaaatgacccagcaggacaagtctccggatggccttggccaacccggtgcttccctcttttcttggttgtagttctcagaataactagagaatgtactgggagtgttgtcctgagataaggaggaactgtcctaaacctggactctgttcccatcacacctagaacaggatgtcctgcaacgctttagcccaatgatccaagttgcccttggggtataaaacttgacagcagagggcgttcagggtccctcagctgcagtgtgaagtgggacacacaggtgagactccatctgccctgggcaggttcctgagccttgggggaccagttcaccctacatcccaggcttctgttgtcccttgcctgcctgtaaggaataaagttgctttgcttaa

SEQ ID NO: 73542 - DNA, 907 bp, Homo Sapiens
gtatgttgagtgattagtgatcggaaactacgagtgatatggtacaggtgtttgtagaagaacagtaaagccattgatcaggcaaccccagctttccagacagtcacttttcccagtggtcatacctggtctggaagattccccatcatctcgaataaagctgttgttgcttttaactccatggagagaccgaatggagtgagcccagcagggcatgctgggcaagagaggtcccccgaggcccaaataagaatttcaactagtataaaacgaggcagcgaacccacacgtggaagtctgataccgcttccagaagggaattgaatagatgtctccctattggtaaggatgtggttttattgacttgaaataacaaagcccgcaagcaacaactgatcatccgcgggatgctgccacaaggaataattgagcactcattcagacacaggggaaaccactgcctctttcagtctttctcccagattccaacagtcagtgttacagcatttcaccttgttcacctccctgagaagacgttgcagctcactcaccccagtgggcactgggagcctctgctcaggtgggagacagatgccccccacatgcacatctggtgtttatgaagcagatactggggcttcataaacacagaaggggcagggaagtagccccagggcatagtgtggggcctcctgactaaaagtagcttgcaaacccctgcctataacagccacttcctggcagtcattgtgccacttaggagccctcctcaccgctcttcctttagttccttcactctgtatagaccctgccagagcagctcaggggggagcagctgcagccatgggacctggtccaggcaaggcccctatgctacacagtccctgggggtgagggtttccagagg

SEQ ID NO: 73543 - DNA, 2107 bp, Homo Sapiens
tctaattatttgatcaatgaggaaaacccagaaagctacacaacacggaacaggtgaaataaaagtccagcgatccagtgagagacacagaagtgctagaaagccagatgctcgtgaactaaggagaaaaagaacagacaagggaacagccctggacatggcatcagagatccacatgacaggcccaatgtgcctcattgagaacactaatgggcgactgatggcgaatccagaagctctgaagatcctttctgccattacacagcctatggtggtggtggcaattgtgggcctctaccgcacaggcaaatcctacctgatgaacaagctggctggaaagaaaaagggcttctctctgggctccacggtgcagtctcacactaaaggaatctggatgtggtgtgtgccccaccccaagaagccaggccacatcctagttctgctggacaccgagggtctgggagatgtagagaagggtgacaaccagaatgactcctggatcttcgccctggccgtcctcctgagcagcaccttcgtgtacaatagcataggaaccatcaaccagcaggctatggaccaactgtactatgtgacagagctgacacatagaatccgatcaaaatcctcacctgatgagaatgagaatgaggttgaggattcagctgactttgtgagcttcttcccagactttgtgtggacactgagagatttctccctggacttggaagcagatggacaacccctcacaccagatgagtacctgacatactccctgaagctgaagaaaggtaccagtcaaaaagatgaaaattttaacctgcccagactctgtatgcgtcggtaaatttcccttcccaaaaagaaaagaatgcttgtgtcttcgatcggcccgttcaccgcaggaagcttgcccagctcgagaaactacaagatgaagagctggaccccgaatttgtgcaacaagtagcagacttctgttcctacatctttagcaattccaaaactaaaactctttcaggaggcatcaaggtcaatgggcctcgtctagagagcctagtgctgacctatatcaatgctatcagcagaggggatctgccctgcatggagaacgcagtcctggccttggcccagatagagaactcagccgcagtgcaaaaggctattgcccactatgaccagcagatgggccagaaggtgcagctgcccgcagaaaccctccaggagctgctggacctgcaccagggttagtgagaggaagccaaatgaagtctatatgaagaactctttcaaggatgtggaccatctgtttcaaaagaaattagcggcccagctagacaaaaagcgggatgacttttgtaaacagaatcaagaagcatcatcagatcgttgctcagctttacttcaggtcattttcagtcctctagaagaagaagtgaaggcgggaatttattcgaaaccagggggctattgtctctttattcagaagctacaagacctggagaaaaagtactatgaggaaccaaggaaggggatacaggctgaagagattctgcagacatacttgaaatccaaggagtctatgaccgatgcaattctacagacagaccagactctcacagaaaaggaaaaggagattgaagtggaacgtgtaaaagctgaatctgcacaggcttcagcaaaaatgttgcaggaaatgcaaagaaagaatgagcagatgatggaacagaaggagaggagttatcaggaacacttgaaacaactgactgagaagatggagaacgacagggtccagttgctgaaagagcaagagaggaccctcgctattaaacttcaggaacaggagcaactactaaaagagggatttcaaaaagaaagcagaataatgaaaaatgagatacaggatctccagacgaaaatgagacgacgaaaggcatgtaccataagctaaagaccagagccttcctgtcacccctaaccaaggcataattgaaacaattttagaatttggaacaagcgtcactacatttgataataattagatcttgcatcataacaccaaaagtttataaaggcatgtggtacaatgatcaaaatcatgttttttctt

SEQ ID NO: 73544 - DNA, 3097 bp, Homo Sapiens
  misc_feature (3021)..(3021): n is a, c, g, or t
  misc_feature (3049)..(3049): n is a, c, g, or t
  misc_feature (3059)..(3059): n is a, c, g, or t
cagtcgacggtagcggacatatgcccgggaattcggccattacggccggggatattagtgcatttcttggcagaggttacctcattattcttgtctctcgtcaggtctctgacattgacagagcctggacgttggaggaagccccaggacgttggaggggtaaagtaaaagtccacagttaccgtgagagaaaaaagagggagaaagcagtgcagccaaactcggaagaaaagagaggaggaaaaggactcgactttcacattggaacaaccttctttccagtgctaaaggatctctgatctggggaacaacaccctggacatggctccagagatcaacttgccgggcccaatgagcctcattgataacactaaagggcagctggtggtgaatccagaagctctgaagatcctatctgcaattacgcagcctgtggtggtggtggcgattgtgggcctctatcgcacaggcaaatcctacctgatgaacaagctggctgggaagaaaaacggcttctctctaggctccacagtgaagtctcacaccaagggaatctggatgtggtgtgtgcctcatcccaagaagccagaacacaccctagttctgctcgacactgagggcctgggagatatagagaagggtgacaatgagaatgactcctggatctttgccttggccatcctcctgagcagcaccttcgtgtacaatagcatgggaaccatcaaccagcaggccatggaccaacttcactatgtgacagagctgacagatcgaatcaaggcaaactcctcacctggtaacaattctgtagacgactcagctgactttgtgagcttttttccagcatttgtgtggactctcagagatttcaccctggaactggaagtagatggagaacccatcactgctgatgactacttggagctttcgctaaagctaagaaaggtactgataagaaaagcaaaagctttaatgatcctcggttgtgcatccgaaagttcttccccaagagaaagggcttcgtcttcgaatggcccgctcctaagaaggaccttgctcacctagagcagctaaaggaagaagagctgaaccctgatttcatagaacaagttgcagaattttgttcctacatcctcagccattccaatgtcaagactctttcaggtggcattgcagtcaatgggcctcgtctagagagcctggtgctgacctacgtcaatgccatcggcagtggggatctaccctgcatggagaacgcagtcctggccttggcccagatagagaactcagccgcagtggaaaaggctattgcccactatgaacagcagatgggccagaaggtgcagctgcccacggaaaccctccaggagctgctggacctgcacagggacagtgagagagaggccattgaagtcttcatgaagaactctttcaaggatgtggaccaaatgttccagaggaaattaggggcccagttggaagcaaggcgagatgacttttgtaagcagaattccaaagcatcatcagattgttgcatggctttacttcaggatatatttggccctttagaagaagatgtcaagcagggaacattttctaaaccaggaggttaccgtctctttactcagaagctgcaggagctgaagaataagtactaccaggtgccaaggaaggggatacaggccaaagaggtgctgaaaaaatatttggagtccaaggaggatgtggctgatgcacttctacagactgatcagtcactctcagaaaaggaaaaagcgattgaagtggaacgtataaaggctgaatctgcagaagctgcaaagaaaatgttggaggaaatacaaaagaagaatgaggagatgatggaacagaaagagaagagttatcaggaacatgtgaaacaattgactgagaagatggagagggacagggcccagttaatggcagagcaagagaagaccctcgctcttaaacttcaggaacaggaacgccttctcaaggagggattcgagaatgagagcaagagacttcaaaaagacatatgggatatccagatgagaagcaaatcattggagccaatatgtaacatactctaaaagtccaaggagcaaaatttgcctgtccagctccctctccccaagaaacaacatgaatgagcaacttcagagtgtcaaacaactgccattaaacttaactcaaaatcttataatcgatcgaaaaagataagaaaaagcatgtcgggccgccttcggccctcgaataagtttttctagacccttccgctgggcgccgcgggccacggaaggtcaaagggaatatgggccataggcgggttctcctaggccaattccggggcctgggacgagcgggctgggtatccttccccacataaacaaacggcccgggggtaaacctaatacgggctcctgagctgaacttctaagatgggcctaggcgcaggtgcagtgaacgcgggaccgcgtggaacggggacacccatagaagagggcgtcggagaaggcgaaaagtctaagagccactgcgggtgagaagctgcccaggccgagaccggtggtaggaaggaatcatctcaaaacaattatcgcaagaagaattggggcgagctgtagagatagatgcgcggtccaggagattagcattctaggagccggagaagtgaagtgccgcaatcatccgccctcataggtgtgcatgactccgtagcatgtgacgcccagcagctatgcgcaccggcttaaacgtgacgacccgcattatctaatcgtattgtacgcatcatacgttgacgaagcggatttcgacgtagaacgggagttttggagtatcaagatcctatggtaccgcagtctatgagagggcaaccgccgggaagagcacacttagagcgcaccgcattagaggtgtaaggtgagaatccacgagtgcacatcacgaatgacgtgagcgagacactagagatacaccacagacaggacggagaatatatacacatcactacancgtgcgcggctgagacgcccgtattgcncgcggtgtcnagtgtatattacgcgtcgactcacatgaagcacgagat

SEQ ID NO: 73545 - DNA, 537 bp, Homo Sapiens
cttagaccaaatttcctaatccatgattcatacaccttatgagattttgaggatactttgcttatttcggtgttatgtcatatacataatagggtaaggaacatggctgtgctttggtcaatgataggccaaagtatgacatttacgtcttgcgtgactcagagaaaattaaataacaaatcatttaatgtggaaaccagatagaatgtttcaatttgcctgatgctacactttactcagccttcgtttgtccctttttaggaacaggagcaactactaaaagagggatttcaaaaagaaagcagaataatgaaaaatgagatacaggatctccagacgaaaatgagacgacgaaaggcatgtaccataagctaaagaccagagccttcctgtcacccctaaccaaggcataattgaaacaattttagaatttggaacaagcgtcactacatttgataataattagatcttgcatcataacaccaaaagtttataaaggcatgtggtacaatgatcaaaatcatgttttttcttaaa

SEQ ID NO: 73546 - DNA, 765 bp, Homo Sapiens
gggccttaaaatttcaggactgtgattattagtatgtgtgcctaaggaactttttgagtcactcttaagaaagtgaaactgaagagtctaagtgataactataggattaagtcagaattgtttttcctgtcatttgttggaagcttcttgagttctgttattagcattcagggaattgatacccatcaacttgaatggaaaatcctttgtaggtattacttaagtgaatgttaagagttccaccctgagtggtaatctaaggctgtgcagtcagttacttcagactgctcagaatagttcattagaaaggtaacaaatgagaaatgtattattatacagttctatagtagtgaagtgatggaatacctttcttacttttgtggagttacatctgatgctaagaatttgacctccaactaagcaaacattttaatgagcaaaagttagtgttattaaagttttttatgatagatccaaattgaggacctgtgtcctgtttttataagattgcaacccagctatgctcatttgtttatgttttgtatatggctgcttttgtgttacagtggtagagtttagtagttaggacagagacctgcaaagcaaaataatttacagtctggccctttacagaaaagtttgctgactcatggtcaaaataaatgaaaattttttgtgttagggttgttaagctagggttctttttggtatcatatgcttattttatgtaaatctctcaataaaaaattatttttaagagaaaaa

SEQ ID NO: 73547 - DNA, 1604 bp, Homo Sapiens
  misc_feature (87)..(103): n is a, c, g, or t
gtactacatataaaatattttattacaaaaagctccattgcatggcatttcaaaaagaacatttcctacagttttctttcttcttcnnnnnnnnnnnnnnnnngctgttacacagaagagactagttaagtgtaccattgaagactattatgcatcacgtgcctacgttcatcaggccttaagccctcaaagaacaacagcatcaggggctctgcgagagccgccacctgagcctcaccgcttagttcataaaacagccctgtgtcctttctacaaagccaggtcgtgttttctacccacagttcaggactccagcgtagacagcaaacacaaaacttgtttcctttttgaaacaaaacagtcttagtagaagcaaaacaaacaaccacaatctaaaccagccgcgaggaaccctttcctagctggaaaggagaatgtgtcgccagcgattcggagtgaaaaggatgggaagatgcctgtgccacacccttgaatgtggtccacagattcaccagctccaaggcagcatctctttccaaagcacctgcagcaggaggctgtgtggggcaacaaagtcactcctgatacagagaatccccccccgcccgccgccatccaaatggctccatgcacagctggcccctccgcttctcaactgtggctcatgtggctttgttagagtcttgggggtgaaaggtgtgagagacaggagggagcgtggctcaagtggggccattcagtcgggcggccgggtgtcgggggccttctcctggacttcatcatactgcggtggaggagtcaaaggctctatcgagggaggagggacgtttttgtctgggaggttgatcctaaagtctttgaggtgaagcttttcagatttaatccttcgaactttcagtggtttcagtcgtttggccaacttagagttctgcctgtcaggggggttcccagggctggcctccacgtcagccctggtggatgtgggggtggtctcgtcgagccccgtcagtgactcataggacgggagagagatgctcaacctcgggttctgctcctctccccttgcttctgagtagtttgtgttcatcacttcctcgtagctgggaacatagtaccttgaggcagcctcctcatcctcctcttcttcctcctggctgtcttcctcctgggcgtgaggcccagcgcctgtcgggtgctggacatgggccaggtcctcgccctgccgctgcttcctcttatccctgatactcaggcagatagaaagcagcagcagcatcaccccggccccgaccagcacgtaggccacagagaaggtcttgctcttgaggatgccgccacccacctcggtcttgttgctgccctgagctgttggcttctcggccgcgctgaagccgggtaccaggttccacatggccatgatcaccccaaggaccagcatccccaggccgatggcggtcagcgcatagtgcgagccattggccttggactgggccatcatgtcagtgggaggagggcgaggcccagttccaagaaagaaaataaatatatacaaggcagcagtcacaacaaaaaccccttaaatgcgctccacaaaatctctcgcc

SEQ ID NO: 73548 - DNA, 1239 bp, Homo Sapiens
cagtcgacggtaccggacatatgcccgggaattcggccattacggccgggattgtatctaggaaaaaagtgtgaatgcttcaaaggagagatactgataattgtgacttgaaatagtgtcagatgaattatgtagctgatcactgatggaaccatctaatgaggcaggcttaaactctatttagtttcgtttgttttctcatatgaagtttataattcctttcagtcctaaaatgtcagatgccaggtgtcaaatgccacagtagaacgtgaaattaagtagagtccccttttaaacaaatttctctgtaagcaaaactatctttagtgacttaaaaaataatatcctctaaaattaccctttcaagaggaaaaaactgttcaatgaaaaaaccactcaattatgactcatataagaaatactggtttaaccaggagatatttggggagcaaaattttaaggaatttcaaattgctaaatctaatacaaatatctgacaataagatacagatctaaaagaatggttcttaagaactatggtttacctgggaataaactaagctctatgaagaattcgtaagcattacatgttccagtaagtttagcaacttagagccaagactggtgcccacctccatttatttccccactgctcctccactgacatccttcttagcagaaacttcatgaaaaagttttggctgacacagaacaaacctgaaagtagtaatctactttctaaatactactttgcttttcagcagtgcgatttgatatttataatgttctctaaagcttgcaactttttcagcaacgtttaaaaatagattaacctggaataacttacttgtttgctgctaaaatactcaagattttgccatttttaaacaaccagtccctgtgatacaactttgaaaaaacttttaaaaatctctgatgtgtgggctctttttttcccataagaattatgtacatctgtgatgttttacagggggatccgcttttaaacagtgtacatattggaccacactgaaatgtcatatatcctttctctacttaaaattggttatttactgtgagttcatttccgatgtgttcttggttgttgctgttttctgcctgaagacgtgtatcataaagagctacatggtatggactatttatttgtaatttgacataaagtttgaagaataaagatctataaaagttgaagtttctgatattaaagctcttaatata

SEQ ID NO: 73549 - DNA, 1641 bp, Homo Sapiens
  misc_feature (83)..(117): n is a, c, g, or t
taagaactgataatcactatagggcgctagctcttagagccgaacgacgagcgcagcgaagtattgagcgaggaagcggccgnnnnnnnnnnnnnnnnnnnnnnnnnnnnnnnnnnncagtcgacggtaccggacatatgcccgggaattcggccattacggccggggaaagcctgaggaaaaagcggccgctttttccatggtttggactggatatcggtggaactctggtcaagctggtatattttgaacccaaagacatcactgctgaagaagaagaggaagaagtggaaagtcttaaaagcattcggaagtacctgacctccaatgtggcttatgggtctacaggcattcgggacgtgcacctcgagctgaaggacctgactctgtgtggacgcaaagataggtgatcttcagctttgcaaactggatgaactagattgcttgatcaaaggaattttatacattgactcagtcggattcaatggacggtcacagtgctattactttgaaaaccctgctgattctgaaaagtgtcagaagttaccatttgatttgaaaaatccgtatcctctgcttctggtgaacattggctcaggggttagcatcttagcagtatattccaaagataattacaaacgggtcacaggtactagtcttggaggaggaactttttttggtctctgctgtcttcttactggctgtaccacttttgaagaagctcttgaaatggcatctcgtggagatagcaccaaagtggataaactagtacgagatatttatggaggggactatgagaggtttggactgccaggctgggctgtggcttcaagctttggaaacatgatgagcaaggagaagcgagaggctgtcagtaaagaggacctggccagagcgactttgatcaccatcaccaacaacattggctcaatagcaagaatgtgtgcccttaatgaaaacattaaccaggtggtatttgttggaaatttcttgagaattaatacgatcgccatgcggcttttggcatatgctttggattattggtccaaggggcagttgaaagcacttttttcggaacacgagggttattttggagctgttggagcactccttgagctgttgaagatcccgtgatcattacctggggaggggttcctgaaaccttccacaatgggatctgtggactttcatttttttaagagacttactcaatttcatgactgtactacctgaaacaaagtgagaaaggacaggtgtatttttctaagtcatcaagataaatccttaagaattcagtctaaattagcaaccaggaaggaaaaatatattaaaaacaacaaaaaagtggcacatgtccaggcagtgtgaggatttgctgtatataagttgcctgctttgtatttttgaaatctctgcatcactcattggaagtgcttctgaagagagctgctctgtgttcagttgactggttttgtgtcctgtttgaacttgctgaatgtaaggcaggctactatgcgttataatctaatcacaatttgtcaatatggtcttggcaatcatctgtgcattactctggtttgcattaagcctgtgtgtgaacttactgtaaaacatgttttatttcaaggttctgcaaaatta

SEQ ID NO: 73550 - DNA, 705 bp, Homo Sapiens
tgcggccgctttttccatggtttggactggatatcggtggaactctggtcaagctggtatattttgaacccaaagacatcactgctgaagaagaagaggaagaagtggaaagtcttaaaagcattcggaagtacctgacctccaatgtggcttatgggtctacaggcattcgggacgtgcacctcgagctgaaggacctgactctgtgtggacgcaaaggcaatctgcactttatacgctttcccactcatgacatgcctgcttttattcaaatgggcagagataaaaacttctcgagtctccacactgtcttttgtgccactggaggtggagcgtacaaatttgagcaggattttctcacagtatgcattttttagcttatatacaatttatggtaatttgattgttaaaaataatgccagtagcaagtggtgaaataatttccatctctaatggaacttgaattttcttgagtcaaatgaagattaaaggtacgctagtgataggagttggccatctagaggtggttgtctagttcagatgtatggacgacaatcagagccactaaaagggtagcattttattgctcctttagtatgaaaaattagggcatctgctatacgttgaggaagaaactacctaaaaggaacatcattagatcatgaacaatgagattgaaatataattaaaatcatttcatgtcat

SEQ ID NO: 73551 - DNA, 1047 bp, Homo Sapiens
  misc_feature (58)..(58): n is a, c, g, or t
  misc_feature (119)..(119): n is a, c, g, or t
  misc_feature (183)..(183): n is a, c, g, or t
gtccggctcatgttgtgagatttgagcgtaacatccacacggaacggttgacatgttngaattatacgactcctatgggaattgccctggagacaagattcggaagaggctgtccctgntgtgcccattgaccatcagcacaataggtcacccctttactgtaattctaactgcttactgtcntagggttgtatgaataaacatgacagcttgtggagccctcaagtgcatacttggtgttcccttcccatcagctccaacacgtccagtagccccccctcctatggcagcgtctcctgcatatgatgagctcccctccacgtgtcccaccacctacccctgctgtttttacatccaacatgcctgagaatttcctctggagaggaatctattcctgtcatggtctagtgcctgggagggagagaactttctgggggtagggtgccctccatctgaaacaggccaggtgagcatcatgcataaggcctccattctgtccgctcagattctgggtggggccacaggcaaatctcctgacttatggggagttggcttgtggttcctcccttggatagcctccatggaaccactataggctttcccaacagctgcctctgaaatagctgctgcttcgagatcctccctttttaaagcactttctaaagccctcaggatggcgggagcaaacagcactggtatattctaggagtaagtgcaggaattcagcagtgagagcatgtctgggaccacctggactgccatccatttaacctcaaatctctttgggatactcgccctccctgggaaccagagttctggctctaacattgagcagctatgcactagttccagagaagccactaacaggctgccatgtgtagatgtaggttcttaagagatcacaggctgggtcatctgatcactggatggatagctcagcctggggcatttagtgttttccctggtgataaatccccaagacagctggatttggagctggtggcaagttgaaattattaaaaattgatttgtgtgggactgtcaaaa

SEQ ID NO: 73552 - DNA, 623 bp, Homo Sapiens
gagaatctgatcatcaccctgcaggagctgacacatacagaggagaggtcaaaagaggtccctggagaacacagtgatgcttctgagccacagtaaggatctagtccagccctaaatgagtccttgactgtattcagagtctggtaatgggaataacaggagaggggggtgggtttctaactgcatgaattaatccacaaagcagttttcctttgggaaggagaagaggtcttgcataccagcacagtggatggggaatggtgtgacctctgtccctgctctcttctctgctggcttaagggtctattctccatgtgtctatttctttgatgactttatactttttatgaaaggagcatcttttcattaaaccttcaaaaataaaggaagatacaaaaactaaagtacaaattacctgaaactcagcacccttttgtaaccattgtcagccctttggtgaatgtccttccagatatctccctgtacctgtgtacccagatagatatatgtatagataagagtgaccaaatataagtgctgttctatactgtgtatttttcaccaaataatgtatctcgtggacttctatgtcgatgaatatatataaatatctaaattcaaaa

SEQ ID NO: 73553 - DNA, 1273 bp, Homo Sapiens
gacaaagactatttctcccccaaaagtcaagggaaatataaaaaatgaaattagtgattaagaatagaagtcaattaatacaatcattttgtcttaattatttaaagtccagttttttccctccagcaaacctgaaaatacactatcctccagctatcagaattatattgagatctactcacatttatgatgatgttcagagattctcattgggaaggaaaaggcacacgctgcggcggtcttgcatgactctgttgttgtggaaattcaatttgttcattgtgttttgggctctctgggtggtcagggctgggctctgggtccttggcaattcctcaggttcccagcactccaaagccaagctcacctcctcatcacacaccctacaggagaagcattagggtgtccgactacgtgggtttcatagctgtggaaaagccaaaggggagactcctgaagaaaggcggtgaagactgtgaagagcgggtcaggaagatgagcacagcactgctactcctgtgggcacagggacagcatgtctccagccagcgccaccttgtttaatacatgggaactcactgaaattcattctgtattttgcccgcaaagttttaaagctttcatccacagtcaggaattaaacttataccaatgagagcctcacacattcaaggatgtactaagcactacaggcctcacagaaacagagatcccatcttggagttttcagtaccacatgggagataaagggttttgaacatgaaatgacaaaaacaacagcaagaagaaaattcttgtcctttttcattactatcagactcaaataaatgtcttggctcttacattacattcattcttcaaccattgtggtctggcttccacttccttcacttcaccaacatggctctgccaaaggaagcccgtgatctctaggccatcactttaattgatctttctacaacatttatcctggttgttaagccctccttacaacattcttctctctttgtttttatagctccatctctcctgcttctttaacttgataatgcatacttgatttttctatttgttatttcataaaccaattaatacacagataaaatgactgtatatcaaaccatgtttgtatagaaaaaatggattttggatgcctctcatatgtaattagttctattaaacatattaattgtattgtttaatttgtcaggtttttgacagaattttgtttacaagtaataaaaattttatctccaattttcaataattacaa

SEQ ID NO: 73554 - DNA, 1050 bp, Homo Sapiens
  misc_feature (49)..(140): n is a, c, g, or t
  misc_feature (169)..(255): n is a, c, g, or t
  misc_feature (612)..(625): n is a, c, g, or t
  misc_feature (879)..(910): n is a, c, g, or t
ggtcgtgacgggagcggaggcgcccatagcaaacgctttcccgggggtnnnnnnnnnnnnnnnnnnnnnnnnnnnnnnnnnnnnnnnnnnnnnnnnnnnnnnnnnnnnnnnnnnnnnnnnnnnnnnnnnnnnnnnnnnnncagctttacacttatgctccggctcgtannnnnnnnnnnnnnnnnnnnnnnnnnnnnnnnnnnnnnnnnnnnnnnnnnnnnnnnnnnnnnnnnnnnnnnnnnnnnnnnnnnnnnntgccctcgagccaagaaattcggaacgagggtcaccacaaggttatatgacaactctgttctaagacttatacctattatatagggttatacctttttttcgtatgcctcagctctgtacctgacaatttatgattcagtggagccaagctagaaggaacaaaggtcatctaacactgtgatggggatgaattcctgagttttacctgcacaatgaggtggtgccccggaattcacaacagagtagtgatagagcataagatggctgctccagatgactcttgggtttagtgtacttgtgattgaacaagattttttatctatgaagcttgattctacaaccaaaataatagaaatnnnnnnnnnnnnnnaatcatgtctgcttatgctttttaaaagcttatagtttaagtaaaagtaaaatgtaaaaactgattaaacctatacaagtctggcaatgagctctgcatgaggaaatggaaggaggaatattgaaaatgattctaggaaagtgaacgtaagaaaggaaaatgggttttccttttctgatcatgggctctggaaagtattcatggcctttaccagcattcagtataaaccagagataaggacatatgtacttacnnnnnnnnnnnnnnnnnnnnnnnnnnnnnnnntattctgaacagcttgtaaatattgtagttgtttaaaatggaaaataaaagctgagttcttttggcaaatatattgcatcaaaaatacagtattgacagtggataaaacactgaggaaataaatttttttcagtttgcaa

SEQ ID NO: 73555 - DNA, 698 bp, Homo Sapiens
  misc_feature (44)..(44): n is a, c, g, or t
gggcttcccagccaagttccaggcccagttcccaatcagtgctntggatgcactggaatgggtgtggggccacgtgacactgattagtaggttgttacggctgaggaagatctttaaggtcataggagtggcataggatggagaacggctggcattctcaacccgtggtggggccaggtgcattaaaagacacaccacagggagccatatcacccacgaggaaaaaacaaggtcaagactgacaatcccgtgtaaggtgtttctgggaaccggcacacccttaaccaccatgctgtggtggacggccaatgacacccacatagagagcgcctacccgggaggccgcgtgaccgaggggccacgccaggaatattcagaaaataatgagaactacattgaagtgccattgatttttgatcctgtcacaagagaggatttgcacatggattttaaatgtgttgtccataataccctgagttttcagacactacgcaccacagtcaaggaagcctcctccacgttctcctggggcattgtgctggccccactttcactggccttcttggttttggggggaatatggatgcacagacggtgcaaacacagaactggaaaagcagatggtctgactgtgctatggcctcatcatcaagactttcaatcctatcccaagtgaaataaatggaatgaaataattc

SEQ ID NO: 73556 - DNA, 1384 bp, Homo Sapiens
tgctgtttgtattttgtggtctaataaggagttcgggatagcctgttgtatttgcctcatgccagcccctgagctgccttgggagaagatgctgattgtccttgtccagagtactgcttttgcagagtgacaggctgctgggacagatgtcctcctgttgcatctttgtggatgtttagtaccaatgatgacacgggaactcacatcactgacaccgctcttcatcttctgttagtctcttgaagagcatttttttgtacttctttgctgatgacctacctcttcataagccaagtgaaacaagttgacgaactgcctaggacttccacgtgttgctcacatacatgatgatttctgtcacgctcttgtgttcagacacactgacattaccatgtatgtcagacctccttatgatcgcatgtcctgacagttaagctgattgcaaacagactattaaatatgaatggagcaaacgctgtatgtcatggatatgttctggagaaattcttacccatctggatggggcagggcccttgactcacctgaatcatgaccaggcaaacattttatctgtcctttctgcaggaatccgttctgtgtcatgctaggagaatgggttcagtatatggggccatcaggcagtataccctctgaatgtttaacattgttgtatttgcttagagtaactaaacaattgtatctttcaatttatcttttaattcaaagaggaaaccttggcttctgataactttgttgtgttgtatcttaatggcctatagctgtcattacttcctgtagctgcagtacagaattgttacagacctggattaatgcttccaaagacagaaggaccttggcacctaaactgaccagccctgtgatcctgcaccccacaggagtaactcatcaggacttaccagactgctgcttttgggcatcatctgctgggttgatgatttggtttggccaagagtcttgccaagactttaatctatgcctcttgttctacatgaattcttgggaattactcacgttccataggaagagtgcatccccaggtgatggtttttggttatggtatgatcctttcacaccgaggatttcattgtttaaaacgtgtttctttaaaagaagccttgataacgagagtgggggaaggaggcagcagactttgaagactgtggcctttggtgttctggagtagggggagggaaggagaaacatgttttccacatcatcgcaagtgtgtgccctttgccccttttcaggatccttagagttgcctccctccctccaccccgacagttttgcaataatgtgccttatcagttgtgagtttacaggtgaagcaatttcccaaataaatggatgtaagtgttcaaaa

SEQ ID NO: 73557 - DNA, 532 bp, Homo Sapiens
ggggtgggggtggggtgacaaagaaagtacagaacaaaccctgtgtcactgtcccaagttaagctaagtgaacagaactatctcagcatcagaatgagaaagcctgagaagaaagaaccaaccacaagcacacaggaaggaaagcgcaggaggtgaaaatgctttcttggccagggtagtaagaattagaggttaatgcagggactgtaaaaccaccttttctgcttcaatatctaattcctgtgtagctttgttcattgcatttattaaacaaatgttgtataaccaatactaaatgtactactgagcttcgctgagttaagttatgaaactttcaaatccttcatcatgtcagttccaatgaggtggggatggagaagacaattgttgcttatgaaagaaagctttagctgtctctgttttgtaagctttaagcgcaacatttcttggttccaataaagcattttacaagatcttgcatgctactcttagatagaagatggcaaaaccatggtaataaaatatgaatgat

SEQ ID NO: 73558 - DNA, 652 bp, Homo Sapiens
ctaaataaatggataagtagaattaatggttgaggcaggaccatacagagtgtgggaactgctggggatctagggaattcagtgggaccaatgaaagcatggctgagaaatagcaggtagtccaggatagtctaagggaggtgttcccatctgagcccagagataagggtgtcttcctagaacattagccgtagtggaattaacaggaaatcatgagggtgacgtagaattgagtcttccaggggactctatcagaactggaccatctccaagtatataacgatgagtcctcttaatgctaggagtagaaaatggtcctaggaaggggactgaggattgcggtggggggtggggtggaaaagaaagaattagaggttaatgcagggactgtaaaaccaccttttctgcttcaatatctaattcctgtgtagctttgttcattgcatttattaaacaaatgttgtataaccaatactaaatgtactactgagcttcgctgagttaagttatgaaactttcaaatccttcatcatgtcagttccaatgaggtggggatggagaagacaattgttgcttatgaaagaaagctttagctgtctctgttttgtaagctttaagcgcaacatttcttggttccaataaagcattttac

SEQ ID NO: 73559 - DNA, 698 bp, Homo Sapiens
  misc_feature (29)..(30): n is a, c, g, or t
gtacacaacaggagcgggaggaggagtgnncctgtgcccagcagccatagctgtcgcagagccctccacttccgaatgcctccgcattgagcctgacaccactgccctgagcaccaatcacgagaccatcgacctgcttgtccagatcctccggaattgtttacggtacttcctgcctccaagtttccccatctccaagaagcagctgagtgctatgaattcagatgagctaatatcttttcctctgaaggagtacttcaagcaatatgaagtagggctccaaaacctgtgcaattcctaccagagccgtgctgactcccgggccaaggcctccgaggaaagcctgcgcacctccgagaggaagctccgcgagacggaggagaagctgcagaagctgaggaccaacatcgtggcactcctgcaaaaggtgcaggaggacatagacatcaacacagatgatgagctggacgcctacattgaggacctcatcaccaagggggactgaaggcaggagagagagcagctcccctgcccacctgcccctcaaccctgtagctgcagggggaggggacttcattcatgggttggtggtcgcaccttggtttgacttacacgggacatttgtgtttttggaggaaaagataccctgattctttgaatcttccttaagtttataaatatttattttttaaaagaag

SEQ ID NO: 73560 - DNA, 827 bp, Homo Sapiens
  misc_feature (749)..(765): n is a, c, g, or t
  misc_feature (768)..(768): n is a, c, g, or t
  misc_feature (770)..(770): n is a, c, g, or t
  misc_feature (772)..(775): n is a, c, g, or t
cagtcgacggtaccggacatatgcccgggaattcggccattacggccggggagatcgtcaggtgagggaggaagggatagccagcgcgaaggaagtgctggagtcgtgtgttttggctgcgcgtgatcctgcgtgggtcgggaggtgtttctgtgaaaagcctaaagattagactgtaagaaaagaaaatagaagccatgtttcgaagacctgtattacaggtacttcgtcagtttgtaagacatgagtccgaaacaactaccagtttggttcttgaaagatccctgaatcgtgtgcacttacttgggcgagtgggtcaggaccctgtcttgagacaggtggaaggaaaaaatccagtcacaatattttctctagcaactaatgagatgtggcgatcaggggatagtgaagtttaccaactgggtgatgtcagtcaaaagacaacatggcacagaatatcagtattccggccaggcctcagagacgtggcatatcaatatgtgaaaaaggggtctcgaatttatttggaagggaaaatagactatggtgaatacatggataaaaataatgtgaggcgacaagcaacaacaatcatagctgataatattatatttctgagtgaccagacgaaagagaaggagtagaaaggatgattcttctttggccatcatttggtacagtctcatttccaagtcatgtataatctttatggcttccaaggacaagaattaaaatactcttttaccccnnnnnnnnnnnnnnnnnaananannnnaaaaatgtcgggccgccctccggccccctcaagaaagctttccaagaaccat

SEQ ID NO: 73561 - DNA, 860 bp, Homo Sapiens
  misc_feature (688)..(705): n is a, c, g, or t
  misc_feature (709)..(713): n is a, c, g, or t
gggctgtttcctttttcctctggcgagctttgcgttccctgtgcgccggaagtgatcccctgcgtggctgggctgctcgggttagatcgtcaggaaaagcctaaagattagactgtaagaaaagaaaatagaagccatgtttcgaagacctgtattacaggtacttcgtcagtttgtaagacatgagtccgaaacaactaccagtttggttcttgaaagatccctgaatcgtgtgcacttacttgggcgagtgggtcaggaccctgtcttgagacaggtggaaggaaaaaatccagtcacaatattttctctagcaactaatgagatgtggcgatcaggggatagtgaagtttaccaactgggtgatgtcagtcaaaagacaacatggcacagaatatcagtattccggccaggcctcagagacgtggcatatcaatatgtgaaaaaggggtctcgaatttatttggaagggaaaatagactatggtgaatacatggataaaaataatgtgaggcgacaagcaacaacaatcatagctgataatattatatttctgagtgaccagacgaaagagaaggagtagaaaggatgattcttctttggccatcatttggtacagtctcatttccaagtcatgtataatctttatggcttccaaggacaagaattaaaatactcttttacgccnnnnnnnnnnnnnnnnnnaaannnnnaacatgtcggccgcctcggccctccaaaacctttctaaaccattcgtttggcgcccgggccccagtaaggaaagggaaacatggtccataacctggttccctaaggagaacccgggccatggacctaaggcctgggatttctccacc

SEQ ID NO: 73562 - DNA, 560 bp, Homo Sapiens
tctttctcttagacccccagagtgtagaatgtgatacacttttgtccttttctctgaggatgtgctgcctagtgtcgtggaatctgcctgaccattgcaagcatccaattttgtgaccagttcttttgcaggaaattgtttctgagaagactggaagacaagaaatatcccacctcttctaacaagatctgaattgttcgaaaagcagccagtgcctaacttgtagctccacttatgccaactgtatatatacctctcgtgagcatagcaagtgatttaatattttgaaaagatggctaaaatccttttaatgaacagcactaaagttatatgtattagaggagaattattgaatgagatggagaaagagttctgaaattaatatttacattttggcttttttacagataatattatatttctgagtgaccagacgaaagagaaggagtagaaaggatgattcttctttggccatcatttggtacagtctcatttccaagtcatgtataatctttatggcttccaaggacaagaattaaaatactcttttacgtaaaaaa

SEQ ID NO: 73563 - DNA, 889 bp, Homo Sapiens
  misc_feature (425)..(446): n is a, c, g, or t
  misc_feature (853)..(853): n is a, c, g, or t
agatattttgagatgcattatgagaactttcagttcaaagcatcaaattgatgccatatccaaggacatgccaaatgctgattctgtcaggcactgaatgtcaggcattgagacatagggaaggaatggtttgtactaatacagacgtacagatactttctctgaagagtattttcgaagaggagcaactgaacactggaggaaaagaaaatgacactttctgctttacagaaaaggaaactcattcagactggtgatatcgtgatgtacctaaaagtcagaaaccacattttctcctcagaagtagggaccgctttcttacctgtttaaataaaccaaagtataccgtgtgaaccaaacaatctcttttcaaaacagggtgctcctcctggcttctggcttccataagaagaaatggagaaaannnnnnnnnnnnnnnnnnnnnntgtgaaagatcaatccatctgccagaatctagtgggatggaagtttttgctacatgttatccaccccaggccaggtggaagtaactgaattattttttaaattaagcagttctactcgatcaccaagatgcttctgaaaattgcattttattacccatttcaaactattttttaaaaataaatacagttaacatagagtggtttcttcattcatgtgaaaattattagccagcaccagatgcatgagctaattatctctttgagtccttgcttctgtttgctcacagtaaactcattgtttaaaagcttcaagaacattcaagctgttggtgtgttaaaaaatgcattgtattgatttgtactggtagtttatgaaatttaattaaaacacaggccatgaatggaanggtggtattgcacagctaataaaatatgatttgtgg

SEQ ID NO: 73564 - DNA, 1233 bp, Homo Sapiens
cagtcgacggtaccggacatatgcccgggaattcggccattacggccgggggtggctgggctgcgcttgggtccgtcgctgcttcggtgtccctgtcgggcttcccagcagcggcctagcgggaaaagtaaaagatgtctgaatatattcgggtaaccgaagatgagaacgatgagcccattgaaataccatcggaagacgatgggacggtgctgctctccacggttacagcccagtttccaggggcgtgtgggcttcgctacaggaatccagtgtctcagtgtatgagaggtgtccggctggtagaaggaattctgcatgccccagatgctggctggggaaatctggcgtatgttgtcaactatccaaaagataacaaaagaaaaatggatgagacagatgcttcatcaccagtgaaagcgaaaagagcagtccagaaaacatcccatttaataccgttgggcctcccatggaaaacaaacgaacaggacctgaaagagtattttagtacctttggcagaagttcttatggtgcaggtcaagaaagatcttaagactggtcattcaaaggggtttggctttgttcgtttcacggaatatgaaacacaagtgaaagtaatgtcacagcgacatatgatagatggacgatggtgtgactgcaaacttcctaattctaagcaaagccaagatgagcctttgagaagcagaaaagtgtttgtggggcgctgtacagaggacatgactgaggatgagctgcgggagttcttctctcagtacggggatgtgatggatgtcttcatccccaagccattcagggcctttgcctttgttacatttgcagatgatcagattgcgcagtctctttgtggagaggacttgatcattaaaggaatcagcgttcatatatccaatgccgaacctaagcacaatagcaatagacagttagaaagaagtggaagatttggtgttcatctcatttcaaatgtttatggaagaagcacttcattgaaagtagtgctgtaaatattctgccataggaatactgtctacatgctttctcattcaagaattcgtcatcacgcatcacaggccgcgtctttgacgccctgaatgcaaagaattcatagcagttaattccccttttttgacccttttgagatggaactttcataaagtttcttggcagtagtttattttgcttcaaataaacttatttgaaaagttgtttcaagt

SEQ ID NO: 73565 - DNA, 2126 bp, Homo Sapiens
acgatggtgtgactgcaaacttcctaattctaagcaaagccaagatgagcctttgagaagcagaaaagtgtttgtggggcgctgtacagaggacatgactgaggatgagctgcgggagttcttctctcagtacggggatgtgatggatgtcttcatccccaagccattcagggcctttgcctttgttacatttgcagatgatcagattgcgcagtctcggggtggagaggacttgatcattaaaggaatcagcgttcatatatccaatgccgaacctaagcacaatagcaatagacagttagaaagaagtggaagatttggtggtaatccaggtggctttgggaatcagggtggatttggtaatagcagagggggtggagctggtttgggaaacaatcaaggtagtaatatgggtggtgggatgaactttggtgcgttcagcattaatccagccatgatggctgccgcccaggcagcactacagagcagttggggtatgatgggcatgttagccagccagcagaaccagtcaggcccatcgggtaataaccaaaaccaaggcaacatgcagagggagccaaaccaggccttcggttctggaaataactcttatagtggctctaattctggtgcagcaattggttggggatcagcatccaatgcagggtcgggcagtggttttaatggaggctttggctcaagcatggattctaagtcttctggctggggaatgtagacagtggggttgtggttggttggtatagaatggtgggaattcaaatttttctaaactcatggtaagtatattgtaaaatacatatgtactaagaattttcaaaattggtttgttcagtgtggagtatattcagcagtatttttgacatttttctttagaaaaaggaagagctaaaggaattttataagttttgttacatgaaaggttgaaatattgagtggttgaaagtgaactgctgtttgcctgattggtaaaccaacacactacaattgatatcaaaaggtttctcctgtaatattttatccctggacttgtcaagtgaattctttgcatgttcaaaacggaaaccattgattagaactacattctttaccccttgttttaatttgaaccccaccatatggatttttttccttaagaaaatctccttttaggagatcatggtgtcacagtgtttggttcttttgttttgttttttaacacttgtctcccctcatacacaaaagtacaatatgaagccttcatttaatctctgcagttcatctcatttcaaatgtttatggaagaagcacttcattgaaagtagtgctgtaaatattctgccataggaatactgtctacatgctttctcattcaagaattcgtcatcacgcatcacaggccgcgtctttgacggtgggtgtcccatttttatccgctactctttatttcatggagtcgtatcaacgctatgaacgcaaggctgtgatatggaaccagaaggctgtctgaacttttgaaaccttgtgtgggattgatggtggtgccgaggcatgaaaggctagtatgagcgagaaaaggagagagcgcgtgcagagacttggtggtgcataatggatattttttaacttggcgagatgtgtctctcaatcctgtggctttggtgagagagtgtgcagagagcaatgatagcaaataatgtacgaatgttttttgcattcaaaggacatccacatctgttggaagacttttaagtgagtttttgttcttagataacccacattagatgaatgtgttaagtgaaatgatacttgtactccccctacccctttgtcaactgctgtgaatgctgtatggtgtgtgttctcttctgttactgatatgtaagtgtggcaatgtgaactgaagctgatgggctgagaacatggactgagcttgtggtgtgctttgcaggaggacttgaagcagagttcaccagtgagctcaggtgtctcaaagaagggtggaagttctaatgtctgttagctacccataagaatgctgtttgctgcagttctgtgtcctgtgcttggatgctttttataagagttgtcattgttggaaattcttaaataaaactgatttaaataaa

SEQ ID NO: 73566 - DNA, 996 bp, Homo Sapiens
  misc_feature (878)..(912): n is a, c, g, or t
gcatgccaagtaacaaaggccaaggccctgaagggccttgggatgaagacaattccgtcacatccccgttacttgagaggagaacttcccgcagctcaacctccagtcatgtcccgctgtacaacgcccccacaaccactttttctgctttctcaaaaggctcatcttcgcttttgcttagaattaggaagttcccagtcacaccatcgtccatataatcataggtcgctgtgacattacttttcacttgtgtttcatattccgtaaaacgaacaaagcccaacccctttgaatgaccagtcttaagatctttcttgacctgcaccataagaacttctccaaaggtactaaaatactctttcaggtcctgttcggttgttttccatgggagacccaacactattaaatcggatgttttctggactgctcttttcactttcactgctgatgaagcatctgtctcatccatttttcttttgttatcttttggatagttgacaacatacaccagatttccccagccagcatctggggcatgcagaattccttctaccagccggacacctctcatacactgagacactggattcctgtagcgaagcccacacgcccctggaaactgggctgtaaccgtggagagcagcaccgtcccatcgtcttccgatggtatttcaatgggctcatcgttctcatcttcggttacccgaatatattcagacatcttttacttttcccgctaggccgctgctgggaagcccgacagggacaccgaagcagcgacggacccaagcgcagcccagccaccgcttcgctcccacaaaatggcccccggccgtaatggccgaattcccgggcatatgtccggtaccgtcgactgnnnnnnnnnnnnnnnnnnnnnnnnnnnnnnnnnnncgccgcttcctcgctcactactcgctgcgctcgtcgttcggctcgaagacgctagcgccctatagtgagtcgatacatttcttc

SEQ ID NO: 73567 - DNA, 1097 bp, Homo Sapiens
  misc_feature (964)..(972): n is a, c, g, or t
ccacgcgtccgctctgtttaaaattgtgggctgatttggtcttcctctcctcctcccactgttactgccctgcagcccttgttcaggtgtacagacccttattctggcctctagtgtccttgtctgtcatgacacacccttccgcccaaatacctctgaccccaaggctggaatggggctggtaggagataagtttgcttactcatagtcatgtcctttctcttggcacctgcttccctgcggtgtcctcaaatggatttctgtgtggcagtggagtgattgcatgaatttttctgtaacacattaactttgtattattattaagggagtttgagaaagctttgcttataatgtcaaggcaaggagtaaaaactggagcccaaagaaattcccttagggcaagattatgttataatagaaaattgaatttcctgaggcagtggctgccaccccttttcagatgtttagtcctgcaaatagcatctttcttgtagtctgtgacatggatggggatgctagggcccttaggggcaaggggactaaactaaatcaagttgagtttttttccagcaggggttaggggaggtactcgctgttgatatttgacactagaaagtaatcttttttacaaaactgtttttctaggtgggtggaaagtgaaactgccacatccttgttggtttagtccaagagatcatttgcaacaacagtagatgtccgggttttgtttctgtctttttattatgaaaaactatgttaagggggaaaatgtggattatggtaaccagaggaatccctagccttgttttccttagaagacttgtttagtgttttatcagacgtctgttgtagttgtagacaggaaagcttgtgagaaaaacaccacatggagcctgtaaatgtttttgcacaacctgtaaagcattcttggaagtggccagtaaaaaggggttttaccattttnnnnnnnnntgtaactgtgtcattgtttacatctgtaactttttcctcccctgttctcattacaccattctggcgaaaatgtaggcaaagtagcttccagttttagaataaataaccatttggataaaattcaa

SEQ ID NO: 73568 - DNA, 1603 bp, Homo Sapiens
  misc_feature (228)..(261): n is a, c, g, or t
  misc_feature (1082)..(1165): n is a, c, g, or t
ctgacgatgagaaccccaacgccaacctacttgagatatgctacaaggaccgcatccagcagtttgatgatgatgaggaagaggaggacgaggaagaggcccagggctcaggggagtctgatggagaagatggcgcctggcagggcagccagctggccaggggggcccgtctgggccagccacctggtgtccggagtggaggcagcacagacagtgaggacgaagaannnnnnnnnnnnnnnnnnnnnnnnnnnnnnnnnngcattggctgtgcagcccgtggaggggccacccctctgtcctaccccagccctggccctcagcctccaggccccagctggacagccacctttgacccagtgcctacagatgccccgaccagcccccgagtctccggggaggaagagctgcacactgggcctccagccccacaggggcccctcagtgtgccccagggcctccccactcagagcctggccagccctcctgcccgtgacgccctgcagctcaggtctcaggaccccacacccccctcagcacctcaggaagccacagaaggcagcaaagtcacggagccctcagccccttgccaggccttggttagcatcggggaccttcaggccaccttccacgggatccgttctgcccccagctcctcggacagtgcaaccagagacccctctacctctgtcccagcctccggggcccaccagcccccccagaccacagaaggggagaagagcccagagcccttggggcttccccaaagccagagtgcccaggccctcacgcctcctccgatacacaatggctctgcaccggaagggcctgcatccccaggctcccaatagctgcctggtgcggcagcggcggccaaatcttccgtcctcccgtggatctcccggggtggggggcagggcgggtcccacgatggcccccattgccctcatcaccctgacacccccacattctctcctctggacccccaagaggctggtgccagggagacaggcccaacccacccccatttgcactggagaagagaagtttttggagcggttgcctcctagaataaagatacnnnnnnnnnnnnnnnnnnnnnnnnnnnnnnnnnnnnnnnnnnnnnnnnnnnnnnnnnnnnnnnnnnnnnnnnnnnnnnnnnnnngacaccgaactgggctggcggctccaaagcacagccttccctgttccgtcccagcgggagctggtgttaggggtcccaaggttgccacccacgtgcccagctgtcccacgctgcagcgcagacggccacgcccacacccggccttttagctcaggtccaccatgggggacggcccagcgtgggtgggggtgccagagggtcccgagtgggggccgtgcctttgcccagaccctgcactttcaaccaggccagtccggctctggggagcaggggcctccccggcaacagccccaggggccttgagggtctgaggtcccagccctgttgccaagtgaccttgtccccagctccctcctcccaggctggtgtgagtgtgcgtgcgtttgtgccgagcttctatttcatattgcaaatataaataaaggaaggcagtttacg

SEQ ID NO: 73569 - DNA, 722 bp, Homo Sapiens
  misc_feature (543)..(551): n is a, c, g, or t
tgacaccagcatgttgctgtaaatttagcaatagaataggcaatggactgctgtgcatttccttagtttttcattctgaaacagagcaaaacatcttcccaaagagatggagacaatctcttctgggtagattccaagtataacctgtcccagggtcctcttgctcagctgtgactaacaaaagtctgttcaatttaactacttagataagaagcgcaatgcttttatttaaaaatttaatattttctatggggctgtattttccaaataatagcaacaaaactgtcctaacgttttcactgttctgtaattttgttttaatatagaggatacccataatttcttaacactggaaacatcattctgaacgatgtaggaagcggtcagtaacgtgaatgatgttattgtaccgtctccagctttttccttcttcccccagatggtcgcacctgtgcatacatccctgtgcatgtgggggcacatgagtgggaaagtgggtgtcactcctattttctgtcctagagtgtcagcgttggaagggannnnnnnnngttcctccagtccggccctctagttgatagtccagtagtctgttaacaatttgtaaggacctgggttatattttaaaggtggttgttgttgttgtttgggttcacttatgtatatgcagcttgactgttcaacccagatttttaaacaataaaaaaatttaaaaaataaaa

SEQ ID NO: 73570 - DNA, 1072 bp, Homo Sapiens
  misc_feature (80)..(80): n is a, c, g, or t
  misc_feature (92)..(195): n is a, c, g, or t
  misc_feature (199)..(199): n is a, c, g, or t
  misc_feature (212)..(213): n is a, c, g, or t
  misc_feature (217)..(217): n is a, c, g, or t
  misc_feature (222)..(222): n is a, c, g, or t
  misc_feature (290)..(290): n is a, c, g, or t
  misc_feature (318)..(318): n is a, c, g, or t
cgtccgatcatatcagtgcagcagttccgatgaaagcggcatgaggcacgcaatatgtgagtagtcactcataggcaccncagcttaccacnnnnnnnnnnnnnnnnnnnnnnnnnnnnnnnnnnnnnnnnnnnnnnnnnnnnnnnnnnnnnnnnnnnnnnnnnnnnnnnnnnnnnnnnnnnnnnnnnnnnnnnnttgncccctcgagccanngaantcgcnacgagggacaaacctatgcgtatccagtatgccaagaccgactcagatatcattgccaagatgaaagncaccttcgtggagcgggaccgcaagcgngagaagaggaagcccaagagccaggagaccccggccacccaagaagcctgtgcaaggcggggcgagccacccccgtggtggggcctgtcccagggccaggtcccggggcatgccgccgatgactcaggcgccccgcaattatgcaccacatgccgggccagccgccctacatgccgccccatggtatgatccccccgccaggccttgcacctggccagatcccaccaggggccatgcccccgcagcagcttatgccaggacagatgccccctgcccagcctctttctgagaatccaccgaatcacatcttgttcctcaccaacctgccagaggagaccaacgagctcatgctgtccatgcttttcaatcagttccctggcttcaaggaggtccgtctggtacccgggcggcatgacatcgccttcgtggagtttgacaatgaggtacaggcaggggcagctcgcgatgccctgcagggctttaagatcacgcagaacaacgccatgaagatctcctttgccaagaagtagcaccttttccccccatgcctgccccttcccctgttctggggccacccctttcccccttggctcagccccctgaaggtaagtccccccttgggggccttcttggagccgtgtgtgagtgagtggtcgccacacagcattgtacccagagtctgtccccagacattgcacctggcgctgttaggccggaattaaagtggctttttgaggtttggtttttcacaaaa

SEQ ID NO: 73571 - DNA, 844 bp, Homo Sapiens
caaatcacctgtcaactaaggacctgtatttggaatacacagagaactcttaaaactcaacagtaagaaaacagtccaactaaaaagtggaaaagacctgatcagacatgcaccagcaatgacacagcattgactgttgggcacaggagaagaggcttgacaccaccagccaccaggaaatgcagattcagccaccacgcaggacacgaggcacctgcaccacagccgcagtgcaagagaatgctggtggtgccccaagctgccagggtgtggacctgctggaaatggaagacggcatggtggtttcctataaagttcaatgtacacagccacatgacccagcaatcccactgttgggtatttagagaatgaaaaacttaagtccacataaaaactgtacgtttgaactaccaaagacagtgtgaaaagaatgaaaagatgaggagaaaatattcacaaatcacctgtcaactaaggacctgtatttggaatacacagagaactcttaaaactcaacagtaagaaaacagtccaactaaaaagtggaaaagacctgatcagacatgcaccagcaatgacacagcattgactgttgggcacaggagaagaggcttgacaccaccagccaccaggaaatgcagagactgacacattgggcaccatgggggtgggaagaggtgaaggaaggttgggggaaggcgccgtggtcaggtgtggcactaaggagatttgggggtggagccattctgtgtgtggactgtggtggtggtcgcgtgactgtacatgtgttaaagcttcaaacaaaaaagttaaaaattttagtttaaaatattaaaacattttt

SEQ ID NO: 73572 - DNA, 620 bp, Homo Sapiens
tgaattctgggctcaggtgatcctccattctcagcctgcccagtaactgggactacagctgtgcccactatgcacggctagttctgaattttttgtggagaaggaggtctcacaggctggtctcgaaccaacctgggcaacatagtgagacccctcctcccgcctcagcctcccagagtgctggattacaggtgtgagccactgcgcctgggctgcctgcttgtcattaccataggctgtctctgaaagctaacagcacaaggccccggtgatgcacctccctcccggccagcccctcacagcccccaccctgctctgcagcctggcccacacaggtgtctgggatctgctgccacccaccaccatcccttgcaggaagctggtcctaccctggaagactgtgacaatctgtgtcatgagggcaggggtcaaatgcaagtcttttctgcacccccagatcatgcaagagctgtggcagctgactaaacaaacgaacaggactgagacctttaggcacagcagccccagcctcacaatgcccattctgccgagatgggcaggcatgcaaggagcagccactttggggtggactgcctacaatatactacaggttgtgtgtg

SEQ ID NO: 73573 - DNA, 793 bp, Homo Sapiens
  misc_feature (65)..(88): n is a, c, g, or t
gaagtgttttggtagttctattaagaaatagttaaatattgtgcttttcagagcctcagagaaannnnnnnnnnnnnnnnnnnnnnnncagccggaatctgtccttgatggggccagcttaaataatactggcaaccaagattctgttaggatttctgtgcatatagtgtagtaaagaagtatcattcaggggtgaaaaacaaagagccgttttaatgatgttgagtacatttggctgttttatagcctttttcttccctccccccaaagaattctgtttgcctaactcccaaactgttggggtggtacattcctttaggaccaattaaaacataattgagggtcagtgatacatttggctgactctggttcagtattctcttaggtgattatattctctcatgtacagttacaggaaattaaaatgttaaagtaacctaaaatgaattcagaccaataaaatcaagggaaatacaagttgattgcattacttctgtatgttgcttgctattaaaaaggttaagaggccaggttacccaccagtccttgcactgttctgacactttccccaggaggaaaacaagtacaaaggttacggtggaggcataagtagaagagattgttaagaagggtattcatgtgtctttgctctttctgctttatgcctcagtttggtttaaaaacttctgtactggcaaatggtggtattcagtgtgggatagtgtcataactaatttgacaatttattaatcataaaataacaataaatctctagcttttacacttgaaaaaa

SEQ ID NO: 73574 - DNA, 1094 bp, Homo Sapiens
  misc_feature (669)..(689): n is a, c, g, or t
  misc_feature (696)..(713): n is a, c, g, or t
  misc_feature (847)..(859): n is a, c, g, or t
  misc_feature (979)..(988): n is a, c, g, or t
cgcagtaactataacggttctaaggtagcgaggcctgggtggcgaattcggcacgaggggcggcggtcatgcgggacgcggatgcagacgcaggcggaggcgctgacggcggggatggccggggtggccacagctgccgcgggggcgtggacacagccgcagctccggccggtggagctcccccagcgcacgcgccaggtccgggcagagacgccgcgtctgcggccagggggtcacgaatgcggccgcacatattcaccctcagcgtgcctttcccgacccccttggaggcggaaatcgcccatgggtccctggcaccagatgccgagccccaccaaagggtggttgggaaggatctcacagtgagtggcaggatcctggtcgtccgctggaaagctgaagactgtcgcctgctccgaatttccgtcatcaactttcttgaccagctttccctggtggtgcggaccatgcagcgctttgggccccccgtttcccgctaagcctggcctgggcaaatggagcgaggtcccactttgcgtctccttgtaggcagtgcgtccatccttccctagggcaggaattcccacagttgctactttcctgggagggcctcatgttttatctggttcttaaatgtttgttactacagaaaataaaactgcgctactnnnnnnnnnnnnnnnnnnnnnctcgagnnnnnnnnnnnnnnnnnngaattgggacaaagtttactaaggcatacgacacggctccacaagcggtgggaaattccagtgatgggattgtttgttgggtgggttccttttatccaaatgggagacaagacacattttccccaaggactgtnnnnnnnnnnnnnaccgggaacaaaccgaatggcaagattgccacccgccgggctagggattgggttccccgggacacccgaaattttggggggcattgaccccacccaccatgtgcaatgcccgggccacannnnnnnnnnccccggaagggggagggaaaccaccttattgtgttttgccccacaccttcgcctttcaggggaaggggccccccgggaggggaaaggcccccggcaaagggtttca

SEQ ID NO: 73575 - DNA, 782 bp, Homo Sapiens
  misc_feature (42)..(42): n is a, c, g, or t
  misc_feature (147)..(147): n is a, c, g, or t
agatggaatagaataactgggctatgagtcaccagcccactntgtgacccagcaagacctttcccctctttgggcatcagtttctcatctgtaagatgaccagagttgcttagatgatctcctagatcctttccagttctcttgatntcgtaaagccaatgcttctccctctttaagggctatgccaaccagccctggaggctgggatctgccgctccctccagccaccagggggcaggagtgcactacctgctgtcagtcaccagagtggccgctcagtgcccagcccgccagcctcgctcttggaggctgctctttatcctgcctgtggttttcagctcagagctggacttctatttataagttacctgtatttatatttatatgcccgctctcatggtgaaggctggacaaggtgctcctctggcccctccttcttacctcagatgcctgaacagaacaaggcaaacccgtagcagcctctcaggagctgacaggtcctctttcggggctcaggagggtgggcacacacccagcggcctgcagagtaagcttattacccacaactgtgcccgctttgtgcttctaaggtgcacacctagcctaggtgagacactgcagccaggcaaccaccgacacacgccccttctcaaagccagaggtgagtggggcaggtgcccggggctgggtgagtggaattaggacacacacaggcttgggcttcaagttcatttattgatgcattggttggacacaataaaaccacaattgttatcaaaaaa

SEQ ID NO: 73576 - DNA, 2391 bp, Homo Sapiens
  misc_feature (63)..(63): n is a, c, g, or t
  misc_feature (1676)..(1676): n is a, c, g, or t
  misc_feature (1679)..(1767): n is a, c, g, or t
  misc_feature (1772)..(1775): n is a, c, g, or t
  misc_feature (1801)..(1918): n is a, c, g, or t
cgggaggccgggccggccgggctgcgagcgcctgccccatgcgccgccgcctctccgcacgantgttcccctcgcggaggaaagcggcgcagctgccctgggaggacggcaggtccgggttgctctccggcggcctccctcggaagtgttccgtcttccacctgttcgtggcctgcctctcgctgggcttcttctccctactctggctgcagctcagctgctctggggacgtggcccgggcagtcaggggacaagggcaggagacctcgggccctccccgcgcctgccccccagagccgccccctgagcactgggaagaagacgcatcctggggcccccaccgcctggcagtgctggtgcccttccgcgaacgcttcgaggagctcctggtcttcgtgccccacatgcgccgcttcctgagcaggaagaagatccggcaccacatctacgtgctcaaccaggtggaccacttcaggttcaaccgggcagcgctcatcaacgtgggcttcctggagagcagcaacagcacggactacattgccatgcacgacgttgacctgctccctctcaacgaggagctggactatggctttcctgaggctgggcccttccacgtggcctccccggagctccaccctctctaccactacaagacctatgtcggcggcatcctgctgctctccaagcagcactaccggctgtgcaatgggatgtccaaccgcttctggggctggggccgcgaggacgacgagttctaccggcgcattaagggagctgggctccagcttttccgcccctcgggaatcacaactgggtacaagacatttcgccacctgcacgacccagcctggcggaagagggaccagaagcgcatcgcagctcaaaaacaggagcagttcaaggtggacagggagggaggcctgaacactgtgaagtaccatgtggcttcccgcactgccctgtctgtgggcggggccccctgcactgtcctccaacatcatgttggactgtgacaagaaccgccacaccctggtgcacattcagctgaagctggatgggacagtgaggaagcctgtacctacaggccatattgctcaggctcaggacaaggcctcaggtcgtgggcccagctctgacaggatgtggagtggccaggaccaagacagcaagctacgcaattgcagccacccggccgccaaggcaggcttgggctgggccaggacacgtggggtgcctgggacgctgcttgccatgcacagtgatcagagagaggctggggtgtgtcctgtccgggaccccccctgccttcctgctcaccctactctgacctccttcacgtgcccaggcctgtgggtagtggggagggctgaacaggacaacctctcatcacccccacttttgttccttcctgctgggctgcctcgtgcagagacacagtgtaggggccatgcagctggcgtaggtggcagttgggcctggtgagggttaggacttcagaaaccagagcacaagccccacagagggggaacagccagcaccgctctagctggttgttgccatgccggaatgtgggcctagtgttgccagatcttctgatttttcgaaagaaactagaatgctggattcttaagtgatatcttctgattttttaaatgatagcacctaaatgaaacttntcnnnnnnnnnnnnnnnnnnnnnnnnnnnnnnnnnnnnnnnnnnnnnnnnnnnnnnnnnnnnnnnnnnnnnnnnnnnnnnnnnnnnnnnnnaccannnnaacacaccccccaccacaccaaacannnnnnnnnnnnnnnnnnnnnnnnnnnnnnnnnnnnnnnnnnnnnnnnnnnnnnnnnnnnnnnnnnnnnnnnnnnnnnnnnnnnnnnnnnnnnnnnnnnnnnnnnnnnnnnnnnnnnnagcagcgcctcccgggagaggccccggcccacatatccaggagtcgttggccaatcccccccgaaacaaaacaatcgcttcggacagccccaacctaattctaatatctacagcacctaccatccaaacggccgcgtatttttggctccttacaatttcgctagcccccccacatattacttccttctcgtcaccctcgcgcgcttttttctttacaagcagtctagtgacagatttacgccgtctcggccagggtttggttctttcgcttcctcatcctcgactctctcccctagtatggcccgcacactcccgcaggtggagccgcacgtcaacgtcgaccacgccggctcccccacgcccacatgtcaacagccggtccttcaccccgatttttgtggcacagcagacaaccaaaatccaaaccacgccatataaccctccgcttgctggcaagaggctagcacgacggc

SEQ ID NO: 73577 - DNA, 458 bp, Homo Sapiens
tttatagatagggacagaaattccctgttcaaagtcacatagctagagcttggcagtgactcagagcaggcatcttctcaccagaccataaactccgggagggcagcgatcagcttgcatggttttcagctgcgtccccacgttattggatagggccgtcagaaaatgcttgatcgagtagggcgactggctcccaggatccggcgctttccactccccaaagcccgtcaccctagttgcttttgcctctgatgcttataaaatacgattataagattcgtttttacgctgtgtgaacaagactcctttctttataaccaaactaagtgactttttttctgtctatgtagtttattttatggcagggttttcggacactcttctttactcaggcttacccagcgtaatgctagacacggaggtggcactcgataataaactctagatgatttttctaa

SEQ ID NO: 73578 - DNA, 2845 bp, Homo Sapiens
  misc_feature (2474)..(2505): n is a, c, g, or t
agcgaggcctgggtggcgaattcggcacgagggttttgtggccaccaagggaatgacatgtacgatgaagaaaaagtgaaatacactgtgttcaaagtattgaagaactcctcgcttgctgagtttgttcagagcctctctcagaccatgggatttccacaagatcaaattcgattgtggcccatgcaagcaaggagtaatggaacaaaacgaccagcaatgttagataatgaagccgacggcaataaaacaatgattgagctcagtgataatgaaaacccttggacaatattcctggaaacagttgatcccgagctggctgctagtggagcgaccttacccaagtttgataaagatcatgatgtaatgttatttttgaagatgtatgatcccaaaacgcggagcttgaattactgtgggcatatctacacaccaatatcctgtaaaatacgtgacttgctcccagttatgtgtgacagagcaggatttattcaagatactagccttatcctctatgaggaagttaaaccgaatttaacagagagaattcaggactatgacgtgtctcttgataaagcccttgatgaactaatggatggtgacatcatagtatttcagaaggatgaccctgaaaatgataacagtgaattacccaccgcaaaggagtatttccgagatctctaccaccgcgttgatgtcattttctgtgataaaacaatccctaatgatcctggatttgtggttacgttatcaaatagaatgaattattttcaggttgcaaagacagttgcacagaggctcaacacagatccaatgttgctgcagtttttcaagtctcaaggttatagggatggcccaggtaatcctcttagacataattatgaaggtactttaagagatcttctacagttcttcaagcctagacaacctaagaaactttactatcagcagcttaagatgaaaatcacagactttgagaacaggcgaagttttaaatgtatatggttaaacagccaatttagggaagaggaaataacactatatccagacaagcatgggtgtgtccgggacctgttagaagaatgtaaaaaggccgtggagcttggggagaaagcatcagggaaacttaggctgctagaaattgtaagctacaaaatcattggtgttcatcaagaagatgaactattagaatgtttatctcctgcaacgagccggacgtttcgaatagaggaaatccctttggaccaggtggacatagacaaagagaatgagatgcttgtcacagtggcgcatttccacaaagaggtcttcggaacgttcggaatcccgtttttgctgaggatacaccagggcgagcattttcgagaagtgatgaagcgaatccagagcctgctggacatccaggagaaggagtttgagaagtttaaatttgcaattgtaatgatgggccgacaccagtacataaatgaagacgagtatgaagtaaatttgaaagactttgagccacagcccggtaatatgtctcatcctcggccttggctagggctcgaccacttcaacaaagccccaaagaggagtcgctacacttaccttgaaaaggccattaaaatccataactgatttccaagctggtgtgttcaaggcgaggacggtgtgtgggtggccccttaacagcctagaactttggtgcacgtgccctctagccgaagtcttcagcaagaggattcgctgctggtgttaattttattttattgaggctgttcagtttggcttctctgtatctattgactgccctttttgagcaaaatgaagatgtttttataaagcttggatgccaatgagagttattttatggtaaccacagtgcaaggcaactgtcagcgcaatgggggagaagaggttagtggatcgggggtccctggctcaaggtctctgggctgtccctagtgggcacgagtggctcggctgccttcctggggtcccgtgcaccagccctgcagctagcaagtcttgtgtttaggctcgtctgacctatttccttcagttatactttcaatgaccttttgtgcatctgttaaggcaaaacagagaaactcacaacctaataaatagcgctcttcccttcattgtgtgcattgtcggcccttcctcgggttctcctcctccagctgcctgggggctttttaataaacttgtctcacctcgtcagccactactgtctgcagcccctttgcaaagtggatgcactgaatacagtccggacagacattgtgggggtctttttattaaatcaagaacattgttaaattcaattaaggtttactctgctgccttggcagacttacgatctcaacagttcatacgagcaggtgaaaggattataaatagaatttcgttaaagtggaacagacgacaagaaagccttttagcaagagggcatgctcactagtggttagtaagctgtcgactttgtnnnnnnnnnnnnnnnnnnnnnnnnnnnnnnnntgaattgtatatttaatgaatgaacatgtacaatttgccactgggaggaggttcctttttgttgggtgagtctgcaagtgaatttcactgatgttgatattcattgtgtgtagttttatttcggtcccagccccgtttccttttattttggagctaatgccagctgcgtgtctagttttgagtgcagtaaaatagaatcagcaaatcactcttatttttcatccttttccggtattttttgggttgtttctgtgggagcagtgtacaccaactcttcctgtatattgcctttttgctggaaaatgttgtatgttgaataaaattttctataaaaataaaa

SEQ ID NO: 73579 - DNA, 1037 bp, Homo Sapiens
  misc_feature (14)..(14): n is a, c, g, or t
  misc_feature (55)..(55): n is a, c, g, or t
  misc_feature (80)..(80): n is a, c, g, or t
  misc_feature (121)..(121): n is a, c, g, or t
  misc_feature (253)..(253): n is a, c, g, or t
  misc_feature (269)..(269): n is a, c, g, or t
  misc_feature (305)..(305): n is a, c, g, or t
tcgaatatcgatcntataggaatgccctgagccagaatcgcacgagcccgctgtncacactgaaagagacttgtccagtntgtgtgacttctcacgaatactatccaaaaaagtggacacntatagacactccaaaagtaccccccaaaagctgtctaaaagaccatgcaattttctcgtacacaaagtgcatactaaaatatcacaataatcatcgtcagatgtacatggtatttagtacatctcacagttntcagtattcagtcccntcatgaacatctaatagtcatctcatcgggccctgntgtgaaatatgtgattccagttcaattcagagtgtatgatcccgcttttcacgctgatcaagtaaatttatggtgtctcttttctgatcctcaacattaaaaactaaaaaggaaaaacacataatattctatagagtattaaatgagatactagccctaggcaggtcccattttcttatcaacttctagaaactgtcataaagaggactgcatctcccacagcaacactgtaattgggagttgtattcctcatcaaggacaagatggcaacagtgatatgggagggggacagggaagtgctgggtagagaagggcagggtcactggcaagggctccaccctcaggcttgtgcccatggacctaatgagaacaaggactcctgtcttcttgcccaaatgttgcattttccaagaccactctggcctgccatgccacccattctgtgcctataaaaaccctgagaccccagcgggcacacacacaagcggctggacgtcaagaggaacacactggcagaagaacacatcgaaagacgctggcaggccattgatggtggaacgattcggacgccaagggaaattcggccaaggacagtaggagatcccggctgctgagcagccagactccagaggaagactaccttcccatgctatcccccttctggctccccagccatctgctgagagctacttccaccactcaataaatcttgcattcattctccaaaaaaaa

SEQ ID NO: 73580 - DNA, 1534 bp, Homo Sapiens
tggaccggtccggaattcccgggatatcgtcgacccacgcgtccgccacccgaaggcgtccgggaatcttcactttttccgttgctagcagtggaagggtcacagaccaaacactaaggcctgagcggtgacaatcgaggcgagatgatggtcaacagggaatgcctcgtgggagaaaaaagacaattttattctcagcgctgattttgagatgatgggcttgggaaacgggcgtcgcagcatgaagtcgccgcccctcgtgctggccgccctggtggcctgcatcatcgtcttgggcttcaactactggattgcgagctcccggagcgtggacctccagacacggatcatggagctggaaggcagggtccgcagggcggctgcagagagaggcgccgtggagctgaagaagaacgagttccagggagagctggagaagcagcgggagcagcttgacaaaatccagtccagccacaacttccagctggagagcgtcaacaagctgtaccaggacgaaaaggcggttttggtgaataacatcaccacaggtgagaggctcatccgagtgctgcaagaccagttaaagaccctgcagaggaattacggcaggctgcagcaggatgtcctccagtttcagaagaaccagaccaacctggagaggaagttctcctacgacctgagccagtgcatcaatcagatgaaggaggtgaaggaacagtgtgaggagcgaatagaagaggtcaccaaaaaggggaatgaagctgtagcttccagagacctgagtgaaaacaacgaccagagacagcagctccaagccctcagtgagcctcagcccaggctgcaggcagcaggcctgccacacacagaggtgccacaagggaagggaaacgtgcttggtaacagcaagtcccagacaccagcccccagttccgaagtggttttggattcaaagagacaagttgagaaagaggaaaccaatgagatccaggtggtgaatgaggagcctcagagggacaggctgccgcaggagccaggccgggagcaggtggtggaagacagacctgtaggtggaagaggcttcgggggagccggagaactgggccagaccccacaggtgcaggctgccctgtcagtgagccaggaaaatccagagatggagggccctgagcgagaccagcttgtcatccccgacggacaggaggaggagcaggaagctgccggggaagggagaaaccagcagaaactgagaggagaagatgactacaacatggatgaaaatgaagcagaatctgagacagacaagcaagcagccctggcagggaatgacagaaacatagatgtttttaatgttgaagatcagaaaagagacaccataaatttacttgatcagcgtgaaaagcggaatcatacactctgaattgaactggaatcacatatttcacaacagggccgaagagatgactataaaatgttcatgagggactgaatactgaaaactgtgaaatgtactaaataaaatgtacatctgaagatg

SEQ ID NO: 73581 - DNA, 680 bp, Homo Sapiens
agtaagtgtcaagtacagatgctctttgacttatgatggggttatgtcccagtaaacccattggaagtcaaatgcatttaatacccctgactggacaccacagcttagcctcgtccaccctaaatgtactcagaacacttagaattgcccacagttgggcagaatcatctaacacaaactctattttataatcgagtgttgaatatatcatgtaatttattgaatattgtacattatgttgaaattgcaaccatttcacaccattgtaaagtccaaaaatcagaagctgaggactgtctgtacatgacattgaatcacatgaatggattactagggcctgaggggtgtccgttctttagaaaaatgtagagtatatatatcttcagggctgtgaattccatactagttatcaatattttaagatcattctgtatatacatattttaaattatgcaagcaaactaggaggagaatgtgcaattttgagggatacctaatttgcattcggttaggggatatttttcaacctcttgctttatactctgatatggggtgtgtttatgaacttgttaatgttatttaatcatgcagatttccaatcagtgtattgctcatttactgacaaaaagggaaaatacgaaacacagaaagggaaaataaactgacttttataatgaaaa

SEQ ID NO: 73582 - DNA, 604 bp, Homo Sapiens
ctgttaatgattctctagattttctaaaataatgtttcttagcattgtgatgataaagctcatgatgaactttatcactagttatgccaccttaactagtcagatttcctagaattaggaaatggtgactcttgtctaaatttggttaagtgatgaatttgggttaccttctcatgtgaacctggagattcaccagtcttaacttttgggtcattgtgttttctctacattcatgcattggatgttttgctaaataactcctgtggatttaggaatgtgtgctaatagcaatcttcctaattttcatgtttatatggaactatgcagttgagtattgaaagctttaaactgagtttatttacaaggactgagtctagcctacagagaacatacagcagccttctttggaccacagtcttatccgaggggtctgtggttgtatcagaagagccactaaaccaatccccctttccaaaattgaacctcacagacgttcctgttttttgtgattgagaaactggtcaatgaacaggaagacttagagatgtttcacaagcctttgatttttgtttcatttatttgtaataaacctcttccacgtgaa

SEQ ID NO: 73583 - DNA, 623 bp, Homo Sapiens
gtcgtcagtacccctgggccactgctaacaagcacctaacaaggggcccagagccccctgctccagccacatctggacccatcagtgactgcctgccatagcctgagagtgtcttggggagaccttgcagagggggagaattgttccttctgctttcctaggggactcttgagcttagaaactcatcgtacacttgaccttgagccttctatttgcctcatctataacatgaagtgctagcatcagatatttgagagctcttagctctgtacccgggtgcctggtttttggggagtcatcccccagagtcactcacccactgtgtttctggtgccaaggctcttgagggccccactctcatccctccttttccccctaccagggactcggaggaaggcataggagatatttccaggcttacgaccctgggctcacgggtacctatttatatgctcagtgcagagcactgtggatgtgccaggaggggtagccctgttcaagagcaatttctgccctttgtaaattatttaagaaacctgctttgtcattttattagaaagaaacccagcatgtgactttcctagataacactgctttctcataataaagactatttgcatttg

SEQ ID NO: 73584 - DNA, 962 bp, Homo Sapiens
  misc_feature (99)..(99): n is a, c, g, or t
  misc_feature (116)..(116): n is a, c, g, or t
  misc_feature (169)..(169): n is a, c, g, or t
  misc_feature (315)..(315): n is a, c, g, or t
  misc_feature (319)..(320): n is a, c, g, or t
  misc_feature (327)..(335): n is a, c, g, or t
gatcatgtgttgtggtgtgagcctgttttttagaatggtgtcgaagtgaccactgacagcaaatgattgtctgcaaccataatcatgtttggttattgncacccaagagtatctanggactccagtaaacagatggaaagatcaggtttttgacaggtcaggaataacngacagaaaaggctgcaagctgacagagtgcagttcaagattgtaaaaaatccctctgggaccaaaaccgaaaatgcatcaaagttgccataaaaggaaaaagtaaaagtaactttttgtttgatgtacacatattttaaaaaaagntttnntttcttnnnnnnnnngcaaatattctgtggcagggcaaggtttaaatgtgtttcttattaatatgtaaattcacagtaaatatgtaaagctaaatactttcctctccaaagatcattatctttattgattagcactgaggattttaacattgtgatatattatatatttataatttaccatctcttgatgagactcttatttctttatataggtcagtcttgcaagtaccattttataagcagctgtgaaatttaagtgaaatgttctttgtaaacatttgtactattttaaatgaataatgaccttatgaagtatgctatctgtaggctgaaattataggtacatctgttttcactatatgatattaagaaagcgtgaaatgacttaaatgttcatttttttctgtatagatactttatcatgttttcatgattttaggaattactgctttgttgatattcaaagtgtgaaactaaaactttatggttgtactttaattcttggcatgttgcctctatgtcccatttaaaataaaatacattctcattaactttagatgggaaataaggttgtatgttgatggatgaattttggcatgatgactgtactctcaataaaggctgaaaatgttgtataactga

SEQ ID NO: 73585 - DNA, 2257 bp, Homo Sapiens
  misc_feature (1161)..(1183): n is a, c, g, or t
cagtcgacggtaccggacatatgcccgggaattcggccattacggccggggtgtgaaagactctaacatccatgagcttgaacatgagcaagagcctacttgtgcctcccagatggctgagcccttccgtaccttccgagatggatgggtctcctactacaaccagcctgtgtttctggctggcatgggtcttgctttcctttatatgactgtcctgggctttgactgcatcaccacagggtacgcctacactcagggactgagtggttccatcctcagtattttgatgggaccatcagctataactggaataatgggaactgtagcttttacttggctacgtcgaaaatgtggtttggttcggacaggtctgatctcaggattggcacagctttcctgtttgatcttgtgtgtgatctctgtattcatgcctggaagccccctggacttgtccgtttctccttttgaagatatccgatcaaggttcattcaaggagagtcaattacacctaccaagatacctgaaattacaactgaaatatacatgtctaatgggtctaattctgctaatattgtcccggagacaagtcctgaatctgtgcccataatctctgtcagtctgctgtttgcaggcgtcattgctgctagaatcggtctttggtcctttgatttaactgtgacacagttgctgcaagaaaatgtaattgaatctgaaagaggcattataaatggtgtacagaactccatgaactatcttcttgatcttctgcatttcatcatggtcatcctggctccaaatcctgaagcttttggcttgctcgtattgatttcagtctcctttgtggcaatgggccacattatgtatttccgatttgcccaaaatactctgggaaacaagctctttgcttgcggtcctgatgcaaaagaagttaggaaggaaaatcaagcaaatacatctgttgtttgagacagtttaactgttgctatcctgttactagattatatagagcacatgtgcttattttgtactgcagaattccaataaatggctgggtgttttgctctgtttttaccacagctgtgccttgagaactaaaagctgtttaggaaacctaagtcagcagaaattaactgattaatttcccttatgttgaggcatgnnnnnnnnnnnnnnnnnnnnnnnctcagtttaaatacggagactataatgataacactgaattcccctatttctcatgagtagatacaatcttacgtaaaagagtggttagtcacgtgaattcagttatcatttgacagattcttatctgtactagaattcagatatgtcagttttctgcaaaactcactcttgttcaagactagctaatgtatttttgtgcatcttagttatttttaaaaacaaattcttcaagtatgaagactaaattgtgataactaatattatccttattgatcctattgatcttaaggtatttacatgtatgtggaaaaacaaaacacttaactagaattctctaataaggtttatggtttagcttaaagagcacctttgtatttttattatcagatggggcaacatattgtatgaagcatatgtagcacttcacagcatggttatcatgtaagctgcaggtagaagcaaagctgtaaagtagattaatcacacaatgactgcatacagacttcaaatatgtcaatagtttggtcatagaacctagaagccaaaagccacacagaagggcaagaatcccaatttaactcatgttatcatcattagtgatctgtgttgtagaacatgagggtgtaagccttcagcctggcaagttacatgtagaaagcccacacttgtgaaggttttgttttacaaatcacttgatttaacacactcaggtagaatatttttatttttactgttttatacccagaagttatttctacattgttctacagcaagaatattcataaaagtatccctttcaaatgcctttgagaagaatagaagaaaaaaagtttgtatatattttaaaaaattgttttaaaagtcagtttgcaacatgtctgtaccaagatggtactttgccttaaccgtttatatgcactttcatggagactgcaatacgttgctatgagcactttctttatccttggagtttaatcctttgcttcatctttctacagtatgacataatgatttgctatgttgtaaaatctttgtaaaaaatttctatataaaaatattttgaaaatcttaaaa

SEQ ID NO: 73586 - DNA, 1201 bp, Homo Sapiens
  misc_feature (42)..(76): n is a, c, g, or t
  misc_feature (190)..(332): n is a, c, g, or t
  misc_feature (349)..(367): n is a, c, g, or t
aacgacgagcgcagcgcagtttgtgagcgaggaagcggccgnnnnnnnnnnnnnnnnnnnnnnnnnnnnnnnnnnncagtcgacggtaccggacatatgcccgggaattcggccattacggccgggttgtagaactgaaagtatattctgattcggtgtgtgtataaggaaatatacaccagtatatgcnnnnnnnnnnnnnnnnnnnnnnnnnnnnnnnnnnnnnnnnnnnnnnnnnnnnnnnnnnnnnnnnnnnnnnnnnnnnnnnnnnnnnnnnnnnnnnnnnnnnnnnnnnnnnnnnnnnnnnnnnnnnnnnnnnnnnnnnnnnnnnntgagacctcatctcttnnnnnnnnnnnnnnnnnnngtctaagaggatacacagaaatttttaagtggttacctccacggaatgggattaggggatcagaggtgagggaactcatggtttggctatttctcgttctttctgcactgtttcaaatttttacaaagtgtatgttattgtacttttaaaaagattagcttggcaacaagtctagcctgaaatgggtgctattttgactagtctgagtgaaaagtgaggatttaaatgaagtaacccctaaactcagccagtcccatgtttttttaacacttggaatatctaattccatttacactgcattcttcaaatgtaattttcaaagatgccttttgcctcatcccttgcttttaagtattattatagacttttggagactcacgaaacaagcaatccctaaattctcgcccaggaaagtatcttggattaaatggtttttgagaaccttgagagtgtatattctatgaaatggaagaaacaagaactagacagagtcacaaatgctgttgatcacagacaatctctgccatccataaggtaaatgtaatacatctggcgacctgctgagtgtgaacttgcagcaggtgaggaaggaactctgaactctcacaatcttgtttcttcatttcccagagagaaactcggcaaagagaaaaaggacatttccctccaggttatctgaaagaatttcaatgcttacctttaatcatgtgacattgtttatcttggattaaaagaaaagaaaatgtatttattttgtgcatattttcaataaaatatataaaatcgagttggtatatagtgccaaataccattaattaaaaatattttaacctg

SEQ ID NO: 73587 - DNA, 941 bp, Homo Sapiens
taggtagcgaggcctgggtggcgaattccgcacgagggcggcgcccgctggccgggctggctgcggccgccctgggccgggccccaccggacggcatgtcgggccccaggcctgtggtgctgagcgggccttcgggagctgggaagagcaccctgctgaagaggctgctccaggagcacagcggcatctttggcttcagcgtgtcccataccacgaggaacccgaggcccggcgaggagaacggcaaagattactactttgtaaccagggaggtgatgcagcgtgacatagcagccggcgacttcatcgagcatgccgagttctcggggaacctgtatggcacgagcaaggtggcggtgcaggccgtgcaggccatgaaccgcatctgtgtgctggacgtggacctgcagggtgtgcggaacatcaaggccaccgatctgcggcccatctacatctctgtgcagccgccttcactgcacgtgctggagcagcggctgcggcagcgcaacactgaaaccgaggagagcctggtgaagcggctggctgctgcccaggccgacatggagagcagcaaggagcccggcctgtttgatgtggtcatcattaacgacagcctggaccaggcctacgcagagctgaaggaggcgctctctgaggaaatcaagaaagctcaaaggaccggcgcctgaggcttgctgtctgttctcggcaccccgggcccatacaggaccagggcagcagcattgagccacccccttggcaggcgatacggcagctctgtgcccttggccagcatgtggagtggaggagatgctgcccctgtggttggaacatcctggggtgacccccgacccagcctcgctgggctgtcccctgtccctatctctcactctggacccagggctgacatcctaataaaataactgttggattagaaaaaa

SEQ ID NO: 73588 - DNA, 979 bp, Homo Sapiens
cgcgttctgcggggcgctggtgacgcagcgggagaagacgggctgggagggcactgtgctgaacgatccctgcggtcgcgacaggccagcgcaggtggaggcggggctagagaggcactgaggcatgtcgggccccaggcctgtggtgctgagcgggccttcgggagctgggaagagcaccctgctgaagaggctgctccaggagcacagcggcatctttggcttcagcgtgtcccataccacgaggaacccgaggcccggcgaggagaacggcaaagattactactttgtaaccagggaggtgatgcagcgtgacatagcagccggcgacttcatcgagcatgccgagttctcggggaacctgtatggcacgagcaaggtggcggtgcaggccgtgcaggccatgaaccgcatctgtgtgctggacgtggacctgcagggtgtgcggaacatcaaggccaccgatctgcggcccatctacatctctgtgcagccgccttcactgcacgtgctggagcagcggctgcggcagcgcaacactgaaaccgaggagagcctggtgaagcggctggctgctgcccaggccgacatggagagcagcaaggagcccggcctgtttgatgtggtcatcattaacgacagcctggaccaggcctacgcagagctgaaggaggcgctctctgaggaaatcaagaaagctcaaaggaccggcgcctgaggcttgctgtctgttctcggcaccccgggcccatacaggaccagggcagcagcattgagccacccccttggcaggcgatacggcagctctgtgcccttggccagcatgtggagtggaggagatgctgcccctgtggttggaacatcctggggtgacccccgacccagcctcgctgggctgtcccctgtccctatctctcactctggacccagggctgacatcctaataaaataactgttggattagaaactccaaaaaaaa

SEQ ID NO: 73589 - DNA, 875 bp, Homo Sapiens
aattagctagtacgaggctggtgttaatcggcaccgaggtggcccggatgctgcggcgcccgctggccgggctggctgcggccgccctgggccgggccccaccggacggcatgtcgggccccaggcctgtggtgctgagcgggccttcgggagctgggaagagcaccctgctgaagaggctgctccaggagcacagcggcatctttggcttcagcgtgtcccataccacgaggaacccgaggcccggcgaggagaacggcaaagattactactttgtaaccagggaggtgatgcagcgtgacatagcagccggcgacttcatcgagcatgccgagttctcggggaacctgtatggcacgagcaaggtggcggtgcaggccgtgcaggccatgaaccgcatctgtgtgctggacgtggacctgcagggtgtgcggaacatcaaggccaccgatctgcggcccatctacatctctgtgcagccgccttcactgcacgtgctggagcagcggctgcggcagcgcaacactgaaaccgaggagagcctggtgaagcggctggctgctgcccaggccgacatggagagcagaaatcaagaaagctcaaaggaccggcgcctgaggcttgctgtctgttctcggcaccccgggcccatacaggaccaggcagcagcattgagccacccccttggcaggcgatacggcagctctgtgcccttggccagcatgtggagtggaggagatgctgccctgtggttggaacatcctggggtgacccccgaaccagcctcgctgggctgtcccctgtccctatctctcacctctggacccagggctgacagtcctaagtaaaataacctgttgggattagaaactccc

SEQ ID NO: 73590 - DNA, 518 bp, Homo Sapiens
agctattcgctatgtagcgaggtccgtgcggttaatcggcacgaggcgctggccgggctggctgcggccgccctgggccgggccccaccggacggcttgctctgctctttacctggggttgctgtcgaggaccctgtgcaagacatcggccggtttttctttctccctgatggacagacccaaacatagccgcgcagcatcgtgaagggctggggccttcactcctctgtggctctggaagagcccgatttcctcaggaggcatgtcgggccccaggcctgtggtgctgagcgggccttcgggagctgggaagagcaccctgctgaagaggctgctccaggagcacagcggcatctttggcttcagcgtgtcccataccacgaggaacccgaggcccggcgaggagaacggcaaagattactacttagtaaccagggaggtgatgcagcgtgacataacagccggcgacttcatcgagcatgccgagctctcggggaacctgtatggcacgagcaagg

SEQ ID NO: 73591 - DNA, 971 bp, Homo Sapiens
cgttggcaggtcgaggccgggcttataaatcggcacgagggaggtggcccggtatgctgcggcgcccgctggcgggctggctgcggccgccctgggccgggccccaccggacggcttgctctgctctttacctggggttgctgtcgaggaccctgtgcaagactcggccggtttttctttctccctgatggacagacccaaacatagccgcgcagcatcgtgaagggctggggccttcactcctctgtggctctggaagagcccgatttcctcaggaggcatgtcgggccccaggcctgtggtgctgagcgggccttcgggagctgggaagagcaccctgctgaagaggctgctccaggagcacagcggcatctttggcttcagcgtgtcccataccacgaggaacccgaggcccggcgaggagaacggcaaagattactactttgtaaccagggaggtgatgcagcgtgacatagcagccggcgacttcatcgagcatgccgagttctcggggaacctgtatggcacgagcaaggtggcggtgcaggccgtgcaggccatgaaccgcatctgtgtgctggacgtggacctgcagggtgtgcggaacatcaaggccaccgatctgcggcccatctacatctctgtgcagccgccttcactgcacgtgctggagcagcggctgcggcagcgcaacactgaaaccgaggagagcctggtgaagcggctggctgctgcccaggccgacatggagagcagcaggagcccggcctgtttgatgtggtcatcattaagacagcctggaccaggcctacgcagagctgaaggaggcgctctctgaggaaatcaagaaagctcaaaggaccggcgccttgaggcttgctgtctgttctcggcaccccgggcccatacaggaccagggcagcagcattgagccaaccccttggcaggcgatacggcagctctggccctgg

SEQ ID NO: 73592 - DNA, 892 bp, Homo Sapiens
gaacaccgggggcagtactactacggtcctaaggtagcgaggcctgggtggcgaattcggcacgagggtgggccggtgcggcgctgtcacgtaggttcagtgggcggaagaggtggccccggatgctgcggcgcccgctggccgggctggctgcggccgccctgggccgggccccaccggacggcatgtcgggccccaggcctgtggtgctgagcgggccttcgggagctgggaagagcaccctgctgaagaggctgctccaggagcacagcggcatctttggcttcagcgtgtcccataccacgaggaacccgaggcccggcgaggagaacggcaaagattactactttgtaaccagggaggtgatgcagcgtgacatagcagccggcgacttcatcgagcatgccgagttctcggggaacctgtatggcacgagcaaggtggcggtgcaggccgtgcaggccatgaaccgcatctgtgtgctggacgtggacctgcagggtgtgcggaacatcaaggccaccgatctgcggcccatctacatctctgtgcagccgccttcactgcacgtgctggagcagcggctgcggcagcgcaacactgaaaccgaggagagcctggtgaagcggctggctgctgcccaggccgacatggagagcagcaaggagcccggcctgtttgatgtggtcatcattaacgacagcctggaccaggcctacgcagagctgaaggaggcgctctctgaggaaatcaagaaagctcaaaggaccggcgcctgaggcttgctgtctgttctcggcaccccgggccatacaggacagggcagcagcattgagccacccccttgggaggcgatacggaagtctgtgccttggcacatgggatgggggga

SEQ ID NO: 73593 - DNA, 762 bp, Homo Sapiens
taggtgcgaggcttggtgttgaattcggcacgagggggcggaagaggtggccccggatgctgcggcgcccgctggccgggctggctgcggccgccctgggccgggccccaccggacggcttgctctgctctttacctggggttgctgtcgaggaccctgtgcaagactcggccggtttttctttctccctgatggacagacccaaacatagccgcgcagcatcgtgaagggctggggccttcactcctctgtggctctggaagagcccgatttcctcaggaggcatgtcgggccccaggcctgtggtgctgagcgggccttcgggagctgggaagagcaccctgctgaagaggctgctccaggagcacagcggcatctttggcttcagcgtgtcccataccacgaggaacccgaggcccggcgaggagaacggcaaagggaggtgatgcagcgtgacatagcagccggcgacttcatcgagcatgccgagttctcggggaacctgtatggcacgagcaaggtggcggtgcaggccgtgcaggccatgaaccgcatctgtgtgctggacgtggacctgcagggtgtgcggaacatcaaggccaccgatctgcggcccatctacatctctgtgcagccgccttcactgcacgtgctggagcagcggctgcggcagcgcaacactgaaaccgaggagagcctggtgaagcggctggctgctgccaggcgacatggagagcagcaaggagcccggctgtttgatgg

SEQ ID NO: 73594 - DNA, 1072 bp, Homo Sapiens
  misc_feature (1013)..(1015): n is a, c, g, or t
ccgccccactacttcaacccacaaccgccccccaaaggtcctaagtagcgaggcctgggtggcgaactcgacacgaggcccggatgctgcggcgcccgctggccgggctggctgcggccgccctgggccgggccccaccggacggcatgtcgggccccaggcctgtggtgctgagcgggccttcgggagctgggaagagcaccctgctgaagaggctgctccaggagcacagcggcatctttggcttcaccgtgtcccataccacgaggaacccgaggcccggccaggagaacggcaaagattactactttgtaaccagggaggcgatgcagcgtgacatagcagccggcgacttcatcgagcatgccgagttctcggggaacctgtatggcacaagcaaggtggcggtgcaggccgtgcacgccatgaaccgcatctgtgtgctggacgtggacctgcagggtgtgcggaacatcaaggccaccgatccgcggcccatctacatctccgtgcagccaccttcactgcaagtgctggagcagcggctgcggcaccgcaacaactgaaaccgaggagagcctggtgaagcggctggctgctgcccaggccgacatggagagcagcaaggagcccggcctgtttgatgtggtcatcattaacgacagcctggaccaggcctacgcagagctgaaggaggcgctctctgaggaaatcaagaaagctcaaggaccggcgcctgaggcttgctggctgttctcggcaccccgggcccatacgggaccagggcagccgcattgagccccccccttggcaggcgatacggcagctctgggccccttggccaccatgtggagtggaagaaatgcctcccccggtgggttggaaccttcctggggggaccccccgacccaaccctcggtgggctgtccccctggcccaatctcccccctctgggaccccgggctgacatccaaataaaataacggttgggattcggaaacaacctcccgccnnnttgacttcgggggatttctagttccggggcgcggaaaaagacgcgtatgggatcggg

SEQ ID NO: 73595 - DNA, 1824 bp, Homo Sapiens
  misc_feature (851)..(882): n is a, c, g, or t
  misc_feature (1067)..(1123): n is a, c, g, or t
  misc_feature (1349)..(1349): n is a, c, g, or t
  misc_feature (1626)..(1639): n is a, c, g, or t
  misc_feature (1663)..(1663): n is a, c, g, or t
  misc_feature (1678)..(1678): n is a, c, g, or t
  misc_feature (1757)..(1757): n is a, c, g, or t
ggattgcagagtggagagatctacagaccaagtaatcaagccagtcaatgtaggagctctatcaaaatgggttgggaagataccgccagatgttttacaagacatggcagtgattgctcctatgcttgccaagcttggatatgacccatatgccaacccacctaactacggaaaacctgatcccaaaattattgaaaacactcgaagggtctataagggagaattccaactacctgactttcttaaagaaaaaccacagactgagcaagtggagtagcagaaccaggagcctcttccatacatgaggaaagattgctgccttttcagcagaagggaaattcctaggattggctgtcccctgccaagcttggtggagcgtctgcaccttggctgcgccgcctgtgcatttgccagtttcctcccactgagaggatggaggtgtccgcacagctttgggcctcgtgagggatctgcctcctgagcaaagagctcttgatcccgatttcatgcacagccctgcagtaaggagcccagaaggaacatgtgtttcctgttaaaactcctcttgttctcttttcttacattatgacgtttgttttcaaggagagggtttaaaaatgggatcctgtaagcagacttgggcagtctccttttgaaataggttgtctgtacatgttctaatgttttgtagaacacgtgtgcctgtttaagtgtattgatgtgaataatattaaatatcctaattatttaattcattgtattgtttctgagaagttgggaaattaccattatacatttacaacctaatgacttttgtattttatttttcaaaataaaagctttcaatgtgnnnnnnnnnnnnnnnnnnnnnnnnnnnnnnnngtcatcaaagatcagaaagatccacaacggcaccatacccaacgacggcgaagcacctggaaggagaggggcagaggcagattcgaagcgaccgcgcccaactcaaccccgaggaaaagcaggtattcagagaggtggcgccgcgccctccctctccgacattagaataatttagcaaaaccaannnnnnnnnnnnnnnnnnnnnnnnnnnnnnnnnnnnnnnnnnnnnnnnnnnnnnnnncgaacatgctcgcgctgccagaaaagaagacgccgtggtctaagaccacgaagaggacgctgatattctttcccgcgcccgacacaagaagcaggccgcgcgcggtggagggagcacgaccgggccgctgctagcgtatagcaacactacactcgccgcatcgccgggtgctctctcggcaggcagagagagaagcacaaaagaaggagacgatcccgctgctgcnctcgagagatgctagtgtcctcacgagcggagagtgcgtggcggatgtttagccgcctcaagggtgtggggtctctccctactgcttagctgggcacactagtacggatatgaccagcgactaaggggcgttgggtactatgctctctaacatacataaaaacagttactcgtcgccccacagagcgagtgtaacaagtgcgccgcacctacgtgcaggggctggtagatggaataggactgagcacgcgcatgcagccgtgccgagcaccatgtannnnnnnnnnnnnntggaaccgatccgcacgagtagantcaatgttacagagncctctgccgtgggccgcaacgcacaggcgagcgcgcggaacagaccgacttccctctcgtcgccattgggcgcccgtcncccgttcctaaggacgtagcgcgggtgggggggagagataaccactcccagatgtagcatatagatc

SEQ ID NO: 73596 - DNA, 1409 bp, Homo Sapiens
  misc_feature (69)..(160): n is a, c, g, or t
ggctaggacaggtctcgggtgttaattcggcacgaggcgcagacccgctggggccgcggccgcccgccnnnnnnnnnnnnnnnnnnnnnnnnnnnnnnnnnnnnnnnnnnnnnnnnnnnnnnnnnnnnnnnnnnnnnnnnnnnnnnnnnnnnnnnnnnnntcctcaccctctgcctccactgcccagactgcccagactgcagccgacacctggtatctgcttccgcggccgtgcttctcacccttcaggccactgtagacagcagtcaggctccgggatccgtacagccggcgcccatcactcccactggagaagacgtgaagcccatcgatctcacagtgcaagtggagtttgcagccgcagagggcgcagccgctgcggccgccgcgtcggagttacaggctgctaccgcagggctggaggctgccgagtgccctatgggcccccagttggtggtggtaggggaagagggcttccctgatactggctccgaccattcgtactccttgtcgtcaggcaccacggaggaggagctcctgcgcaagctgaatgagcagcgggacatcctggctctgatggaagtgaagatgaaagagatgaaaggcagcattcgccacctgcgtctcactgaggccaagctgcgcgaagaactgcgtgagaaggatcggctgcttgccatggctgtcatccgcaagaagcacggaatgtgaactggtgccccggcagcctgctggactcccagaccccatccagccaggggaccgcaggccattgttgaactcctctatactcctgggcactggttgacagtactgaggcttaaggcagctggactctcttgctggtgacctggcatcctcaattgtttcctcctgaagtggaagctggggccttagactctgccctggtgacaccagcaattatgactttgtctacccttcctccccagttattgttgcagattctggttaagcagaggcttcagaaccactgaacttgaaacttaccctctagggatgcaggtgggatgtccagggactataggtttgggaaaaccataccttaaggttggtcagcagtcagacaactctaatgtgtgtagtgataagagattcaagtaacatcagttctcctccttttcatgcttttccttcccaggtgcagcctgtgattctgatggggactggtaaatctgtgcctctgcctcctaggacttattttcccaggaggccatttacaaggggatctggatgacctgctgatggagatccagcttgccagggacttaggtttatcctgttttgtttgctactggttacaaattctattttctgtacaattagtcagactaaagttttcactgtgtttgtttggcaaaacaaattaaacaaaaagtaaggtttctacc

SEQ ID NO: 73597 - DNA, 456 bp, Homo Sapiens
gtacttagaggatccctcaggagagagaactggtgcctggaagctgctggactcccagacccatccagccaggggacgcaggcattgttgaactcctctatactcctgggcactggttgacagtactgaggcttaaggcagctggactctcttgctggtgacctggcatcctcaattgtttcctcctgaagtggaagctggggccttagactctgccctggtgacaccagcaattatgactttgtctacccttcctccccagttattgttgcaggattctggttaagcagaggcttcagaaccactgaacttgaaacctaccctctagggatgcaggtgggatgtccagggactataggttagggaaaaccataccttaaggttggtcagcagtcagacaactctaatgtgtgtagtgataagagattcaagtaacatcagttctctctccctgca

SEQ ID NO: 73598 - DNA, 940 bp, Homo Sapiens
  misc_feature (802)..(817): n is a, c, g, or t
ggggaaccgcgacgggcgggcggcgagcaggcccgggagccgggaggctgcgggcggcggcgctggacccgacgcggcgagagaggccccgagatgccgagcaagaagaagaagtacaacgcgcggttcccgccggcgcggatcaagaagatcatgcagacggacgaagagattgggaaggtggcggcggcggtgcctgtcatcatctcccgggcgctcgagctcttcctagagtcgctgttgaagaaggcctgccaggtgacccagtcgcggaacgcgaagaccatgaccacatcccacctgaagcagtgcatcgagctggagcagcagtttgacttcttgaaggacctggtggcatctgttcccgacatgcagggggacggggaagacaaccacatggatggggacaagggcgcccgcaggggccggaagccaggcagcggcggccggaagaacggtgggatgggaacgaaaagcaaggacaagaagctgtccgggacagactcggagcaggaggatgaatctgaggacacagatactgatggggaagaggagacatcacaacccccaccccaggccagccacccctctgcccactttcagagccccccgacacccttcctgcccttcgcctctactctgcctttgcccccagcgcccccgggcccctcagcacctgatgaagaggacgaagaagattacgactcctagcgccttctgccccccagaccatagccccttttagttggttttagttgctctggggggaggagagaaggtagagctgttcttaaatttattnnnnnnnnnnnnnnnngggaatctcagtgtctgttccaggctctgcgcaggacgtcatggttgccatcccatccacccacctgccttccccacatgaaactgggagctggggccgggtgcggtggctcacgcctgtaat

SEQ ID NO: 73599 - DNA, 1418 bp, Homo Sapiens
  misc_feature (53)..(53): n is a, c, g, or t
aacggctaggtacgaggctgggtggcgaattcggcacgaggattgtgcgcaantgccaaggacacagcacacacacgggctgagcggaacattctagagtcagtgaagcacccctttattgtggaactggcctatgccttccagactggtggcaaactctacctcatccttgagtgcctcagtggtggcgagctcttcacgcatctggagcgagagggcatcttcctggaagatacggcctgcttctacctggctgagatcacgctggccctgggccatctccactcccagggcatcatctaccgggacctcaagcccgagaacatcatgctcagcagccagggccacatcaaactgaccgactttggactctgcaaggagtctatccatgagggcgccgtcactcacaccttctgcggcaccattgagtacatggcccctgagattctggtgcgcagtggccacaaccgggctgtggactggtggagcctgggggccctgatgtacgacatgctcactggatcgccgcccttcaccgcagagaaccggaagaaaaccatggataagatcatcaggggcaagctggcactgcccccctacctcaccccagatgcccgggaccttgtcaaaaagtttctgaaacggaatcccagccagcggattgggggtggcccaggggatgctgctgatgtgcagagacatccctttttccggcacatgaattgggacgaccttctggcctggcgtgtggacccccctttcaggccctgtctgcagtcagaggaggacgtgagccagtttgatacccgcttcacacggcagacgccggtggacagtcctgatgacacagccctcagcgagagtgccaaccaggccttcctgggcttcacatacgtggcgccgtctgtcctggacagcatcaaggagggcttctccttccagcccaagctgcgctcacccaggcgcctcaacagtagcccccgggcccccgtcagccccctcaagttctccccttttgaggggtttcggcccagccccagcctgccggagcccacggagctacctctacctccactcctgccaccgccgccgccctcgaccaccgcccctctccccatccgtcccccctcagggaccaagaagtccaagaggggccgtgggcgtccagggcgctaggaagccgggtgggggtgagggtagcccttgagccctgtccctgcggctgtgagagcagcaggaccctgggccagttccagagacctgggggtgtgtctgggggtggggtgtgagtgcgtatgaaagtgtgtgtctgctggggcagctgtgcccctgaatcatgggcacggagggccgcccgccacgccccgcgctcaactgctcccgtggaagattaaagggctgaatcatggtgctgaaaa

SEQ ID NO: 73600 - DNA, 1129 bp, Homo Sapiens
tcgcccacacaaaaaatacggcaggagcgaggccgggtgtgtaattcggcacgaggcggccaggtacgggccgacgggcccgcggggccggcgccgccatggcggccgtgtttgatttggatttggagacggaggaaggcagcgagggcgagggcgagccagagctcagccccgcggacgcatgtccccttgccgagttgagggcagctggcctagagcctgtgggacactatgaagaggtggagctgactgagaccagcgtgaacgttggcccagagcgcatcgggccccactgctttgagctgctgcgtgtgctgggcaaggggggctatggcaaggtgttccaggtgcgaaaggtgcaaggcaccaacttgggcaaaatatatgccatgaaagtcctaaggaaggccaaaattgtgcgcaatgccaaggacacagcacacacacgggctgagcggaacattctagagtcagtgaagcacccctttattgtggaactggcctatgccttccagactggtggcaaactctacctcatccttgagtgcctcagtggtggcgagctcttcacgcatctggagcgagagggcatcttcctggaagatacggcctgcttctacctggctgagatcacgctggccctgggccatctccactcccagggcatcatctaccgggacctcaagcccgagaacatcatgctcagcagccagggccacatcaaactgaccgactttggactctgcaaggagtctatccatgagggcgccgtcactcacaccttctgcggcaccattgagtacatggcccctgagattctggtgcgcagtggccacaaccgggctgtggactggtggagcctgggggccctgatgtacgacatgctcactggatcgccggccttcaccgcagagaaccggaagaaaaccatggataagatcatcaggggcaagctggactgcccccctacttcaccagatgccgggacttgtcaaaagtcctgaacggaatccagccagcgattgggggtggcccagggatggtgtgatgtgcagagacatcccttttcgggcatgaatgggacgacttctgcccgggtgtgaccccctttagggccgttgagcaaagg

SEQ ID NO: 73601 - DNA, 874 bp, Homo Sapiens
gtgtggattacggcggccttcaatggatagactcccttgcagagtccaaagccggtcactttaatgtggcaagcgcaccctggctgctgagcaatgatgttctcgggcttgagggtcccggtaagatgaatgcactgggaatggagatggccccagggccagcgtgatctcagccaggtagaagcaggccgtatcttgccaggaagatgccctctcgctccagatgcgtgaagagctcgccacctgcctcacagagctgccgtggggattcaattcaattcagcaaacatctaccgaagcctactcggtgcctggccctgtgctgggtgaagctggggacaggatgaagagacccagccactgccctcaggacgctcagtcactgaggcactcaaggatgaggtagagtttgccaccagtctggaaggcataggccagttccacaataaaggggtgcttcactgactctagaatgttccgctcagcccgtgtgtgtgctgtgtccttggcattgcgcacaattttggccttccttaggactttcatggcatatattttgcccaagttggtgccttgcacctttcgcacctggaacaccttgccatagccccccttgcccagcacacgcagcagctcaaagcagtggggcccgatgcgctctgggccaacgttcacgctggtctcagtcagctccacctcttcatagtgtcccacaggctctaggccagctgccctcaactcggcaaggggacatgcgtccgcggggctgagctcatggctcgcccatcagccctcgctgccttcctccgtctccaaatccaaatcatacacggccagccatggcaggcgccggccccgcgggcccgtcggcccg

SEQ ID NO: 73602 - DNA, 811 bp, Homo Sapiens
  misc_feature (22)..(22): n is a, c, g, or t
  misc_feature (41)..(41): n is a, c, g, or t
gaaggtttcaatgacagcttangacggacatgaaaagcttntggtgtgcacgtctcatgcattgaaccaggattgtcaaaacaaaacttggcagatccagtaaaggtaattgaaaaaaaactcgccatttgggagcagctgtctccagacatcaaacaacaatatggagaaggttacattgaaaaaagtctagacaaactgaaaggcaataaatcctatgtgaacatggacctctctccggtggtagagtgcatggaccacgctctaacaagtctcttccctaagactcattatgccgctggaaaagatgccaaaattttctggatacctctgtctcacatgccagcagctttgcaagactttttactgttgaaacagaaagcagagctggctaatcccaaggcagtgtgactcagctaaccacaaatgtctcctccaggctatgaaattggccgatttcaagaacacatctccttttcaaccccattccttatctgctccaacctggactcatttagatcgtgcttatttggattgcaaaagggagtcccaccatcgctggtggtatcccagggtccctgctcaagttttctttgaaaaggagggctggaatggtacatcacataggcaagtcctgccctgtatttaggctttgcctgcttgctgtgatgtaagggaaattgaaagacttgcccattcaaaatgatctttaccgtggcctgccccatgcttatggtccccagcatttacagtaacttgtgaatgttaagtatcatctcttatctaaatattaaaagataagtcaaacatt

SEQ ID NO: 73603 - DNA, 1010 bp, Homo Sapiens
gactccagagtgaaggatattaggatgatacaggacggaggaaggaagcatccaggcaatctcaataaaagcatccatgagtaaaagttccattattctttattaagcccagaacattaccaggcctagtgttgaactataattattgttgacaggaataacaatattcttgtttaaactaattgagaagtcttttatctctacttcccataccagggtgctgatccccaacttttaggaaaaggtcgagaaagtgcactgtcgttggcctgtagtaaaggctacacagatattgtcaaaatgctgcttgattgtggagttgatgtaaatgaatatgattggaatggaggaacacctctgctttatgctgtacatggaaatcatgtgaaatgtgtaaagatgctcttagaaagtggggctgatccaacaattgaaactgactctggatataattctatggatctagctgtagccctaggctatagaagtgttcaacaggttattgagtcacatttgttgaagctgcttcaaaatatcaaggagtagacacagtcatcagaaaatgtctgcccttttgtttacttcttggtccttataaatgatagttttgtttacttataaatttttacctcagttgcaatatttactggtttttagtaggttttaataaatatttctctgagtaattcactggtttataataaatgtaatactctttttataactatgttttactgtatatttaaaattataaattaatgttttcgtggcatgtaaatttttatggtacagatagttatcatcagtctttgtatcaagtgctgtaatttgacattttcagaaattattctaccctagtcatcttcactcgtgtattaagtcattcactttatatagggtttgctataaatccctagaaaaaaattgttcttattgttgaattaaaaagtgcacagtgtgattgtttacaaaatgatattataaataaataaaatacttcttctgtcaaa

SEQ ID NO: 73604 - DNA, 522 bp, Homo Sapiens
  misc_feature (414)..(414): n is a, c, g, or t
gatagcaaactatttatagggcaaccttaggataaccttgtattctggactctccttgagtttcaaaaataaagaaacaaagacacaacgtccagtaacttggacagttactcagtgacagactaagtttcaagttttttaaagtattgcattgtattattgccctcaggctatgtatgtatcctgcttagaaataactttattttaggaaaatattggggataagttaaatttgatagttttaaaagaaattttatagtcactgtgctgtaatcttgattacctatctgttctagttcaacaggttattgagtcacatttgttgaagctgcttcaaaatatcaaggagtagacacagtcatcagaaaatgtctgcccttttgtttacttcttggtccttataaatgatagttntgtttacttataaatttttacctcagttgcaatatttactggtttttagtaggttttaataaatatttctctgagtaattcactggtttataataaatgtaatactct

SEQ ID NO: 73605 - DNA, 702 bp, Homo Sapiens
tgaaagtgaccggggtgcctggcacggagtttgtgcagaagctgaacgacaaagcggccaaatcctacatccagtccctgccacagacccccaggaaggatttcactcagctgttcccacgggccagcccccaggctgcggacctgctggagaagatgctggagctagacgtggacaagcgcctgacggccgcgcaggccctcacccatcccttctttgaacccttccgggaccctgaggaagagacggaggcccagcagccgtttgatgattccttagaacacgagaaactcacagtggatgaatggaagcagcacatctacaaggagattgtgaacttcagccccattgcccggaaggactcacggcgccggagtggcatgaagctgtagggactcatcttgcatggcaccaccggccagacactgcccaaggaccagtatttgtcactaccaaactcagcccttcttggaatacagcctttcaagcagaggacagaagggtccttctccttatgtgggaaatgggcctagtagatgcagaattcaaagatgtcggttgggagaaactagctctgatcctaacaggccacgttaaactgcccatctggagaatcgcctgcaggtggggccctttccttcccgccagagtggggctgagtgggcgctgagccaggccgggggcctatggcagtgatgctgc

SEQ ID NO: 73606 - DNA, 809 bp, Homo Sapiens
gaatatggtttgaacagttcgctgtctttggttggctgaaacttagtgattgccacaagagtagggtaccgtctgtttacacgtccagttaggctacagttctatgtactgagaaacctttaagctgaacttgagatatgtaaagagactttaggctaaacttaacaatatatataggatatatacccttctacttcacatgcactgaatatgcattttattgctttactcttcattctgtggcacctacccacaggggaagtaagaagtttgttttggtatttcggaaactaaagtccttatgggatggggtctagaattgattctcctttcctgagttttactccacggagtcttaggtacctggtaaaaagttgtcttctaaattaagggtcattgctttgttgtctagctgctaatgtcttacttttgtttcttttgctttttaatcagttcttaataggatatagttttatgttttccaagttataacttggagttaatggtcactagattatcagttatgagcagtgttaaaatctcctattaatgtgtaatgtacctgtcagtgcctcctttattaaggggttctttgagaataaaagagaaaagacctactttatttgacagcaaaactgttctaattgttaataaggacttttaaaaattgtttttgatttgctaagctcagaaaaaatgtctctcagtgcatcagttctttgtaaagcttactacgaagtatttatatgctaaggaaaacaactgaggatgtgggtggcttaaatctgtattttcatcatgtatgtgag

SEQ ID NO: 73607 - DNA, 1612 bp, Homo Sapiens
  misc_feature (89)..(180): n is a, c, g, or t
gaattcccgggatcgggtccctgaggatcccgatgcctacgagccaagatgctcagctttataggtgtgacctacacatgtgacttcannnnnnnnnnnnnnnnnnnnnnnnnnnnnnnnnnnnnnnnnnnnnnnnnnnnnnnnnnnnnnnnnnnnnnnnnnnnnnnnnnnnnnnnnnnntgcaggagggagcctcggaagcagggcctggccggcagagcacacctgctgtcaccagggaccacaggcagcatgaagacccccgtggagctggccgtcagtgggatgcagaccctcggccttcagcaccgctgccgaggtggctaccgggtcaaggccaggacgtcatatgtggatgagactctgtttggcagcccagcaggcacccggcctaccccaccggacttcgatccgccctgggtggagaaggctaacagaaccagaggcgtgggcaaggaggcatcgaaggccttgggggcaaaggggagctgtgagaccaccccctcaaggggcagcacccccaccctcacaccaaggaagaagaacaaatacagacccatcagccacaccccgtcttactgtgatgagtcgctgtttggctcccgatctgaaggcgccagcttcggggccccgcggatggcgaagggggatgccgcaaagctccgtgctctcttgtggacgccaccacctacccccaggggtagccactcgccccgccccagggaggcaccactgcgagccattcacccagctggtccctccaagacagagccggggccagcggcagactcccagaagttatctatgggtgggttacactcttcacgccccctgaagcggggactttcccattccctcacccacctgaatgtccccagcactggtcatccagccaccagtgccccccacacaaatgggcctcaggatctcaggccttccacgtcaggggtgaccttccggagccccctggtgacttccagggctcgctcagttagcatttcagtgccatctaccccacgacgaggtggggccacccagaaaccaaagcccccttggaaatgatactctttcatcagggttgcctatggggccacggcgacaggtatggccccttgccagggtaggaggacattcatcacccagggaaccccaggtattaaagaagcccctgtgggggcagacagacatagcaggggtgggcagtgcctccctttatcctgacaatctctagtcgattcttgcctttttctcccgattgcggatttgggggccacctctaagatgcctctctccagccctgtctcaaccatactccaaattagtgccaacccaggggcctggcacctcccacatcatccattgtcttgctgccaagtgcgaataaacggtgtgattgccaacctggagggtcccctcttatcccttcaagccaagcttcctgctcaggattagtttccagctaagtctgcaagccctagaggagtttttccaggctgtctgtgaagcctggggaacacaacggcaactgggagatttgtgagtgaacactgtttcatcttaatatgcttctgaatttattttcatgtactaaatagatcagctcatcaaagcc

SEQ ID NO: 73608 - DNA, 1162 bp, Homo Sapiens
cactgaagaggtctgtacagtgacaacccgggccggcagcaaggacacagatgcagccacagtaaggctccatcaggactgggtcagtgatggcaacaggatggccaaggatggctctagaacactctgtccatgcgtcactcccccaagttttatttttagctttggcttcagggagtgacagccatcacaaatagccacattctgctctactctccaacataccagattctacactgttgttatttcatgagacgtgaatgttgcagagagtggggggattctggttgttaaggaacttacactggggagctttactcttccgtgtcaacaatgtgactacatgttctccagattagccacacatgcaaacatcagtgtccttctagctttagccgagaaagaaaccagtcccagggaatgaatggtggtctccccactcccggcagcactttaggcagcccataagctatgcgagaatgtgaacgctcaccttgctccgtcacggttctgacctaccacataaacaggaagaagccagtgaccggaacagctctaggaataacaagtcagaatagaagtgtcctttatattaccagaaaatatgggcttggcctaagtcgctgtctcctaacctgccggggtcattccccaccaaacaccccatactaaggagccatgagccacctggacattcaccttttctttgaccatctggagtctggggcaacttaaggaggcaccacacagtggtgcaggcacatttccaagcgtaggtgtccctggcttttgtggccaaagctagtgttatggtcaacaacaggccagggtctgtggggcactgaccttgaaagtggcaaaatggaggtttcacaggctgtgcgggagcaggacggcttgcttcatctaacaatctcagtttcctttaaaaaaagaaagaaaggaaaagatttcataagcaggtgtcagtggacagtttaagtacttaaccatttctctttcttcttatggatgtgaactgtgctgtggataaatcatttgtatttcttgaatgttctctatgactaacagttattaagtcggttgtgtatatgtgtaactaatgtaactgccttttaaaatttcattacaataaaaatgactttgctctgaacaaaaaaaa

SEQ ID NO: 73609 - DNA, 960 bp, Homo Sapiens
  misc_feature (258)..(291): n is a, c, g, or t
gttgtctctagcctgatcagataggagcacaagcaggggacggaaagagagagacactcaggcggcagcattccctcccagccactgagctgtcgtgccagcaccattcctggtcacgcaaaacagaacccagttagcagcagggagacgagaacaccacacaagacatttttctacagtatttcaggtgcctaccacacaggaaaccttgaagaaaatcagtttctagaagccgctgttacctcttgtttacagttnnnnnnnnnnnnnnnnnnnnnnnnnnnnnnnnnnaaaggtactgttaactactgtacaacccgacttcataatggtgctttcaaacagcgagatgagtaaaaacatcagcttccacgttgccttctgcgcaaagggtttcaccaaggatggagaaagggagacagcttgcagatggcgcgttctcacggtgggctcttccccttggtttgtaacgaagtgaaggaggagaacttgggagccaggttctccctgccaaaaagggggctagatgaggtggtcgggcccgtggacagctgagagtgggattcatccagactcatgcaataaccctttgattgttttctaaaaggagactccctcggcaagatggcagagggtacggagtcttcaggcccagtttctcactttagccaattcgagggctccttgtggtgggatcagaactaatccagagtgtgggaaagtgacagtcaaaaccccacctggagcaaataaaaaaacatacaaaacgtactggtgctttcctgtctaagtcgccttttgtgtgttcttttatgaggcccccaccatccacccctctgtgcacaaggcggctcccggcccctggaatgtgatgtttttggtcatctccaaaggctgcagttttatactgggaggctgatgacaccttttattataattattcttatggttctggttata

SEQ ID NO: 73610 - DNA, 1136 bp, Homo Sapiens
taaggccagtaaccatagcggtcctaaggtagcgaggcctgggtggcgaattcggcacgagggcgacagctcctacctcctgcgacaccagcgcacccacagccacgagcggccctacagctgcaccgagtgcggcaagtgctatagccagaactcgtccctgcgcagccatcagagggtgcacaccggtcagaggcccttcagctgtggcatctgcggcaagagcttctcccagcggtcggcccttatcccccatgcccgcagccacgcccgggagaagcccttcaagtgccctgagtgcggcaagcgctttggccagagctcggtgctggccatccacgcccgcacccacctgccaggccgcacctacagctgccccgactgcggcaagaccttcaatcgctcctccactctcatccagcaccagcgctcccacacgggcgagcggccctacaggtgcgccgtgtgcggcaagggcttctgccgctcctccacgcttctgcagcatcaccgggtccacagtggcgagcggccttacaagtgcgatgactgcggaaaggccttctcccagagctccgacctcatccgccaccagcggacccacgcggcgggccggcgctgacctggggccccagcaggggtgggaggtgtgggcagaagataaggggccagggagctagaggaacctttagggaggatagtggagaagccgcaggagaatggaggagctgaggatgctggaagaagagaaccagggtggaggaagtgacatgccctggagacttgtgggaagtgggttggagggaggccaggccggcagcgggaggccctgggagaaatggagagaggtcagcggagggctggcctcagccgcggctccttggtgggtgcctggcttggcaactgctagagcagggaggggggagggcaggggattacctaattagagtgggttagcttagattggtagctgctgaaactctcgttgagtcaggagcgggtaaaaggtaggtggggtggggagtggggccccggggtggggcctgggcctctgcgtgcaaaccccagcctccctcttcttcctcaggctttggagcccctgagtttgagttcaataaaaactttatgtggtaaaa

SEQ ID NO: 73611 - DNA, 1330 bp, Homo Sapiens
  misc_feature (402)..(505): n is a, c, g, or t
  misc_feature (596)..(645): n is a, c, g, or t
  misc_feature (671)..(685): n is a, c, g, or t
  misc_feature (941)..(965): n is a, c, g, or t
cagtttgttagtgagaacattctttaatcagttgtaagcatatttgggttacagaaaaacatttgagagatctaacatttgttatgtgccctctgtatatcatctacacgataagactgaaatattttattcttttacagagaagggaactaaagctcagagaggttaagtactttgcccaaagtcatttgataaatgaaaggtagaaccagaattcaaatttggacctgtctgataccaaaacccatactcgctctactacagaagtactgtagtggtaagctgaagggtacaggttcaggggttagtaatgaatatcacagtgagaattttaactattactttaggcttatagtttgctaataaaattgctacctgaaggcagaggcagtggctcactcnnnnnnnnnnnnnnnnnnnnnnnnnnnnnnnnnnnnnnnnnnnnnnnnnnnnnnnnnnnnnnnnnnnnnnnnnnnnnnnnnnnnnnnnnnnnnnnnnnnnnnnntaaattagcagggtgtgatggggagcacctgtgatcccagctactcagaatgctgaggttggaaggattgcttgagcccaggagttaaaannnnnnnnnnnnnnnnnnnnnnnnnnnnnnnnnnnnnnnnnnnnnnnnnngagtgagactgtctctcctttatttnnnnnnnnnnnnnnncctacttcttgggtcattgtcctttgtcaaaggaaactcttctaatatcatacctacatgccagaggaagtcctataaattttaaatgtttacttccaagacatttacttgaaagttgaatgttttgatgttctgtcccatggggtccttattgtaatctagaccatcttgttctagatgggcacttaagccctgtttcttcatagtctgttatgctgtcatttggacctggatgcttcctgtttcttccagcaannnnnnnnnnnnnnnnnnnnnnnnnaagagaggaacatttaaggagttagataaactggtaattttcagatgtgtagaaaattgcataggtggtgaaagccaatgccataggctctgaaattttactatttcctacatcaggaaatgtgtaccaaaagtgctaaaatgccaagaataattttgagtatctaaagatagataaatcttttcatctgagtggaaatggcattatgactttatattctcatggttttccttgtaccttgaaattgagcatcacttgaattggagccccagaagcaaggttaaagtgagttactactgagtttctggtgttcctaacttatccctttggtatatatgtagaagataacaaagcagctgtgtaca

SEQ ID NO: 73612 - DNA, 600 bp, Homo Sapiens
aggtgtgagccaccacacccagccagaaatgatttttgactacacctaatattcactttatacaataaacttagaacttaatctctatataagctatttattttaaaattcagaaaagcaaaaaaatatttaaatcattcataaactaaaactacccagagataaacactgtcagtaatatattcaatcttttgtatatctatgttatttacatgtagtgggttgagtagtgtcattcagaaactgatgtcaacctaaaacctcagaatgtggccttattttggaaatcgggtcttggcaaatgtaattagttgtagtcatgccggattagggtgggccctaaatccaatgactagtgtccttagaagaagagcagaagatactcagaaacactgggaaggctgttttgtgataaaggagaccggagggatgttcctacaactagggaacaccaaggattgccagcaaccaccagaagctaggagagaagtaacaagcattctccttcatagcttccggaaagaaccaaccttgccaacaccttgatttggggtttctaacctgaactgtaagagaataaatttccattgttttaagtca

SEQ ID NO: 73613 - DNA, 1041 bp, Homo Sapiens
  misc_feature (90)..(90): n is a, c, g, or t
  misc_feature (171)..(171): n is a, c, g, or t
  misc_feature (200)..(200): n is a, c, g, or t
taaatgaggaccttgatctgaattgtagcataccatctcagtttatatactgcgaccaaggcaaaaacatcagttatgatgtgcaagctntagttccacgttgtacctcactgcgaccacatgagaaaaacctacaattaacagttggaatcctcagtactccattcgttnagtacatgacgactcacactgagagaccntatgatgtaaggatgcggaaaccttcagtctccagttcctttcgaaatcatgaaagaaggcatgcggatgagagactgtcagcataaggaatgtgggaaaacctaaaggtgtccctgttctctctgaagacatgaaaactcactggggagaaaccctatgaatgtaaaaatgtggaagcaactttgtatctcaggtcttaatgaacacatatgaattcacagtggagaagaccctgcatcagggaatgtggaaatgactttgctgaattctcaagccttaccaaacacatcagaaatctcactggagagaaactgtatgaatgtagagaatctgggaatacctttctgaatcccacaaaccttaatgtgtgtatgtgaactcacattggagagaaaccctgcaatttaaatggtatggtctggatgatgccccactccatatttgtaagccctaagtcctagttccttacactataactgtatttggacatagggttttcaaacaggtgagtaacttcaaatgaggttgttgggttcgatccctaatctgacatcactggtgtccctataagggaaactgaaggaaggatacacatggagaagactgtgtggatccaccagaagatggccatctacaagccaaggacagagacctggaacagatgctttcattatggcctccagaggaaaccaaccctgtctccaccttgatattgcacttccaggctccagaactgtgaggcaataaatttctcttggttaaatcattcagtctgttattttgtacagcaaccctaggaaactaatactgtgaggaacttgggaaaagctttagatcaag

SEQ ID NO: 73614 - DNA, 580 bp, Homo Sapiens
tttcttatttttaatgcaccactatttactgagggttccccacacgtcaggcaccctgctaggggagtctccaatgtcatggacatgccaaatgccagtgctcttcgccctctgagtctcccggagtccctgtgcctcctgcagtcagggtgacagtgtcagtcctgggcaagttgctgtgcctgagctgaaggggaggcctcgtcccgggcctgggcccccctgccagccactgtctgccttgctgtctctgtccctcgcctcctctggtatcatgcgaggcactggctcatctggaagcagatgctctggatggggttgggcagccacacccgctctccaatctctccccactgtttggcccagtgtttctgtgagaggatcaggacaaaggcaagaaagcccaggaggttcactggctggcctgtggtccacagctcccgtttcttcacccagatgcaggatctaatgtggttccaaagctcaaggctgaggctggctggtggattatagttcaagttgggagatctgcaggcaggaattatggaggccagtgtttggggcaaggagaagggtctgc

SEQ ID NO: 73615 - DNA, 902 bp, Homo Sapiens
gggagctttggggttgtccctggacttgtcttggttccagaacctgacgacccggcgacggcgacgtctcttttgactaaaagacagtgtccagtgctccagcctaggagtctacggggaccgcctcccgcgccgccaccatgcccaacttctctggcaactggaaaatcatccgatcggaaaacttcgaggaattgctcaaagtgctgggggtgaatgtgatgctgaggaagattgctgtggctgcagcgtccaagccagcagtggagatcaaacaggagggagacactttctacatcaaaacctccaccaccgtgcgcaccacagagattaacttcaaggttggggaggagtttgaggagcagactgtggatgggaggccctgtaagagcctggtgaaatgggagagtgagaataaaatggtctgtgagcagaagctcctgaagggagagggccccaagacctcgtggaccagagaactgaccaacgatggggaactgatcctgaccatgacggcggatgacgttgtgtgcaccagggtctacgtccgagagtgagtggccacaggtagaaccgcggccgaagcccaccactggccatgctcaccgccctgcttcactgccccctccgtccccacccctccttctaggatagcgctccccttacccaagtcacttctggggggtcactggggatgcctcttgcagggtcttgctttctttgacctcttctctcctccccctacaccaacaaaggaggaaatggctgcaagaaacccagaatcaccccattccgggttctacttccccggccttcccaagttcagcaggccctagccccccaaacccagcgctaggagccaggggtcctcctcctaaaagggggaaccttgaaggggccca

SEQ ID NO: 73616 - DNA, 1024 bp, Homo Sapiens
ctggacttgtcttggttccagaacctgacgacccggcgacggcgacgtctcttttgactaaaagacagtgtccagtgctccagcctaggagtctacggggaccgcctcccgcgccgccaccatgcccaacttctctggcaactggaaaatcatccgatcggaaaacttcgaggaattgctcaaagtgctgggggtgaatgtgatgctgaggaagattgctgtggctgcagcgtccaagccagcagtggagatcaaacaggagggagacactttctacatcaaaacctccaccaccgtgcgcaccacagagattaacttcaaggttggggaggagtttgaggagcagactgtggatgggaggccctgtaagagcctggtgaaatgggagagtgagaataaaatggtctgtgagcagaagctcctgaagggagagggccccaagacctcgtggaccagagaactgaccaacgatggggaactgatcctgaccatgacggcggatgacgttgtgtgcaccagggtctacgtccgagagtgagtggccacaggtagaaccgcggccgaagcccaccactggccatgctcaccgccctgcttcactgccccctccgtcccaccccctccttctaggatagcgctccccttaccccagtcacttctgggggtcactgggatgcctcttgcagggtcttgctttctttgacctcttctctcctcccctacaccaacaaagaggaatggctgcaagagcccagatcacccattccgggttcactccccgcctccccaagtcagcagtcctagccccaaaccagcccagagcagggtctctctaaaggggacttgagggcctgagcaggaaagactggccctctagcttctaccctttgtccctgtagcctatacagtttagaatatttatttgttaattttattaaaatgctttaaaaaacttccccaaaaaaacaccaaacctcgagggcatcttatgtcggggggccggaaaaaaagaggttaaatgaac

SEQ ID NO: 73617 - DNA, 1472 bp, Homo Sapiens
  misc_feature (50)..(101): n is a, c, g, or t
  misc_feature (439)..(447): n is a, c, g, or t
  misc_feature (1386)..(1420): n is a, c, g, or t
aaaattcaaagctgaaaataaatggtttatttttaacataagtaaatttnnnnnnnnnnnnnnnnnnnnnnnnnnnnnnnnnnnnnnnnnnnnnnnnnnnngacactctcaaaatattaaaacctatggaaagaaaataagtaattaatgaatgatgtttttgtttccaaatacaatgaagtgattttttattagagtccttgggaatcatctaagttacaatacagaagagaattaaataaatcgtatatgattttgtaattagacactctatatatcacagttctttgttaacctgggcatggaacgtccctatagcatatatttaaaaccattaattttttttaaaaaaatttgagacatggtttgttcttgttctctaaattatgtttccccatttcccttgaatgttctctattggccatcttctggaacattnnnnnnnnntcttgaaacaaattctcttgcaatgatacgtatcacataaacttgatatgctttatattacagcatttgtaaaattaagtaccaaaggcaggcatataaatagaaaaaacatcaaggtatttctaggggtgcccaacagcatttgggataaatatggaatccaaaagtgcaaaaggaatgcagcaatggcaagagaatggtcctttcgtgactagacctattccctgtttgcctaaagttaatgtaagaattgatattcaaagcgtatctggaataagttctgtttctggtctagtaagtgaaggcttaatagagggagtaattgtggtttctaatagggaaaaatattaataaggctaaaaataagtagatccaagaatgacctacttttctactttgtttcatccaagtgaaactttgtgttcaatttaaaataatcaataacacttatagagggaaatgatttattatgggtacttaaatataggatataattttacatgttgttcatcaacattcatgttaccgggataagggctttcttaaattacgaattattctgtttcacaggataccaagattcatttacagttatatttgtttcctgttatcactcaacagttcaaatagttgagcactgaggttaacatagcttagtttctaaatgtgtctgctgggaatatagtaggaaatcaattaatgcccgatggctggctactgcttagcagtgaccatggaagctctgtgcacagcagatgccactgcaacctagataaactgtagcaatacttaagttatttatacaaacttagggaaggcaagaactatgacaactatcactctgtgagctgtgaattaacaaataatatgtacagaaaacactgacaccccggccgtaatggccgaattcccgggcatatgtccggtaccgtcgactgnnnnnnnnnnnnnnnnnnnnnnnnnnnnnnnnnnncggccgcttcctcgctaactgactcgcttgtccgttcttcctggttttcagt

SEQ ID NO: 73618 - DNA, 778 bp, Homo Sapiens
  misc_feature (54)..(54): n is a, c, g, or t
  misc_feature (60)..(60): n is a, c, g, or t
  misc_feature (93)..(93): n is a, c, g, or t
  misc_feature (130)..(130): n is a, c, g, or t
  misc_feature (154)..(154): n is a, c, g, or t
ccaaagcatgttgtactgattgtgtagtacaatttattgaaaaatgtatgttangattancataaatattggggtgtccatgaatcaagaatnacatgaaagtatggcaccaaaacgttaaaagtggttntgttgcgagttcaggggatttacntttctccctaatactttattctttgaatatcttgaaatggatattttgtaactgtataaggagaaaggaagcgaaactatttttctgcaggggtacacccacatctattgtattagacaaatcacagagggattgcaacagaacacagatttttctcactgttttttctctggttgatcgggatgcattatccaccagaaaacactgtagacgactcactcaccaggaaaagagcatatgccagttggaataaataaaggggaagagtaaggaagaggctgtagaattattttataaattatcaagtcttatgagccaggtgcagtggtgcatgcctatgtacagtcccagctactcaggaggctgaggtggtaggatagcttgagcccaggagttcgagggtggagtgtgatatgatcgtctgtgaatagccacagcactgcatcctggacaagatagggtctctttaaaaataagacttaactagcactttaataatcattgtttttgttcccaactgcattgtacattcattgaggacagggactttaaacttcattatattgctgttgctgtgtttcacctttgaatgatttttaaataaaaatctcatctttgagtcac

SEQ ID NO: 73619 - DNA, 587 bp, Homo Sapiens
gagatccagtattgccagcacctagtggatcagtgtcgccaccgcctgctcatggaatttgacatctggtacaatgagtcctttgtcatccctgaggacatgcagatggcactgaagccaggcggcagcatccggccaggcatggtccctgtgaacaggattgtgtctctgggagaagatgaccaggaaaaattcagccagctgcagcagagggtgcttcctgagggccctgattccatctccttctacaatgccaaagtcaagatagagcagaagcataattacttgaaaaccatgatgggcctccagcaggcacatagaaaatagaacctcatcgccagtaccttaaaggacaagaccagcaactcccacctactgtagtggagctgctcaaccacctgcccagagctgcagccccctctactccaatgctgggacccagcacagagaacacatttggcctgcatgttgggaggagcatcctccaaggacaaccttgctcatctccacagagcactttgggttttaattcactgtcttatatgcagggacaggataaaataactttctagtttggactttcaaaa

SEQ ID NO: 73620 - DNA, 1852 bp, Homo Sapiens
  misc_feature (1744)..(1778): n is a, c, g, or t
aggagctgaggtgcccttcttcgagacctggatgcagacctgcatgcctgaggagggcaagatcctgaaccctgaccacccctgcttccgccccgactccaccaaagtggagtccctggtggccctgctcaacaactcctcggagatgaagctagtgcagatgaagtggcatgaggcctgtctcagcatctcagccgccatcttggaaatcctcaatgcctgggagaatggggtcctggccttcgagtccatccagaaaatcactgataacatcaaagggaaggtatgcagtctggcggtgtgtgctgtggcttggcttgtggcccacgtccggatgctggggctggatgagcgtgagaagtcgctgcagatgatccgccagctggcagggccactgtttagtgagaacaccctgcagttctacaatgagagggtggtgatcatgaactcgatcctggagcgcatgtgtgccgacgtgctgcagcagacagccacgcagatcaagtttccctccaccggggtggacacaatgccctactggaacctgctgccccccaagcggcccatcaaagaggtgctgacggacatttttgccaaggtgctggagaagggctgggtggacagccgctccatccacatctttgacaccctgctgcacatgggcggcgtctactggttctgcaacaacctgattaaggagctgctgaaggagacgcggaaggagcacacgctgcgggcagtggagctgctctactccatcttctgcctggacatgcagcaagtgaccctggtcctgctgggccacatcctacctggcctgctcactgactcctccaagtggcacagcctcatggaccccccgggcactgctcttgccaagctggccgtgtggtgtgccctcagttcctactcctcccacaagggacaggcgtccacccgccagaagaagagacaccgcgaagacattgaggattatatcagcctcttccccctggacgatgtgcagccttcgaagttgatgcgactgctgagctctaatgaggacgatgccaacatcctttcgagccccacagaccgatccatgagcagctccctctcagcctctcagctccacacggtcaacatgcgggaccctctgaaccgagtcctggccaacctgttcctgctcatctcctccatcctggggtctcgcaccgctggcccccacacccagttcgtgcagtggttcatggaggagtgtgtggactgcctggagcagggtggccgtggcagcgtcctgcagttcatgcccttcaccaccgtgtcggaactggtgaaggtgtcagccatgtccagccccaaggtggttctggccatcacggacctcagcctgcccctgggccgccaggtggctgctaaagccattgctgcactctgaggggcttggcatggccgcagtgggggctggggactggcgcagccccaggcgcctccaagggaagcagtgaggaaagatgaggcatcgtgcctcacatccgctccacatggtgcaagagcctctagcggcttccagttccccgctcctgactcctgacctccaggatgtctcccggtttcttctttcaaaatttcctctccatctgctggcacctgaggagtgtgagcaacctggaccacaagcccagtggtcacccctgtgtgcgcccgccccagcccaggagtagtcttacctctgaggaactttctagatgcaaagtatgtatannnnnnnnnnnnnnnnnnnnnnnnnnnnnnnnnnnttatgtgtattttgtaatatgtgagggaaatctaccttcgttcatgtataaataaagctcctcgtggctccctt

SEQ ID NO: 73621 - DNA, 719 bp, Homo Sapiens
  misc_feature (44)..(44): n is a, c, g, or t
gagctggagatctaaatgctccagaccatctctctgattctctntggagatgggtctgaaagacaattcagtagtttgggaattctagaaagttgcttggaaacgtgggaagactcttgcctagtgcctaaatgctccatttgcagctctagccaagtagatacttggtaggtatagagccgggtttgcgtttatatcagcaaaacctatatcagagttgaagaagtagtcaggaaaaagcgtcttggtcgcaggccggggaacatcttaaaagcaaacttctagcctgctgactcttggcaatgagtgttggatcctggctaaagtgccttgaatgcagcatgaggccaatccatgaatccaacttctcatggagaaatgttaatattttttcagtttgaatcaatcagggtgaaactaccatgctattggtttgcttactttttattatttcatgtaaaatctaagacaaaatacattaaatgcttattgacatatgtatttattcttcaccaggctgataatatctgcctaattttaaactttcttccattttgtaggtttcaacttattctattgtaagatactgttaaatctaatagaggcattgtcacttttacgtataattttattttatttcatatatttcctattggctttttacatttaaattatggagcacttcatcatataaaaaacttcaattatatttaaacagt

SEQ ID NO: 73622 - DNA, 368 bp, Homo Sapiens
ctcttgtctccttaggatatgttacctgctccactgcagactagagaaataaatgtgtattgaaccttttactgcaaacttgaaaatgctagaaaaccaagcatgaagaataaatacatggcgggaaacacacaggcatgtgcatatgcatatacattgtaagttagtaagttagaaagctagctttgttgtatctgaacacatgaatcttttttggtcagtgtaggaagcacagccagatcctataggaatgaatacctcaaatctgttgtctgagattctagagattaaaccactgtgccatttttaacccaggctgtactattgtttcttaccaacagcataggttttcatcactggaaggagcc

SEQ ID NO: 73623 - DNA, 1839 bp, Homo Sapiens
gggacgctttgcggctgtcgtcggagaggcatctgggttcggactggggccgccatggggaaagtgaatgtggccaagttgcgttacatgagccgagatgacttcagggtcttgaccgcggttgaaatgggcatgaagaaccatgaaattgttcccggcagtttgattgcttctatagccagccttaaacatggtggctgtaataaagttttaagagaattagtgaaacataaactcatagcttgggagcgtaccaaaactgtccagggctatcggttgacaaatgcaggatatgattacctagctttgaaaacactttcttctaggcaagtagttgagtgtgttggaaaccagatgggtgttggcaaagaatcagatatttacattgttgcaaatgaagaaggacaacaatttgcattaaagcttcacagactaggaagaacctcgtttcgaaatttgaaaaacaaacgcgattatcataaacataggcacaatgtgtcttggctttatttatctcgtctctctgccatgaaggaatttgcctatatgaaggcattgtatgagaggaaatttccagttccaaagccaattgattacaatcgtcatgcagtggtcatggaactcataaatggttatccactatgtcagatacaccatgttgaagatcctgcatcagtatatgatgaagctatggaactaattgtcaaacttgcaaatcatgggctgattcatggagattttaatgaatttaatctcattttggatgaaagtgaccatatcaccatgattgattttccacagatggtttcaacttctcatcccaatgctgagtggtattttgacagagatgttaaatgcattaaagatttctttatgaaacgtttcagctacgaaagtgagctttttccaacttttaaggatatcaggagagaagacactcttgatgtggaggtttctgccagtggctacacaaaggaaatgcaggcagatgatgaactgcttcatccattaggtccagatgataaaaatattgaaacaaaagagggatctgaattctcattttcagatggagaagtggcagaaaaagcagaggtttacaggtcagaaaatgaaagtgaacggaactgtctagaagaatcagagggctgctattgcagatcatctggagaccctgaacaaataaaggaagacagtttatcagaagagagtgctgatgcacggagttttgaaatgactgaattcaatcaagctttagaagaaataaaagggcaggttgttgaaaacaactctgtaactgaattttctgaggagaaaaacagaactgaaaattacaacaggcaagatggtcagagagttcaaggaggagtccctgctggctctgacgagtatgaagatgaatgccctcatctaattgccttgtcgtcattaaatagagaattcaggcctttcagagatgaagaaaatgtgggagctatgaatcagtatagaacaagaactctgagtatcacttcttcaggcagtgctgtaagctgttcaacaattcctccagaactggtgaaacagaaggtgaaacgtcagttgacaaaacagcaaaaatcagctgtcagacgtcgattgcagaaaggagaagcaaatatatttaccaagcaacgtagggaaaacatgcaaaatatcaaatcaagtttggaagcagctagcttttggggagaataatatatttaggatcttggatatgtttaatatattttttaaagttactgtaattcctttttgagccctcatttgtcttttttgagccaaggctatcatatattaataaataaaccctctttcatctat

SEQ ID NO: 73624 - DNA, 1406 bp, Homo Sapiens
ctgacggcagtaactataacggttctaaggtagcgaggcctgggtggcgaattcggcacgaggcgcgggcagccggagcgcacccggccggaagccgctgtcggggagccggcggtggggctggacgcaggtgcaactgacatgggtgaaccccagggatccatgcggattctagtgacagggggctctgggctggtaggcaaagccatccagaaggtggtagcagatggagctggacttcctggagaggactgggtgtttgtctcctctaaagacgccgatctcacggatacagcacagacccgcgccctgtttgagaaggtccaacccacacacgtcatccatcttgctgcaatggtggggggcctgttccggaatatcaaatacaatttggacttctggaggaaaaacgtgcacatgaacgacaacgtcctgcactcggcctttgaggtgggcgcccgcaaggtggtgtcctgcctgtccacctgtatcttccctgacaagacgacctacccgatagatgagaccatgatccacaatgggcctccccacaacagcaattttgggtactcgtatgccaagaggatgatcgacgtgcagaacagggcctacttccagcagtacggctgcaccttcaccgctgtcatccccaccaacgtcttcgggccccacgacaacttcaacatcgaggatggccacgtgctgcctggcctcatccacaaggtgcacctggccaagagcagcggctcggccctgacggtgtggggtacagggaatccgcggaggcagttcatatactcgctggacctggcccagctctttatctgggtcctgcgggagtacaatgaagtggagcccatcatcctctccgtgggcgaggaagatgaggtctccatcaaggaggcagccgaggcggtggtggaggccatggacttccatggggaagtcacctttgatacaaccaagtcggatgggcagtttaagaagacagccagtaacagcaagctgaggacctacctgcccgacttccggttcacacccttcaagcaggcggtgaaggagacctgtgcttggttcactgacaactacgagcaggcccggaagtgaagctggaagacaggatcaggtgccagcggaccatcggctggcagagcccagcggccaccacccgtcaaccctgccaggagctgagggcaccacccagcaacctgggcctgcattccatccgctctgcagccccaagcatctttccagtggggcccccattcacgttggtcctcagggaaaccagggtccggggcaggcccggcgctttgctccccacaccagccccctgcgcgtgtccactctgatcctgcatcccactccctgggagccaataaagtgcattttcacaggcaaaaaaa

SEQ ID NO: 73625 - DNA, 1002 bp, Homo Sapiens
  misc_feature (988)..(988): n is a, c, g, or t
agggctcccacttccatgtattccccgcaggaccccaataaagaggctgggccagtcccagcgagtatatgaactgcctccgcggatttcctgtacccccacaccttcagggccgagccgctgttcttggccaggtgcaccttgtggatgaggccagccagcacgtggccatcttggatgttgaagttgtcgtgggccccgaagacgttggtggggatgacagcggtgaagggtgcagccgtactgctggaagtaggccctgcggaggcacagcgtctcctgccctcgtcctgggcccgcgatccccaccccaaggctgccgctggcctcttactgaggctggcacgaagacccgaccagccggccccacccgccccctgggggccctctccccgactcctggctgggcctcagcaggatgggcgcgaggacctgttctgcacgtcgatcatcctcttggcatacgagtacccaaaattgctgttgtggggaggcccattgtggatcatggtctcatctatcgggtaggtcgtcttgtcagggaagatacaggtggacaggcaggacaccaccttgcgggcgcccacctcgaaggccgagtgcaggacgttgtcgttcatgtgcacgtttttcctccagaagtccaaattgtatttgatattccggaacaggccccccaccattgcagcaagatggatgacgtgtgtgggttggaccttctcaaacagggcgcgggtctgtgctgtatccgtgagatcggcgtctttagaggagacaaacacccagtcctctccaggaagtccagctccatctgctaccaccttctggatggctttgcctaccagcccagagccccctgtcactagaatccgcatggatccctggggttcacccatgtcagttgcacctgcgtccagccccaccgccggctcccatcccgggaatcctgtttaggacgcttcgttggggtggacagtggttggtttgnttgtttgtatttgg

SEQ ID NO: 73626 - DNA, 1696 bp, Homo Sapiens
  misc_feature (1611)..(1628): n is a, c, g, or t
  misc_feature (1661)..(1661): n is a, c, g, or t
cagtcgacggtaccggacatatgcccgggaattcggccattacgtgccggggactcttgaaaccacagctgttggcagggtccccagctcatgccagcctcatctcctttcttgctagcccccaaagggcctccaggcaacatggggggcccagtcagagagccggcactctcagttgccctctggttgagttggggggcagctctgggggccgtggcttgtgccatggctctgctgacccaacaaacagagctgcagagcctcaggagagaggtgagccggctgcagaggacaggaggcccctcccagaatggggaagggtatccctggcagagtctcccggagcagagttccgatgccctggaagcctgggagagtggggagagatcccggaaaaggagagcagtgctcacccaaaaacagaagaagcagcactctgtcctgcacctggttcccattaacgccacctccaaggatgactccgatgtgacagaggtgatgtggcaaccagctcttaggcgtgggagaggcctacaggcccaaggatatggtgtccgaatccaggatgctggagtttatctgctgtatagccaggtcctgtttcaagacgtgactttcaccatgggtcaggtggtgtctcgagaaggccaaggaaggcaggagactctattccgatgtataagaagtatgccctcccacccggaccgggcctacaacagctgctatagcgcaggtgtcttccatttacaccaaggggatattctgagtgtcataattccccgggcaagggcgaaacttaacctctctccacatggaaccttcctggggtttgtgaaactgtgattgtgttataaaaagtggctcccagcttggaagaccagggtgggtacatactggagacagccaagagctgagtatataaaggagagggaatgtgcaggaacagaggcgtcttcctgggtttggctccccgttcctcacttttcccttttcattcccaccccctagactttgattttacggatatcttgcttctgttccccatggagctccgaattcttgcgtgtgtgtagatgaggggcgggggacgggcgccaggcattgtccagacctggtcggggcccactggaagcatccagaacagcaccaccatctagcggccgctcgagggaagcacccgccggttggccgaagtccacgaagccgccctctgctagggaaaacccctggttctccatgccacacctctctccaggtgccctctgcctcttcaccccacaagaagccttatcctacgtccttctctccatctatcggaccccagtttccatcactatctccagagatgtagctattatgcgcccgtctacagggggtgcccgacgatgacggtgccttcgcagtcaaattactcttcgggtcccaaggtttggctttcacgcgctccattgccccggcgtggcaggccattccaagcccttccgggctggaactggtgtcggaggagcctcgggtgtatcgtacgccctggtgttggtgttgcctcactcctctgagctcttctttctgatcaagccctgcttaaagttaaataaaatagaatgaatgatnnnnnnnnnnnnnnnnnngaccgcgtatgcggccgcaagcttattcccttntagtgagggttaattttcgcttaggcacttggccg

SEQ ID NO: 73627 - DNA, 1297 bp, Homo Sapiens
  misc_feature (60)..(60): n is a, c, g, or t
  misc_feature (81)..(168): n is a, c, g, or t
  misc_feature (170)..(171): n is a, c, g, or t
  misc_feature (174)..(174): n is a, c, g, or t
  misc_feature (180)..(180): n is a, c, g, or t
  misc_feature (184)..(184): n is a, c, g, or t
  misc_feature (1011)..(1121): n is a, c, g, or t
  misc_feature (1125)..(1125): n is a, c, g, or t
  misc_feature (1133)..(1133): n is a, c, g, or t
  misc_feature (1138)..(1140): n is a, c, g, or t
  misc_feature (1142)..(1187): n is a, c, g, or t
tccgatgaaagcggcatggcgcacgcaatatgtgagtagccactcattagcaccccagcnttacacttatgctccggctcnnnnnnnnnnnnnnnnnnnnnnnnnnnnnnnnnnnnnnnnnnnnnnnnnnnnnnnnnnnnnnnnnnnnnnnnnnnnnnnnnnnnnnnngnnccntcgagnccangaattcggcacgaggagtaattggagccaagaaaatgagtataggtaagaagcgcaattccacactctacataaccatgttactcattgttccagtcatcgtcgcaggtgcaatcatagtactcctgctttacctaaaaagcctcaagattattatattccctccaattcctgatcctggcaagatttttaaagaaatgtttggagaccagaatgatgatactctgcactggaagaagtacgacatctatgagaagcaaaccaaggaggaaaccgactctgtagtgctgatagaaaacctgaagaaagcctctcagtgatggagataatttatttttaccttcactgtgaccttgagaagattcttcccattctccatttgttatctgggaacttattaaatggaaactgaaactactgcaccatttaaaaacaggcagctcataagagccacaggtctttatgttgagtcgcgcaccgaaaaactaaaaataatgggcgctttggagaagagtgtggagtcattctcattgaattataaaagccagcaggcttcaaactaggggacaaagcaaaaagtgatgatagtggtggagttaatcttatcaagagttgtgacaacttcctgagggatctatacttgctttgtgttctttgtgtcaacatgaacaaattttatttgtaggggaactcatttggggtgcaaatgctaatgtcaaacttgagtcacaaagaacatgtagaaaacaaaatggataaaatctgatatgtattgtttgggatcctattgaaccatgtttgtggctattaaaactcttttaacagtcnnnnnnnnnnnnnnnnnnnnnnnnnnnnnnnnnnnnnnnnnnnnnnnnnnnnnnnnnnnnnnnnnnnnnnnnnnnnnnnnnnnnnnnnnnnnnnnnnnnnnnnnnnnnnnnttanaaaaaccnctccnnnannnnnnnnnnnnnnnnnnnnnnnnnnnnnnnnnnnnnnnnnnnnnnaaaaactttcttgaactttccttgggccgccgggcccccaagaaaaaaacggcggggaacaagtgtttgtaaagaacccctgaaaagggccctgggggggcctccccccc

SEQ ID NO: 73628 - DNA, 1294 bp, Homo Sapiens
  misc_feature (30)..(30): n is a, c, g, or t
gttatagatccctccaggaaagttgtcacnaactcttgataaagattaactcccaccactaattcatcactttttgcttggtcccctagtttgaagcctgctggcttttataattcaatgagaatgactccacactcttctccaaaagcgcccattatttttagtttttcggtgcgcgactcaacataaagaccctgtggctcttatgagctgcctgtttttaaatggtgcagtagtttcagtttccatttaataagttcccagataacaaatggagaatgggaagaatcttctcaaggtcacagtgaaggtaaaaataaattatctccatcactgagaggctttcttcaggttttctatcagcactacagagtcggtttcctccttggtttgcttctcatagatgtcgtacttcttccagtgcagagtatcatcattctggtctccaaacatttctttaaaaatcttgccaggatcaggaattggagggaatataataatcttgagcctttttaggtaaagcaggagtactatgattgcacctgcgacgatgactggaacaatgagtaacatggttatgtagagtgtggaattgcgcttcttacctatactcatttcttggctccaattactccagagtttgtcatcctcatagcataacttatttgttttgactcttattctgactgtgttcaaagtatcaggaagaacaccagggaccatgaaacaagatgtattctccacatttctctcaaattctggattctcacatttagcctcttggacgtagaaaacattatgtgtctcagtttggctgttattgacttctacttcataaaataggcatctgctaataaaattctgtggattctcccattgcacatataggtcatcattgtggaaggagaggtttttaatatgtggaggatcaggtttcacacgggaagttaaaggcactatattgaaggatggtttaatttttcctgcattatccttgaccattatttggacactgtgttgttcaaaactggaatccttcactttggtcagatcaaaggaacaaccaaagtattggccttctctaaagatgttttcacatatgatgaattttctccaggcttctgtgccaatagtacgagagtatagttagtgtcgggactggtattccttccaggggagccacgaacacttcatgtagctcaggttgtgccccatgccatttgaagctcagtcacagcagaatccggatcacctactgggggtgagatgcacttttttcaaccaaaatgctagg

SEQ ID NO: 73629 - DNA, 2386 bp, Homo Sapiens
ctgccacgtcaagcaaaccgggaaaggagaggatcccggagccggtgagaattctctgttttttctctaccatcctttccaggccttttcctcacctaatgagtcgtagagacgagggcccagagagtctgtaaagtggctggtgaaagattagtgtcccagggccctacatccgggaggtggttcgggataaagagaactagtcttgggaacaatgtaggtgggaacttaagggaatgggagagcggcccatagaggtggacggagggcgcgattggagtaaagcggaccctgtgtaggtatagagttgagtcaagtggagtcactgcctctgtccctctggtcagcgtgatggccagaggcctgggggccccccactgggtggccgtgggactgctgacctgggcgaccttggggcttctggtggctggactcgggggtcatgacgacctgcacgacgatctgcaagaggacttccatggccacagccacaggcactcacatgaagatttccaccatggccacagccatgcccatggccatggccacactcacgagagcatctggcatggacatacccacgatcacgaccatggacattcacatgaggatttacaccatggccatagccatggctactcccatgagagcctctaccacagaggacatggacatgaccatgagcatagccatggaggctatggggagtctggggctccaggcatcaagcaggacctggatgctgtcactctctgggcttatgcactgggggccacagtgctgatctcagcagctccattttttgtcctcttccttatccccgtggagtcgaactctccccggcatcgctctctacttcagatcttgctcagttttgcttccggtgggctcctgggagatgctttcctgcacctcattcctcatgctcttgaacctcattctcaccacactctggagcaacccggacatggacactcccacagtggccagggccccattctgtctgtgggactgtgggttctcagtggaattgttgcctttcttgtcgtggagaaatttgtgagacatgtgaaaggaggacatggtcacagtcatggacatggacacgctcacagtcatacacgtggaagtcatggacatggaagacaagagcgttctaccaaggagaagcagagctcagaggaagaagaaaaggaaacaagaggggttcagaagaggcgaggagggagcacagtacccaaagatgggccagtgagacctcagaacgctgaagaagaaaaaagaggcttagacctgcgtgtgtcggggtacctgaatctggctgctgacttggcacacaacttcactgatggtctggccattggggcttcctttcgagggggccggggactagggatcctgaccacaatgactgtcctgctacatgaagtgccccacgaggtcggagactttgccatcttggtccagtctggctgcagcaaaaagcaggcgatgcgtctgcaactactgacagcagtaggggcactggcaggcacagcctgtgcccttctcactgaaggaggagcagtgggcagtgaaattgcaggtggtgcaggtcctggctgggtcctgccatttactgcaggtggctttatctacgtagcaacagtgtctgtgttgcccgagctgctgagggaggcatcaccattgcaatcacttctggaggtgctggggctgctggggggagttatcatgatggtgctgattgcccaccttgagtgaggggtggataaactacccctgccccaaacctctacccctaactccaggtcaggggtgcgtagaggttgggggccctggccagggacatctgccaaaggaaggaactgtagcctgggagaatggttactttggcattagggccttcaagggctggcagtcttacagaggctggagcggtgagaatgagaggccagagggaccatagtgttgggcactgtctgaccatgttgcatttggaaggctaaatggggccatgaagaaggctggaagggacagggggtgatggcagcctacctggtgtcccctaccccacctgttctcggagaaccaagttgctacacaggaagttctccaaggtccagtttcctttctcccaccagttggtggaggcttcagggaagaccagagtcctggacagagagggtaacaggaggagtcggggataaacatcaaacatcaatcgtgtgtcctgatttgggagtgattggggggatggggtgggagagggttagttggtattctcatggcctgattttttttgtttctattccttttatatcactgtgtttgaatcgagggggaggggtggtaaccggaaataaagacctccgatcttccgccccac

SEQ ID NO: 73630 - DNA, 426 bp, Homo Sapiens
  misc_feature (202)..(202): n is a, c, g, or t
  misc_feature (378)..(378): n is a, c, g, or t
tgagccaccgcgcctggcctgaaggtattctactcttagttatcagaaaggtcgctcaaatttacagagtggcatgacgcactgtctagtatgagcagtgctttgttggtgagattattttgggcactgtatttttcaacggcaaaaaaagtaagtgaaccattcatgaaagatgctcctggtcacccaagcctttctgttnggagcgccaaatcacgggcaaactgggcttcaagaaccttcacagccttgcgggtttctgagcggtacaccagtaagggttcaacttaaagtcccagctgcactgccaccaagcagcacatcaagcgatctttggatgacttaaaccctggctcagattctcttcctcggaaatancgttcctttgggcatctcttccaatcaatctcgtctcatctacgttaa

SEQ ID NO: 73631 - DNA, 1532 bp, Homo Sapiens
caacacccacgaaggaccccctccaaacgccgcatcgtgctacactgatgaacagtggtaaaaaagcaggctgtacggtccgaattcccgggatatcgtcgaccacgcgtcgacagcgagtacgaccagtgggtggactgcgagtcccagacatctaccccgtcggctggtgtgagctcaccggctaccagctccagcctcctgtggccgcagaaccggccacaccgctgaaggccaaagaggccacaaagaagaaaaagaaacagtttgggaagaaaaggaaaagaatcccgcccactaagacgcgacccctcagacaggggtccaagaagcccctgctggaggacgaccctcagggtgccaggaagatctcgtcggagcctgttcctggcgagatcattgctgtgcgtgtgaaggaagagcatctagacgtggcctcgcccgacaaggcttcaagtccagagctgcctgtctccgtcgagaacatcaagcaggaaacagacgactgagccttcctgcctccagcctggcttctagctggaagccagcccagcgtttctctaccaccaccaccatgcctccacctgactttggcttggagactgatcctctctgtgtaaattctgcccggtgctgtgaaggctggacggtggaggacctgctggggtctcctgggacccgcctgttgcttctgccctcccctgtggaaaggtctatatgacgggccgcctgaggccccagaactcgtctgtgaaccaccttttccagccagagttcccaaagctggaacgctagctgcctgctcttccttaagatggcctccccccgacccgccacggccctcagttgccagggatggggccaccactgtcacactgtggaatacaagacagtgaactctgtctgcctgaacgagccatgtaaattaagttctagagcagctctctgagcaggataaggtcccctgacagtgagtttgtgtggtgggggcagcctctgcctcaaaaattcaccaagcagaatgcctctcagcctcatgtgttggtcctctgctcctcctagctccccagggatgttggggacccagcttgtctcggcagctaagaagcagtgaccaggatgtggattttggcgacctgtgtggtggccttgagctgctttctgtgtttgtgaggactgactcccatttcctaaaggaaatgcccccggggaggacattgggaggaagatggcctgagtgtgcactttggctctgctacctgctcctgaagccccgctaaaaataattcatccaagattcctttgtagttaaagggtccagttctgactggagcctctagagagctgggcttgtatgttcttttggccttttgttcctacctaaatgaagaaaccatgcctggaggggccgtgaacacagaaccctcaagacaaggatgacagagctggaggacacatctagctgccattgcaacctcactgggctccccagactctgtgtgtgagaaattaaaccccctgcttgcttgaaa

SEQ ID NO: 73632 - DNA, 713 bp, Homo Sapiens
gagagagaatgctgtaaagaacaacacttgtttgtctgtggggaaagaaaagcagaatacttgagatgaaagttggcatacaaataggatactatcgccagtagttatattacaaacattatcggccttttctagtgtgaatgaacattagacacattattgtcattcctagtttaaagttaaggttgcgtggttggatttttccactatctttttctaatttttctaccatttggagaccgtaggcatttgggcctgtcaccccttggatgggttcctagtttgtttacattttcctgaaccctcctgagcgcccgttcttggtctaatccccagtcgtgatgattccacacttcctcagccgcatgttgtcttgcctcattcatgagctggtcagcgtttcgtctctttaactgacatgttccccagtgctgtttgaactgttgagtttccgttgctggctgagtgcgttttgtccttcacgtaaccttcgctggtaaaaataagcccatgtgatgtccaccagtggatgaatgctggaccgagagccctagcttctggatccaggtctaggcccttcatctgctgctctgtggcccagggcaggtttgcttgacctctgcctcagttctcgactctaaaggacatactgacctacctcacaggggtgttgtgaggattaataaatgttggtactctgctttggaaatgtg

SEQ ID NO: 73633 - DNA, 1010 bp, Homo Sapiens
  misc_feature (47)..(47): n is a, c, g, or t
  misc_feature (62)..(62): n is a, c, g, or t
  misc_feature (93)..(93): n is a, c, g, or t
  misc_feature (148)..(148): n is a, c, g, or t
  misc_feature (154)..(154): n is a, c, g, or t
  misc_feature (191)..(191): n is a, c, g, or t
  misc_feature (253)..(254): n is a, c, g, or t
  misc_feature (277)..(277): n is a, c, g, or t
  misc_feature (305)..(305): n is a, c, g, or t
  misc_feature (333)..(333): n is a, c, g, or t
  misc_feature (357)..(357): n is a, c, g, or t
  misc_feature (398)..(398): n is a, c, g, or t
ctgagccagatcgccgaggtttaaagtagagcgtgtgccatatatgntagttctatgctgtnagtagtaatgtcaaagtagttgtgtttgtcntagtttaaagactgaatttgtgctacagcattgctgtgcattgtatcaaattgcntgcctnttatgagggagcctgctttcacacctcagttattatnacgaggcagttgtagacaaacactcatctagtgatctgtgtgccccatgaaattaaggtatnntggggaaaaggattagtcagttntaagcaaagagtcacatcttttgagctntcgattatcagtgtagtacctgactaanaaatgaagtaatacccttaaaccnatttataatttctagtatttctctcgaaagatcgttttggngacaaaagtgacgttgacatgtccaatttcatttcagaataaaaagctagcatctttaaaaatctcagattgcttgcttacagatacaagtaagaattatggacaaacgattccttttagaggattacttttttcaatttcggttttagtaatctaggctttgcctgtaaagaatacaacgatggattttaaatactgtttgtggaatgtgtttaaaggattgattctagaacctttgtatatttgatagtatttctaactttcatttctttactgtttgcagttaatgttcatgttctgctatgcaatcgtttatatgcacgtttctttaatttttttagattttcctggatgtatagtttaaacaacaaaaagtctatttaaaactgtagcagtagtttacagttctagcaaagaggaaagttgtggggttaaactttgtattttctttcttatagaggcttctaaaaaggtatttttatatgttctttttaacaaatattgtgtacaacctttaaaacatcaatgtttggatcaaaacaagacccagcttattttctgcttgctgtaaattaagcaaacatgctataataaaaacaaaatgaaggaaat

SEQ ID NO: 73634 - DNA, 2385 bp, Homo Sapiens
  misc_feature (41)..(75): n is a, c, g, or t
  misc_feature (999)..(1071): n is a, c, g, or t
  misc_feature (1916)..(1971): n is a, c, g, or t
  misc_feature (1998)..(2023): n is a, c, g, or t
  misc_feature (2219)..(2237): n is a, c, g, or t
cgacgagcgcagcgagtcagtgagtctgaggaagcggccgnnnnnnnnnnnnnnnnnnnnnnnnnnnnnnnnnnncagtcgacggtaccggacatatgcccgggaattcggccattacggccggggagagcatttcaataaaatgtgacttggctgtctttggaagagaagtgcaaggctttcctttgaagaatttaaattagtccggtaggatgtcaggtgagactgtgtatgcaaaatgaatggcacaggtgatgccagggcctcttgcttgggtctgatgtcttggcacagggtaagtgaaggttaattccagaagagaggaatgacttgaaggcaaaggaaactaaggaaggaggttcagtgaggaaaataaggttgtccatgagatttgaatagatttttagttcccccaaggtttaaatacaaacatagtcaagcaaggtagtcatctttctgctggttgtgagggggaatctgaaaatggagttttagaggaaaagtcaacatctaactagtgaggaaaagtgcctaatacaattagaatctccctcactctatagttgcccagttgaaaggataaggaggaggggtggcttttatggacttccatgagagaaggaaagaaatatttcaggtaagcttctcagggctggccctttttgggatttggatgagaaattggaagtactaactactttctagcatatctttaagaaaattgattgttatttactcccagatcctcttgcagacccagaattatcaggaacatagctctgtgattcatgagtgtccccatactgatgaattggagcatccatatggaaagcaaaggcagaattatcccagctgtattattttgatcttttggatgcaggtgccttaatgaagctctcaaaatattttaggagctgctcagggagtgttgggtggaactgtttggactacattgttttctcttagattatgtgatttttgttgggcactggcaaaagnnnnnnnnnnnnnnnnnnnnnnnnnnnnnnnnnnnnnnnnnnnnnnnnnnnnnnnnnnnnnnnnnnnnnnnnnttgcagacatgcaaaactgcagctgaaataataccttagatttctaggtaagtctttccacatttcaataatgggtaagagtagaaccagggccgggtatcaattaatgcttgctgtttgcaaccaggcataaaatcactttctcaaatcatccaccgttcctattaaatttatgccggaaactctccttctgtgagtataactcctgcagttcctatagcagataagatataagaaagtgcctcctagtgctcctccgcccgcttgtttgctaaaattccctttctctctaagtccaccattttcaagatttgtagatagtgtattagttaagacagctttgtcgatctggccagatgttttttctcctttgtccaaaggccagagaccatcccaagaagagtggtgggtggtttatacactggaaatgttgcgtttatgctttttaaaaacacacgttaacttcagaaggaaggatgggcaaatctggtctagctgggtgaaacccttattttcccagagatgccttaacctttgttggtttggctttagggttcagagtcacttttgttcccttctccattctggagagggacttcccctacatagagccctgatttttgtggctgtggggatcggaggtagcattcaaagatcagatgtgcttttcctcactttggagattgaacactctgggttttacagcattaacctgcctaaccttcatggtgagaaatacaccatctctcttctagtcatgcctgtgcatgccgcttactctgttggggtctatataaacttcgttgaacttcttacctacatttccaaagaagtttcaaggaacnnnnnnnnnnnnnnnnnnnnnnnnnnnnnnnnnnnnnnnnnnnnnnnnnnnnnnnncaggaatactgcctcagttactgaacnnnnnnnnnnnnnnnnnnnnnnnnnnaagctgagaagtatagggatgaaaaagatgttatattgtgtttgactattttccaacttgtattttcatataatttatattttttaaaagctgaaaatttagaagcaagatgaaaaaaaggaaaagcaggtgctttttaaaaatcagaactgaggtagcttagagatgtagcgatgtaagtgtcgatgtttttttnnnnnnnnnnnnnnnnnnnttcttatggcggagttttttgtttgtttattttagtagctgatgctggcacatcattttgctggagagttttttatatactgtagcctgatttcatattgtattttaaactgtgtgaaattaaaaacaaagaatttcattcataaaaa

SEQ ID NO: 73635 - DNA, 684 bp, Homo Sapiens
  misc_feature (221)..(261): n is a, c, g, or t
  misc_feature (302)..(327): n is a, c, g, or t
  misc_feature (407)..(470): n is a, c, g, or t
  misc_feature (523)..(541): n is a, c, g, or t
gggtggctgtggggattggaggtagcattcaaagatcagatgtgcttttcctcactttggagatgaacactctgggttttacagcattaacctgcctaaccttcatggtgagaaatacaccatctctcttctagtcatgctgtgcatgccgcttactctgttggggtctatataaatttgttgaactcttacctacattccaaagaagtttcaaggaaccnnnnnnnnnnnnnnnnnnnnnnnnnnnnnnnnnnnnnnnnntaaaataaaattatcaggaatactgcctcagttattgaacnnnnnnnnnnnnnnnnnnnnnnnnnnaagctgagaagtatagggatgaaaaagatgttatattgtgtttgactattttccaacttgtattttcatataatttatannnnnnnnnnnnnnnnnnnnnnnnnnnnnnnnnnnnnnnnnnnnnnnnnnnnnnnnnnnnnnnntcagaactgaggtagcttagagatgtagcgatgtaagtgtcgatgtttttttnnnnnnnnnnnnnnnnnnnttcttatggcggagttttttgtttgtttattttagtagctgatgctggcacatcattttgctggagagttttttatatactgtagcctgatttcatattgtattttaaactgtgtgaaattaaaaacaaagaatttcattcat

SEQ ID NO: 73636 - DNA, 2044 bp, Homo Sapiens
  misc_feature (1696)..(1842): n is a, c, g, or t
  misc_feature (1860)..(1876): n is a, c, g, or t
  misc_feature (1891)..(1963): n is a, c, g, or t
acacaccaataccgcaggtacgaggctgggtgtttaattcggcacgagggcggcagcggcacagcgaggtcggcagcggcacagcgaggtcggcagcggcacagcgaggtcggcagcggcacagcgaggtcggcagcggcagcgaggtcggcagcggcacagcgaggtcggcagcggcagcgaggtcggcagcggcgcgcgctgtgctcttccgcggactctgaatcatggcgaccacggccacgatggcgacctcgggctcggcgcgaaagcggctgctcaaagaggaagacatgactaaagtggaattcgagaccagcgaggaggtggatgtgacccccacgttcgacaccatgggcctgcgggaggacctgctgcggggcatctacgcttacggttttgaaaaaccatcagcaatccagcaacgagcaatcaagcagatcatcaaagggagagatgtcatcgcacagtctcagtccggcacaggaaaaacagccaccttcagtatctcagtcctccagtgtttggatattcaggttcgtgaaactcaagctttgatcttggctcccacaagagagttggctgtgcagatccagaaggggctgcttgctctcggtgactacatgaatgtccagtgccatgcctgcattggaggcaccaatgttggcgaggacatcaggaagctggattacggacagcatgttgtcgcgggcactccagggcgtgtttttgatatgattcgtcgcagaagcctaaggacacgtgctatcaaaatgttggttttggatgaagctgatgaaatgttgaataaaggtttcaaagagcagatttacgatgtatacaggtacctgcctccagccacacaggtggttctcatcagtgccacgctgccacacgagattctggagatgaccaacaagttcatgaccgacccaatccgcatcttggtgaaacgtgatgaattgactctggaaggcatcaagcaatttttcgtggcagtggagagggaagagtggaaatttgacactctgtgtgacctctacgacacactgaccatcactcaggcggtcatcttctgcaacaccaaaagaaaggtggactggctgacggagaaaatgagggaagccaacttcactgtatcctcaatgcatggagacatgccccagaaagagcgggagtccatcatgaaggagttccggtcgggcgccagccgagtgcttatttctacagatgtctgggccagggggttggatgtccctcaggtgtccctcatcattaactatgatctccctaataacagagaattgtacatacacagaattgggagatcaggtcgatacggccggaagggtgtggccattaactttgtaaagaatgacgacatccgcatcctcagagatatcgagcagtactattccactcagattgatgagatgccgatgaacgttgctgatcttatctgaagcagcagatcagtgggatgagggagactgttcacctgctgtgtactcctgtttggaagtatttagatccagattctacttaatggggtttatatggactttcttctcataaatggcctgccgtctcccttcctttgaagaggatatggggattctgctctcttttcttatttacatgtaaataatacattgttctaagtctttttcattaaaaatttaaaacttttcccatnnnnnnnnnnnnnnnnnnnnnnnnnnnnnnnnnnnnnnnnnnnnnnnnnnnnnnnnnnnnnnnnnnnnnnnnnnnnnnnnnnnnnnnnnnnnnnnnnnnnnnnnnnnnnnnnnnnnnnnnnnnnnnnnnnnnnnnnnnnnnnnnnnngaaaagaaggcaggagcnnnnnnnnnnnnnnnnnggggccgttgccggnnnnnnnnnnnnnnnnnnnnnnnnnnnnnnnnnnnnnnnnnnnnnnnnnnnnnnnnnnnnnnnnnnnnnnnnnagaaacgggggggaatctttttacacacaaagaaagagcgcgggcccaaaagagaaaatggcgggtgggaaattacgccgc

SEQ ID NO: 73637 - DNA, 841 bp, Homo Sapiens
  misc_feature (689)..(726): n is a, c, g, or t
ctcccagccagtggtcctttccacagcctttctgtcccttaaaacacctgcaactgggggagaaatgggacccatgggagggggagtcgtcatcccttacacaagaaatagccactttccttttgttgtcattcttgtgatcctgggtgggtttctgtggcactcctttagaacatgtagcatcatcttagaggtctatttttaaaaaatgtgttgaagaggaaaaaaccattctcacgatggggcttaagtcattgtccaggaataagattggcgtggtgcccatgacatcaccgtcactctgcctaaaagcactctagagctacttgttcacgtggagaggaaggatattttgcgaagcaacagccgcaggtggagagccctgttcacctgatagggtctagctgtgacagtaaatataataccgctgtttccttgggtacagatttgagtgttcatgtgatgagactgtaaacctcatttttcggttcctctgtttaaaaaaacatctgaaggatgaactaaggctgctggtgccctgagcaactgataatgcaaatgtggacaaagtgtctgttttctactctagcctgttcatatggaccaaatttcaacaaggaactcaaggaaaatttgtacctgccgtatttatgctttcatgtaaaaaagggttggggggaggggtgtcnnnnnnnnnnnnnnnnnnnnnnnnnnnnnnnnnnnnnnccactgtttctgtctggttttaaaacaaattacagttttgtatggattttttaaatgtacattttggaacaaatgatcaaatattttttgaaataacaataaaaggcagaaaatt

SEQ ID NO: 73638 - DNA, 1233 bp, Homo Sapiens
  misc_feature (1004)..(1004): n is a, c, g, or t
acaggccttcctcctggtccacctccaggagctcctccattcctgagaccacctggaatgccaggactccgagggcccttaccccgacttttacctccaggaccaccaccaggccgaccccctggccctcccccaggtccacctccaggtctgcctcctggtccccctcctcgtggacccccaccaaggctacctccccctgcacctccaggtattcctccacctcgtcctggcatgatgcgcccacctttggtgcctccccttggacctgccccccctgggctgttcccaccagctcccttgccaaaccctggggttttaagtgccccacccaacttgattcagcgacccaaggcggatgatacaagtgcagccaccattgagaagaaagccacagcaaccatcagtgccaagccacagatcactaatcccaaggcagagattactcgatttgtgcccactgcactgagagtacgtcgggagaataaaggggctactgctgctccccaaagaaagtcagaggatgattctgctgtgcctcttgccaaagcagcacccaaatctggtccttctgttcctgtctcagtacaaactaaggatgatgtctatgaggctttcatgaaagagatggaagggctactgtgacagcttttgatgccagaaaaggcttctgttcacaacagtggcccatggagaaagaggctcttattaaacttagatgaaagagctgcttccattgtcagggtattttctaatttcagttcaaggaatatcctaaaatttagccttgttcagaatttactgcacataaaaaagggtatttcatccagaatagatcagttattgaagcagtgctgctaacatccattccctttcataccaccattttcaccctgtttcttcccctcctccagttctttggaaatttgtgatcgggggatcttagttgcttatttgttttgactcttgtgtgctgtgggcactggagtagagatttctggagnaaaaaaaacagtttatttcatcttgccttttgtgtttgagttatttttaatattttcctgtaaatattttgtaatattttacttgtaatgaaatggatcacaatgtcatttcctaatacaaggcaggatatgtgggaagaatatgtacaattatttgattaaaattatttcccactgacctaaactttcagtgatttgtgggaaaaataaataaatgttctacaccaag

SEQ ID NO: 73639 - DNA, 643 bp, Homo Sapiens
tgggctcctaaatgaccaatacacatgtgctatactggtgccaagaaagaagggtttttgtaggaaagtcaaggtgagaggaggtgcccaggacttggctcctttctgtgaagggtgacggtgtaaattctccatgctggggatcctactgatggatggaggcatgtcgatctcatcatttcacagagtggggagctatggccacaacgtgcctatcacacaagtccagcctcacgtcagctggacaccagctgttctgacacttgtcagcacatggggcacccggaagttcatggtgttctgcaaagaacgccacaaaacagtgagctcaacttcttgaaagtcataatgtgttgctaagtccgatcccagatcctaaaaataatatgaggtagtggccattgaacagaaaaaatttacatcttaaacttgaagataagtacaagtgtacctttttctaccactgttgttcagttttattatattgacaagcacctctgcccaccctgtggggtaaaactgtttgaaagtgtttatgaaagttttatataaatattggttgatcaaatgtacaaaatatgcatgatggcaccatattgtgtataatagtgacaaatacagtctatgtgggtggagaaacaaa

SEQ ID NO: 73640 - DNA, 1649 bp, Homo Sapiens
  misc_feature (282)..(313): n is a, c, g, or t
agagagcgagcgccctttagcggcctgccaccacagcacgcggcctcctgatccggaagcacgcagcatgttccctgctgagcggaggcagcccacctgtcctgcctcccaggagcccttggccacctcgcgccagcccaaaggcgcagctctgagttcaaagccaaatgtccccactaccccagggatcccccagctcccccagcccctggcttcctgaccctgcgcctcaccctcagactggtgaccaggcttctgaaagccattctggatcagttggcnnnnnnnnnnnnnnnnnnnnnnnnnnnnnnnnctaagagatttgcaatgcaaggtctccttgaccccttgccacaactggaaacacttgaaaggggaccccagggccagctgtttcaggggtttcctggaccacccactgcttctccccaaccctgatgcgctgacattcccttagcaccagctgtcccacctccagggtcctgaccaggtcagagatgtcccctgccatgcagagcaggaagcctcagctgggcctggagtgtccctgctccagccctgccagggacaggtttctccctggatactcttggcccaccgcagatctgtagccagtcagaggaggaggagaaggagcccctcagcagagtggtgcagtttcgctcagagcttgtctccttggcttccaaccccagaaatgcctgctgggccttaagctttccaggggccggggcagtggggagcccccatcccttcacaccgccaccaactaaccaagcttggcctctgactcccgtctctgtgcttgcccccatctcagggaccatgatgtctcagtcactccacgctccccacaggccaaccctggcacaggtcatgtctgcagcccccagaatgttctggacatgcaccaccagccggtggtcccaatgtccacccctgcctccccttcactggggactggggttttcgccccatgctgcatcgtgttgtattgggatggggctgaggaacatgctccctccctccctcccataaaatgcctgctcttcacctcccacctttgtggggggcttttgaggacccagctgcgtcaggagttttgcttcaagatgtcagaaagtcaagttcagctaagagacacccaggtccccagcttgccctgagcagcccttcagggcttctggttccttctgccgcccttcctgagaccttagaaaccagaagagccatacagtcagtggaaggcgggggggccctggcctctgcaccgggatcccagtgggaaccttcatgccttatttatttctaatgggtaaaggggttttcttaccaagcatccctgacctcctggagacaccacctgctttccgggcggcactgtgatgggagctggtggcgactgagtccttctgtacgtgcaactgggaaacttttgtcctttgaggctaggcagctccctgccctccgtgtgtgtctgttatctgggggagaggagtgtggaagggttgggggaagagctccagcctgtctgctccccagctctgtagtggcagaccagcgtcacctttgaagtatacgtgagagaaatatatttacaaatgctttattctcttctttaataaaaaatgcaccagtattctaaaagc

SEQ ID NO: 73641 - DNA, 716 bp, Homo Sapiens
gcacgaggagaggagagcagcttttgccatcagtcactttacaaaccatttcaaggaaggacaacctctctggctcctgacacaagccagccctcggtgctttaatctgttgtggtggtttttcttctttccctttttaaaagacgcatgaccaagacaacctagggagtttgtcttgcttgcctttgactatttccttaatccaaccatgctctcgagggctgagcagagactagactcaaggcacaggtttctggtgatggagtaaagttacagcggtatctcatgtctacacaagaagaggaacgttctgaaagctccaacaacttcttgagggggatggaccaatacagctttgggctcaggattccctagcctcctctgcccatcgcgtgcactgattggaggagtctggcccaaacactctcatatgaacctcgacatgctggagtggggtctggcaggagctgatgacagtttgagggacttgagtgtccctagcctggcagttggctcccggaagcactagacactgacactcattggtagaccctccctccccgccgttgtgtttggttcttttgcactccatgtactgcagaaggatggaaggacctgggtgctggctgggctgtgtatactgtgtatacaagggagctggctgctgaggtgaccacagccttctcctaataaagctgtaagtatttaaaacctgg

SEQ ID NO: 73642 - DNA, 1224 bp, Homo Sapiens
  misc_feature (1146)..(1163): n is a, c, g, or t
tcagtgcaataagaaagatgacttacttcacaagttggatattggattccgactcgactcattacataccatcctgcaacaggaagtcctgttacaagaggatgtggagctgattgagctacttgatcccagtatcctgtctgcagggcaatctcaacaacaggaaaatggacaccttccaacactttgctccctggcaaccactaagatatgggaaaactcaataaaaattgactacagaagagtgaaagtaataaatccgccacaacagacaatgaaataagtaggactgagtatttatgtgaaaactctctagaaggtaaaaataaagataattcttcaaatgaagtcttcccccaaggagcagaagaaagaatgtgttaccaatgtgagagtgaagatgaaccacaagcagatggaagtggtctgaccactgcccctccaactcccagggactcattacagccctccattaagcagaggctggcacggctacagctgtcaccagattttaccttcactgctggccttgctgcagaagtggctgctagatctctctcctttaccaccatgcaggaacagacttttggtgatgaggaggaagaacaaataatagaagaaaataaaaatgagatagaagaaaagtaagaaccaagattcatatgaagtgatattagattgttccttttacaaaagtgtttagcttcaagactggaaagggaatatgagtgtaagtttactatatataaagctaagatgtggatttacaggaagaaccctggtttgaataactgatctgaaattagtagttacctgtaaatggcagatcttttaggaaaataagagaaaggtaagggctcttttgaataaactgctgttttatttgtggcacaactgatcaatcttggaaattctttaagtatttttaataagaaatgaattatcatttcttgccagaatttgctaccttaaggtgattgggaaaattctgttgcaagaacattaacatttagtatgactcctttttactgtattcttgcagttaataactgcagctattatgttaataacaagttgtttgtattttatttttgtttataccagtcttaaagatccaggttctgaataaaaaaattaattgatacnnnnnnnnnnnnnnnnnngcctacagccgcggccgcaagcttattccctttagttgagggttaattttagctatggcac

SEQ ID NO: 73643 - DNA, 612 bp, Homo Sapiens
aaagaacaagaacaggacaaggacaggggctccaacaggcagagctccctaaccgttccccaggctttggaatcaagaaggagaagacaggctgggacacgtcagaaagtgagctgagtgagggtgagctggagaggcggcggcggacactcctacagcagctggatgatcaccagtgacccaatgagctgttctctgcctcgggtctgtgtgaggccatggctcctgggccaccctcaccgtctgcctcagacttcttccttagtctggtctgtgtccactttttctaaagtaaccccacccccagcacaccattgttggcacctctcaaggttgctcttggtgttcaagggtcccctactccctggactagtgcagtccttgccctcagccccagaccagagatgggtggtatatgccatgtggggtgggtgatgccagtagataaaagtgtgagagaaggggtctccagggaagagtcacaggctgttggacgcagcctgggtggcagagggcagggtcatcaccctctagcatcagtgcctgctcctgcctgccctggccctgaggctccaccacttcttcctccacccaggacctaatgtacgtgtg

SEQ ID NO: 73644 - DNA, 1013 bp, Homo Sapiens
  misc_feature (667)..(832): n is a, c, g, or t
  misc_feature (835)..(933): n is a, c, g, or t
actttaaaaggattaatctgggcagacattatgtaaaaggaaaggttgcgtctaatatattttttgaactttgtaggacaaaacatagctggttaaccttgaagtgactgttgtaccactggttgtgcacatgcttcagaatcctatggaagagaatattcctacttgcagtacatcaaaggaatggatggtggaccctactattcatgttttgagacataaatgttcactttaaagcaattgcataatagataaaaacctgaactttcattggatttttgttaattttcctcattttgaattatgtgcactaccatagctacatcagtttgatacagtattgaaaaattatcagttatattttgctgtttatgatctatttgtagattaggattaaaatggatttaatccatttttaaggctgtgtgaatttttctaaacaagaaccatttgcaatatggatttcttagagattaaaccaattataacttattagcagtcgcgagcacatgttcatatagtcaatgtaaaaatacactaatgagtatttggtaaatcccagtaggcttttaccattagcataattttgtgttgtacaattaagttacaattacatctctaattttggataatattcattggttaacaataaagtgacaaaagctcnnnnnnnnnnnnnnnnnnnnnnnnnnnnnnnnnnnnnnnnnnnnnnnnnnnnnnnnnnnnnnnnnnnnnnnnnnnnnnnnnnnnnnnnnnnnnnnnnnnnnnnnnnnnnnnnnnnnnnnnnnnnnnnnnnnnnnnnnnnnnnnnnnnnnnnnnnnnnnnnnnnnnnccnnnnnnnnnnnnnnnnnnnnnnnnnnnnnnnnnnnnnnnnnnnnnnnnnnnnnnnnnnnnnnnnnnnnnnnnnnnnnnnnnnnnnnnnnnnnnnnnnnnggagaagaaccgcgccggggggacccccccggcgcaaaaaaaggcacacacgagggaaaccgggggggcggggagggccc

SEQ ID NO: 73645 - DNA, 2806 bp, Homo Sapiens
  misc_feature (163)..(222): n is a, c, g, or t
cgtcgccattcccggagcaggtcggcctcggcccaggggcgagtatccgttgctgtgtcggagacactagtccccgacaccgagacagccagccctctcccctgcctcgcggcgggagagcgtgtccggccggccggccggcggggctcgcgcaacctccctnnnnnnnnnnnnnnnnnnnnnnnnnnnnnnnnnnnnnnnnnnnnnnnnnnnnnnnnnnnngcctcctcgtcctcggtcgccgctgccgccgggcttaacagccccgtccgccgcttctcttcctagtttgagaagccaaggaaggaaacagggaaaaatgtcgccatgaaggccgagaaccgctgccgccgccgacccccgccggccctgaacgccatgagcctgggtccccgccgcgcccgctccgctccgactgccgtcgccgccgaggcccccgttgatgccgctgagctcccccaacgccgccgccaccgcctccgacatggacaagaacagcggctccaacagctcctccgcctcttcgggcagcagcaaagggcaacagccgccccgctccgcctcggcggggccagccggcgagtctaaacccaagagcgatggaaagaactccagtggatccaagcgttataatcgcaaacgtgaactttcctaccccaaaaatgaaagttttaacaaccagtcccgtcgctccagttcacagaaaagcaagacttttaacaagatgcctcctcaaaggggcggcggcagcagcaaactctttagctcttcttttaatggtggaagacgagatgaggtagcagaggctcaacgggcagagtttagccctgcccagttctctggtcctaagaagatcaacctgaaccacttgttgaatttcacttttgaaccccgtggccagacgggtcactttgaaggcagtggacatggtagctggggaaagaggaacaagtggggacataagccttttaacaaggaactctttttacaggccaactgccaatttgtggtgtctgaagaccaagactacacagctcattttgctgatcctgatacattagttaactgggactttgtggaacaagtgcgcatttgtagccatgaagtgccatcttgcccaatatgcctctatccacctactgcagccaagataacccgttgtggacacatcttctgctgggcatgcatcctgcactatctttcactgagtgagaagacgtggagtaaatgtcccatctgttacagttctgtgcataagaaggatctcaagagtgttgttgccacagagtcacatcagtatgttgttggtgataccattacgatgcagctgatgaagagggagaaaggggtgttggtggctttgcccaaatccaaatggatgaatgtagaccatcccattcatctaggagatgaacagcacagccagtactccaagttgctgctggcctctaaggagcaggtgctgcaccgggtagttctggaggagaaagtagcactagagcagcagctggcagaggagaagcacactcccgagtcctgctttattgaggcagctatccaggagctcaagactcgggaagaggctctgtcgggattggccggaagcagaagggaggtcactggtgttgtggctgctctggaacaactggtgctgatggctcccttggcgaaggagtctgtttttcaacccaggaagggtgtgctggagtatctgtctgccttcgatgaagaaaccacggaagtttgttctctggacactccttctagacctcttgctctccctctggtagaagaggaggaagcagtgtctgaaccagagcctgaggggttgccagaggcctgtgatgacttggagttagcagatgacaatcttaaagaggggaccatttgcactgagtccagccagcaggaacccatcaccaagtcaggcttcacacgcctcagcagctctccttgttactacttttaccaagcggaagatggacagcatatgttcctgcaccctgtgaatgtgcgctgcctcgtgcgggagtacggcagcctggagaggagccccgagaagatctcagcaactgtggtggagattgctggctactccatgtctgaggatgttcgacagcgtcacagatatctctctcacttgccactcacctgtgagttcagcatctgtgaactggctttgcaacctcctgtggtctctaaggaaaccctagagatgttctcagatgacattgagaagaggaaacgtcagcgccaaaagaaggctcgggaggaacgccgccgagagcgcaggattgagatagaggagaacaagaaacagggcaagtacccagaaagtccacattcccctcgagaatctacagcagtttcctgccttcaattcttatacctgctcctctgattctgctttgggtccacccagcaccgagggccatggggccctctccatttctcctctcagcagaagtccaggttcccatgcagactttctggtgacccctctgtcacccactgcagtcagggcagtccctcattctgcgtgggagtctggaagaagactctccttcccttcctttgccagatgctgagggttggaaaagcaaaagcagatgtgtggcccaaaaactgctccaaagacaggatgggaacacgttaagttcctactggccctgtgggacagcgacggggaaaagtggtaattcagaaccgggttcctgggccaggtttcaaaatccctcggcaagcaatgaaagcttcatggaactggaccaccagtaatataatccctcttgagcagacgggggac

SEQ ID NO: 73646 - DNA, 571 bp, Homo Sapiens
agagtatgaagtcgacggcgcgccgaattcggcacgaggcgactcgtcgccattcccggagcaggtcggcctcggcccaggggcgagtatccgttgctgtgtcggagacactagtccccgacaccgagacagccagccctctcccctgcctcgcggcgggagagcgtgtccggccggccggccggcggggctcgcgcaacctccctcgcctccccttcccccgcagcctccgccccgccaggcccggcccggactcccgagccccggcctcctcgtcctcggtcgccgctgccgccgggcttaacagccccgtccgccgcttctcttcctaatttgagaagccaaagaaggaaacagggaaaaatgtcgccatgaaggccgagaaccgctgccgccgccgacccccgccggccctgaacgccatgagcctgggtccccgccgcgcccgctccgctccgactgccgtcgccgccgaggcccccgttgatgccgctgagctcccccaacgccgccgccaccgtctccgacatggacaagaacagcggctccaacagctcctccgcctcttcgg

SEQ ID NO: 73647 - DNA, 1173 bp, Homo Sapiens
  misc_feature (683)..(718): n is a, c, g, or t
  misc_feature (793)..(813): n is a, c, g, or t
  misc_feature (979)..(979): n is a, c, g, or t
  misc_feature (1061)..(1071): n is a, c, g, or t
gggtcacagatatctctctcacttgccactcacctgtgagttcagcatctgtgaactggctttgcaacctcctgtggtctctaaggaaaccctagagatgttctcagatgacattgagaagaggaaacgtcagcgccaaaagaaggctcgggaggaacgccgccgagagcgcaggattgagatagaggagaacaagaaacagggcaagtacccagaagtccacattcccctcgagaatctacagcagtttcctgccttcaattcttatacctgctcctctgattctgctttgggtcccaccagcaccgagggccatggggccctctccatttctcctctcagcagaagtccaggttcccatgcagactttctgctgacccctctgtcacccactgccagtcagggcagtccctcattctgcgttgggagtctggaagaagactctcccttcccttcctttgcccagatgctgagggttggaaaagcaaaagcagatgtgtggcccaaaactgctccaaagaaagatgagaacagcttagttcctcctgcccctgtggacagcgacggggagagtgataattcagaccgtgttcctgtgcccagttttcaaaattccttcagccaagctattgaagcagccttcatgaaactggacacaccagctacttcagatcccctctctnnnnnnnnnnnnnnnnnnnnnnnnnnnnnnnnnnnncagaagctcctgttcagcacctcagtcgtccacaccaagtgacactactggcccaggctaccttctccatctggnnnnnnnnnnnnnnnnnnnnncccccatgcttttgtttggctgctgtaatttttaagtatttgagtttgaacagattagctctggggggagggggtttccacaatgtgagggggaaccaagaaaattttaaatacagtgtattttccagcttcctgtctttacaccaaaataaagtattgacccccnaaaaaggggcgcttactacaaaccaaccctgttgggccgccctcggcccctgcgaaaagctttctaccacctttcccttttnnnnnnnnnnnccccagaaggttaggggaacaaggtccatagcttggttcccatagagaaacccctgggccatgaacttggggcctggaattcctcccccaatggaaaagcgc

SEQ ID NO: 73648 - DNA, 632 bp, Homo Sapiens
  misc_feature (336)..(378): n is a, c, g, or t
  misc_feature (446)..(466): n is a, c, g, or t
gcggccgctccaacatcagaatgagggactgccctgactggcagtgggtgacagagggcagtccctcattctgcgttgggagtctggaagaagactctcccttcccttcctttgcccagatgctgagggttggaaaagcaaaagcagatgtgtggcccaaaactgctccaaagaaagatgagaacagcttagttcctcctgcccctgtggacagcgacggggagagtgataattcagaccgtgttcctgtgcccagttttcaaaattccttcagccaagctattgaagcagccttcatgaaactggacacaccagctacttcacatcccctctttnnnnnnnnnnnnnnnnnnnnnnnnnnnnnnnnnnnnnnnnnnntcctgttcagcacctcagttgtccacaccaagtgacactactggcccaggctaccttctccatctggnnnnnnnnnnnnnnnnnnnnncccccaggcttttgtttggctgctgtaatttttaagtatttgagtttgaacagattagctttggggggagggggtttccccaatgtgagggggaaccaagaaaattttaaatacagtgtattttccagcttcctgtctttaccccaaaataaagtattgacccaag

SEQ ID NO: 73649 - DNA, 412 bp, Homo Sapiens
cctttttgggtacagctgtaaaatatttggatataggaaatgttgtgttattcttgcagccttgatattcagggtggattgtaaaatataaatttttgtgagatttcaaagattaagattattttgataacattatttacagatttaaaagatgtggttatcacaagtctcgagggggaaactactgcataaaataactaacttggaataaatattttgcatcagtttggattgtcttgtgtaagaagtatattttctttaaaattagatgagtggattcttttttaggggaaatatttttagaagttggggggaaatgtgaattcagacacaactgtttctctattttagcagatacttttttgatgcagaaaaacctgtgcaataaattaccagtaataaacctcgtgcc

SEQ ID NO: 73650 - DNA, 973 bp, Homo Sapiens
  misc_feature (88)..(88): n is a, c, g, or t
  misc_feature (101)..(101): n is a, c, g, or t
  misc_feature (103)..(103): n is a, c, g, or t
  misc_feature (134)..(134): n is a, c, g, or t
gacccatcgtccatggatacgtgccgatgtttccgatggattgactgttgacatgtgtgagcagtgcatctcgagacatgctgttgcntacatccttgtcncntgtgactgctgacgtgctcctgattgaatcntctttatggctagatgcatcagctgtgggatctcagccgtacgtgagggatggtggctttctacatagtgccagccatgaagatgattagagtgcagcctgtgcagagagagactgagactgactgcagaggcccaagaccaggggtcctcatctcctaggagtcccgggctcagctctgccactttgtcaccatgtgcatcttcacatgcacaggtcagcatgcttctaaccacctgggccagctggactggtactcctggatccctaatggcccatgcaccatgcagaagcccccgcccatctctaaggatgtgacagagaaggatatagtggacttactgcccaatctccaccagcatgaggagaaatatttctctggtcctgagccccaagctgtgctgagacaattccaggaggaactggcttccatggacaaggagattgaggtccggaatgcagtcctggacctgccctgtgagtacctttgacccagcatggtagagaacagcgtgaccatctgagaggccttgcccgcctcagctccaaagctccaccatccctgagtgcctttgagtattccgtcctcctcacatcctctggtgaacaaattgtccccaaagctttgtggtcagggtatccagagctgctcaccacacaactatggggaatacacagtgatggtccccattgcatttggaagtggcatcccccaaagctgccctaccttaaatgtccatccagtcctgcacttcctcaccccgatccctgcacacctcctcattgccaaaggacctggcttagatacaagtaaaaatatatgattaaataacaaaacgg

SEQ ID NO: 73651 - DNA, 758 bp, Homo Sapiens
ctctggctctggggcttggggcttctcaggatcctggatggcagagactgccctcagaagttccttgtccaggtgggcacccacagtgactcagaggacagggctaggcaggagacctgctgctcctcattggggggatctcttggggggcagacaccagtttgccaatgaagcaacacatctgatctaaagactggctccagaccccgggctgccaggattatgcagtccacttggtctaccttaatttaacctgtggccaaactcagagatggtaccagccaggggcaagcatgaccagagccagggaccctgtggctctgatcccccatttatccaccccatgtgcctcaggactagagtgagcaatcataccttataaatgacttttgtgcctttctgctccagtctcaaaatttcctacacctgccagttctttacatttttccaaggaaaggaaaacggaagcagggttcttgcctggtagctccaggacccagctctgcaggcacccaaagaccctctgtgcccagcctcttccttgagttctcggaacctcctccctaattctcccttccttccccacaaggcctttgaggttgtgactgtggctggtatatctggctgccatttttctgatgcatttatttaaaatttgtactttttgatagaacccttgtaagggctttgttttcctaatagctgactttttaataaagcagttttatataaaacaaagcccttacaagcgttctatc

SEQ ID NO: 73652 - DNA, 2459 bp, Homo Sapiens
ctgaggcctcgcacaggggatcgactggaataggggtgtgtctgaagtgtgcgcgctaagggtgggtgcatggtcttctgcggttttggtaatctctcacgtttgtgggctcaatgtgtgtggtaagaatcgccggtgttccgtggagataaacaaaaaaggtgtcgccccctggccccggatgtgggggcccattgatgtggggcggacccgggtagagcccaaatttatttaccttttaggccgggggcgcggggggttcattccccggtaaatcctagccattttggggaggctggaggcgggcggatttccaaattcaggaggttggagaaattatttacctattaccccatttggttatttttccccttgtaaggaaggaagctcagaggtcacacagctagtaagaagccagcacctttcgatgtgggattgaggtggaggataggcatatacagagaacacaaaagcaaaacgccatggtgcagattttgaaagaaaagccctaagattagtaatgagtgtgaattattcaacaaagtgatcaaaactaactccagctctgcattcctcttcgccatcaggagtttggagcctggagactgctagctgcctggttctttaagaaccagccctggtccagcccattccgcaggccagcaagcttctgaaaagcaaacctaggaagtagctttccaacataaagtggaggtttcaacacaggagactttaagcaagttccagtgtgtctatatttggtctggctgatcggctggactctggccttccccgctcacgttagcagacagctctgccctagtgggcgcttagcctgcgacggcagcccgagaggatgtctaacaagcttctttctccccacccccattcagttgttctcaggtctgaattcaaaatggcctcatctcctgctgtccttcgagcgtcccggctgtaccaatggagcctgaagagttcggcgcagttcctggggtctccacagctgaggcaggttggtcagatcattagggttcctgctcggatggcggcgacgctgatcctggagcctgcgggccgctgctgctgggacgaaccggtgcgaatcgccgtgcgcggcctagccccggagcagccggtcacgctgcgcgcgtccctgcgcgacgagaagggcgcgcttttccaggcccacgcgcgctaccgcgccgacactcttggcgagctggacctggagcgcgcgcccgcgctgggcggcagcttcgcggggcttgagcccatggggctgctctgggccttggagcccgagaaacctttggtgcggctggtgaagcgcgacgtgcgaacgcccttggccgtggagctggaggtgctggatggccacgaccccgaccccgggcggctgctgtgccagacgcggcacgagcgctacttcctcccgcccggggtgcggcgcgagccggtgcgcgtgggccgggtgcgaggcacgctcttcctgccgccagaacctgggccctttcctgggattgtggacatgttcggaactggaggtggcctgctggagtatcgggctagtctgctggctgggaagggttttgctgtgatggctctggcttattataacctatgaagacctccccaagaccatgggagacgctccatctggagtactttgaagaagccatgaactactttgctcagtcatcctgaggtaaaaggtccaggagttgggctgcttggaatttccaaagggggtgagctctgcctttccatggcctctttcctgaagggcatcacggctgctgtcgtcatcaacggctctgtggccaatgttgggggaaccttacgctacaagggcgagaccctgccccctgtgggcgtcaacagaaatcgcatcaaggtgaccaaagatggctatgcagacattgtggatgtcctgaacagccctttggaaggacctgaccagaagagcttcattcctgtggaaagggcagagagcaccttcctgttcctggtaggtcaggatgaccacaactggaagagtgagttctatgctaatgaggcctgtaaacgcttgcaggcccatgggaggagaaagccccagatcatctgttacccagagacagggcactatattgagcctccttacttccccctgtgtcgggcttccctgcatgccttggtgggcagtcctattatctggggaggggagcccagggctcatgccatggctcaggtggatgcttggaaacaactccagactttcttccacaaacacttgggtggccacgaggggacaatcccatcaaaagtgtaaattttatttgatcatgtggcctctctgttgctaatctctcctggaaacatctgccacatttagtgtgtgtatgtgtattcattcttttgtttttaataactaaagttttttcccctcattattaaaatgaatttaccagtaagaatga

SEQ ID NO: 73653 - DNA, 680 bp, Homo Sapiens
  misc_feature (65)..(247): n is a, c, g, or t
ttttaatatctaaaaccattgttgtaagatttaggtagaggaggtttccttttgtgtgatgcatnnnnnnnnnnnnnnnnnnnnnnnnnnnnnnnnnnnnnnnnnnnnnnnnnnnnnnnnnnnnnnnnnnnnnnnnnnnnnnnnnnnnnnnnnnnnnnnnnnnnnnnnnnnnnnnnnnnnnnnnnnnnnnnnnnnnnnnnnnnnnnnnnnnnnnnnnnnnnnnnnnnnnnnnnnnnnnnnnnnnnnnttaacctaggcagattacttcagagtcagcgtctgccttactatcctgtttcctgagcaggaatttccccttgtgtcaggcaacactaggtgttaggagtggaggtgtgcagatgttgccttacattctgttttcctgatgtggtgtgcttcctaagagtacaaacctgagcatatgtccaggcttgcaaagtctcaggcaaagctgggactaaggcttgtgtttcctgccttgggtaggattttcttctatgcatgttgggtgcttctcacttaacctaatagtatgccttgtctgttttccccccttcccctttttgtttaaattgattcacagaacacaaaaatttactaggtatgaacatttgaaaaaatggaatagagaaaatggtacatcacatgtaataaagataaatattgttttgtgaaaaaaa

SEQ ID NO: 73654 - DNA, 649 bp, Homo Sapiens
taatgattctgtaatgtatgaattatgttcttgagtggttaaaaaagaatatgaaggcttgataattatttattgggtaaagtcaggaaattgtagtgaaagaactaatggttttgttttttggaataaaggcacctaagctattgctaattgaattgctgctagaattagaaattatgctttagaatagaattggtatttctgtgattctttttgcttcttggtattttctcttgtatctatgtatctagtattgaggcttgctctttcatgtggctttatcctctctttaatagctgttgtaaaattcctgagtaactggctgcttcaggatcagcttgcagagtcttgcttttaggttagatacaaacaaagtaaatcatagttggtgtaaatccagcaaaaaacagctggctttggaatggagaacactacaattcaaatttgaagtatattcagaagaaaactttggaattagctttacatttgtttgtaaatctaaacaaatatgcaaaattggtcaaaatgtaagtatatagcatttttaaagattaatggttccttttatgtgctgatttctttgtattctgttctctgcattcatcattcaggaataccaccaataaatgtatttatatatcccttaaaa

SEQ ID NO: 73655 - DNA, 1308 bp, Homo Sapiens
  misc_feature (89)..(89): n is a, c, g, or t
  misc_feature (164)..(165): n is a, c, g, or t
  misc_feature (175)..(175): n is a, c, g, or t
  misc_feature (178)..(178): n is a, c, g, or t
  misc_feature (181)..(182): n is a, c, g, or t
  misc_feature (339)..(355): n is a, c, g, or t
  misc_feature (1167)..(1167): n is a, c, g, or t
  misc_feature (1243)..(1243): n is a, c, g, or t
  misc_feature (1245)..(1245): n is a, c, g, or t
gggggaggaatccccaaggccctaagttcatgggccagggatttttcttagggaaaccaggctatgacccatggtttcacttacccttncggggcccgccgcgcccaaacgaaaggttcttaaaaagcttttcggagggccgagggcggccgacaaggtttttnntttttttcgnttnttnnttttacccaacacttgccaacaggcttttatttagaactaatgaacttgtaggtggaatcaggaagatcacaaacagagggttaaggataaatggaaacgatcactaattggactcgccaaaagacagactgtcgccttcaggaaaataaaaaaacnnnnnnnnnnnnnnnnnaagaatcacagcaatccaagcaaagtacctcactgagtaggtatcaagacccttcaggcagaattccatcattctcgcaattagtgacagggacgctggttgtggaggagtatttggagtggtggcagaaaattgcatcggcatttccagcttgagtaggtcttatcttcttagcggatgctcagaagccaaggtctggatgcagtcggtcagttgcaaataacagctcaggaatgttaagtggcttcaggagtcgtgtggacagcacgattacctgggttcctggcttcaacgatgccacaagatctttgaccattttcacttcagagactgtgaccccacctaccacaaagaggatcaggagggggtagtcactaggatgaggccggctcaccttcatgaacatgctaaatccagttttaaggagatcagtgaggcctgaagacatgtgttcaatatcaacggaatctggcctctcgggatgaaatatttcctccacaacttgcttcaacaatggcttataagatgcctggtgggtatgatttccaggaacatatacagacttaaactgtttcaggagactccgagctccagcaatatcccgaagtgaagtaaagagttcatccacggcaattttggatttgtgaaatgtcagattaattgaagagtcccagtccgtaattttttgcagcaaaggtgacaatccagattcctcacagaagactgagccatgcttctgacttttctctgctcaacggtcttgtctacgtgactctcagtgcagataatattatgagaggtcacagtctcangtgtatctcgtggtcctggtacagctatcgggagagtgataacacgaatgtgatccatgtctagaggactcaagcnantgtcactggatcgggtttcacttgcgtgcatcactgggagaatatcaaatttagttctagatg

SEQ ID NO: 73656 - DNA, 601 bp, Homo Sapiens
  misc_feature (150)..(150): n is a, c, g, or t
  misc_feature (199)..(199): n is a, c, g, or t
ctttaaaacaaaataaggtgaaatacgaagtccttggtctgatataaagcccctattggattcttcggatgcgtaaaagaaattgcctgtttcagccagaagactggtgaaaacacatacatcagactatgttgtgagcccaggtggatntttttattttattatatgccaggtgagtgttgaaactgttaaaattccnaatttgttttcattccagtattagtttagttctaaatatagcaaaccccatccaggtgctatcagatgaccagttactgcttagttaactaggtgtaaagttttacatatacattaatgtcaatagtttattacaagttgtgtaaaatggactctagtttaataatgggggaaaaaagattaggttgctcctgaaactgactgtagagcatgtaaaatgattttactggattctgttcaactgtaatcaatgaaaaagatgtacgttgtagacaaagttgcagaattaaaaaaagaaatctgcttttaatttattctttttgtattaagaatttgtatagtatctttacattttgcaaaacagtgttgtcaacacttattaaagcattttcaaaatgaaaag

SEQ ID NO: 73657 - DNA, 1281 bp, Homo Sapiens
tgaggccggaacagctgggggacatctgtgtcggaaatgtgctgcagcctggggccggggcaatcatggcccgaatcgcccagtttctgagtgacatcccggagactgtgcctttgtccactgtcaatagacagtgttcgtcggggctacaggcagtggccagcatagcaggtggcatcagaaatgggtcttatgacattggcatggcctgtgggataacctttgagaatgtggctgagcggtttggcatttcacgggagaagcaggatacctttgccctggcttcccagcagaaggcagcaagagcccagagcaagggctgtttccaagctgagattgtgcctgtgaccaccacggtccatgatgacaagggcaccaagaggagcatcactgtgacccaggatgagggtatccgccccagcaccaccatggagggcctggccaaactgaagcctgccttcaagaaagatggttctaccacagctggaaactctagccaggtgagtgatggggcagctgccatcctgctggcccggaggtccaaggcagaagagttgggccttcccatccttggggtcctgagtcttatgcagtggttggggtcccacctgacatcatgggcattggacctgcctatgccatcccagtagctttgcaaaaagcagggctgacagtgagtgacgtggacatcttcgagatcaatgaggcctttgcaagccaggctgcctactgtgtggagaagctacgactcccccctgagaaggtgaaccccctggggggtgcagtggccttagggcacccactgggctgcactggggcacgacaggtcatcacgctgctcaatgagctgaagcgccgtgggaagagggcatacggagtggtgtccatgtgcatcgggactggaatgggagccgctgccgtctttgaataccctgggaactgagtgaggtcccaggctggaggcgctacgcagacagtcctgctgctctagcagcaaggcagtaacaccacaaaagcaaaaccacatgggaaaactcagcactggtggtggtggcagtggacagatcaaggcacttcaactcatttggaaaatgtgaacactgatgacatggtataggagtgggtggggtgttgagccacccatcagaccctctttagctgtgcaagataaaagcagcctgggtcacccaggccacaaggccatggttaattcttaaggcaaggcaaatccatggatgagaagtgcaatgggcatagtaaaagtgcatgaatttaaaaaaa

SEQ ID NO: 73658 - DNA, 936 bp, Homo Sapiens
cggcagtactatacggtcctaaggtagcgaggcctgggtggcgaattcggcacgaggatgtggttctgcgcgtgtgcggacggctgtctgttaactccgcggtcagttcccggactggtggctggtctgcaggggttgacctgcgcaatgcagaggctgcaggtagtgctgggccacctgaggggtccggccgattccggctggatgccgcaggccgcgccttgcctgagcggtgccccgcaggcctcggccgcggacgtggtggtggtgcacgggcggcgcacggccatctgccgggcgggccgcggcggcttcaaggacaccacccccgacgagcttctctcggcagtcatgaccgcggttctcaaggacgtgaatctgaggccggaacagctgggggacatctgtgtcggaaatgtgctgcagcctggggccggggcaatcatggcccgaatcgcccagtttctgagtgacatcccggagactgtgcctttgtccactgtcaatagacagtgttcgtcggggctacaggcagtggccagcatagcaggtggcatcagaaatgggtcttatgacattggcatggcctgtggggtggagtccatgtccctggctgacagagggaaccctggaaatattacttcgcgcttgatggagaaggagaaggcagagattgcctgattcctatggggataacctctgagaatgtggctgagcggtttggcatttcacgggagaagcaggatacctttcgcctggcttccagcagaaggcagcaagagccagagcaagggctgttccaagctgagattgtgcctgtgaccaccaaggtccatgatgacaggcccaagaggagatcactgtgaccacgataaggtatccggccacaccacatgaggggctggcaactgaactgcttcaaaagcaggtctaacg

SEQ ID NO: 73659 - DNA, 696 bp, Homo Sapiens
ccaggatgaggtatccgccccagcaccaccatggagggcctgcccaaactgaagcctgccttcaagaaagatggtctaccacagctgggctgacagtgagtgacgtggacatcttcgagatcaatgaggcctttgcaagccaggctgcctactgtgtggagaagctacgactcccccctgagaaggtgaaccccctggggggtgcagtggccttagggcacccactgggctgcactggggcacgacaggtcatcacgctgctcaatgagctgaagcgccgtgggaagagggcatacggagtggtgtccatgtgcatcgggactggaatgggagccgctgccgtctttgaataccctgggaactgagtgaggtcccaggctggaggcgctacgcagacagtcctgctgctctagcagcaaggcagtaacaccacaaaagcaaaaccacatgggaaaactcagcactggtggtggtggcagtggacagatcaaggcacttcaactcatttggaaaatgtgaacactgatgacatggtataggagtgggtggggtgttgagccacccatcagaccctctttagctgtgcaagataaaagcagcctgggtcacccaggccacaaggccatggttaattcttaaggcaaggcaaatccatggatgagaagtgcaatgggcatagtaaaagtgcatgaattt

SEQ ID NO: 73660 - DNA, 1048 bp, Homo Sapiens
aaagtagcgaggcctgggtggcgaattcggcacgaggggctggtctgcagggttgacctgcgcaatgcagaggctgcaggtagtgctgggccacctgaggggtccggccgattccggctggatgccgcaggccgcgccttgcctgagcggtgccccgcaggcctcggccgcggacgtggtggtggtgcacgggcggcgcacggccatctgccgggcgggccgcggcggcttcaaggacaccacccccgacgagcttctctcggcagtcatgaccgcggttctcaaggacgtgaatctgaggccggaacagctgggggacatctgtgtcggaaatgtgctgcagcctggggccggggcaatcatggcccgaatcgcccagtttctgagtgacatcccggagactgtgcctttgtccactgtcaatagacagtgttcgtcggggctacaggcagtggccagcatagcaggtggcatcagaaatgggtcttatgacattggcatggcctgtggggtggagtccatgtccctggctgacagagggaaccctggaaatattacttcgcgcttgatggagaaggagaaggccagagattgcctgattcctatggggataacctctgagaatgtggctgagcggtttggcatttcacgggagaagcaggatacctttgccctggcttcccagcagaaggcagcaagagcccagagcaagggctgtttccaagctgagattgtgcctgtgaccaccacggtccatgatgacaagggcaccaagaggagcatcactgtgacccaggatgagggtatccgccccaacaccaccatggaagggcctggccaaactgaagcctgccttccaagaaagatggttctaccacagctgggaaactctaacccaggtggaattgatgggggcaacctgccatcctgcctgggcccggggaggtccaagggaagaaaaagttggggcctttccactccttggggggtccttgaggtgcttatattcaaaggggtttggggggtcccaaccttggacattatgggg

SEQ ID NO: 73661 - DNA, 1015 bp, Homo Sapiens
cagtcgacggtaccggacatatgcccgggaattcggccattacggccgggtatagaatggaactcaaggaaatctgtgtcagtggatgctgctctgtggtccgaagtcttccatagagactttgtgaaaaaaaattttatagtgtcttgggaattttcttccaaacagaactatggaaaaaaaggaagaaattccaggaaaatctgcactgtgggcttttattgccatgagctagaagcatcacaggttgaccaataaccatgcccaagaatgagaagaatgactatgcaacctttggatgcactttatattattttgaatccagaaataatgaaataactaggcgtggacttactatttattgctgaatgactaccaacagtgagagcccttcatgcatttgcactactggaaggagttagatgttggtactagatactgaatgtaaacaaaggaattatggctggtaacataggtttttagtctaattgaatcccttaaactcagggagcatttataaatggacaaatgcttatgaaactaagatttgtaatatttctctctttttagagaaatttgccaatttactttgttatttttccccaaaaagaatgggatgatcgtgtatttatttttttacttcctcagctgtagacaggtccttttcgatggtacatatttctttgcctttataatcttttatacagtgtcttacagagaaaagacataagcaaagactttgaggaatatttgcaagacatagaatagtgttggaaaatgtgcaatatgtgatgtggcaaatctctattaggaaatattctgtaatcctcagacctagaataatactagtcttataataggtttgtgactttcctaaatcaattttattacgtgcaatacttcaatacttcatttaaaatatttttatgtgcaataaaatgtatttgtttgtattttgtgttcagtacaattataagctgtttttatatatgtgaaataaaagtggaataaaccc

SEQ ID NO: 73662 - DNA, 829 bp, Homo Sapiens
ggaactactatccagtcaacacccggattacatcacggatggaaacatgcagctgactgtgctgactgaccgctcccagggggcagcagcctgagagatggctcgctggagctcatggtgcaccgaaggctgctgaaggacgatggacgcggagtatcggagccactaatggagaacgggtcgggggcgtgggtgcgagggcgccacctggtgctgctggacacagcccaggctgcagccgccggacaccggctcctggcggagcaggaggtcctggcccctcaggtggtgctggccccgggtggcggcgccgcctacaatctcggggctcctccgcgcacgcagttctcagggctgcgcagggacctgccgccctcggtgcacctgctcacgctggccagctggggccccgaaatggtgctgctgcgcttggagcaccagtttgccgtaggagaggattccggacgtaacctgagcgcccccgttaccttgaacttgagggacctgttctccaccttcaccatcacccgcctgcaggagaccacgctggtggccaaccagctccgcgaggcagcctccaggctcaagtggacaacaaacacaggccccacaccccaccaaactccgtaccagctggacccggccaacatcacgctggaacccatggaaatccgcactttcctggcctcagttcaatggaaggaggtggatggttaggtctgctgggatgggccctccaagcccaagcctcctgctccgggggcagaccagactctgactctcctcttggggctgctgccattaaaacgctactactaagactcaggtc

SEQ ID NO: 73663 - DNA, 2613 bp, Homo Sapiens
taggggggagagagtatgaagtcgacggcgcgccgaattcggcacgaggggaggaagctgctgagccatgggcgcctacgcgcgggcttcgggggtctgcgctcgcggctgcctggactcagcaggcccctggaccatgtcccgcgccctgcggccaccgctcccgcctctctgctttttccttttgttgctggcggctgccggtgctcgggccgggggatacgagacatgccccacagtgcagccgaacatgctgaacgtgcacctgctgcctcacacacatgatgacgtgggctggctcaaaaccgtggaccagtacttttatggaatcaagaatgacatccagcacgccggtgtgcagtacatcctggactcggtcatctctgccttgctggcagatcccacccgtcgcttcatttacgtggagattgccttcttctcccgttggtggcaccagcagacaaatgccacacaggaagtcgtgcgagaccttgtgcgccaggggcgcctggagttcgccaatggtggctgggtgatgaacgatgaggcagccacccactacggtgccatcgtggaccagatgacacttgggctgcgctttctggaggacacatttggcaatgatgggcgaccccgtgtggcctggcacattgaccccttcggccactctcgggagcaggcctcgctgtttgcgcagatgggcttcgacggcttcttctttgggcgccttgattatcaagataagtgggtacggatgcagaagctggagatggagcaggtgtggcgggccagcaccagcctgaagcccccgaccgcggacctcttcactggtgtgcttcccaatggttacaacccgccaaggaatctgtgctgggatgtgctgtgtgtcgatcagccggtggtggaggaccctcgcagccccgagtacaacgccaaggagctggtcgattacttcctaaatgtggccactgcacagggccggtattaccgcaccaaccacactgtgatgaccatgggctcggacttccaatatgagaatgccaacatgtggttcaagaaccttgacaagctcatccagctggtaaatgcgcagcaggcaaaaggaagcagtgtccatgttctctactccacccccgcttgttacctctgggagctgaacaaggccaacctcacctggtcagtgaaacatgacgacttcttcccttacgcggatggcccccaccagttctggaccggttacttttccagtcggccggccctcaaacgctacgagcgcctcagctacaacttcctgcaggtgtgcaaccagctggaggcgctggtgggcctggcagccaacgtgggaccctatggctccggagacagtgcacccctcaatgaggcgatggctgtgctccagcatcacgacgccgtcagcggcacctcccgccagcacgtggccaacgactacgcgcgccagcttgcggcaggctgggggccttgcgaggttcttctgagcaacgcgctggcgcggctcagaagcttcaaagatcacttcaccttttgccaacagctaaacatcagcatctgcccgctcagccagacggcggcgcgcttccaggtcatcgtttataatcccctggggcggaaggtgaattggatggtacggctgccggtcagcgaaagcgttttcgttgtgaaggaccccaatggcaggacagtgcccagcgatgtggtaatatttcccagctcagacagccaggcgcaccctccggagctgctgttctcagcctcactgcccgccctgggcttcagcacctattcagtagcccaggtgcctcgctggaagccccaggcccgcgcaccacagcccatccccagaagatcctggtcccctgctttaaccatcgaaaatgagcacatccgggcaacgtttgatcctgacacagggctgttgatggagattatgaacatgaatcagcaactcctgctgcctgttcgccagaccttcttctggtacaacgccagtataggtgacaacgaaagtgaccaggcctcaggtgcctacatcttcagacccaaccaacagaaaccgctgcctgtgagccgctgggctcagatccacctggtgaagacacccttggtgcaggaggtgcaccagaacttctcagcttggtgttcccaggtggttcgcctgtacccaggacagcggcacctggagctagagtggtcggtggggccgatacctgtgggcgacacctgggggaaggaagtcatcagccgttttgacacaccgctggagacaaagggacgcttctacacagacagcaatggccgggagatcctggagaggaggcgggattatcgacccacctggaaactgaaccagacggagcccgtggcaggaaactactatccagtcaacacccggatttacatcacggatggaaacatgccaacatcacgctggaacccatggaaatccgcactttcctggcctcagttcaatggaaggaggtggatggttaggtctgctgggatggccctccaagcccaagcctcctgctccgggggcagaccagactctgactctcctcttgggctgctgccattaaaacgctactactaagactc

SEQ ID NO: 73664 - DNA, 1171 bp, Homo Sapiens
ggcggagagtatgaagtcgacggcgcgccgaattcggcacgaggcgcgcgggcttcgggggtctgcgctcgcggctgcctggactcagcaggcccctggaccatgtcccgcgccctgcggccaccgctcccgcctctctgctttttccttttgttgctggcggctgccggtgctcgggccgggggatacgagacatgccccacagtgcagccgaacatgctgaacgtgcacctgctgcctcacacacatgatgacgtgggctggctcaaaaccgtggaccagtacttttatggaatcaagaatgacatccagcacgccggtgtgcagtacatcctggactcggtcatctctgccttgctggcagatcccacccgtcgcttcatttacgtggagattgccttcttctcccgttggtggcaccagcagacaaatgccacacaggaagtcgtgcgagaccttgtgcgccaggggcgcctggagttcgccaatggtggctgggtgatgaacgatgaggcagccacccactacggtgccatcgtggaccagatgacacttgggctgcgctttctggaggacacatttggcaatgatgggcgaccccgtgtggcctggcaaattgacaccttcaggcactctcgggagcagcctcgctgtttgcgcagatgggcttcgacggcttcttctttgggcgccttgattatcaagataagtgggtacggatgcagaagctggagatggagcatgtgtggcgggccagcaccagcctgaagcccccgaccgcggacctcttcactggtgtgcttcccatggttacaccccgccaaggaatctgtgctgggatgtgctgtgtggcgattagcccggggtggaggacccttgcacccccgattcaacgccaaggagctggtctatactttcctaatggtggccctgccccgggccggtttaccgcaccacctcattgtgatgacctggggctcgaacttccatatgaaaaagccacttgtgtttaaaaccttgacaactctccagctgttattctcagtcagccaaaagaggcaggtcattgttttctcccctccccttgttccctggaatggacaaggcacttactgttgggaatcgctacttttccttccggaggccccctttcggatgttttttttctgta

SEQ ID NO: 73665 - DNA, 689 bp, Homo Sapiens
aatgcaggaagtaatgtatactctagtattctggtgtttgtatatttatgtaataatttcgtaaaaccattcagacagataactatttaattttttttaagaaagttggaaaggtctctcctcccaaggacagtggctggaagagttggggcacagccagttctgaatgttggtggagggtgtagtggctttttggctcagcatccagaaacaccaaaccaggctggctaaacaagtggccgcgtgtaaaaacagacagctctgagtcaaatctgggcccttccacaagggtcctctgaaccaagccccactcccttgctaggggtgaaagcattacagagagatggagccatctatccaagaagccttcactcaccttcactgctgctgttgcaactcggctgttctggactctgatgtgtgtggagggatggggaatagaacattgactgtgttgattaccttcactattcggccagcctgaccttttaataactttgtaaaaagcatgtatgtatttatagtgttttagatttttctaacttttatatcttaaaagcagagcacctgtttaagcattgtacccctattgttaaagatttgtgtcctctcattccctctcttcctcttgtaagtgcccttctaataaacttttcatggaaaagctcctgtgccaggagctcagtctg

SEQ ID NO: 73666 - DNA, 993 bp, Homo Sapiens
atgagaatgacagtagcagtgagggggataatgattctggtcacgagttgatgcaacctggggtattcatgctggatggaaacaacaaccttgaagatgactccagtgtgagcgaagacctagaagtggattggagcctctttgatggatttgcagatgggttaggagtggctgaagccatttcctatgtggaccctcagttcctcacctacatggcacttgaagaacgcctggcccaggcaatggaaactgcccttgcgcacttggagtctctcgcagtggatgtagaggtggccaatccaccagcaagcaaggagagcattgacgctcttcccgagatcctggtcactgaagatcatggcgcagttggtcaggagatgtgctgccccatctgctgtagcgaatatgtgaagggggatgtggcaactgagctgccgtgccaccactatttccacaagccgtgtgtgtccatctggcttcagaagtcaggcacctgccccgtgtgccgctgcatgttccctcccccactttaaagaccaaggccgtttactcctggtctgattattttccccatctgaaatccacaatactgcaggagccctcttgaaattaacaatggaaataaaaccaatcagtcagttagcctaaacctattgattcctcgtgattatttccaatgtgaaaacagttgtgtatgattgcattaaaaatcatatcatcttttagaggttagaaaagggaaaactaaactttctaaatgctacttgagattgcagtaagaagatacgttttctaacctgaaagttaaatcgcatttgttttcttcagtagaatgggaatgtgttgctgttacttgtaatgtcaagtttatctgttaaatatgtccaaaaggcaaaatcatttttgttgcatgttatgggtcgatgttcctgtaattgcagtgccgtaaaagcttattaaagttgttcttttggttttacatggtaaaaaaaa

SEQ ID NO: 73667 - DNA, 627 bp, Homo Sapiens
  misc_feature (325)..(334): n is a, c, g, or t
acgagcaccacatcaaggtcttcagcaaggccactttgaggatgatgaccccgatggcttcttaggctgagcgcccagcctcacccctgccccagcccattccggcccccatctcacccaagatcccccagagtccaggagctggacggggacaccctcagccctcataacagattccaaggagagggcaccctcttgtccttatctttgccccttgtgtctgtctcacacacatctgctcctcagcacgtcggtgtggggaggggattgctccttaaaccccaggtggctgacccttccccacccagtccaggacattttaggnnnnnnnnnntgaaatgtggggggcttctcatctccccaagatcctcttccgttcagccagatgtttcctgtataaatgtttggatctgcctgtttattttggtgggtggtctttcctccctcccctaccacccatgccccccttctcagtctgcccctggcctccagcccctaggggactagctgggttggggttcctcgggccttttctctcctccctcttttctttctgttgattgtcgctccagctggctgtattgctttttaatattgcaccgaaggttttttaaataaaattttaaa

SEQ ID NO: 73668 - DNA, 1425 bp, Homo Sapiens
cacaggcaaaaaagtttatctgggttgcctctggggtaggataccttttttctttttctctattttatacatcctgacaattatttccaagatgatacatgcctcaaaacaaacaaaacccctcgagacacactccccagcccccagggaaggcatgtgtctgggctgtgtaggggcttccgctctcctgggggtagctctgccacggtctctggggtcttggcatctgtcacagaaccctagtggttacagggctcactgtcccacagccccaggccacacggtgatgtgctgtggcccaggggaggccaccctggactcctgggactggctgtggagagaagggacggcagggagtggagggcaagctaaaaaagcccaagcttgttgtttcagccattttaatacattcaagaatatttactagaacaacatttaaacgtatcgtcggtccgcaaaagcctgggatcgagagaaatagaaacgcgactggcccttttgcagtaaagcttgtgcttgaagggagaagaggcaaagtggcttcttggagacttcgtgccagatgccacaggactgagagcatctccaaatgtcactttaaacacgtgtgagcatctatagtcattcctaaagcccacagtgtcctaaggatcctattagacgaggcaaaaggcaatgcttctggaaccctctcccttgcagctctgcacgcaaaccttccccaaggaggggcccgaggcagggctgggctcgcatggccagcaagggataaagttgggaactgcagaccaggggaagccccctcattcttagggcaaaacagcccctgaaggacaaaataaataaaccaaaccatgaccagacagctggatccggacaggtggagtggcctctgtgaaggcaaatgagagcaaaagtgggaactgaggacacctaagtggagagacacttaaaaacagtaattctcacatgaacatcagtggctcatgccaacagcagagctggccatcaacagaggaacagcaacaaaaacacaactcagacagggggcgggacggggccaggagtctgcgggggtctctgatatgctttgtggcatgactttgcttgcctggcctctcctttcttagctgaaaacaggcatttcaccaaagggcatccagccagcggcagcagcctgagctcccaggctgacatctgggcagggctgatgggcagcttctggccatctggtgaccaggtgtgccgccagctgcacccacatgcacagcccctttcctaataaccacattctaggttacgtagacacgttaaactcctattctagaacatcgtgcttgaatgcagacccctcagcccacaatcgggctggctgggcctcccctcgtgccgattcaacacccagcctcgacctagccgtatgtt

SEQ ID NO: 73669 - DNA, 1229 bp, Homo Sapiens
  misc_feature (1148)..(1148): n is a, c, g, or t
  misc_feature (1169)..(1187): n is a, c, g, or t
cctgtccggatccagctgtctggtcatggtttggtttatttattttgtccttcaggggctgttttgccctaagaatgagggggcttcccctggtctgcagttcccaactttatcccttgctggccatgcgagcccagccctggtgcctcatgggatgggggggtaggggtccccaggatcttctggaggaaggtggccatggatggatgggctgtatctgtgttttccctctgggagtctcatgggtccagcatcaggcctgaggtcagcaacagggaaagagggtgggcacggggagggcttggccccgcctatctagaggcttgcctcgggcccctccttggggaaggtttgcgtgcagagctgcaagggagagggttccagaagcattgccttttgcctcgtctaataggatccttaggacactgtgggctttaggaatgactatagatgctcacacgtgtttaaagtgacatttggagatgctctcagtcctgtggcatctggcacgaagtctccaagaagccactttgcctcttctcccttcaagcacaagctttactgcaaaagggccagtcgcgtttctatttctctcgatcccaggcttctgcggaccgacgatacgtttaaatgttgttctagtaaatattcttgaatgtattaaaatggctgaaacaacaagcttgggcttttctagcttgccctccactccctgccgtccctctgacgtcgcataaaccagaacccagctccctcctgggactggctgtggagagaagggcacctctgagccagcctgtggccctaccccaaggcgcacttcctcatgtgggcagatcctgaccaggagtccagggtggcctcccctgggccacagcacatcaccgtgtggcctggggctgtgggacagtgagccctgtaaccactagggttctgtgacagatgccaagaccccagagaccgtggcagagctacccccaggagagcggaagcccctacacagcccagacacatgccttccctgggggctggggagtgtgtctcgaggggttttgtttgttttgaggcatgtatcatcttggaaataattgtcaggatgtataaaatagagaaaaagaaaaaaggtatcctaccccagaggcaaccangataaacttttttgcctgtgnnnnnnnnnnnnnnnnnnncctgagcaggcggccgcaagcttattccctttagtgagggta

SEQ ID NO: 73670 - DNA, 2646 bp, Homo Sapiens
tttcgagatgcatggctgacgacgcgggtttgcagaccccgctgtgttccgagcagttcggctccggggaggcacggggctgccgcgccgccgcggacgggagcctgcagtgggaggtcgggggctggcgctggtgggggctctccagggccttcacggtcaaacctgaaggacgagatgcgggcgaagtgggggcttccggggccccctcaccgcccctctccgggctccaggccgtgttcctgcctcagggcttccctgatagcgtcagcccggactacttgccctaccagctgtgggattccgtgcaggcgtttgcttccagcctctccggctccctagccacccaggcagtcttgctgggcataggggtggggaacgcaaaagccactgtttcagctgccacggccacctggctcgtgaaagattcaactggcatgctgggccgcatcgtctttgcctggtggaaaggtgcatcgtgagtgttgctggtggggccactcgggctgccctgaccgtgcaccaggctcggaggaacaacatggctgacgtgtcagccaaggacagcagccaggagacgctggtgaacctggcggggctcttggtcagcctcctgatgctccctctggctgtcaggttgccctggcttcagcgcttgtgatgtttcttcttcctcactgccctccacatctacgccaactaccgcgcggtccgagccctggtcatggagaccttgaacgaaggccggctccggctggtcctgaagcactaccttcagaggggagaggtactcgacccaactgcagccaatcgcatggagccgcttgagggtggacaggtttctggccagctccgtctctatccctgggggtccccttacaccgcttggtctccagtgtctttgagctgcagcagctggttgaggggcaccaagaatcctacctcctctgctgggaccagtcacaaaaccaggtacaggtagttctgaaccagaaggcaggccccaagaccatcctaagggccgccacacatgggctgatgcttggggccctgcagggagatggaccccttccagcagagctggaggagctgaggaaccgggtgcgggcaggtcctaagaaagagagctgggtcgtcgtcaaggagacacacgaagtgttggacatgctgttcccaaagttcttgaaaggactgcaggatgccggctggaagaccgagaagcaccagctagaggtggatgagtggagggccacatggcttctgtctcccgaaaagaaggtcttgtgagcagcccagacggaggcccaagcccagggcaggaacctggagcaaggacactttggccacagcaggacaggggaaaggcagctttatttttccttagggcaactgcagcgggtgggccaggccctcatgggaagtgactgccaatcagatgcagtgggccccaggcagaggaaggccgggagaaggggagccaggaccttctcaccccactgccccttccccttttctggggagcaccgcaggctcctcacccccacttcctgtgaggctgtggcttatggtgtccaacgcagttggtcttaggcatagaagccccagaggaacacggccactgccatcatgagcagggcattgaggttgaccacacgggcccagctcgggtcctcgctgatgtcctccagccgcctggctgctgccgctgcctcctcctgggtaaggggcggaggactgcccaccccacctctgctcattccacaaaaccagagcaggcactggcggaagaggcttggtgccggggcctggggctctgagggaaattgaggccctgcagttagtttgcgggaactcagctcctccagccccacctcccagcatggtgccctaccattcatctccatggcactctctgggcacccattctgtacagggaagtgaggagccttgctgctcatcagcatccaggtcctcccgttcctccttgctatgccggagactgaagaccaggcggtggagctggggagggtgggagcacgaacgaggtgggagttctgtccccccatgcctggccctaaagtctcttgcacaccagctcgtcactgcctgccctacccacctctgtccagtctacacacccagcccaggcttaactcatgccaactccaccctacatggctgccctgtgccctcgggataaaccccaagcccctgagcttgtgtttaaagccgttggccttgctcccccagctttgtcagctcaggtctgtctacacccagatggtagcgcttgtgacactggcctggcagtcctgctcacagtgttctgtgcctgtgtgctcccaccctttcctcctgctgctgcagaaacccggccatccttccacacccagatctcttgtcctgtcctcaccccaccctgccaccatcagccctgcctggagccacctgccctttggcaacaaaaccaaacctttttgtgggcgttcaagatggtattgtgcccaccagtcagatcctgtgttttgagtcccaaaggccatgccaaggattggctttgggaggctttaatcaccaacccatcaacatcaagcctcccccaggccggttcaaataaatgtatttaaataaaaattcttgctcggc

SEQ ID NO: 73671 - DNA, 1015 bp, Homo Sapiens
  misc_feature (996)..(996): n is a, c, g, or t
ggtccggaattcccgggatggctgggatcaaaagctcggcatggctgacgacgcgggtttggagaccccgctgtgttccgagcagttcggctccggggaggcacggggctgccgcgccgccgcggacgggagcctgcagtgggaggtcgggggctggcgctggtgggggctctccagggccttcacggtcaaacctgaaggacgagatgcgggcgaagtgggggcttccggggccccctcaccgcccctctccgggctccaggccgtgttcctgcctcagggcttccctgatagcgtcagcccggactacttgccctaccagctgtgggattccgtgcaggcgtttgcttccagcctctccggctccctagccacccaggcagtcttgctgggcataggggtggggaacgcaaaagccactgtttcagctgccacggccacctggctcgtgaaagattcaactggcatgctgggccgcatcgtctttgcctggtggaaagggagcaaactggactgcaatgccaagcagtggaggctttttgcggacatcctcaatgacgtagccatgttccttgagattatggctcctgtatacccaatctgtttcaccatgaccgtctccaccagcaacctagccaagtgcatcgtgagtgttgctggtggggccactcgggctgccctgaccgtgcaccaggctcggaggaacaacatggctgacgtgtcagccaaggacagcagccaggagacgctggggaacctggcgggggctcttggtcagcctcctgatgctccctctggtgtcaggttgccctggcttcagccttggatgtttcttcttcctcactgccctccacatctacgccaactaccgcgcgggcccgaaccctggtcatggagaccttgaacgaaaggccggctccggctggttcctgaaacactacttcagaggggagaggactcgacccactgcagcaatcgcatggagcgctgtggacnggttctggcagctcgtctc

SEQ ID NO: 73672 - DNA, 766 bp, Homo Sapiens
gagttgttttttcctttggccagatgctttttggtcccgtctgtccttgcgccctcaggatttcgggttctcaatttgtgttcaatttttgtgcaagccttgtctagcagctgcttttgtgaaccagaaaaggccattaacatggtccaggatcatcaagtcttctgactctagatgggacacttgacagggacttgaaacacttgcatattcaggaatgcatgagatttcaagagagcctaccagtatgaaatcattgttcgaccaacaataagccagcttgcttctgaaatagctgtctttccccagtagctactcacctgcctctggtggctgggattcagatgccacaaaactgtcagtatctatagaccaggtctgtgccacctcctctctcctctgtgctcagtgaggaggcagtaaatgaagttacaggctagcacaatacctaactcatgtttcccagtacacctgtagatattactgtacttttatgttctcaagaaataagttgttgcctattcagtgttacagatttctttgtttctttttaattaaaatacaagaagcagctgaggaaagggagacaaggtattttatttctgactgattttagaaaaaacttgtgtacatgtgtttggaactgttgaaatgccaagttttctgtataagtgtttttgtaattaaactttcagattttctttgttttttaagaagttgatgtgcttgtttgacatttgtctcagttaaaacttttctaccgttg

SEQ ID NO: 73673 - DNA, 1120 bp, Homo Sapiens
  misc_feature (382)..(391): n is a, c, g, or t
gagttgttttttaaaaatttaataaattcataaaaaagactcatatctttgcaaacaaaagaagggcagatactgggcttctacatgctatccttaagagcttctccccctcacccattcctagtgctcttggtatacacttgggaaaataatgtcctccaggagaaagtgttagagggaactaacattttaggaatgcttattcagaaaaaaatcctagagttgattcattgttttcctccatcctgcaaaagaagatccctttgttaagcagctcacttggaaatatgattcttggagtcaatgatctctaaacaaactggattatcaactatttacaacgtctatacagtataaactacctcacttgcctttcttgggnnnnnnnnnntgaatggactttaacaattgttgttacaaactgtgcctgaatcttattatttaaatcacttcagttagctttcagtgtatgtttaataatatacatttaatgatgaaaaatattttcagcaaagctttaaaaccagaaatactgtgtaactgtgatctatgtggtatactctgagagaattctgtgtcctgctcattgtcttgagtttctaaccatgtgcagatgcaagcgttcaggagtaggaattaatgtccatcttttctttcaggcattttcatctgctgtccacgtatttcacttgactgaaagctcatatgagttaaaatgtcccttcttcctagcgagcatatttcaactgttcttcataaatgtttatgtgccttaaaagactttatgttaaaggattaaatagtttctctgacaggcagtttttaactgttttccacaaataaaaataatatgtcatgggattaaaatgtttgttttcaagcatttttaacagttttacacacttacatacaccttaattaaaaatttttttctgtcagacatttaccaactattttctaaaactaatttgacaaatcatgacactagaaaacgccaatgttttatgtctttgcccatctcaaaagctaatattgattcttctgttccatcagctttcattgttaagtagaatatgtatgttgcattttatccataagaaataaagagaaaaaaactaaa

SEQ ID NO: 73674 - DNA, 1481 bp, Homo Sapiens
ttaggctaggtacgaggccctgggtgtcgaattcggcacgaggggagagtgtcatggaggcctacgagcaggtccaaaagggacccctgaagctgaaaggcgtcgcagagctgggagtgaccaagcggaagaagaaaaagaaggacaaagacaaagcgaaactcctggaagcaatgggaacgagcaaaaagaacgaggaggagaagcggcgcggcctggacaagcggaccccggcccaggcggccttcgagaaaatgcaggagaagcggcaaatggaaaggatcctaaagaaggcatccaaaacccacaagcagagagtggaggacttcaacagacacctggacacactcacggagcattacgacattcccaaagtcagctggacgaagtagccgcctgcccccagtatggagcagcatcgagggttcgcaaaaggccacactggggttgtgtgtgtttcctttggtatattctggaaacatggctacacacacccttgcatcttctgctacagactgcttttcgaagctgtgtaccctcattctggaacttgattaaagtaagatcgtccttgtactcagtttaggcttcttggcaacatacagaagatacacccttttcgtttggatggaaagtttctaagtttatccagaggtaaagcccattgtgtgtctgtgtcatgtaaaaatgttttcacccgagttgcatgtaacgctctgaggccagccagctgtcttctcctggatgagacagactccagagggtaaggagctagcgccatggtggcctgcagtatgcagagccccgcaggacccagcgtgggcgcccttccaagcttcctctagctttgggcctatgctgtcccctgcaggccctagggaagccacttgcaactatgcggccttcagacttcctcctcagccacctggccactgagacagcatagcctgggtaacggaacagccacctaaggcaagaatggaacggacacaccttgctcctttctgagcccgtttcccaaaaccccccttccaggtgcttctaatgggtgttgccatagcagacgctgctaatgcatcacagcattctttgaaatggaaccagacacagcctgcctctcaatcctcagctgggggctcctagcagcctcttgtatttactcagagttgacacatcacacagatcctgtttggcattcctaccttacggacgtctcaggggtgacaggaccagggcagagccccggtacaaacagacaaggctgcagtcaaatgggagggtccaggtgtccgtgttggagggctgggatcttgtagggcctgtgcgtcctggctgaggatcaaaccacatatgttattgggagaaacgatttctgttgacgtagatattgaaagaataatgaaggcagaagagaaaaacgaagtgtggaatttggggttgtcctgtgtaaattacacaataaagcaaaagtcagttattgt

SEQ ID NO: 73675 - DNA, 926 bp, Homo Sapiens
gcactggagagtgtcatggaggcctacgagcaggtccaaaagggacccctgaagctgaaaggcgtcgcagagctgggagtgaccaagcggtgaggcccgagggcccgcgggattccgtcttcatcccccttagaccttttctcgggacccctggccctgatcctccgacccgccgcctcctcatgtctttttccaggaagaagaaaaagaaggacaaagacaaagcgaaactcctggaagcaatgggaacgagcaaaaagaacgaggaggagaagcggcgcggcctggacaagcggaccccggcccaggcggccttcgagaaaatgcaggagaagcggcaaatggaaaggatcctaaagaaggcatccaaaacccacaagcagagagtggaggacttcaacagacacctggacacactcacggagcattacgacattcccaaagtcagctggacgaagtagccgcctgcccccagtatggagcagcatcgagggttcgcaaaaggccacactggggctgtgtgtgtttcctttggtatattctggaaacatggctacacacacccttgcatcttctgctacagactgcttttcgaagctgtgtaccctcattctggaacttgattaaagtaagatcgtccttgtactcagtttaggcttcttggcaagcatacagaagatacaccccttttcgtttggatggaaagtttctaagtttatccagaggtaaagcccatggtgggtctgtgtcatgtaaaaaatgttttcacccgagttggatggtaacgctctgagggccagccagctggtcttctcctggatgagacagactccaagagggtaaggagctagccgccatggtggcctgcagctatgctgagccccgcaggacccagtgtgggcgccttcatgcttcttctacttggc

SEQ ID NO: 73676 - DNA, 706 bp, Homo Sapiens
  misc_feature (29)..(29): n is a, c, g, or t
  misc_feature (143)..(143): n is a, c, g, or t
taaaaaagatcctagttgagcatctctcntggtgaggaagcgatgtgtgtgcgattcaggaaactcctccaagaggaggaggagtccaaacagggatgccagaggaagctttccgttttcctagccaacttgtgttctgggtntgaaaaagacccaccacaaatgctttttctattttctgatttaaaagtcgcttttgaatatgaccatgagaaaccaagaaatgctgcttgtgtggtgctctgcttcctgaggatttggctggaaggggattctccgctggcacatgggagaaggccatcttctgtgtcggtgctgtgatctgccttgttctcacttgctgaggataagggcatacacgctgctcctcgctttcttgttgcccgacttcgtactaagcagctcaggagcagtcactcagacccaaatgtcttgactgtgttgtttttaatcactgtgacccttaaagtacaggccaagtgttgtcaaacaccttggctaaaacagtggagggtgatgggtaaagcagtagagggccctcaacccacacactggctgaaactgccaccaactgccacgatgaacccaactgctgtttatgcccccattttcctttttttgtatctacaccccacacgattccccaatgttggatatttctacatgaataaagcaaggatcagtgcctcttatgtaattaacgctc

SEQ ID NO: 73677 - DNA, 461 bp, Homo Sapiens
tttgtgaccttcctggtggaaggaaagctgttttatgcacataaagtcctgctggtgacagcttctaacaggtaggcagcctcagataacaaactcccagcccaggggcacagaagcaccttgtttcagattccaggtgacagagagtgactcgctggggctgtaccctgcagcctctgcccctcagactgcagtcacattgcagcagagccccactcgccccacagcgggatgagacggggtggacccagggcagcaggaaaggggggctctgaggtggtgttctttctggcctagttattgcttttattattagaaaacataaatatcctggaatgaagagtcagcattctggccacaggcgtcaggtcgcttgtagggtgggtggtggggacagaattgggctcagctcagatgtcttcctaagatggtgtaaaatggcacttgctgaaaattatttt

SEQ ID NO: 73678 - DNA, 696 bp, Homo Sapiens
  misc_feature (675)..(675): n is a, c, g, or t
gctggttcacatctctttaatgagatcaaaggctcctgtgtatgtcctgcgggggtaaagctagcacagtcccccaatactgcccctctccagccctttcaggcagattctaggtaggcagggaggggccaaaggaacgcaaggagttgggactagggctgtttctggtgggcaagtaacccatccaccctctcaaaactacttatgggatgtccccttcactggaagacagccccatgggaaagatctgcggtacagactctgggggtagtgcacacggggagtagtcctccagatctggcagggtggcactaaccctcacctccttgactggctcaccctcaccggaggcaggacaagggcagagctcaataccggagtcgccagttaaacggcgatagcggcaggaggggggtgtggaggcaggggtcacccctgccccgggctcaccctcctgatgagggggggcactctggtgggaggaaacaccttccacatttgttccttcaaagtgggcagggcagctggatgaggaggaacagcaggtttgttcactggaagcagtcaaggggcggcctgggcggtgcctgggcggtgaacacatcctcgtaggctgggggcttgaaggtgctgaggaagcgaaggtcaagcagtgaaccggtagggaaaggacanccccatggcatgccccatgat

SEQ ID NO: 73679 - DNA, 1166 bp, Homo Sapiens
tttttttagctggttcacatctctttaatgagatcaaaggctcctgtgtatgtcctgcgggggtaaagctagcacagtcccccaatactgcccctctccagccctttcaggcagattctaggtaggcagggaggggccaaaggaacgcaaggagttgggactagggctgtttctggtgggcaagtaacccatccaccctctcaaaactacttatgggatgtccccttcactggaagacagccccatgggaaagatctgcggtacagactctgggggtagtgcacacggggagtagtcctccagatctggcagggtggcactaaccctcacctccttgactggctcaccctcaccggaggcaggacaagggcagagctcaataccggagtcgccagttaaacggcgatagcggcaggaggggggtgtggaggcaggggtcacccctgcccccgggctcaccctcctgatgagggggggcactctggtgggaggaaacaccttccacatttgttccttcaaagtgggcagggcagctggatgaggaggaacagcaggtttgttcactggaagcagtcaaggggcggcctggggccacagtataaggggggggtggtgtgcctgggcggtgaaccacatcctcgtaggctgggggcttgaaggtgctgaggaagcgaaggtcaagcagtgaaccggtagggaaaggaccagccccatggcatgccccatgataggccaacaagttgatttcacgctgccgctgctgttgttgcagcctgagtttagctcgtcggtggcggaaggcgcaacagcagctaaagaggatgaggacagtccagagcagccagaaccaccagagctcatagtagtaggtgcagcagccagtctccccgcagcagtgaccactctcacagaggtagggctggttgttcactcctgggcacagctctcgaagctgctgttgcggcgcccgaagtgccccccaggcctcctcgctgccgttcccgctgctggcccgagccatacctccacctacagccccctgaggaccacagcctcctctaccgccagccgccccgcccctgccacctctgctgccaccgccatggtccctgcccggcccatcttcgctgaggccaccatcgtacccgccacccaggcctcgctac

SEQ ID NO: 73680 - DNA, 510 bp, Homo Sapiens
cgaggaggcctggggggcacttcgggcgccgcaacagcagatgcagctgactttgcctgtagcctcatagaacccatcccatggctgcagtggaagcttgcggtgcctctccagtgacaagaggaatagtgaggtccccagggaggctccctctgtctgccaacagttatttgtgatctttttctatggccctattggtcaacaacagagtccggcagcgtcttctcttgagggagcaatttggagaagagctggaacccagactcgcgccctggatgccatcctttatcatccacagcaatcccatctgcccttcaaggatatttcaacactcctctcagcatcctccacttcccccatctctccaagctgaacttggttaacagggtggattgtcttcagagagctgtgccacaggagtgaacaaccagccttacctctgtgagagtggtcactgctgcggggagactggctgctgcacctactactatgagctctgtgtgtctgggc

SEQ ID NO: 73681 - DNA, 637 bp, Homo Sapiens
aaaaattatagctcttggattccaaattcctatgcccccgatctgcaagcctcgtgggctctggagcactcgtggcggagtgtgtcagtgtgtctgcacgcacagtgaagggtgtgaactggattctagcacctactgagaaatcaaggaaaagaaaactaaagccaaaccccaagattgcagggaagctttctggatgttcagtccagtccaggactcactaagtttctgggggactgtcatgcagggagatccaaaccagtctcaggaaatcctctcgacaaacgaacactactatgtggatacatttttagttgtgggtttttaaatatataaagaaatctttagaagatattctttttgcttttgcagctcctattttatgtaaaaagtcctgtttctccccccaagaactggggtttccacagccagcgttaacaaataaataacttataactgcttgtcaccttctttcttcagtcgactgtaataatcttcctgacttggtaggtggccaccatgcatgtgggggtgtccatgcagccactgctgctccatggccagtctctgcagctcggccgactgggcatgcatggcctgcagctggtgggctgctgacatggggggtgggatggcc

SEQ ID NO: 73682 - DNA, 580 bp, Homo Sapiens
  misc_feature (14)..(14): n is a, c, g, or t
  misc_feature (428)..(453): n is a, c, g, or t
caatgagatggccntaagacactccaccttatgcctggatgaattccaggggcacacagaggctggagatgttgttgagttgaagaaacaaagttcatctttcaaggaggctgagatggcgataattttgcaggtcagagtacgggagaggaaagatctgcacagagagaactctctggggagctgcatagacttgctcatgagtcagcagctgagcgttgatcagcccttttgtgtgaggagactactggaagtcagggaaaaaatcactggaaagcagcagacagaacagtttccagagctcacacagagaacattcatgttctcaccagtctgtatggaaatacctcttaacatgacaggcattgaatagagtccacagtaatgggatcaaattaattctatcacaagaactggaaccagaggcnnnnnnnnnnnnnnnnnnnnnnnnnntctagactaacagctgttctagaccagcctaacaaagtttaaaagcaaattttgaagagattaaactatttccaagttaatgaagtatatttcagaacaaacccttaaatatttgagggaatacaaa

SEQ ID NO: 73683 - DNA, 642 bp, Homo Sapiens
cccggcccgagcctccggccgcccgccgggttgtcccgcgatccccgaccatgcccgccgacctcagcggtacttggaccctgctcagcagcgacaacttcgagggctacatgctggccctaggtattgactttgccactcgtaaaatagccaagttgctgaagccacagaaagtgattgagcagaatggggattcttttaccatccacacgaacagcagcctaaggaactactttgtgaaatttaaagttggagaagaatttgatgaagataacagaggcctggacaacagaaaatgcaagagtttggttatctgggacaatgacaggctcacctgtatccagaagggagaaaagaagaacagaggctggacccattggatcgaaggagacaaactccacctggaaatgttctgtgaaggtcaagtgtgcaaacagacattccagagagcctgatccacatccagcagcagagcccacttgtggctgcagctttatgccaaattatattgcagactgaacagacgtttatctatcccatttggcgacgaggactcgtggctggagagagccacacagcgtgtaacctgaagtcatctagattatggggaaactgctcagcttcaataaacctgtccaaatg

SEQ ID NO: 73684 - DNA, 653 bp, Homo Sapiens
agcatgaaagcagccatagacagtatgtaaataagcacagctgcatccatataaaacttcatttatggagtcaatttgaatttcatataattttcacgtcatgaaatatccttttttgatttttaaaaaatcatttcaaaatataaaattcattcttagctcatgggccatacaaaaataggtggtggaccataatatctcaaccgctggtctcagcctcactgctgaggataatgagtagctgtgcacaaatagttacttcatcagtgcttccccagctagggacagagctacgctcaccagtcatttagcctgctaggcagaactctggaattctgattcaacttctgccctgatgctttccagctgtgaccttgggctctagtcacacgatatcagagtctcaggctgctcatttccaaaacagtgatacaaaatttttttctgccttcttcatggcactggtgcaaactgcatatgaacgtcttcatagtctgattgctggtttcctctgtggcctccatttgcaaaaagtacattaacattttaatcatccttcaccaaacatttctggaagacctattctatgccagtctgagcccttggggatatacagatgactgagaactagaccttgccctcacagcaaaaaa

SEQ ID NO: 73685 - DNA, 1998 bp, Homo Sapiens
  misc_feature (1690)..(1690): n is a, c, g, or t
  misc_feature (1705)..(1705): n is a, c, g, or t
  misc_feature (1820)..(1865): n is a, c, g, or t
gcggtccatggaccggaatctccggccgacggacgggaacccgggccgcgatcgccgcctccccgcctcaggctcctcctcctcgctctccgccgcctccgccggactcccgcaggccctgcaccgccgccgccaggctagcggagctgccccgggaagctgggtgacgggttcgcggctgccgccggactgcggcctactccgccgcctctcagtgctattgtccctgggcctggccttgagcgggtccactggggaaggccgtgtgcgccggctccgcggaagatgccggaccaagccctacagcagatgctggacagaagttgctgggtttgttttgctactgatgaacgatgatagaacagctgaatgggtgagaccatgcaggtgcagaggatctacaaaatgggttcaccaggcctgtctacaacgctgggtggatgaaaagcaaagaggaaacagtacagccagagtggcatgtcctcagtgcaatgctgaatacctaatagtttttccaaaattgggtccagtggtttacgtcttggatcttgcagatagactgatctcaaaagcctgtccatttgctgcagcaggaataatggtcggctctatctattggacagctgtgacttatggagcagtgacagtgatgcaggttgtaggtcataaagaaggtctggatgttatggagagagctgatcctttattccttttaattggacttcctactattcctgtcatgctgatattaggcaagatgattcgctgggaggactatgtgcttagactgtggcgcaaatactcgaataaactacaaattttaaatagtatatttccagggataggttgtcctgttcctcgaattccagctgaggccaatcctttagcagatcatgtctctgctactcgaatcttgtgtggagcccttgtctttcctactattgctacaatagttggtaaattgatgttcagtagtgttaactctaatttacaaaggacaatcttgggtggaattgcgtttgttgccataaaaggagcatttaaagtttacttcaaacagcagcaatatttacgacaggcacaccgcaaaattctgaattatccagaacaagaagaagcataaaactgacttctggttgttctgcagttctctcatccttatgaatctggtgtgttgttttgattccatcattaatgcacttgtggagacttgtgataagctgctgctcctatattttttaagaaatataataaagcacttagggcaggggaaatcatctcggtaatcatggaacctaaggatgtgatttgttttcattgtttgtatgtactacttttatggcagtcatatgaaccattatcttagcatggtaaacctgggttttgttcatattttctccagacagaaatgcaaagatcaaactgtgcaaatattaaaaaaatgcacatgctgttttattcaaatgcctcttttgtacatgttcatgtttagtgttttctcagaatcagcaactcaaggtactatgaggatttttctcactgacataatttgattacatactaaataagaggatatgttaatatgaggaaatgtaaattaaattagttataaataaataaccaaaaatgtatgtaaacattcaaatgattatctgaacaaatgagattttgtggtgttttctttaacccnatgtgatgtcctccnaaaatgtgtagggtaaaaattcacagggcttccagatcactttttcaatattaaattttatttacataatgttgacatctcatacttcatgaagtaattttgactcatgcagtcnnnnnnnnnnnnnnnnnnnnnnnnnnnnnnnnnnnnnnnnnnnnnnttcagtgtttcatcaggtccttccatctctgggagttttttcaacccatatttctagaaattacagctgccagtttatagtagtttgagcagaggatgatttgcaaaaataaaaataaagttattttactctc

SEQ ID NO: 73686 - DNA, 1139 bp, Homo Sapiens
  misc_feature (575)..(756): n is a, c, g, or t
  misc_feature (776)..(776): n is a, c, g, or t
  misc_feature (778)..(869): n is a, c, g, or t
  misc_feature (871)..(875): n is a, c, g, or t
  misc_feature (877)..(881): n is a, c, g, or t
  misc_feature (883)..(888): n is a, c, g, or t
  misc_feature (890)..(905): n is a, c, g, or t
agccggtgcgcgtgacgttctgacgtagatcggggcggcgtagcatcctgaggtccgatagctcgcggccgtgtcctgccgcttccgtctgcagacggcgcgctcacgacctcccgctccttggcgctaccgtcccgcaggtgtaacctctagtcactctcactaggttgcggaggcacgtctcgactcgatctattacagatgatctgtattgctcctcgttcgccacttctcgctccggtgcgacgttgtctccccgaattccctacatattcggtcactgtccctcgcccagtagtgtcgcggcctccgtccccctccgcgcactccccacttctccatccgtcgtttcctcgcgcgcgtttcgcacgtggggtcgcgcgctccgccgccctccgttctgtgcgcggcccgcctgttgttcggcgccacccccgtttctccgtctttcgcgccgtggcttttgtcttctgtggggttgtttgcggtggcgccgcgcgtgggctttctggttgcgggcgccctgtgcctgccgtcccctcacgcatctggtgggctgtgctcctcttcttggnnnnnnnnnnnnnnnnnnnnnnnnnnnnnnnnnnnnnnnnnnnnnnnnnnnnnnnnnnnnnnnnnnnnnnnnnnnnnnnnnnnnnnnnnnnnnnnnnnnnnnnnnnnnnnnnnnnnnnnnnnnnnnnnnnnnnnnnnnnnnnnnnnnnnnnnnnnnnnnnnnnnnnnnnnnnnnnnnnnnnnttcttctttttcccctcttntnnnnnnnnnnnnnnnnnnnnnnnnnnnnnnnnnnnnnnnnnnnnnnnnnnnnnnnnnnnnnnnnnnnnnnnnnnnnnnnnnnnnnnnnnnnncnnnnncnnnnncnnnnnncnnnnnnnnnnnnnnnntccccacctcccaccccccaccctgtaaactaggcggctgcagcaagcagaccttcgcatcaacacagcagacaccaaaaaccagtgagagccccgctctctaccgcccggccccagcactcgctagctttcctgacacctggaactgtgcacctggcaccaagcggaaaataaactccaagcagccagtagccccgatggtgtgtgcctgagctgtgtggcccgaggttccat

SEQ ID NO: 73687 - DNA, 718 bp, Homo Sapiens; identical to SEQ ID NO: 14355
  misc_feature (688)..(688): n is a, c, g, or t
  misc_feature (700)..(700): n is a, c, g, or t

SEQ ID NO: 73688 - DNA, 1403 bp, Homo Sapiens
ccaaccacccccacaccactgggcgggcctaaacccaacaaaccaaaataagtagcgaggcctgggtggctttccggcacgagggcgggagtcgcggcgctgcgggtaggagccgggttgcgggagaccccaggttcggttgggattcccagccagaacggagcttaagccgggcaggcgagcgaatgacggagtagcgagctgcacggcggcgtgctgcgctgttgaggacgctgtcccgcgcgctcccaggccgccccgaggcttggggtcttcgaaggataatcggcgcccggggccgaacagcgggggcacacggggcgctgccgaagtgcaaggccacggccagagctcgagcccgacgcgctgtctggagtcgtaggttggcgccgtttggggtcggggtctgaggcttgggcgctgcctgggccgagcggagatcggggtttgcctcccgtccccgctcaggaccctgacgtggctgaagcggccccgggagcatgagcgggcagcgcgtggacgtcaaggtggtgatgctgggcaaggagtacgtgggcaagactagcctggtggagcgctacgtgcacgaccgctttctggtggggccttatcagaacaccatcggggccgccttcgtggccaaggtgatgtcggtcggagaccggactgtgacattaggtatttgggacacagcaggctctgagcgctatgaggccatgagtagaatctactatcggggtgccaaggctgccatcgtctgctatgacctcacagacagcagcagctttgagcgagcaaagttctgggtgaaggaactgcgcagcctagaggagggctgccaaatctacttatgtggcaccaagagtgacctgctggaagaagaccggaggcgtcgacgtgtggacttccacgacgtccaggactatgcagacaatatcaaagctcagctctttgaaacatccagcaagacaggccagagtgtggacgagctcttccagaaagtggcagaggattacgtcagtgtggctgccttccaggtgatgacagaggacaagggcgtggatctgggccagaagccaaacccctacttctacagctgttgtcatcactgagtcagcactcacctggcctgggggaattaaaggaattccccgtaagggctggacccagctcctttctgggcttgggtagtcaaatgtctgagctaccccaggtcctcatgtcagcagagtggcgcctgcctgtgctggcccatggaacggagacagcattgggctgactgtgggcatgaggagggataaggctgatttggaccccaggcttctgccctggacagcacttgtgtctgcagattatttaagtggcttttgatctgtaaataaaatcagtgcactgtgaatcac

SEQ ID NO: 73689 - DNA, 1045 bp, Homo Sapiens
  misc_feature (25)..(25): n is a, c, g, or t
  misc_feature (37)..(38): n is a, c, g, or t
  misc_feature (61)..(62): n is a, c, g, or t
  misc_feature (67)..(67): n is a, c, g, or t
  misc_feature (70)..(70): n is a, c, g, or t
  misc_feature (109)..(109): n is a, c, g, or t
  misc_feature (159)..(159): n is a, c, g, or t
  misc_feature (178)..(178): n is a, c, g, or t
  misc_feature (184)..(184): n is a, c, g, or t
  misc_feature (187)..(187): n is a, c, g, or t
  misc_feature (211)..(211): n is a, c, g, or t
  misc_feature (248)..(248): n is a, c, g, or t
  misc_feature (271)..(271): n is a, c, g, or t
  misc_feature (329)..(329): n is a, c, g, or t
  misc_feature (374)..(374): n is a, c, g, or t
  misc_feature (377)..(377): n is a, c, g, or t
ggatacgggcagatagctgtgagcntagtgcagacgnntttgtggcctatccagacacatnngggcnccnttgtgccaaggtgatgtcgtcggaacccgatgtgacatnagtattgggacacagcagctctagcgctatgagccatgagtagaactacnatcggggtccaaggctgcnatcgtntgntatgacctcacagacagcagcagnttgagcgagcaaagtctggtgaaagaactgcgcagcntagaggaggctccaaaatctacntatgtgcaccaaagagtgacctgctggaagaagaccggaggcgtcgacgtgtgacttncacgacgtccaggactatgcagacagtagctgctcctcagccctntgngggggtgggggtgtgtggctgtctgggtgaatcaaagaaaatagggactgccttggctgccagggcaaggtgctctaggaggtcttcctggcctccttgaactgtggggtccaggagactccctgaactgctagccctcccttttgtctgtttatctaattctcaggtatgaggctttagtcacttctctttacagatatcaaagctcagctctttgaaacatccagcaagacaggccagagtgtggacgagctcttccagaaagtggcagaggattacgtcagtgtggctgccttccaggtgatgacagaggacaagggcgtggatctgggccagaagccaaacccctacttctacagctgttgtcatcactgagtcagcactcacctggcctgggggaattaaaggaattccccgtaagggctggacccagctcctttctgggcttgggtagtcaaatgtctgagctaccccaggtcctcatgtcagcagagtggcgcctgcctgtgctggcccatggaacggagacagcattgggctgactgtgggcatgaggagggataaggctgatttggaccccaggcttctgccctggacagcacttgtgtctgcagattatttaagtggcttttgatctgtaaataaaatcagtgcactgtgtaaaaaaa

SEQ ID NO: 73690 - DNA, 789 bp, Homo Sapiens
cccaccccccaaggctgaggacagctactgtcgcatagtcctggacgtcgtggaagtccacacgtcgacgcctccggtcttcttccaagcaggtcactctgggggccacataagtagatttgccagccctcctctaggctgcgcagttccttcacccagaactttgctcgctcaaagctgctgctgtctgtgaggtcatagcagacgatggcagccttggcaccccgatagtagattctactcatggcctcatagcgctcagagcctgctgtgtcccaaatacctaatgtcacagtccggtctccgaccgacatcaccttggccacgaaggcggccccgatggtgttctgataaggccccaccagaaagcggtcgtgcacgtagcgctccaccaggctagtcttgcccacgtactccttgcccagcatcaccaccttgacgtccacgcgctgcccgctcatgctcccggggccgcttcagccacgtcagggtcctacgactccagacagcgcgtcgggctcgagctctggccgtggccttgcacttcggcagcgccccgtgtgcccccgctgttcggccccgggcgccgattatccttcgaagaccccaagcctcggggcggcctgggagcgcgcgggacagcgtcctcaacagcgcagcacgccgccgtgcagctcgctactccgtcattcgctcgcctgcccggcttaagctccgttctggctgggaatcccaaccgaacctggggtctcccgcaacccggctcctacccgcagcgccgcgactccc

SEQ ID NO: 73691 - DNA, 1131 bp, Homo Sapiens
gcacaggaaggttttgatatttttattaaaactgaaaatacacatctccaaatggggaaaaaaattatatagtgttaatgttaagaacaaagttgattccaacctcttgagacataaacacaagcatgaggattatggacagaaacaaatccgtattccaggaacagccgttgattatcgtgagggccgtaacagatgaatacctcttcatgctttctccaacgtgaagtcgttctaatttcgtaagaatgagtttcttcattaaacgctgcttttacctggacatgtgggctatgattcagcaggtccaggtacggagcgagtgcacaggtgtccggctctgcagaaaggcattcccgctgcctgggcctcaggtacacggctctggtgttgacggtgcaccaagcccacagcagggcactgtagctgaagatgctgtcaacagcctccgcaaacagaggctgcagagaagagaaaaagtctctggaggaagcaaagaactcctgcacgtgggctctctgctcttcagcctttgcttttaaagatttgggaagaaggttcaccacttccggctccaaacaaacagggcaggtatacgccttgggtaaaatctccaggtaaggcttccaaagagatcggtgcccagcatgcttttctgaaactaaaaaggtgcacagcgccagcagaggagatggaggaggcttccacttagtaatgtatgcccctaagtagcttcgaatcactgtgtccgtggtgagcaggcaactctcaggcaacgaaataatcatctgtccctcctgcagggatgtttgactcatcagccctcttcctgtacctggaaaacaagcaggcgctaagtttgaatcttgaaacttcctagctttcagccacttcctcagctctataaattcagacttgtggctctcattcactcctcttgattcagaacttccgcagagttttcgtcttctgatccggcttgttctcccttttcctttctgcatgctaaaactgtagtttcttttttctgaaatacagttctattttttcaaaaggaccaactgtaatttctgtggaatgctcaatcccccgactctgctcccgttacctcgtccgatttcaacccggcgc

SEQ ID NO: 73692 - DNA, 780 bp, Homo Sapiens
aaataaattggataagactttttattgtaagttccagctgttgaagatacggggataagattgacattgctgttgcagtattgcaaaaacatgactaaattggttaattatgtctaccgcttatgtttaagagaatcctttcactaacttaaattgttaacattgttgtgatattgagaaagaatattaacctaaacagtcactttacaacaatcatgtaaagacgtgtgcctgcagttgaggttttttgcatttctgagcctgctttgtattcatgagaaacaaaaacataatgggagaaaagttttagataagcagcattgtaagtttttgtaaagtttgggatgtcaaagtattaacgaagggtactgaaaacatacttttacttgggtcaaattactttttatgatctgatttcttaattttctgtatttgaaatcttgcaaattaggaatatctacatctatagataaataagtaaaacttaatggtagaaataagtgtaattcagcaacatgattcaacaatttttatatttaggataagttattgtttattatattaatatcaaatttatatattgccttgtaatgctaaatgctcttaaaagaatatatgggctacttcaattctaccaccttcttccccctcccccaggacgtacaaaagatcttatattaaccaatcctctgtgaattttgccatatcaaacattgtgccttattttaataaaactgttttgttggaatccagttctatattaaagtctctataatgttg

SEQ ID NO: 73693 - DNA, 1215 bp, Homo Sapiens
  misc_feature (104)..(138): n is a, c, g, or t
  misc_feature (843)..(851): n is a, c, g, or t
tgctactaccgactcaccttaataagggagccggcccccgccgtctttttagtctatgcccgaacgaacgagcgcagccgagtctatgagcgaggaagcggcgnnnnnnnnnnnnnnnnnnnnnnnnnnnnnnnnnnncagtcgacggtaccggacatatgcccgggaattcggccattacggccgggtctgtaactacaagttgtgatcgacatgtacaaaatgtctaagaaaggtcatatgctgaatattttacttttcctgtatagtctgcatgatttgtttcataaacccagcttatttcctccaaaaagcaaaatggtcctgtaatttttaaagtaaaataaacgtgccattttgtctgcaatctataatttcaggaagttattgaaagttctgactcagggctttttaacagttcaagcaattgtcagttatattttggaaactccatctgtgtaattctccagtgccttgaaagaattattaacttggcaacactattaaaactttataaaagatgtctttagtgcacgtgtatcattatatacacgttttaaagtcatattgcttagcttgttaataatgattctgcatgtgtgctgggtttgggtaattctttaaaggaagttttctagatttgcacttgatgtttgttttgtaaaaactgattatttatggccgtgacactgttaccagaaaagtaattctaattaagttattatgcaaagtcatctataagtagcatctgggaagaggagatcgaggccacagtttgctattttagtatgaaaggaggatctgtttgggaaacatagattgtcttcccctcaaatgaggggnnnnnnnnngaccctttgttcaaatggattctgttgtaaaaaattatttttaaaggaaatcacaaattgtatgtcattcttaatgctagtcttatagaataaatccataaaattgtttttatgttcagtatgtttatgtcattctaaatgcagcaaattcaatgatagcagttcaattgactcatagcagtgttttgtattttttctaattctttagctttcaatattggattaaagtcttgtttgtgaatatagtttccgtatggcaaatgatttcttgcttattagcttttgttaaagaatgcttagtaagagctaagcttttaaaagtaatgcaaacatttatcgttaataaaacaaaaggtgtaatatc

SEQ ID NO: 73694 - DNA, 710 bp, Homo Sapiens
accagccctccagctgcgtgtctccgcagaccaggctctgtgtgggctagaggaatgtcgcccattactcctcaggcctggccctcgggcctccgtgatgggagccccccaggaggggtcagatgctggaaggggccgctttctggggagtgaggtgagacatagcggcccaggcgctgccttcactcctggagtttccatttccagctggaatctgcagccacccccatttcctgttttccattcccccgttctggccgcgccccactgcccacctgaaggggtggtttccagccctccggagagtgggcttggccctaggccctccagctcagccagaaaaagcccagaaacccaggtgctggaccagggccctcagggaggggaccctgcggctagagtgggctaggccctggctttgcccgtcagatttgaacgaatgtgtgtcccttgagcccaaggagagcggcaggaggggtgggaccaggctgggaggacagagccagcagctgccatgccctcctgctccccccaccccagccctagccctttagcctttcaccctgtgctctggaaaggctaccaaatactggccaaggtcaggaggagcaaaaatgagccagcaccagcgccttggctttgtgttagcatttcctcctgaagtgttctgttggcaataaaatgcactttgactgtttgttgtcaaaaaa

SEQ ID NO: 73695 - DNA, 1063 bp, Homo Sapiens
  misc_feature (282)..(387): n is a, c, g, or t
  misc_feature (653)..(678): n is a, c, g, or t
  misc_feature (1001)..(1021): n is a, c, g, or t
gtcggggggcagtgacagccgaaccgctttaacgtgagcttgcgccaagaaaacatattcgagttcccggttgtggcacccatcacccctgataaagataccacaccgcaacaaagaccacagcgaagtagtagcagagacacgaaaaccccaaaccaaacccctttacagagctgacgattcataatcagctgcccgacagtttcccgactgaaacccggccgtgagcccaacgcactatgtgggtgggctcactcagtaggccacccaggcttaccaacnnnnnnnnnnnnnnnnnnnnnnnnnnnnnnnnnnnnnnnnnnnnnnnnnnnnnnnnnnnnnnnnnnnnnnnnnnnnnnnnnnnnnnnnnnnnnnnnnnnnnnnnnntggccctcgagcccaagaattcggcacgaggcggaacgaggtgaatctgaggttctataaatccctcaaacgattgctgagagcctgattgtggaaagaagtgagatgcaccttattttcaagaagtcctgggaagcgctctcctagcacgtccatttacaggaggagaagcaagcagatgagaggttttccattttgtcatccaaggtagctgtgcacttgccttgttgctgaagttccaataatgtgaaaaccaaagtagaggnnnnnnnnnnnnnnnnnnnnnnnnnnattaatttcacttataccaaagtgtttgaaagtatgaaatgtgttgcttctgagttatataaggctacttcatgacaagactgctttgtaatatttcactttgttttactacaaattcagatcactttgttttactataaattcagattatccaaatattttcctaatactatgtgggaatgctgattttcttttgttacgtagtggaaacattttgcattgtttacatagttctcatggaacatggaaatttttgaaagtgatatatgatacacattttttgtgtatgtattctaattagtgtgaataaagcagtaacattnnnnnnnnnnnnnnnnnnnnngcctacagccgcggccgcaagcttattccctcttagtgaggg

SEQ ID NO: 73696 - DNA, 619 bp, Homo Sapiens
  misc_feature (114)..(114): n is a, c, g, or t
gcagtacggagtacggggctcaggacttggggtcctccacgtgtcccagggattctccacacgagtgtcctcaagggcctgttggtgacaccgagctccccccaccccaagctntgctggggccaatctgcggggctctgccgggtgcacggctgacctggcttcggggacgccggccctccccttgggtgtcacagcagctgggcccacagacaggaaatgacctgacctcaaaccagatgtggaggtgcacgagaggcgcaggaacgggcagtggctgacagctgggaaggccctgagcgtcactgctgctgggcggaagggcctgtggacagcccacccaggcggcggggtcttggtgggtccagtggtaatggtgcccctcccctccattccctgtgggtgcagcccacaggctggcgaggaggtgcctctgccctaccctcgggtctggcgagggagggggcagggtgcatccactgtgacagcccctctgggcccacaactccctgaccctggaagctgagcctgctttcctgaccctccgccccaccccctcctccccagaacactcagagggacggtcaacatcagagcacattaaacgctggtgaaacca

SEQ ID NO: 73697 - DNA, 711 bp, Homo Sapiens
tcccactgcatcagaagcaggttaaatgaagtcttgtgaatttgtaatagatcagtaccatttattggtttggggaccatcttaattaaaaataaatgcccaaaatgtagaactttaaccaaagacttgtcccttttaaagcaaaatggggattgaagggacttataatttctgttgtttctaattaaagtccctgaagatcatataccaaagtgtttgagaacttcatccaaacctactttaaagcattatgtgcaattaagttgttatgacataattatattgcctaattgttgggtcttttttcttgagcttataatgtacctggaaaataaacctcttgagaaaaagaaaagttcatactgattattggaaaaggactatatatgtgagcaagattgtgttttagagaggaaacttgaaactccaagaaagcacttgatgtttttatatgcttgtagcaaattgatgttctaactgtagttttatagaaagtattaatgcttttatgtatttcaaaactttcatatgttaaatggaaattgttttaaatgtgtttgagtttatgtaagcatgtatacactgtgctaaaagtcacatgtttcagtttgtgtataatattaatatgcaatttttggtttaaatttttgtcttaaaatattagtggcttacattttaaaaaagaaaaatcaccagcatgaacttgcacct

SEQ ID NO: 73698 - DNA, 1426 bp, Homo Sapiens
gggcagccctccttaccactgtggaagtccctcagaggccttggggcatgacccagtgaagatgcaggtttgaccaggaaagcagcgctagtggagggttggagaaggaggtaaaggatgagggttcatcatccctccctgcctaaggaagctaaaagcatggccctgctgcccctccctgcctccacccacagtggagagggctacaaaggaggacaagaccctctcaggctgtcccaagctcccaagagcttccagagctctgacccacagcctccaagtcaggtggggtggagtcccagagctgcacagggtttggcccaagtttctaagggaggcacttcctcccctcgcccatcagtgccagcccctgctggctggtgcctgagcccctcagacagccccctgccccgcaggcctgccttctcagggacttctgcggggcctgaggcaagccatggagtgagacccaggagccggacacttctcaggaaatggcttttcccaacccccagcccccacccggtggttcttcctgttctgtgactgtgtatagtgccaccacagcttatggcatctcattgaggacaaagaaaactgcacaataaaaccaagcctctggaatctgtcctcgtgtccacctggccttcgctcctccagcagtgcctgcctgcccccgcttcgctggggtctccacgggtgaggctggggaacgccacctcttcctcttccctgacttctccccaaccacttagtagcaacgctaccccaggggctaatgactgcacactgggcttcttttcagaatgaccctaacgagacacatttgcccaaataaacgaacatcccatgtctgctgactcacctggctggaacaacatgcttactgccaacacgtgggccgaaccacatggccctggctctggaatgcacaagtggctttgcgtgaatctgcgctaagctatgcagtctgctttttcttctcagctctggtagttcttcagaaatgtaccctccaggcacatccactattgcgagggtgagcacgaagggtgggagatgcccatgtcctcaaggcatcacttcctaaatccaaaagcatcggcaggagaaaggactggggacaaatactgtcccttcgggagtagggagggaacactgaggcccatccctggctccttccctaaaagtagagtaaaatggaagcgagcatcctgggattgggggcaagagggggaccgcagggtagctgtgggttccaactgctgtcagagtcagagaggcagccccaagccagcctccctgctttgccagggaatttgggggaggaaggtgacagctgcccagaggctgactcatctgatatttagcactgggtaggatgattgtttctgagcatttttcttaaaggcctcagatctaaatt

SEQ ID NO: 73699 - DNA, 1296 bp, Homo Sapiens
  misc_feature (51)..(60): n is a, c, g, or t
gtccggaattcccgggatatcgtcgacccacgcgtccgcggacgcgtgggnnnnnnnnnnaaagtagcattttctctgggtaaagggaaaggcaatgaatgattgccaacatgtaaactccctgctgcccgccttcccccagtcccctccatctaacataatacagtaaatttgtagccagttgtagaaaaagaaattgatatctttctgagtaaggtttcatgccctgtgactaagaataggtggaggaatcatggccaaatcaaatatgaattgtttagcttggtcctgttgcagttggctttctgtagtgttctgaaacaagaggacgattccattccttctcaggaacctagaaacaacaccgcttgagcaactggaatatgtttgctgcaagcagaatattttggggagaggaagagtagtttaattcaagtagtttaattgaacatattagtcattggtctgtctgggacgtgcagtgttcatagtagcaatgtatgtaccatttattttatctggttgtgtgtgatgtgtgtgtatgcctatttaatatgtacacatatattcactacatatgtatgtatgatatattcatatatacatgcagtctgcttgattatcagcaaaatggtcagcctttatcagatagtttcttcatgtggagttcatctgcatgtggcccttactctgaagcctcttcctgatctggagccacagtctgtctgtcttccagttcatctcagtcctcgagaaaggccctttaaatatgtcactttcccattttcctttaaccatgggttgtgtgagccagaaagagctttgagaaagatggctgcttccacccagggtggaggcttctaggtctgcatgatgatggggcccgtttctggccagagggtggctctgggagcagttgtgctgcgggcttgctgggggagaactctaactgttgcagaaacagagcttcatggcttgcttaaattacttagctggaatattttaaagtgtcagataatgtgatgtacaaagagagtatgccgatgcatttcattgtttttgcattatctgtatcagtatttcccattgctagcccgaataatcaagaccagactgtttcttgtcactggattctggaagccttgccctttcaactggatttatgtttgtttctgctgctgtgaaaccccaaagtaatgcagtaggttttaattgaaaattgtttaattctattattgataattatttattgtaataaaagtaaaagagtaatttttaaatcccttttaattgttt

SEQ ID NO: 73700 - DNA, 928 bp, Homo Sapiens
  misc_feature (601)..(616): n is a, c, g, or t
  misc_feature (728)..(825): n is a, c, g, or t
  misc_feature (869)..(869): n is a, c, g, or t
cacaggaggaaccccttctctggttgagctgggccaggctaagagtagcaggaactctaagaccacagagttttttataaatgtataaatgtatcaagccaaatgtgcagatgctaactggacattctggggaactgggcaccaggagtgccttcatacactgtaccccagctctcttctaaaagagaagtgggtgggcacactgaactgtttggtggccccaaccacaggaagctgcaattctctggcttagggtgatacttttgccctccttgtgcccctctcagctttccatccccagctaggaagaaagaatggcactcttgggcttggcccagaattagagttattagagcaagagagagcttaggaagcatgagggcaactatagtgaggccttattgccaggagggagggttttggttgctggcgcttgtgtataaaggggcaagagcagctcctttggactattcctgggaggactctgatgcagggcgtctgttgctcccctgggtcacctcctccctgctcgctgacatctggggctttgaccctttcttttttaatctacttttgctaagatgcatttaataaaaaaaannnnnnnnnnnnnnnngtgtgagggacaaaatgcaaacctatttcccttgcctcataggcttctgggatgtcatcacctccagtttgttggttttgtttccaactgttaataaagcattgaaacagtnnnnnnnnnnnnnnnnnnnnnnnnnnnnnnnnnnnnnnnnnnnnnnnnnnnnnnnnnnnnnnnnnnnnnnnnnnnnnnnnnnnnnnnnnnnnnnnnnnttcttaaacacccttttttaaggaacacagcaaaaaaacggttngggccctcgccccgcgcgggatattaaaaaaaatttctatccctcttgcgggggccgcg

SEQ ID NO: 73701 - DNA, 1096 bp, Homo Sapiens
ttaaggctaggtagcgaggcctgggtgttgaattcggcacgaggtcatgaaaggggcggggaaacgaataaattgagccttgtacgcaggcgcaaatgctcgttgcatcctgggagtcgtagtgctcagcacggtagtgctacaaaaggactacatttccccaaatgcccgcaaagccttgtgcacgccttccggaaggagtttgttacacgaggtctgagagacagaggcagcgtgtttgagctgctggtgcggtggtcagcgcgatgcccaaggccaagggcaaaacccggaggcagaagtttggttacagtgtcaaccgaaagcgtctgaaccggaatgctcgacggaaggcagcgccgcggatcgaatgctcccacatccgacatgcctgggaccacgctaaatcggtacggcagaacctggccgagatggggttggctgtggaccccaacagggcggtgcccctccgtaagagaaaggtgaaggccatggaggtggacatagaggagaggcctaaagagcttgtacggaagccctatgtgctgaatgacctggaggcagaagccagccttccagaaaagaaaggaaatactctgtctcgggacctcattgactatgtacgctacatggtagagaaccacggggaggactataaggccatggcccgtgatgagaagaattactatcaagataccccaaaacagattcggagtaagatcaacgtctataaacgcttttacccagcagagtggcaagacttcctcgattctttgcagaagaggaagatggaggtggagtgactggtttacatcacagctgccccaggctgaggcgtcccccggaccagtgaagctggagccagggtgtaaggcaaggaggtgctgtgtggctccagaggagctggccaggtcccatggaatcagaaggttacacacacacgtgcacactccccgctctggggaaggaactgttctcagaggctccaatttatattcatctgggggttcacggaaaagccagaacctgctgttttcagggtgggtgatgtaaatatagtgtgtacataataaagcaaatatatcttacttctctg

SEQ ID NO: 73702 - DNA, 798 bp, Homo Sapiens
gggacacgaggtctgagagacagaggcagcgtgtttgagctgctggtgcggtggtcagcgcgatgcccaaggccaagggcaaaacccggaggcagaagtttggttacagtgtcaaccgaaagcgtctgaaccggaatgctcgacggaaggcagcgccgcggatcgaatgctcccacatccgacatgcctgggaccacgctaaatcggtacggcagaacctggccgagatggggttggctgtggaccccaacagggcggtgcccctccgtaagagaaaggtgaaggccatggaggtggacatagaggagaggcctaaagagcttgtacggaagccctatgtgctgaatgacctggaggcagaagccagccttccagaaaagaaaggaaatactctgtctcgggacctcattgactatgtacgctacatggtagagaaccacggggaggactataagagtggcaagacttcctcgattctttgcagaagaggaagatggaggtggagtgactggtttacatcacagctgccccaggctgaggcgtcccccggaccagtgaagctggagccagggtgtaaggcaaggaggtgctgtgtggctccagaggagctggccaggtcccatggaatcagaaggttacacacacacgtgcacactccccgctctggggaaggaactgttctcagaggctccaatttatattcatctgggggttcacggaaaagccagaacctgctgttttcagggtgggtgatgtaaatatagtgtgtacataataaagcaaatatattttacttct

SEQ ID NO: 73703 - DNA, 2218 bp, Homo Sapiens
  misc_feature (472)..(472): n is a, c, g, or t
  misc_feature (1997)..(2040): n is a, c, g, or t
ggagcgagcctgggtggcgattctcggcacgagggtcactttgtgcctcctgggaagacacagctggctcggtggactggactgaccagctgggtctcaggaacttggaagtgtccagctgtgtgggttctgggggctcgagcgaggccagggagagtgccgtgggacagatgggctggtcaggtggcctgagcttgagagacatgaacctgaccggctgtttggaaagtggagggtctgaagagccggggggaatcggagttggggagaaggactggacttctgatgttaatgtgaagagcaaagatttggctgaggtcggggagggaggaggccacagccaggccagagagagtggcgtggggcagactgactggtcaggtgtggaggccggagagttccttaaatcaggcagactggacacctgaccttgggctgagaaacatggccccaggggcagtctgcagtcctnggagagtccaaagagcttggggtgggccagatggactggggtaacaatctgggcctgagggatttggaggtgacctgtgacccagactctggaggttctcaggggctacggggatgtggagtggggcagatggactggacccaggacttggcgccccagaatgtggagctctttggggctccaagtgaagccagggagcatggggtgggcggggtgagccagtgcccagagcccggcctgaggcacaatggcagcttgtctcctggcctggaggccagagaccccttggaggccagggagctgggggttggtgagacaagtgggccagagacccagggtgaagattactcctcgtcttccttggagccacaccctgcagaccctggaatggagacaggagaagccctcagcttcggagcaagccctggcaggtgcccggcccgccccccaccctccggctcccagggcctgctggaggagatgctggcagccagcagctccaaggcggtggctcggagggagtcagcggcctcgggccttgggggcctgttggaggaggaaggagccggggcaggtgctgcccaagaggaggtgctggagcctggcagggactctccaccctcctggaggccgcagcctgatggtgaggccagccagacagaagacgtggatggcacctggggctcttcagcagccaggtggagcgatcaggggccagcacagacttctcggcgaccctcccaaggccctcctgccagatcccccagtcaggacttctccttcattgaggacaccgagatcctcgacagtgccatgtatcggagccgtgccaacttggggcgcaagcgtgggcaccgggccccggtcattcggcctgggggtaccttgggcctgtcggaggcagcagactcggatgcacacctgttccaggactctacagagccacgggcatctcgggtgccatcttcagatgaagaggtagtggaggaacctcagagccgccggacacggatgtcgttgggcaccaaggggctgaaagtcaacctctttcctggcctgagcccctcagccctgaaggccaagctgcgcccccggaatcgctcagctgaggagggagagctggctgagagcaagtcgagccagaaggagtccgcggtccagcgttcgaaatcctgcaaggtcccaggactgggaaagcccctcacgttacctcccaagccagagaaatcctcagggtcagaaggatcgtcgcccaactggcttcaagccctgaaactgaagaagaagaaggtctgagaagtcactgaggttcttcccacctggcagtctcaggcagtgcccattcctgtggggtccctgggtgaggagacggctggagccccaccatgccccaggctgcagcctctgtcccctccacctctgaggagcgtctggggaggcacatttatgcactttgtatcaccctccgaactccccccacaccttcccttccctggatttcatcactagtggttgaaggttttgnnnnnnnnnnnnnnnnnnnnnnnnnnnnnnnnnnnnnnnnnnnnagcctcccttgggttttcttttgataccaatttatagcattttttataaaagcctttgatttttataatgggtgggactgtatccctgcctcaccccaggtctccgtctgccccgccaggtaccccacagagaccaatgacattttgccacttgaaacaataaataaagttttttggg

SEQ ID NO: 73704 - DNA, 695 bp, Homo Sapiens
  misc_feature (14)..(14): n is a, c, g, or t
  misc_feature (467)..(520): n is a, c, g, or t
gagcccctcagccntgaaggccaagctgcgcccccggaatcgctcagctgaggagggagagctggctgagagcaagtcgagccagaaggagtccgcggtccagcgttcgaaatcctgcaaggtcccaggactgggaaagcccctcacgttacctcccaagccagagaaatcctcagggtcagaaggatcgtcgcccaactggcttcaagccctgaaactgaagaagaagaaggtctgagaagtcactgaggttcttcccacctggcagtctcaggcagtgcccattcctgtggggtccctgggtgaggagacggctggagccccaccatgccccaggctgcagcctctgtcccctccacctttgaggagcgtctggggaggcacatttatgcactttgtatcaccctccgaactccccccacaccttcccttccctggatttcatcactagtggttgaaggttttgnnnnnnnnnnnnnnnnnnnnnnnnnnnnnnnnnnnnnnnnnnnnnnnnnnnnnngggttttcttttgataccaatttatagcattttttataaaagcctttgatttttataatgggtgggactgtatccctgcctcaccccaggtctccgtctgccccgccaggtaccccacagagaccaatgacattttgccacttgaaacaataaataaagttttttgggaattggt

SEQ ID NO: 73705 - DNA, 1109 bp, Homo Sapiens
  misc_feature (902)..(921): n is a, c, g, or t
cctgggtggcgaattcggcacgaggggtgagtttagtcctcagttgttggcccccagcgagaggcagcatttagcccagggcagcaggactggagccgggacttctgcatcgaggccagtgagaggagctatcagtttggcatcattggcaacgacagagtgagtggtgctggctttagcccttctagcaagatggaaggtggtcactttgtgcctcctgggaagaccacagctggctcggtggactggactgaccagctgggtctcaggaacttggaagtgtccagctgtgtgggttctgggggctcgagcgaggccagggagagtgccgtgggacagatgggctggtcaggtggcctgagcttgagagacatgaacctgaccggctgtttggaaagtggagggtctgaagagccggggggaatcggagttggggagaaggactggacttctgatgttaatgtgaagagcaaagatttggctgaggtcggggagggaggaggccacagccaggccagagagagtggcgtggggcagactgactggtcaggtgtggaggccggagagttccttaaatcaagggagcgtggagttggacaggcagactggacacctgaccttgggctgagaaacatggccccaggggcagtctgcagtcctggagagtccaaagagcttggggtgggcccaaatggactggggtaacaatcctgggcctgagggattttggaggtgaccctgtgaccccagactcttggagggttctccaaggggctaccggggaatagtggaaatgggggccaaaatggaactgggaccccaaggacattggccgccccccaaaaatggtggaagcctcttctggggggcctcccaaagtggaaagcccaggggaaaccatnnnnnnnnnnnnnnnnnnnnttgtaacacccaagggccaccaaaaaggcccgagggcccccgagagggaaaacacagggcgcacagcttgttgctctccccctggggccccaccgcgaagagccccctatctgaaaacccccccattttagtgcgaagagagccccagggggctcgcctactttcggccgcgcggcgggggtacagac

SEQ ID NO: 73706 - DNA, 1296 bp, Homo Sapiens
  misc_feature (1209)..(1227): n is a, c, g, or t
gtggacatccccacaattggacagccatttcaagggagtgtttgaatcttttaaatggtatgactcagaaactgattctctatcaagaagctgctgctacgaatgggagagtgtcttcatcttacccagtggaacctaagaaattaaattctccagaagaaactgcttttcagacaccaaaatctagccagatgcctcggccttcagtgccaccattagttaaaacatcactgttttcttcaaaattatctacacctgatgttgtgagcccatttgggaccccatttggctctagtgtaatgaatcggatggctggaatttttgatgtaaacacctgctatgggtcaccgcaaagtcctcagctaataagaagggggccaagattgtggacatcagcttctgatcagcaaatgactgaattttctaatccttctccatctacctctattagtgctgagggtaagacaatgagacaacccagtgtgatttattcatggattcagaataaacgtgaacagattaagaatttcttgtcaaaacgggtgctgataatgtattttttcagtaagcacccagaggcctccattcaggctgttttttcagatgcccaaatgcatatttgggcattagaaggtctgtcgcacttagtagcagcatcatttacagaggatagatttggagttgtccagacgacactaccagctatccttaatactttgttgacactgcaagaggcagtcgacaagtactttaagcttcctcatgcttccagtaaaccaccccggatttcaggaagccttgtggacacttcatataaaacattaagatttgcattcagagcatcactgaaaactgccatctatcgaataactactacatttggtgaacatctgaatgctgtgcaagcatctgcagaacatcagaaaagacttcaacagttcttggagttcaaagaatagttaagtaatataaactgtgttcattacactgctgatacaactacagatgggacagtaaatgttcagcattcttggatcagaagaaaacggactaattagatgcttcctttgtcgtggtggttgctttgaaaactatactttaatgggagaaatcatggaaagaaattctcaacagaataactgaaaactgccttttctgtaccgattgctttttgtgtgtgtggtataataaaatctttattcaattttnnnnnnnnnnnnnnnnnnngccaacagccgcggccgcaagctttttccctttagtgagggttaatttcggctatggcacttggccgtc

SEQ ID NO: 73707 - DNA, 2312 bp, Homo Sapiens
  misc_feature (1705)..(1713): n is a, c, g, or t
  misc_feature (2230)..(2230): n is a, c, g, or t
cctgtatacttcaatcaaccagtccagccggggctaggccactctgaaaagacgggtacaacttgggatattcccatgtggttccactgggatctttcaataagatgcagaggtagtaaatcaccttctgcatgtaaatggcctcattgatgacaatatccttgaccttgcccatttctatgaaggtagtgctttctttgcctgaagcataagatgaagtcatctgaatgccaagggaatcaatgattaacagagtctcctgatcaatcttcacaaaatggagataaccaagcagacctaagagggtgatgaagatggcagcagagaggatcatgctgttctcgcagagggtgaagagtccgtaggccgccagccacaccgtgcaggtgacagcggtgagcgaacgcagcgagagccgagggcagctgaggcagaattcccggcaggacggggagtagtagcggcgccgcgcggtgcgggcggccgagtgggggcgtcatggaggatgagcaaagcttttcggatatctgcggcggccgcctggcgctgcagcgccgctactactccccgtcctgccgggaattctgcctcagctgccctcggctctcgctgcgttcgctcaccgctgtcacctgcacggtgtggctggcggcctacggactcttcaccctctgcgagaacagcatgatcctctctgctgccatcttcatcaccctcttaggtctgcttggttatctccattttgtgaagattgatcaggagactctgttaatcattgattcccttggcattcagatgacttcatcttatgcttcaggcaaagaaagcactaccttcatagaaatgggcaaggtcaaggatattgtcatcaatgaggccatttacatgcagaaggtgatttactacctctgcatcttattgaaagatccagtggaaccacatgggatatcccaagtagtacccgtcttccagagtgccaagccccggctggactgcttgattgaagtatacaggagctgccaggagatcctggcacaccagaaagccacatcaacaagcccatgagccccagcgttcagaaggccagcattgtcttccatgggagatgactcttaagccataggggctggttttccgtactccaaaccatcaggtggacacagtcctaggaaccattatggatgtagtgcatcttagagccatagagcaggtgactggaaatctaactcagtatatttccgtgtattatagtgttttccttgtaaggttttgcctactttaccaaaggaggggagaccttaagaattttgacacagtatgtcaaaagtaatgtcagcaaagaacactttcggaaattgctaagcatgttcaggtttactttgttgatgtttgtgaagcaaaacaatgggaaactgacatcagatgtcttgagaaagctatattttccaatagtaccccttgtgtaaagttacgaaaaaaacaagcccttcagtactggttagcaggaagaaatgtcctacaaaagacgagtctgtcaacctagtgcctgtgttctgtacagggcttatttatttactgttaataaacagatcttccaaaacacacagttacctggttcacagatagctgctttttattgacaaacaagatcatagtatttcagtcatggtgtcaagcacattaatacttttctgttactcagcannnnnnnnnatatcagttcaaaagctacttttgccaagaaggatgagacaaaaggccagacagaaattggactttggttttcagacatgggactctcatgttaacaaagaataaataagcaaatattgaatcctttgtttctaagttagtttcttctgtataagattaataaactaaagggttcctgaagggttggggaggagagagggtgggggaaatagattgaccccaaattcagtgtgaacacagctccattcttgtttactcttcctttggactcctacttttcttctaaactctctgggtagataatgttatccttattggccttagagatacccaagatattataaaaccagagctgttatgtctgtcaccagccctgcaggaattattcaggaacctgtggtacatgtgacttgttcgaggtagaaatgtctcagctagatccccaagttgtggggtgaaaagtgtgaacagaaatggctgtaaaactagttctggcctcgcagtttttgctgtgcanaagatacacacattgttggggttaaggcttggttttgggtgctactgctaatataagttttcagactttactgacatatagt

SEQ ID NO: 73708 - DNA, 674 bp, Homo Sapiens
gcagcgcggccggtgggatgcggggcggccggagccgtccgagggctcccgcacctcgggctgcgggaacattaaaatctccccagatgctcactgctctgatcatttcccctacagcaccagacatgttggcatcatctcttagttgggccatgtggccagggaacccttcatgaaaccacctctgcagtcctggagagttgctgtagaagaaggaaaagagaggaagacaacacaacacaggaggggataagtacctctggacacaatggaagtagtagttgttgagcagagggaaagggataggagaaggatgtggactgcagtgctgcagtgccagtggacatgagagaaagatcccatagccctcttggtcttggttggaacagaaggaaaatgaaaactggacatccatcttaggacttaatcctacggagaccacaagctggaagaggcactcaatactagcatggcttctgtggcattttgatgagtagtatgggctccacactgaaatattaatatcttattgttttgatgatgatgatgatgttcattggcccagggcaaaaggtaaaggttgtgttataaagctgatctattcaatatctgtggatgttaactccaccccatccccttattgaacaattacgatgcctataaatattgtattg

SEQ ID NO: 73709 - DNA, 445 bp, Homo Sapiens
tctcctatccctttccctcggctcaacaactactacttccattgtgtccacaggtacttatcccctcctgtgttgtgttgtcttcctctcttttccttcttctacagcaactctccaggactgcagaggtggtttcatgaagggttccctggccacatggcccaactaagagatgatgccaacatgtctggtgttttgtaaaacacttttgttgctataagctccatgaagagaaaatgcccagtggagtacctgaaatccgcagcccgaggtgcgggagccctcggacggactccggcccgccccgcagtccccaccggccgcgctgcggccccggctgacgacgagtcgagaaagtcacccgcgatgaccgcggacgcgaggggcgggccgcgtcgcgccgccccgcggaggcgccgcaaacttttcccggttcgcaagttgc

SEQ ID NO: 73710 - DNA, 526 bp, Homo Sapiens
cctttccctgctgtgaggtgggcaagttagttgctccaaaaacaagataaaatgattgagttcttttctcaagcgggagtcggagtttatctgctctgagagccccagcagctactattaatgagtgtctggaatatgttcctggcatttcacctaccctctctccaatccttccaagaaactcacaaagcagggctttttcttgaacttctcttcctcacaacagttaaatcatccatttaaagatgtcaaacaacctccgtgttctaagccagaccatcaacttaacttgtaaaactaccaactgttgctgcacacaggcaaaggaattaaacttggtagctgatcatttgattacatctatcagtctactggagggcttcaacgcagagtaggtggaattcatggttcaaatcagagtattaatgggatctgtttgcacaccaatacctgatctccttggcacaaatacagagctgattcttaaagcatgtccccacaataaagcttttcttaatcattaaaa

SEQ ID NO: 73711 - DNA, 736 bp, Homo Sapiens
aaaatctcaccagatgctcactgctctgatcatttcccctacagcaccagacatgttggcatcatctcttagttgggccatgtggccagggaacccttcatgaaaccacctctgcagtcctggagagttgctgtagaagaaggaaaagagaggaagacaacacaacacaggaggggataagtacctctggacacaatggaagtagtagttgttgagcagagggaaagggataggagaaggatgtggactgcagtgctgcagtgccagagccccagcagctactattaatgagtgtctggaatatgttcctggcatttcacctaccctctctccaatccttccaagaaactcacaaagcaggctttttcttgaacttctcttcctcacaacagttaaatcatccatttaaagatgtcaaacaacctccgtgttctaagaactatttactgagctctacggagacacagctacaagcaccacatgctggacccctgaatatggagggccaactacactagaaacacacacgctagctgagaaagatggtggcttaaggagatcaccagtttgtagtagaggcccactctcggaaggtttggtaaaaagttgttttgaatcataatgttggctttattggcatgttgaaaccatttacctctgtaattttccatttgttttcctttccaactaccactcctcctgcctgataaataaataccattgcaagattaaaaaa

SEQ ID NO: 73712 - DNA, 528 bp, Homo Sapiens
cagcaaacctttccctgctgtgaggtgggcaagttagttgctccaaaaacaagataaaatgattgagttcttttctcaagcgggagtcggagtttatctgctctgagagccccagcagctactattaatgagtgtctggaatatgttcctggcatttcacctaccctctctccaatccttccaagaaactcacaaagcagggctttttcttgaacttctcttcctcacaacagttaaatcatccatttaaagatgtcaaacaacctccgtgttctaagaactatttactgagctctacggagacacagctacaagcaccacatgctggacccctgaatatggagggccaactacactagaaacacacacgctagctgagaaagatggtggcttaagggtaagcatggaaagaggcaaggaggtgaggacagcaggactgatagataagctggggaggccagagctccacaaggacatccatttcacttatcagaatctaaaaataaacacgttgagataatagaaaaa

SEQ ID NO: 73713 - DNA, 1309 bp, Homo Sapiens
  misc_feature (78)..(112): n is a, c, g, or t
gaactgatgacactatgggcgtagcgtcgcagcagccgaacgacgagcgcagcgaagtagtgagcgaggaagcggcgnnnnnnnnnnnnnnnnnnnnnnnnnnnnnnnnnnncagtcgacggtaccggacatatgcccgggaattcggccattacggccggggatcagaagcgggagctgaggggagagagaggccggtcctggtctggccgctgcggctgctagcccgaggtctccaagccgggctgcggctccatcctcggctcctgggcaccgtctgcgaggctccgccgaccagagtgagaaagccgcgggcggcgaccgccgcatcatgtcagccaaggacgagcgggccagggagatcctgaggggcttcaaactaaattggatgaaccttcgggatgctgagacagggaagatactctggcaaggaacagaagacctgtctgtccctggtgtggagcatgaagcccgtgttcccaagaaaatcctcaagtgcaaggcagtgtctcgagaacttaatttttcttcgacagaacaaatggaaaaattccgcctggaacaaaaagtttacttcaaagggcaatgcctagaagaatggttcttcgagtttggctttgtgatccctaactccacaaatacctggcagtccttgatagaggcagcacccgagtcccagatgatgccagcaagcgtcttaactgggaacgttatcatagaaacaaagttttttgacgacgatcttcttgtaagcacatccagagtgagacttttctatgtttgaaagaagaatgtgtgtacatttcaagaatttgggttttttggagggaggaggaaactgtttacttttttcctccacacgtttgatttttgacacatacacccctaattccctcaacagcagaacctacctgcagccaccaggggaccagctctgtgtaggtaaccagatggctctttttcccaagccgccatcttccagctgaccagactaaactcccaaccccagaccagggcaggggacaggtctcaagtccttcccagcatacacacagggaacaaacacataccacaaaccggtaactgtacctgtcaccctccttgtctcctccttgggccctacaggctacacatctacctttggcccctggttttggaaaaattccgtgttcctgacccatgtttagttttttcctaccatttctatttcatacattctcatacatttaacttgtaaaatagactgtgatattattacataatgtaattaaaaatatgaattaaaatattcctacagtctttagcatgg

SEQ ID NO: 73714 - DNA, 1043 bp, Homo Sapiens
  misc_feature (146)..(146): n is a, c, g, or t
  misc_feature (183)..(397): n is a, c, g, or t
cgcacgcgctttacgtctgctttgtgctttgccacatgtctctgcctatccctgatcttgataccgtatacgctttgatgactgtacgttcccgcacccgacgaccgagcgcagcgatcatgagcgagaagcggagagcgcccatnacgcaaccgctttcccgcgcgttgccgatcataatgnnnnnnnnnnnnnnnnnnnnnnnnnnnnnnnnnnnnnnnnnnnnnnnnnnnnnnnnnnnnnnnnnnnnnnnnnnnnnnnnnnnnnnnnnnnnnnnnnnnnnnnnnnnnnnnnnnnnnnnnnnnnnnnnnnnnnnnnnnnnnnnnnnnnnnnnnnnnnnnnnnnnnnnnnnnnnnnnnnnnnnnnnnnnnnnnnnnnnnnnnnnnnnnnnnnnnnnaagaattcggcacgaggatggaggtggataccacaccaacagttgctggacagtttgaggatgcagatgttgatcactgaaaatgatttatgcaagtttaagattctgctcctaagtgtaggagagaacttggtcctcttccactctggagtgaagttaatgaaagtctttttccttttccaaaacccaacctgaaccagttctttcttgagacagactatactgagacaacaagttgtcaccagcagaagatagataatatgacctttattaacttgatgaattaacttaaccaagagggtatttgtagtttactatttaccctaaaactttctgtgtctgggtaccctctgagtaggcctataattcctaccttgactgtgtgcatcatttgtaagctagcagatctatgtggtgaaaatgcacaggagcttggtagactgcgggggaaagagagagctcctttcgccatgttttaccagtctgctgttataacctcttaggttgtatcctttaatttccagccttttaggttagtttctgtaacagaacaagtgagtctgggatgaagtcctctaaagtacttcaaaatggtaattgttttgtttttgtaatagcttaacaaataaacctagttttctatatt

SEQ ID NO: 73715 - DNA, 1453 bp, Homo Sapiens
  misc_feature (1368)..(1391): n is a, c, g, or t
gggctcttccagggcgggcggtgtggtgcacgcattgctgtgctccaactccctcagggcctgtgttgccgcactctgctgctatgagcttcctcaaaagtttcccgccgcctgggccagcggaggggctcctgcggcagcagccagacactgaggctgtgctgaacgggaagggcctcggcactggtaccctttacatcgctgagagccgctgtcttggttagatggctctggattaggattctcactggaataccccaccattagtttacatgcattatccaaggaccgaagtgactgtctaggagagcatttgtatgttatggtgaatgccaaatttgaagaagaatcaaaagaacctgttgctgatgaagaagaggaagacagtgatgatgatgctgaaccctattactgaatttagatttgtgcctagtgataaatcagcgttggaggcaatgttcactgcaatgtgcgaatgccaggccttgcatccagatcctgaggatgaggattcagatgactacgatggagaagaatatgatgtggaagcacatgaacaaggacagggggacatccctacattttacacctatgaagaaggattatcccatctaacagcagaaggccaagccacactggagagattagaaggaatgctttctcagtctgtgagcagccagtataatatggctggggtcaggacagaagattcaataagagattatgaagatgggatggaggtggataccacaccaacagttgctggacagtttgaggatgcagatgttgatcactgaaaatgatttatgcaagtttaagattctgctcctaagtgtaggagagaacttggtgcctcttccactctggagtgaagttaatgaaagtctttttccttttccaaaacccaacctgaaccagttctttcttgagacagactatactgagacaacaagttgtcaccagcagaagatagataatatgacctttattaacttgatgaattaacttaaccaagagggtatttgtagtttactatttaccctaaaactttctgtgtctgggtaccctctgagtaggcctataattcctaccttgactgtgtgcatcatttgtaagctagcagatctatgtggtgaaaatgcacaggagcttggtagactgcgggggaaagagagagctcctttcgccatgttttaccagtctgctgttataacctcttaggttgtatcctttaatttccagccttttaggttagtttctgtaacagaacaagtgagtctgggatgaagtcctcaaagtacttcaaatggtaattgttttgtttttgtaatagcttaacaaataaacctaggttttctatatcaaaannnnnnnnnnnnnnnnnnnnnnnnaaaacatgtcgggccggcctccggccctcgagaaagctttctaaaaacatttccgttttggg

SEQ ID NO: 73716 - DNA, 972 bp, Homo Sapiens
  misc_feature (191)..(191): n is a, c, g, or t
  misc_feature (193)..(193): n is a, c, g, or t
  misc_feature (208)..(208): n is a, c, g, or t
  misc_feature (221)..(221): n is a, c, g, or t
  misc_feature (246)..(246): n is a, c, g, or t
  misc_feature (274)..(274): n is a, c, g, or t
  misc_feature (279)..(279): n is a, c, g, or t
tttgtgacatttcttttccaccagtgctggtcagctttttgtttggaacacagagatccaataccactcccctgttattggatagtcccagtgtgcactgcacatcaggtgtgtctattagactcagtattttgtcaaagaatgcctactcagctgtgtagacatatagcatgaggttgcgaccatctgcntntgatcctgagcagcntgtccagaaactntggtcagtgatgcgcaggccaccgntaccagacgccctgaaacaggacacatngtttntgccctcaccctggcagccgcgtcacaataacagtctcctcctcctcccacctgagtttagcgcaggcttgaatgttagtcccaactctggccaaagatattttttccagagacagaggccaggaggcagtgaggggagccccgcggggaggcggcggcgactgcccacagcccttccagcctgtcttgctggccgccctggttcatatttgagtttaattgtactgaccctggacccagataagcagcaactttgtgtctttggggtcacagaacattttggggcagtttaatgtggtaccaaactgaaaataggagctatttatagatggagcagcacttagtgcttcatagaaagcaatgcctatttttaaagttacaaacgcagatatctacatagatatgctttgctgagaagttaggtctgtggtagaccagaaaccacaaattgactttttttcttagaaaatatttctatttgcggtaaatatagtaatatgtaaataatgtacatctgttgatttctggagtgtctgttattcaatgatgtatatactcccacagctcgcatgaaggaacagcctctattgatacttggttgtaaagtgaagtaagattggagggtggatggctgtcagagctcttgcagatactgtgttcactaaataaaaatcacatgtattgttaaaacaa

SEQ ID NO: 73717 - DNA, 1578 bp, Homo Sapiens
  misc_feature (33)..(33): n is a, c, g, or t
  misc_feature (365)..(365): n is a, c, g, or t
tccttggagccagagcatgaccttaatgatgtnagtctctaccccaactcaggcatgctcctgacggccaatgaaaccccaagatgggcatctattacattccagttttgggtcctgctcctcggtggtgttccttcttagacaacttgaccgaagaattagaagagaatccagaaagcacagtctatgatgattataaatttgtcaccaagaaagaccttgaaaatttagggctcacccacctcattggatctcctttcctccgggcatatatgcatgggtttttcatggatataagactctatcacaaggtgaaactgatggtaaatccatttgcttatgaagaatataggaaagataaaatncgacagaaaatagaagaaacacgtgcacagagagtccagttaaagaaattgccaaaagttaacaaagagctggcacttaaattaattgaggaagaagaggagaagcagaaatctacatggaaaaagaaagttaagagtcttcctaatattctcaccgatgatcgatttaaagttatgtttgagaaccctgacttccaagtagatgaagagagtgaagaatttaggcttctgaatccacttgtttcaaaaattagtgaaaaaaggaagaagaaactaagactcttagagcaacaagaacttcgtgaaaaagaagaggaggaagagccggaaggaaaaccaagtgatgcagaaagttcggagagttcagatgatgaaaaagcctgggttgaagaggtcagggaagcaacgcagactcctccagcaggaggaaaaagtgaagcggcaggaacgactcaaggaggaccagcagacagtcctaaagccccagttttatgagatcaaagcaggagaagaatttagaagcttcaaagattctgccacaaagcagaaactgatgaacaaaacccttgaagatcgtttgaaaattgaagcaaaaaatgggacattgagtgtatccgacaccaccgttggcagcaaacaattgacattcacgttaaagaggtctgaacagcagaagaagcaacaggaggctgagaaactgcatcgacaagaaaggaaaagactccgtcgttcggccggacacctgaagtcaagacacaaaagaggacggtcgtttcattgatttgggaagtggtcctacctgtgattagggaggggtacgtctcccccaaactgatcatcgttagggtgttaaacacagacgaggaaacacacgtttttaaagttcatgtacgttcttgtacacagaggtaaagatttgaaaacctgtgccttgtgggttggactttgaagctggccccgccgacggccaccgcacagccccaggggtgtgcttgcgagtcgttgctccctggaaacattgtcctttccccacggctttaatcatgaaaaccaggctggggtttttttaatattgtgaaatgtacaccatgaaatgaaaggtttatcctgtgccagaaaccaaggtttatcatgctctaggaacttttttcttacactgcctaccgccattcatgattaaaccatccagaaataccatccctgttttacctgg

SEQ ID NO: 73718 - DNA, 1051 bp, Homo Sapiens
  misc_feature (130)..(130): n is a, c, g, or t
  misc_feature (195)..(195): n is a, c, g, or t
  misc_feature (205)..(205): n is a, c, g, or t
  misc_feature (276)..(276): n is a, c, g, or t
  misc_feature (286)..(286): n is a, c, g, or t
  misc_feature (289)..(289): n is a, c, g, or t
  misc_feature (309)..(309): n is a, c, g, or t
tgtgttgattgacgatacattcaccaggaacgttgactgatacgaattatagatcatttaggatttgcctcgagccagaatcgcacgagcttttgcattatctgagcagtaacatccttgtatcagcatntaacagttggattactatcagtatctatccaaactacattactctccagtatagatctgtgctcntgaccaaaangtgagaaaacaatgtaaaaatatagatgcttccattgaaatggagtgaaacattgttctatatgtgtcttntaaaatattntcntattaaaaacttgctgtctntatataacttaccctttttatgcatatcaatagtattagtaagatgtgttctataattatgtaattgtagatactgttatgcattgtccagtgacatcataaggcaggccctactgctgtatcttttctaccttcttatttgtaatagaaactatagaatgtatgactaaaaagtcactttgagattgacttttttaaaaagttattaccttctgctgttgcaaagtgcaaaactgtgagtggaattgttttattctgacttaatgtgttagaaattagagaatacagtgggaggatttttagacattgctgctgctgttacccaaggtattttagataaaaaatttttaataaacatccctttggtatttaaagtggaacatttagcctgttcattttaatctaaagcaaaaagtaatttgggtcaaaatattggtatatttgtaaagcgccttaatatatccctttgtggaaggcactacacagtttacttttatattgtattgtgtatataagtattttgtattaaaattgaatcagtggcaacattaaagttttataaaatcatgctttgttagaaaaagaattacagctttgcaatataactaattgtttcgcataattctgaatgtaatagatatgaataatcagcctgtgtttttaatgaacttatttgtattttcccaatcattttctcgtagtgtaatgtttgctgggataataaaaaaaattcaaatctttc

SEQ ID NO: 73719 - DNA, 1457 bp, Homo Sapiens
  misc_feature (1254)..(1254): n is a, c, g, or t
gggatccaaattacgcttatgcctatactctattagggcatgagtttgtcttaactgaagaattggacaaagcattagcttgttttcgaaatgctatcagagtcaatcctagacattataatgcatggtatggtttaggaatgatttattacaagcaagaaaaattcagccttgcagaaatgcatttccaaaaagcgcttgatatcaaccctcaaagttcagttttactttgccacattggagtagttcaacatgcactgaaaaaatcagagaaggctttggataccctaaacaaagccattgtcattgatcccaagaaccctctatgcaaatttcacagagcctcagttttatttgcaaatgaaaaatataagtctgctttacaagaacttgaagaattgaaacaaattgttcccaaagaatccctcgtttacttcttaataggaaaggtttacaagaagttaggtcaaacgcacctcgccctgatgaatttctcttgggctatggatttagatcctaaaggagccaataaccagattaaagaggcaattgataagcgttatcttccagatgatgaggagccaataacccaagaagaacagatcatgggaacagatgaatcccaggagagcagcatgacagatgcggatgacacacaacttcatgcagctgaaagtgatgaattttaacttctggaaatcagacttttacaactggatgtgtgactagtgctgacgtgtttcttgtccctctgtatactgagtctttactcttgagctggcggtgtcatcgtccgtcacttataccatgagtgtgccactttcattggaccctgactgtatacagaatgaaaggcagtgcaatatttagctgctaacaagactggctcttttaccagtatgaatgacaatttatggggggtagggtggggaactttcttttctgtttttctttaatctccctttgttggaaagtatcatgaaaggaagagttatgctttatcttgaaggaaccattagatatggaaaatagtgatgaaccagagtttcttggttgctttttcaaaaatttgtttttatttggttctgttcctgataaacagagtaactgaccttcatttctaggttcttcaagaatggtgtttgcaagtgccagatggaacaataaaagacgttgcctataacagtgacttgattgccaaggaatgtaaattaccttaaacttgcagtatctcccataaacaaatgtaatggngcatattgggactcgtatgtaggaatcaaatatccctccatacagtgtactcttattcttggcaagaatgctttaatgtctaaccaagaattttaatttattcatcttgcttcaaagtgttgatcattgttgtcttggtattgcaaactttaaaattgtttcttaccatattgcctcttctctttgagcttctgtggggatca

SEQ ID NO: 73720 - DNA, 984 bp, Homo Sapiens
  misc_feature (102)..(136): n is a, c, g, or t
  misc_feature (250)..(259): n is a, c, g, or t
  misc_feature (464)..(490): n is a, c, g, or t
  misc_feature (641)..(679): n is a, c, g, or t
  misc_feature (913)..(922): n is a, c, g, or t
aggcaaatgacaagcgataggctattgcaacttgagaaagagaactgctccttcatcgtaaatttagaagaccaagtagataatggaaccaaagttgttacnnnnnnnnnnnnnnnnnnnnnnnnnnnnnnnnnnntgtacctctacagagaccaaaactcattctcttaaagagattttatggggctactgcagataaaaataggacacaatattaaaggagctacagaaggaagggagtcccatctcnnnnnnnnnntgaatgtatgccactgcaattagagtatccaataaaggagacagtttagagtcaggacagaaaagcttccataattgaactagattacataatagtatttctagaaaaagagatatttttagattgtatgccacttttgtttaagaactgtgctgtgatcactgtattaattttggtttatcttggcatatatccttcagtttgnnnnnnnnnnnnnnnnnnnnnnnnnnnccgattaggctttgggcagcatttttcatttaaaaaaaagtaacactcccatccactcataagcttgggacaaaaacttctctggcagttacttttgaagcttcactctgctttctgtataaagggcagtctgtggtcacgcaagactttnnnnnnnnnnnnnnnnnnnnnnnnnnnnnnnnnnnnnnncttttccaggcagcttcatgatgtgcaggcagtagccagacagggtcatgggaagggggccctgtgcttctaaactgagtggttgctggttagtttggtattcaaaagaggataaaaatctggtagattagttcattctcagcatgtgtagctagacatgagtaaagataacagcatgagaaactgttagtacgcatacctcagttcaaacctttagggaatgattaaaatttnnnnnnnnnncatttcactcagttgcacttagcggtatgtcttgcatgcttagtctaaagactgtagcaaaa

SEQ ID NO: 73721 - DNA, 1011 bp, Homo Sapiens
  misc_feature (62)..(71): n is a, c, g, or t
  misc_feature (305)..(343): n is a, c, g, or t
  misc_feature (494)..(520): n is a, c, g, or t
  misc_feature (725)..(735): n is a, c, g, or t
  misc_feature (849)..(883): n is a, c, g, or t
tttgctacagtctttagactaagcatgcaagacatacgactaagtgcaactgagtgaaatgnnnnnnnnnnaaattttaatcattccctaaaggtttgaactgaggtatgcgtactaacagtttctcatgctgttatctttactcatgtctagctacacatgctgagaatgaactaatctaccagatttttatcctcttttgaataccaaactaaccagcaaccactcagtttagaagcacagggcccccttcccatgaccctgtctggctactgcctgcacatcatgaagctgcctggaaaagnnnnnnnnnnnnnnnnnnnnnnnnnnnnnnnnnnnnnnnaaagtcttgcgtgaccacagactgccctttatacagaaagcagagtgaagcttcaaaagtaactgccagagaagtttttgtaccaagcttatgagtggatgggagtgttacttttctttaaatgaaaaatgctgaccaaagcctaatcggnnnnnnnnnnnnnnnnnnnnnnnnnnncaaactgaaggatatatgccaagataaaccaaaattaatacagtgatcacagcacagttcttaaacaaaagtggcatacaatctaaaaatatctctttttctagaaatactattatgtaatctagttcaattatggaagcttttctgtcctgactctaaactgtctcctttattggatactctaattgcagtggcatacattcannnnnnnnnnngagatgggactcccttccttctgtagctcctttaatattgtgtcctatttttatctgcagtagccccataaaatctctttaagagaatgagttttggtctctgtagaggtacannnnnnnnnnnnnnnnnnnnnnnnnnnnnnnnnnngtaacaactttggttccattatctacttggtcttctaaatttacgatgaaggagcagttctctttctcaggttgcaatagcctatcgcttgtcatttgcctctaaattcttttgcctcctttgatcac

SEQ ID NO: 73722 - DNA, 956 bp, Homo Sapiens
  misc_feature (121)..(131): n is a, c, g, or t
  misc_feature (809)..(843): n is a, c, g, or t
gctcatattaattagactgacaatatggccttggaaggctctcccttgtggaaccaagttgccatgggcttgggtgctctgcgataacgggtgtgggttggttttgtttgcaaaatggccnnnnnnnnnnnccggcttccccgagcagctgccctgaaagtaggggtggcggcggcggcgctgagtttatacattagttcagacctactgggtggcattaaactgtttgaatgcaaattcgatttcagattgaacttgttaagggagttaacgagggctgagttcagcaaatgctaaagtgttaatttcaaatatgcaaatttggtactgcagtttgttatgcaatattatatcaccaacccagtatcacaaaaactcatagaagatatcatgtaggccctgggctttgggggggtcccaaacatggtatgcagaaatgtgatggttacaggtcagtacaacctcagtccttagaacccctccacacttcagctctgcacccactttcctgtcatttatttatataggactgtagttttttttagttcgagagcctttcgaagcttaatttatattctttctttgtaccttttttctaaaattaccaaagatattacacaaaggtaaattatgttctctgttttatgctttatctgatgaagccaaatatcctcttattgttgatcaaaggaggcaaaagaatttagaggcaaatgacaagcgataggctattgcaacctgagaaagagaactgctccttcatcgtaaatttagaagaccaagtagataatggaaccaaagttgttacnnnnnnnnnnnnnnnnnnnnnnnnnnnnnnnnnnntgtacctctacagagaccaaaactcattctcttaaagagattttatggggctactgcagataaaaataggacccaatattaaaggagctacagaaggaagggagtcccatctc

SEQ ID NO: 73723 - DNA, 1538 bp, Homo Sapiens
  misc_feature (42)..(42): n is a, c, g, or t
  misc_feature (52)..(52): n is a, c, g, or t
  misc_feature (54)..(54): n is a, c, g, or t
  misc_feature (57)..(57): n is a, c, g, or t
  misc_feature (105)..(105): n is a, c, g, or t
  misc_feature (107)..(107): n is a, c, g, or t
  misc_feature (165)..(165): n is a, c, g, or t
  misc_feature (245)..(245): n is a, c, g, or t
  misc_feature (277)..(277): n is a, c, g, or t
  misc_feature (1024)..(1246): n is a, c, g, or t
  misc_feature (1416)..(1416): n is a, c, g, or t
cgattatcgatccttgggattgctcgagccagaatcgcacgnggatcagtgntnggncagattgacccttagtctggggagactggtatacctgtgttgatgatntngcagaccttccctctcaaagacaccatctccttcagccccttatgggaccagcagctntgagcagccacagggctgtagagaagcaagcctggagtgcctgcaccgagtagcaggtcagggttcgtgtctcctcctcntgctgcagggctgcacatcccattgccccacntttgctttgtgtctccctctgtctagcttccagggcagggagcaggccccacctagggctgcaggcagtctggcctgtgccagcacggtctcctgtgcccaccagccccacaggtgctgtgctttgtgctcttggctgctgtgctgcgacagaatgggatgccaggaagagaagaaagggggtgcagtctgaggccaccaccccccttcctatctaagggagggctgaagacaaggggccggcattcagtgggcagcagaaaggagaggccccttgaagctgctcagtcagaggcccccgtccctccttttgccttccgcaggactgaagacctgaaggggctggcttttggagtgttgaggtgaatatctgggagcagagatcatgaatagctcagggcagtgaatggcgcaccaagagcagggctgtgtgtgggaggctgcagccaggattgcctcagctcctccccctcaggctgggaggatagcacaggctaggggctcggggtggagggtctcagctctgctgcccccaccccagtactagcctagcttcccaagctgtggcttagaggatagttggcttcctgcctctctcctctaaaatagcaagtctgggaaatcctggggtgagtggagtcaccccactcccagttgctggcagagactgagactaaagcatcacttaataaaccccccaagcccaaacaacgcgaccttatacatccctcactcgcgcccgttcgcnnnnnnnnnnnnnnnnnnnnnnnnnnnnnnnnnnnnnnnnnnnnnnnnnnnnnnnnnnnnnnnnnnnnnnnnnnnnnnnnnnnnnnnnnnnnnnnnnnnnnnnnnnnnnnnnnnnnnnnnnnnnnnnnnnnnnnnnnnnnnnnnnnnnnnnnnnnnnnnnnnnnnnnnnnnnnnnnnnnnnnnnnnnnnnnnnnnnnnnnnnnnnnnnnnnnnnnnnnnnnnntcctcccctagcgctacgcgaacgtccttgcttccgccgcgcccgcccgccgttcgcgtgcccgcctcttcctggcccgttcccatgttcgcgccctcggccgtcagctatgcctccctcgacccgcgtaacgtcctcccgccccgtcgggtccgccgtatactcgcctnacctcgcgcccctcccgccccacgagattgcgctgccagctcccgcaccctgcgatattgcgcagctcccgcgcacgccctgatctccgctacatgccccctctgctccccgttctcctccg

SEQ ID NO: 73724 - DNA, 2088 bp, Homo Sapiens
ggtacgaggcctggtggcgaattcggcacgaggggctcagctacgacttcagctcgaagtgtctcagctggagggcagcctgcagcagcccaaggcccagtcagccatgtctccctacctcgtccctgacacccaggccctctgccaccatctccctgtcatccgccaactggccaccagtggccgcttcattgtcatcatcccaaggacagtgatcgatggcctggatttgctgaagaaggaacacccaggggcccgggatgggattcggtacctggaggcagagtttaaaaaaggaaacaggtacattcgctgccagaaagaggtgggaaagagctttgagcggcataagctgaagaggcaggatgcagatgcctggactctctataagatcctagacagctgcaaacagctgactctggcccagggggcaggtgaggaggatccgagtggcatggtgaccatcatcacaggccttccactggacaaccccagcgtgctttcaggccccatgcaggcagccctgcaggccgctgcccacgccagtgtggacatcaagaatgttctggacttctacaagcagtggaaggaaattggttgatactgacccccaggccctgcagtggggctgactccagatctctcctgccctccctggcagccaggaccagcacctgtagtcaccccaccacacgcagactcatgcacgcacacaggagggaggcctagctgctcagaggctgcaggaagggcccaggagccggctgggagggtggggtccctttgttgccaagacgttaggaaagcgaggaaagtgcttggattaggagagtcttgtgggcccctggccagccttcctgcctcagctcccctgctgtctccaggggcaggtggtaggcatgggtacctgcatttcactggagtgggttcttggatctctgaggggaaggaacagcaaaagaggcccttcttcctcacccaagatgcagggtggttggggccaggagtttggaccctctaggtcttgggggaagagctgggtaatacctggtgtctgagtgattctctgcagacccttcccctcctcaaggatcacccatcctcctttcagccccctttatggggaccaggcagctctggagccagccacaggggctgttagagaagcaaggcctggagtggcctgcaccgagtagcagggtcagggttcgtgtgctcctcctcctgctgcaggggctgcacatcccattgccccacttctgctttgtgtctccctctgtctagcttccagggcagggagcaggccccacctagggctgcaggcagtctggcctgtgccagcacggtctcctgtgcccaccagccccacaggtgctgtgctttgtgctcttggctgctgtgctgggacagaatgggatgccaggaagagaagaaagggggtgcagtctgaggccaccaccccccttcctatctaagggagggctgaagacaaggggccggcattcagtgggcagcagaaaggagaggccccttgaagctgctcagtcagaggcccccgtccctccttttgccttccgcaggactgaagacctgaaggggctggcttttggagtgttgaggtgaatatctgggagcagagatcatgaatagctcagggcagtgaatgacgcaccaagagcaggatgagtgtggaaggctggcaacaggaaggcctcaggtctccgccacaaggcgggacgatagccaggccaagggcccggaagagggcacgcacgagaccaaccaagaaacacaagtaccaaagggcgctagcgcgcactcgaaccgcgacacacctaaaatggaggcgggacaccctgggtcgaggaaggtgcccgaagcacgagagaggggagaacggaacaagagcggtaaggagccaagcgagaacaacaaaacaacagaagacagcgggcgaagagcgcacatgcgagcagcaggaggaggagagcggaacgagacagacggaagaagaggagcaggccgacgacagcagacgacgcaagcagcaagcaagcactacaacccagagcagcacgaggcagagtg

SEQ ID NO: 73725 - DNA, 302 bp, Homo Sapiens
tatcagctcggcacggttactggacttctgccaagtatattgctggcagaaggtcatgttttcagagaactttgggagccctctagggagccaggtcccttctctgcctgaagagtgtactgaggtgagctcagatacttcctccagagccccttgtcacagcagtctgagcttatctgttttgtctttccctaccttgcccaccagtgatcgatggcctggatttgctgaagaaggaacacccaggggcccgggatgggattcggtacctggaggcagagtttaaagaaggtcccggtgtg

SEQ ID NO: 73726 - DNA, 676 bp, Homo Sapiens
  misc_feature (16)..(16): n is a, c, g, or t
  misc_feature (25)..(25): n is a, c, g, or t
  misc_feature (417)..(443): n is a, c, g, or t
gacatcgaccaccctntgcccctcntgcagtcagaacccgagtagtgcaagaacggccacccggtttgccagcgttcagcgtctgcccatggacccataaggcacattagcgttgggggtctcttttcagcagcctcacagacattcccgtcctttctggttggtgttgactgtgtttcagcatcactctaccctcccatgtccttagcattgctgtgcgtgtttccaggcacttaggacacccttccccacgttgccatcttactgacagttcaaatgactctccttttttgttcgttagtaacaatcttcatttgacaccttaatacatttctgactgttcttaaaacagtggggatgcctatattttccttgagtttttgtgactgactttggctatatatacctttctggggnnnnnnnnnnnnnnnnnnnnnnnnnnnattaccgagggtatttggggtggggttgttttttgagatgtgtaattcttttatggagtttttaaaaagaattttcatattgtttttctaacatggcttcattaaacgtttaagtattttaaaaatatgtaatatttggaccagatgttgtgaataatagtagagataaagctattttattctgtatttttaaaactgttccgtacaaataaaagctctcctggacacaaaaa

SEQ ID NO: 73727 - DNA, 1100 bp, Homo Sapiens
agccccaggaggtattgaaggacaggagagatgtcaggtggggatgaagaagaggggcaggtcgggggagggtgatgccagtgattccaaggcaccgccatgtactgcactgccctggtcgaatgctcggtgtctgggtggcagctgagctgggactcaaggtggctcttggaacctgggaggcagcatctgggggcagtggatagaacacccggcctgtttctggttgcagatggttgccgatctgcccttgtcacagataggctacatcccagggtttctggctgcaagtgagactccaccctccccacctggctcatttccccgatgaccctggattgtaggaaagttaagcaggcaccatcctggaagtctacccctaggtggtcgagagacctgttctttcacacatgtgagaagccccaggatgattgaccatggtgttcaggagcggggagcactgatgaggtgctggggatgacaggaaggaaggaacactgggcagaaccagagagatgggacatggtagactgtggcccagaccccagagcagagaaacttgttcccacgacccttcccaaatctgctccagcaggactaaggtggctttcccactcctggcccacagccccagagagcctgtctgtgcatcctgaaccactctgtgctgggcctccgcaagggcctctcttgggtctgtgtcctttttcaagcctgtttagatggggggagtgcccatgccctctgtgaagtgcccaaatgcgaaagaataacaccttttcttgcattctgagctaagccagacagcctttatactagattctatcaaaatcttgcaaaggaaaacaaaatgaacaacttctacccttaaacacatcctttctcccctgggcttgtaagaagatgcagcttgatgcagctcctcaaacaccaggccccctgggaactgggggtgtgggagttctccctctgggggacagaaaatctgactactaggaagacttctaggctatgaaactgacttctaggctatgaaacttacagggtatgggtgggcacattatcctttattttatgaaaaatacaaatgtgtgtatgtg

SEQ ID NO: 73728 - DNA, 1218 bp, Homo Sapiens
  misc_feature (929)..(938): n is a, c, g, or t
cagtcgacggtaccggacatatgcccgggaattcggccattacggccggggtatagggttttcatactaatcatgttttaaataataattatattttctgactgcaggcacgtgacacaagctgacctcaagagctccacgttttggcttcgagcaagttttggtgctactgtttttgcagttttgggctttgctatgtacaaagcattattgaaacagcgatgatataaaaagaaatactgtccctaccaaaaacaaatacttttatgtacattctgaatgctttaagttctgctagaattattgagatatttatacatgcagagttactttattaatatttgtaattcatgcataagagtattttaatgatagttataactgcagtattggctagcatatggaaagaaaacagctaacagccaaactaaaatggctaaattccagaggccaaaagggaatattttgtaaatatatgtacatattcaggcaagatatggtctcccaagctgagttctagaaatgatgtttctagacatttctaagtggtattgttagtgctcacttggctcactcttctaggtttaagttagcccagagattgtatttactcatggatcactttatttatttcacatttactcagaatgatcctttgggttctataaggacataaggtacaatttgccattgtctctccatttttaaaaacatacaagtcagtgtcagcttaccaacatgacattttttcagtcagttgtggtaggccagccttgaagccatcgcacagtctagaaacttgtgtagctgagtgtgcagctcacctttaagggtgaagttaggtaaaagcaattagcagaggcgttatctatgtgattatgttgcttccttgtcagtatgttgaattttatagccctttcaatgaaatnnnnnnnnnntttgtatattaccaatgtttttagtttaaataaagagtcacccttactactgttgaatttcatcccaagtgtaaatcattctataatggctgtgtctgttatagtatattacagtaactgcatgtgtcaccaagtgttctatatcaggctaggataacctagaggcagtaattttttaaatgataaaataaatctaatgaatataaactctcatgataaacctattttttccatcatcagccttttcaagtatttaaataaataactgctgtgtactgtg

SEQ ID NO: 73729 - DNA, 572 bp, Homo Sapiens
  misc_feature (33)..(33): n is a, c, g, or t
  misc_feature (44)..(44): n is a, c, g, or t
acacacttgcagttactgtaatcacaagattanagaagtacatntatgtagtaaggaagacaacgtaatatatagctaggcaggaagcctgaccaagcagtgcgtttctacataattactaaatgttaattatggcaagaaaggagatttggtcattctctaagaaaatatcaacaaaatcccacagaagtcataaagaaaaagtaacttacaaagcagtttttagaaagacccagatttttctcaaattctctattctatcagtgtggcccatgtctcgggagagtctgtctctgtaatgatcctctctgtagataacatacatgagagttttaaagcaaaggtaaaacataaataaggttttggttattctataataataggaatgacttgtcttcgaatacaaatagaaattcaagggtttgttgcatctaaaaaaagtattaggtaataaaatagcagtaaagttaactgactttaaaaatctgtacaaatcaacacctttttgaaaaatgtcattcttggtttatagcaatgtttgattattactatgtgttacactgtagttttca

SEQ ID NO: 73730 - DNA, 872 bp, Homo Sapiens
gggtttcgagtgaaggtggaagcggccgcggcggcagcagaccccagagtcagaaggagtgagaaccctgacccctaatcccactgcatccagccaataggagcccagccaccatggcggagctgcaggaggtgcagatcacagaggagaagccactgttgccaggacagacgcctgaggcggccaaggaggctgagttagctgcccgaatcctcctggaccagggacagactcactctgtggagacaccatacggctctgtcactttcactgtctatggcacccccaaacccaaacgcccagcgatccttacctaccacgatgtgggactcaactataaatcttgcttccagccactgtttcagttcgaggacatgcaggaaatcattcagaactttgtgcgggttcatgtggatgcccctggaatggaagagggagcccctgtgttccctttgggatatcagtacccatctctggaccagcttgcagacatgatcccttgcgtcctgcagtacctaaatttctctacaataattggagttggtgttggagctggagcctacatcctggcgagatatgctcttaaccacccggacactgttgaaagccttgtcctcatcaacattgatcccaatgccaaagggttggatgggattgggcaacccacaagctaacagggcctcaccctcttcctttccgggagaatgatccttgggacattcttttttcagccagggaaagagctcctctgggaaatttcctgagttggataccaaaagggtcccgaaaatatttcattacaccttggcacccaaactttacaccttagagaggattttcaacctttaactttggaaccgcctcctgacccc

SEQ ID NO: 73731 - DNA, 2326 bp, Homo Sapiens
  misc_feature (2136)..(2136): n is a, c, g, or t
ggcgtcgggacgcagcaaagagaggagagaccccagagtcagaaggagtgagaaccctgacccctaatcccactgcatccagccaataggagcccagccaccatggcggagctgcaggaggtgcagatcacagaggagaagccactgttgccaggacagacgcctgaggcggccaagactcactctgtggagacaccatacggctctgtcactttcactgtctatggcacccccaaacccaaacgcccagcgatccttacctaccacgatgtgggactcaactataaatcttgcttccagccactgtttcagttcgaggacatgcaggaaatcattcagaactttgtgcgggttcatgtggatgcccctggaatggaagagggagcccctgtgttccctttgggatatcagtacccatctctggaccagcttgcagacatgatcccttgcgtcctgcagtacctaaatttctctacaataattggagttggtgttggagctggagcctacatcctggcgagatatgctcttaaccacccggacactgttgaaggtctagtactcatcaacattgatcccaatgccaagggttggatggattgggcagcccacaagctaacaggcctcacctcttccattccggagatgatccttggacatcttttcagccaggaagagctctctggaaattctgagttgatacaaaagtacagaaatatcattacacatgcacccaacctggataacattgaattgtactggaacagctacaacaaccgccgagacctgaactttgagcgtggaggtgatatcaccctcaggtgtcctgtgatgctggtggtaggagaccaagcacctcatgaagatgcagtggtggaatgtaactcaaaactggaccccacccagacctcgttcctcaagatggctgactccggaggtcagccccagctgactcagccaggcaagctgaccgaggccttcaagtacttcctgcaaggcatgggctacatggcctcatcctgcatgactcgcctgtcccggtctcgtacagcctctctgaccagtgcagcatccgttgatggcaaccggtcccgctctcgcaccctgtcccagagcagcgagtctggaactctttcttcggggcccccggggcacaccatggaggtctcctgttgaatggcccttgttgccctagagtgggacccagccctcacctcccccagagctaacctgggaggtgctgaaggggcattgggccaccgtaagcaagggaaaaaaggcagatcatgcggggagatgaccttgatctttgattgctaccctaaccttgacctttaacccgtgattccccccagctcctggaagagatgtcctaatatctcttagggacccagacccctaaattctcctcctcccccattttgatgttaaggtggagagggcatatgcatcctctgtcctgatctaggtgtctatagctgaggggtaagaggttgttgtagttgtcctggtgcctccatcagactctccctacttgtcccatatttgcaaggggaggggatttggggctggggctccattcaccaaagctgaggtggcttctcattaaccctttaggactctgaagggtatggacctacgtgaatgtgtgtcagggggagacttgctggtgggttagtggtcctcaggatgtgatagaaacatccagtgtaaaaaggaagttggaatgggagttggcgggcagtgaacgagtgtggggaaggattggtgctggggcaacaggaaggggcctggggccgtttggctgcactaactttggtagctcagtgtgcatctagagtgggactggggagggagctaagcttgggctgggctgcttggggcttggcatagggtggaaagggctaccctggggctctgaccacactgtagtatgtgtggagggtgccctcccgtctcccacaacttctgctataacaataaactgtagaggaatctgagtaccgttattattctttgtctaggtgtgcctgcatcatgctcctcttcctatcttctccctgtccacgtctcatattctcttctcaaagtgatataaaccctgggagagggccttttgtggcataggcacctcancaaatatgaaccacctagaaactggctcttttccaatacaacggtggttgctttgatattgaaagattttttaagcctggggagaaaggaaacctttttaatccttaggaaacttcccttatcaactatgggggaactgaaaaaaggcccacgggattttcaaaaaaaccccccaacttctccccctttt

SEQ ID NO: 73732 - DNA, 1149 bp, Homo Sapiens
  misc_feature (521)..(535): n is a, c, g, or t
  misc_feature (629)..(645): n is a, c, g, or t
tcgggctccagccagaccttgtctggagctggctttttgctttatcacagcaaatggtggactcagtaagagagtggccgtactgagcctcattagtaatcacagcagtgagacactacttcacacccaccaggttgtcagaaccttaataatgtgacaatgtcaagtactattgaaatggggcaaccagtactacttgcatacactgttgctaggagtgccagtcagcacaaccactttggaaagcaatttaccaggcatcacctaataaagttgaatatgcacacatcttaacattcagcaagtccacgcctaggctgatactggagaatttctttcatgtcttccccagaggcatgtgccagagtgtttttaattgcaaaaccaagtatccattgacaataaaatggataaaacaaattgtgatagagccatacaatagaacactactcatcagtgaaaatgaatgacctacaaatgtatttttcatgagtaaatctcaaaactataacatttgagtnnnnnnnnnnnnnnngcaagtcagaatgatagagtgggcacatttataaaaagattgaaaatggaaaataaactattttatttaaggatacatacatgtgttaacactnnnnnnnnnnnnnnnnnggcaaaagttcaggagaatggttatctctggtggagaggaaagaattagggaggggcctgcaggtgcttgggaggaaccaatagtatcctgctccactgagtggtggacacgtggacactttatcattacttttaaagagtacatttacagtgtatatctgctcttttctaagtacattctatgatgcaaattttaaaatatagctatgccagatacataagctggtatttgggaagtatgttgggaggtacattttcttttaccctccttaaaagatttttacttgaattcaccattaatccttggccttgtttcttctccccgtctagagtgtttgtatgacagaatagcacaagaaactgtggatgaaactgaaattgcacagagactctccaaagtcaacaagtacatctgtgaaaaaatcatggatatcaataaatcctgtaaaaatgaagaacgaagggaagcaaaatacaatttgcaataaactttggatttttcat

SEQ ID NO: 73733 - DNA, 1256 bp, Homo Sapiens
  misc_feature (51)..(51): n is a, c, g, or t
tcccactcgctttggtcagtgggcttctgggtccccctttccctcaccggncctgtgtgggtggagaggcgtgagcaccctatctcagctgctattcgggcatgatgctttgtagagggtagagtagacagccccctcccctactcaccatggtatttctccttgaattcctctttcttgttttctttcctggttgtgtgaaccagttgctgctgtcatacccctggcagggccaggggacctctctttggtcatctctgtcctttcactggctgctgccccaggaagactcctctaggctctccatctttcccttgagagctggctccccaccccaacctgctcaggcaccacagaggatctaggtctctggctccccatacctggacccacatgggtgggtgcctgttgcatgtttaagagagaggggctgtgaggtgacagggcactagggccttcactcctttctccccttccatcctttctttaccagtgccacccatgtccctagctcccgggtattggggctgaggctctggggcctgtctccctgccagcgtgagggcaagaccccagagccttagctgagcaagcccagaggggcagcgtggcccctccctccccttttcctgccccgtcccatgcctcagcttgctgcttgtgccagttgcctgtttcgcttcagtgtttgattctagcacttacatgtgtcctccccaccaagccctctatctccttctaatccttcaacccctggccccctccccgtaacagtgacttttccagggaggaagaggcagcaggagctgttggccttggtttgcacagagcgggtagggctgtagggaaagcgggtgagctgttgtgctgctgggcctccctttggccctcgcttcccaccctacgatgtatgaaatgtatgtacagaccagagatgtttatacagccgataaagatggagtttccgtatttatcagtatggccggaaccaggagcctttctagtccactgggctaggaacaggactgctggatgggggcagccgaaggcagcttgctcatggggagatgtggaccaatgttgggccagggatgggaatcatatgttccatgggcctggctacaggcctgagcacagatacgtcccctgggagatgaggctttgaccttcctgtgaataagtgttgactccaatttcggctaaagtttatagaaattctttattattagacaaaaatagactctcttttttcccct

SEQ ID NO: 73734 - DNA, 534 bp, Homo Sapiens
  misc_feature (315)..(350): n is a, c, g, or t
ttcatacatatagttcttatctaaacttgttcagctaacttcatagatcagttacttagcaaattcatactgagtcttattttgggaagtcttcctgagggaagctgtacaaaactgaggtggtcaggttcatctcttcaaagtaccagttatacagccatctaaataggcataacttatggcaaaattataacaattttttttctttgcagtaaacgatacctcatctaagaggctctaatacctaaagagtttatccttaaaagtaaaagtgactttgtaccataaaataaccccaaagccactctctagggnnnnnnnnnnnnnnnnnnnnnnnnnnnnnnnnnnnnaacttagttttggaattacgttagctactttggttccatagaacaagttttcaacttggggtctacagttcctacagtgtgctcattgtctcagtgaagttcttttgttttcaaagattcatgggaacaaaatgtattttactgctacaactaaaatgtatttataataaaatgcctttttaat

SEQ ID NO: 73735 - DNA, 1806 bp, Homo Sapiens
ggtccggaattcccgggatgccgcgcgtcagggagctgtgccgtccgcccgtccgtctgcccgcaggcattgcccaagccagccgagccgccagagccgcgggccgcgggggtgtcgcggggcccaaccccaggatgctcccctgcgcctcctgcctacccgggtctctactgctctgggcgctgctactgttgctcttgggatcagcttctcctcaggattctgaagagcccgacagctacacggaatgcacagatggctatgagtgggacccagacagccagcactgccgggatgtcaacgagtgtctgaccatccctgaggcctgcaagggggaaatgaagtgcatcaaccactacgggggctacttgtgcctgccccgctccgctgccgtcatcaacgacctacacggcgagggacccccgccaccagtgcctcccgctcaacaccccaacccctgcccaccaggctatgagcccgtacgatcaggacagctgtgtggatgtggacgagtgtgcccaggccctgcacgactgtcgccccagccaggactgccataacttgcctggctcctatcagtgcacctggccctgatggttaccgcaagatcgggcccgagtgtgtggacatagacgagtgccgctaccgctactgccagcaccgctgcgtgaacctgcctggctccttccgctgccagtgcgagccgggcttccagctggggcctaacaaccgctcctgtgttgatgtgaacgagtgtgacatgggggccccatgcgagcagcgctgcttcaactcctatgggaccttcctgtgtcgctgccaccagggctatgagctgcatcgggatggcttctcctgcagtgatattgatgagtgtagctactccagctacctctgtcagtaccgctgcgtcaacgagccaggccgtttctcctgccactgcccacagggttaccagctgctggccacacgcctctgccaagacattgatgagtgtgagtctggtgcgcaccagtgctccgaggcccaaacctgtgtcaacttccatgggggctaccgctgcgtggacaccaaccgctgcgtggagccctacatccaggtctctgagaaccgctgtctctgcccggcctccaaccctctatgtcgagagcagccttcatccattgtgcaccgctacatgaccatcacctcggagcggagcgtgcccgctgacgtgttccagatccaggcgacctccgtctaccccggtgcctacaatgcctttcagatccgtgctggaaactcgcagggggacttttacattaggcaaatcaacaacgtcagcgccatgctggtcctcgcccggccggtgacgggcccccgggagtacgtgctggacctggagatggtcaccatgaattccctcatgagctaccgggccagctctgtactgaggctcaccgtctttgtaggggcctacaccttctgaggagcaggagggagccaccctccctgcagctaccctagctgaggagcctgttgtgaggggcagaatgagaaaggcccaggggcccccattgacaggagctgggagctctgcaccacgagcttcagtcaccccgagaggagaggaggtaacgaggagggcggactccaggccccggcccagagatttggacttggctggcttgcaggggtcctaagaaactccactctggacagcgccaggaggccctgggttccattcctaactctgcctcaaactgtacatttggataagccctagtagttccctgggcctgtttttctataaaacgaggcaactgg

SEQ ID NO: 73736 - DNA, 1835 bp, Homo Sapiens
  misc_feature (505)..(533): n is a, c, g, or t
ggccccccacagaaatttaggtcttcccagggggctttgggctgactggcatctattcagacccgcgagtgccctgaggggatgatgggaatcatagtccttcatgaaaaccagtcacaggggtagaagggtctttggggattccctccctttgtagggtaggagaaattggggggacgggcaaggagctcatttgtgtcccccacctcggggtctctagccgctgtctctgcccggcctccaaccctttatgtcgagagcagccttcatccattgtgcaccgctacatgaccatcacctcggagcggagcgtgcccgctgacgtgttccagatccaggcgacctccgtctaccccggtgcctacaatgcctttcagatccgtgctggaaactcgcagggggacttttacattagggtaaggtttctgcaaccctcaactgacatgcacaatctaaaactgaactccaggacgccttaagggggaactcggccaggctgctatgnnnnnnnnnnnnnnnnnnnnnnnnnnnnnggaggcggggtttctgcaggaagacgggggtactctaaatgcaattctaacggttaaatgcaattctaacgaagcactcggacacgggagtttgagtcctggtactggttttccatattgatctcagtttcttcacccacaaaccaagggaatggcgtgtgcagggccctggggtcagaaagtccactccttgctagtggatctgttaggtgggagggggccaggggcggctcacagtgagctgctcacagtgactggcagccgcatgcatgggtctcagcaggagaaggggtttgtctagtaccagcccttctctttctttttgaaattgaatgctctgaagggagtctgctcactttgggtcaccaaaggtcccaccagtcccaagagccacatgtggccttgaatcgtcagttagcctgggtcagacagagcaggctggagagggtgagaagagccccagcaggagatttctgagggcaggagcctgggtggggaggagagacatcgagggtgtcaaagagctgcatgagaggctggggtggcagcctggccagggctgttcctctgcctcacggccacggggcagggaggtgacgctggggcaggggcctagcacacaggctgacacaatatatatgtccccccacccactgccctgcagcaaatcaacaacgtcagcgccatgctggtcctcgcccggccggtgacgggcccccgggagtacgtgctggacctggagatggtcaccatgaattccctcatgagctaccgggccagctctgtactgaggctcaccgtctttgtaggggcctacaccttctgaggagcaggagggagccaccctccctgcagctaccctagctgaggagcctgttgtgaggggcagaatgagaaaggcaataaagggagaaagaaagtcctggtggctgaggtgggcgggtcacactgcaggaagcctcaggctggggcagggtggcacttgggggggcaggccaagttcacctaaatgggggtctctatatgttcaggcccaggggcccccattgacaggagctgggagctctgcaccacgagcttcagtcaccccgagaggagaggaggtaacgaggagggcggactccaggccccggcccaaaaatttggacttggctggcttgcaggggtcctaagaaactccactctggacagcgccaggaggccctgggttccattcctaactctgcctcaaactgtacatttggataagccctagtagttccctgggcctgtttttctataaaacgaggcaactggactgtt

SEQ ID NO: 73737 - DNA, 710 bp, Homo Sapiens
  misc_feature (19)..(19): n is a, c, g, or t
  misc_feature (61)..(61): n is a, c, g, or t
  misc_feature (110)..(110): n is a, c, g, or t
  misc_feature (159)..(217): n is a, c, g, or t
agtccagaaaactacgttntgtcagtagcaatacactaggaagtaaaatatatttagaatntaaacattgtgtgccagtggtcatcgcgcttgactgcacatcagttacntgaagagccacacctcagatcaatgcagtcagaacctgggaagtaggtnnnnnnnnnnnnnnnnnnnnnnnnnnnnnnnnnnnnnnnnnnnnnnnnnnnnnnnnnnngaccacttttctgtgcattggcttgcacaatttgaaaataatgcttttcctgagctggatcccagtgttgccttaacagggtgtctgtcgtgccgcagtagagcactgctgcttcctccaaccccaaaatttatgttcctaagtaagtcaggtccctaagccccgtcccaagaagtgacacaagtggccaacatccacactgtaggcttgcaggctacccgccctgagatttggtaaagaacactgccttgttccccatcagtaaacaaggttacctacctcaggaggctgcttgtgagagagcaaatgcagtatcttcagaatgatttatttttttaattaattgtaaagacttgtgccattggctgctctttctagtcccctaaatttctgttctagttttaaatttctctagaacttgcaatagttgggggttttataatgatgttttacaatgtttatttcttaaataaaaacttaaaaattcaacatt

SEQ ID NO: 73738 - DNA, 1055 bp, Homo Sapiens
  misc_feature (227)..(336): n is a, c, g, or t
  misc_feature (988)..(988): n is a, c, g, or t
  misc_feature (996)..(996): n is a, c, g, or t
  misc_feature (1028)..(1028): n is a, c, g, or t
tcacatgagttcatcgcgtagccgcaagcctacagtgtggatgttggccacttgtgtcacttcttgggacggggcttagggacctgacttacttaggaacataaattttggggtggaggaagcagcagtgctctactgcggcacgacagacaccctgttaaggcaacactgggatccagctcaggaaaagcattattttcaaattgtgcaagccaatgcacagaaannnnnnnnnnnnnnnnnnnnnnnnnnnnnnnnnnnnnnnnnnnnnnnnnnnnnnnnnnnnnnnnnnnnnnnnnnnnnnnnnnnnnnnnnnnnnnnnnnnnnnnnnnnnnnttcaagtaactgatgtgcagtcaagcgcgaggaccactggcacacaatgtttaaattctaaatatattttacttcctagtgtattgctactgacaaaacgtagttttctggactcatcagaatgttaggctcataccttctggcaataaattaaggtagttaaaagtaactgctgaacctaaaatgaaggcagcagcaattagatataaaaaaatcttaagatcagcctgcaaattgtaaactagtttacaaagcaggctatacaatgaggaataattcgagcttgtagaaatccatggtttccaccagatacaggtattccggatctagaattatctttctatttgcaggatttccgaagagaccgttaagcatctacgcgccccttcctggatcccatgcttcttggggcaggaaatttcttttggtccgtcgctttcgtcgtgaaatacacaactaattttcctttcatgttataaggcaccatatttatgattttgttaactgaagaaaaaacccgagataaaccatcttaagtacttttaaaagtccagtggctgaattcggtgtttaatctgatacccttctggattcgctgacactggagagaataatttccaagtcttagtatagccaaaacaaaaaactaccntcgctaangctacatctaccactgggatttttaaaattgnccaaaacaggcctggagaaaaattcac

SEQ ID NO: 73739 - DNA, 708 bp, Homo Sapiens
  misc_feature (56)..(56): n is a, c, g, or t
  misc_feature (416)..(459): n is a, c, g, or t
gtgcagcataatgttcctgatgttaacagaagactgtatttgtaaagttacaaatntgtatatggaattaagtaatggcgctatataccctgttgtggggaggggggaagaaaaggaggaaccaattaaataggaccttttaaaaattgttaattttgtaaactttgcttctcttataagttattgtgattcattttagttactgtgttttattttgaaaatatttaaatattgcacttctataaatagtatgataaatgcacagacaattgcagtaaattcttttttaagctaggatatttgaaatgacaacctttggttaagtgtgtcaaggttgcaacagaattttcacaatttttttgttgtttgcaaattgttactaatattgaagaggtaagggaggcaatgcaaatgannnnnnnnnnnnnnnnnnnnnnnnnnnnnnnnnnnnnnnnnnnngtgactttatgcaaccatatttttactttgtcttgacaactgaaagatgtataaggttttttgccagaaatgtactgtatacatagttttaagtataacagattttactgatatgtaaaaattttgccattaaaataaatgatttctcactgagaggaacttttctaccaggttggggcatatgggagcttaatatatcatatctaatttaaaataatttcactgaaataaactccattgcttttccct

SEQ ID NO: 73740 - DNA, 1433 bp, Homo Sapiens
  misc_feature (68)..(102): n is a, c, g, or t
  misc_feature (1202)..(1245): n is a, c, g, or t
acctcaatgggcgcatgccgtcgcaccgaacgacgagcgcagcgagtagtgagcgaggaagcggccgnnnnnnnnnnnnnnnnnnnnnnnnnnnnnnnnnnncagtcgacggtaccggacatatgcccgggaattcggccattacggccgggtggatataacattattattattttgataaaatatggaacaaatcaattctattaataagtggtcacatttgttttgggcttaaattactttttaaagatactggattttcttaagatttctgatttacactgatattttttttgtcattcttaattgcatcacacaatagatgtaaatgaagatgtagtcacctcagataaaattggtatcgtgtatgataatattgtatcatttatatttgccttatgttaactttaagaaattgatttttttgtattaatcattttcccattgcaacagagctatattttttctattttaagaatcatattttaggattatttttggcaaatacagtgagcacttatgtaaccagatgataatgaactcaaatgtcatgatagcttgcataaatggtgactctagtagatttgactcaagcacttctagaatcatgcactgaattcaaaagaaaaatcttgctgctttttgtccagggcttgttctattcaacttctaatttgaaagctgtacaaagtaatagaagttccatttaaatatgagttcaaaactgtatttactttttatgtggccctctctttaggggattctaattttacttagggtctctaagtgcagcataatgttcctgatgttaacagaagactgtatttttaaagttacaaatttgtatatggaattaagtaatggcgctatatacgctgttgtggggaggggggaagaaaaggaggaaccaattaaataggaccttttaaaaattgttaattttgtaaactttgcttctcttataagttattgtgattcattttagttactgtgttttattttgaaaatatttaaatattgcacttctataaatagtatgataaatgcacagacaattgcagtaaattcttttttaagctaggatatttgaaatgacaacctttggttaagtgtgtcaaggttgcaacagaattttcacaatttttttgttgtttgcaaattgttactaatattgaagaggtaagggaggcaatgcaaatgannnnnnnnnnnnnnnnnnnnnnnnnnnnnnnnnnnnnnnnnnnngtgactttatgcaaccatatttttactttgtcttgacaactgaaagatgtataaggttttttgccagaaatgtactgtatacatagttttaagtataacagattttactgatatgtaaaaattttgccattaaaataaatgatttctcactgagaggaacttttctaccaggttggggcatatgggag

SEQ ID NO: 73741 - DNA, 1030 bp, Homo Sapiens
gagccagtgttttctgtaactggagacctcagttaggccaacttcgaattccagagcaacgtaggaagtctattcagcagaaactcgacattgttcagtgtgtattgctgtgcagggtgcctattgtgacaggacacaaatgttactatgttttaatttgctatatttttgaatgggtaaagcattactttacttctcttggttacttgtaccaccattccacccctatccctagcctgccccacaaatctaatattaggaagcctcttaactgaaaccaaatgaacatttgggtcaggtgccagatgtctgctgcctagaatagctttttctaggtgtctaccaccttgaatttatctcttaactgtgtgttcaagtctttgtcattgaaactagtttttcatatcttagattcagttgtgtatgatttaatgtcccttattaggagtctttaggcagggagggaagaaaaaacagatttgttcatagcaatgtcagtatccattttggcacataaagatttttgatgagccctgtttgcatagagccagatgttttcccctcccccaagagtatctacatcagggatgtgacttggtgcgaagagtcaggggaaagaggaaaaacccaatttctaaatgacctccttgcccagcttactaaaatggctgcagagcagacacaggatgaatttgaacctgacacaggatgaatttggaacctttggtctcatttatggaaaaacttgtgcaattttttttctgtgctacactacatacaaatcaccaaattacaaattacccttttgtgatccttggtgtactgagcagtttctttggggctttttctttctgggaagcgggagggaaaggagcaaggtgtcatcctgctcttcatttgtattttggtcccaaaatgtaaatacaattttctatgttacttttttgtggtaactaccgagatgaatattttaattagataagttatatgaaaaggaaaattccatgtctaaataaaaaacaaactccat

SEQ ID NO: 73742 - DNA, 959 bp, Homo Sapiens
  misc_feature (240)..(248): n is a, c, g, or t
gagctaaagtcagggaatcaagccatgcttaatatttaacaatcacttatatgtgtgtcgaagagtttgttttgtttgtcatgtattggtacaagcagatacagtataaactcacaaacacagatttgaaaataatgcacatatggtgttcaaatttgaacctttctcatggatttttgtggtgtgggccaatatggtgtttacattatataattcctgctgtggcaagtaaagcacacnnnnnnnnnctcctaaaatgtttttccctgtgtatcctattatggatactggttttgttaattatgattctttattttctctcctttttttaggatatagcagtaatgctattactgaaatgaatttcctttttctgaaatgtaatcattgatgcttgaatgatagaattttagtactgtaaacaggctttagtcattaatgtgagagacttagaaaaaatgcttagagtggactattaaatgtgcctaaatgaattttgcagtaactggtattcttgggttttcctacttaatacacagtaattcagaacttgtattctattatgagtttagcagtcttttggagtgaccagcaactttgatgtttgcactaagattttatttggaatgcaagagaggttgaaagaggattcagtagtacacatacaactaatttatttgaactatatgttgaagacatctaccagtttctccaaatgccttttttaaaactcatcacagaagattggtgaaaatgctgagtatgacacttttcttcttgcatgcatgtcagctacataaacagttttgtacaatgaaaattactaatttgtttgacattccatgttaaactacggtcatgttcagcttcattgcatgtaatgtagacctagtccatcagatcatgtgttctggagagtgttctttattcaataaagttttaatttagtataaaaaaaa

SEQ ID NO: 73743 - DNA, 1355 bp, Homo Sapiens
  misc_feature (197)..(256): n is a, c, g, or t
  misc_feature (393)..(404): n is a, c, g, or t
tcatggtttatttggaaatgtcagttgcaatcatggttctgtcatttgactgcacagtatcagaggagcctgttaacctctctgtgccttagtttcttagcccatgaaagagatcattgcctgacccagggactacctcaagggcttttgatgaggacaggtgacagtaggaagatgcaagagcctttagtaccaannnnnnnnnnnnnnnnnnnnnnnnnnnnnnnnnnnnnnnnnnnnnnnnnnnnnnnnnnnncactcttcccctgtacccccggacagttaaatcagaacctcagacagcaatatgccttgagatgccttgaaccatgcttgagaaggaaggacaaacacattattatcttggaagaattgcataaggcttatgacttnnnnnnnnnnnnttctttttggaaacacaagcatttctttaaggatgaccggatgttgccgtatgtatttatggcacaagcaggtgttgtctaagcagtttctctgtttgcttgtcatagcagcatttggaaactcaaacatgctttcatttacataaatagtttatgaagctttgacaacaaatgtaaacagacacgaaattataaatctgctaaatatgtattaagggtattaattattgaaagtccctttccccaaaactcaactcctatggcaattatgaactccattttaccaagaacatttaagtgcctcagcatctgtatgatatagtggagcaggtgctgacataggtaccagctgacatgatgtgtcactagctctgtgggatgattgccacatacatggaacacctgggagtgctggaaatgtactgggatcgaagtgacaaagtgtgttttcattcacagtggaggctacatcaagcaaggggaggtccagccctcttgcaagtgtggtgagaggctctactagcaaagacatgggcaccggagtaggtcccgtgtagcatgcgggtgctgtagagaaaattcagtgacgtacatggctctggttctggacacaaaatctgtactggagaggaaatgactgctgaaataaggcgattgtatgaatatttaaaatgcctggaacactaaagtaaagtaatgatatttcaagtgtttttgtgctctttggttcttgttgtaggtattgactgtcctgggatatcactggtcatttaaattcaccatataattagccgggcatggtggcatgtggtggtggctgaggtgggaggatcgcttgaggctgaggtgtgaggctgcagtgaaccatgttcacaccactgtactctagcttgagcaacagagcaagaccctgtctcaaaagtaaataaataataaagtaaatataaatcc

SEQ ID NO: 73744 - DNA, 662 bp, Homo Sapiens
  misc_feature (116)..(116): n is a, c, g, or t
acggactccctggactggctggaggccctgagcggggtcctcctctgggttctggtcccccaccccccagcatcttctccgctgacttatctgactccagcagcagccggctgtgngacctgctggaggatccatggtgatggattctaggatttacagagacagagaactgatgggggtggagagaagctccttgtgggaggagagggaactaccagcagagcccctcctaccgcagacacaggatcggagacaacctccaaccccacctgcctcctgaagtgctgctgacatgcaactgccttaactttgcctacctggcctccttatgatccccctccggcgtggtatggttggggggcttcttttgctgctggccacggcaaacaagctgcttgctgcttccttcagagacctcatggatgttcttacatgccccggaccccggtagatggctccctgttgtttggggagcctggaaggtggttatgccttttggatgcaggagaggagcaagaaagagtggagagggagaatgggggagccggaccctgacctccctgggttctggttggagatgaaaaaattagaagcatcaggtctaagatcagcttctcttggaagcagagcctgagacaagatataaatgccagtcatttatt

SEQ ID NO: 73745 - DNA, 924 bp, Homo Sapiens
cagtcgacggtaccggacatatgcccgggaattcggccattacggccgggaagcaaagtaagtgttgcagtggaagccagcgcagatagctcgaagacagacaagaaattgcaaattcaagaaaaagcagcacaagaggtaaaattggccatcaagccattttaccaaaataaagatatcaccaaggaagaatataaagaaattgtacggaaagcagtagataaagtttgtcatagtaagagtggagaagtaaattctactaaagtggcaaatctggttaaagcctatgtagacaaatacaaatattcacggaaggggagccaaaagaaaactctggaagaacctgtgtctactgaaaaaaacataggctgaaatggggaacgctgtcaaggacattatcaggatatctgcaaagtgcaatttcaacatgtaccattaactgaaaatcatacataactgtgattgaaatttggttttgataaaattatttttttaacataggatatgatgttttgttctaaataaatataggtctgcactgcaacttctgtatccttccttcccctccaccctcccccacaaaattcaagggaaagtaaagggtttaaaggaatgtgcatctttactaggactgtgttatagtgtggatactggaaaatgtatagctttttgattagggcaatggagtgcataaattagaaacttctaagtgcactggttttcaaagagatatatataatgcatttattctgtcaggttaaaatataaagtatgatctttatgattttttccctctaattatagaaagttaaataatgtattaccatgaaaaatgtttctaatattaaatagaacagatcagttgcaaagttcctaatgtgtatttttaaagcacatatctgaataaaaagaatagatagaaaa

SEQ ID NO: 73746 - DNA, 681 bp, Homo Sapiens
ttcatcctcagctacccttgcatctccacacaggagtgcccctcatgcaggtagccactcctaccagtgtatctaagggactaccaccaccaccaccccctcccccaccatcccaacaagtcaactacattgcttcacaaccagatggaaagcaattgcagggtattcctagttcttctcatgtaagtaataacatgagtacaccagttttgcctgctccgacagcagccccaggaaatacgggaatggttcagggaccaagttctggtaatacttcgtcatcaagtcacagcaaagcctctaatgctgctgtaaaattggcagaaagcaaagtaagtgttgcagtggaagccagcgcagatagctcgaagacagacaagaaattgcaaattcaagaaaaagcagcacaagaggtaaaattggccatcaagccattttaccaaaataaagatatcaccaaggaagaatataaagaaattgtacggaaagcagtagataaatgtgtactgctggaatgttccatccaaaagatgtagcttcagaagcacagtgattgccccagggtccatgagatattgtttgtattatgaagttggagtgctgtctactgaaattatactcttaaataaatatgtatgtagtgtgtaaaattttctaataaattcttttgataaactaaaa

SEQ ID NO: 73747 - DNA, 1639 bp, Homo Sapiens
  misc_feature (143)..(156): n is a, c, g, or t
gaatgaagtgttaatttggtgaccaggtggtagccattagccatgttgcaaaattctagacagtaaaacctgtgttttagaaacagaggggaaatttaaataatggagtcctggttagcctttcagggattagggatttgggnnnnnnnnnnnnnnctctttttaatactagaatatctcagtttttataaaaggtaagtttaaaatgtttatggtgccattattttaactggcatcttgaaagaacagtaggttttctccatgataaactgattccagtaagaattttcagtacataccaagtacctggaaagttcttcagataagttaatagatccaaggagatacatgcctcagtgagataaactgacctttttactagctaaactatttagccagagcaatactctgtagaactgtgcttttctaaagtaaagattatctgtttctcaattttatgtgcataatacttttcctggtgctagctttgataggcaaaatattttgaaatgttggtcccataatgattgtgctagttcataagctttgttgttatgagtgtaatcataaaaatatttccaagcagtttttgacctttattctacatttctgggcatttgtaatatggtattctactggtatatatttttaaagtttgcgtttagattatggtaaagaaatttcaagcatatttcttctaataaagtattaagacagtgtttcagaatatcaaggcacacctccttagttgttttagattagaactctagaaacaattttgtgaacattgaaagtattttgagttaagcctaagcgtgattaatcacacaatacatacttttcctgcattttctttcagtgacatttgagaattgggtgacattttaaaatgtgttttataccatttagcttttgcaaacaagttctaaagttttggagaaaaagtgatgtggtcaagagttgaagtctcatatatctttagtagcactcccatgaattatttccgtgacagtaacaagtgtgtgttccatgtctgatttggggcactggttagactgcattaatagctacttgattagaattcgaacttttaaaattttgaaatgtttaagaatgtattagaaaatgcatgctttatgttgaaaaaatacattgctttaatattcctcattcttgagttaagaaatttatgttaattttgcatgggcacaaacttaatcagaaacattttgtggagttacatttcctcttattatttatcaaggttcagtattgatctttgaaaccttggtcccgttaacttactagtcacattgaccaatgttttatagaaatgcctagaattttgagactaatagtagttatccattaacattccaaaagttttgtgctttttaaaatttgttttggtaattatcacatttttttctcttaccttcctttaaatggccacagtgtgtactgctggaatgttccatccaaaagatgtagcttcagaagcacagtgattgccccagggtccatgagatattgtttgtattatgaagttggagtgctgtctactgaaattatactcttaaataaatatgtatgtagtgtgtaatattttctaataaattcttttgataaactaaaaaaa

SEQ ID NO: 73748 - DNA, 961 bp, Homo Sapiens
  misc_feature (556)..(556): n is a, c, g, or t
  misc_feature (602)..(602): n is a, c, g, or t
  misc_feature (632)..(632): n is a, c, g, or t
  misc_feature (707)..(707): n is a, c, g, or t
  misc_feature (713)..(713): n is a, c, g, or t
  misc_feature (769)..(769): n is a, c, g, or t
  misc_feature (808)..(808): n is a, c, g, or t
cccaggtcaatgaggcagcaacattaacaaaaagtgagacatacttttttcttgcaagataattcaataattcttcccaaactgatgctccacagataatcctaagaggttttcattacatttagcctaatctggaagatctggcattctacatatcaaaaataactcccaggctgatatgaggccaacccatgagcactcaattccacacaggggcaatacctcaagcagagagagggcttcaggccaccccacttctggctctttccagtcctagcaggtaaaagaggagatccaggctaaattttctggcccttcaggaaggctggcacctctggctctccctacctggggaacctccagggctactggatcagcagggactttgggggttgtttatggacccagaatttgtgcaagaagctccatgcttgctgcccaacaaactcctgaatgatctcagcctctctctccttttctgaacacactcctttgttgaaaaaggagactaaacagattcaagaggctcactgatgtgcacttggcaatgacgctnttgtcaaaagaacacagaattttatttgtagcagcttgcaatgtcncagggccagagaggggtggatttctcttangacgcctgggagcatctcaaatggtaacatttgggacagcccagctgggggaatgctgcatttttagctgtgcanattgcnatgcacgtggaaccttgctgcacgcaacaggggaagcacagatcctttctatgcancagaggtctgacgggaaagtcccctctctcttcctctcntatccaggtggctgctgagtctctatccaacaattcccggcgcctgtcaagtattgggtaatgggacagaaaaaacactcagcccagctccctttggactgctcaatgaccctcttcagactctggataaaggaaacatagtggtcatagggc

SEQ ID NO: 73749 - DNA, 1651 bp, Homo Sapiens
gctggaccggtccggaattccctgcatgtgcccgcttccaaatggcggcggcggcggtatctggtgcgcttggccgggcgggctggaggctcctgcagctgcgatgcctgcccgtggcccgttgccgacaagccctggtgccgcgtgccttccatgcttcagctgtggggctaaggtcttcagatgagcagaagcagcagcctcccaactcattttctcagcagcattctgagacacagggggcagaaaaacctgatccagagtcttctcattcaccccccaggtatacagaccagggcggcgaggaggaggaggactatgaaagtgaggagcagttgcagcaccgcatcctgacggcagcccttgagtttgtgcccgcccacgggtggacagcagaggcgattgcagaaggagcccagtctctgggtctctccagtgcagcagccagcatgttcgggaaggatggcagtgagctaatactgcattttgtgacccagtgcaatacccggctcacacgtgtgctagaagaggagcagaagctggtacagttgggccaggcggagaagaggaagacagaccagttcctgagggatgcagtggaaaccagactgagaatgctgatcccatacattgagcactggccccgggccctcagcatcctcatgctccctcacaacatcccgtccagcctgagcctgctcaccagcatggtggatgacatgtggcattacgctggggaccagtccactgattttaactggtacacccgccgagccatgctggctgccatctacaacacaacagagctggtgatgatgcaagactcctctccagactttgaggacacttggcgcttcctggaaaaccgggttaatgatgcaatgaacatgggccacactgccaagcaggtaaagtccacaggagaggcactggtgcaaggactcatgggtgcagcagtgacgctcaagaacttgacaggtctaaaccagcgtcggtgagaggaaggggtataagctacaatgcctagaagagaatgagcggacagattgaaagagctttgaaaagtataaggtgccatccacataacctggtgttcacgagaacacactaaaggactcctgagtcactaccacagccacctggaaaccacaaggcatttgatgctaccgttctggtcagggattgggctgcttcttcagttcctaataccagaccaagcctcctgatgcctttctgcactgcaactgtgtgattgaaaaatgagatgttcatccaagcagtcaagccacagaaacccagcatgtccctgtcacaatctcatgggcaccttgatcatgtcttaaccttcccttaaccttggggctcccaagccagagtcaaggtctgacgccacctcaaggtgacagctcatctccagcacagcacaggcgtgtgcacacagaggtgttccttgcagccccctccctctcaggtgtcctgagatgctgctcctgggagccccctcagaaaactgcctcacctgagacaagtgcctgctggacagaggtgtgattccaggcctggtgtcacatgacaccagcatgcattgcaggattattagtgtattttgagtctgtaaaaataataaatatgtttgaagtagtttcccaaa

SEQ ID NO: 73750 - DNA, 906 bp, Homo Sapiens
  misc_feature (25)..(25): n is a, c, g, or t
ccatgtgaatataaacagtggtaanaaaagcaggctggtccggtccggaattccgggatatcgtcgacccacgcgtcggcggtatctggtgcgcttggcgggcgggctggaggctcctgcagctgcgatgcctgcccgtggccgttgccgacaagccctggtgccgcgtgccttccatgcttcagctgtggggctaaggtcttcagatgagcagaagcagcagcctcccaactcattttctcagcagcattctgagacacagggggcagaaaaacctgatccagagtcttctcattcaccccccaggtatacagaccagggcggcgaggaggaggaggactatgaaagtgaggagcagttgcagcaccgcatcctgacggcagcccttgagtttgtgcccgcccacgggtggacagcagaggcgattgcagaaggagcccagtctctgggtctctccagtgcagcagccagcatgttcgggaaggatggcagtgagctaatactgcattttgtgacccagtgcaatacccggctcacacgtgtgctagaagaggagcagaagctggtacagttgggccaggcggagaagaggaagacagaccagttcctgagggatgcagtggaaaccagactgagaatgctgatcccatacattgagcactggccccgggccctcagcatcctcatgctccctcacaaatcccgtccagcctgagcctgctcaccagcatggtggatgacatgtggcattacgctggggaccagtacactgattttacctggtacacccggcgagcatgctggtgccatctacaaacaaaagagctggtgattgatgcaggattcctctcaagactttgaggacaccttggggcttcctgggaaaacgggtaatgatgcaagacc

SEQ ID NO: 73751 - DNA, 1079 bp, Homo Sapiens
  misc_feature (363)..(363): n is a, c, g, or t
  misc_feature (420)..(420): n is a, c, g, or t
gacctgccacctccttagagagcaaccggtgcccggtgtttttttacagggcatagtccttttgttaattaagaaacttttttattgttttcttgagcacggaagggtggcctttccgaatggggagccgggggccttaaggtctggcagttgggtacccgggggaagggtgctgggtaggattacagcgtgcccatccccggtacctcggacgtcagcctggcgttgatgagatactggcaaaggctgatgtggccggggtccccgtgatggtgatctgacgctctgaggacccttcccgtggcgttggcgattttgatctgagctccagacatctgtcgaatttcattgattttggtcccntggcgtccaattatgcagcctattagatcatgggaatggtgagctcatgagtgctgnccggtgggctggcgtccagacctgatgactggcccatcagattttgagcttcttcggaggagtgtaaaggcagcttttctccggggaaagcggggttggtctgtccgaggggaggaaagggggtttgctgcatggccaactggtggagcttggtcaaatccgggtgagggatggcatactgtccctggattgtgtaggcctccagcatgaccacacagatctgcttgacgcactggatgatggcatctggggtccccgagatggtcaccgctcgctccgtggagttgggcagcatgtccccagccacctgcacctgggcacctgtggactccctgatctccttgatcttggagcctcctttgccgatcagggacccacactggctggcaggcaccaccagcctcagcgtcactgggggcttgctggtggcagggctgttgctcatggagttgatgatatcctcctcaaacttgtatgcgatcatggcaaaggccttgaagatggcgtctgtggggcctgtgatggtcacaatcctctctgggcagtttccctctgagatgttgatccttgcaccactctcctcacgcatcttcttcacagtttctcctttcttcccgatgatgcttccaacttcctttccatgcatcagcaggcggatg

SEQ ID NO: 73752 - DNA, 2413 bp, Homo Sapiens
  misc_feature (2336)..(2348): n is a, c, g, or t
aacaccctaagcgctaggtacgaggccgggtgttaactcggcacgaggtcgggaccgactgacggccggccggcttcccggaactggaaggttacattgattacccacctagtacaacatcttacgggaagagcatagtatttcctagaggaatatgaacataacaggaaggtatcattggctctgaattaaatttgaacttgtcccctgaatagctacaggttttggaagctgaatcaatgttatcagatgagttagaatccaaaccagagctcctggtacagtttgttcagaatacgtccatcccattgggacaggggcttgtagaatcagaagctaaagatattacttgcttgtccctccttcccgtgactgaagcctcagaatgcagtcggctaatgttaccagatgatactacaaatcattctaactcctccaaggaggtcccttcctcagctgtttggagaagccttcgggtgaatgtgggtccagacggagaggagacgagagctcagactgtacagaaatccccggagttttgtccacttcagagtcttctagcttgttgcaagatctacagccaagtgatagcacttcttttattcttcttaacctaaacaagagcaggtctgggctcttcagctgagcacttagtgttggtacaggatgaggcagaagattcagggcaatgatttcctctccagtgagagcacagacagaagcattccatggttcctcccgggttcaggagtggcccatgacagttgatgctgctactcgtgcacaactggcaaagaatgcaaaaaccagcagcaatggagaaaatgtccaccttggttctggtgatgggcagtcaaaagattctgggccccttcctcaagtggaaaagaagctcaagtgtacagttgaaggttgtgaccggacatttgtatggccagctcactttaaataccacctcaagactcatcgaaatgaccgctccttcatctgtcctgcagaaggttgtgggaaaagcttctatgtgctgcagaggctgaaggtgcacatgaggacccacaatggagagaagccctttatgtgccatgagtctgggctgtggtaagcagtgtactacagctggaaacctgaagaaccaccggcgcatccacacaggagagaaacctttcctttgtgaagcccaaggatgtggccgttcctttgctgagtattctagcctccgaaaacatctggtggttcactcaggagagaagcctcatcagtgccaagtctgtgggaagaccttctctcagagtggaagcaggaatgtgcatatgagaaagcatcacctgcagctgggagcagctgggagtcaagagcaggagcaaactgctgagccactaatgggcagtagtttgcttgaagaggcttcagtacccagtaaaaacctggtgtctatgaattcccagcccagccttggtggagagtccttgaacctaccaaataccaattctatcctgggagttgatgacgaggtgcttgctgaaggatccccacgttccctgtcttcagtgcctgatgtgacacatcacctggtgaccatgcagtcagggaggcaatcatatgaagtttctgtcttaactgcagtaaatccacaagagttactaaaccaaggagatttaactgaaagacggacatgagcgtgggtgctgactcctggaagagcaactctatctgatctcaaaatgcgtatactgggaacaggatgccttagcccacaacagaaccagaatgaatctttgaaggcacaagactctgcttttgccactcttcctctttcctggtatagaagatggatgtaggagagcttcttttctaactaccatctgatcagacaaggaatgaagcaatgactgtgggctgggaaactgtacctacctctcttcccactgcaaatttctgggatagaccaaaagtgaatttgattatgtgttggctgaagttcttcattctgactgttgaggggaggttttcctttgaagagttttcatcccagactcagctgtcttttcacatggatgaaataattcctgctaccaacaacagagcttcaccaggaagttgagttttcaagatgccttgttgctttgaagaagggagtgatgtcaattctcttgttacattctccctttagcaacctgagtaagagactctctgccactgggctgcaaaaaaataaattacttgaatctccccttggcccaggctgaggtactatcttgtcctatacacttctacttggtcactttgctttcttcgttaatggaacatacagtagcatgttaagagggatttcatgnnnnnnnnnnnnnaaagttaaaaattacatgatgcagagattcaggttttcctttaaataaacaaaacagcccagtca

SEQ ID NO: 73753 - DNA, 470 bp, Homo Sapiens
ccagagaggagcaagtgtttcctagagagccctttcttttctccagaagatatggcttttgaaggcataagcagagcccaaaaaaaaggaaagaatacctgctcttgttaggttaagaagaataaaagaagtgctatcacttggctgtagatcttgcaacaagctagaagactctgaagtggacaaaaactccggggatttctgtacagtctgagctctcgtctcctctccgtctggacccacattcacccgaaggcttctcaaaacagctgaggaagggacctccttggaggagttagaatgatttgtagtatcatctagtaaagggaaaataccacagctttatgtagcacctatctctaggagcccaccattttgatacacagcacccaacatctcttggaagctaacatccttatagcaacagacagcattctcattacacaaataaaaactttgactcacagaaa

SEQ ID NO: 73754 - DNA, 1027 bp, Homo Sapiens
ttaggtacgaggctggtggtgaatcggcacgaggaattcgggaccgactgacggccggccggcttcccggaactggaaggttacattgattacccacctagtacaacatcttacgggaagagcatagtatttcctagaggaatatgaacataacaggaaggtatcattggctctgaattaaatttgaacttgtcccctgaatagctacaggttttggaagctgaatcaatgttatcagatgagttagaatccaaaccagagctcctggtacagtttgttcagaatacgtccatcccattgggacaggggcttgtagaatcagaagctaaagatattacttgcttgtccctccttcccgtgactgaagcctcagaatgcagtcggctaatgttaccagatgatactacaaatcattctaactcctccaaggaggtcccttcctcagctgttttgagaagccttcgggtgaatgtgggtccagacggagaggagacgagagctcagactgtacagaaatccccggagtttttgtccacttcagagtcttctagcttgttgcaagatctacagccaagtgatagcacttcttttattcttcttaacctaacaagagcaggtctgggctcttcagctgagcacttagtgtttgtacaggatgaggcagaagattcagggaatgatttcctctccagtgagagcacagacagtagcatcccattggttccctccggggttcaggaggtggccccatgacaggttgattactggctactcgtggcacaactgggcaaagaatgcaaaaaaccaccagcaatggaagaaaatgtcccaccttgggttctgggggaaggggcagtccaaaaagaatcctggggcccctttccttcaagggggaaaagaaacctccagtgtgacaagtttgaggggttgggaacccgggcaatttggaattgggccagcttccacctttaaaatacccccctccaagaaatcctcgaaaatggaccgggtcccttcaatttggccc

SEQ ID NO: 73755 - DNA, 1052 bp, Homo Sapiens
  misc_feature (25)..(25): n is a, c, g, or t
  misc_feature (61)..(61): n is a, c, g, or t
  misc_feature (67)..(67): n is a, c, g, or t
  misc_feature (103)..(103): n is a, c, g, or t
  misc_feature (126)..(126): n is a, c, g, or t
  misc_feature (140)..(140): n is a, c, g, or t
  misc_feature (146)..(146): n is a, c, g, or t
  misc_feature (195)..(195): n is a, c, g, or t
  misc_feature (206)..(206): n is a, c, g, or t
  misc_feature (265)..(265): n is a, c, g, or t
  misc_feature (288)..(288): n is a, c, g, or t
  misc_feature (296)..(296): n is a, c, g, or t
  misc_feature (363)..(363): n is a, c, g, or t
  misc_feature (395)..(395): n is a, c, g, or t
aaagtgactggtcgattatcgctcnttagattgcctgagccaagatcgcagagtttcgtgnattgtnagggatcccagaagagtagaaaagaggagagctacngtggagatgttgctttcaacagnatctgaagccagtnccaccncatgatctcagaaaatcggcgtgctgtcgctcagtgtcttggaactcgnaaaagaacaanaacagaaatgctagtaaccgagaagcccttatctctcaaggacgcaaagttggtagaangaaaagaagcttctggaacaggnaacgggcncaggtgatgcaagaaaaaagacagggtgcagcctttgagaagtgcgtatttgagctgcctgcaaagnggaagaaaactggcaaaggagagccaggcttntgctgaaaggaatttgaagctgttctcacagaaagacagaatatctactgcagtctgtttcttcctcgcagcaagcggctggagatagagaagagcttactggtgcgagcgtccgtcgaccccgtcgccgctgacctagagatggcagccggtctcaccgacatatttcagcatgatacatactgtggtgatgtctggaacaccaacaaacgccagaatggcagactcatgtggctctatctcaaatactgggaactcgttgtcgaactgaagaagtttaagagagtagaggaagccatactagaaaagtaagacaagagtgaaatcaaactgcttttagtgactcgaggccaggcagtcatgcgccttctgggtctccggcgtcttccgttcccgtgctgcccgtgtcatggccacaccgtcacccttcagcagcgacctccactcccgccaccgtctgagcagaagtgcaccgaagcctcagagacagagggtctcctcccgatgctctgccgctgttggggatatggtttcttgaagcatttttaggctgccagtattgtattaagcagaacagtataacctcgtattttagctccagggtaaaaatggttttttaaaaagtcaaatacaatactggtccttaccacaagtaaa

SEQ ID NO: 73756 - DNA, 795 bp, Homo Sapiens
gggatcgcgcctgcgcaccatgccacgcccggagcgggtactgagtgggggcgccgcgcctgcgcaaagcggacccgcggacggtggcgttaagggaacgctgaggtcccgcgctccccgaccgaggtatatctccatgaataacctaaatgatcccccaaatggaatatccggcctaattccagggcggatggtggtgatggaagcaggtggaattatgccctgtggttccaatgctgggatggctgcttttcgttggattggtctagggagtcccagaaagaagtagaaaaagagagagaagcctaccgtcggagaactgctgcttttcaacaggatctggaagccaagtaccacgccatgatctcagaaaatcggcgtgctgtcgctcagttgtccttggaactcgaaaaggaacaaaacagaactgctagttaccgagaagcccttatctctcagggacgcaagttggtagaagaaaagaagcttctggaacaggaacgggcccaggtgatgcaagaaaaaagacaggtgcagcctttgagaagtgcgtatttgagctgcctgcaaagggaagaaaactggcaaaggagagccaggcttttgctgaaagaatttgaagctgttctcacagaaagacagaatatctactgcagtctgtttcttcctcgcagcaagcggctggagatagagaagagcttactggtgcgagcgtccgtcgaccccgtcgccgctgacctagagatggcagccggtctcaccgacatatttcagcatgatacatactgtggtgat

SEQ ID NO: 73757 - DNA, 1220 bp, Homo Sapiens
  misc_feature (14)..(14): n is a, c, g, or t
  misc_feature (957)..(1085): n is a, c, g, or t
  misc_feature (1095)..(1107): n is a, c, g, or t
agccaagaatcgcnacgagcgggctccagcggtcatgtccggcagaggaaaggcggaaaagctttaggcaaagggggcgctaagcgccaccgcaaggtcttgagagacaacattcagggcatcaccaagcctgccattcggcgtctagctcggcgtggcggcgttaagcgaatctctggcctcatttacgaggagacccgcggtgtgctgaaggtgttcctggagaatgtgattcgggacgcagtcacctacaccgagcacgccaagcgcaagaccgtcacagccatggatgtggtgtacgcgctcaagcgccaggggcgcaccctgtacggcttcggaggctaggccgccgctccagctttgcacgtttcgatcccaaaggccctttttagggccgaccacttgctcatctgaggagttggacacttgactgcgtaaagtgcaacagtaacgatgttggaaggcttatgattttactgtgtatgtatttgggagaagaaattctgtcagctcccaaaggataaaccagcagttgctttattggtcttcagatgtggctgcaaacacttgagactgaactaagcttaaaacacggtacttagcaatcgggttgccagcaaagcactggatgcaagccttgccttccagaagcttaccagtcgggttgccagcaaagcagtggatgcaagacttgccctccaggagcttaccatcacaacgaagaagacaaataaatgcataatatatagacgacataaatccatactgtacacatttaagaataaacagtccagtagtaagaggcagtacatattcaatctgctgagaaatgtagacaataactactataagaatcctaatgctacagaagtcactggctgctgggaaaccggggaaaacttggctatggacgtgggggcttgtgtcggactctgaataaagagcagaatgattggnnnnnnnnnnnnnnnnnnnnnnnnnnnnnnnnnnnnnnnnnnnnnnnnnnnnnnnnnnnnnnnnnnnnnnnnnnnnnnnnnnnnnnnnnnnnnnnnnnnnnnnnnnnnnnnnnnnnnnnnnnnnnnnnncctttggggnnnnnnnnnnnnntgaaaaattttttaaaacctttttttgggcgcggggccccaaaaggaaggggaaatgggccaaactggttcccagaaaaaactgggccctaaaccacggcttggattcccccc

SEQ ID NO: 73758 - DNA, 1259 bp, Homo Sapiens
  misc_feature (564)..(607): n is a, c, g, or t
  misc_feature (951)..(989): n is a, c, g, or t
cgactgtcagaagtagacattgatgatgacgaaagaccacataatccacacaaaataaaaagctgtgaggttttgtttaatccttttgatgacatcattccaagggaaattaaaaggctgaaaaaagagaaaccagaggaggaagtaaagaaattgaaacccaaaggcacaaaaaattttagtttactttcatttggagaggaagctgaggaagaagaggaggaagtaaatcgagttagtcagagcatgaagggcaaaagcaaaagtagtcatgacttgcttaaggatgatccacatctcagttctgttccagttgtagaaagtgaaaaaggtgatgcaccagatttagttgatgatggagaagatgaaagtgcagagcatgatgaatatattgatggtgatgaaaagaacctgatgagagaaagaattgccaaaaaattaaaaaaggacacaagtgcgaatgttaaatcagctggagaaggagaagtggagaagaaatcagtcagccgcagtgaagagctcagaaaagaagcaagacaattaaaacgggaactcttagcagcnnnnnnnnnnnnnnnnnnnnnnnnnnnnnnnnnnnnnnnnnnnngaagtgaagaggaagaagcccctccagatggtgctgttgccgaatacagaagagaaaagcaaaagtatgaagctctgaggaagcaacagtcaaagaagggaacttcccgggaagatcagacccttgcactgctgaaccagtttaaatctaaactcactcaagcaattgctgaaacgcctgaaaatgacattcctgaaacagaagtagaagatgatgaaggatggatgtcacatgtacttcagtttgaggataaaagcagaaaagtgaaagatgcaagcatgcaagactcagatacatttgaaatctatgatcctcggaatccagtgaataaaagaaggagggannnnnnnnnnnnnnnnnnnnnnnnnnnnnnnnnnnnnnnataaaatgagaataatgataaccagaacttgctggaaatgtgcctacaatggccttgtaacagccattgttcccaacagcatcacttaggggtgtgaaaagaagtatttttgaacctgttgtctggttttgaaaaacaattatcttgttttgcaaattgtggaatgatgtaagcaaatgcttttggttactggtacatgtgttttttcctagctgaccttttatattgctaaatctgaaataaaataactttccttccacattacatgtt

SEQ ID NO: 73759 - DNA, 682 bp, Homo Sapiens
caggacaggtatttgagttaaattgctgggtgagagagcttggaagtccttttcataaaaggtacctctttccttttcttattgaattcttagaacttagttaaccctccctgccttttcttaacaaaaaggacttttctaaggactgaagattggcaaaaacgaaaagcttcttcctccaagagcccattgaagaagcccagtgatgagacggtgagatggtttgagtcctcggtgcctgggtagcaggaagaaagacctgcatcctgcatctgtacttggggaagccagcggagaggacggggaggttacttctctaagtttctgcagaaatattgaaggctggagtttggaatccttaaacttggccttctcaaactcagcagcagatctccgggattctgctgttattatccaaaggcgttggaaggaaagatggatcttcttacatgctagaagttttaaacggtccttaacatgcctttgttcaagcaccttccagaatgtaaggttcagcagctctggtttctattacggtgacttgaatgtcagattcaagggcccggcgtcaaaggaaattggttttgactttttgtaatctaggagcgacagttcgtgagatgtttattcagtgttaaagagcctgtttttctaccaaacaataaaaccaagagaagaaaaa

SEQ ID NO: 73760 - DNA, 2892 bp, Homo Sapiens
  misc_feature (34)..(34): n is a, c, g, or t
ctctctcatctccacatacccacccaataatccnctcctaggtagcgaggcctgggtggcgaattcggcacgagggcatcatccgccccggcacggcctttgagctcctggaggcgcaggcggccaccggttacgtcatcgaccccatcaagggactgaagctgacggtggaggaggctgtgcgtatgggcattgcgggccccgagttcaaggacaagctgctgtcggccgagcgcgccgtcactgggtacaaggacccctactctgggaagctcatctccctcttccaggacatgaacaagggcctgatcctgaaagaccatggcatccgcctgctggagggcccaaatcgccacgcgcggcatcatccaacctgaggacagccaccgcgatgcccctggaggtggcccacaagccgcggcctcttcgatgaggagatgaacgagatcctgaccgacccctcggacgacaccaagggcttctttgaccctaacacggaggagaacctcacctacctgcagctgatggagcgttgtatcactgacccccagacgggcctgtgtctcttgccgctgaaggagaagaagcgggagcggaagacgtcctccaagtcctccgtgcgcaagcgccgagtggtcatcgtggaccccgagacgggcaaggagatgtcagtgtacgaggcctaccgcaagggcctgattgaccaccagacgtacctggagctgtccgagcaggagtgcgagtgggaggagatcaccatctcctcctcggacggcgtggtcaagtccatgatcatcgaccgccgctccgggcgccagtacgacatcgatgatgccatcgccaagaacctcatcgaccgctcggcactggaccagtaccgcgccggcacgctctccatcaccgagttcgccgacatgctctcgggcaacgccggtggtttccgctcccgttcctcctcggtgggatcctcctcctcctaccccatcagccccgccgtctccaggacccagctggcctcctggtcagaccccactgaggagacgggccccgtggctggcatcctggacacggagacgctggagaaggtgtccatcaccgaggccatgcaccggaacctggtggataacatcacggggcagcggctgctggaggcgcaggcctgcaccgggggcatcatcgaccccagcaccggtgagcgcttccctgtcaccgacgccgtcaacaagggcctggtggacaagatcatggtggaccgcatcaacctggcccagaaggccttctgcggcttcgaggacccacgcaccaagaccaagatgtcggccgcccaggccctgaagaagggctggctctactacgaggccggccagcgcttcctggaggtgcagtacctgaccggcggcttgatcgagcccgacacgccgggccgcgtgcccctggacgaggccctgcagcgcggcacggtggacgcccgcaccgcacagaagctgcgtgacgtgggcgcctactccaagtacctcacctgccctaagaccaagctcaagatctcctataaggacgcgctggaccgcagcatgggtggaggagggcacggggctgcggcttgctgaaagctgccgcgcaatccaaccaagggctactacagccccctacagcgtcagcggctccggctctaccgctggctcccgcaccggctcgcgcaccggctcccgggccggctcccgccgcggcagctttgacgccaccggctccggcttctccatgaccttctcttcatcctcctactcctcctcgggctacggccgccgctacgcctcggggtcctcggcctccctggggggccctgagtctgccgtggcctgaggctgcctgcgcccaccccgctctgcatgcggcccagcccggctcccaccgaggcgcgggggccgttttcaacgcttaaaggtgtcttcctcccaagtggtgcctaaagtttaaccaaaaagaccagactaatatattaatatatatctgctgtccagacagcctgtatcttggggggacagggctggcccagccctgctggccgcctcaccccctcgggtctcctcactcccttctacctgccactcacacagccaggtgccttggagggtcccaagctgggccccagcccaccctcctgtcttcccagggtagcccgcctgccagtcctagctgcacagggcagctgggcccaaccctgtctgtagagggccctggtgtttctagcactggcctgcacggtgggccttgctggggacggggggccccagtcagcctctctcccagtctacccagagaagccccttccccatgggaagacgaggccctcgggcccagcccccacagtgctgtctgatctgtgctttccagctcaccccccacactcactcctgagacccctggcctccggcgtcagcctccagcctctgttcccctagtaagtgccttccatgtcggcctctaaccccaggccccgaggacccagacccagtggggaggcggacgttccagccggcatggctgggaactgcagacctgtcctcctggtgggtccaggggcccctccagcttgtggagccccacactggggtgccgcctgcccgtctctctcccatggagccccagccccctttgggcccagggacaccagccaggctctgtgctgaccctcctgttgcacccagccctggtctcagcagcgaccacccctgcctccaccctccgagctttgcatgttccactaaccccgggcgggtggcaggtggaggtgtcaggctgctggcgcctctgcaagggcagaacactaacctgaccgtgggcggggccttgcggtatccgcccccaataaaagcaattccaaccttaaaaaaa

SEQ ID NO: 73761 - DNA, 1463 bp, Homo Sapiens
  misc_feature (32)..(32): n is a, c, g, or t
agaaaataagctgtagcaaatgcttcaggagntgagacaggagggagctgctgtctgggcttcttgtgcttctctgagctatgaggctgagaagatcttcaagtggatttttagcaaatttagctcatctgcaaaagatgaagttaaactcctctacttatgtgccacctacaaagcactagagactgtaggagaaaagaaagccttttcatctgtaatgcagcttgtaatgaccagcctgcagtcaattcttgaaaatgtggatacaccagaattgctttgcaaatgtgttaagtgcattcttttggtggctcgatgttaccctcatattttcagcactaattttagggatacagttgatatattagttggatggcatagagatcatactcagaaaccttcgctcacgcagcaggtatctgggtggttgcagagtttggagccattttgggtagctgatcttgcatttcctacgactcttcttggtcagtttctagaagacatggaagcatatgctgaggacctcagccatgtggcctctggggaatcagtggatgaagacatccctcctccatcagtgtcatcaccaaagctggctgcgcttctccgggtatttagtactgtgctgaggagcattggggaacgcttcagcccaattcgggtcctccaattactgaggcatacgtaacagttgttctgtcacagagtaatgagatgtgtgacggctgcaaaccaggtgtttttttctgaggctgtgttgacagctgctaatgagtgtgttggtgttttgctcggcagcttggatcctagcatgactatacattgtgacatggtcattacatatggattagaccaactggagaattgccagacttgtggtaccgattatatcatctcagtcttgaatttactcacgctgattgttgaacagataaatacgaaactgccatcatcatttgtagaaaaactgtttataccatcatctaaactactattcttgcgttatcataaagaaaaagaggttgttgctgtagcccatgctgtttatcaagcaatgctcagcttgaagaatattcctgttttggagactgcctataagttaatattgggagaaatgacttgtgccctaaacaacctcctgcacagtctgcaacttcctgaggcctgttctgaaataaaacatgaggcttttaagaatcatgtgttcaatgtagacaatgcaaaatttgtagttaaatttgacctcagtgccctgactacaactggaaatgccaaaaactcgagtctttaattgtaatgactttgttttatccacagttaagccttttctcattacatatttatgtatttcactgtcatgtcaacatgtctgcagaatcactgtatgtaacaaacagccatatttaagacatgcctggataaataaaattggtaggaatgttttcttgccattatatttaaaa

SEQ ID NO: 73762 - DNA, 888 bp, Homo Sapiens
  misc_feature (461)..(513): n is a, c, g, or t
ttccgcccagcgctggccttaatgctaaagccaaatgcagcttctgctgtgcgacgcactcctggccatcttgccgtgtcaccccctgtccggcctccacttgccatgggggatggatggatttagggtgggagggcctgtgggggccctggacagtcacaccccagcagcagtgagtgggcaggtttggaggagcagccagggagccccgagtggcccaggagtccccccacacacagatgcataggcctgccttccggagaccctgtccacattgccgggaccaccctggtggggccactggtgggtgccagggacaggttagggccactctggggaaggcattttggttttttattccacgctgtgctgtttggatgggagccccacagaggcaggtcctggaaccaccccacccccacacctggacgctcgctctggtgggggcacacgcaggtggnnnnnnnnnnnnnnnnnnnnnnnnnnnnnnnnnnnnnnnnnnnnnnnnnnnnncttagctggccccgcacccaggccggggaggctcaagttcgccactttactcagaccgatgcacagtcttcccattttacacttttttaataaacataattgcaatattttaggtgggctgcgagctgcagtcagccttcacgtctggcctcagtccccgtgtcagtgcccctctgcgtgtgcgtgtgcgcgtgtgtgagcctctacacatatatatacgtacagagccttaaaccacatcgtggcggtgccgtctgagctgtagcgggtggctttgtttccagtttttgtacccgtgtccttgtctcccctcctcccccatctggggatgtgtctgtgttccaccccttgaaataaacagacacatacgtgttc

SEQ ID NO: 73763 - DNA, 1134 bp, Homo Sapiens
  misc_feature (149)..(195): n is a, c, g, or t
gccagacgtgaaggctgactgcagctcgcagcccacctaaaatattgcaattatgtttattaaaaaagtgtaaaatgggaagactgtgcatcggtctgagtaaagtggcgaacttgagcctccccggcctgggtgcggggccagctaannnnnnnnnnnnnnnnnnnnnnnnnnnnnnnnnnnnnnnnnnnnnnnaccacctccacctgcgtgtgcccccaccagagcgagcgtccaggtgtgggggtggggtggttccaggacctgcctctgtggggctcccatccaaacagcacagcgtggaataaaaaaccaaaatgccttccccagagtggccctaacctgtccctggcacccaccagtggccccaccagggtggtcccggcaatgtggacagggtctccggaaggcaggcctatgcatctgtgtgtggggggactcctgggccactcggggctcctccaaacctgcccactcactgctgctggggtgtgacttgtccagggcccccacaggccctcccaccctaaatccatccatcccccatggcaagtggaggccggacagggggtgacacggcaagatggccaggagtgcgtcgcacagcagaagctgcatttggctttagcattaaggccagcgctgggcggaaggccctgcagagaggccagtgcccctgagaggggcccagcacacctgggcccgcagcgccttgtggccccgggtccctcctgcgcctggactccccgtcacagtggctgtgcttgccgggcctctctgcctccatggagcaggcttaaagtgctgggtgcctgggagggaaggctcaagactggccaggagctctgccccaagggctcctatttgaggatgtggttaatgaacagctgacacgccaggaacacgcagagcaagaaccaagatcgggggctctgcaggaggcctggggtcggtgcctgtgctgcccgtgccgtggagctcagcatggccgagaggtgcctgtgcagctcctgctgggcctctcggatggagaggatggcctcgtgcagggcctgcagccgccgcgcctccttccgtgcacccccccggccgtaatggccgaattcccgggcatatgtccggtaccgtcgactg

SEQ ID NO: 73764 - DNA, 639 bp, Homo Sapiens
  misc_feature (510)..(510): n is a, c, g, or t
acaacaagccaacacatatgctttatggttctgtttcaaaaacatgaaaacccaggccctaggattcaagtgatgttgagaggcagaaaggatggagaagttgttggcgccagcatgggggcaagcagccagacctcaggccctcactctaggctccacgtggctgggcttgacttctggccaagggctgcttttcccgcctgcggcccacctgaggccagaccttgcctgaggaaagggcctgtggtcggggggaagctcaggcagaaggaagacgtggccaacggccatccctgaggaggtagtgagcagggcactgaagggcttcccgatcagcacagtgattttctgtccaaagcgggggaagtagggcggactgttaggaaggacgtcattcattccgacatgccacaggggcaggatgatgggggttgagatgacactcagcaatcaggcgcccgattccccacttgaaacgcaggaattcggaactcatgttcactttccctnggtgagagagcacagaggcgaggcttgggagcccatcccgctcatactgggggggctcgacccagtcagccctgctgaccttctgggaagatatgcacccagtccccatggttgagcttctccaaaatg

SEQ ID NO: 73765 - DNA, 2104 bp, Homo Sapiens
ttgagtttttttgtacgacaagccaacacatatgctttatggttctgtttcaaaatacatgaaaactccaggccctaggattcaagtgatcttgagaggcagaaaggatggatgaagttgttggcgccagcatgggggcaagctagccagacctcaggccctcactctaggctccacgtggctgggcttgacttctggccaagggctgcttttcccgcctgcggcccacctgaggccagaccttgcctgaggaaagggcctgtggtgggggggaagctcaggcagaaggaagacgtggccaacggccatccctgaggaggtagtgagcagctcctggttcggcaagggcggtgggtaggagccaggccgaggagtcttagggtcccctctccacagctctggtgggccccctgctcccctagccaactggttgctcacctgccttctatgctccctcctgaagccagcccctgggagagaacatctgaaggcaagaaggaaagagagccctgcctaagcttcttcctccctgcttggccaagtgggagaagcagctgaggtcctttgtgtaactgaggaagcacggaggagctggaatgcctaccagctcggagagggcacttgagagggtctatgaacaaatctgtctaaaagccacgtttgagctaaaagcatcagtccatccctcagccccagctctgtgcgggccaagaatccagaaggcagcaagcaaggcctatctcccaggctggaggtggttgtggagctgctctgcctgagtcttcagatgctggaattcctcttgaatgaagtccgtcagggctttccgcatctccacagccgacttgttctccgcccggagccgctcgagtacaggcagggcactgaagggcttcccgatcagcacagtgattttctgtccaaagcgggggaagtagggcggactgttaggaaggacgtcattcattccgacatgccacaggggcaggatgatggggttgagatgacactcagcaatcaggcgcccgattccccacttgaaacgcaggaattcggaactcatgttcactttccctggtgagagagcacagaggcgaggcttgggagcccatcccgctcatactgggggggctcgacccagtcagccctgctgaccttctgggaagatatgcacccagtccccatggttgagcttctccaaaatgaagtccatccccttctggtagacgccatctcctttctctcttctttttccagcacctggcatgtgcctgcctgtgtctagaacacctttcccctcattctctgcttggaaaaattctgctcctcggcacacaggcacacacttgcccaagctgaagaagtgggagtgtagctccttggtgaagcagatgtctgcagctgcaggggtccccatgccctgcctggactgctggacgccacctcctagggcagagcaggaggagggcaaatctgggcagaggcaggtcgggccggcccggcccacttcgaggggcccagtcctcctgcaccaacgcatcaacttcaggttccagatgtggcggagtttcaggatcccccagagatgagggtcgtccatgcaggactggtgattggacacggtgatgaggggcgtggccgggcctcgcttctcgatgagctcgtacagcacctccctgttgtgcacggtcaggtggttcatgtacttggtccagaagcagctgtaggtgcccaccaagcccatgacgacgctgctggccagggtccaggtgagcggcaggcaccgcggggaacggccacttcacgtgcagaggcatccccacccggcccacggccggcgctcccagcgccccagggccggcctgtggggcgcactctaggtctgcgacctcgaccgctcgagacactggccacctgactggcccgcgcacggacggacgggggcgcggcgcaacaggggactggaccgaggtcccttcgcaggtcaggccggagcagcgcccggccccgctctctcgtcactggggagcggtcgccggggtcacaggccgtgggcgcgctgcaggaacgggaggaaacagggaaggcgggcgctggcaccccg

SEQ ID NO: 73766 - DNA, 1105 bp, Homo Sapiens
gttggtcctgtggaggcccgcgagcgctgcgatgcccgccgcgtgcccgttgcggtcgggcgacggagcgcagtgtggcgggcgagagagcctgtctgggggggcgcgggaccaatggcccccacaaggccaatctcctggcccggaagactcgcctgggcccaagagcccaccccacgccccttacgcccactctgaaacgcaaggaattccggaacctcaaggttcaacttttcccctggttgagagagcaacagaaggcgaggccttgggagcccaatcccgctcaatactgggggggctcgacccaagtcaagccctgcctgaccttctggggaagaaatgcaacccagtccccatggttgagcttctccaaaatgaagtccatccccttcctggtagacgccaatctcctcggcacaacaggcacacacttgcccaagctgaagaagtgggagtgtagctccttggtgaagcagatgtctgcagctgcaggggtccaacgcatcaacttcaggttccagatgtggcggagtttcaggatcccccagagatgagggtcgtccatgcaggactggtgattggacacggtgatgaggggcgtggccgggcctcgcttctcgatgagctcgtacagcacctccctgttgtgcacggtcaggtggttcatgtacttggtccagaagcagctgtaggtgcccaccaagcccatgacgacgctgctggccagggtccaggtgagcggcggcaccgcggggaacggccacttcacgtgcagaggcatccccacccggcccgcggccggcgctcccagcgccccgggccggcctgtggggcgcctctaggtctgcgacctcgaccgctcgagacactggcccctgactggcccgcgcacaggacggacgggggcgcggcgcaacaggggactggaccgaggtcccttcgcaggtcaggccggagcagcgcccggccccgctctctcgtcactggggagcggtcgccggggtcacaggccgtgggcgcgctgcggaacgggaggaaacgggaaggcgggcgctggcaccccggcccggtgcaaccgccggaaagcgaacctgcgccggtg

SEQ ID NO: 73767 - DNA, 1285 bp, Homo Sapiens
  misc_feature (134)..(192): n is a, c, g, or t
agaggccacccctcccaccccagacatccagacatctggaactttgggtgccaagagtccagcttaatgcaggcagcctggcttttgggggctttggtggtcccccagctcttgggctttggccatggggctcnnnnnnnnnnnnnnnnnnnnnnnnnnnnnnnnnnnnnnnnnnnnnnnnnnnnnnnnnnnagggaggccctgatgctgaagcatctgcaggaagccctaggactgcctgctgggaggggggatgagaatcctgccggaactgttgagggaaaagaggactgggagatggaggaggaccagggggaggaagaggaggaggaagcaacgccaaccccatcctccggccccagcccctctcccacccctgaggacatcgtcacttacatcctgggccgcctggccggcctggacgcaggcctgcaccagctgcacgtccgtctgcacgcgttggacacccgcgtggtcgagctgacccaggggctgcggcagctgcggaacgcggcaggcgacacccgcgatgccgtgcaagccctgcaggaggcgcagggtcgcgccgagcgcgagcacggccgcttggagggctgcctgaaggggctgcgcctgggccacaagtgcttcctgctctcgcgcgacttcgaagctcaggcggcggcgcaggcgcggtgcacggcgcggggcgggagcctggcgcagccggcagaccgccagcagatggaggcgctcactcggtacctgcgcgcggcgctcgctccctacaactggcccgtgtggctgggcgtgcacgatcggcgcgccgagggcctctacctcttcgaaaacggccagcgcgtgtccttcttcgcctggcatcgctcaccccgccccgagctcggcgcccagcccagcgcctcgccgcatccgctcagcccggaccagcccaacggtggcacgctcgagaactgcgtggcgcaggcctctgacgacggctcctggtgggaccacgactgccagcggcgtctctactacgtctgcgagttccccttctagcggggccggtaccccgcctccctgcccatcccaccacccggcctttccctgcgccgtgcccaccctcctccggaatcgcccttcccttcctggccacgaatggcagcgtcctccccgacccccagtctgggcgcttctgggagggctcttgcggtgccggcactcctccttgttagtgtctttccttgaaggggcgggcaccaggctaggtccggtgccaataaatccttgtggaatctgaaaaaaa

SEQ ID NO: 73768 - DNA, 686 bp, Homo Sapiens
  misc_feature (226)..(275): n is a, c, g, or t
  misc_feature (353)..(408): n is a, c, g, or t
gaagagagaagctgggataatccggaacctgggggctagtgacctgcacacagggcaggggcactcggcagttcccagaggccacccctcccaccccagacatccagacatctggaactttgggtgccaagagtccagcttaatgcaggcagcctggcttttgggggctttggtggtcccccagctcttgggctttggccatggggctcggggagcagagagggannnnnnnnnnnnnnnnnnnnnnnnnnnnnnnnnnnnnnnnnnnnnnnnnnccctgatgctgaagcatctgcaggaagccctaggactgcctgctgggaggggggatgagaatcctgccggaactgttnnnnnnnnnnnnnnnnnnnnnnnnnnnnnnnnnnnnnnnnnnnnnnnnnnnnnnnnagcaacgccaaccccatcctccggccccagcccctctcccacccctgaggacatcgtcacttacatcctgggccgcctggccggcctggacgcaggcctgcaccagctgcacgtccgtctgcacgcgttggacacccgcgtggtcgagctgacccaggggctgcggcagctgcggaacgcggcaggcgacacccgcgatgccgtgcaagccctgcaggaggcgcagggtcgcgccgagcgcgagcacggccgcttggatggctgcctgaaggggctgc

SEQ ID NO: 73769 - DNA, 654 bp, Homo Sapiens
  misc_feature (385)..(420): n is a, c, g, or t
  misc_feature (464)..(481): n is a, c, g, or t
  misc_feature (518)..(538): n is a, c, g, or t
gatgtattgacctgtgtttcccaagacagcaggtgccacggcccgccccgcctgccagcccgaattcccgttctcctgtgtctactaacaaggacatgggggtgggcggtgacctccgcatccctcagagctcagagggtcctcgctgccaccggtccccccctagcccgtcatcagccggtggcagctccatcttccattcctggttttagggcagaatccatggagactgcttccagaaggcatctggctctgagttataaattacttccctggtcctgacagtcacctggggtcccccctctccctggttccacctttctgaaggaggagcctggagtcagggctgggttttggattaacccatccttcctagttaacaccnnnnnnnnnnnnnnnnnnnnnnnnnnnnnnnnnnnnctccgtgtgtgtgttttcctaatttatttacctctgtttccccnnnnnnnnnnnnnnnnnnaattaaagagcaaagctttttattactttgtaatttnnnnnnnnnnnnnnnnnnnnnctgaagaactttggggggaattttgtacttttttcctgtgtaaatattggacttttttgagctttatcgtggttgttaatttgaagtaataaagtagaaaagataaagtgaaaaaa

SEQ ID NO: 73770 - DNA, 735 bp, Homo Sapiens
cggggtgaataccgcctcctgcagctgcttacctggccaagcctgggactcactggcccaggccttcaatatcaccagccaggacgatgtactctttgccatcttctccaaagggcagaagcagtatcaccacccgcccgatgactctgccctgtgtgccttccctatccgggccatcaacttgcagatcaaggagcgcctgcagtcctgctaccagggcgagggcaacctggagctcaactggctgctggggaaggacgtccagtgcaccaaggcgcctgtccccatcgatgataacttctgtggactggacatcaaccagcccctgggaggctcaactccagtggagggcctgaccctgtacaccaccagcagggaccgcatgacctctgtggcctcctacgtttacaacggctacagcgtggtttttgtggggactaagagtggcaagctgaaaaaggtaagagtctatgagttcagatgctccaatgccattcacctcctcagcaaagagtccctcttggaaggtagctattggtggagatttaactataggcaactttattttcttggggaacaaaggtgaaatggggaggtaagaaggggttaattttgtgacttagcttctagctacttcctccagccatcagtcattgggtatgtaaggaatgcaagcgtatttcaatatttcccaaactttaagaaaaaactttaagaaggtacatctgcaaaagc

SEQ ID NO: 73771 - DNA, 601 bp, Homo Sapiens
agatttgtggtattctggtcaagttattgtgctgtactttgtgcgtagaaattgagttgtattgtcaaccccagtcagtaaagagaacttcaaaaaattatcctcaagtgtagatttctcttaattccatttgtgtatcatgttaaactattgttgtggcttcttgtgtaaagacaggaactgtggaactgtgatgttgtcttttgtgttgttaaaataagaaatgtcttatctgtatatgtatgagtcttcctgtcattgtatttggcacatgaatattgtgtacaaggaattgttaagactggttttccctcaacaacatatattatacttgctactggaaaagtgtttaagacttagctaggtttccatttagatcttcatatctgttgcatggaagaaagttgggttcttggcatagagttgcatgatatgtaagattttgtgcattcataattgttaaaaatctgtgttccaaaagtggacatagcatgtacaggcagttttctgtcctgtgcacaaaaagtttaaaaaagttgtttaatatttgttgttgtatacccaaatacgcaccgaataaactctttatattcattaaaag

SEQ ID NO: 73772 - DNA, 317 bp, Homo Sapiens
  misc_feature (144)..(175): n is a, c, g, or t
cccccactaaatagaaatgagggtccttagtctgtttctgacaatctgttaatttcttaggacagctgtctttggtttgctttccagcaggcgtagtatatttagtcggagagcacatctgtatgcgacaacttgattacatcnnnnnnnnnnnnnnnnnnnnnnnnnnnnnnnnaccatgtttcagtttctgcatgtagatttaaataaaaaacaaaacttgtaaagttgtaacatttcacatggaaatgctgcccaatcttcaccagcttcagaaatctgacctttgccgatgctgcaataaagtgttgtaattt

SEQ ID NO: 73773 - DNA, 1413 bp, Homo Sapiens
  misc_feature (79)..(113): n is a, c, g, or t
  misc_feature (1278)..(1301): n is a, c, g, or t
tgtatagactcactatagggcgctactcgttgcagccgaacgacgagcgcagcgaagcagtgagcgaggaagcggccgnnnnnnnnnnnnnnnnnnnnnnnnnnnnnnnnnnncagtcgacggtaccggacatatgcccgggaattcggccattacggccggggtctgaggaggccttcaccctgcctctcctcaatgaccctgagcccaagccctcagtggaacctgtcaagagcatcagcagcatggagctgaagaccgagccctttgatgacttcctgttcccagcatcatccaggcccagtggctctgagacagcccgctccgtgccagacatgcacctatctgggtccttctatgcagcagactgggagcctctgcacagtggctccctggggatggggcccatggccacagagctggagcccctgtgcactccggtggtcacctgtactcccagctgcactgcttacacgtcttccttcgtcttcacctaccccgaggctgactccttccccagctgtgcagctgcccaccgcaagggcagcagcagcaatgagccttcctctgactcgctcagctcacccacgctgctggccctgtgagggggcagggaaggggaggcagccggcacccacaagtgccactgcccgagctggtgcattacagagaggagaaacacatcttccctagagggttcctgtagacctagggaggaccttatctgtgcgtgaaacacaccaggctgtgggcctcaaggacttgaaagcatccatgtgtggactcaagtccttacctcttccggagatgtagcaaaacgcatggagtgtgtattgttcccagtgacacttcagagagctggtagttagtagcatgttgagccaggcctgggtctgtgtctcttttctctttctccttagtcttctcatagcattaactaatctattgggttcattattggaattaacctggtgctggatattttcaaattgtatctagtgcagctgattttaacaataactactgtgttcctggcaatagtgtgttctgattagaaatgaccaatattatactaagaaaagatacgactttattttctggtagatagaaataaatagctatatccatgtactgtagtttttcttcaacatcaatgttcattgtaatgttactgatcatgcattgttgaggtggtctgaatgttctgacattaacagttttccatgaaaacgttttattgtgtttttaatttatttattaagatggattctcagatannnnnnnnnnnnnnnnnnnnnnnnctaccttgaggtcttttgacatgtggaaagtgaatttgaatgaaaaatttaagcattgtttgcttattgttccaagacattgtcaataaaagcatttaagttgaatgcgaaa

SEQ ID NO: 73774 - DNA, 1560 bp, Homo Sapiens
  misc_feature (84)..(118): n is a, c, g, or t
  misc_feature (1495)..(1495): n is a, c, g, or t
aaagactatatagctactatgggcgctagcgcgctttagccgaacgacgagcgcagcgaagtcagttgagcgaggaagcggcgnnnnnnnnnnnnnnnnnnnnnnnnnnnnnnnnnnncagtcgacggtaccggacatatgcccgggaattcggccattacggccggggaaccgcatctgcagcgagcaactgagaagccaagactgagccggcggccgcggcgcagcgaacgagcagtgaccgtgctcctacccagctctgcttcacagcgcccacctgtctccgcccctcggcccctcgcccggctttgcctaaccgccacgatgatgttctcgggcttcaacgcagactacgaggcgtcatcctcccgctgcagcagcgcgtccccggccggggatagcctctcttactaccactcacccgcagactccttctccagcatgggctcgcctgtcaacgcgcaggacttctgcacggacctggccgtctccagtgccaacttcattcccacggtcactgccatctcgaccagtccggacctgcagtggctggtgcagcccgccctcgtctcctctgtggccccatcgcagaccagagcccctcaccctttcggagtccccgccccctccgctggggcttactccagggctggcgttgtgaagaccatgacaggaggccgagcgcagagcattggcaggaggggcaaggtggaacagttatctccagaagaagaagagaaaaggagaatccgaagggaaaggaataagatggctgcagccaaatgccgcaaccggaggagggagctgactgatacactccaagcggagacagaccaactagaagatgagaagtctgctttgcagaccgagattgccaacctgctgaaggagaaggaaaaactagagttcatcctggcagctcaccgacctgcctgcaagatccctgatgacctgggcttcccagaagagatgtctgtggcttcccttgatctgactgggggcctgccagaggttgccaccccggagtctgaggaggccttcaccctgcctctcctcaatgaccctgagcccaagccctcagtggaacctgtcaagagcatcagcagcatggagctgaagaccgagccctttgatgacttcctgttcccagcatcatccaggcccagtggctctgagacagcccgctccgtgccagacatggacctatctgggtccttctatgcagcagactgggagcctctgcacagtggctccctggggatggggcccatggccacagagctggagcccctgtgcactccggtggtcacctgtactcccagctgcactgcttacacgtcttccttcgtcttcacctaccccgaggctgactccttcccagctgtgcagctgccaccgcaagggcagcagcagcaatgagccttcctctgactcgctcagctcacccacgctgctggccctgtgagggggcatgggaaggggaggcatctggtcnccccaattgcgatgcccgagctggtgcattacagacaagagaacacattctgccttaagggttcc

SEQ ID NO: 73775 - DNA, 714 bp, Homo Sapiens
ggtacgatacgctctagacggctgggctcttctttgttctcttgctgaggatcttattttaaatgcaagtcacacctattctgcaactgcaggtcagaaatggtttcacagtggggtgccaggaagcagggaagctgcaggagccagttctactggggtgggtgaatggaggtgatggcagacacttttactgaatgtcggtctttttttgtgattattctagttatctccagaagaagaagagaaaaggagaatccgaagggaaaggaataagatggctgcagccaaatgccgcaaccggaggagggagctgactgatacactccaagcggtaggtactctgtgggttgctcctttttaaaacttaagggaaagttggagattgagcataagggcccttgagtaagactgtgtcttatgctttcctttatccctctgtatacaggagacagaccaactagaagatgagaagtctgctttgcagaccgagattgccaacctgctgaaggagaaggaaaaactagagttcatcctggcagctcaccgacctgcctgcaagatccctgatgacctgggcttcccagaagagatgtctgtggcttcccttgatctgactgggggcctgccagaggttgccaccccggagtctgagggaggcttcacctggcttcctcaatgacctgagccaagcctcagtggaacggctagacggta

SEQ ID NO: 73776 - DNA, 580 bp, Homo Sapiens
  misc_feature (62)..(123): n is a, c, g, or t
  misc_feature (403)..(411): n is a, c, g, or t
ccccaggaaccataagggggacttcagcgtccacatcagcaggaatgtcatccacgccagcnnnnnnnnnnnnnnnnnnnnnnnnnnnnnnnnnnnnnnnnnnnnnnnnnnnnnnnnnnnnnnttgggcagatgggggccagcacagcagcatccacccagcctgaggctcaagctgcccttaccaccccatcccccacgcaggaccaactacctccgtcagcaagaacccaagcccacatccaaacctgcctgtcccaaaccacttacttccctgttcacctctgccccaccccagcccagaggagtttgagccaccaacttcagtgcctttctgtaccccaagccagcacaagattggaccaatcctttttgcaccaaagtgccggacaacctttgtggtnnnnnnnnntcttcacattatcataacctctcctctaaaggggaggcattaaaattcactgtgcccagcacatgggtggtacactaattatgacttcccccagctctgaggtagaaatgacgcctttatgcaagttgtaaggagttgaacagtaaagaggaagttttgcacaaaaaaa

SEQ ID NO: 73777 - DNA, 928 bp, Homo Sapiens
  misc_feature (856)..(864): n is a, c, g, or t
tggaccggtccggaattcccgggatcgcgctcacgcggcccgcgggccgggcgtcatgggcggcctcttctggcgctccgcgctgcgggggctgcgctgcggcccgcgggccccgggcccgagcctgctagtgcgccacggctcgggagggccctcctggacccgggagcggaccctggtggcggtgaagcccgatggcgtgcaacggcggctcgttggggacgtgatccagcgctttgagaggcggggcttcacgctggtggggatgaagatgctgcaggcaccagagagcgtccttgccgagcactaccaggacctgcggaggaagcccttctaccctgccctcatccgctacatgagctctgggcctgtggtggccatggtctgggaagggtacaatgtcgtccgcgcctcgagggccatgattggacacaccgactcggctgaggctgccccaggaaccataaggggtgacttcagcgtccacatcagcaggaatgtcatccacgccagcgactccgtggagggggcccagcgggagatccagctgtggttccagagcagtgagctggtgagctgggcagacgggggccagcacagcagcatccacccagcctgaggctcaagctgcccttaccaccccatcccccacgcaggaccaactacctccgtcagcaagaacccaagcccacatccaaacctgcctgtcccaaaccacttacttccctgttcacctctgccccaccccagcccagaggagtttgagccaccaacttcagtgcctttctgtaccccaagccagcacaagattggaccaatcctttttgcaccaaagtgccggacaacctttgtggtnnnnnnnnntcttcacattatcataacctctcctctaaaggggaggcattaaaattcactgtgcccagcaaaa

SEQ ID NO: 73778 - DNA, 945 bp, Homo Sapiens
gcggcctcttctggcgctccgcgctgcgggggctgcgctgcggcccgcgggccccgggcccgagcctgctagtgcgccacggctcggcgtcccctccagaggaggacggctggggcggagctcagcgctgaccctgggtctggaagcgacaggccttgaaactccacagcagcacaggccccgtctcctggctcggacagaaccctgctaccttccctcttcaatcttcaggcccctttttgtccgtgtttccagggctcacctggtggggaaagagggccctcctggacccgggagcggaccctggtggcggtgaagcccgatggcgtgcaacggcggctcgttggggacgtgatccagcgctttgagaggcggggcttcacgctggtggggatgaagatgctgcaggcaccagagagcgtccttgccgagcactaccaggacctgcggaggaagcccttctaccctgccctcatccgctacatgagctctgggcctgtggtggccatggtctgggaagggtacaatgtcgtccgcgcctcgagggccatgattggacacaccgactcggctgaggctgccccaggaaccataaggggtgacttcagcgtccacatcagcaggaatgtcatccacgccagcgactccgtgggagggggcccagcgggagatccagctgtggttccagagcagtgagctggtgagctgggcagaacgggggccagcacagcagcatccacccagcctgaggctcaagctgcccttaccaccccatcccccacgcaggaccaaataactccgtcagcgaagaacccaaagcccacatccaaacttgcctgtccccaaacacttacttcccgtgttcacctctggcccaccccagcccagaaggaagtttgaggccacaatttcagtggccttctgtaccccaagccagcacaagaa

SEQ ID NO: 73779 - DNA, 1771 bp, Homo Sapiens
gggtttctcggggtcctataggaccacctggtcgagctgggaaacgtggattacctggaccccaaggacctcgtggtgacaaaggtgatcatggagaccgaggcgacagaggtcagaagggccacagaggctttactggtcttcagggtcttcctggccctcctggtccaaatggtgaacaaggaagtgctggaatccctggaccatttggcccaagaggtcctccaggcccagttggtccttcaggtaaagaaggaaaccctgggccacttgggccaattggacctccaggtgtacgaggcagtgtaggagaagcaggacctgagggccctcctggtgagcctggcccacctggccctccgggtccccctggccaccttacagctgctcttggggatatcatggggcactatgatgaaagcatgccagatccacttcctgagtttactgaagatcaggcggctcctgatgacaaaaacaaaacggacccaggggttcatgctaccctgaagtcactcagtagtcagattgaaaccatgcgcagccccgatggctcgaaaaagcacccagcccgcacgtgtgatgacctaaagctttgccattccgcaaagcagagtggtgaatactggattgatcctaaccaaggatctgttgaagatgcaatcaaagtttactgcaacatggaaacaggagaaacatgtatttcagcaaacccatccagtgtaccacgtaaaacctggtgggccagtaaatctcctgacaataaacctgtttggtatggtcttgatatgaacagagggtctcagttcgcttatggagaccaccaatcacctaatacagccattactcagatgacttttttgcgccttttatcaaaagaagcctcccagaacatcacttacatctgtaaaaacagtgtaggatacatggacgatcaagctaagaacctcaaaaaagctgtggttctcaaaggggcaaatgacttagatatcaaagcagagggaaatattagattccggtatatcgttcttcaagacacttgctctaagcggaatggaaatgtgggcaagactgtctttgaatatagaacacagaatgtggcacgcttgcccatcatagatcttgctcctgtggatgttggcggcacagaccaggaattcggcgttgaaattgggccagtttgttttgtgtaaagtaagccaagacacatcgacaatgagcaccaccatcaatgaccaccgccattcacaagaactttgactgtttgaagttgatcctgagactcttgaagtaatggctgatcctgcatcagcattgtatatatggtcttaagtgcctggcctccttatccttcagaatatttattttacttacaatcctcaagttttaattgattttaaatatttttcaatacaacagtttaggtttaagatgaccaatgacaatgaccacctttgcagaaagtaaactgattgaataaataaatctccgttttcttcaatttatttcagtgtaatgaaaaagttgcttagtatttatgaggaaattcttcttcctggcaggtagcttaaagagtggggtatatagagccacaacacatgtttattttgcttggctgcagttgaaaaatagaaattagtgcccttttgtgacctctcattccaagattgtcaattaaaaatgagtttaaaatgtttaacttgtgatcgagacctacatgcatgtcttgatattgtgtaactataatagagactctttaaggagaatctta

SEQ ID NO: 73780 - DNA, 1084 bp, Homo Sapiens
gagcacaccccgcccctccctggtcctggctgctcaggagtgccaagaaacacacttggacacgaaacgtggaggagtgcgggctccacggctgcagctttctcggatcttactgttggaagtgaaccaggtgtccttaggaaactctcttataaacagcgctggattttgtggctgtttccttcaggaagggaaggagtttgccgacagccagaagttgctgttcatggaaacttcggccaaactgaaccaccaggtgtcggaggtgttcaatacagtggcccaagagctactgcagagagcgacgaggaggccagctctacgggggatgcagctgtgctctgaacaagggcccgcgaggcaggccaaatgctgcgcccactaggtgcagccactcctgggggctgtggggaagacaccccctgcctgggccatggccagctctaggtggattctgattcactgtcaatgctgggttgctcccgagccctagatgttcctggaagttggccccctttatgaaaaccacttcccacagccagtgggaactgccagaggaagatctggcgtcacatggctcccaggaaagtgctgtgccctatccccactgataccatctgattccccgatgcctgtgcctgttccacctggacggtggccccctcagcctggcagcctctggacagagaggaaggaaggattggaaaagtccccgcagcacagcgacggtgggaagatgccttacgtctgatcttgatgggggcactggcctggagcctgggcccacctgcttctggggggttggggagcaggccagatggaggtggtggtgccaggaagaaatggagcgatgactgactgtggggtgggcccaggatttccacatcttggtgaagttgcccctgggaagggcagctgggggcagtggcgccagttcccttccatggtctcccggctggcaatgtggtgaagctgagtttctgtccaatgagcaggaagattctgagacatttcgcctgagatataagttgtactgcgtatgcagtttttcctccaaaaattaaattgcttttgacaatctgaa

SEQ ID NO: 73781 - DNA, 1016 bp, Homo Sapiens
gtggggtctcccccgtgtgtgcggccgcgccgggccttttttccaaccgccagggcccttcccttccttaccggagcccctcactccttccaatgttttcaggcacgtgttctaatggaagaactggacgggcagcttctccagcttcttgggatcagccacctcaccgcccagcagcactcgctgcactccgccccagtggtttgctgggctttcacctctgcggcagcgaaggctcaacttcgtccagaatattcaatactacatgatgttccgaagtgatggaaccgacctggcacatcctggagaaaaacctgaaatccgcctccaacattgacgacgtccttggccaccacacaggcttcctggacacctgcctgaaggactgcatgctcaccaaccccgagctgctgaaggtcttctccaagctcatgtctgtgtgcgtcatgttcaccaactgcatgcagaaatttacacagagcatgaaattagatggcgagctgggcgggcagacgctggagcacagcaccgtcctggggctgcccgcaggggccgaggagcgggcccggaaggagctcgccaggaagcacctggctgagcacgcagacactgtgcagctggtgtccggcttcgaggccaccatcaacaagtttgacaagaacttctcagcccacctgctggacctcctggcccggctgagcatctatagcaccagtgactgtgagcacggcatggccagcgtcatctccaggcttgacttcaatggtttctacacggagcgcctggagcgcctgtctgcagagaggagccagaaggccaccccccaagtgcctgtcctgcgggggcccccggctcctgcacccagggtcgcagtcaccgcacagtgagccctggctgtgacaggaaggaagggtgtggggtcagcagggactggtgcaaatgggtccagaattttcaaatcgaatgctctgtgttctgtctttgcagtttaaatataaagcaggaatgattgactc

SEQ ID NO: 73782 - DNA, 2278 bp, Homo Sapiens
  misc_feature (1754)..(1754): n is a, c, g, or t
aaaaccaccaaacgataccacaaacccccaacgtagcgaggcctgggtggcgaattcggcacgaggaggagcttgaggaactgaggaagcagcttggcagcgtggccacaggctccaacgctgcagcagtctctggaacttaaaagaaagatgcttcgagacaagcagaacaaaaaaaattcaggccagcacctccccatcttcccagcatgggtgtatgagagacctgccctgatcggggatttcctgattggtgctggcatcagcacagacaccgctttgccgataggcacgttgcccctggcctcgcaggagtcggccgtggtggaggacctgctgtacgtgctggtgggcgtggacgggaggtacgtcagtgctcagcccctggctgggaggcagagccggaccttcctcgtggaccccaacctggacctgtccatcagggagctggtgcacaggatcctcccagtggccgccagctactccgctgtgaccaggttcattgaagagaagtcttccttcgagtacgggcaggtgaaccacgccctggcggccgccatgcgcaccctggtgaaggagcacctgattctggtgtcacagctggagcagctgcacaggcagggcctcctttcgctgcagaagctctggttctacatccagccagccatgcgcaccatggacatcctggcctccctcgccacctcggtggacaaaggcgaatgtcttggggggtccacgctgagcctgctccacgacaggagcttcagctacacaggggacagccaggcgcaggagctatgcctgtacctaaccaaggcggccagtgctccctacttcgaggttctggagaagtggatctacaggggcatcatccacgacccatacagtgagtttatggtcgaggagcacgagctgcggaaggagaggatccaggaggattacaacgacaagtactgggaccagcggtacaccatcgtccagcagcagatcccgtccttcctgcagaaaatggcggacaagatcctcagcacaggaaaatatctaaatgtggtcagagagtgtgggccatgacgtcacctgcccggtgggctaaagagatcatctacaccttaaaaaagcgggcgtatgtggagcagatcgagaaggcgtttaactacgccagcaaggtgctgctggacttcctgatggaggagaaggagctggtggctcacctcaggtccatcaagcgctacttcctcatggaccagggcgacttcttcgtgcacttcatggacctcgcggaggaggagctccggaagccggtggaggacatcacgccccctcgcctggaagcgctcctggagctggcgctgcgcatgagcacggccaacactgaccccttcaaggacgacctcaagatcgacctgatgccccatgacctcatcactcagctcttgcgcgtcctggccatcgagaccaagcaggagaaggcgatggcgcacgccgaccccacggagctggcgctgagcggctggaggctctctttcgactacatcgtcaagtggcccctttcgctcatcatcaacaggaaagccctcactcgctaccagatgctcttcaggcacatgttctattgcaagcacgtggagcggcagctctgcagcgtctgaatcagcaacaaaaccgccaagcagcactcgctgcactccgcccagtggtttgctggggctttcactctgcggcagcgaatgctcaacttcgtccagaatattcantactacatgatgttcgaagtgatggaaccgacctggcacatcctggagaaaaacctgaaatccgcctccaacattgacgacgtccttggccaccacacaggcttcctagacactgtgcagctggtgtccggcttcgaggccaccatcaacaagtttgacaagaacttctcagcccacctgctggacctcctggcccggctgagcatctatagcaccagtgactgtgagcacggcatggccagcgtcatctccaggcttgacttcaatggtttctacacggagcgcctggagcgcctgtctgcagagaggagccagaaggccaccccccaagtgcctgtcctgcgggggcccccggctcctgcacccagggtcgcagtcaccgcacagtgagccctggctgtgacaggaaggaagggtgtggggtcagcagggactggtgcaaatgggtccagaattttcaaatcgaatgctctgtgttctgtctttgcagtttaaatataaagcaggaatgattgactcagctc

SEQ ID NO: 73783 - DNA, 1124 bp, Homo Sapiens
tatgggcgagagagtatgaagtcaaggcgcgccgaattcggcacgaggcgtcgggggctgcgcgggggctgtggctccgggactgcggagaacatattgtgatgttcgtgcctcagagctaaaactatgagtgaatttcggattcaccatgacgtcaatgaactgcttagcctgctgcgtgtccacggaggagatggggctgaggtctacattgacctgcttcaaaagaacaggaccccgtacgtcactaccactgtctctgctcacagtgccaaggttaaaattgcagagttttctcgtactccagaagactttctaaagaaatatgatgaactgaaatctaaaaatacaaggaaccttgacccgctggtgtacctgttgtcaaagctcacggaagacaaagagactctgcagtacttacaacagaatgcaaaagaaagagctgagcttgcagccgctgctgtgggcagcagtaccaccagcatcaacgtccctgccgcggcctccaagatctccatgcaggagcttgaggaactgaggaagcagcttggcagcgtggccacaggctccacgctgcagcagtctctggaacttaaaagaaagatgcttcgagacaagcagaacaaaaaaaattcaggccagcacctccccatcttcccagcatgggtgtatgagagacctgccctgatcggggatttcctgattggtgctggcatcagcacagacaccgctttgccgataggcacgttgcccctggcctcgcaggagtcggccgtggtggaggacctgctgtacgtgctggtgggcgtggacgggaggtacgtcagtgctcagcccctggctgggaggcagagccggaccttcctcgtggaccccaacctggacctgtccatcagggagctggtgcacaggatcctcccagtggccgccagctactccgctgtgacaggttcatggagagaaatcttctttgagtagggcagtgaacacccctggcgccgcctgtgcccctgggaagacacttattttggttaattggaaacttccaggaggtcttttcataaaatctgttacttcaccctgtccatgaattggttcttccccgggaaaggattttgggcctc

SEQ ID NO: 73784 - DNA, 2884 bp, Homo Sapiens
  misc_feature (2111)..(2128): n is a, c, g, or t
  misc_feature (2161)..(2738): n is a, c, g, or t
  misc_feature (2846)..(2846): n is a, c, g, or t
tcagcacacaaaacaacaacacagcaaagatcagtctaggtagcgaggccggggtgttaaatcggcacgaggatgaaacatgcaagtaccacacactgtttgaattttgcacaaaaagtgactgtaggatcaggtgatagccccggaatgtacagtgtcttggtgcaccaagatgccttctaaaggctgacataccttggaccctaatggggcagagagtatagccctagcccagtggtgacatgaccactccctttgggaggcctgaggtagaggggagtggtatgtgttttctcagtggaagcagcacatgagtgggtgacaggatgttagataaaggctctagttagggtgtcattgtcatttgagagactgacacactcctagcagctggtaaaggggtgctggaggccatggaggagctctagaaacattagcatgggctgatctgattacttcctggcatcccgctcacttttatgggaagtcttattagagggatgggacagttttccatatccttgctgtggagctctggaacactctctaaatttccctctattaaaaatcactgccctaactacacttcctccttgagggaatagaaatggacctttctctgacatagttcttggcatgggagccagccacaaatgagattctgacgtgtccaggtttctcctgagctcatctacatagattggtagacccttcctttggattaggaaagatgagttttacctctggtacactgtcttggtaagcctggatgtgacagacacctcggctctccttgaataagaaagccagcagaactcttaaagccagttgtagtacggagttgtcagcactcactgaacctcactttacagggataagagtggtgtggcattttaaatacaatggtatgttattgccaggagtgaggtacaagacgatggctcatgtcacaggcctacctgatacggtgtcagagaaagtggtggggaaaggatctggttcatggaattctgatcttggcccataggtgaaccaccaaaatagtgctcgagtcttaggttactgtcatcaaagacttgggatgactccattatatcctggggttgtgggtattagaactaaatatggaggtcctgagcatggggactggcgtcctcagtaggtgtttgggaatatgggaagggtctcctatttattcaatagagttttctcagttattttcctcccttgcccttgcaatctccagcaaaaggtgggatctaggaagaaagaatccagtgtagaagttgagaagaacttgaaccgttttggttctggataaggtcactgtccctaggtgctaggtggaccgagcaaaagactcagtggatgaactggtgcagtgcctgacagaataaagaacagtattaatccctttgagaaagcatagtccagcaggacagtggccatttggacagaagcccacttagtttcttgggagcaacagcacgtatcagaagccagacttgctcttcggtcatgcactttgggatacagcgtataggtgcagccctgtcacaacaccaacagaagtagcagcctctgggtgcagtcacccacaccccaaagctggaaggatctggttcaacatagcacaaacccttaggaaaaatgaaattaacatcactgatgtgtaatccagtaaaatctccctttttcgggtgtgtatgtgggcatgtgcccatttctatgtgtgtgtctacgtgcagctcactaccaacagcctcatgtgcacttgacctgacagtgctcgctgagaactctcaccaggttggcgcctgaatgccttactctcagcagtcagaggcttgcttgctctgtgcagatttttaattttcttttttggccctaggctggttgggacctctacagcttcattctttcaccattaaatagtggcctttttcagtattttccctcttcccctttataaattatgctaaagccacaaagcacatttttggggatcatagaaggttggggttccagaaaggcatctgtgtgatggttccattgatgtgggatttccctacttgctgtattctcagtttctaataaaaagaaccaaatgnnnnnnnnnnnnnnnnnngcctacagccgcggccctcgtgccgaattcttnnnnnnnnnnnnnnnnnnnnnnnnnnnnnnnnnnnnnnnnnnnnnnnnnnnnnnnnnnnnnnnnnnnnnnnnnnnnnnnnnnnnnnnnnnnnnnnnnnnnnnnnnnnnnnnnnnnnnnnnnnnnnnnnnnnnnnnnnnnnnnnnnnnnnnnnnnnnnnnnnnnnnnnnnnnnnnnnnnnnnnnnnnnnnnnnnnnnnnnnnnnnnnnnnnnnnnnnnnnnnnnnnnnnnnnnnnnnnnnnnnnnnnnnnnnnnnnnnnnnnnnnnnnnnnnnnnnnnnnnnnnnnnnnnnnnnnnnnnnnnnnnnnnnnnnnnnnnnnnnnnnnnnnnnnnnnnnnnnnnnnnnnnnnnnnnnnnnnnnnnnnnnnnnnnnnnnnnnnnnnnnnnnnnnnnnnnnnnnnnnnnnnnnnnnnnnnnnnnnnnnnnnnnnnnnnnnnnnnnnnnnnnnnnnnnnnnnnnnnnnnnnnnnnnnnnnnnnnnnnnnnnnnnnnnnnnnnnnnnnnnnnnnnnnnnnnnnnnnnnnnnnnnnnnnnnnnnnnnnnnnnnnnnnnnnnnnnnnnnnnnnnnnnnnnnnnnnnnngacccctgcgctaccggatactgtccgctttctccttcgggaagcggggcttctcatactcagctgaggtaccagtcggtgagtcgtcgctcagctggtgtgtgacanccccgtaagccgacgtgcgctatcggtatacgctgatc

SEQ ID NO: 73785 - DNA, 1046 bp, Homo Sapiens
ttgatgctgatgcccagcctctacatcacaggagctgccctgtatgctgcccggatccccgaacgctttttccctggcaaatgtgacatctggtttcactctcatcagctgtttcatatctttgtggttgctggagcttttgttcacttccatggtgtctcaaacctccaggagtttcgtttcatgatcggcgggggctgcagtgaagaggatgcactgtgatacctaccagtctccagggactatgaccctaaaccagggcctgcggcacttgcgggcctccctgctggctactgatgccagtaccagaggagccccaaaactttgacagcctcgtgggctttgtgaacgcccaagggctctgcgtggtacatgactgagaagagaaaaacaaaaataaatcatacctcaaaggatggagtgcatcaattgggagaaaaggagacatagcccaaaccctggcttattcttgggatctactgattgcgggctctgcaagacccttggcaaactggcttctgatccatatcatatttatttgtagaagatggcgaaacagtttagctggtggttctttcttctccctttctctctctctatgacaataatacaaaccaatttaagtgaacatttatatccgataaggggtgggagtgtgattttaaatgctcttttgggagaacaaagaaattaatgtaaataagatttctaactgtttaaataagactttatataaatgtttaaaacataggggtaagggagggagggagaatttttgtatagaatgaaacatgcaagtaccacacactgtttgaattttgcacaaaaagtgactgtaggatcaggtgatagccccggaatgtacagtgtcttggtgcaccaagatgccttctaaaggctgacataccttggaccctaatggggcagagagtatagccctagcccagtggtgacatgaccactccctttgggaggcctgaggtagaggggagtggtttgtgttttctcaggggaagccgccatgactgggtgccagatgttagata

SEQ ID NO: 73786 - DNA, 693 bp, Homo Sapiens
cttaagcactttgacattttggtagttccacactattgagagaataatatatttattgtgtgacattgcagatgccaaatactgtaaccttctcatgataacaatacttaggttcaagatcactgttcaaaccctgtcatgctgtaaaactgatgcgagatgattttgttttttgcataatcaatacttaagggtgcaatcaactgttagtaattgtgcagtaaagtaaagccctgtggtgtatcaactactagttaagagtctcagttgatttctgtaatgtttgacctaataatagcccgtttcgtctctgacccaacagaggaagcacagatcaaatcaccttggagtggtcaccagggggacagggagccccccaccaatgtatcaatgggtgatttatgatgccttctgccctttggcgagtgaatgggtttcccataggggaagttggcctccctccgtgagctttggaaatgttttctaatagacacagggaggccagttctgtttcagagcaattatcttcccaaattctctgttctggtgttggaactgtgtgccctggtttctgttttcctttctactgctgtaattctctgtctcatcatccttctcttttgtttccatagccttttataatgcatatatgatgctgtgaacagaaataaattatttatacaatcaaatgaa

SEQ ID NO: 73787 - DNA, 459 bp, Homo Sapiens
gtaagcttcaagtgctgaaaagcaaaaaatacaagatggtttctctaaaagaatcatttttgagaagtcacgggaggtgtcagtctcttaccaacatttagataaataaattgtacattataaaccattactgatgacgcttatgcaaggatataactatgtaaggattttaagcagtaaaaaataccgtaaatcaagacaatgttttaaccaaactgtttccaaccatgttaagttacagttgtacactaaaataataattattcatgtttgagaattagagatcttcacaaaaatacttcaaatatattcacagctggacaaaaaaatttcaccttacactgttaccatggagaaaaaggttctacatttgggtgtaacttcctgtagcactgacaatgaaatcgcagccatatatcttttcatttggtcaattccacatagacaggccacatctct

SEQ ID NO: 73788 - DNA, 1080 bp, Homo Sapiens
  misc_feature (730)..(730): n is a, c, g, or t
  misc_feature (739)..(739): n is a, c, g, or t
  misc_feature (765)..(765): n is a, c, g, or t
  misc_feature (783)..(783): n is a, c, g, or t
  misc_feature (848)..(848): n is a, c, g, or t
  misc_feature (902)..(902): n is a, c, g, or t
  misc_feature (939)..(939): n is a, c, g, or t
  misc_feature (956)..(956): n is a, c, g, or t
  misc_feature (977)..(977): n is a, c, g, or t
  misc_feature (985)..(985): n is a, c, g, or t
  misc_feature (991)..(992): n is a, c, g, or t
  misc_feature (1003)..(1004): n is a, c, g, or t
  misc_feature (1012)..(1012): n is a, c, g, or t
  misc_feature (1014)..(1014): n is a, c, g, or t
  misc_feature (1022)..(1022): n is a, c, g, or t
  misc_feature (1026)..(1026): n is a, c, g, or t
  misc_feature (1032)..(1032): n is a, c, g, or t
  misc_feature (1038)..(1039): n is a, c, g, or t
  misc_feature (1055)..(1055): n is a, c, g, or t
cggactcgcagactttaagcaaacacgtgttggggccgctcccgcctggcgggtcagttgtccgcgtcggtcaccagcggggccaggtagtccgagtgccggatcccgaaactccagccgcggggcttccggtgctgcgggcccggagacaccgctgacctcgcggggccggcatcctctccgcgccgggacccctggacccccggggactctgatcccatcactccgacctcaggccctccccactctcctgactctgacccttgaccctgggctccaggccacctgatccacgttgtaggccgcgggccctggcttccgagtgttgtcttgggggagcgaagtccgcgccagaatcgtgaactggggggcccgggacttgtagacccctggactcacgacctgataggcgcaggggcccggggtctgcgagagggcagagggtgctggctgccgcctccactgccgcggaccagggaccccctgcgtccgccccggcccctcccccaccttgctgaggtcctcgaagaaactgccagccgctctgcggccgtagatggagcaagttggggcggagactttgccgatgacgcgcggacccaagagcgagggcaccgtataggccgcgggacctgggctctgctgttccgcctggacaccccagtttcggggagcaatggtgtgccgaggcgcactggggtacgtcgcgttccccgctcgctccgggaangtactgcangtcccggagtgaggaagggcgctgancggcgtgggcgggcgtanatggagtaggcgggggcgcccgtcggtgcgcgcacggtcatgcgagcgggcacaggtgggctggnccgggggcgcacgtcgtctgctgcgtgggggaacgcgcgccgacgggtgacggngggggcgcgcggtcgcgacgggtcatgcagggcgtanccggtgttgggcggcancttggttattgggcccggggnctccgtantgcccnncaatggggccnncggggccngntgtgggcncaanaggccnacccanngcgttcgagcccatancgcgggttggggggcgcttaaggcc

SEQ ID NO: 73789 - DNA, 660 bp, Homo Sapiens
acgtgtggggccgctcccgcctggcgggtcagttgtccgcgtcggtcaccagcggggccaggtagtccgagtgccggatcccgaaactccagccgcggggcttccggtgctgatccacgttgtaggccgcgggccctggcttccgagtgttgtcttgggggagcgaagtccgcgccagaatcgtgaactggggggcccgggacttgtagacccctggactcacgacctgataggcgcaggggcccggggtcttgctgaggtcctcgaagaaactgccagccgctctgcggccgtagatggagcaagttggggcggagactttgccgatgacgcgcggacccaagagcgagggcaccgtataggccgcgggacctgggctctgctgttccgcctggacaccccagtttcggggagcaatggtgtgccgaggcgcactggggtacgtcgcgttccccgctcgctccgggaagtacctgccaggtcccggagtgaggaagggcgctgagcggcgtgggcggccgtagatggagtaggcgggggcgccgtcggtgccgcgcacggtcatgcgagcgggcaccaggtggcctggcccggggccgcacgtcgtctgctgcgtggggaagcgcgcgccgaaggtgaaggcgggggcgcgcggccgca

SEQ ID NO: 73790 - DNA, 1268 bp, Homo Sapiens
  misc_feature (42)..(81): n is a, c, g, or t
  misc_feature (85)..(119): n is a, c, g, or t
  misc_feature (905)..(905): n is a, c, g, or t
aattgtatagatcacctatagggcgctagctcgcttgtatgnnnnnnnnnnnnnnnnnnnnnnnnnnnnnnnnnnnnnnnnccgnnnnnnnnnnnnnnnnnnnnnnnnnnnnnnnnnnncagtcgacggtaccggacatatgcccgggaattcggccattacggccgggggacctgaggagtcacagttgtgagcaggttcggtgccgcgggctggggtaggcggcagtggggtccctggctttggggcactgggaagatcgcgagtgggaaggtcctcccgcggtcctccgggtcatctttcctcctgaggagcagcatatttcgcatctgccggagattagaattacttgttattggtaaatagccactatggagactaaggaccagaagaaacaaagaaagaaaaatagtggacccaaagctgcaaagaaaaagaagcggcatctgcaggatctccagctaggagacgaagaagatgcccggaagagaaatcccaaagcttttgcagttcagtctgctgtgtggatggctcgatcctttcacaggactcaggatttgaagacaaaaaagcatcatattccagtggttgatcgaactccactagagcccccaccaatagtggtagtggtgacggggcctccaaagttggaaagagcactttgatataatgcctcattcggaacttcacccggcagaagttgaccgagatcagaggccctgtgatgatcgtgtcaggtaaaaagctccgactcaccattattgaatgtgggtgtgacattaacatgatgattgatctggctgaagtagcagatctggtactgaattgcttatagatgccagcttagggtttgaaatggaaacgttggagtttctaaacatctgtcaagtacatggctttcctanaattatgggagttctcacccacctcgactccttcaagcataataagcaactggaagaagacaaagaagcgattagaacacagggttctgggacggaagttttaccccgggtggccaagcttggtactaccctttctgggaatgggtgcatgggagcaatatcaaaacccgaggaaatcccccaatcctgggccgcgttttatttacaggttatcgcaggtttagggcctctccaaatgggcaaaactctctcacccctttatatccctggccaagacagggatggggaaaatttttgacaaacccccggaggaatattcccgaaaccaaacacttaaaatgtgggaccttgggaaggcggggc

SEQ ID NO: 73791 - DNA, 889 bp, Homo Sapiens
aaggtagcgaggcctgggtggcgaattcggcacgaggcaaatgtgacctgcaggtgtcactttatggttatttaagaggagcacacttgaaaaataaaagccaaattcacatgccaggacaaggtggggctcacccatgagctggtccagagtctcatctccacctactccaccattgatgccaagatggcttcaagtcgagtgatgctgctttccaattccaaaccacttgggtcagaggctatagataatcaagggtgagtggtgtcattgagcaaacacaaagtcgggctcatccaaggatgagattttgccagagaaaggacgagcagcaagtcagggagcttaagcgtcagcctcgagtttgaccagcagcaggggtcggtgtgtccctctgaatctgagatctatgaggcaggagctgaggacaggatggcaggagcgcccatggctgctgctgtacagcctgctgaggtgactgttgaagttggtgaggacctccacatgcaccaggttcgtgaccgggagatgcctgaagctttggagtttaacctttctgccaatccagaggcaagcacaatattccagaggaactctcaaacagatgctttggagtttaacccttctgccaatccagaggcaagcacaatattccagaggaactctcaaacagatgttgtagaaataagaagaagcaactgtacaaaccattgtgaccttggagatacctcatcatatcacacaaagagatgcagatagatctttgagcatacctgatgaacagttacactcatttgccgaaagggtttcacccatggtgggcccggaatggttctttaaaactcctggacctcggtgaatcccaccccccctttggccctccaccaaa

SEQ ID NO: 73792 - DNA, 1280 bp, Homo Sapiens
  misc_feature (1014)..(1039): n is a, c, g, or t
gagcgaggcctgggtggcgaattcggcacgagggcaaaagaagtagctggaagccatgggactggcgggagcctgtttgggggatctggatggttgactcctaggagtcaagttcagcatcttcgccgtggctgcagagctgcctgatgggcactagagggcacgccagccccacactccctgggtctggcttcctcccgcaacctcactctagtagagcctgtgcctgcctactagcgctctggggttcggagagtttgggaatttctcagagccaactggctcaggcttgggaaggctggctgctgccctcagctccgcctcatcagctatgtgaaggggtgtgtgtggagtgatcctgccgccccctccctgggctggtccagagatctcaaactccgatgcccctggggccacgtatgttgtgtaaatggatgaaacaggcccttgagttgggagcctgcttcactttgactttcccactgttgctggagacaaagacatcgtgatgagagaaagttcgcacaatctagtcggtaacagccactttccttgagaccaagagagtgcggtggggatgggggggagagcacgggtccccgtctgacagtggccgctgccatattcaggtgtagctaattgctctggtgtgggaatgcaggcctaatgacagaaatctggagaagccagaaatacagatttgtatgtgagatgtcctgattttttaagttgttggcagaaattaattcagaaatcaaatctgcaggccaaacaaggtgcaggacccagctttggccccatgcccctgtaggtccctctgggacagtcaccgctggggtcctggctgctctgtcattgagggatgctgggcactgctgccgggtggccagggtatggggcatgtgcccagcaatgtggctccttggccccgctggccagtgtcctgggcccctgacaggcgctggctgtgagtggtttgtacatgctacaataaatgcagctggcagcattggnnnnnnnnnnnnnnnnnnnnnnnnnnaaacctccaggcatctatgtcggggtgcgggaaaagaagggaatgaaaatggcacctgggtcactaactgttttcctgaacccaacttttccttggaacaaaaggggggtaaaatctggccgggtctcccctattaggggagtccgtatttaaattttccaaataaacccagggtgtaacccctggccatttaattgggaatcgggcgctggcaggataaacccccggggaaaaattttaa

SEQ ID NO: 73793 - DNA, 204 bp, Homo Sapiens
  misc_feature (76)..(90): n is a, c, g, or t
gccatccatcctgtgcaatatgccgtgtagaatatttgtcttaaaattcaaggccacaaaaacaatgtttgggggnnnnnnnnnnnnnnntcatgccagctaatcatgtcaagttcactgcctgtcagattgttgatatataccttctgtaaataactttttttgagaaggaaataaaatcagctggaactgaaccctaaaaaa

SEQ ID NO: 73794 - DNA, 616 bp, Homo Sapiens
  misc_feature (87)..(103): n is a, c, g, or t
  misc_feature (499)..(512): n is a, c, g, or t
tgaatgaaaaacgcagtacatagtgtcgcgaactcaaatcggcatttagatagatccagtggtttaaacggcacgtttttgcttatnnnnnnnnnnnnnnnnngatgtggtttacaagttaaagctacagaatccctttttgctgtaattgcaccagttttaaagcctctggacagagcagtatttcgtttaaaactttgtttttcttaaaagcttacagtgtttggctaattctcctcccctttttacaagacgggggccggagggtggacactggtggcaggttaagggatactgtcactttaagaagcctgcagattgaagtgtaaacatggagaaattaggggctgattttttaaactgtgtgagatattaaccagccgccctgttataaaatcaggaaatccaaacagcgatttacaccgattaacaccccctttatatattttttacaaaaatacactgagaaaataatcaaacgttttcatctctcttgtcnnnnnnnnnnnnnnaaaagtgtcaaaagtctacatttaaatataaaaaattaaaagttaaaactctagcccttcagtgaaggagacgtaaaatggcgtgggtaacaacaactaccaaa

SEQ ID NO: 73795 - DNA, 977 bp, Homo Sapiens
ttttaactaacaggatatttaatgacaaccttctggttggtagggacatctgtttctaaatgtttattatgtacaatacagaaaaaaattttataaaattaagcaatgtgaaactgaattggagagtgataatacaagtcctttagtcttacccagtgaatcattctgttccatgtctttggacaaccatgaccttggacaatcatgaaatatgcatctcactggatgcaaagaaaatcagatggagcatgaatggtactgtaccggttcatcgggactgccccagtaaaaataactttcaagcaaacatcctatcaaaaacaagtgtggttctgcataccaagctgagcacagaagatgggaacacttggtggaggatggaaaggctcgctcaatcaagaaaattctgagactattaataaataagactgtagtgtagatactgagtaaatccatgcacctaaaccttttggaaaatctgccgtgggccctccagatagctcatttcattaagtttttccctccaaggtagaatttgcaagagtgacagtggattgcatttcttttggggaagctttcttttggtggttttgtttattataccttcttaagttttcaaccaaggtttgcttttgttttgagttactggggttatttttgttttaaataaaaataagtgtacaataagtgtttttgtattgaaagcttttgttatcaagattttcatacttttaccttccatggctctttttaagattgatacttttaagaggtggctgatattctgcaacactgtacacataaaaaatacggtaaggatactttacatggttaaggtaaagtaagtctccagttggccaccattagctataatggcactttgtttgtgttgttggaaaaagtcacattgccattaaactttccttgtctgtctagttaatattgtgaagaaaaataaagtacagtgtgagatactg

SEQ ID NO: 73796 - DNA, 878 bp, Homo Sapiens
tgggagtaggagttgctcctaccccgttcctggggctgggtgtgtttcaggacagctgcttctgtgcatttgtgtctgcctgcctcatgctctctatagaggaggatggtcatcgtgacagcagcagctcaagttagcatttcaagtgatttgggggtgcaatgataatgaagaatggccatttgtaccagggctctgtattctgcaacagcctgtttgggaggctggagtggaaacaaagggtgggcatcaaagatgagaagccaaagcccctacaactccagccacccagccaggaggggctgtccaatcacattcaggcatgcgaatgagctgggccctgggtgaggtgggggtctggcctagtggggaggggcctggcctgggtggggcagggcctggcctggtccaggcttgggctccattcccatcactgctgtccctcctgaggtctggattggggatggggacaaagaaatagcaagagatgagaaacaacagaaacttttttctctaaaggactggttaaatcaattctgatacagccttacaatacaatagtatgcagctaaaaaataattgtatgtctttatatactaatatgtaataatcttcaggtgaaaaaggcaagccacagaaatgtgtatagcgcacttcccatttgtgtttcagaaaggagtagaatataaacacataattgcttatgtatgcctattcagaataaatgggtaacactgattacttttgggaggggaaccagtaggttgaggacaggagagggaagggtcttaacacttacacccttttgtacattttgaattttgaaccatgtgactgtattacctattcaaaataaacaataaatgggcccaaacagg

SEQ ID NO: 73797 - DNA, 2473 bp, Homo Sapiens
  misc_feature (64)..(64): n is a, c, g, or t
  misc_feature (1829)..(1863): n is a, c, g, or t
gaggagacagccagtgcgactccaccctccagctcgacggcagccgccccggccgacagccccngagacgacagcccggcgcgtcccggtccccacctccgaccaccgccagcgctccaggccccgccgctccccgctcgccgccaccgcgccctccgctccgcccgcagtgccaaccatgaccgccgccagtatgggccccgtccgcgtcgccttcgtggtcctcctcgccctctgcagccggccggccgtcggccagaactgcagcgggccgtgccggtgcccggacgagccggcgccgcgctgcccggcgggcgtgagcctcgtgctggacggctgcggctgctgccgcgtctgcgccaagcagctgggcgagctgtgcaccgagcgcgacccctgcgacccgcacaagggcctcttctgtgacttcggctccccggccaaccgcaagatcggcgtgtgcaccgccaaagatggtgctccctgcatcttcggtggtacggtgtaccgcagcggagagtccttccagagcagctgcaagtaccagtgcacgtgcctggacggggcggtgggctgcatgcccctgtgcagcatggacgttcgtctgcccagccctgactgccccttcccgaggagggtcaagctgcccgggaaatgctgcgaggagtgggtgtgtgacgagcccaaggaccaaaccgtggttgggcctgccctcgcggcttaccgactggaagacacgtttggcccagacccaactatgattagagccaactgcctggtccagaccacagagtggagcgcctgttccaagacctgtgggatgggcatctccacccgggttaccaatgacaacgcctcctgcaggctagagaagcagagccgcctgtgcatggtcaggccttgcgaagctgacctggaagagaacattaagaagggcaaaaagtgcatccgtactcccaaaatctccaagcctatcaagtttgagctttctggctgcaccagcatgaagacataccgagctaaattctgtggagtatgtaccgacggccgatgctgcaccccccacagaaccaccaccctgccggtggagttcaagtgccctgacggcgaggtcatgaagaagaacatgatgttcatcaagacctgtgcctgccattacaactgtcccggagacaatgacatctttgaatcgctgtactacaggaagatgtacggagacatggcatgaagccagagagtgagagacattaactcattagactggaacttgaactgattcacatctcatttttccgtaaaaatgatttcagtagcacaagttatttaaatctgtttttctaactgggggaaaagattcccacccaattcaaaacattgtgccatgtcaaacaaatagtctatcaaccccagacactggtttgaagaatgttaagacttgacagtggaactacattagtacacagcaccagaatgtatattaaggtgtggctttaggagcagtgggagggtaccagcagaaaggttagtatcatcagatagcatcttatacgagtaatatgcctgctatttgaagtgtaattgagaaggaaaattttagcgtgctcactgacctgcctgtagccccagtgacagctaggatgtgcattctccagccatcaagagactgagtcaagttgttccttaagtcagaacagcagactcagctctgacattctgattcgaatgacactgttcaggaatcggaatcctgtcgattagactggacagcttgtggcaagtgaatttgcctgtaacaagccagattttttaaaatttatattgtaaatatnnnnnnnnnnnnnnnnnnnnnnnnnnnnnnnnnnngtacagttatctaagttaatttaaagttgtttgtgcctttataatttgtgtttaaatgctttgatatttcaatgttagcctcaatttctgaacaccataggtagaatgtaaagcttgtctgatcgttcaaagcatgaaatggatacttatatggaaattctgctcagatagaatgacagtccgtcaaaacagattgtttgcaaaggggaggcatcagtgtccttggcaggctgatttctaggtaggaaatgtggtagcctcacttttaatgaacaaatggcctttattaaaaactgagtgactctatatagctgatcagttttttcacctggaagcatttgtttctactttgatatgactgtttttcggacagtttatttgttgagagtgtgaccaaaagttacatgtttgcacctttctagttgaaaataaagtgtatattttttctataaagggcttggttattcatttatccttctaaacatttctgagttttcttgagcataaataggaagttcttattaatcataagataattcaccaataattttctaaatatctttaattattctatacattaataaattgattattccatagaatttttatg

SEQ ID NO: 73798 - DNA, 579 bp, Homo Sapiens
ttcaggattggaatcctgtcgttagactgacagcttgtggcaagtgaattgcctgtaacaagccagatttttcaaaatttatatggtaaatactgcgtgtgtgtgtgcgtgtatattatatatctatgtccagtcatctaagttaattcaaagttgtctgtgccttctcatttttgtttttaatgctttgatattttcaatgttagcctcaatttctgaacaccataggtagaatgtaaagcttgtctgatcgttcaaagcatgaaatggatacttatatggaaattctgctcagatagaatgacagtccgtcaaaacagattgtttgcaaaggggaggcatcagtgtccttggcaggctgatttctaggtaggaaatgtggtagcctcacttttaatgaacaaatggcctttattaaaaactgagtgactctatatagctgatcagtttttttcacctggaagcatttgtttctactttgatatgactgtttttcggacagtttatttgttgagagtgtgaccaaaagttacatgtttgcacctttctagttgaaaataaagtgtatattttttctat

SEQ ID NO: 73799 - DNA, 1147 bp, Homo Sapiens
ggcacgaggccgagaccacgtggcctccgagcagctcagggcgcccttgaaagttcttggatctgcgggttatggccggtcccttgcagggcggtggggcccgggccctggacctactccggggcctgccgcgtgtgagcctggccaacttaaagccgaatcccggctccaagaaaccggagagaagaccaagaggtcggagaagaggtagaaaatgtggcagaggccataaaggagaaaggcaaagaggaacccggccccgcttgggctttgagggaggccagactccattttacatccgaatcccaaaatacgggtttaacgaaggacatagtttcagacgccagtataagcctttgagtctcaatagactgcagtatcttattgatttgggtcgtgttgatcctagtcaacctattgacttaacccagcttgtcaatgggagaggtgtgaccatccagccacttaaaagggattatggtgtccagctggttgaggagggtgctgacacctttacggcaaaagttaatattgaagtacagttggcttcagaactagctattgctgccattgaaaaaaatggtggtgttgttactacagccttctatgatccaagaagtctggacattgtatgcaaacctgttccattctttcttcgtggacaacccattccaaaaagaatgcttccaccagaagaactggtaccatattacactgatgcaaagaaccgtgggtacctggcggatcctgccaaatttcctgaagcacgacttgaactcgccaggaagtatggttatatcttacctgatatcactaaagatgaactcttcaaaatgctctgtactaggaaggatccaaggcagattttctttggtcttgctccaggatgggtggtgaatatggccgataagaaaatcctaaaacctacagatgaaaatctccttaagtattatacctcatgaattcccgtccaaggaagcagagttgttaaagagtactggaataggggctgaaggatctatattcccttattgcattttccttatgtataattttccagatggtgatgttacttttcagtgtactcatatgtctcattttcatctaaaattaaatggcaggaaacaaggactgcatagagaaaaaa

SEQ ID NO: 73800 - DNA, 2111 bp, Homo Sapiens
  misc_feature (1368)..(1464): n is a, c, g, or t
  misc_feature (1604)..(1612): n is a, c, g, or t
  misc_feature (1886)..(1895): n is a, c, g, or t
aagctctagttgctatgaaccaagtgtgtcaaaaaagcaggctggtaccggtccggaattcccgggatatcgtcgaccacacgtcggtccggagcctcaacttcaggatgttgacaacattgctgccgatactgctgctgtctggctgggccttttgtagccaagacgcctcagatggcctccaaagacttcatatgctccagatctcctacttccgcgacccctatcacgtgtggtaccagggcaacgcgtcgctggggggacacctaacgcacgtgctggaaggcccagacaccaacaccacgatcattcagctgcagcccttgcaggagcccgagagctgggcgcgcacgcagagtggcctgcagtcctacctgctccagttccacggcctcgtgcgcctggtgcaccaggagcggaccttggcctttcctctgaccatccgctgcttcctgggctgtgagctgcctcccgagggctctagagcccatgtcttcttcgaagtggctgtgaatgggagctcctttgtgagtttccggccggagagagccttgtggcaggcagacacccaggtcacctccggagtggtcaccttcaccctgcagcagctcaatgcctacaaccgcactcggtatgaactgcgggaattcctggaggacacctgtgtgcagtatgtgcagaaacatatttccgcggaaaacacgaaagggagccaaacaagccgctcctacacttcgctggtcctgggcgtcctggtgggcagtttcatcattgctggtgtggctgtaggcatcttcctgtgcacaggtggacggcgatgttaattactctccagccccgtcagaaggggctggattgatggaggctggcaagggaaagtttcagctcactgtgaagccagactccccaactgaaacaccagaaggtttggagtgacagctcctttcttctcccacatctgcccactgaagatttgagggaggggagatggagaggagaggtggacaaagtacttggtttgctaagaacctaagaacgtgtatgctttgctgaattagtctgataagtgaatgtttatctatctttgtggaaaacagataatggagttggggcaggaagcctatggcccatcctccaaagacagacagaatcacctgaggcgttcaaaagatataaccaaataaacaagtcatccacaatcaaaatacaacattcaatacttccaggtgtgtcagacttgggatgggacgctgatataatagggtagaaagaagtaacacgaagaagtggtggaaatgtaaaatccaagtcatatggcagtgatcaattattaatcaattaataatattaataaatttcttatatttnnnnnnnnnnnnnnnnnnnnnnnnnnnnnnnnnnnnnnnnnnnnnnnnnnnnnnnnnnnnnnnnnnnnnnnnnnnnnnnnnnnnnnnnnnnnnnnnnttttgggggccccctccgccctcaaaaaatttttcaaacccttcttttgcggcccgggcccataagggaaggaaacatggtcccaatttttttccccggaaacccgggacccaaaataaggggttggggcctttcccccnnnnnnnnnccccccggcgcggcaaacgagggccttttggaaaaaaattcccagaggggggtttcccgggggccatttcccggggatcctaaaccgaccgggggatcccccaggcgcagacctccgaaaatacaaaaattacgcccgcccgccccagcgtgggaaaatttatatgtgcagcccaacgcgggggaaaacgtccccttaaagcgcattcccggccgcccgccgtgggtaaagttttattttcacgaagccccccgattgagttgaaaccttcaannnnnnnnnnggggcggatatccacaccccccttgtcgcccccctcgcgccaatataatttctctttttccccgcggcgaaaaaccccgtggtaacaacaacacgatttttcccctatattgcgcgccgcgctatgaactccaacagagggggcgaatacatccccccccgtgggagttggtggccggaaccacactataaactattttcttcccccccgccgccg

SEQ ID NO: 73801 - DNA, 1004 bp, Homo Sapiens
  misc_feature (80)..(80): n is a, c, g, or t
  misc_feature (91)..(91): n is a, c, g, or t
aaataacactttataagcctctccctcctcccatctcctggcctccttccatcctcctctgcccagactccgcccctccnagacggtcctnacttcttttttccctagactgcagccagcggagcccgcagccggcccgagccaggaacccaggtccggagcctcaacttcaggatgttgacaacattgctgccgatactgctgctgtctggctgggccttttgtagccaagacgcctcagatggcctccaaagacttcatatgctccagatctcctacttccgcgacccctatcacgtgtggtaccagggcaacgcgtcgctggggggacacctaacgcacgtgctggaaggcccagacaccaacaccacgatcattcagctgcagcccttgcaggagcccgagagctgggcgcgcacgcagagtggcctgcagtcctacctgctccagttccacggcctcgtgcgcctggtgcaccaggagcggaccttggcctttcctctgaccatccgctgcttcctgggctgtgagctgcctcccgagggctctagagcccatgtcttcttcgaagtggctgtgaatgggagctcctttgtgagtttccggccggagagagccttgtggcaggcagacacccaggtcacctccggagtggtcaccttcaccctgcagcagctcaatgcctacaaccgcactcggtatgaactgcgggaattcctggaggacacctgtgtgcagtatgtgcagaaacatatttccgcggaaaacacgaaagggagccaaacaagccgctcctacacttcgctggtcctgggcgtcctggtgggcagtttcatcattgctggtgtggctgtaggcatcttcctgtgcacaggtgggacggcgatgttaattactctccagccccctcagaagggggctggaattgatggaaggctgggcaaaggggaaagtttcagcctcactggggaagccaagaactcccccaactgaaaacaccaaga

SEQ ID NO: 73802 - DNA, 597 bp, Homo Sapiens
  misc_feature (105)..(118): n is a, c, g, or t
aatcagaacactgttgtgtttaacactagttcagatgcagttaccttagagacttatttatttgcaggaacaaatggtgcctgaatattaacagtgttctgattnnnnnnnnnnnnnngatacatatgccttgtaaatggctcaccgagtggtcagtagtcacttcaactcttagttcacttttgtatagttgctctgctggaaagaaatgagagtgaatctgcttactcactagaacttccctgtgtgctgtgagccagcggaaccacttgtacaatgccagatttgtttatctttgtacagaagctttgatgaagtgtcttgtatttaacacccttatttaagcttatttaaccttaaattgttaattttataaaatttggtttggcctgcactacgatgagggatggaggtagctgcaggctcagaagagactgagcttgcacagatcagaccgagaagcagggtgagagattctaacgactggatgctgctagtaacacattgtttgtattgctttaccatttttaactgttagatttgagatgaacatacattttgcttttttaataaatgtttaaaagaagtccacataag

SEQ ID NO: 73803 - DNA, 699 bp, Homo Sapiens
  misc_feature (481)..(492): n is a, c, g, or t
ttacacagcattttagggaaagaatacaggcaggatgacactgtgtgttaaagtgttatttctatgtattacctggaatgaggcaggtttttttctgttttctaaaaagagtaaccaagatacctccagggtgtcattgggttccagctgctctcctccacattgaatgatatcttgttaatttataggcacatttgtggtaatttatatgtctatagagtaagtataagagataattcattagtaataggaattaactgaccccttttggatgggggagagcatcaggctggggtcaggtaagtgtaaatggccttctgagcatgctcttctaggctgactcccagccctgacttgaaaccattagcgctaacttgctctgttttgagaaaaactttccaaacttttgcatgagaaactagaaaaaggaatgtatgccacgtaactggattacagaaatgagttaattgtctctgtgatnnnnnnnnnnnntgaaatattttcttattgaattaatatttttgtcttgaagcattttctagtgatagaatgtatttgtcttttttcctggtggtaccctcttagcatatatctttgctatccttaagatcctaaacaaatcatctttgtcagttaagtatagttgcgcaaaaattgttaaatcctttgtctttattaaagaaaaatttgagtaacatt

SEQ ID NO: 73804 - DNA, 688 bp, Homo Sapiens
gatggtatctaattttgtagataacatctatgtctctaatagatctatctgtgcaatagaaccatacagtccttcgtagataggagaagcacaaatgttggttaatatttaacagagtatcagacctgcatccttctctctaagagctcaaacttcagagagtagattcagagagtaaatgttttcccaggctcaggcaagaggggtggtttgtatgttatttctttcttattttccagttagacttttggaaatctgccagatgcaattgaaaaaccctgctcagctttgtccaatgtctcatttgaggatcagcatgagtttgtttacttgagattaacaggagtcaaggatatacaaattcagcaatgtatggataactttcccctttttaacgctggcctcaccacaaaactaccaccatattgttgaattttggaagtttattatgctttattttttcctataaaaaaataaatgtcatcacattgtaatagttttataacctgttttatcatattttaaaatacatcttgaatattctttcatataattaatcttctacagcataattttaatatctatgaagattccattatgtgcttgtattatacatttttactctgaatacattattgttgtaaacaatgcttacaattatgaaaataaatatatatggctcatttac

SEQ ID NO: 73805 - DNA, 683 bp, Homo Sapiens
ccgtagcccatgtctggtgagcacaacagggaatgaattgggcactccactcccccgtctctctggcccagccctgaactagatgagctgcatttcatggagcccattttaaaatctctttccttatgactttgttactcaagtccagagttctctgtgcacttctgctagataaggagtgtaagccctgccccccagcactggcagcacgctgggccctccccacacaggacaccgtgcagttccgggggaagctgactcaaatcaaccttgaaatctcatgaaaacaaaatgacttgtctttttatttgatagtgtaatatcattcattttataaattttttagggtttttctcgtaatattgtacagttttgcatggcctggtgtgatcattttttggttagaatataatgctgacaaatgtggatggaggggaagatactgctttagcctatcactccttattttattttgtttggttttatgccctcagtgtcttagggaactttttaagagatcctctgctaccaaacaatgatgtggattcttttgcacagaaatatttaaggtgggatggtaaaaaatgtcacaaaagactcctcaccaatactttatgttgatatcacttaatattaaccagactttgctgtattgcaataaaacagagaactaataaaaaaaa

SEQ ID NO: 73806 - DNA, 849 bp, Homo Sapiens
  misc_feature (58)..(88): n is a, c, g, or t
  misc_feature (650)..(650): n is a, c, g, or t
  misc_feature (815)..(815): n is a, c, g, or t
  misc_feature (818)..(818): n is a, c, g, or t
  misc_feature (820)..(820): n is a, c, g, or t
ggggagagcggcgcggcgtgcgcgggcacgaggcgtagtggtctcccctaaggctgannnnnnnnnnnnnnnnnnnnnnnnnnnnnnntgcgaggctgttgtgctcccggctctcgtgtttcccctcctgagcgggtggaggaggcccaagcggtgctgggcgcgctcccccttcctttccctccggcgtcctctcccggccctctcgcgctgcactgtctctccgacgcaagactgtcccggcccggatatggctcgtggacagcagaaaattcagtctcagcagaaaaatgccaaaaagcaagctggacaaaagaagaaacaaggacatgaccaaaaggctgctgccaaagctgccttaatatatacctgcactgtctgtaggacacaaatgccagaccctaagaccttcaagcagcactttgagagcaagcatcctaagactccacttcctccagaattagctgatgttcaggcataaggttgtttacaggtgaattcatgacacctttgactcttctactgtctcagaccttaggtaacatacctgcagctgcttttctaacaaactgttgatcagcaaaaataaaggggctacagaaacactcatttttatgctgttccctcttgggcttcatgcaaagacaatntctgtgtaaatgtacagttgactctgatttggaaatatgaaaatcagtccatccttggtataaaaaatttttttacaattggaaattataattgatggtcatattggggtaaataactcctttaataaaatagaactttggattacgacctccccgggaaaaccncgncncagccccagaaaacccaaaattggcgcgt

SEQ ID NO: 73807 - DNA, 1058 bp, Homo Sapiens
ggtccggaattcccgggatcgcgcggcggcggcgggcgtgcgaggctgttgtgctcccggctctcgtgtttcccctcctgagcgggtggaggaggcccaagcggtgctgggcgcgctcccccttcctttccctccggcgtcctctcccggccctctcgcgctgcactgtctctccgacgcaagactgtcccggcccggatatggctcgtggacagcagaaaattcagtctcagcagaaaaatgccaaaaagcaagctggacaaaagaagaaacaaggacatgaccaaaaggctgctgccaaagctgccttaatatatacctgcactgtctgtaggacacaaatgccagaccctaagaccttcaagcagcactttgagagcaagcatcctaagactccacttcctccagaattagctgatgttcaggcataaggttgtttacaggtgaattcatgacacctttgactcttctactgtctcagaccttaggtaacatacctgcagctgcttttctaacaaactgttgatcagcaaaaataaaggggctacagaaacactcatttttatgctgttccctcttgggcttcatgcaaagacaattctgtgtaaatgtacagttgactctgatttggaaatatgaaaatcagtccatccttgttataaaaaatttttttacaattgtaattatattgatgttcatattgtgtaaaataactcatttaataaaatagtactttgatttacgacatcacaggataaatggttttagaaattctgttctaactttccacattatttgccttataaaaatctaatgaattcatcagctagaattgcaagtgcaattcttatatcccctttctctgctcagtggcaggttccctcagttaaactagagcagactgatttcattaaaattgtgcataccattttatggggcagctgatgatcttagtggaaaaatgatttatctgctgcctttagtatatttgcgggttagggggccattgtaccccctccgatcatttccctggggtttgaggtgggaaatatttaaaa

SEQ ID NO: 73808 - DNA, 681 bp, Homo Sapiens
  misc_feature (46)..(46): n is a, c, g, or t
aatttccctgctttcaaaagatgctgcaattcccaaatctctcttntgggttttgctaagagccctctagaggaggggctgccaacatacctcgtaggggaaattcaaggcctcttcatccactctgtctctctgaacgattgctttagccgtgaacccgcctgctccttcttcatctagctccaaattgtcagtaaaatcttctaactcatcgagcactgcatactccactctcttttcctgatccagctcattctcctcatccttcttatcagcactctcaccccctacgcctaccccgtcaccaacactcccgccaaagggacaagcatgcacgtccccactgacagggctaaggagcagaccgcactccgcccgcacgtcgcgctctgctcctgtgtacagcaccttcctgtccttactcctgcagctctcggtaaagctcacgctaatctttacatccttaagcaacttaaggtcaggggagaacttccggaccgcaggtgcgtgccgggcggtgcgcgggctgtggccactacagttcgggtctatgaggaggcggcccttagagaaggatcctttggagagaagagaagctccgtagaagttgaaggggtcctcagcagggagttcggactgtccatcaccaccagagccaacgtccattacctctgcaccact

SEQ ID NO: 73809 - DNA, 1009 bp, Homo Sapiens
  misc_feature (49)..(50): n is a, c, g, or t
  misc_feature (55)..(56): n is a, c, g, or t
  misc_feature (142)..(142): n is a, c, g, or t
  misc_feature (146)..(146): n is a, c, g, or t
  misc_feature (176)..(176): n is a, c, g, or t
  misc_feature (207)..(207): n is a, c, g, or t
gatgaaccgcatgagccacgcaatattggtagtcatcatagcccccagnntacanntatctccgctcgttgtgtgtgaattgagcgatacatttcacacaggaacagctatacatgatacgaattaatacgctcactatagngatntgccctcgagcccaaatcgggcacgagcangcccagccctcccacatcacgggccacccantgggcgtgaggcagagcccgcgctgtggggcatttccagccctgcccacaggccaccctcgcccgcacaggcagcactgagccggggaccctgctggcgcccgatccgccactgcagaagagaccctctgtggacacccacactctgcagggactggcccccaactcaccccgtgctggctggtggggtccatttccccgcagcgggtatggaggatgcgtcgaggtccctgtctctgtcaatgtcatgggaaccaaaagtcactgagccgtcctccccccacctccgagcacagggcctggagggcaggggctccccgaaggctgggggttggagaagggtgaggggcttcccccagggatccccccacctggcctgctcacggggccttggagcatgagaccagtgaccccgagttttgcccatatcaggacagtggctccttctcactcccctttctcaggccaggagggccgagggccacacgggtgccacagcccaggtcggagtggcccagccggcaggcttgttcttcagcatccgacgggaacatctccaacagaagcaaaacggaaagtgcctcccggacccccagagggccacccaacctcaccagtcaccagccccagaccacccacagcccctcccagacaccccgcctcatctggaaatagttccgtttgtttctctaaaaagacttgtaggtgggaaaaaaaatcttttgttctcatggaattggcctattggcaagatcgcatgtttttttaataaacgttgtattttagaataatcttaggtttgc

SEQ ID NO: 73810 - DNA, 1657 bp, Homo Sapiens
gctaggtagcgaggcccggtgttaatcggcacgagggatggctgctgtggccgtggctgttcgcgaggactcgggatccgggatgaaggcggagcttccccctgggcctggggcagtggggagggaaatgaccaaagaagaaaagctgcagcttcggaaggaaaagaaacagcagaagaagaaacggaaggaagaaaagggggcagaaccagagactggctctgctgtatctgcagcccaatgtcaagtaggcccaaccagagaactgccagaatcgggcattcagttgggcactcctcgggagaaagttccagctggtcggagtaaggccgaacttcgggctgagcgtcgagccaagcaggaggccgagcgggccctgaaacaggcaagaaaaggggaacaaggaggaccacctcctaaggccagccccagcacagctggagaaaccccctcaggagtgaagcgtctccctgagtaccctcaggttgatgacctacttctgagaaggcttgttaaaaaaccagagcgtcaacaggttcctacacgaaaggattatggatccaaagtcagtctcttctctcacctaccccagtacagcagacaaaactctctgacccagtttatgagcatcccatcctctgtgatccacccagccatggtgcgactcggcctgcagtactcccagggcctggtcagtggctccaatgcccggtgtattgccctgcttcgtgccttgcagcaggtgattcaggattacacaacaccgcctaatgaagaactctccagggatctagtgaataaactaaaaccctacatgagcttcctgactcagtgccgtcccctggtcagcgagcatgcacaacgccatcaagttccttaacaaggaaatcaccagtgtgggcagttccaagcgggaagaggaggccaagtcagaacttcgagcagccattgatcggtatgtgcaagagaagattgtgctagcagctcaggcaatttcacgctttgcttaccagaagatcagtaatggagatgtgatcctggtatatggatgctcatctctggtatcacgaattcttcaggaggcttggacagagggccggcggtttcgggtggtagtggtggacagccggccatggctggaaggaaggcacacactacgttctctagtccatgctggtgtcccagcctcctacctgctgattcctgcagcctcctatgtgctcccagaggtttccaaggtgctattgggagctcatgcactcttggccaacgggtctgtgatgtcacgggtagggacagcacagttagccctggtggctcgagcccataatgtaccagtgctggtttgctgtgaaacatacaagttctgtgagcgtgtgcagactgatgcctttgtctctaatgagctagatgaccctgatgatctgcaatgtaagcggggagaacatgttgcgctggctaactggcagaaccacgcatccctacggttgttgaatctagtctatgatgtgactcccccagagcttgtggatctggtgatcacggagctggggatgatcccttgcagttctgtacctgttgttctacgagtcaagagcagtgaccagtgacgggggaaacacagggttaataaatgccatactccctaccctcagct

SEQ ID NO: 73811 - DNA, 598 bp, Homo Sapiens
  misc_feature (380)..(436): n is a, c, g, or t
  misc_feature (467)..(467): n is a, c, g, or t
tatccgctctgatgatcagcaggtgcttgaatatgtgtatgatgacaagcctatagagggctcagagatggcacaagtcagaatggccaaaccattccgtaacccttgactagggcaaaaaaaggcttacgttggccttcccgggagtttttaacatgtttcttaatttgacccacaggtgcatgccttccttatttctcatactcatcacctcctcttcccgcttggaactgcccacactggtgatttccttgttaaggaacttgatggcgttgtgcatgctcgctgacaggggacggcactgagtcaggaagctataatacaacagcaataccttatatctgcgcaactcttcacaacttacaaagccttcacatttnnnnnnnnnnnnnnnnnnnnnnnnnnnnnnnnnnnnnnnnnnnnnnnnnnnnnnnnncaggaaaaagagtacaagacaaagattggcngagctgggagtggacttatagtgttgtccctacctcatgtagggttttagtttattcactagatccctggagagttcttcattagacggtgttgtgtaatcctgaatcacctataggtaccaaggtgattt

SEQ ID NO: 73812 - DNA, 2263 bp, Homo Sapiens
  misc_feature (76)..(110): n is a, c, g, or t
  misc_feature (365)..(376): n is a, c, g, or t
  misc_feature (1091)..(1099): n is a, c, g, or t
  misc_feature (1253)..(1269): n is a, c, g, or t
  misc_feature (1651)..(1669): n is a, c, g, or t
  misc_feature (1711)..(2117): n is a, c, g, or t
  misc_feature (2163)..(2163): n is a, c, g, or t
  misc_feature (2184)..(2184): n is a, c, g, or t
acatgactagactcatataggggctcgcgtatagcgaacgacgagcgcagcgagtcattgagcgaggaagcggcgnnnnnnnnnnnnnnnnnnnnnnnnnnnnnnnnnnncagtcgacggtaccggacatatgcccgggaattcggccattacggccggggcaattcggaatgaaaaattataatgtaattttacattacataagttccttttacaattaaaaaatagcacttcttcatcttatgcctgtttgagaagatattaaattttcacattgttgacagtgaaatgctatgttggtttataagattacagaccatttgttttcatgtggataattttagtgcattgctcacccggtatgnnnnnnnnnnnnaacttgaacatttggctgtgtttggttttcttttttaattagataatcacacggaaaattaagctgttcatatctttaaattaggattgcaaaccaaggaaagaacgcatttgagattttaagatgtcacttataaggggagaagtgttcttaaaaagtcaaccagaaaactgttatgccttttatttgtttgcaaggatgtctttgtaatgtgtttcatgaatagaatatccaatacagataagctgacttgaatcatttggagcaattttgccctgtgttatatgtgtttcacgcacatatttgcagttggattttctccaacagaaagtggattcactactggcacattaacaagcaccaataggtttttattccaactccgagcactgtggttgagtaacatcacctcaattttttattatccttaaagatattgcattttcatattctttatttataaaggatcaatgctgctgtaaatacaggtatttttaattttaaaatttcattccaccaccatcagatgcagttccctattttgtttaatgaagggatatataagctttctaatggtgtcttcagaaatttataaaatgtaaatactgatttgactggtctttaagatgtgtttaactgtgaggctatttaacgaatagtgtggatgtgatttgtcatccagtattaagttcttagtcattgatttttgtgtttnnnnnnnnntaggaaagagggaaactgcagctttcattacagattccttgattggtaagctctccaaatgatgagttctagtaaactctgatttttgcctctggatagtagatctcgagcgtttatctcgggctttaatttgctaaagctgtgcacatatgtnnnnnnnnnnnnnnnnngattattttaggggagatgtaggtgtagaattattgcttatgtcatttcttaagcagttatgctcttaatgcttaaaagaaggctagcattgtttgcacaaaaagttggtgattcccaccccaaatagtaataaaattacttctgttgagtaaactttttatgtcatcgtaaaagctgaaaaaatccctttgtttctatttataaaaaaagtgcttttctatatgtacccttgataacagattttgaagaaatcctgtaagatgataaagcatttgaatggtacagtagatgtaaaaaaaattcagtttaaaagaacatttgtttttacattaaatgtttatttgaaatcaaatgattttgtacataaagttcaataatatnnnnnnnnnnnnnnnnnnngcctacagccgcggccgctccaaccctcgtgccgaattcttnnnnnnnnnnnnnnnnnnnnnnnnnnnnnnnnnnnnnnnnnnnnnnnnnnnnnnnnnnnnnnnnnnnnnnnnnnnnnnnnnnnnnnnnnnnnnnnnnnnnnnnnnnnnnnnnnnnnnnnnnnnnnnnnnnnnnnnnnnnnnnnnnnnnnnnnnnnnnnnnnnnnnnnnnnnnnnnnnnnnnnnnnnnnnnnnnnnnnnnnnnnnnnnnnnnnnnnnnnnnnnnnnnnnnnnnnnnnnnnnnnnnnnnnnnnnnnnnnnnnnnnnnnnnnnnnnnnnnnnnnnnnnnnnnnnnnnnnnnnnnnnnnnnnnnnnnnnnnnnnnnnnnnnnnnnnnnnnnnnnnnnnnnnnnnnnnnnnnnnnnnnnnnnnnnnnnnnnnnnnnnnnnnnnnnnnnnnnnnnnnnnnnnnaacaaagggcaggaactgtaaaaggcgcgtgctggcgttttcatangtccgcccctgacagcacaanaatcagctcagtcaaggtgcgaacggaagatataaatacagcgttccctggagtcctctggtcctgtcgactgcgtacg

SEQ ID NO: 73813 - DNA, 934 bp, Homo Sapiens
ggaccggtccggaattcccgggatatcgtcgacccacgcgtccgcgggagtacaaactagtgatgctgggtgctggtggtgtagggaagagtgccatgaccatgcagttcatcagccaccgattcccagaagatcatgatcccaccattgaagatgcttataagatcaggatccgtattgatgatgagcctgccaatctggacattttggatacagctggacaggcagagtttacagccatgcgggaccagtatatgagggcaggagaagggtttatcatctgttactctatcacggatcgtcgaagtttccatgaagttcgtgagtttaaacagcttatttatcgagtccgacgtactgacgatacacctgtggttcttgtgggaaacaagtcagacctcaaacagctaagacaggtcaccaaggaagaaggattggccttggcccgagaattcagctgtcccttttttgagacatctgctgcataccgctactatattgatgatgttttccatgcccttgtacgggagatacgtaggaaagaaaaggaggcagtactggccatggagaaaaaatctaagcccaaaaacagtgtatggaagaggctaaaatcaccattccggaagaagaaagattcagtaacttgaagagaagatgtgaagtgtttatctgtgaactgcagtgctgtatcaaagcagtccagtaacctgcagtactgagtatggtgcttgctctttcacttaactgataagagggacatgcctactaggagtttttaatgatgtggtatttaaagtattgtctcttagttaagtatgatttattaacccagtggagcactgtctgcttttaaattgtcacattagaatttgttctaccaaatgttttgggttctgttgcgctattaattaatgtaaatttgtttatacccagg

SEQ ID NO: 73814 - DNA, 788 bp, Homo Sapiens
  misc_feature (47)..(55): n is a, c, g, or t
  misc_feature (651)..(659): n is a, c, g, or t
ccatcccttacgctgtgtagacagagctttattgccctggaaaagannnnnnnnnaactctcatgcagttcagtctttccatcatttcactttgtgagtcactcacataattgtcaatcattcctctgaccttcttaagaatttacaccttaccgtctctgtgattgaagcagacttctcgctttatttcccttaggctcatttttctgtgggctctcccttaaagacacatggccacagacacctccttcacatatgtaatctgccttcccctgcggccttccgtggtcacagcaacagggactgctcaccccctccagctggggcttttctaacaagcacagtcagaaatgcgcaggcctggggttggggatgaacagaagttgattagtgggcacagaaatacagttagatagaaggaatagttccagcattcgatattacagtagggagactgcatttaacaataattgattgtatatttgaaaacagctagaagaataagaatattcccaacacaaagaaaagataagcgaggtgaaggaaatcccagttaccctcattcagtccattacacattcgatacaggtatcaaaatatcataggcacctcaaagacatgtacaactcttaatttaacatttttgaaagnnnnnnnnnccggccagagcattaaaacaaataaaataagaaacacagaggccagtgttaggtgaagaactccgctgcttcagaaagagaatagcagcgctcgcttaccgtgggaacacggccagttaacaaaatggg

SEQ ID NO: 73815 - DNA, 599 bp, Homo Sapiens
  misc_feature (195)..(318): n is a, c, g, or t
gcacgagggcggcgtttgcacggagtgcaatcactgcgtccttacgggggttgcaaggcgtccgaagtatgagtccactaacaaaagtccagaaactcgccagttaatagtattgtgtctcttcaaaatatcggagaataatttctttctcgctgatcgcctaacttctactgacgaagcttggaaattgcagannnnnnnnnnnnnnnnnnnnnnnnnnnnnnnnnnnnnnnnnnnnnnnnnnnnnnnnnnnnnnnnnnnnnnnnnnnnnnnnnnnnnnnnnnnnnnnnnnnnnnnnnnnnnnnnnnnnnnnnnnnnaaatacaaaaaaaattctaaaacttgtatggaactacaaaagacattaaataatcaaagtaatcttgagcaacaaggacacagctggaggcatcactctacctgattttgtaatccattatcaaaaaactgtggtaccagcataaaaacagattcactgaccagtggaacaggaaagcccagacataactcatacatttccatccaattgatttttgacaaaagtggcacacagaatggggagaggacaaataaataaataaattgttttgagatatctgt

SEQ ID NO: 73816 - DNA, 481 bp, Homo Sapiens
  misc_feature (222)..(222): n is a, c, g, or t
atataccaaaagctgaaaggaaaacactgccatccaggaatactatctccaactatcctgtgtttcaaaaattaaggagaaatataaagttctcaaacaaaagatgtgggagtttaccaccactagacctgcacgggaagaattgctaaagggagtccttcaagctgtagtaaaagagtgctaattagaaacatgaaaacaaatacaaaaaaattctaaaancttgtatggaactacaaaagacattaaataatcaaagtaatcttgagcaacaaggacacagctggaggcatcactctacctgattttgtaatccattatcaaaaaactgtggtaccagcataaaaacagattcactgaccagtggaacaggaaagcccagacataactcatacatttccatccaattgatttttgacaaaagtggcacacagaatggggagaggataaataaataaataaattgttttgagaaaaaaaa

SEQ ID NO: 73817 - DNA, 1123 bp, Homo Sapiens
  misc_feature (195)..(432): n is a, c, g, or t
  misc_feature (659)..(767): n is a, c, g, or t
ttaagatggcggcgtttgcacggagtgcaatcactgcgtccttacgggggttgcaaggcgtccgaagtatgagtccactaacaaaagtccagaaactcgccagttaatagtattgtgtctcttcaaaatatcggagaataatttctttctcgctgatcgcctaacttctactgacgaagcttggaagttgcagannnnnnnnnnnnnnnnnnnnnnnnnnnnnnnnnnnnnnnnnnnnnnnnnnnnnnnnnnnnnnnnnnnnnnnnnnnnnnnnnnnnnnnnnnnnnnnnnnnnnnnnnnnnnnnnnnnnnnnnnnnnnnnnnnnnnnnnnnnnnnnnnnnnnnnnnnnnnnnnnnnnnnnnnnnnnnnnnnnnnnnnnnnnnnnnnnnnnnnnnnnnnnnnnnnnnnnnnnnnnnnnnnnnnnnnnnnnnntgagccaccgcgcccggccagaacattagttttaaacttcctaacccttgggagaaggcaaaacacttgatgaaatctacataaagactaaaacattttaccaattttgcattgtttgtttgaaattgcattgacgactgccagacatgatgtattgagtaaaaggaacttcggtacacaggcctttagtgatgtggtggtaagatggtatgatggagttcgctctnnnnnnnnnnnnnnnnnnnnnnnnnnnnnnnnnnnnnnnnnnnnnnnnnnnnnnnnnnnnnnnnnnnnnnnnnnnnnnnnnnnnnnnnnnnnnnnnnnnnnnnnnnnnntactgggctctgtatcacccagctctggagttgaaagagctcttcattcctgagtctcctgtaccactgagaatagaaatacaaaaaaaattctaaaacttgtatggaactacaaaagacattaaataatcaaagtaatcttgagcaacaaggacacagctggaggcatcactctacctgattttgtaatccattatcaaaaaactgtggtaccagcataaaaacagattcactgaccagtggaacaggaaagcccagacataactcatacatttccatccaattgatttttgacaaaagtggcacacagaatggggagaggacaaataaataaataaattgttttgagatatctg

SEQ ID NO: 73818 - DNA, 777 bp, Homo Sapiens; identical to SEQ ID NO: 6156
  misc_feature (230)..(338): n is a, c, g, or t
  misc_feature (413)..(650): n is a, c, g, or t

SEQ ID NO: 73819 - DNA, 1088 bp, Homo Sapiens
  misc_feature (43)..(51): n is a, c, g, or t
ccccggctttcaaagagagaagaatctattgcaaagattgggnnnnnnnnntatcagaaaattaatttggacgaagcagaggagttttttgagcttatttccaaagctcagagcaacagagcagatgaccaacgtgggctgctaaggaaggaagacctggtgttgccagagttcctccgtttacctcctggttctacagaactcaccctccccactccagctgctgtggccaagggctttagcaagagaagcgccacaggcaacggccgggagagcgcctcccagcctggcgagcagtgggagccagtccaggagagcagcgacagcccgtccaccagcccgggctcagcctccagcccccctggacctcctgggacgaccccccccgggcagaagtctcccagcgggcccttctgcactccccagtcccccgtctccctcgcgcaggagggcaccgcccagatctggaagaggcagtctcaggaagtggaggccgggggcatccagacggtggaggatgagcacgtggccgagctgaccctgatgggggagggggacatcagcagccccaacagcaccttgctgccgccgccctccaccccccaggaagtgccaggaccttccagaccaggaagtgggacccatggcagccgagacctcccagtcaacagaatcatcgatgtggatcttgtaactggctcggcgcccgggcgggatggtggcatagcgggggcacaggctggccctgggaggtcgcaggccagtggtgggcctcctacatcagacctccctggcttgggccccgtcccgggtgagcctgctaagcccaagaccagcgctcaccacgccaccttcgtctgagctgccctggcctggccaactctcctgtggacatgtcggggtggggcagcccaggtggattctgtgggcctcaggggggccaccctggccaccacaccctcaggagcccagccaggagggcagggggtgacctcgctggaggcactggccccggacattcgccatgctggccatggggctccctggccctggcctcctgctgcccaataaagcatttctgaggaccc

SEQ ID NO: 73820 - DNA, 636 bp, Homo Sapiens
ccagctccctcccggtctcgccttccctcgcggtcagcatgaaagccttcagtcccgtcaggtccgtcagaaaaaacagcctgtcggaccacagcctgggcatctcccggagcaaaacccctgttggacgacccgatgagcctgctatacaacatgaacgactgctactccaagctcaaggagctggtgcccagcatcccccagaacaagaaggtgagcaagatggaaatcctgcagcacgtcatcgactacatcttggacctgcagatcgccctggactcgcatcccactattgtcagcctgcatcaccagagacccgggcagaaccaggcgtccaggacgccgctgaccaccctcaacacggatatcagcatcctgtccttgcaggtaagacctgctccggggtccccgccccgccgccgcacactcccgcggtcgtctgggctgtcactaggagatccgtagcccagacggtgactttcgtatgagctatttaactttattttcttcagaatctgctgtagattgagctgtgcgtgaaattgctagtaagttctgacatgttaatgcgtctgtctttaaatctgaattgttaccataaacgtgtttaatggaacttgcaggaatgtggactac

SEQ ID NO: 73821 - DNA, 1405 bp, Homo Sapiens
  misc_feature (665)..(665): n is a, c, g, or t
  misc_feature (758)..(772): n is a, c, g, or t
  misc_feature (1072)..(1094): n is a, c, g, or t
tgcggccgctcgtcttgatagacgtgccaccttccgccaatggggacgaagggaagctccagcgtgtggccccggcgagtgcggataaaagccgccccgccgggctcgggcttcattctgagccgagcccggtgccaagcgcagctagctcagcaggcggcagcggcggcctgagcttcagggcagccagctccctcccggtctcgccttccctcgcggtcagcatgaaagccttcagtcccgtgaggtccgttaggaaaaacagcctgtcggaccacagcctgggcatctcccggagcaaaacccctgtggacgacccgatgagcctgctatacaacatgaacgactgctactccaagctcaaggagctggtgcccagcatcccccagaacaagaaggtgagcaagatggaaatcctgcagcacgtcatcgactacatcttggacctgcagatcgccctggactcgcatcccactattgtcagcctgcatcaccagagacccgggcagaaccaggcgtccaggacgccgctgaccaccctcaacacggatatcagcatcctgtccttgcaggcttctgaattcccttctgagttaatgtcaaatgacagcaaagcactgtgtggctgaataagcggggttcatgatttcttttattctttgcancacaacaacaacaacaaattcacggaatcttttaagtgctgaacttatttttcaaccatttcacaaggaggacaagttgaatggacctttttnnnnnnnnnnnnnnntggaaggaaaactaagaatgatcatcttcccagggtgttctcttacttggactgtgatattcgttatttatgaaaaagacttttaaatgccctttctgcagttggaaggttttctttatatactattcccaccatggggagcgaaaacgttaaaatcacaaggaattgcccaatctaagcagactttgccttttttcaaaggtggagcgtgaataccagaaggatccagtattcagtcacttaaatgaagtcttttggtcagaaattacctttttgacacaagcctactgaatgctgtgnnnnnnnnnnnnnnnnnnnnnnnctatttgagtgaaaccttgtgaactctttaattagagttttcttgtatagtggcagagatgtctatttctgcattcaaaagtgtaatgatgtacttattcatgctaaactttttataaaagtttagttgtaaacttaacccttttatacaaaataaatcaagtgtgtttattgaatggtgattgcctgctttatttcagaggaccagtgctttgatttttattatgctatgttataactgaacccaaataaatacaagttcaaatttatgtagactgtataagattataataaaacatgtctgaagtcaaa

SEQ ID NO: 73822 - DNA, 862 bp, Homo Sapiens
  misc_feature (224)..(224): n is a, c, g, or t
  misc_feature (607)..(625): n is a, c, g, or t
cagtcgacggtaccggacatatgcccgggaattcggccattacggccggggattcattctgagccgagcccggtgccaagcgcagctagctcagcaggcggcagcggcggcctgagcttcagggcagccagctccctcccggtctcgccttccctcgcggtcagcatgaaagccttcagtcccgtgaggtccgttaggaaaaacagcctgtcggaccacagccntgggcatctcccggagcaaaacccctgtggacgacccgatgagcctgctatacaacatgaacgactgctactccaagctcaaggagctggtgcccagcatcccccagaacaagaaggtgagcaagatggaaatcctgcagcacgtcatcgactacatcttggacctgcagatcgccctggactcgcatcccactattgtcagcctgcatcaccagagacccgggcagaaccaggcgtccaggacgccgctgaccaccctcaacacggatatcagcatcctgtccttgcaggcttctgaattcccttctgagttaatggtcaaatgacagcaaagcactgtgtggctgaataagcggtgttcatgatttcttttattctttgcnnnnnnnnnnnnnnnnnnnattcacggaatcttttaagtgctgaacttatgtttcaaccatttcacaaggaggacaagttgaatgggacctttttaaaaagaaacaaacaccatggaaggaaaacctaagaatggatcatcttcccaggggtgttctcttactgtggactgtggatatcgttattatgaaaaaagacttttagattgccctttctgcagttggaagggtttctttatatactatgcccacatgggg

SEQ ID NO: 73823 - DNA, 753 bp, Homo Sapiens
  misc_feature (161)..(179): n is a, c, g, or t
taaatacgaatatcacagtccaacgtagagaacaccctgggaagatgatcattcttagttttccttccgttgttttcttctttttaaaaaggtccattcaacttgtcctccttgtgaaatggttgaaaaataagttcagcacttaaaagattccgtgaatnnnnnnnnnnnnnnnnnnngcaaagaataaaagaaatcatgaacaccgcttattcagccacacagtgctttgctgtcatttgacattaactcagaagggaattcagaagcctgcaaggacaggatgctgatatccgtgttgagggtggtcagcggcgtcctggacgcctggttctgcccgggtctctggtgatgcaggctgacaatagtgggatgcgagtccagggcgatctgcaggtccaagatgtagtcgatgacgtgctgcaggatttccatcttgctcaccttcttgttctgggggatgctgggcaccagctccttgagcttggagtagcagtcgttcatgttgtatagcaggctcatcgggtcgtccacaggggttttgctccgggagatgcccaggctgtggtccgacaggctgtttttcctaacggacctcacgggactgaaggctttcatgctgaccgcgagggaaggcgagaccgggagggagctggctgccctgaagctcaggccgccgctgccgcctgctgagctagctgcgcttggcctcgtgccgaattcgccacccaggcctcgctaccttggaccgta

SEQ ID NO: 73824 - DNA, 1540 bp, Homo Sapiens
  misc_feature (1211)..(1241): n is a, c, g, or t
  misc_feature (1315)..(1326): n is a, c, g, or t
  misc_feature (1404)..(1419): n is a, c, g, or t
ttttttggtttccggtactgtcacctccaggctgagccgggctggcggaagaggcacgtgcgctgctgaatggagctggtcgctggttgctacgagcaggtcctctttgggttcgctgtacacccggagcccgaggcttgcggcgaccacgagcaatggactcttgtggctgacttcactcaccatgctcacactgcctccttgtcagcagtagctgtaaatagtcgttttgtggtcactgggagcaaagatgaaacaattcacatttatgacatgaaaaagaagattgagcatggggctctagtgcatcacagtggtacaataacttgcctgaaattctatggcaacaggcatttaatcagtggagcggaagatggactcatctgtatctgggatgcaaagaaatgggaatgcctgaagtcaattaaagctcacaaaggacaggtgaccttcctttctattcacccatctggcaagttggccctgtcggttggtacagataaaactttaagaacgtggaatcttgtagaaggaagatcagcattcataaaaaatataaaacaaaatgctcacatagtagaatggtccccaagaggagagcagtatgtagttatcatacagaataaaatagacatctatcagcttgacactgcatccattaggggcaccatcacaaatgaaaagagaatttcctctgttaaaatttctttcaaagtctgtcccttgcaggggctggagatgaagaaagttataaaggttttttgactgtgattcactagtgtgcctctgcgaatttaaagctcatgaaaacagggtaaaggacatgttcagttttgaaattccagagcatcatgttattgtttcagcatcgagtgatggtttcatcaaaatgtggaagcttaagcaggataagaaagttcccccatctttactctgtgaaataaacactaatgccaggctgacgtgtcttggagtgtggctagacaaagtggcagacatgaaagaaagccttcctccagctgcagagccttctcctgtaagtaaagaacagtccaaaattggcaaaaaggagcctggtgacacagtgcacaaagaagaaaagcggtcaaaacctaacacaaagaaacgcggtttaacaggtgacagtaagaaagcaacaaaagaaagtggcctgatatcaaccaagaagaggaaaatggtagaaatgttgnnnnnnnnnnnnnnnnnnnnnnnnnnnnnnncaatgcagtgaatcacagatgtctcctgaaagaactcttttagatgaaatcattctactcaaatgtaccttaannnnnnnnnnnnccctgagtaaaagcaagaaatttcttcctttggaaaaaatatatatattaaaaaaccacttttagatggttttttttnnnnnnnnnnnnnnnnctggtaaaattacttttggcagacagtgttttatgaattatgtatcatgttgatatataatatgttaatgtgtcatgtaatttttactttgtacaaagcaaataaagatctttctcaaaat

SEQ ID NO: 73825 - DNA, 1535 bp, Homo Sapiens
  misc_feature (750)..(751): n is a, c, g, or t
  misc_feature (1240)..(1240): n is a, c, g, or t
  misc_feature (1242)..(1242): n is a, c, g, or t
  misc_feature (1288)..(1435): n is a, c, g, or t
ggctcggtgttttgactgcaagtctttttggatagaattttatagttagaaagtagctaacacttgggttttataggcacaaaaaacaagtcttatactagctgtactttattttttgagttcttattaatgaggaacatccacttttgcattgacagtgatttcaagattgctttatcagcctttaaaggattcttgactagtcgtgcacatcagaactgccaggtccccagtggttctgaagcagtaagctttgggtgggctctggcatcagcactttcactaagcttcacagataattctgatgcatactccaggcctgaaccactgatcaatttgaaacatgcataacaaagcaaaaaaagttttgtttcaccttttgaaatacagttaactcttttaccatgccagagatcattcagagagacaggtcgttgctccggagtgatacagatctggcagtacccagcccttgtgtgtgtgcgttagctcagcacctgcccacactgcgagcccccgtaggatgtgccttgtccttccctgtttcagcacttaacacactacctggtacagagtatgtagtgggcatctgttgaatgaatgcttttcccagtagcagtgtattcatacaatattaatataattgtcccctggcttacagataaaaatgaaagcatcaagtgcccagtgagtgagacccaggtgttcttcctccacccctagtggtcccctgggcaggtcttttttttnnggtaacactcaccagtctgttctgtagtcaatcattgattgacttgtctgtgaacttgcaggaactgtttcatagtttcattagcacagagtaaacatgtttgccatgcaaggttattttgcatctgcatttaagtgataatgttgaatcaatgaaaagtgttgattaagcagtagttgtagatatgctaagtttttcaaattactaatatcaagtggagattgtttttacttttaagggtattgcttttgtgatagcataaataatggttttccttttttgtaatgtaaattaattgctggcaacttttgtattcccatagactggggaagcttaattgcctttacaagtacttatgtacaactttgtatcaaattttctgtaatagtttatgctttagtactatatatgtactaataattttatctgacttctgtttatatcatttgtacaattacatggttgtaaaataaacttttaaacctcacncnccccaaatcctacccccgctattcaacacttttccccccccaaacnnnnnnnnnnnnnnnnnnnnnnnnnnnnnnnnnnnnnnnnnnnnnnnnnnnnnnnnnnnnnnnnnnnnnnnnnnnnnnnnnnnnnnnnnnnnnnnnnnnnnnnnnnnnnnnnnnnnnnnnnnnnnnnnnnnnnnnnnnnnnnnnnnnngtttcttttcccgccaccctccccataccataactcttccgtcctactttccgcttccgggcggctgtcctttccctgtatattggccctcctgttcccc

SEQ ID NO: 73826 - DNA, 481 bp, Homo Sapiens
cagtatatatagatcctttcatattattttactaataatgtttgaactttgcatatttgacatagttcctgataggaatagcacagctcaaacattagtttttctacttacctcctctaacacgtggtttgtctggagagtttctaaaaattcagctataaccccagttcatgtatttactggtgattgttcttgctgaggtagtaacagcccaatcttgggctgttaaatcctaggaaatctcgaatcatagtgattaaaatagttggggtaaagttgtagcttatatgcaatactacttggaggaattcttttactaatttgtatttaatgtggaaattgtatagtttcattgatttaatcataaataatggaaatggtcttcaagaagttttatttcatttttttgcttatacactctgattcctataatacagtgcggtaagctatgcacagaaaataaaatgttaaaaatccaaaa

SEQ ID NO: 73827 - DNA, 972 bp, Homo Sapiens
  misc_feature (734)..(752): n is a, c, g, or t
gtaataaaccttcacatggcttcaaaaggaaaacaagcaaatcttctctaatctactcttactataatttcctaagtgtacaccaaactctggatttaaaaatctgaagtactatagaacattaagttgaagaatggaaattaagagtacgtattcatggtttatatttcttattctatggagttcgtgaacacatctaggtggaatgcatctgagactaagggctggtttttaatcctcataagaaaccagccttgaagaattaacaattctcttcattggtattctaaacctcctaagatatttaggcttctgtacataaaagtgtttttgctaaatttacagtatatatagatcctttcatattattttactaagaatgtttgaactttgcatatttgatatagttcctggtaggaatagcacagctcaaacattagtttttctacttacctcctctaacacgtggtttgtctggagagtttctaaaaattcagctataaccccagttcatgtatttactggtgattgttcttgctgaggtagtaacagcccaatcttgggctgttaaatcctaggaaatctcgaatcatagtgattaaaatagttggggtaaagttgtagcttatatgcaatactacttggaggaattcttctactaatttgtatttaatgtggaaattgtatagtttcattgatttaatcataaataatggaaatggtctccaagaagnnnnnnnnnnnnnnnnnnngcttatacactctgattcctataatacagtgctataagctatgcacagaaaataaaatgtttgaaatccaagaataatggttcttactgctaagagggagtaatagttattactaatgattttgattgggttgcatttttgttgcaatgtttattccacttgcagttagaatatgaatatgttttatcactagtgtggctaaataaccaaacatttgtgt

SEQ ID NO: 73828 - DNA, 2223 bp, Homo Sapiens
  misc_feature (73)..(784): n is a, c, g, or t
  misc_feature (836)..(853): n is a, c, g, or t
  misc_feature (1086)..(1096): n is a, c, g, or t
tgttctcccatgcgatagtggtctacccgggtgatccagacgtagtaccgataagcgcagcgtccgctgaacnnnnnnnnnnnnnnnnnnnnnnnnnnnnnnnnnnnnnnnnnnnnnnnnnnnnnnnnnnnnnnnnnnnnnnnnnnnnnnnnnnnnnnnnnnnnnnnnnnnnnnnnnnnnnnnnnnnnnnnnnnnnnnnnnnnnnnnnnnnnnnnnnnnnnnnnnnnnnnnnnnnnnnnnnnnnnnnnnnnnnnnnnnnnnnnnnnnnnnnnnnnnnnnnnnnnnnnnnnnnnnnnnnnnnnnnnnnnnnnnnnnnnnnnnnnnnnnnnnnnnnnnnnnnnnnnnnnnnnnnnnnnnnnnnnnnnnnnnnnnnnnnnnnnnnnnnnnnnnnnnnnnnnnnnnnnnnnnnnnnnnnnnnnnnnnnnnnnnnnnnnnnnnnnnnnnnnnnnnnnnnnnnnnnnnnnnnnnnnnnnnnnnnnnnnnnnnnnnnnnnnnnnnnnnnnnnnnnnnnnnnnnnnnnnnnnnnnnnnnnnnnnnnnnnnnnnnnnnnnnnnnnnnnnnnnnnnnnnnnnnnnnnnnnnnnnnnnnnnnnnnnnnnnnnnnnnnnnnnnnnnnnnnnnnnnnnnnnnnnnnnnnnnnnnnnnnnnnnnnnnnnnnnnnnnnnnnnnnnnnnnnnnnnnnnnnnnnnnnnnnnnnnnnnnnnnnnnnnnnnnnnnnnnnnnnnnnnnnnnnnnnnnnnnnnnnnnnnnnnnnnnnnnnnnnnnnnnnnnnnnnnnnnnnnnnnaagaattcggcacgaggccattctgatgttggagcggccgcggctgtaggcnnnnnnnnnnnnnnnnnncaatacaatctatattatctcatatatagatttcttcctcactttatttgctcacttctgtcacgcatttaaaatgtcacagagaccaaaatagagtggctttctggtggaactcatggcagtcatacaacaagatacaaaactaggagactctgtcttctcatacatcatacaattaatttttcaagtattctttatgtacaaagagctactctacctggaaagaaaatttnnnnnnnnnnngacaaggtaggttatgcatcctaaggaggaggaggggatggagcggtcgggcacatgttcccgtccccacgaccccacggaccgctgattccctgccactgagctccccccaccctccacgcaaacagcaacgctgggcaggcgaaaaccaagggagtgggaatcagcagcactttggcctggagggagaagggaagccacggtggagagacagcttggtgaaagcagatggcggggcagggccagggctggtcctcagcctgtgtctgcacccaccctcccgggcagcttgggcccaactgctccgcccccccaagatggagggggagagctggcctctggcacccacatgcaggcctctgccacgaggaaaggaaggaggccaggaagacggctgggccccaactctcctcacaggtggcagggagggaacctgttcattccaggaaggaccaaaagaaagaatccccagtgaacaccggcagggtccctctcccttaccctaccagcttctccaggtgactgcagcccaaacccagggataatctgggttttaaatgccaggacactttgcctgtagggacacgtgttgtgacacgaggctcttcctaagtcaggagctagtataagcccagcctgctgggggttccggaggccccaggtctagaggtgtggagggggagaggaggggcttggtggtcctgaccactcctgaggcctgtccaagggctctgggcccagcactgcaggatcctgcgagtgccagcagctgaactaagagccccagggagcgtgtgggacagatggggagccagggaggggcgctttcatatgtgactaaggcacagaagagatgggccaggggccagatggggtagaacaccaggccctgtgtggataggggccccgagaggagtctgggaccattccccccacctcccagctccccactgtgtggccacccctcccggtctccctgccggactgccttcccccagaagctggtctgaaacgtggagactcagacctttcccctgaaacgggagggagaagccccaaagagagagagaacccagcatcagcccctcgtgccgattcaacaccaggcctcgactaagcctatattt

SEQ ID NO: 73829 - DNA, 1288 bp, Homo Sapiens
cagtcgacggtagcggacatatgcccgggaattcggccattacggccgggggctggccacatatttgttccttgcccatatgctttctacttcttgttcttattatgaaattatgaatttgaagcctctgaaatggtgatcagttttcaacatctttcaaaaacaaaattactatttcctccatattgccttttttagataactttaaagttaggattttaaaatatttgtaactggctaaattttaaagtcgtgacaaataattacttaggttcagaaatatacacacacttactctttagccagtttctttcaaggtttactgtcccatcagatatctagccattttcctttgcaaattacataccttcttaagagtgtatttttaagattattacttatgctttatgatgatatagtttttcaaaattatttatagcttcatatgatgtttggtaattttttctattgatacctgttttaaaaatattttccaaggaagttgattaaaattatatttgttaccttttagaaaaagcattgaaatgagtttctcttgctttttcattttccctctgctttatatgctcttcgcaatacatcatgtccaacgggatacctattgttctcatgacacccaaaattgatgagagcaaaggggtcgcaccatatggaaatgttgaaaactattgtaaagtagtattatgaagtagcttttgtgtcattcatgtcgatgacatgaaagtgaagtaaatttattctatgtaaattcacactaaaaccagtacagtaccataagtagaatacatgtaagaatcacctagtcttcactatattgagtaaatataacatgctaattttacaattaatgaaactaaacttttaaacatctccattatatctacatccttttgaaggtatttatcatagttgccaattttaattttaggattgactttctctttctgaatgacttcataaagtttggtgtgaattttgaagacttgggttactaatgattgtatctttgctagtcaacaacttatgaaatatactcaatgcgtctgatgtgtcattaagtgcagaaataactaagacacaaataacctttgcaaaccttcaagctgtgtaatattccaatgttgtttttttctttgtatatatacttatatcacgtaggatgtaaaaccagtatgaccttgtctagtctccaaacttaaaataaacttttgaaaagctgggattcttttgaagcagttgtaattaaacacatttataagaatacaaa

SEQ ID NO: 73830 - DNA, 688 bp, Homo Sapiens
ctcaacagccccatgacttcagctccacctggggcagtagggaaggtggaggcacactcctcttctgttggacaggtgagctctgagggcaagccctgggcccagccacgcagagaccctggctgccctggctcttgtttgtttaggcccaggttctgcccagaccggggcccagcagagctctcaggaggctgagaaacctccagggcagacagaaagttggggccagagctaggttttagagatcctacaggatcccacatgggacggctacctaggtggggcacggcccctacccgagaacaggagggtcctccagagaatgtgccatgatcagggatatgagcagggcctgcccagagcctgggcacctttgggagagggaaaagtgaggtgggacttggaaaggctttgaacgccaggctgatggttgagggatggtgggcagggagggagggcgaagaggctccctctggcatttgggagccggtgggtggagggaggagcccttggaggtggctgcagtcccttaatggggggccttgctctgggcatgtggggctcttcctccatccagagctggcccaagacccttagaaccctgagtgctggcaaatctcactgctcctgacccagcctgtgtattcaaaacgaaaacagtaaaaccaacatcaggatgtccgtcaga

SEQ ID NO: 73831 - DNA, 1623 bp, Homo Sapiens
gtagactcccagatcggaagttagtcttggagagtttccaaagtgctgaagtaaaaaggagacttggagggcctttgcttaatgaacaagaggcttgtgtcctcccaagaacatgagggagttcagaagggagctatagctcacagacagaaacctgcccgctcaccccatccctcgtgactgggagcatgtttgctcagaattttctaacaggactctcccttcaaaaatccaatttgctcccagaatgttgtttagcctctgagaatctcactctttcatttccatctgtgaatggacatagatgtgttgctcagggatcagaaacatcagagtccagggcccagtggcatggtgttgcattagtagttagaaaagtaattggtcagctctactgtaaaagaaataagtatgtagtacagttttgtaaatgtcaggtctgttctattgttttgtgatctgaagactgtcaaactggttgataatcaaagaaaaggttggttagaataagtaaaatttcagttagaaagatatagcttaccagttttccatgtgcttaaggaagtcaagaatatttcaggttgttgagaactgttgtaaaatggaattgaagctagtgtctctcaccttcttaggtgtatcagagagaggaagtggaaggccagtagtagcatcttcatacttacttttgccagcccagcctccatttcaaagactttgtcttccatcctatccaatgacatggtcagggatgggctctgaggaggcagtgaggccccaccttggtttgctccactgtggtgtgtagtctccaaacagcttaagggtttttaagttttctcacgattacctccactccactcatctactatcagcatcagaaaggttaacatccctgggaccattctacttataaaagagatgaactagtgtgctttctccccttttccaggtgtgccatccatatacaatctcctcttggccaagttcaacaaatgtttccagggaaccccgtgggttgaggcaaagtagccaagatgtattgagttaagtttttctagaggacaaaagtatttcttgtcccttttccctcatgctcatatgttttagctgaggcgtaaatggccaagttgagtaatatctgtggaactgagacagagagccagggacccatgtacccagggaccagtcccctggggaatcacacagtggctcagactagactgctctatcccaccagaactctgctgctgttcatttccatcaggaccacccaggaaagcaaataagttagccttctcatcattaggtcacctaaagaacaggccagccacacatataaccctttccctactttactaatgtatcccttatgtggtaccagcaatggaggacaggcagacttaccccctgccatctagagagaatgttgttattacccgtaaaacttgaccacccccatatcccactcctttttgtaaaaacaaatgcttaaacctgtgagcctgccgttcctttctatgtgttaatcagtttccttccatttgagctgtgtgggagggaagggcattgaaattgtaggttgtaatcttgtgccaaccaataaaaaccagtatttcacac

SEQ ID NO: 73832 - DNA, 796 bp, Homo Sapiens
accttgtgcgggttataaaacaaggagctggagtaaaattgcccttacccccaatccaaatgctgtccaggatttaggagctacccaacctgtggttatatggtgttggtttccattttttgtttgtttgcttgtttccaaaatagccttgcttggtactgcatggaaagttcaagcttttcttcttgcccgctcagggctggcctcttccccgtgtcttcacagcgtccctaaggaagatttttgcagcactctctggagctgaggggagtgaaatttggtccagagaaggcggaaggaaatagttttcctgtttccttttctcgaggtggatgtcctcaggcttccttcacacctccttctcatgggtgcggctggcagtacagtcaggctgtggaggagggctgagaagaaaggggcactggtccagccccaggtttggtctgagacaggtacacagcagataccatcccaccttcctctctaaagaacaggccagccacacatataaccctttccctactttactaatgtatcccttatgtggtaccagcaatggaggacaggcagacttaccccctgccatctagagagaatgttgttattacccgtaaaacttgaccacccccatatcccactcctttttgtaaaaacaaatgcttaaacctgtgagcctgccgttcctttctatgtgttaatcagtttccttccatttgagctgtgtgggagggaagggcattgaaattgtaggttgtaatcttgtgccaaccaataaaaaccagtatttcacacacaa

SEQ ID NO: 73833 - DNA, 1678 bp, Homo Sapiens
gctgtataattattttaatatgctgaatgttgcgagtattttgaggatttgtgcatctgtatgcgtaagggatactagcttagagttctgctttttctttagtgtctgtttggctttgatgtcaaggtggtgctggcctcagagtgagttaggaggtatgcccacatcttccatttttttccttcaaagtttgagaaggattgccatttgttcgtaagagtatttggtagaaatcaccagtgaagccatctggtcctgggcttttctttgttggaaaaattttgattactgatcagtctccttgcttgccttacctcaatttagattttcttttcttcttgagtcagttttggtaatttatgtttccaggaattttctgtgtcaggtagtttgtccatgtcttgtaggtaattttggcatataattgttcgtagcagttttttacaatttcattgtggtaggaacacaacatggatctatcctcttaaattgtggagggcaccgcacatcacagctgacgcaggagcagtgctgtacagccgagccctggagcttgttcacatccgccacccaaaccctgtgtgagccggttaccagctccccattcccctccctgcagcccctggtagcaaccactccgctccgagtctgtgaacctgactgctctaaacccttcatgtgccgacttcacaaacaccttctacttgctgagctccttcccagtggagctagagtcgccaggcctggcggaattcctggccaggctgatggagcagtgtgcctccctggaggagctgaggctggccttccggccccagatggatccccggcagctatccatgatgctgatgctggcgcagtcaaacccgcagctgttcgcgcttatgggcacccgggcaggcatcgccagggagctggagcgtgtggagcagcagtctcggctggagcagctgagtgcggcagagctgcagagcaggaaccagggccactgggctgactggctacaggcgtacaggtgagccctgcgtccatggtcaccgggggacggcgggtcgcgtgctggaaaaagtccagcccggctgtgactccagagcccggatgtcattccagagcccggctggacaaggacctggaaggcgctggggacgctgccgcctggcaggctgagcacgtgcgcgtgatgcacgccaacaacccgaagtacgtgctgaggaactacatcgcgcagaatgccatcgaggctgccgagcgcggggacttctcagaggtgcggcgggtgctgaaactactggagaccccttaccactgcgaggcgggggccgccacagacgccgaggccacggaagccgacggggcggacggcaggcagcgctcctacagcagtaagcccccgctctgggcagcagaactgtgcgtgacatgatcttcgtaacggcctcggcacgctccacacccctggagtctcccgaggcccccatgtgctgctgagtggccaagatgatgccaggctgccctatacactgggggattctgccctggcccatgcacacccgtctttccatgatggcagagacatccagtcaggacctgacccgtctctgtctgaggccggctcagcagtgcagcctggtccctgggggctggacccaggctcctaaataaaccagcaactccctcg

SEQ ID NO: 73834 - DNA, 1395 bp, Homo Sapiens
  misc_feature (42)..(42): n is a, c, g, or t
  misc_feature (193)..(256): n is a, c, g, or t
caccaccacaaattcacccgcgcccccccttggccccacaanaacgctggtaccggtccggaattcccgggatatcgtcgacccacgcgtccgcgagggcgccccgtccgcgccgcggcccgtgcccggggcctgcttcacccgcgtgcagcccaccccgctgcggcagccgcgcctcgtggcgctgtcagannnnnnnnnnnnnnnnnnnnnnnnnnnnnnnnnnnnnnnnnnnnnnnnnnnnnnnnnnnnnnnnctgttcttcagcggcaacgcgctcctgccgggcgccgagcccgccgcgcactgctactgcggccaccaattcggccagttcgccgggcagctgggcgacggcgccgccatggacctgggcgaggtgtgcacggcgaacggcgagcgctgggagctgcagctcaagggcgccgggcccacgcccttctccagacaggccgacggtcgccaaggtcctacggtcaagcatccgggagtttctatgcagcgaagccatgttccacctgggagtccccaccacacgggccggcgcctgcgtcacgtacgagtccacggaggtgcgcgacgggttctatgatgggaatcccaaatatgaacaatgcacggttgtgttgcgtgtagcttccactttcataaggttggatcctttgagatttttaagtctgcagatgagcacacagggcgtgcaggccccagcgtggggaggaacgacattcgagtgcagctgctcgactatgtcatcagctccttttaccccgagatccaggctgctcatgccagcgacagcgtgcagagaaatgctgccttcttccgggaggtgacgcggcgcacggcgcggatggtggccgagtggcagtgtgtgggcttctgccacggcgtgctcaaaaccgacaacatgagcatcctggggctcaccatcgactacgggccctttggcttcctggacaggttacgaccccgaccacgtgtgcaatgcctccgacaacaccggcgcgctacgcgtacagcaagcaggcccgaggtgtgcacgtggaacctgcggaagctggccgaggccctgcagccggaactgcccctggagcttgggggaggccatcctggccgaggagtttgacgccgagttccaaaggcactacctgcagaagatgcgcaggaagctgggcctcgtgcaggtggagctggaggaagacggggcgctggtgtccaagctcctggagaccatgcatctgaccggtgccgacttcacaaacaccttctacttgctgagctccttcccagtggagctagagtcgccaggcctggcggaattcctggccaggctgatggagcagtgtgcctccctggaggagctgaggctgggcttccggccccagatggatc

SEQ ID NO: 73835 - DNA, 1379 bp, Homo Sapiens
  misc_feature (1130)..(1153): n is a, c, g, or t
cagttacatacttttaaacagggatgtgtttcattattcagacattcaggcaatgttgacttcattagtgttgacagaaaataagcataaaaatgcaaaacattgttggcttaacctgaacatacctgcattacctattattgaccagtttgtgttgccaaaagacttattcctcggcattaaaatggagcacttaaaaatattgctaaaaagcaaatgcctacacactggtctttgcagcaaataagggtatttatacttttaaaatattttaagtccataattggagtaatatacacaccttcttatgtagaaggagttcagatcatataaacactgtacaatccaaaaaaccctactgagaataaaactaaataggcttatgataagaaatacagatattcgcatgtatttacaaatatcatagacacacaagtttggtcaaatactgtaaagaaagaagaagtggtttcacattataatggccaaaatgtttatctaccttgctcaaagcaaataaaaatataaactcagtatgtgaactcctgcagtttaagacatcatgacagtatacagatagatagaaactgttgaccaaattatacagcaaatgtttttgtaggctaagtgtaggtctttaaaataaaaaaagatcattcataggattcatagcaacaatgataaacaagtgtcctgatttgtggtgttcatgtgggtgcctaattccatcagagaagaaaaatgcattaaacttttggctaataagaaaagatagaattacaaagtacaattaaatccctgtaaatgcaataatgaagtaaaaaaatgtagctttactttaatatacatcttaaatgttaccttgagacaataaagaataaataagcatgcctggaggcacacacttaaagacaacgaagagactgcatgggaggaataagtaacaattatataaatgaaagatgaatatgagatttattcaaaataattatctttctagccagtctttgttttaacccttcttgaaaattttggctagtagaatgtgacaaaactacatgtgtgtctttatggcttaaaacaaagcatacttgaaaagtggaatgggcttccttttttacagaattttnnnnnnnnnnnnnnnnnnnnnnnncatatgcaggcacttcaaaagactatggaggcaaagcacctgacccatcctttccaaaatatttttcaatcatcaaaattatgctaaagagtaggaaaattccagagaatcagcaaagttgaatacaagagactaatgtgcacagagggcatagagtgacccactttttattgctgggggtcttttttttaatcaaagagcaaaataattacacagacaccattgc

SEQ ID NO: 73836 - DNA, 733 bp, Homo Sapiens
  misc_feature (653)..(674): n is a, c, g, or t
cccagtgggataattccaaccggagaaacccagagtttgcccaaatatttaaaaagaagttattccttgagaagttcatattttgtgacatctgcattgatttcagtattactgatggtactgttattcataagtcatattaacattctctccgtgaaatcatggtacagtcactgcccagaggtactgaggaaaaagcaatatgggttcggcagatggtggtggtaaaatgaatcttaaggagtgtggtaaatatgtgctccgcttttgttgcatcactatgtgaagtactgtgttgcagaagtggcaaaagcgcttatttttaaaaatgcaaaatatttgtacaatgtaactttatgcttccaaataataatgtatgttagacagcaagaaatgaatactttaaaaagtgatatatgttggagttataaagaaatacactaaggagaggtagtaaatgtgaaccttgttgcagtgtataaggtggaagcctaaagaaatctcaccgaaacttactgctgaatgattacattctcccttaagcagaaaactttggatgtgccatgcaatggtgtctgtgtaattattttgctctttgattaaaaaaaagacccccagcaataaaaagtgggtcactctatgccctctgtgcnnnnnnnnnnnnnnnnnnnnnngggcggcgctcgcgatctagacggacgcgtgggtcgacgatatcccgggaattccggac

SEQ ID NO: 73837 - DNA, 726 bp, Homo Sapiens
  misc_feature (30)..(30): n is a, c, g, or t
  misc_feature (463)..(485): n is a, c, g, or t
ctatggctgcacagctcactgaaggtagancaatgattgtgctcagtccaattctgtctcccccatgcctagctgttaagtaattactggttcaaaactacgtgttattagtaaaacaaacaaaacagataaagacagcatttaaaactgtgttgtcagataagagaacacatccaaaatgcatgattcttacaaactaaaggaagttaatgtgcaaaaatctcaaccaaaactactatttttagtatacttgtttacgtaaatgctgattggaaatatttaaatgactatagatctgattctttcttttcctttggaaactgggattaatgtatgctctagatccatttattagaaatgcaaaaatactacaattttttgatggatgaaaatactcctgtaacacaaacagagaactggaggaactgaagaataactcactcatatagctctgcctcattcnnnnnnnnnnnnnnnnnnnnnnntagcagaggtattttactcagaaaataggtttcaaagaacattaatgactttcttttcccttttatgtctgcttaatcagtgttaaactgctatgggaaaagttttatagaactatataacctgaatgttggtctctttgtacacatcttttctatgactgcaaatcttcactttatgtatcatttttactgtcatattatttttgttcaataaaaactttgtgataaaaggtaaaaaaaa

SEQ ID NO: 73838 - DNA, 703 bp, Homo Sapiens
caaggaaggccccaccgacatctacttctcggccatatgcctgcgagctttgcgccaagcagttccagagcccttccacactcaaaatgcacatgagatgtcacaccggggagaagccataccagtgcaagacctgcggacggtgcttttcggtgcaaggaaacttacagaaacatgaacgcatccacctgggcttgaaggagttcgtctgtcagtattgcaccaaggcattcactttgaatgagaccctcaaaatccatgaaagaatccatactggagaaaagcgttaccactgtcagttctgctttcagagatttttgtatctctccaccaaaaggaatcacgagcagaggcatattcgggagcataatgggaagggctatgcctgcttccagtgccccaaaatttgcaaaacagctgctgcccttggaatgcaccaaaagaaacacttattcaaaagcccaagtcagcaggagaaaataggtgacgtgtgccacgaaaactcaaatcccttggagaatcaacatttcattggttcagaagacaatgaccaaaaggataacatacaaaccggtgtggaaaatgttgtcctttgagtggcaagaattagaaaaatcttcaaaaatatagttggtggtttttttagttatgatttaagtttagtttcattttgtccatgtgacagtcatgaaggagtgaaatt

SEQ ID NO: 73839 - DNA, 743 bp, Homo Sapiens
  misc_feature (291)..(318): n is a, c, g, or t
agccacggaggagccgaggaccttccagacgttcggcaaggcagaggcaccagagctgagcccaacaggcacgaggctggccagcacctctgtctcggagatgagctcactgctggagatgctgctggaacagcgctccagcatgcccgtggaggccgcctccgaggcgctgcggcggctctcggtctgcgggaggaccctcagtttagacttggccaccagtgcagcctcaggcatgaaagtgcaaggggacccaggtggaaagacggggactgagggcaagagcagagnnnnnnnnnnnnnnnnnnnnnnnnnnnngtgcctgtgaacatacctcagacgcctctggatccaagaaccaggggcctgaggatctgtggacaagagctggtttctaaaatcttgtaactcactagctagcggcggcctgagaactttagggtgactgatgctacccccacagaggaggcaagagccccaggactaacagctgactgaccaaagcagccccttgtaagcagctctgagtcttttggaggacagggacggtttgtggctgagataagtgtttcctggcaaaacatatgtggagcacaaagggtcagtcctctggcagaacagatgccacggagtatcacaggcaggaaaggatggccttcttgggtagcaggagtcagggggctgtaccctgggggtgccaggaaatgctctctgacctatcaataaaggaaaagcagtgattc

SEQ ID NO: 73840 - DNA, 1077 bp, Homo Sapiens
ggctttttaaaaatttacttattacttgttcttagcaaattaagacaattacaataaaacatcagctaactgggttcttgtgagaaaactgaggtcagcttggaaaggagttccccgagtggagttcccagcggcccgcggctgacggccagatctgtcctgaggggtcgtgggagcccagcgcctgccttgagggaaatgaacactgaaaacaggatttgggagcagtattggattgacagcagagaagggactgtttgtaagggcagtttctcactgaagctgctaccattttcctttgtaaagaagtcatccacctcctcccagcggtgcccattttcaagacgctgcccgagcctcttaaaacagcttcttgaaagggtttttccacaacgggttctggaatgttctgcttcagctctggaggatgctctaaattagttcaccatgatgaagttagatttgcagtgagctataaactccgtcacagggtcatgctcgccttccgttttgatggtacctgcgatgctgtcattctccaggatggggaggaaaagttgcacgaagtcagaggtataaggaggagcaatgacgtccagcacctgcgtgggggagcacagggtgacttcttccgcacactagtgcggggcatccaccgacatccgggtgaaatggccatcagtttggaaaaaatccctccccacccccaccggccggtgacaccacccatctccaacattcagatgcccagggtggtaatggaggtaaagtgtgtcatacagctgctgcaggcagaaggtgctttttggtaaacgagtatctgtcattgtcatcactacatcagaaagcacagttctcagttaggtacaaaatgaactaaattaagccaaaaagggcagtgctagtgtaaacagtatgaaacatgaaaccaacggtgcattgctgacctcagtgacaaaatagcgaatgagtgaaatgtcagtgtccagcttctccagacactttcggatgtaactgacaacaggaagtacataacctcgactcagcaggtgaaccatcctgtccagccgcggccgc

SEQ ID NO: 73841 - DNA, 927 bp, Homo Sapiens
ttccgggaatcgtcgaccacgcgtccggactgacatacccctgtccacctggcgttgctggatgagatcagcacctgccaccagctcctgcacccccaggtcctgcagctgcttgttaagctttttgagactgagcactcccagctggacgtgatggagcagcttgagttgaagaagacactgctggacaggatggttcacctgctgagtcgaggttatgtacttcctgttgtcagtaacatccgaaagtgtctggagaagctggacactgacatttcactcattcgctattttgtcactgaggtgctggacgtcattgctcctccttatacctctgacttcgtgcaacttttcctccccatcctggagaatgacagcatcgcaggtaccatcaaaacggaaggcgagcatgaccctgtgacggagtttatagctcactgcaaatctaacttcatcatggtgaactaatttagagcatcctccagagctgaagcagaacattccagaacccgttgtggaaaaaccctttcaagaagctgttttaagaggctctggcagcgtcttgaaaatgggcaccgctgggaggaggtggatgacttctttacaaaggaaaatggtagcagcttcagtgagaaactgcccttacaaacagtcccttctctgctgtcaatccaatactgctcccaaatcctgttttcagtgttcatttccctcaaggcaggcgctgggctcccacgacccctcaggacagatctggccgtcagccgcgggccgctgggaactccactcggggaactcctttccaagctgacctcagttttctcacaagaacccagttagctgatgttttattgtaattgtcttaatttgctaagaacaagtaataagtaaatttttaaaaagcctttctgctgggttggattaatg

SEQ ID NO: 73842 - DNA, 1243 bp, Homo Sapiens
cagtaactatagccggtctaaggtagcgaggcctgggtggcgaattcggcacgaaggggcgcccggaaggtcagcgtgtgaagtaggcgctggcaacgcggggttacccgctgttattgaggagtaacggcccagcggaccacccaggcttgaggcagcggcgggaaccactcggtttgctgcgataccatggaaggaggcgggggaagcggcaacaaaaccacagggggattggccggctttttcggagccggcggagcaggttactcgcacgcggatttggctggcgtcccgctaactggtatgaaccctctgtctccttatttaaatgtggatccacgatacctcgtgcaggatacagatgagtttattttacctaccggagctaataaaacccggggcagatttgagctggccttctttacgattggaggatgttgcatgacaggggctgcgtttggtgcaatgaatggtcttcggctaggattgaaggaaacccagaacatggcctggtccaaaccaagaaatgtacagattttgaatatggtgactaggcaaggggcactttgggctaatactctaggttctctggctttgctctatagtgcatttggtgtcatcattgagaaaacacgaggtgcagaagatgaccttaacacagtagcagctggaaccatgacaggcatgttgtataaatgtacaggtggtcttcgagggatagcacgaggtggtctgacaggactaacacttaccagcctctatgcactatataataactgggagcacatgaaaggctccttgctccaacagtcactctgaagattttgccaactcatgaatggaggacacttcagtagtcatctagatccttttataagacagtttggagttattctctctcttctacctacaattagtttgaaaaattggagattttgatttgctgtgatgaaaatcctggatggctgaccaagactggcacttgttccagccattagtgagttgaagccaaagccctttggtgactcactgagtaccatggttctgttctcctctggagatcttgcacgtatctgttttcctcccccatgaactagaaaaccacttactcccagaattcaggtcgtgcttgttagtactatatcaccaagtccattcatttaatgatccaaaactgtaatgttgcactgtattccaaataaagggtaaaaacagaaccaaagttataactccaacacacaaa

SEQ ID NO: 73843 - DNA, 744 bp, Homo Sapiens
  misc_feature (11)..(11): n is a, c, g, or t
  misc_feature (61)..(61): n is a, c, g, or t
ccagaggagtntgtggccatcgcggactacgctcccaccgatgagacccagctcagttttntgagaggagaaaaaattcttatcctgagacaaaccactgcagattggtggtggggtgagcgtgcgggctgctgtgggtacattccggcaaaccatgtggggaagcacgtggatgagtacgaccccgaggacacgtggcaggatgaagagtacttcggcagctatggaactctgaaactccacttggagatgttggcagaccagccacgaacaactaaataccacagtgtcatcctgcagaataaagaatccctgacggataaagtcatcctggacgtgggctgtgggactgggatcatcagtctcttctgtgcacactatgcgcggcctagagcggtgtacgcggtggaggccagtgagatggcacagcacacggggcagctggtcctgcagaacggctttgctgacatcatcaccgtgtaccagcagaaggtggaggatgtggtgctgcccgagaaggtggacgtgctggtgtctgagtggatggggacctgcctgctggtgagggcgggcgtgcgggcagctgggggccggagctggggggcttctgagcacgggctcggctgggccaacctcaggatctcaagggtcgtgcgtgattcattttgatgttttccctaatgtgacgactaattaatttcttgtgtgctagtaaccacgttctcctgatcaaatatccctgtc

SEQ ID NO: 73844 - DNA, 1990 bp, Homo Sapiens
ggggagggcggtggctcaggctcctggaaaggaccgtccacccctccgcgctggcggtgtggacgcggaactcagcggagaaacgcgattgagaaatggaaaagaaaatgaaataaatcagcagttatgaggcagagcctaagagaactatggcaacatcaggtgactgtcccagaagtgaatcgcagggagaagagcctgctgagtgcagtgaggcgggtctcctgcaggagggagtacagccagaggagtttgtggccatcgcggactacgctgccaccgatgagacccagctcagttttttgagaggagaaaaaattcttatcctgagacaaaccactgcagattggtggtggggtgagcgtgcgggctgctgtgggtacattccggcaaaccatgtggggaagcacgtggatgagtacgaccccgaggacacgtggcaggatgaagagtacttcggcagctatggaactctgaaactccacttggagatgttggcagaccagccacgaacaactaaataccacagtgtcatcctgcagaataaagaatccctgacggataaagtcatcctggacgtgggctgtgggactgggatcatcagtctcttctgtgcacactatgcgcggcctagagcggtgtacgcggtggaggccagtgagatggcacagcacacggggcagctggtcctgcagaacggctttgctgacatcatcaccgtgtaccagcagaaggtggaggatgtggtgctgcccgagaaggtggacgtgctggtgtctgagtggatggggacctgcctgctgtttgagttcatgatcgagtccatcctgtatgcccggggatgcctggctgaaggaggacggggtcatttggcccaccatggctgcgttgcaccttgtgccctgcagtgctgataaggattatcgtagcaaggtgctcttctgggacaacgcgtacgagttcaacctcagcgctctgaaatctttagcagttaaggagtttttttcaaagcccaagtataaccacattttgaaaccagaagactgtctctctgaaccgtgcactatattgcagttggacatgagaaccgtgcaaatttctgatctagagaccctgaggggcgagctgcgcttcgacatcaggaaggcggggaccctgcacggcttcacggcctggtttagcgtccacttccagagcctgcaggaggggcagccgccgcaggtgctcagcaccgggcccttccaccccaccacacactggaagcagacgctgttcatgatggacgacccagtccctgtccatacaggagacgtggtcacgggttcagttgtgttgcagagaaacccagtgtggagaaggcacatgtctgtggctctgagctgggctgtcacttccagacaagaccccacatctcaaaaagttggagaaaaagtcttcccccatctggagatgacagttgatgctttattttggaaagcagtgtgcatatcttgaggggtgatgaacacaaacaaaccaaggtgcacctggcttcctgcacactcctgcgaaagtcggtgaacattcccctccacatttgaccccttcccctaacctgggcaaggtgaccttcaggttccttcaccagaacaaacaccccttggggctccggcaaggaacttggcgtggcccaccccccgcctgcccagtgggccggcccttctaaaaaagtaaggctggggttttcccggtgggttccacccggggggtggcccccagagggcccaaacccctgggccttggttcccgaaacttcctgtggtccctaaagcttaagggctaaagggctaacacatctcctagggaacgccacgccatttttccacccccggggaacccctggggaacaggggaactggccccccacttcccttggggttaagggggggccccttaattggcgggtggctttaattccctttctgggggtgggaacactaaggatattgcc

SEQ ID NO: 73845 - DNA, 1496 bp, Homo Sapiens
  misc_feature (795)..(795): n is a, c, g, or t
  misc_feature (798)..(798): n is a, c, g, or t
  misc_feature (993)..(993): n is a, c, g, or t
  misc_feature (1347)..(1371): n is a, c, g, or t
ccccacacactggcgtgtggacgcggaactcagcggagaaacgcgattgagagcagtgtgtggattacactatcactggaaaaatacgaattgagaagaaggaaaagactggaagatgcagaccttggttcctgttagtggaaacactgtaaggtcccagaaatggaaaagaaaatgaaataaatcagcagttatgaggcagagcctaagagaactatggcaacatcaggtgactgtcccagaagtgaatcgcagggagaagagcctgctgagtgcagtgaggcgggtctcctgcaggagggagtacagccagaggagtttgtggccatcgcggactacgctgccaccgatgagacccagctcagttttttgagaggagaaaaaattcttatcctgagacaaaccactgcagattggtggtggggtgagcgtgcgggctgctgtgggtacattccggcaaaccatgtggggaagcacgtggatgagtacgaccccgaggacacgtggcaggatgaagagtacttcggcagctatggaactctgaaactccacttggagatgttggcagaccagccacgaacaactaaataccacagtgtcatcctgcagaataaagaatccctgacggataaagtcatcctggacgtgggctgtgggactgggatcatcagtctcttctgtgcacactatgcgcggcctagagcggtgtacgcggtggaggccagtgagatggcacagcacacggggcagctggtcctgcagaacggctttgctgacatcatcaccgtgtaccancanaaagtggaggatgtggtgctgcccgagaaggtggacgtgctggtgtctgaattggatggggacctgcctgctggttgagttcatgatcgagtccatccctgtatgcccggaatgcctggcttgaaaggagaacggggtcatttggcccaccatgggctgcgttgcaccctgtgccctgcagtgctgataaggatnatcgtagcaaggtgctcttctgggacaacgcgtacgagttcaacctcagcgctctgaaatctttagcagttaaggagtttttttcaaagcccaagtataaccacattttgaaaccagaagactgtctctctgaaccgtgcactatattgcagttggacatgagaaccgtgcaaatttctgatctagaggtgagaaaaagatgaattgctccttacattcgataatcagtgaccacgaaacactcagaccagagcctggcttatcaaaaaccttcagtgagtgctgggggtgtgagtgaataactaattattttattatgcaaataagtgaatttataaaacgtttgctactgannnnnnnnnnnnnnnnnnnnnnnnnacgttctattttgattctttcatattgtacaccattttatgtctccagcgtcttcattttagatttatgtttaatattctcagcatcttcaaaatcaaataaattatatttcgtttcattatgga

SEQ ID NO: 73846 - DNA, 1082 bp, Homo Sapiens
  misc_feature (67)..(67): n is a, c, g, or t
  misc_feature (83)..(83): n is a, c, g, or t
  misc_feature (158)..(158): n is a, c, g, or t
  misc_feature (173)..(173): n is a, c, g, or t
  misc_feature (228)..(228): n is a, c, g, or t
  misc_feature (248)..(248): n is a, c, g, or t
  misc_feature (307)..(307): n is a, c, g, or t
  misc_feature (1018)..(1037): n is a, c, g, or t
tccgccactgtgattggtttcactcggacttgatgcaggcgactggcataaggattgtccatcagangcacgctgtgagagcntgaaagccaaagactggttcactcctcatgcagccatgtgaatgtgcacaggaactgcctggactcgcttacccnaacagtaccccacantgcaggagggacccctccacccccagtaccttgaccccctccgcagagtctcgcnagagcccttgtgctgctgcntctggaagtagtctccctccctccccggggggcctcagactctgtcggtttcccctctntaccccttccccgtccccgtgttctgctgggctctgattctgcccaatgagtatccccataggttctcaaaaacatgaacaagtctgtaaagctcagacatttgtcagcctcaacagcaccacccattcaagcatcctgtggataaagaattcagggaaccatccacacacctgccaaccctgggaagcatccagttctcaaatcgtttttgctatggatttatactaacaagaacattccttgacttccctcctgctggtgttttaaagccacaagtagggaagatatctggcaggcagaaagaagtctgtgatgataaacaatgatgaggatgacctaggcaccctacgctagtgtgagaagcctgcgccccaggaaggatctgtgttagtccctgggatggctccaaggcctgctctaggaaggcagcatgctcagtgggaacacagcaagattcagaatttaaagtagttgcttcatggctctgtgcactcccttttcttcctcgcagcctccctaagatgactccagtgtgaccctgtgcttagtgagcaatagtgattgagctcatgttccctgcaagtgccatttcctctccaggatgggcctctaaagctgaggcctggctcagagcctgtttgccctctgtcttaaacaattgtaaatatcacttaaattataaccatttgcaataaacatccccaaagttnnnnnnnnnnnnnnnnnnnnacctgagcaggcggccgcaagcttattccctttagtgagggtaat

SEQ ID NO: 73847 - DNA, 788 bp, Homo Sapiens
agccctttgtgctgctgcttctggaagtagtcccccttcctcccgggatgacctcaggactctgtcggtttcccctctttacccttccccgtccccgtgttctgctgggctctgattctgcccaatgagtatccccataggttctcaaaaacatgaacaagtctgtaaagctcagacatttgtcagcctcaacagcaccacccattcaagcatcctgtggataaagaattcagggaaccatccacacacctgccaaccctgggaagcatccagttctcaaatcgtttttgctatggatttatactagcaagaacattccttgacttccctcctgctggtgttttaaagccacaagtagggaagatatctggcaggcagaaagaagtctgtgatgataaacaatgatgaggatgacctaggcaccctacgctagtgtgagaagcctgcgccccaggaaggatctgtgttagtccctgggatggctccaaggcctgctctaggaaggcagcatgctcagtgggaacacagcaagattcagaatttaaagtagttgcttcatggctctgtgcactcccttttcttcctcgcagcctccctaagatgactccagtgtgaccctgggcttagtgagcaatagtgattgagctcatgtttccctgcaagtggcatttcctcctccagggatggggccctctaaagctgaaggccctgggctcagaaaccctggtttggcccctctgggctttaaacaaatttggtaaatatatcgccttcaaaattaattaacc

SEQ ID NO: 73848 - DNA, 726 bp, Homo Sapiens
  misc_feature (93)..(93): n is a, c, g, or t
  misc_feature (96)..(96): n is a, c, g, or t
acttgcgagggggtggggtggaaatagcggctcttcttttccaaggattatttaatggggatgtgttcaaggcaagaccgaattcagaagganatngacgtcgtgatccagaagtccagagctgaggactgcctgtttgcagggcccgcctggcaggacgactgagcaagttcttggaaaaccagagatattagagcggtgaatcgcgctggtcacgttggacacctgcgcgttaggagattctggagccagagggagagaccccagaaacgccccggtcggcgacccagcccgagacgcctggggtcccaagggaagctgaacgcccggtgggctcccgggatggttcttccggttctttgtgccgccttcacccagtgaaggagcctgtatccaccctgcccagtcgctcgtgggctgctgcggagcttccgctgccatcttcggatcctgtgttccgcccggggctccaccagggcagggatggtgcagaatggggaaatggagagagaacctgaaagagccccaaactcgaggacctattgctccccaagaataacatcttccagaactagacagaaaactaggcgtctgggaaccctgaaatccttggaggagtagatcatcatgaccctctgtgttccttttggcaaatgacttgcttccattgtttgtttgttcaattgtctgtttgttaaataaataaaacccttttcatgtatcttt

SEQ ID NO: 73849 - DNA, 1092 bp, Homo Sapiens
gtccggaattcccgggatatcgacgtcgtgatccagaagtccagagctgaggactgcctgtttgcagggcccgcctggcaggacgactgagcaagttcttggaaaaccagagatattagagcggtgaatcgcgctggtcacgttggacacctgcgcgttaggagattctggagccagagggagagaccccagaaacgccccggtcggcgacccagcccgagacgcctggggtcccaagggaagctgaacgcccggtgggctcccgggatggttcttccggttctttgtgccgccttcacccagtgaaggagcctgtatccaccctgcccagtcgctgttgggctgctgcggagcttccgctgccatcttcggatcctgtgttccgcccggggctccaccagggcagggatggtggtgagggtcgctcgtgggtcccctggcagggagcagggtctggcactcacaagggcgcacgactaggacttgtcgaatgaatcccttgtcgcctttagcttttagtcctttgaagagaggtgagagtggaaatcaagagatttttttccacggggaagttctttttacaaagcgttgatttcttggcaccccgcggggcgggcaactgacacggcctccggtgcaccttctgcgctgtggagcctctggggctcagctgggcggtggtcgggtcgtggggcggtagggcgggagcgggggaagggaaagcaaaagctggaaaagaagcaggggagttgtgaaccagacatccagacctcctgaagggctcgtgcagacgtacaggcgggatcttctggaagtgagaattgtttttgtttgtttatctattgtagcagaatggggaaatggagagagaacctgaaagagccccaaactcgaggacctattgctccccaagaataacatcttccagaactagacagaaaactaggcgtctgggaaccctgaaatccttggaggagtagatcatcatgaccctctgtgttccttttggcaaatgacttgcttccattgtttgtttgttcaattgtctgtttgttaaataaataaaaccctttttatgtatctttaaaatta

SEQ ID NO: 73850 - DNA, 755 bp, Homo Sapiens
  misc_feature (18)..(18): n is a, c, g, or t
  misc_feature (135)..(135): n is a, c, g, or t
  misc_feature (199)..(199): n is a, c, g, or t
gcccagtcgctctcgggnccgcggagagcttccgctgccatcttcggatcctgtttccgcacggggctccaccagggcagggatggtggtgagggtcgctcgtgggtcccctcggggggagcagggtctggcacntcaccagggctcacgactaggacttgtcgaatgaattcattgtcgcctttagcttttagtcctntgaagagccctgagagcggaaatcaacagatttttttccatggggaagttctttttacaaatcgttgatttctcagtaccctgcagggcgggaaactggcagggcctccggcgcaccttctgcgcggtggagccgcgggggctcagctgggccgtggtccggccctggggccgtagggcgagagcaggtaaagggaaaagcaaaagctgggaaagaagcccgggagcggtggaccagacatctagacctcctgaaaggcgcatgcagaggcacaggcgggatcttctggaagtgagaattgtttttgtttgtttattgtagcagaatggggaaatggagagagaacctgaaagagccccaaactcgaggacctattgctccccaagaataacatcttccagaagaactagacagaaaactaggcgtctgggaactctgaaatccttggaggagtagcatcatcatgaccctctgtgttccttttggcaaaggacttgctcccattgtttgcttgttccattgtctgtctgttaaataaataaaacccttttcatat

SEQ ID NO: 73851 - DNA, 984 bp, Homo Sapiens
  misc_feature (95)..(174): n is a, c, g, or t
gtgtttgtgttttttctccccgtgggtgatacagagtcttagtgaccgtcagtcctcggaacccatccagctgttgcctcccatgagactccggnnnnnnnnnnnnnnnnnnnnnnnnnnnnnnnnnnnnnnnnnnnnnnnnnnnnnnnnnnnnnnnnnnnnnnnnnnnnnnnncctatttaggtgacacctatagaacaaggtttggtaccaaaaaagtcaggctgggtaccggtccggaattcccgggataatcgtcgacccacgcgtccgctcccgggggagcaaaatggacgaaaggcgaccccccaggcaggggcgctgggtgccttgggaatccgaggaatcccttctctttgccagtcggaggggactagatggagccgaaggggccggagatgggccgagcgctgccccccgggggtcctcggcgccgggcgcagcttacgagcgcagcgcagcaggctccattcccggccgccgccgctcagcccattacgcaaacctggcgggtccaaccaaccccgctctgccgccgctgctggaacccaggaggcgtgcttgcaggcttcgggcactacgcggggctggaaataccacgcactgccccttcgcctagacccccgctcgggccactcgggttctgccttcaaagctagtagctgccccagacttggggctggggggaggggaaggggcgaggctggcgccccctcccgcttttggctcccgcgttcgttgcagcagctgtcgccaaatgaaccccggaatgcggacgtgcaaaccctccaccccacccccagccacacatcgtcgcggtcagagaactgagaagggggcgctgggtccgaggttctggaaaagcaagaactcacctgcaaacaggcagtcctcagctctggacttctggatcacgacgtcgatatccttctgaattcggtcttgccttgaacacatccccattaaataaatccttggaaaaga

SEQ ID NO: 73852 - DNA, 669 bp, Homo Sapiens
  misc_feature (282)..(333): n is a, c, g, or t
ctcccaagatggctccttgttgccacagatgctgtgtcctcacatggctgcaaacaggcagtcctcagctctggacttctggatcacgacgtcgatatccttctgaattcggtcttgccttgaacacatccccattaaataaatccttggaaaagaagcagccgctatttccaccccacccccctcgcacgctttcagctttggtaaatattcagttaaaaatgaaacctctggccgaggcaggggctgaaggccaagtggtttcggaagtgatcctgggtnnnnnnnnnnnnnnnnnnnnnnnnnnnnnnnnnnnnnnnnnnnnnnnnnnnncggctttccatttccagatgtgaccgcccagctgctgctcgccgctgctggattccagtttcctccccttctggcgacggattggtgatgacaccgagtctcactttctccttcccccgcccggaccaaccgccgtggggggccgagggtgccggggacggcaggagagcgatcaccggctgggcggcgggagccgacgaggggcgagccccgctccggccttccctctccgcgctctccccccgtcacttttatgaattcgactccactttctaaaggaattatgagtcttgtggcaaacacaaaccggagtggccgggagggggaaaagggggg

SEQ ID NO: 73853 - DNA, 536 bp, Homo Sapiens
tttggtgccctccagtggacttggagggagtattttatttgatgttgtttccagtaagcgacatctccagtttataggcatagtttttgatattttcatctcccatcagctcattatgaaaggcatcctttattaatttggagctcttcataagaagttttgtgagacctttcagttaacagccgaacgcgctaaccgattgcgccacagagacaagaactactgcttttactgtgcgctatgggaagggcgccttcaacaaatttcccctgtgccttccagcctcagggcttgtccggcaggatgactgagcaaggccttggaaaaccggagcgattagagcggtgaatcgcgctggtcacgttggacacctgcgcgttaggagattctggagccagaaggacagccgaatggccttcgcccgccctgcccctcgcctgcttcagaagcccccggaaacgccccggtctgcgacccgggttcgagcagccagggggctcaagggaagctgaacgcctggtgggctcccgggatgg

SEQ ID NO: 73854 - DNA, 639 bp, Homo Sapiens
  misc_feature (20)..(20): n is a, c, g, or t
gggggagtcgcctttccatnttccagatgttaccgtccagctgctgctcgccgctgctggattccagtttcctccccttctggcgacggattggtgatgacaccgagtctcactttctccttcccccgcccggaccaaccgccgtggggggccgagggtgccggggacggccggagagcgatcaccggctgggcggcgggagccgacgaggggcgagccccgctccggatcaagcgcgcacacccctcacggcccgcactccggccttccacacccgtgcacactctcgcccgcgggcggcggcagccgtgcccaggctgctgcagcgccacccgcccgccgcggaccctccgcgccctccgcctagtcacccggcccggccgcgggccgccggggctcgcagagtgtcagccatcccgggcaggagtcgcgtctccccaccccgacctccactcgcgccgggagctgagcggcagtgtaggtagtgaagactccctggggctcccagccttccctctccgcgctctccccccatcacttttatgaattcgactccactttctaaaggaattatgagtcttgtggcaaacacaaaccggagtggccgggagggggaaaaggggggaaaagaaaatcttt

SEQ ID NO: 73855 - DNA, 1733 bp, Homo Sapiens
  misc_feature (524)..(524): n is a, c, g, or t
ggcacgagggtgactcctgacctcaagccaacagaagcctcaaggtcggcttttcgcttgatgccaactcttggcgggaagggggctgacccaaaaggaaaaaaccccagggcctcttcaaaaacaaaacccgctgccacgatccgcatcgggcaaggactgggagtgatgcctcccaaagcaggccagaccatcaccgttgcaacccacgccaagcaaggggcctcggtggccagtgggtctggaactgtccatacttcagcggtgtccttacccagtatgaatgctgctgtgtccaagactgtagctgtggcttctggggctgcaagcacccccatcagcatcagcacaggagcccccaccgtgcggcaggtccctgtcagcaccacggttgtgtccacgtcccaggctgggaagttgcctacacggatccacagttcccctctctgtgatcagccagccaatgaagggcaagagcgtggtcacagcccccatcatcaaaggcaaccttggagccaacctcnagtggggtgggccgcaacatcatcctcacaactatgccagcaggcactaagctcattgctggcaataagcctgttagtttcctcactgctcagcagttgcagcagcttcagcagcaaggtcaggccacacaggtgcgcatccagactgtccctgcatcccatctccaacagggaacagcttctggctcctccaaagcagtctccactgttgttgtgactacagctccgtctcctaaacaggcacctgagcaacaatgattatgagagaggatggcttccgtgaaagaccatgcctggtctgtcctggctgagaagggaccagggaggttgcatcattgttttaagcttgcctgttcaaggcagccaggcgaggggtgatggcaacggtggcctggattcgtggcctggattctgctgccacgtgccatagtggagcaccctgagaaaggttcactccagggttccaaggtctgctctctaccaatctaggagaatattctgttgaaattgcaggaattaccagttacgtccaacaagccagagttctgagagtaagacccccagggaaggcttaccagttgcagagtgcacacagcgaataggctggttctccatgaggattgtattttttggcttctggtcttctccatgactagtggtctggataggagttttgtgtccagaaaattttatgtaatttatttttttaaagaacctgttgtacatctttctcaaatacaaacttgggctttagctgccccctccactaaaccgatgacttacttttttgactagaatgagaaaatggcaagaatcttagtaaggtggtagccagcttggtaactgcatagtaatcgagaggctgtaagatgggaattcatcgtaggcagcgaggtagagtgggtcccctgaaatgggattcgcttggcactgcctcttaaagataggggtgttgggatcttgattgtggccgccccccccagctttacctgcccactttgtccttcttggcaagcctgttcacatggacgtccagagccagtggacagagaggaggggacggacagcagaggtgctgcttttgcagcagaaactttgttgcagttcagagtataccttctgctctgctccagagcaagagttgcaaaccaggcccttggggctggccatttgtttttgtaaataaagttttattggaacacaaaaaaa

SEQ ID NO: 73856 - DNA, 802 bp, Homo Sapiens
  misc_feature (72)..(81): n is a, c, g, or t
tcaagacaacattatacatggctctgaaatatctgacacaatgtaaacattgcaggcacctgcattttatgnnnnnnnnnncaacaaatgtgactaatttgaaacttttatgaacttctgagctgtccccttgcaattcaaccgcagtttgaattaatcatatcaaatcagttttaattttttaaattgtacttcagagtctatatttcaagggcacattttctcactactattttaatacattaaaggactaaataatctttcagagatgctggaaacaaatcatttgctttatatgtttcattagaataccaatgaaacatacaacttgaaaattagtaatagtatttttgaagatcccatttctaattggagatctctttaatttcgatcaacttataatgtgtagtactatattaagtgcacttgagtggaattcaacatttgactaataaaatgagttcatcatgttggcaagtgatgtggcaattatctctggtgacaaaagagtaaaatcaaatatttctgcctgttacaaatatcaaggaagacctgctactatgaaatagatgacattaatctgtcttcactgtttataatacggatggattttttttcaaatcagtgtgtgttttgaggtcttatgtaattgatgacatttgagagaaatggtggctttttttagctacctctttgttcatttaagcaccagtaaagatcatgtctttttaaaaagaaagtgtaagatttttcttttgtggacttttgctatcgtgcccttaaagctcttaaaaaatagggg

SEQ ID NO: 73857 - DNA, 1049 bp, Homo Sapiens
  misc_feature (476)..(526): n is a, c, g, or t
  misc_feature (949)..(949): n is a, c, g, or t
  misc_feature (964)..(964): n is a, c, g, or t
cagtcccatgggtagggaggaggggcaatttgctgaagcccactgcccttccagtactcacaagccaagggccctatgggatctgtttcacaggactcatgcttatggcagctgagcacatctgtcctgtatgtctgccagcagccacgtccctctcactcctgtgacgacagccttgactatatttagaaattccatttctgattgcatttcactgctgaatggtcctagaatcctttattgcccttgtcccatcacaagagacagccagccacagccacttttatctcaacaacatactgaatactgacagaacaaacaggcaagttgtagattcaccaggatttatacatatttgattttttattaccaatcaaaaataaattccatatatcgtttagcaaatatcattgttttgtgacaaaagacacaagagtcataacaacaaaactccccgagagtcaaactcataacgnnnnnnnnnnnnnnnnnnnnnnnnnnnnnnnnnnnnnnnnnnnnnnnnnnncggcggctgtcacctgcctacccatttggatgccctttgcaaaggtctcccttacgtggaagacacagtgggtgggccagttccagggtatggctcatcccaggaaccagaggttgaaataggaagggaaaaattgcactgggaagaggaagtcatcagacaaacaatatttggaaataatgatgaccctctgtgagaagggatgatcaatgggccagggaagaggaggagggccagccagttggtggtaaccgtgtgcacagaggtcactgtggaggtgtgtgcacctgccccttttgcttcacatacccccaccaatgtcttttgctctacctggcagtcagggctgtcaggaatatagctctgccagcttccaaaaggacttgggagcaagctgctcctgtacaagactaagggctttcncccactagggaacanaagtctggtgtcttttttccttacagttgagaaccatgggtgtcacaccttctctccaggcttccaggagtcagttctatggcta

SEQ ID NO: 73858 - DNA, 1086 bp, Homo Sapiens
  misc_feature (836)..(900): n is a, c, g, or t
ggaattcccgggatcccagtgccctgctctccaggtgcctagagtatcctaactcttaggaccagggattgtcttgcaccaagtatgcctacccctggccagtctgaggtctcctagccatagaactgactcctggaagcctggagagaaggtggtgacacccatgggttctcaactgtaaggaaaaaagacaccagacttttgttccctagtgggggaaagcccttagtcttgtacaggagcagcttgctcccaagtccttttggaagctggcagagctatattcctgacagccctgactgccaggtagagcaaaagacattggtgggggtatgtgaagcaaaaggggcaggtgcacacacctccacagtgacctctgtgcacacggttaccaccaactggctggccctcctcctcttccctggcccattgatcatcccttctcacagagggtcatcattatttccaaatattgtttgtctgatgacttcctcttcccagtgcaatttttcccttcctatttcaacctctggttcctgggatgagccataccctggaactggcccacccactgtgtcttccacgtaagggagacctttgcaaagggcatccaaatgggtaggcaggtgacagccgccgtatttattttgcataatattttaatttgtatatttttgtgatttattttggcgttatgagtttgactctcggggagttttgttgttatgactcttgtgtcttttgtcacaaaacaatgatatttgctaaacgatatatggaatttatttttgattggtaataaaaaatcaaatatgtataaatcctggtgaatctannnnnnnnnnnnnnnnnnnnnnnnnnnnnnnnnnnnnnnnnnnnnnnnnnnnnnnnnnnnnnnnnggggggggcggcttcaaaatataccctcagggggcccaagtttatcggcaccccctttttttgtaaaaagggggccccctaaggggggcccttttataacctagggcccggcccctcttttttaaacgcccggagcgtgggaaaactcccactctggggaactttgggaaggaaaccttccttctt

SEQ ID NO: 73859 - DNA, 897 bp, Homo Sapiens
cgagcctcactgcctaaaccaatgcccttctcatccctgtttccccaggctcctggctgttatctgccccaaaggagaagcctcatggggttgacataggtcctttctgccatctctgttccagctgctgtcagggattaacaacagagtgtaggggagattaactgcctcccttccaatagacactatcagcagggacagatgtgtgggagtgcagggctgcagagggtatggggggaggaggctgctaaaccctatcccccagcctcccccctgccctgaagatcttccatttgcttccactcagctggaggctcaagagggcttgatggctgtcccctgcccccctccttttgttttgtacacagagaccaagaggcctcagtttagcaccttaggacctccgctgcttcacttgctttagccaaagccataaaaaacctgcaacgtagagaaaataatgcagataccctgactagccagccctctactcctccaaccttttccaagatatgcaatggcctttgtgcctgcccaaaggcttcgccccctccagtgcatgaggaaccctctttcctccgctcagagatgctgcttcatttacccaggaggtcatattctttatatatattttttgttgcaaagtgtctctctagagaaactctatatattattcgaatttttaaattatttgtttatatataaaagaaaagctcaattggctgtgctgtcctgtgctgtgctgtgcccacagtctgtagtttgcctttcctgtgttggaagtgtcgtgagtcctgctggtcacccaccagcctggtccggcctccactctgaagcacgggttgagcctgctgtgctctcagacgcggagccgttccaataaagcagagtggcaga

SEQ ID NO: 73860 - DNA, 560 bp, Homo Sapiens
  misc_feature (354)..(378): n is a, c, g, or t
  misc_feature (386)..(386): n is a, c, g, or t
ataagtagccgcctggttactgtgtcctgtaaaatacagacacttgacccttggtgtagcttctgttcaactttatatcacgggaatggatgggtctgatttcttggccctcttcttgaattggccatatacagggtccctggccagtggactgaaggctttgtctaagatgacaagggtcagctcaggggatgtgggggagggcggttttatcttcccccttgtcgtttgaggttttgatctctgggtaaagaggccgtttatctttgtaaacacgaaacatttttgctttctccagttttctgttaatggcgaaagaatggaagcgaataaagttttactgattttcgaaannnnnnnnnnnnnnnnnnnnnnnnnaacatgtncggccgccctcgggccctccaaaaagcttttcaagaaccatttccttttgggcgccgcggggcccccaataagggaaaagggaaacaggggcccaaagctggtttccccaaaggaaaaccccgggggcccagggaacaaaagggcgcttgggggaattcctccccccccaaatt

SEQ ID NO: 73861 - DNA, 1488 bp, Homo Sapiens
gggagagagtatgaagtcgacggcgcgccgaattcggcacgaggcagctgcttgagatagcagcctctggctaggcccttggcgtggccaagccaatcaggcaggtttagagcctggtgcccctagacaggtcctgcaaccaagaacaggggtagccttcaaaggccagccctgccttccaaccaccgctccacagcgagggaaaccaaggctcttagggcaggaggcttgtccgagattagcacctgcgtgctccaggctctgagttctgtcccctcagctgtccggcccctgggtgctcactttaatctcaagtcattcatcttactattaaacgtgagcccagaaatattgttgtaatggagaacgatgcctgcgagtctccaaagccttccctcggaacggttccattaaatctctcctgctcagaaccacccaatccaattcatggagcgccacgtggtctacagcacagctggttagggccagcggaggtttatttatagctgggctcctggctgcctggtaaccggccattgccacctttaaagagtcttgggatattatctacctctattcagcttgaaatcgggcatgcagtgccttgggctggggctggcgataattaaatttctatcatgcacaattatggatgcaaagaatgaatgacatcccactggcatgtgaggattcgggcagcttctggactgaaatacagacttcataattgctccatccagattgggacaaagactgtggttgggagaacatgcctgaacaaagaaaaatgactctgcaggaccaaagttcttgacactaattgatctgccaaaaggggaagaatgagtccagctagaatccaggactaaccagcgggtgagcttcaaggaacaaagggcttccgctgggtcagcccacgagagggagctgcctgcaggtacctgagagggcacagccaccgtgtctgttccttgggagcagggctccttggaaggcagcgccagctccagaaaggccactgttccccctcccacccaccccaggtggcaactgcccctgcaggtcacggtcccagggcctcgctcggccggcctagagagagaaaagggaagatgcccaattagctggacgcccatggccccagggctgggggaccttgggttatcctgaaagaaggacaatgaccacctgcaaaggacgatttcaagtggagcctggaggaggcggcaaatagctcagtccgcactcaactcccttcccagccgtctggtggaaggtgaggagcaaaagctcatgctgctgaggcctggggccacccaggcaccggcctccccgtgctgagcagagacagcagccccctagctgcaggagtgtgccccgatgcgcacctgccgactttccttctgatgcagacatggtccccactggggcaaggctgcagttttcttttaaaaaacagatctttcaaaataaaaggggccttgaaga

SEQ ID NO: 73862 - DNA, 1041 bp, Homo Sapiens
  misc_feature (383)..(392): n is a, c, g, or t
  misc_feature (531)..(542): n is a, c, g, or t
  misc_feature (637)..(690): n is a, c, g, or t
caatcatggagatacagcagttattaggtgtggaaggacattacctcaaatgtcctcagatggctccaggaaattcttttaaaacagttggagagaaatagtcgtgaccatgtaaaacctagaggatctggtaaatcccatactactggttagggatttgtaaagtccatttctttttagagttcaaagcagttctgttacttgtccataagttcctcataaattgtcccaaaggtaggacatggaaataaatgtatatctttattttttaatctactatgtcacactctggtgatattcatggaacattaaaaaagcaactatgtttattttataattagtaaaatgaagatagaaaattgttcttttgaaatttttagggnnnnnnnnnntctcgtgacctaaatctttccactataatgaatattcattgtgattgcaaatatctaattttatataatcactgtgtatggatttagcgattttacttttcatagattcaaaaacatataatctgaatgctttctctgnnnnnnnnnnnntcagagttgagctcttgaggatcagagttaagtatccattgataatatgtgttcattttgctctatgtcataactttgtttttttattgagaaannnnnnnnnnnnnnnnnnnnnnnnnnnnnnnnnnnnnnnnnnnnnnnnnnnnnncagttcaaggaataattttaaagcaactatataactagcactcagcttagtagaatatattgacagcagttcagaaattacacatgtagttccttcccagtcacaaccagctccctgccacgtaccctttggtaattaccactatcctaccttgtatgataattgtctctttgtttttatagtgttaccacctatgtgtgtaaacttaaacaatacagtttgcttgtttttgagttttatttaaaatcatacattcttttgtagctgcatttgttcaagatgggattgattcatgttggttgtagctgtactttattcttcattatgtctgtgtaatttacttttctgtta

SEQ ID NO: 73863 - DNA, 873 bp, Homo Sapiens
  misc_feature (573)..(581): n is a, c, g, or t
  misc_feature (677)..(729): n is a, c, g, or t
  misc_feature (742)..(742): n is a, c, g, or t
  misc_feature (747)..(747): n is a, c, g, or t
  misc_feature (792)..(809): n is a, c, g, or t
gattttagtcagtaagacgatataacctacttactccgtaagggaaatgaaggcccggagaagggaagggacttgaccgaggtcccacttctgtttcgaggcagaagcagactaattttcatgcctcctgactcccaatcagtttcacaaagggattcaatctgtttatatacgttacattcctggatacgaggtcttttgatgttcagagtaactgactagttagtattagaagaccctcgaggtttttttccacagaaaaacatctgaagatggattgggtgagggctggcaaaacgaaggcatgccgggccagctccttaacccaatgacccagtgatgctgcaaggctggaacggggtccaggagactgtgtgtaacaggtgccctaggtgacccttataatcagggaagtttggtgaacaaaaatcgaacccatgagtgaacataaattaaaaagttgatcaacctattaaaatgtgtatttcattgggtagcttttctcactgtagacagattttttccttcttcaaatgaaaaggcttttaaattagtacaactgttactattttnnnnnnnnntaccctaagtactctgtttacttctggtgaaacaaaaccagtcattagaaatggtctgtgcttttattttcccagactggagtggcttttctgaannnnnnnnnnnnnnnnnnnnnnnnnnnnnnnnnnnnnnnnnnnnnnnnnnnnntccctcacttctngttangccaagaagtttgctttccctagctgcagtgtagatggctcttgnnnnnnnnnnnnnnnnnnaatcatttggcattcacatgtggctgttaatatgtgcttgtttttaattaaaacaagaagcttt

SEQ ID NO: 73864 - DNA, 671 bp, Homo Sapiens
  misc_feature (83)..(83): n is a, c, g, or t
  misc_feature (272)..(280): n is a, c, g, or t
attcagcaggcgggcaagaacatgagtgccaggctgactgtcgtctgcaagcagtgccctctcctcagaagaggtctaaatancattattatgggccaagtaggtgaagatgggcgaggcaaaatcatgccaaacagctttatcatgaagttcaagaccaagaatcagaagctcctggatgccttaaaaaataagcaatgttaacagtgaactgtgtccatttaagctgtattctgccattgcctttgaaagatctatgttctctcagtagnnnnnnnnntacttataaaattacatattctgaaagaggattccgaaagatgggactggttgactcttcacatgatggaggtatgaggcctccgagatagctgagggaagttctttgcctgctgtcagaggagcagctatctgattggaaacctgccgacttagtgcggtgataggaagctaaaagtgtcaagcgttgacagcttggaagcgtttatttatacatctctgtaaaaggatattttagaattgagttgtgtgaagatgtcaaaaaaagattttagaagtgcaatatttatagtgttatttgtttcaccttcaagcctttgccctgaggtgttacaatcttgtcttgcgttttctaaatcaatgcttaataaaatatttttaaaggattacag

SEQ ID NO: 73865 - DNA, 562 bp, Homo Sapiens
agcaacatgttgcgccagaaagctttgagcctataccaagacttctgcaagggatgctctgaaactgacaccaagccatttactgcgagtaagggatggttacacagattcaggcatagattctcacatcattacaagaagaagaagaaggggatcatggcccaggtagcagggtccaccatgcctgttgaagaagagtcctcctcagagaccaggatggtggtgacattcctcgtgtctgccctcgaatccatgtgtaaagaactggccaagtccaaggcagaagtggcctgcatcgcagtgtacgaaacagacgtgtttgtcgtcggaaccgagagaggatgcgcttttgttaatgccaggacggattttcagaaagattttgcaaaatactgtaggtgttttaattttatcctttgtattcccaatctcaaaaggatcgcaggcaagacttccacagtattttcttctaagctatcataagcattctcctagaaacgatcctaacacatcttcttggattcagcttaccaaataaacactgcttaacactgcagagtcc

SEQ ID NO: 73866 - DNA, 511 bp, Homo Sapiens
tgaatgaggaccaaaggttagagccctctttctccccgaagaaagagcccggaaaaacatggcagagcaaagagcaaaatcctttctcccccgaatgctttaccagtttctcagcttgaatacagttcctggtgcatcaaagctgtaagttctcagctgctggcctgcactcatcacctcttcctacaaataaacatttggaaaaaagtccatcttcaatatgcttaaagagaagggtaggagataaggagaaagaacagatacggtttttttcccctttaaggcctttagattttgaggtactgtaaggggcctagaaggacaaaaggctttcattccctcttccttttggcaggcaggttatcagtccttggcagaagggcccagccctatccttttctgtatcaaacaaaatccttgaggttggtatacaagttaaggctgaaaaaaggccttaaattcccagtaaagaatgtgaaagcaagcatgtaaaataaactggtcttcatga

SEQ ID NO: 73867 - DNA, 624 bp, Homo Sapiens
  misc_feature (36)..(36): n is a, c, g, or t
  misc_feature (43)..(43): n is a, c, g, or t
  misc_feature (88)..(88): n is a, c, g, or t
  misc_feature (108)..(108): n is a, c, g, or t
aaaaatgaaaaaggtggtcctttcaaaatcaaaaanaatgaanctttaaaaatgttccttggggaaaccaacagggttcccctggccnatgtctggcggctaaagagnaagccccaggatggggacttcaaaccccaagcaagctgtggttttgcctttgaataaggttccctggtaaaaatcatcttgaataaatgttgctgagaaactggtaaagcattcgggggagaaaggattttgctctttgctctgccatgtttttccgggctctttcttcggggagaaagagggctctaacctttggtcctcattcagataggctaattaggggtctcgggtgtccccaaagggcagcaacttggacccctccccttgtgggtaaaagggcttttcacaagtttcccagcagttggtttttggtttccacataaggctaaaggtgttaaagtttggtctgcacctcgttggttttaatccagggaggagctcctggatttctttttctcccccacagagggaaccttttgtttccggtggcccgagttaaaacgggcctttaccactcactcagagtgtttggtgttatatgctttgtgtgtgtgtttgggaacagaaaaggatccg

SEQ ID NO: 73868 - DNA, 1924 bp, Homo Sapiens
  misc_feature (79)..(113): n is a, c, g, or t
  misc_feature (1378)..(1386): n is a, c, g, or t
  misc_feature (1493)..(1521): n is a, c, g, or t
aaaaactgatcatcatatagggcgccacgcgtcatagcgaacgacgagcgcagcgagtctgtgagcgaggaagcggcgnnnnnnnnnnnnnnnnnnnnnnnnnnnnnnnnnnncagtcgacggtaccggacatatgcccgggaattcggccattacggccggggagttattgctgtcgacgggggtggggcaaggacccgcgctccgtagagctacacgctgcttcacaagcacacggctagcgctctgctctcacctggttcgcttacagatttctctagccattaatttgcctctctgtgtttaaagagcaccaggaccgaatggattttcacttcaggctttccttcaccaagaataaggttctttctggagcctgcaagaagacagttgcccaacactttgacacttgctagtaggtcctttgatcaagagtgtctgaggctgtcaaatgtgtgccaccctttataatacagctatgaaaagttacttctccattaatttctccattctgtttatatcttacagttggacccaaattccaaagtatcagttaatcgaaactacattgcaagtcaacaatatttctctcttcttcctcagcttctccatgtctagggaactgagaaagaacctgcctaagcagcacttccccaatgtcctttcaccttcatgttaacgtcccttctgatggtctcactcttcacaggtagttcacactctgagacttgaagtaagctcatggttcagtactctgggggcgcagggctgcggcaggacccttggaacatgttgcaagtgttactagtaccagtttcactttctgtcgtcacaatttactgtattttttactttttctgttacagttttgctaatttatcagaaggtccaaaagtctgacataactatttcattttgcattatttatttatgatgcttttttcattgtcttttatacatttgggattataaattatgtaaatgttaaaatgagcatctcaaagaagtctgttaaatcatgactgaaaaaaatcaatcagatgtatcttcaaaaagtggagtcccagttttatgaatcagagatataaaccagaaattctataactgatcatagaagaagaatccagtaattgaacaaatcctatttaatgacatccttgtagcatagatggtctataatgctgaccacagatttcttagaaatgctgctctctctatttaactaacattttgttcagttttgcctccagtggaagcagaaagggttttttcagctgttaaatcctaaaaatcaatataatttatttatgtaagaaaaataactcaatcaatatatttttgaaccttttaagtactaattttctttttatcaagtagnnnnnnnnntgtatttgccctaaatccttaaaatacaaatgctataaaaattcctgtatcttgaaagccttactgcaaatgagtattatagacatccagcagagtctggttttctnnnnnnnnnnnnnnnnnnnnnnnnnnnnnatggaaaagctgctttccccgggttccacttataacctccggtaggtcacagggttcaatgtggatctgacttaaaaacccaccagcatgctcaatcccttgttatccttatggaatctgtatgttaactctctgggtgttcaggcttctatttgactgctgttgtgaccctgtttgcaaaatgaatatgacactctgtggattatttgctctgtaaggcacaagtgcttcttatgattattttgacgtttccaagagcaaaagccaaatttaaactctcttcagcaaacttgagccttttcatctaattccatgtcactcacggccataactttccttgaccattcttcaccccatgtcttacataataaattgtggtcttgatcctggatttaaaaacaaa

SEQ ID NO: 73869 - DNA, 615 bp, Homo Sapiens
  misc_feature (65)..(130): n is a, c, g, or t
aaaaatgtgtgtagagttgggggtctccctatgttgcctaggctgatcttgagatcctggccgtnnnnnnnnnnnnnnnnnnnnnnnnnnnnnnnnnnnnnnnnnnnnnnnnnnnnnnnnnnnnnnnnnnttagcattttttaaaagtaagtcttcgttaatctcacagataaaaatggtagtttattctaatatttatttctttggttattagtatgagttgaattgaatattttctatgtgttagccatttgtatttccttatttgttcatgtctgcctatttatctgttgcttactggttttaaatggttccttatgtatttggatacgctcaatagataataagtcatgcttttgtaatatagttatttggataagttaattaagcagtaatttatacttaaaaagtagttttttcattttggtattttatatgtatataacattgattatctaatacaggcaaatatgtctattttattgcttgaaagcttgaaaagccctttaacttttacctatgttttctttgttttataatgtttagatttttaaaacatataactttaatctgtaatttttaaataaaatttttccgttaaatatattaaccaat

SEQ ID NO: 73870 - DNA, 659 bp, Homo Sapiens
  misc_feature (19)..(19): n is a, c, g, or t
gcgcggggcgggtgacgcnacccgggcgggctcctttccaggctggagcccgagactgccacgtcctgcgggacccaagtggtgggcgaggaggcgtggagcggcttcaggactcgaggagcggttccgaagcagctagggacttttgcctttgccccccgaggtcgatcggaagacaacccccatcccctgctgtagcgggacagttggagggtcatgggtgggtgaagtgtttggctgagggaaactcagaccaaagagcagcggcaagaaagcagttgggtccccacaaaacgcccgaagtcaaggtgagggtcacacaacgactcttgacgattccggcgagttcatcctggtgcacatcccactccatgcctctctcttctggttggacaatagttacatccttacgaaaaggaggcaagctgctgggccttggtggatccccactaaaccttgttaccaagggacatgccgccatgctatgtgaaaaggggggttttgttgtttgtttttaatttaagtatctaattcgtttcacgaaagaatgatcaataccggcccagagtaaacttgataagtaattaaactgtcagggcatagagttcccataggaggtgcttgttctttcaatacacaaataaagggatgcaaaagtc

SEQ ID NO: 73871 - DNA, 1798 bp, Homo Sapiens
gccgcgtgttaatcggccacgaggcgtgctcagtgtgctgggtaccaggcgactccgggacagggggtctcggccgtcggcgtcatggtttcgcgcgtgcagctcccgcctgagatccagctggctcagcgcctggcggggaatgagcaggtgacccgggaccgggcggtgaggaagctccggaaatacatcgtcgccaggactcagcgggccgcaggtggttttacgcacgacgagctgctgaaggtgtggaaaggactgttttattgcatgtggatgcaggacaagccactcctccaggaagaattaggaaggactatttcccagctcgttcatgcttttcagaccacggaggcgcagcacctgttccttcaggccttctggcagaccatgaatcgcgagtggacgggcattgacaggctgcgcctggataaattctacatgctcatgcggatggtcctgaacgagtccttgaaggttctgaagatgcaaggctgggaagaaagacagatcgaggagctgctagagctgctgatgactgagatcctgcaccccagcagccaggcccccaacggtgtgaagagccacttcatcgagatcttcctggaggagctgaccaaagtgggcgccgaggagcttacggcagaccagaacctgaagttcatcgaccccttctgcagaattgctgcccggaccaaggattccttggttttgaacaacatcactcgaggcatctttgagacgattgtggagcaggccccgcttgccattgaagacctcctgaatgaactggacacacaggatgaggaggtggcgtcggacagtgatgagtcctctgagggtggtgagcgtggagacgcgctgtcccagaagaggtctgagaagccgcccgcaggctccatctgcagggctgaacctgaggctggtgaggagcaggcaggtgacgacagggacagtggcggccccgttctccagtttgactacgaggcagttgctaacagactgtttgaaatggccagccgccagagcaccccttctcagaacagaaagcgtctctacaaagtgatccggaagctgcaggacctggcaggaggcattttccctgaagatgagatcccagagaaggcctgcaggcgcctgcttgaagggaggcggcagaagaagacgaagaagcagaagcgtctgctcaggttgcagcaggagagagggaaaggtgagaaggagcccccgagcccgggcatggagaggaagaggagcaggaggaggggtgtaggggccgaccccgaggcgcgggcagaggctggtgagcagccaggcacagctgagcgggccctgctccgagatcagcccaggggccgtggccagagaggggctcgccagagaaggaggacacctcggcccctgaccagtgcccgagcaaaggcggccaatgtccaggagccggagaagaagaagaaacgcagggagtgatgtggccgggccaaggacaggcagggagggaggccaggcctcgcttgcaccgcgggacgaggctgaccgggctgttctgtagactcaggaccgtggctccagaactcctgtgccaggcgggagggaagggcggcactggagagatgggcccatcattaggggccagcatcccaggaactggacctttccccagagcctccgcctgtggctgtgatgaccttgggccagaaggtcaaactccgaagactgaaactctgcctgcagcaggactggccgcccctgctgtggggggttcagaaaataaaatgccgcgcagcccttgccaggg

SEQ ID NO: 73872 - DNA, 1038 bp, Homo Sapiens
  misc_feature (144)..(332): n is a, c, g, or t
  misc_feature (337)..(337): n is a, c, g, or t
  misc_feature (348)..(348): n is a, c, g, or t
tctgcgtaccctgatcttgatacgtatacgccttgatgagtgatacgctcccccagcgaacgaccgacgcagcggtcatgagcgagaagcgagagcgcccatacgcaacgcctgtcccgcgcgtgcccgatcataatgcagctnnnnnnnnnnnnnnnnnnnnnnnnnnnnnnnnnnnnnnnnnnnnnnnnnnnnnnnnnnnnnnnnnnnnnnnnnnnnnnnnnnnnnnnnnnnnnnnnnnnnnnnnnnnnnnnnnnnnnnnnnnnnnnnnnnnnnnnnnnnnnnnnnnnnnnnnnnnnnnnnnnnnnnnnnnnnnnnnnnnnnnnnnnnnnaaatntgccctcgagnccaagaattcggcacgaggccgacaccagggccaggtcctcagacgacagcacagcaagctggtgggcactaaggccctgtcgaccacaggcaaggccttgaggactctacccacggctaaggtcttcatttccctcccaccgaaccttgatttcaaggtggcacccagcatcctgaagccaagaaaggtgggcctcgacctgtgactcacacccagtggacagtgctgagcacggggtcagggctggagggcacaggcagagggcagctcccaggctggctggcaccccaagggaagagctggtctccctcagaagccccttcctccacagacttctgatcatctccctcttctcccctcctttcacaccgaggctcctgctctcctgtgcctccgaggcccccagctggaagtgccttgttgcctctgccctttgaagtcggaacaattcctagcacctgtcggaaggtcaaggccaaaggcaaattcaaggccagactgtgacaaacccagggctgaggcctgccccatgaagaggctgagccccctgaaacccctgccccttgttggtacattccagaggcgcaggggcctgggggatatgaagctagggaagcccctgcttcgattccccactgcccttgtcctggatccaacaccaaataaaaagaaacaagtgaagtaaaaaa

SEQ ID NO: 73873 - DNA, 2950 bp, Homo Sapiens
  misc_feature (2042)..(2138): n is a, c, g, or t
  misc_feature (2545)..(2573): n is a, c, g, or t
  misc_feature (2688)..(2726): n is a, c, g, or t
  misc_feature (2760)..(2760): n is a, c, g, or t
  misc_feature (2824)..(2837): n is a, c, g, or t
taaatgtatttgtaaaaattgtatatatttttacagaaaagtctatttctttgaaacggaaggaagtatcgaatttacattagtttttttcatacccttttgaactttgcaacttccgtaattaggaacctgtttcttacagcttttctatgctaaactttgttctgttcagttctagagtgtatacagaacgaattgatgtgtaactgtatgcagactggttgtagtggaacaaatctgataactatgcaggtttaaattttcttatctgattttggtaagtattccttagataggtttttctttgaaaacctgggattgagaggttgatgaatggaaattctttcacttcattatatgcaagttttcaataattaggtctaagtggagttttaaggttactgatgacttacaaataatgggctctgattgggcaatactcatttgagttccttccatttgacctaatttaactggtgaaatttaaagtgaattcatgggctcatctttaaagcttttactaaaagattttcagctgaatggaactcattagctgtgtgcatataaaaagatcacatcaggtggatggagagacatttgatcccttgtttgcttaataaattataaaatgatggcttggaaaagcaggctagtctaaccatggtgctattattaggcttgcttgttacacacacaggtctaagcctagtatgtcaataaagcaaatacttactgttttgtttctattaatgattcccaaaccttgttgcaagtttttgcattggcatctttggatttcagtcttgatgtttgttctatcagacttaaccttttatttcctgtccttccttgaaattgctgattgttctgctccctctacagatatttatatcaattcctacagctttccccaccaagagtccacagacctttcatctttcacgaacttgatcctgttagcaggtggtaataccatgggtgctgtgacactaacagtcattgagaggtgggaggaagtcccttttccttggactggtatcttttcaactattgttttatcctgtctttgggggcaatgtgtcaaaagtcccctcaggaattttcagaggaaagaacattttatgaggctttctctaaagtttcctttgtataggagtatgctcacttaaatttacagaaagaggtgagctgtgttaaacctcagagtttaaaagctactgataaactgaagaaagtgtctatattggaactagggtcatttgaaagcttcagtctcggaacatgacctttagtctgtggactccatttaaaaataggtatgaataagatgactaagaatgtaatggggaagaactgccctgcctgcccatctcagagccataaggtcatctttgctagagctatttttacctatgtatttatcgttcttgatcataagccgcttatttatatcatgtatctctaaggacctaaaagcactttatgtagtttttaattaatcttaagatctggttacggtaactaaaaaagcctgtctgccaaatccagtggaaacaagtgcatagatgtgaattggtttttaggggccccacttcccaattcattaggtatgactgtggaaatacagacaaggatcttagttgatattttgggcttggggcagtgagggcttaggacaccccaagtggtttgggaaaggaggaggggagtggtgggtttatagggggaggaggaggcaggtggtctaagtgctgactggctacgtagttcgggcaaatcctccaaaagggaaagggaggatttgcttagaaggatggcgctcccagtgactactttttgacttctgtttgtcttacgcttctctcagggaaaaacatgcagtcctctagtgtttcatgtacattctgtggggggtgaacaccttggttctggttaaacagctgtacttttgatagctgtgccaggaagggttaggaccaactacaaattaatgttggttgtcaaatgtagtgtgtttccctaactttctgtttttcctgagnnnnnnnnnnnnnnnnnnnnnnnnnnnnnnnnnnnnnnnnnnnnnnnnnnnnnnnnnnnnnnnnnnnnnnnnnnnnnnnnnnnnnnnnnnnnnnnnntaacaaaacttacccctaaataccctaaccaacgtcgtatttcctcccggccccccccattttttcaacccacccctgcccctccatttccgctccccatccttacgtttttacgctccccctgggtccccctccccaccccttgatattttgcccgccaggcatgcgggccgtcctcacggaattttttccttggggatgccccaattccgcgcttcccatccaacgagaggtctctgcgacgcgcctttctcgggcgcccttccctgtccggtgtccccctttgtccccctccccgtttgccacgtgggagccacctccaaacctcccgcccttacggacccgttttactctttcctcaccgggtctccaatcgcaccccggagatctttctcggcgctttattnnnnnnnnnnnnnnnnnnnnnnnnnnnnnggtacacccgtatcgcaaacctccactttcctgggggcgcgcgtgatcaacaataagcccccgtggccggaggtgggtaacccccgcctttccctttgcgccgcgcaatatatannnnnnnnnnnnnnnnnnnnnnnnnnnnnnnnnnnnnnngccacccccatttacccctcgatcacccgccacncagattacagcaatcacgcttctcctcctttacgcacccccgtctttccgcgccttgtattatnnnnnnnnnnnnnnaacttactctctccaaatacatcccccctccgcccgagaagtcgcagtctgggggtaaatgcgccgccgccccacccccttttttgtgcctccgcgccccctctttgtttttt

SEQ ID NO: 73874 - DNA, 1146 bp, Homo Sapiens
  misc_feature (22)..(22): n is a, c, g, or t
  misc_feature (45)..(45): n is a, c, g, or t
  misc_feature (1091)..(1099): n is a, c, g, or t
cacgaacccatcccagcgtctntgtataactagccagtcccgttntgtccttacgagaacgtctgtgatactttctgctaatggttcgatgcagctttcttggtgtatggtcttcaagtgtttagccacacaggcagcaaaagaaatgagagtcacaatcctgccccagtgtgttacaccgtcgctgaaaacatggatcatcactcgagacaacgatttcacatcgtcttcgtttttgatgtccagtttccgaagcatgccttggaaggccgtctcgtggttgcgctgcacgccatccccaacccgtcgtaaggtctccagcgccttcctgctggtggccccagacctgcccattggctttgtgtccttggcgccggtggcctgctcccgaaggtaccgagagataatctccagcgactgccggtacaactcgtcctcctcctcctctgctggcggcggcgtcgagggtagtgacccgtccgtactggtgttattaccagattccccgaccaactccagcagcggcaggacagccggccgcttcccgagaggctccggctcgtacccgtccagctcctcttcgggcgacatgatggcgtcagcggccggggcttccatctcctcaagcggcgccgcgcggcgggtgggcgcgaagaaaagcagcctcgcgggggtcgcggtgacgtcggggacctcggcgccaatgggcggcggccgcgcgaccctccgggagtctggcgtgagggtggacggggggcttgcgccggcgcttccgcaaatcaccgcgccggcctcccctccccctatctctcgccgggccgaggcctccttctccgtagccaaaagtcgccctcccgggcgggtggcgccgccactgccggcccccaagccgccccccccacagtagaggttgagtccgattaccgcgtttcttttgaggccaaacattgccagtcgccgccgccgcctggctgagaaaactggggaagaccccgactccttactggaaggaagcggaagtgagaagtggcgagcagtcctttatcacggttttagggcggccagtcctacggggtggcgcacgagactcnnnnnnnnnaaaaaagtattcccataaagggaaggggcggattccggaggttgcgc

SEQ ID NO: 73875 - DNA, 1066 bp, Homo Sapiens
cagtcgacggtaccggacatatgcccgggaattcggccattacggccggggaaagtggccagtagccaggcaagtcatagaattgattacccgccgaattcattaatttactgtagtgttaagagaagcactaagaatgccagtgacctgtgtaaaagttacaagtaatagaactatgactgtaagcctcagtactgtacaagggaagcttttcctctctctaattagctttcccagtatacttcttagaaagtccaagtgttcaggacttttatacctgttatactttggcttggcttccatgattcttactttattagcctagtttatcaccaataatacttgacggaaggctcagtaattagttatgaatatggatatcctcaattcttaagacagcttgtaaatgtatttgtaaaaattgtatatatttttacagaaagtctatttctttgaaacgaaggaagtatcgaatttacattagtttttttcatacccttttgaactttgcaacttccgtaattaggaacctgtttcttacagcttttctatgctaaactttgttctgttcagttctagagtgtatacagaacgaattgatgtgtaactgtatgcagactggttgtagtggaacaaatctgataactatgcaggtttaaattttcttatctgattttggtaagtattccttagataggtttttctttgaaaacctgggattgagaggttgatgaatggaaattctttcacttcattatatgcaagttttcaataattaggtctaagtggagttttaaggttactgatgacttacaaataatgggctctgattgggcaatactcatttgagttccttccatttgacctaatttaactggtgaaatttaaagtgaattcatgggctcatctttaaagcttttactaaaagattttcagctgaatggaactcattagctgtgtgcatataaaaagatcacatcaggtgggatggaaagacattggatcccctggttgcttaataaatttataaatgatgggcttggaaaaagcagggctactctaaccc

SEQ ID NO: 73876 - DNA, 969 bp, Homo Sapiens
gtccaaggtagcgaggcctgggtggcgaattcggcacgagggttttcagcgacggcgtaacaaactggggcaggattgtgactctcatttcttttggtgcctttgtggctaaacacttgaagaccataaaccaagaaagctgcatcgaaccattagcagaaagtatcacagacgttctcgtaaggacaaaacgggactggctagttaaacaaagaggctgggatgggtttgtggagttcttccatgtagaggacctagaaggtggcatcaggaatgtgctgctggcttttgcaggtgttgctggagtaggagctggtttggcatatctaataagatagccttactgtaagtgcaatagttgacttttaaccaaccaccaccaccaccaaaaccagtttatgcagttggactccaagctgtaacttcctagagttgcaccctagcaacctagccagaaaagcaagtggcaagaggattatggctaacaagaataaatacatgggaagagtgctccccattgattgaagagtcactgtctgaaagaagcaaagttcagtttcagcaacaaacaaactttgtttgggaagctatggaggaggacttttagatttagtgaagatggtagggtggaaagacttaatttccttgttgagaacaggaaagtggccagtagccaggcaagtcatagaattgattacccgcccgaattcattaatttactgtagtggtaagagaagcactaagaatgccagtgacctggtgtaaaagttacaagtaatagaactatgactgtaagccctcagtactggaccaagggaaagctttttcctcccctctaattagctttccccaggtataccttccttagaaaagtcccaagtgtttcaaggactttttatacccggttatacctttgggctttgggtttccatgaattccttactttaaataacccttagtttaatcacc

SEQ ID NO: 73877 - DNA, 892 bp, Homo Sapiens
gataaaattcccttagggtaaaaaataggcttttagcaaaaggatggcccttatgggtttggagatggggcagggcagggcaatttcttcccccattacattcttagtcatcttattcatacctatttttaaatggagtccacagactaaaggtcatgttccgagactgaagctttcaaatgaccctagttccaatatagacactttcttcagtttatcagtagcttttaaactctgaggtttaacacagctcacctctttctgtaaatttaagtgagcatactcctatacaaaggaaactttagagaaagcctcataaaatgttctttcctctgaaaattcctgaggggacttttgacacattgcccccaaagacaggataaaacaatagttgaaaagataccagtccaaggaaaagggacttcctcccacctctcaatgactgttagtgtcacagcacccatggtattaccacctgctaacaggatcaagttcgtgaaagatgaaaggtctgtggactcttggtggggagggagggtcactcaggtttccagcaggggtttcacagtgccaaaatctaaaagggctagaaagagttcagggatggcaggggaaagctgtaggaattgatataaatatctgtagagggagcagaacaatcagcaatttcaaggaaggacaggaaataaaaggttaagtctgatagaacaaacatcaagactgaaatccaaagatgccaatgcaaaaacttgcaacaaggtttgggaatcattaatagaaacaaaacagtaagtatttgctttattgacatactaggcttagacctgtgtgtgtaacaagcaagcctaatcctcgtgccgaattcgccacccaggcctcgctacctaggacc

SEQ ID NO: 73878 - DNA, 679 bp, Homo Sapiens
cttcattagacttggcctctccgaagtagaaatctcatattatctcatcgagtgatggagtgagctcatgctcactctctttagaatgtactgcatttaagaaggcagatgtttccaggtgctgacaaatgcagtaggaatcagcgagtacgggacagtggtgatgctgttccacacgtctaatgttggatcgtagcagtccaaagtcttgcatcgctgaatgccaaagtatcctccaaccacgtagagtttgtttccagaggccacagcatggcagctcatgcgctttgctgtcacatctcccaccttggtccactggtaagtctcactgttgaatttataagcagagcaggcagagaattctgtatcaccccccataataaaaatctggttccccagcacagctgctgctgtgtaacgccagggctggggacaggtggccggtacagtccacctgttttcacactgatcgtaacactgaactttggggagcttgtcatgactgacactggtacctccgaaagcaaataacttaagtttggcactcactactgcggcgttgctaacgccttctcggagtggggccaccatggtccatttgttgattgtggggtcataatgttctacctgctttagagagactgagggggaggccgggaggcagccagtggcggccgca

SEQ ID NO: 73879 - DNA, 574 bp, Homo Sapiens
ccctaaaggggagtcaagttcccctgggttgttcccctcataaggtattagggacttgtgtcacatctctctggagttttctattgttaaagaggaatctgaaagcaataagctctttggtcttcttaagatggctacacctcaatttaagatggggtattctttcactagttgaggagtagaagaggatgaccagctagactcccatggaattggaactcctattccttgcttagacattacaggttatgctttgagatctctttggggtgaaggattgaaattaaaccctgagccaccgtgtccttgtagagcacagagtagagaacaactggcagctttgaaaaaacaccatgaagaagaaatcgttcatcataagaaggagattgagcgtctgcagaaagaaattgagcgccataagcagaagatcaaaatgctaaaacatgatgattaagtgcacaccgtgtgccatagaatggcacatgtcattgcccacttctgtgtagacatggttctggtttaactaatatttgtctgtgtgctactaacagattataataaattgtcatcagtg

SEQ ID NO: 73880 - DNA, 765 bp, Homo Sapiens
ccaacaacacacccaccctcagcaatggcaggtacgaggctgggtgttgaattcggcacgaggctgcggctgggcctcaatgaccgcgtgctcttcgagctcactggccgcagctctggcattcctgacagaaacaccttgagcttgatggtaccctccagcagcaatggcagtgacggcgttggcggcgcggacgtggcttggcgtgtggggcgtgaggaccatgcaagcccgaggcttcggctcggatcagtccgagaatgtcgaccggggcgcgggctccatccgggaagccggtggggccttctgtgaaatgagagagcagtgctgacagagtgaacgatatttccggtgaggctcacctgggtcccaagtccagccctggatctcccaatggccttccaatccttaaactgccaatcgacccaccctgtttcctacctggtgccttgggcgcccccatcccccaacagaactccctgggcccccaatccagtataccctaacccttgatgtcccgaccgttgccaacgtatagggcactctcaggttacgctgcacaacagtttcagtgccccctagaccgtttccacctggcgggtctccaaagacaaacccacggctacactcctcctttatcattaccatctcccgcgatgagttctcctcaggtcgtgcgaaacaccccaaattcttctgcacagtgtcaagatcgactgccaaggtttgctccagctgatccctcggccttaacaactgtaaccg

SEQ ID NO: 73881 - DNA, 1010 bp, Homo Sapiens
gtcctgccattagcgcgtaacgagagactgcttgctgcggcagagacgccagaggtgcagctccagcagcaatggcagtgacggcgttggcggcgcggacgtggcttggcgtgtggggcgtgaggaccatgcaagcccgaggcttcggctcggatcagtccgagaatgtcgaccggggcgcgggctccatccgggaagccggtggggccttcggaaagagagagcaggctgaagaggaacgatatttccggtgaggctcaccgggtcccaagtccagccctggatctcccaatggccttccaatccttaaactgccaatcgccccacccgttcctacctggtgccttgggcgccccatcccccaacagaactcccgggccccaatccagtataccctaacccttgatgtcccgaccgttgccacgtatagggcactcccagttacctgcacaacagtttcaggcccccaaaccgtttccaccggcgggtctccaaaacaacccacggctcaactcctcctttatcattaccatctcccgcgtggagttctcctcaggtcgtgcgaaacacccccagattcttcgcacagtgtctagatccgaccgcgccaacgtttgcctcccagcctgactccctcggcccttacccacctgtcaccccctctacgctctccttcctcgccagcacgccttagctttgcaagcctgcatgcattcaggcttctcaggtgtttctagacccccgactccgcaagagtgaggatgatgggagctggtcatgggagctacttatggttggacacaatcttctaaaggctttggcctaatcagccaacctagactgtagattcctctcctgcttagatatggaggtgggctgggctcctttgcagctgagtttcttaactgatttggccctcggagagggaggataactgttggtgctgggcttatttgcttgggaatttccgaactggtaggtaaacaggaagggaaaattatgccccatgg

SEQ ID NO: 73882 - DNA, 997 bp, Homo Sapiens
  misc_feature (533)..(550): n is a, c, g, or t
  misc_feature (557)..(577): n is a, c, g, or t
  misc_feature (689)..(787): n is a, c, g, or t
  misc_feature (824)..(824): n is a, c, g, or t
  misc_feature (941)..(950): n is a, c, g, or t
tcctaggtagcgaggcctgggtggcgaattcggcacgaggcgagagactgcttgctgcggcagagacgccagaggtgcagctccagcagcaatggcagtgacggcgttggcggcgcggacgtggcttggcgtgtggggcgtgaggaccatgcaagcccgaggcttcggctcggatcagtccgagaatgtcgaccggggcgcgggctccatccgggaagccggtggggccttcggaaagagagagcaggctgaagaggaacgatatttccgagcacagagtagagaacaactggcagctttgaaaaaacaccatgaagaagaaatcgttcatcataagaaggagattgagcgtctgcagaaagaaattgagcgccataagcagaagatcaaaatgctaaaacatgatgattaagtgcacaccgtgtgccatagaatggcacatgtcattgcccacttctgtgtagacatggttctggtttaactaatatttgtctgtgtgctactaacagattataataaattgtcatcagtgnnnnnnnnnnnnnnnnnnctcgagnnnnnnnnnnnnnnnnnnnnnggccaatgatgatagtagtggtttcctttaagactggatatctaaaatagtctactttatttcccttagcaatctttatgtttcatatatttgatacaaataatactattgnnnnnnnnnnnnnnnnnnnnnnnnnnnnnnnnnnnnnnnnnnnnnnnnnnnnnnnnnnnnnnnnnnnnnnnnnnnnnnnnnnnnnnnnnnnnnnnnnnnggtgcttccctggtatcctaccaggttggagggcccngggaaacctgaaaaactgggatttatttgggtaaattaatgcccactgcctaatggctgtgccgtaaaatcttgacaaaattggctggttccccggggaaaaaggaaaaaacttcannnnnnnnnntggaaattccccaggggggccaaggggaaaaccccttttctttctcc

SEQ ID NO: 73883 - DNA, 1062 bp, Homo Sapiens
  misc_feature (1044)..(1044): n is a, c, g, or t
aaaaaattcatgaaatcaaaaagtagactatttcaccctattgcagctaagtggtcctggggcatggagtcttcaacctctctatgaatggcacaccttagtcacttatgttacttttgtgtccccaccatgggttgggggattttttgtttattctgatctatgagttttgaaaaagtgaataatcaaaaggaaaataattccttgttgttcataaattaagcatcactaaagtctcttgaaaggcatttctgtattgggcaagatttaaaatactaaagccttaggtcctattcatatttaaagtagcatgtttgtaacctgttactatttggagagagaagcagttgcctgccaaattgaagactacctttcaaatagcaaaagagagagagaaggctgatatttcggcttttaaataaagatttgtgtggttctgcttttactgtaactgtcactttcccagtgaaaatgatttcatatacattgagggtcttacaggtatgggtaaagttctataaattgcaacaaaatgatacccaatttcattttatcctttttgtattgtgaaactggaaactttatgacattgtaaattatcagctggtttttctgaatataaagtgtgaaaacacagaacagtattttgatctatttgataattttgtgggttttttgaagaattaatgagcatgtacatagaaatagtgactgcttgaatactgtatttacttgcactctttcagtacatcaagattcctgtatattttagagtataataaaacacagatgtgagttgtatttaatgaataatgtatttgtatctgtgcatattatctacaaatctataaagtttctagggcattgactactagattttaagcattttttctaaaatatttacggaaattataaatctaatcccccatcttttctttataatataaagaagtcataatgaacccttcctaattattagtagtaggaaggtgaatatgcattttaatgacagtggactacattttctattgtaccttttgaaanaaaacctcgtgccgaatt

SEQ ID NO: 73884 - DNA, 1150 bp, Homo Sapiens
  misc_feature (51)..(51): n is a, c, g, or t
acccactactggcccagaaaagcagaaccctttccaaaagcccagagatgncctgggctcagatctgtaattctcccaggagctgtgatagagcaggccacacaaagtccctacgcctccctgctgcctcccccagatgcatgtgatggcatcaccattccccaaattgaatatcagcatgcggcctgaccagggactctttagatgcatgaatttatttatatgaaggctctcacagagacacacacagcacttcagtagcatttgcattcctggttaaagaatcaccaatatttaaaataaaaactttcctgaaattgggactgtcatgttatccagaagggctggtacatccgcccaccatgtccccctgctgggtcaggagccaacacaggaccctgcgtgtgagcgtgcctgacatctcacgcacggccactccagagccggtccctgtccttggaaagctgtgaagccttgcgttgagttccttctcgatactgacggctccgtgctgacattctgagctctggagtcacaccagcgcaggggcgtggaggaactgaggtttggaaggaatgccaggtctcgcacagcttggcctcgagaaggtgagaggaaggcaaaggccagggaggggacccagagaggcctggcacacaaggcccaagcaccaccgtcaacacagcccagtccatacagaaatgggtttcatgcctgaaaagctttttacagaaagatgccgcctgtagccagtgacagccgcaaccctacaggcctcagttccttgcagaggtgaggggtagagagtcagcctccctcccttccagcagcgacccagcttccctccacttccaggtggtgctgggctcaccgagggagcactggtgggtgctctgaaaacccacaggatcccacctccaggcccacctgggtcccatctcactctcttcttctttcaccaattgctaacatagaccttgttgggatcacgatggcttcacaagccagctgttgggtttgctatgtcactgtggctcagtcacatccctgcgtgtatactgtctgcggggcacatatgtatccatttagagctaaaggaatcagtgtacactacagctaatcctaataaatccgatgttttcggaaaaaa

SEQ ID NO: 73885 - DNA, 1076 bp, Homo Sapiens
aattagtaaccacccccaacagtcttcaacaccccctaggtagcgaggcctgggtggcgaattcaacacgaggggtatgcggcccagatccccaacgtcccaatggtcatgatggtgtggttacactgtgtgagtagagcaaaatctttggcaggtgagccctcaatgccatcgccagcaaacaccacatcactgtgggaggtgtcaatgttctcccgacaccaggccatgccattactggtgaccacgaagatgagggagctgtagcgagctcggaaccagtccagggcctgctgtaggtatcgccggtcggccaccacccccttccacacttttggcatgacatggacatagtcccctcggcgaacatggacccctacaaaggtgcccggccggctcccgttcacctgcaggccccgcaggaacttctgggcctcctcccgcacgtggtcgtgcagggtgaactcctggaggatctcctggcggaggtggtggtagaaggtctaggagcaggggtagccggtgaagcggacgtactcccccgggatgtggcggtattcctcctccatccagtcgttcaggtggtagttctgccaggggatcctgctggccgtggcgctgtgcagcaccggcagggtgattctgaagatgggggccagggtgctgtgcatctgggccgggatgaaggcgggccgcccgttcatcttggccagggcatacagtgtggcgtactcgcccatctggttccccaggcggcctatcgcattgatcgtccacatccccctgagctggctgggtcccagtgcctttgatgttgaggctagcactggtatctgcaccggtaactcccacatggcttgaatcttcgctagccgctgctgaacgtgaaatatagtggaaaccgtaaagacaaagaggatgaagtgggccatgggaaaggagaaaggcatctgaacgaccagcatggctggtcctgctgaaggaaaccgggacagagtggttgggcaggcacctcagtgttccctctgggtctctcttcactcagggccaaagaaacccttccagcataggtgact

SEQ ID NO: 73886 - DNA, 1832 bp, Homo Sapiens
  misc_feature (1697)..(1729): n is a, c, g, or t
  misc_feature (1771)..(1788): n is a, c, g, or t
cctgggtggaaattcggacgaggagaacaccagtgaagtcagcactgtgcttaagctggataacacagtggtggggcagacgtcttggaagccatgtggccccaatgcctgggaccagagcttcactctggagctggaaagggcacgggaactggagttggctgtgttctggcgggaccagcggggcctgtgtgccctcaaattcctgaagttggaggatttcttggacaatgagaggcatgaggtgcagctggacatggaaccccagggctgcctggtggctgaggtcaccttccgcaaccctgtcattgagaggattcctcggctccgacggcagaagaaaattttctccaagcagcaagggaaggcgttccagcgtgctaggcagatgaacatcgatgtcgccacgtgggtgcggctgctccggaggctcatccccaatgccacgggcacaggcacctttagccctggggcttctccaggatccgaggcccggaccacgggtgacatatcggtggagaagctgaacctcggcactgactcggacagctcacctcagaagagctcgcgggatcctccttccagcccatcgagcctgagctcccccatccaggaatccactgctcccgagctgccttcggagacccaggagaccccaggccccgccctgtgcagccctctgaggaagtcacctctgaccctcgaagatttcaagttcctggcggtgctgggccggggtcattttgggaaggtgctcctctccgaattccggcccagtggggagctgttcgccatcaaggctctgaagaaaggggacattgtggcccgagacgaggtggagagcctgatgtgtgagaagcggatattggcggcagtgaccagtgcgggacaccccttcctggtgaacctcttcggctgtttccagacaccggagcacgtgtgcttcgtgatggagtactcggccggtggggacctgatgctgcacatccacagcgacgtgttctctgagccccgtgccatcttttattccgcctgcgtggtgctgggcctacagtttcttcacgaacacaagatcgtctacagggacctgaagttggacaatttgctcctggacaccgagggctacgtcaagatcgcagactttggcctctgcaaggaggggatgggctatggggaccggaccagcacattctgtgggaccccggagttcctggcccctgaggtgctgacggacacgtcgtacacgcgagctgtggactggtggggactgggtgtgctgctctacgagatgctggttggcgagtccccattcccaggggatgatgaggaggaggtcttcgacagcatcgtcaacgacgaggttcgctacccccgcttcctgtcggccgaagccatcggcatcatgagaaggctgcttcggaggaacccagagcggaggctgggatctagcgagagagatgcagaagatgtgaagaaacagcccttcttcaggactctgggctgggaagccctgttggcccggcgcctgccaccgccctttgtgcccacgctgtccggccgcaccgacgtcagcaacttcgacgaggagttcaccggggaggcccccacactgagcccgccccgcgacgcgcggcccctcacagccgcggagcaggcagccttcctggacttcgacttcgtggccgggggctgctagnnnnnnnnnnnnnnnnnnnnnnnnnnnnnnnnngagagctcttagtttttaaaaaggcctttgggatttgccggnnnnnnnnnnnnnnnnnnctcgcctcgtgccgaattcgccacccaggcctcgctaccttgga

SEQ ID NO: 73887 - DNA, 944 bp, Homo Sapiens
  misc_feature (12)..(12): n is a, c, g, or t
  misc_feature (151)..(151): n is a, c, g, or t
aagagggttcanccagggaagggggtgtccccgccacttggtcacctgccggccaatatccgcttctcaacacatcagggctctccaccctcgtctcggggccacaatgtcccctttccttcagagcctttgatggcgaacagctcccaanctggggccggaattcggagaggagcacctccccaaaatgaccccggcccagcaccgccaggaacttgaaatcttcgagggtcagaggtgacttcctcagagggctgcacagggcggggcctggggtctcctgggtctccgaaggcagctcgggagcagtggattcctggatgggggagctcaggctcgatgggctggaaggaggatcccgcgagctcttctgaggtgagctgtccgagtcagtgccgaggttcagcttctccaccgatatgtcacccgtggtccgggcctcggatcctggagaagccccagggctaaaggtgcctgtgcccgtggcattggggatgagcctccggagcagccgcacccacgtggcgacatcgatgttcatctgcctagcacgctggaacgccttcccttgctgcttggagaaaattttcttctgccgtcggagccgaggaatcctctcaatgacagggttgcggaaggtgacctcagccaccaggcagccctggggttccatgtccagctgcacctcatgcctctcattgtccaagaaatcctccaacttcaggaatttgagggcacacaggccccgctggtcccgccagaacacagccaactccagttcccgtgccctttccagctccagagtgaagctctggtcccaggcattggggccacatggcttccaagacgtctgccccaccactgtgttatccagcttaagcacagtgctgacttcactggtgttctcctcgtgccgaattcgccacccaggcctcgctaccttg

SEQ ID NO: 73888 - DNA, 2294 bp, Homo Sapiens
  misc_feature (12)..(12): n is a, c, g, or t
  misc_feature (135)..(182): n is a, c, g, or t
  misc_feature (2239)..(2239): n is a, c, g, or t
  misc_feature (2243)..(2243): n is a, c, g, or t
tgacccgccacnctggacactggccccccactacaaaggcgcggagggaacgggtccggaattcccgggatcggcggcctggccaggcgaggcgggagccgagcaggccggagcgggccgcgcgccggggagggnnnnnnnnnnnnnnnnnnnnnnnnnnnnnnnnnnnnnnnnnnnnnnnntcctctggccgcccctccctccgcgcggggacccctggcgggcggcaggaggacatggccagcgacgccgtgcagagtgagcctcgcagctggtccctgctagagcagctgggcctggccggggcagacctggcggcccccggggtacagcagcagctggagctggagcgggagcggctgcggcgggaaatccgcaaggagctgaagctgaaggagggtgctgagaacctgcggcgggccaccactgacctgggccgcagcctgggccccgtagagctgctgctgcggggctcctcgcgccgcctcgacctgctgcaccagcagctgcaggagctgcacgcccacgtggtgcttcccgacccggcggccacccacgatggcccccagtcccctggtgcgggtggccccacctgctcggccaccaacctgagccgcgtggcgggcctggagaagcagttggccattgagctgaaggtgaagcagggggcggagaacatgatccagacctacagcaatggcagcaccaaggaccggaagctgctgctgacagcccagcagatgttgcaggacagtaagaccaagattgacatcatccgcatgcaactccgccgggcgctgcaggccggccagctggagaaccaggcagccccggatgacacccaagggagtcctgacctgggggctgtggagctgcgcatcgaagagctgcggcaccacttccgagtggagcacgcggtggccgagggtgccaagaacgtactgcgcctgctcagcgctgccaaggccccggaccgcaaggcagtcagcgaggcccaggagaaattgacagaatccaaccagaagctggggctgctgcgggaggctctggagcggagacttggggagctgcccgccgaccaccccaaggggcggctgctgcgagaagagctcgctgcggcctcctccgctgccttcagcacccgcctggccgggccctttcccgccacgcactacagcaccctgtgcaagcccgcgccgctcacagggaccctggaggtacgagtggtgggctgcagagacctcccagagaccatcccgtggaaccctaccccctcaatggggggacctgggaccccagacagccgcccccccttcctgagccgcccagcccggggcctttacagccgaagcggaagcctcagtggccggagcagcctcaaagcagaagccgagaacaccagtgaagtcagcactgtgcttaagctggataacacagtggtggggcagacgtcttggaagccatgtggccccaatgcctgggaccagagcttcactctggagctggaaagggcacgggaactggagttggctgtgttctggcgggaccagcggggcctgtgtgccctcaaattcctgaagttggaggatttcttggacaatgagaggcatgaggtgcagctggacatggaaccccagggctgcctggtggctgaggtcaccttccgcaaccctgtcattgagaggattcctcggctccgacggcagaagaaaattttctccaagcagcaagggaaggcgttccagcgtgctaggcagatgaacatcgatgtcgccacgtgggtgcggctgctccggaggctcatccccaatgccacgggcacaggcacctttagccctggggcttctccaggatccgaggcccggaccacgggtgacatatcggtggagaagctgaacctcggcactgactcggacagctcacctcagaagagctcgcgggatcctccttccagcccatcgagcctgagctcccccatccaggaatccactgctcccgagctgccttcggagacccaggagaccccaggccccgccctgtgcagccctctgaggaagtcacctctgaccctcgaagatttcaagttcctggcggtggctgggcccggggtcatttttgggaaggggctcctctccgaaattccggcccaatgggggagctgttcgccatcaaaggctctgaaaaaaaggggacattgtgggccccgagaacaaggtgggagaaccctggatgttgtganaaancggataattgggcggcaatggaaccagtggcgggaacaccccctttcctgg

SEQ ID NO: 73889 - DNA, 990 bp, Homo Sapiens
  misc_feature (881)..(897): n is a, c, g, or t
gggtgaaccgggatatcgtcgacccacgcgtccgcccggcttgaggtaacagcgcgagctgaggctggggcccttggcgcggaggctgaagggacccgccgcggcgctgtcgccggagagggagggcaccgctgtcgtcggccagaagccaaggagtcctcagtgacggtgggatccacaacatctccacatcgctgtccccacccagccagggcagcgccagcactagctcagacgcaaggacggaaccgctggactccaggttccttgcctgggagtaggagaaatccacctgctgggggctgagtgtggcctgagggacaggccctgggtcccgggatgcccctgcccgagcccagcgagcaggagggtgagagtgtgaaggccagccaggagccatcccccaagccaggcacagaagtcatcccggcagcccccaggaagcccagaaagttctccaaactggtcctgctcacagcctccaaagacagcaccaaggtggcgggggccaagcgcaagggtgtgcactgtgtcatgtccctgggggtgcccggccgacacccttgccaaggccctcctccagacctcaccccgaggcccagcgggccattgaggcagcccctcaggagcctgagcagaaacggagcaggcaggacccaggcacagacagaacagaagacagtggattagcagcggggcctcctgaggctgctggggagaactttgccccctgctctgtggcgcccggcaagtccctgtaaccttgacaacaggcgcatcctcccaggccaccaacccagccataggctcttctctgtccgcagggcttctggggccaaatgggtgaatctttgctttcaacattgtgtgatttcttttcnnnnnnnnnnnnnnnnnagatcaagtataagttacttttgtaagcagaaaaatactttcaaacaagaataaaagaagctgttcgctagaccccataatgggcagggtttt

SEQ ID NO: 73890 - DNA, 619 bp, Homo Sapiens
ggaccacccctccctgctcctcaactggcaggatctgcaaggtgctggcgagggtggcggggccagccatctccagggacaggacgcagtgcacttcctggggcttggatcccacccccatcctcatcttggtcggaggctgtgagcagcaccagtttggagaactccctgggcttcctgggggctgccgggatgacgtccgtgcctggcttgggggatggctcctggccggccttcacactctcgccctcctgctcgctgggctcgggcaggggcatcccgggacccagggcctgtccctcaggccacgctcagcacccagcagggaacctggagtgcagtggttccgtccttcacatgtgagtgagaagcgtcaccatcatcccccacacctgggtcacggcgctggcttgctgggcaggagccccgggggcaaatcccgtaacttctctgggctggtttcaccgacggcagcggggccctccctctccggcgacagcgccgcggcggatcctttaacctctgccgctgcagcagcgagcgtcgacctcgcggcccaggccgccgccgccaccccgaccccggcaccagatgcaaggaattccggaccggtaccagc

SEQ ID NO: 73891 - DNA, 1017 bp, Homo Sapiens
ggagcgctgtgtactatgaccagtggtttaaaaaagcaggctggtaccggtccggatttcccgggatatcgtcgacccacgcgtacggaggaagatggagcccagcaccgcggcccgggcttgggccctcttttggttgctgctgcccttgcttggcgcggtttgcgccagcggaccccgcaccttagtgctgctggacaacctcaacgtgcgggagactcattcgcttttcttccggagcctgaaggaccggggctttgagctcacattcaagaccgctgatgaccccagcctgtctctcataaagtatggggaattcctctatgacaatctcatcattttctccccttcggtagaagattttggaggcaacatcaacgtggagaccatcagtgcctttattgacggtggaggcagtgtgctggtagctgccagctccgacattggtgaccctcttcgagagctgggcagtgagtgcgggattgagtttgacgaggagaaaacggctgtcattgaccatcacaactatgacatctcagaccttggccagcatacgctcatcgtggctgacactgagaacctgctgaaggccccaaccatcgttgggaaatcatctctaaatcccatcctctttcgaggtgttgggatggtggccgatcctgataaccctttggtgctggacatcctgacgggctcttccacctcttactcctttcttcccggacaagcctatccacccagtatccacatgcggtggggaagaacaccctcctcattgctgggctccaggccaggaacaaattgcccgcgtcatcttcagcggctccctcgacttcttcagcgactccttcttcaactcagcaagtgcagaaaggcggcgcccgggtcccagaggtattcccagacagggcaactaatgaactagctgtggccctcctcccgctgggtgtacaaggacgagggtgtctccgtgtggggcctgggtccaatcaatcgagtgggcgaaacagcccacca

SEQ ID NO: 73892 - DNA, 2046 bp, Homo Sapiens
  misc_feature (1673)..(1996): n is a, c, g, or t
  misc_feature (2020)..(2021): n is a, c, g, or t
gtgctccacgggcacgagccgcgattgggctaccgtagatggggtacttccggtgtgcaggtgctgggtccttcggcaggaggaggaagatggagcccagcaccgcggcccgggcttgggccctcttttggttgctgctgcccttgcttggcgcggtttgcgccagcggaccccgcaccttagtgctgctggacaacctcaacgtgcgggagactcattcgcttttcttccggagcctgaaggaccggggctttgagctcacattcaagaccgctgatgaccccagcctgtctctcataaagtatggggaattcctctatgacaatctcatcattttctccccttcggtagaagattttggaggcaacatcaacgtggagaccatcagtgcctttattgacggtggaggcagtgtgctggtagctgccagctccgacattggtgaccctcttcgagagctgggcagtgagtgcgggattgagtttgacgaggagaaaacggctgtcattgaccatcacaactatgacatctcagaccttggccagcatacgctcatcgtggctgacactgagaacctgctgaaggccccaaccatcgttgggaaatcatctctaaatcccatcctctttcgaggtgttgggatggtggccgatcctgataaccctttggtgctggacatcctgacgggctcttccacctcttactccttcttcccggacaagcctatcacccagtatccacatgcggtggggaagaacaccctcctcattgctgggctccaggccaggaacaatgcccgcgtcatcttcagcggctccctcgacttcttcagcgactccttcttcaactcagcagtgcagaaggcggcgcccggctcccagaggtattcccagacaggcaactatgaactagctgtggccctctcccgctgggtgttcaaggaggagggtgtcctccgtgtggggcctgtgtcccatcatcgggtgggcgagacagccccacccaatgcctacactgtcactgacctagtggagtatagcatcgtgatccagcagctctcaaatggcaaatgggtcccctttgatggcgatgacattcagctggagtttgtccgcattgatccttttgtgaggaccttcctgaagaagaaaggtggcaaatacagtgttcagttcaagttgcccgacgtgtatggtgtattccagtttaaagtggattacaaccggctaggctacacacacctgtactcttccactcaggtatccgtgcggccactccagcacacgcagtatgagcgcttcatcccctcggcctacccctactacgccagcgccttctccatgatgctggggctcttcatcttcagcatcgtcttcttgcacatgaaggagaaggagaagtccgactgaggggctagagccctctccgcacagcgtggagacggggcagggaggggggttattaggattggtggttttgttttgctttgtttaaagccgtgggaaaatggcacaactttacctctgtgggagatgcaacactgagagccaaggggtgggagttgggataatttttatataaaagaagtttttccactttgaattgctaaaagtggcatttttcctatgtgcagtcactcctctcatttctaaaatagggacgtggtctgttannnnnnnnnnnnnnnnnnnnnnnnnnnnnnnnnnnnnnnnnnnnnnnnnnnnnnnnnnnnnnnnnnnnnnnnnnnnnnnnnnnnnnnnnnnnnnnnnnnnnnnnnnnnnnnnnnnnnnnnnnnnnnnnnnnnnnnnnnnnnnnnnnnnnnnnnnnnnnnnnnnnnnnnnnnnnnnnnnnnnnnnnnnnnnnnnnnnnnnnnnnnnnnnnnnnnnnnnnnnnnnnnnnnnnnnnnnnnnnnnnnnnnnnnnnnnnnnnnnnnnnnnnnnnnnnnnnnnnnnnnnnnnnnnnnnnnnnnnnnnnnnnnnnnnnnnnnnnnnnnnnngcgagatgttgcccccaaaaaacnngtacattcccaagcaaaacaacatg

SEQ ID NO: 73893 - DNA, 1026 bp, Homo Sapiens
  misc_feature (60)..(60): n is a, c, g, or t
  misc_feature (83)..(83): n is a, c, g, or t
  misc_feature (807)..(813): n is a, c, g, or t
  misc_feature (816)..(826): n is a, c, g, or t
cttcccagcattccctcggtgtgtcacaggctgcatgaccctgggaatgcgggcaggccnacagccacagtctgtctgatccntgagcccaggacaggctcacgtcctcagcgacccactggtgactgacttcccagactctcctctgtccctcaggagcagccgtgtcctctcccaggccctaggacactgccagagactgtgggacatacaggcataagtgatgtgtgtgtttctgcttctgttttaaaaatccagggtcattacacacagcatggaaattagcacaaaatgctgtgcaaacgtcagatgctcccaaaccagcaaagggatgggcttgcttcacatcagatgcgggcacgccttacccctgccttccgtgtccccaccccagggtcaagggttcctcagaccagccatgcctcctcctcctgccgcctccttttctagatggggaggggattccgtcacaagaagagccgcccctcggccgtgtgcaggaagccccatgtcgctttgccgagatcagccctgggaggatccccttctctagctcagatcatgccgtgtggccagaaggctgcggacacaactgacctgcttctcgaggtggttgatgttttaaacaggaagctccacggagttcagccctgtgtgcatttcctcatgtatgtaaacgccaagactgaatgtgagaggtgttggccgcgggccttaagtctgagcagatccatctggaatgttcggggtgtgctgtctggatgtggtgcgctaaaaacacggaataaagatcagtgacaaagcccnnnnnnnacnnnnnnnnnnncaaaactccagactaggccctggtgctttgattgtcaaggccatctccctgggcccgcctggcggccatcccgggctaaacagggtactgcctgggccccgcaaaggggggggcccctaacccttcgtagggccttcacatttttctggaaaatttctaaagaaaaaacaattaaaaaatacccgggcctttccctcccg

SEQ ID NO: 73894 - DNA, 942 bp, Homo Sapiens
cctgcctctcggcccaccagctgaaggcacctctttattccagccccagacaaaaagccagggactggtaggcctgcatcagtctccctcccactctgtgtcctgaccccacaaagggcctctgaggttggagacgcctgtgccttcatccccatccatgcttcctgggggtggggcctctgactaaatatgacaccgtttttcaagaactgagccagggggtcctgaggagaagggcacagtcttgcaaaatggtctcgaatttctctgctgagtttttcatccccctgcttggatcccagtgctgttacctcttgaaaggaactgtacctttagccgaagaaacaaaggcctggggaggatagaagtcctcggaggaaagggccaagggatctgagacccttttttgcttttcctaagattgatcccacccccacctccatgtggtggggacagacaaagacaatgctgcattcttcaaggaacaaaggcagacagacttccagatggaggctttgctgcccggtcttctgcagagggactcaaaggcttctaagaggggttctgccccgggggtggggaacatgattttgccctgagagcaccaccagtttctgaggtgaggaggtgccttcaaaacagggcgctccccgagttggcatgccagcagcccatccagggcagctcggtggcccagcggcccgaggtggttgcctgcagtttggcctggtcgaggcaccagtaggcgtcatctcggaagaagatgatggagccatcgggcctcggcagggcgccgctgacctcctcagggatgcctccccagtcctgcagacttcgggggtagtagggctccacttgcagtccccctcgggccagcacgtaatatctggcacccttgaagaggatgaggcggcgcagaagagggaagaagatggcggcgtc

SEQ ID NO: 73895 - DNA, 915 bp, Homo Sapiens
tgtcttgtcccggtgaaaccctgtgtgcatggtatttccgaaggtgctctcgattacctggatctgtaaaacaagcgtgccaagcgttctggaatatgttgcatcacatgttcagtatcttgcttttcgttcttcgttcttttgtatgtgtgcctttttgtctcgttctcttcagaatttgcccaacattcaacacaactatcaccatcatcctctttgtcttcacagtgatgaacacaagagtcatcaccgtgttcatcatgattacaaatgccttcagtgcaggcaacatccgaaccctcccgagaacctgtttcactcccttccatgctagatgaatatccacaatcactaccattacagtgtggagataagcctttctttattttaggggaccccaaaagattgccactgctaggacaggtacatgatgtattttcattggtaacaattacttctacacaagtattaccatcttcagtgctgccacaggctttgcagctgctattttctatgaagtctgtttccttctcttggcttacttccttttcatctgctgtttgtaagggagtaggaatatcacacacacacttattttttcgtctattcttccgtttttggcgtttcttttcttgcttgagttctcttactcgttcctcttctgaaaattcctcacaaagttgttccaatctgctaataccctgtactttttccacggtcatctcaaaactcttgcgtaaagcatcaacaccaagatagaaaagcatctgccatgtctgctcttctgcccgtagcttctgccagattcgatgcagtctttcataaagatgaattcccaagcaggtcagaacttcttcttgaggaattttcagaagaggaacgagtaagagaactcaagcaagaaaagaaacgcca

SEQ ID NO: 73896 - DNA, 974 bp, Homo Sapiens
ccatggaatataaacgtggtaaaaaaagcaggctggtacggtccggaattcccgggatatcgtcgacccacgcgtccgtgaacatatccagaagcttggaagctgtattacagatccaggtaatcgagagacctcaggaaataccatgcacacagtgtttcaccgtgacaagaccaaagatacacatcctgaaagctgttgcagctctgaaaagggtgggcagccattgccttggtttgagcataggaaaaatgtaccacagtttgcagaacctacagaaacgttgtttgtcccgattccggaaaaggtgccaagagcttagttgaactccttgatgagtctgaatgtacttcagatgaggaaatctttatctcacaagatgaaatacagtcatttatggctaataaccagtctttctacagcaatagagaacaataccgacagcatctgaaggagaaatttaataaatactgccggttaaatgatcacaagaggcccatttgtagtggctggttgacaacggctggagcaaattaaataaataaaatagctctgtctttcaatgaaacactcacgatgactactgcgccttctctttcgaaaaactcttaatttagtgacttatggcaaaattttatcttaaatcaatgtgattctttcttgttttgggagacggtggaggtatcctcattagttctttcttcaggcttgtgtctttagttgcgtggctgcgcaggcctgccatatgatttaagccatctcttttcattaaatgtttctcttcctgtgagacttactaaagcaacttagtggcaaaaagtaatgttgtacttataattctgtacagaaatgacaatgagctgaatatatggttttacaaagtagacatccacttgcaaaatgtttggatgtaatgttaaagcgcaatgtgcaaaatttaaaataaagaatatttattaatacgcacagcaaaa

SEQ ID NO: 73897 - DNA, 1509 bp, Homo Sapiens
acatgtgaatataaacgtggtaaaaaaagcaggctggtacggtccggaattcccgggatatcgtcgacccacgcgtcgctactgttcccgctcaaaggctgactacaccagccacctgcggagcctggtctcgggcctgatccgcctcttcaatgactccagccctgtggttctggaggagagctgggatgccctaaatgccatcactaagaagctggatgctggcaaccaggttggcactcattgaagagctgcacaaggaaatccggctcatagggaacgagagcaaaggcgagcatgtgccaggattctgcctcccgaagaagggagtgacctccatccttccagtgttgcgggaaggagtcctgactggcagccctgagcagaaggaggaggcagccaaagccttaggcttggtaatccgcctgacctcggctgacgccctgaggccctccgtggtcagcatcactggccctctgatccgcatcctgggggacaggttcagctggaatgtgaaggcggctctgctcgagacactcagcctcttgttggctaaggttgggattgccctgaagcccttcctgccccagctgcagaccactttcaccaaagccctgcaggactccaaccggggggtgcgcctgaaggccgcagatgctctgtgggaagctcatttccatccacattaaggtggacccccctcttcacagaggctgctcaatggcatccgcgccatggaggacccaggtgtcagggacaccatgctgcaggccctgaggtttgtgattcagggagcaggggccaaagtggatgccgtcatccggaaaaacatcgtctcactcctgctgagcatgctgggacaacgatggaggacaaacactcgcatctcctcagccgggttgcctaggggaactgtgtgccttttgactgaagaaggagcttagtgccgttctacagcagtgcttgctggcggacgtgtccggcattgactggatggttcggcacgggcggagcctggcactttccgtggctgtgaatgtggctcctggcagactttgtgccggcagatatagcagtgatgttcaggaaatgatcctgagcagtgccacggcggacaggatccccattgcggtgagcggggtccggggcatgggctttctcatgagacaccacatcgagacaggcggagggcagttgccggccaaactttccagcctgttcgttaagtgtctgcagaacccatccagcgacatcaggctggtggctgagaagatgatctggtgggcaaataaggacccactgcctcccctggacccccaggccatcaagcccatcctgaaggctcttcttgacaacaccaaggataagaacaccgtggtcagggcctacagcgaccaggcaattgtcaacctcctcaagatgcggcagggtgaagaggtgtctcagtccctctccaagatcctggatgtggccagttggaggtgctgaacgaggttaaccgaaggccct

SEQ ID NO: 73898 - DNA, 391 bp, Homo Sapiens
gactggttattagccataaatgactgtatttcatcttgtgagataaagatttcctcatctgaagtacattcagactcatcaaggagttcaactaagctcttggcaccttttccggaatcgggaccaaacaacgtttctgtaggttctgcaaactgtggtacatttttcctatgctcaaaccaaagcaatggctgcccacccttttcagagctgcaacagctttcaggatgtgtatctttggtcttgtcacggtgaaacactgtgtgcatggtatttcctgaggtctctcgattacctggtatctgtaatacagcttccaagcttctggatctgataccacagcaaaggatttcacaggtaaaaaggcatgatataatagcaattattcttt

SEQ ID NO: 73899 - DNA, 705 bp, Homo Sapiens
  misc_feature (52)..(141): n is a, c, g, or t
  misc_feature (628)..(652): n is a, c, g, or t
gtccagagacattccaggggtccagggtgtgggtcctgggctgtaacacccnnnnnnnnnnnnnnnnnnnnnnnnnnnnnnnnnnnnnnnnnnnnnnnnnnnnnnnnnnnnnnnnnnnnnnnnnnnnnnnnnnnnnnnnnntgcacgtgtcactggggtggccgtgagtgtgtgctcacaggtacgcggtggtgtcgggttcctgggcctgaggggcctgaactgatctcacttggctccgaaagcctttgctgtgttccctgcagcccctggccccccagccttggggctctggctccccccggcggaattgggggactgtttcctgacatcctggacaagggaagcccactagaggctggaacaggacctctccagcctcctcaccagcaccgtgcccatctcaactggacttcccgccctccttctccaccttctagtgcccgtggccggggattcaaagccgccgttccccaggtccctgggctgggccctgacagggagccgcccccctccccatggtaaccaggaagcccgtttcatgttcagttgcttttgtagaggaagcaagggctgggatggggacagctgtcaatcacaagcccttaaataaagcagccagcgcccnnnnnnnnnnnnnnnnnnnnnnnnnctcgagactagttctccctcgtgccgaaatcgccacccaggcctcgctacctt

SEQ ID NO: 73900 - DNA, 1048 bp, Homo Sapiens
ggcacaaatcgaagcaggaattccccacttttggagcgggccagcctcggccaggcctccatccagaatggcaaagacagcacagccccccagcgtgtccctgttgcctccccatccgcccacaacatcagcagcagtggtggagccccagaccgaactaacttcccccggggtgtgtccagccgaagcaccttccatgctgggcagctccgacaggtgcgggaccagcagaatttgccctacggtgtgaccccagcctctccctctggccacagccagggccggcggggggcctctgggagcatcttcagcaagttcacctccaagtttgtacgcaggaacctgaatgaacctgaaagcaaagaccgagtggagacgctcagacctcacgtggtggggcagtgggcggcaacgacaaagaaaaggaagaatttcgggaagccaagccccgctccctccgcttcacgtggagtatgaagaccacgagctccatggagcccaacgagatgatgcgggagatccgcaaggtgctggacgcgaacagctgccagagcgagctgcatgagaagtacatgctgctgtgtatgcacggcacgccgggccacgaggacttcgtgcagtgggagatggaggtgtgcaaactgccgcggctctctctcaacggggttcgatttaagcggatatcgggcacctccatggccttcaaaaacattgcctccaaaatagccaacgagctgaagctttaacaggctgccaggagcgggggcggcgggggcgggccagctggacgggctgccggccgctgcgccgccccacctgggcgagactgcagcgatggattggtgtgtctcccctgctggcacttctcccctccctggcccttctcagttttctcccacattcacccctgcccagagattcccccttctcctctcccctactggaggcaaaggaaggggagggtggatgggggggcagggctccccctcggtactgcggttgcacagagtatttcgcctaaaccaagaaattttttattaccaaaaag

SEQ ID NO: 73901 - DNA, 729 bp, Homo Sapiens
ctgttttcctcctacacgtggacattattctcctgatcctcctacctggtccaccccagggctaccggaaggtaaaatcttcacctgaaccaattatgagcagtctccttactgaaggtacagccggatacgtggtgcccccggggctggtgttggcagccggggggaggtgcctgagggtccccacggttcctttctgcttttctgaatgcatcaagggtacgagaacttgccaatgggaaattcatccgagtggcactggcagagaaggataggagtggaatgcccacacagtgaccaacagaactggtctgcgtgcataaccagctgccaccctcaggcctgggccccagagctcagggcacccagtgtcttaaggaaccatttggaggacagtctgagagcaggaacttcaagctgtgattctatctcggctcagacttttggttggaaaaagatcttcatggccccaaatcccctgagacatgccttgtagaatgattttgtgatgttgtgatgcttgtggagcatcgcgtaaggcttcttgcttatttaaactgtgcaaggtaaaaatcaagcctttggagccacagaaccagctcaagtacatgccaatgttgtttaagaaacagttatgatcctaaactttttggataatcttttatatttctgacctttgaatttaatcattgttcttagattaaaataaaatatgctattgaaactaaa

SEQ ID NO: 73902 - DNA, 1914 bp, Homo Sapiens
ggctaaggtagcgaggcctgggtgtgtgaatttcggcacgaggccagctgctgcagtacgtggagcgatacgggaagcgtttgaaggccaagaacctgatgtacctgaagcagatcctgtatttgctggagaaattcgtggctgtgctaggggggaacattaagcaaaatcccaatacacagagtctgtcacagacagggacggagctgaagaccatcaacgactttctcttccagagccagatcgacaacatcaacctgttcaaggtgcagcgatactgtgagaagagcatgatcagcagaaagctctttggattcactgaacggtacggagcagtgttctcatcccgggagcagcccaaactggctgggtttcagcaattcctgcagagcctgcagcccaggacgactgaagctcttgcagcccctgcagacgagagtcaggccagcaccctgcgaccagcttctccactgatgcacatcgaaggcttcctggcagctctcactacggccaaccaggacggcagggtcatcctgagccgccaaggcagcctcagtcagagcaccctgaagtttttgctcctgaatccagctgtgcactttgcccaagtggtgaaggaatgccgggcagtggtcattgcggggggtaccatgcagccggtgtctgacttccggcagcagctgctggcctgtgccggggtggaagctgagcgcgtggtggagttttcctgtggtcacgtgatccctccagacaacatcctgccccttgtcatctgcagcgggatctccaaccagccgctggaattcacgttccagaaaagagagctgcctcagatgatggacgaggtgggtcgcattctctgtaacctgtgcggtgtggttcctggaggggtggtctgtttcttcccctcctacgagtacctgcgccaggtccatgcccactgggagaagggtggcctgctgggccgtctggctgccaggaagaagatattccaggaacctaagagcgcacaccaggtggagcaggtgctgctggcatattccaggtgcatccaggcctgtggccaggagagaggccaggtgacaggggccctgctcctctctgtggttggaggaaagatgagtgaagggatcaacttctctgacaacctaggccggtgtgtggtgatggtgggcatgcccttccccaacatcaggtctgcagagctgcaggagaagatggcctacttggatcaaaccctccccagagcccccggccaggcacccccagggaaggctctggtggagaacctgtgcatgaaggccgtcaaccagtccataggcagggtcatcaggcaccagaaggattttgccagcatagtgctcctggaccagcgatatgcccggccccctgtcctggccaagctgccggcctggatccgagcccgtgtggaggtcaaagctacctttggccccgccattgctgctgtgcagaagtttcaccgggagaagtcggcctcttcctgatgggcaaccacaccactgcctggcgccgtgcccttcctttgtcctgcccgctggagacagtgtttgtcgtgggcgtggtctgcggggatcctgttacaaaggtgaaaccccaggaggagagtgtggagtccagagcgctgccaggacccaggcacaggcgttagctcccgtaggagaaaatgggggaatcctgaatgaacagtgggtcctggctgtccttggggcgttccagggcagctcccctcctggaatagaatctttctttccatcctgcatggctgagagccaggcttcctgcttggagtccgcaggaggctgtggcagcagtggcatccactgtggcatctccgtcctgcccaccttaagaggcgagatggagcaggcccatctgcctctgccctttctagcc

SEQ ID NO: 73903 - DNA, 669 bp, Homo Sapiens
  misc_feature (38)..(38): n is a, c, g, or t
  misc_feature (51)..(51): n is a, c, g, or t
  misc_feature (516)..(524): n is a, c, g, or t
tggccccatccccattgccacccagccccacccactgntggaagaggaccnagcgcgaggtggtgcccagggtgggcactgctgcttaatgcgaggcacacctggggcagctgagccccccgaaggctgcgggtttgccaaacacagagaggccaggccccagtgtcaggatgcagtcagcctctggcgcagctctttccacgacctggttcctggatgtcctgcttgctccacacccatctacagggaggatgtgagggggctctgcctcctagggccaggtcccccctctcgggagggggtattgggtaggaccatccaagaaagggcagaagaccaagggcagtcggggtctagaaaggagggcgctggccctgctgggcgcttcggagcccccactgtttcccactcagctttgtgctcagatcccaggtcccaaggagtgacaggggcttcctcccaccttctgtccttgtccagtcatgtaaataatgtgctatttctctccccgagtcnnnnnnnnnaaaacctaccgtggttcctcagctaactgcattccctacccaggcagagactgtcctatgcctcgagcttccaaacgagactcagaccgcgacacagccaccgtatttatggaatgacaaaataaataaagcccaaacaaaaaaa

SEQ ID NO: 73904 - DNA, 1043 bp, Homo Sapiens
ggcacgagggggggagggtttcaaagggagcgcacttccgctgccctttctttcgccagccttacgggcccgaaccctcgtgtgaagggtgcagtacctaagccggagcggggtagaggcgggccggcacccccttctgacctccagtgccgccggcctcaagatcagacatggcccagaacttgaaggacttggcgggacggctgcccgccgggccccggggcatgggcacggccctgaagctgttgctgggggccggcgccgtggcctacggtgtgcgcgaatctgtgttcaccgtggaaggcgggcacagagccatcttcttcaatcggatcggtggagtgcagcaggacactatcctggccgagggccttcacttcaggatcccttggttccagtaccccattatctatgacattcgggccagacctcgaaaaatctcctcccctacaggctccaaagacctacagatggtgaatatctccctgcgagtgttgtctcgacccaatgctcaagagcttcctagcatgtaccagcgcctagggctggactacgaggaacgagtgttgccgtccattgtcaacgaggtgctcaagagtgtggtggccaagttcaatgcctcacagctgatcacccagcgggcccaggtatccctgttgatccgccgggagctgacagagagggccaaggacttcagcctcatcctggatgatgtggccatcacagagctgagctttagccgagagtacacagctgctgtagaagccaaacaagtggccagcaggagggccagcgggccattcttggtagaaaaagcaagcaggaacagcggcagaaattgtgcaggccgagggtgaggccgaagctgcaagattgctgggaagccctgagcaagaacctggtacatcaattcgagatcgagcaccagaatttcaagagatggccctccagatctttttccacgacactgtgtgactcggtgatttccgggggcagcgctaggagaagcctcacaaccccccgggggtggtccttgaaccggg

SEQ ID NO: 73905 - DNA, 1745 bp, Homo Sapiens
  misc_feature (1400)..(1414): n is a, c, g, or t
  misc_feature (1510)..(1549): n is a, c, g, or t
  misc_feature (1557)..(1600): n is a, c, g, or t
gacggcagtaactataacggtccttaaggtagcgaggcctgggtggcgaattcggcacgaggcgggcccgaaccctcgtgtgaagggtgcagtacctaagccggagcggggtagaggcgggccggcacccccttctgacctccagtgccgccggcctcaagatcagacatggcccagaacttgaaggacttggcgggacggctgcccgccgggccccggggcatgggcacggccctgaagctgttgctgggggccggcgccgtggcctacggtgtgcgcgaatctgtgttcaccgtggaaggcgggcacagagccatcttcttcaatcggatcggtggagtgcagcaggacactatcctggccgagggccttcacttcaggatcccttggttccagtaccccattatctatgacattcgggccagacctcgaaaaatctcctcccctacaggctccaaagacctacagatggtgaatatctccctgcgagtgttgtctcgacccaatgctcaggagcttcctagcatgtaccagcgcctagggctggactacgaggaacgagtgttgccgtccattgtcaacgaggtgctcaagagtgtggtggccaagttcaatgcctcacagctgatcacccagcgggcccaggtatccctgttgatccgccgggagctgacagagagggccaaggacttcagcctcatcctggatgatgtggccatcacagagctgagctttagccgagagtacacagctgctgtagaagccaaacaagtggcccagcaggaggcccagcgggcccaattcttggtagaaaaagcaaagcaggaacagcggcagaaaattgtgcaggccgagggtgaggccgaggctgccaagatgcttggagaagcactgagcaagaaccctggctacatcaaacttcgcaagattcgagcagcccagaatatctccaagacgatcgccacatcacagaatcgtatctatctcacagctgacaaccttgtgctgaacctacaggatgaaagtttcaccaggggaagtgacagcctcatcaagggtaagaaatgagcctagtcaccaagaactccacccccagaggaagtggatctgcttctccagtttttgaggagccagccaggggtccagcacagccctaccccgccccagtatcatgcgatggtcccccacaccggttccctgaacccctcttggattaaggaagactgaagactagccccttttctggggaattactttcctcctccctgtgttaactggggctgttggggacagtgcgtgatttctcagtgatttcctacagtgttgttccctccctcaaggctgggaggagataaacaccaacccaggaattctcaataaatttttattacttaacctgnnnnnnnnnnnnnnnggggcggccgctctagagtatccctcgaggggcccaagccttacgcgtacccagcctttctgtgtacaacgtggcccctatagtgagtcgtatcannnnnnnnnnnnnnnnnnnnnnnnnnnnnnnnnnnnnnnncacaactnnnnnnnnnnnnnnnnnnnnnnnnnnnnnnnnnnnnnnnnnnnnctactttgcaccaactactaccgagatttaaaggctcaaggtaaactataacacctttcacgtgtttagcgtgttaccctagctgatatgcttgcgctgaaagttggctaccgggttgattatgaatttacgcccacacaacaac

SEQ ID NO: 73906 - DNA, 412 bp, Homo Sapiens
  misc_feature (18)..(18): n is a, c, g, or t
  misc_feature (112)..(112): n is a, c, g, or t
aaccgtcccaaacatcantcaaatataactgggaaaacccaacggaaaaccctcgacccgtaaaccttgccctccttgagcaacactgcaacatgaaacacttcccatgggngcgagcattaagctccttccagggtcacattcccctttcctgtggtctgtccataaagcccaaatatctcacggagtttttcttcactgattgcatctgttctgtcaattttgttacccaagataaggattggcacattggatattgtttcatcagtcattaaagcattaagctcaactttggattccacgaggcgagaatgatctgcacagtccaccagaaagacaatcccattaattgctgggagataatttttccaaacgcgacgtgcttgctcgtgcccaccaagatcaaaagttg

SEQ ID NO: 73907 - DNA, 1102 bp, Homo Sapiens
gggagggtgctgctggttagtgtgctctgagggagggtccgagccagccgctgttttgccggaggagcccctcaggccgtagtaagcattaataatgtctttcatctttgagtggatctacaatggcttcagcagtgtgctccagttcctaggactgtacaagaaatctggaaaacttgtattcttaggtttggataatgcaggcaaaaccactcttcttcacatgctcaaagatgacagattgggccaacatgttccaacactacatccgacatcagaagagctaacaattgctggaatgacctttacaacttttgatcttggtgggcacgagcaagcacgtcgcgtttggaaaaattatctcccagcaattaatgggattgtctttctggtggactgtgcagatcattctcgcctcgtggaatccaaagttgagcttaatgctttaatgactgatgaaacaatatccaatgtgccaatccttatcttgggtaacaaaattgacagaacagatgcaatcagtgaagaaaaactccgtgagatatttgggctttatggacagaccacaggaaaggggaatgtgaccctgaaggagctgaatgctcgccccatggaagtgttcatgtgcagtgtgctcaagaggcaaggttacggcgagggtttccgctggctctcccagtatattgactgatgtttggacggtgaaaataaaagagttttacttctctggactgatcctattcacagcttcctcatgaacttttctaatagaacaaggaaagctctccaaccatgtctggcgttgagaagccaagagtctctgtcaactctctcattgcccagtggtgacatgtgctcttctccacactgttgggaggtaatgctgccccacgtgctggtgcaggtcagtatcctgggacttggaagctggcaggatttgccgggtaaagctgtatgccatcatggggcacctgaaaagaaaaacacgtctcaccactgtggttgattcaaaagaaagtgattctattttttaaagaaagcgttgttaatgtaattggtatccctcctaactttttgagttcacaatttacttggtccagag

SEQ ID NO: 73908 - DNA, 2634 bp, Homo Sapiens
  misc_feature (14)..(14): n is a, c, g, or t
  misc_feature (24)..(24): n is a, c, g, or t
  misc_feature (1537)..(1587): n is a, c, g, or t
  misc_feature (1905)..(1957): n is a, c, g, or t
acggagcggcaggncgtgagtttntgagcgaggcctccatcatgggccagttcgagcaccccaatatcatccgcctggagggcgtggtcaccaacagcatgcccgtcatgattctcacagagttcatggagaacggcgccctggactccttcctgcggctaaacgacggacagttcacagtcatccagctcgtgggcatgctgcggggcatcgcctcgggcatgcggtaccttgccgagatgagctacgtccaccgagacctggctgcttcgcaacatcctagtcaacagcaacctcgtctgcaaaagtgtctgacttttggcctttcccgattcctggaggagaactcttccgatcccacctacacgagctccctgggaggaaagattcccatccgatggactgccccggaggccattgccttccggaagttcacttccgccagtgatgcctggagttacgggattgtgatgtgggaggtgatgtcatttggggagaggccgtactgggacatgagcaatcaggacgtgatcaatgccattgaacaggactaccggctgcccccgccaccagactgtcccacctccctccaccagctcatgctggactgttggcagaaagaccggaatgcccggccccgcttcccccaggtggtcagcgccctggacaagatgatccggaaccccgccagcctcaaaatcgtggcccgggagaatggcggggcctcacaccctctcctggaccagcggcagcctcactactcagctttttggctctgtgggcgagtggcttcgggccatcaaaatgggaagatacgaagaaagtttcgcagccgctggctttggctccttcgagctggtcagccagatctctgctgaggacctgctccgaatcggagtcactctggcgggacaccagaagaaaatcttggccagtgtccagcacatgaagtcccaggccaagccgggaaccccgggtgggacaggaggaccggccccgcagtactgacctgcaggaactccccaccccagggacaccgcctccccattttccggggcagagtggggactcacagaggcccccagccctgtgccccgctggattgcactttgagcccgtggggtgaggagttggcaatttggagagacaggatttgggggttctgccataataggaggggaaaatcaccccccagccacctcggggaactccagaccaagagtgagggcgcctttccctcaggactgggtgtgaccagaggaaaaggaagtgcccaacatctcccagcctccccaggtgccccccctcaccttgatgggtgcgttcccgcagaccaaagagagtgtgactcccttgccagctccagagtgggggggctgtcccagggggcaagaaggggtgtcagggcccagtgacaaaatcattggggtttgtagtcccaacttgctgctgtcaccaccaaactcaatcatttttttcccttgtaaatgcccctcccccagctgctgccttcatattgaaggtttttgagttttgnnnnnnnnnnnnnnnnnnnnnnnnnnnnnnnnnnnnnnnnnnnnnnnnnnntttctaccgtccttgtcataactttgtgttggagggaacctgtttcactatggcctcctttgcccaagttgaaacaggggcccatcatcatgtctgtttccagaacagtgccttggtcatcccacatccccggaccccgcctgggacccccaagctgtgtcctatgaaggggtgtggggtgaggtagtgaaaagggcggtagttggtggtggaacccagaaacggacgccggtgcttggaggggttcttaaattatatttaaaaaagtaactttttgtataaataaaagaaaatgggacgtgtcccagctccaggggnnnnnnnnnnnnnnnnnnnnnnnnnnnnnnnnnnnnnnnnnnnnnnnnnnnnnctgaaccttgtatgagaaaaaaagattaaaacttcacaacttgctgaaaaagacaaggccttactaggctgaaccatctgcctttgaggcctgctgcccctgaggatgctgccaccacagctgctcctgctgctgctgcagccccagctaacgttgaagcccctgaagaattttatgagtcttactaggatatgggaaccggtctctttgactaatcaccatgaagctactttcttaggcagttttctttgcaaaacaaggtattaatcgctcacatctttgaacccgcggggaccccccaaaatgggaaaacttgcccggggatgtcggcccggcgtaatcctgtctaaaaccattccgtttgccgcggcgggccccaaataaaataagggccccctgccccttggctgttttttctagggagatggtggatcattaattaaaggttgggcccccttgggaaaataaaaacccccccggggggttaaacccaccaattcctccacttggtccaaaaaaggcattgtcgcggccgccgttgaaatagaattctcccccacagggggaatacaaagggggggcacaaaaaattccgcatttatacgggccccgccctctttcaaattacaagcagggggtggagagacctccccacccccggtgtggggtctttcgag

SEQ ID NO: 73909 - DNA, 2341 bp, Homo Sapiens
cggaccccggcgctcggctccctggcgccatgtgagggggctcggtggccgtgtgggggccgggcgctccccgccggatggtgtgaacccacatccctgcccccagggccacctgcaggacgccgacacctacccctcagcagacgccggagagaaatgagtagcaacaaagagcagcggtcagcagtgttcgtgatcctctttgccctcatcaccatcctcatcctctacagctccaacagtgccaatgaggtcttccattacggctccctgcggggccgtagccgccgacctgtcaacctcaagaagtggagcatcactgacggctatgtccccattctcggcaacaagacactgccctctcggtgccaccagtgtgtgattgtcagcagctccagccacctgctgggcaccaagctgggccctgagatcgagcgggctgagtgtacaatccgcatgaatgatgcacccaccactggctactcagctgatgtgggcaacaagaccacctaccgcgtcgtggcccattccagtgtgttccgcgtgctgaggaggccccaggagtttgtcaaccggacccctgaaaccgtgttcatcttctgggggcccccgagcaagatgcagaagccccagggcagcctcgtgcgtgtgatccagcgagcgggcctggtgttccccaacatggaagcatatgccgtctctcccggccgcatgcggcaatttgacgacctcttccggggtgagacgggcaaggacagggagaagtctcattcgtggttgagcacaggctggtttaccatggtgatcgcggtggagttgtgtgaccacgtgcatgtctatggcatggtcccccccaactactgcagccagcggccccgcctccagcgcatgccctaccactactacgagcccaaggggccggacgaatgtgtcacctacatccagaatgagcacagtcgcaagggcaaccaccaccgcttcatcaccgagaaaagggtcttctcatcgtgggcccagctgtatggcatcaccttctcccacccctcctggacctaggccacccagcctgtgggacctcaggagggtcagaggagaagcagcctccgcccagccgctaggccagggaccatcttctggccaatcaaggcttgctggagtgtctcccagccaatcaaggccttgaggaggatgtatccctccagccaatcagggcctggggaatctgttggcgaatcagggatttgggagtctatgtggttaatcaggggtgtctttcttgtgcagtcagggtctgcgcacagtcaatcagggtagagggggtatttctgagtcaatctgaggctaaggacatgtcctttcccatgaggccttggttcagagccccaggaatggaccccccaatcactccccactctgctgggataatggggtcctgtcccaaggagctgggaacttggtgttgccccctcaatttccagcaccagaaagagagattgtgtgggggtagaagctgtctggaggcccggccagagaatttgtggggttgtggaggttgtgggggcggtggggaaggtcccagaggtgggaggctggcatccaggtcttggctctgccctgagaccttggacaaacccttccccctctctgggcacccttctgcccacaccagtttccagtgcggagtctgagaccctttccacctcccctacaagtgccctcgggtctgtcctccccgtctggaccctcccagccactatcccttgctggaaggctcagctctttggggggtctggggtgacctccccacctcctggaaaactttagggtatttttgcgcaaactccttcagggttgggggactctgaaggaaacgggacaaaaccttaagctgttttcttagcccctcagccagctgccattagcttggctcttaaagggccaggcctccttttctgccctctagcagggaggttttccaactgttggaggcgcctttggggctgcccctttgtctggagtcactgggggcttccgagggtctccctcgaccctctgtcgtcctgggatggctgtcgggagctgtatcacctgggttctgtcccctggctctgtatcaggcactttattaaagctgggcctcagtggggtgtgtttgtctcctgctcttctggagcctggaaggaaagggcttcaggaggaggctgtgaggctggagggaccagatggaggaggccagcagctagccattgcacactggggtgatgggtgggggcggtgactgccccagacttggttttgtaatgatttgtacaggaataaacacacctacgctccggaaaaa

SEQ ID NO: 73910 - DNA, 725 bp, Homo Sapiens
cagtcgacggtaccggacatatgcccgggaattcggccattacggccggggttccttttttagctgtaaaaatacttcgtcactaaagcatgaaatttaatacagcagtatgttcttcaagttcctgaaagctataaaagtttctcatgacttgagtggttttttccctgcccaccagaggagaaagcccttgtagaattctgcagtgttacaagtgttccctacaaaaactgaaaccatcagctcctctttaacaagttggctttttaaaagcacgtaattacaatttaatggtattctgtaaagtggtgctctaggcataatttaaattctttttaatgactatatttcttcaaaactttgaaagaaaaatgtgttctttttgctgcatcctttgtaagaagactgccaacagaggaaaaaggactttacaaattaagaccatcttggtttcatttccacaaagatgagaacaaatcatggtgttaggaaaggatccttagaagaacacaagaatttgaaagcccttggtggttatcactactatatttcatatttccacagaagtgacttagccaagctctgcattttgagcctgctgactttcatttaaaaggaatgaaaggctgaaaatccaggctgctgtgtctgtagataaaggtcaaaccatgtttgagttcttcactgttgtgtccacctaaataaaactgagtaagtaatgaaaa

SEQ ID NO: 73911 - DNA, 1057 bp, Homo Sapiens
  misc_feature (79)..(113): n is a, c, g, or t
tgaaagactactatagggcgctagcgtcgttttagccgaacgaccgagcgcagcgagtagatgagcgaggaagcggcgnnnnnnnnnnnnnnnnnnnnnnnnnnnnnnnnnnncagtcgacggtaccggacatatgcccgggaattcggccattacggccggggttttcagcagttgccccgagctgttttgtgtgtaatgaagtggttctttgattaaggagctctatttcttatttaactgatatcccactgccccactccacaaaataggaaaatgaagaaatctttctctctgacttgtttacatcatttcacggaaacacatctttgtttgtaatgcagtattctttctctgtgtttgacagagatggggaggggcagaggaatttaacgaggttttaaaagaaatgttatgtttcttatgacttgtttccactcctcgtacaatgctattcttaggtttctacgaaacctaatgttagaaccgcatcctttcagctaagggagggttggatttattttccttgttttagagactacaaatttttaaatatcccattttgactgagaatattgacatataagggaagaagttttctaaattgtgaaagtctggttcttaattaacagaatttccattctcaagtatcacggttaaaagctgctgccagttagccaagacattatccaccaaattgctttgtgatttatacagggattaatcaaatctggctactataacatggggcattgtaactttaaagtagtgttttaattacagtgatgtattttagactcacattttgtgattcaaatatgttataaaggcattcttgcaccatggtaaagaatgtgtgtggtaaatctccgtttatatgtagttggaaaaaattcactgaataatgttttaatgatagggtattatgatacaatgtaaaaaacaattggttcttcagcagtacagaaagtaaactatatatgtgctatcaggaaaccccttcatactgtgtataaaattgcaatctagtgaaataaactgtatgcaatggaccatt

SEQ ID NO: 73912 - DNA, 2030 bp, Homo Sapiens
tgaggctgacagtcttgctgtaattgggagaaaacgagctgcagcacatttggcagattgagtcaccagcagccaatgtcaggggttgtgcaggcagctgaagggctcagggctccctgcctcacatggtgaaagaggaagaaagaggtcaattgggaaaattggtccctggggctgcttcctctcttcactcacaggaaggtgggtaagggcatcatctccctttgctgccaacgcttcctttgggagaggctggagagggtttataaaaatctcctagtggaaacaacctcccccactggcccccagctggcctctgctcccttccagtcacttcacagcagagttcaaatctagaaccctgtgtgtttcataggcctgagggtggtggggggaggacagggtggccagaggcaaggggtgggggatcaggggcagtggtcattcttagcagttccagggaaacagggcctttctcccaagtaccctgcacaggctcagtggcagcactggccacttgccttcccaggagggtcccaaaccccaacagagtgcctcagagtagagagggttcaagcaaggaagaccacaaagatgatgaagaagacaatgaggatgaggaagattttgaccatgagccaccggttggaggtgacagactggaagtacttgaggatctctgaatgggcggcctcaacgtccagctgggctcctagcacgttctcgtcgatcctctgaatggtttcctcctgttccttaaccatgtgtgccaactgctgaaagatggagcccaactcaacaattgtcgactcaatgttctgcatggtgtctgcccgactctggatgtaggaatcctgctcgtcaatgagctgcagctgctggctggtccgagagtccatcatgtcgatggcgacatccttggaggcatgggactctgcccccagaaccacagcaccaccgcccaggtggttaggggcaaggggcagggctgacacaggtgcccgggagaactgctctctccggctcctctgctgcttcaggttctctgtcctcacttctaaaaccgatttgaagtcattggacatagaagccagtttcgactgcaaggagaccacaatggtgttggagtgggtctgcaagtgccggccactctggctgcccttggctctcacgaaatcctggagctgagcaatttgtttgttgaggctattgatgtcctgtttgatgatatatgttagctcttcaatttccactgctttatcatcaaagagggacttgcgctttgccaagattgtcagcttctccagcttggcaaatgtgttgctaaggtctttcccaatgcgcttggccatgagggtgaattcactgcgttgtcggacagcacgcaaagctggcttatttgtctggattccattctgacgggtctgcagcgacttgcaggcagacagaaactcctgggtccgatcccggcaggacatggtgtcgcgagggggagggacgagggtcactggggggggcagaagggcgatgtcgctgctgctactgccagcagttgcaggggacaggacctgtgtctttgagagacccaggtagacaccctgatccgtgttcttagacccgtagcgtttccgcgggatcattgagacgcataacctcggactgttgtggaggggagagtgtcattccccaggcaacttctttacccaaactcccccgccccaccccaatcaacaaatccccgagccccttctgcacttctcgtggactttcgcgcccaggacgctcgcaaatcctggggcggaccagcagcggaaagggccccgcttttcccctgtcccaagtcgaacccgcttcagactcttcttccaacttggctctggcggccagagcgcgggccggggaccctgaagcagagacagggccagagccaaccccgtggtcctgagactccggcccggcccgtgtaactgccccgggccctaacccagccctttcgtttccgcggtttccttcggcccctccggagggcc

SEQ ID NO: 73913 - DNA, 272 bp, Homo Sapiens
gaagggctcagggctccctgcctcacatggtgaaagaggaagaaagaggtcaattgggaaaattggtccctggggctgcttcctctcttcactcacaggaaggtgggtaagggcatcatctccctttgctgccaacgcttcctttgggagaggctggagagggtttataaaaatctcctagtggaaacaacctcccccactggcccccagctggcctctgctcccttctgtcgtcttctcgcagccgtatagtagtagtagtaggcggccgc

SEQ ID NO: 73914 - DNA, 1836 bp, Homo Sapiens
gggcggtctcaggtgtgccgaagctctggtcagtgccatgatccggcagagcgctccacatcctaccaggagctgagtgaggagttggtccaggtggttgagaactcagagctggcagacgagcaggacaaggagacggtcagagtccaaggtccgggtatcttaccaggcctggacagcgagtccgcctccagcagcatccgcttcagcaaggcctgcctgaagaacgtcttctcggtcctactcatcttcatctacctgctgctcatggctgtggccgtcttcctggtctaccggaccatcacagactttcgtgagaaactcaagcaccctgtcatgtctgtgtcttacaaggaagtggatcgctacgatgccccaggtattgccttgtaccccggtcaggcccagttgctcagctgtaagcaccattacgaggtcattcctcctctgacaagccctggccagccgggtgacatgaattgcaccacccagaggatcaactacacggaccccttctccaatcagactgtgaaatctgccctgattgtccaggggcccccgggaagtgaaaaagcgggagctggtcttcctccagttccgcctgaacaaggagtagtgaggacttcagcgccattgattacctcctcttctcctctttccaggagtttcctgcaaagcccaaacagggtaggcttcatgcaggcctgtgagagtgcctattccagctggaagttctctgggggcttccgcacctgggtcaagatgtcactggtaaagaccaaggaggaggatgggcgggaagcagtggagttccggcaggagacaagtgtggttaactacattgaccagaggccagctgccaaaaaaagtgctcaattgttttttgtggtctttgaatggaaagatcctttcatccagaaagtccaagatatagtcactgccaatccttggaacacaattgctcttctctgtggcgccttcttggcattatttaaagcagcagagtttgccaaactgagtataaaatggatgatcaaaattagaaagagataccttaaaagaagaggtcaggcaacgagccacataagctgaagtcacctcgcgttgtttagagaactgtccacatcaatgggagctgtcatcacttccactttgtaaacggagctatcaacaatcctgtactcacttgaagaaatggggccttgctgggaggaacagcatgtaaaactggaacttctaaccccgtcccaaaagaggcggtgtagagcctaatagaagagactaatggataaacctacaagttatttaaatatttaaattattaataaactttttaaagagctggccaatgacttttgaatagggtttgtagaagatgcctttcttcctgtttggttcattgtattgtattaggttaagctctactagggtaatgaaggctctacttttcactttttaaaagtggacaaaagagtgtgattttctttttccaaaaattcctgagtatcaagacgtgcaggtcatgctttggagcctatgcactgtacacaaaggcaaaaccctatgactttggcatcatctgccattgatgtccagcctctgacatgctctttgatttgttaaatgttaaatgagactttaaggctactagaaactagtaattaagtttcttaatggactgagtagccacctacttgtccggctagaatgtttgttgatgtatgagtttagattaacactcaaaagcactaggacagatgtacatagaaggtgcctactcattgtattttgatgatttcattaacaggtaaataaaagttaatacaaaaggaaaaa

SEQ ID NO: 73915 - DNA, 1078 bp, Homo Sapiens
  misc_feature (60)..(60): n is a, c, g, or t
  misc_feature (129)..(129): n is a, c, g, or t
  misc_feature (133)..(133): n is a, c, g, or t
  misc_feature (191)..(191): n is a, c, g, or t
  misc_feature (224)..(224): n is a, c, g, or t
tagattgcctgagccagatcgcagagagagagcagtgcactgtccagcttgtccaccttntgcatctgcgagcaagcacttaccattcttaaaagttatagatgggtagattgctaaagtttaggtccntgcntaatccactctgaggaggggagaagagaggtggagatctccccagcctgtccatctcntggagagcagacgaggagttcacacagagaatntcatgtgaatgggccagcaagagctgccctgtgtccatggtgagtgtgccgggctggctgggaacaaggagcagtatgttgagtagaaagggtgtgggcgggtatagattggcctgggagtgttacagtagggagcaggcttctcccttctttctgggactcagagccccgcttcttcccactccacttgttgtcccatgaaggaagaagtggggttcctcctgacccagctgcctcttacggtttggtatgggacatgcacacacactcacatgctctcactcaccacactggagggcacacatgtaccccgcacccagcaactcctgacagaaagctcctcccacccaaatgggccaggccccagcatgatcctgaaatctgcatccgccgtggtttgtattcattgtgcatatcagggataccctcaagctggactgtgggttccaaattactcatagaggagaaaaccagagaaagatgaagaggaggagttaggtctatttgaaatgccaggggctcgctgtgaggaataggtgaaaaaaaacttttcaccagcctttgagagactagactgaccccacccttccttcagtgagcagaatcactgtggtcagtctcctgtcccagcttcagttcatgaatactcctgttcctccagtttcccatcctttgtccctgctgtcccccacttttaaagatgggtctcaacccctccccaccacgtcatgatggatggggcaaggtggtggggactaggggagcctggtatacatgcggcttcattgccaataaatttcatgcactttaaagtcctgtggcttgtgacctcttaataaagtgttagaatccaa

SEQ ID NO: 73916 - DNA, 740 bp, Homo Sapiens
  misc_feature (58)..(58): n is a, c, g, or t
tcctgtctctgagctccttctccagtttgctcctttccatcaggtatcacttatcacncacctcctcaaagaggccgtgttcatgtccaggcccacaatctcaagtagccatcctgtgattctgtatcatattatcctttttaaactctatgcagcatttactacctctgatgttttttcttctttaaggatttgattgccttatgtgacaagcccaagatctgtgacagttggagctcaaactaggcagtcttgattccagactgctctgaactagtatttgaaggaactaatgaacatgacatgttaaatgaaagtttggggacgtacactcaggatggaagcagggggacacaacagaaatgaaagaattttctgtagatctgggatctggacacctgccccccgtcatgggaaggcagtaaacaagatgctaactgatggagtgaaatccccaggagatgcagaaggcaagtgcagctaactgaggcctcaggggcaggagatgcccatcaggatgagagctatgtctttctccagtgatgactctgcttctatgaggtcaccagcagtagaaccatatcttgctggcatacacttgggatggccccgcctcctggacttccatctgtcatcaggagaacataaccatctggagtcagtacagatcatcaatccttccacatatacaagttcattttaaatttttaaaaatataatacaactgagaagtcttcatt

SEQ ID NO: 73917 - DNA, 795 bp, Homo Sapiens
  misc_feature (302)..(302): n is a, c, g, or t
gactcccaactgtgagctcatccctgagacttttgacattgttgggaatgccaccagcaggccatgttttgtctcagtgcccatctactgagggccagggtgtgccctggcattctggttgtgggcttcctggaagaggtgatcactctcacactaagactgaggaaataaaaaaggtttggtgttttcctagggagagagcatgccaggcagtggagttgcctaagcagacatccttgtgccagatttggcccctgaaagaagagatgccctcattcccaccaccaccccccctacccccnagggactgggtactaccttactggcccttacaagagtggagggcagacacagatgttgtcagcatccttattcctgctccagatgcatctctgttcatgactgtgtgagctcctgtccttttcctggagaccctgtgtcgggctgttaaagagaatgagttaccaagaaggaatgacgtgcccctgcgaatcagggaccaacaggagagagctcttgagtgggctagtgactccccctgcagcctggtggagatggtgtgaggagcgaagagccctctgctccaggatttgggttgaaaaacagagagagaagtggggagttgccacaggagctaacacgctgggaggcagttgggggcgggtgaactttgtgtagccgaggccgcaccctccctcattccaggctcattcattttcatgctccattgccagactcttgctgggagcccgtccagaatgtcctcccaataaaactccatccaaaaacgcaaaa

SEQ ID NO: 73918 - DNA, 1121 bp, Homo Sapiens
  misc_feature (372)..(411): n is a, c, g, or t
aaaaattaaaacatccaaatgaacaaacaggacagacaaaataaaactattaaaagagagagagaaattctaattccctgccagccccaccccccgcccaccccagttctccctttgccaatgtgactattggagaaagttctacaccatgcagaaatcaggggccgcgcagcctccggcgcaacacgagctgggctcaggaagggagcgagggcacgccaggagccagagggaagtcgacttcagaattctgcatcatccctcctccacgcaggacgttttctgagcagagctgggtgttaggatggcagaccatgtgggtgacaggcaccaagacagcagcaggggggtggccagggtccccagcagagnnnnnnnnnnnnnnnnnnnnnnnnnnnnnnnnnnnnnnnnccggcagccacaagcggctcccaatcagcatcttaaaagttttgtggtgagtatcagggtctgaggtcactatgctgtgggtatttctgggggcccattacctttctgttaagatttcccaggtaatttaaaagggagtaacaggagctgccactcgtgagcgcctcacagtagcttaggcttcagccctgcagggaccccgccctttcctctgacttcttgtctgtaacaaggtgctggtgtggatttggatggggagccgacactgggtgcttccctgacatgtgctggtctctggttacgagatgagggagcccacacctcagagcaaaagaagagaaccagtacagaagcaacttttaaaaatatgcctggttgagagacctgcccctgcctacatctttcagtggggtgtgtccatcctcctgctttcccacatcacattgaaagagcactaatgacggggaggatggagacaatgtttggatttacttaggaagcacgtaccctaaacactggtgcatgaagaatccccccggagctcttatcctacataatgcctgcctctacaccacaatgcatgctcaccacttagttttaaagaagatgcaaacagatctagaaagcctcaaccagctgctccatttaagagagggagtttaaactatagggactcaaaacatcatttctgggagactgtgggccaagaa

SEQ ID NO: 73919 - DNA, 696 bp, Homo Sapiens
ctgcaggtgggcgtgccacctatgactctgcccatcatcctcaaccctgcgctcatcgaggccacctcaccagtgcccctccgggccacaccccgccccacagatccaatacccacctctgaggtcaactaaggcaggtcactcagagatcaggaccagtgcttcccaccaggctttccttgaccccacttctggctgtcctgcgggccacaagctcttcaggccaagtcagagctgctgttgctgccacttggatggggacctgaaaaagagaatgttgatagccccagctaagacccccaatcagctgtgggacctttttcctcctctgcgctccattcctgggggttcagcctgagagtgaactcagctgtcatctgcagcctctgcctccagcccggcagctctggggaggcatccgtgtgccggccctgcagtgcctgcccacggtcaggcattgaaaactaagcccaaccactctgcactttgtttcccactcccattagccctgggccacctcctccagttcttcctcttttactaattagttggtcagtttggagagttgactggcaccatggagggtaggcaggtgggggctgggtgggggactgcccacaggagcatgtacatatggaaaaacagaacaacagtggactttttatgatataataaatgtcttagtaccagcaaaaa

SEQ ID NO: 73920 - DNA, 1389 bp, Homo Sapiens
  misc_feature (290)..(315): n is a, c, g, or t
  misc_feature (336)..(381): n is a, c, g, or t
  misc_feature (887)..(924): n is a, c, g, or t
  misc_feature (926)..(942): n is a, c, g, or t
cagtcgacggtaccggacatatgcccgggaattcggccattacggccggggcaagcgggttgtcattgaagatgataggattgatgacgtgctgaaaaatatgaccgacaaggcacctcctggtgtctaactcccccaaagacaatgagttaagggagagaataagaacggcggtaacagttattggcaaaaagcatgaaaagagaaagcactttgaaatttattactagcttgctacccacgatgaaatcaacaacctgtatctggtatcaggccgggagacagatgannnnnnnnnnnnnnnnnnnnnnnnnnaaggctctgggctcctctgcnnnnnnnnnnnnnnnnnnnnnnnnnnnnnnnnnnnnnnnnnnnnnnttcactatatacacatataaagaaataaaaagaagtctcagttgcagctatttgtcaaaattaatatccatttctttttatatacggtgaatattgcgcaattatagatctggattttgaaccacttaatgaagcggcaacaccaggtgttttgaggtgttggcattcttcgctgatttggctgttcccaatgtttacattatttaatcttgcaaaaatggttctgtgcacttggatgtgaaatgctgtccagtttaatttttattatgttgttatccttggatgtacaaaaaattcagaaaatgatctctgtagatattctgttttatttgggtcatctttagaagttatcaggaatgtgtttaaaacaagaagagaacttttctaaggaatgatacatagaaaagatttcattttaaaatgagttgtaaagcttgtgtttctttgttgctgcaagctatctgcccaagttaatgcaaatggacacattttttatgtcagaaaannnnnnnnnnnnnnnnnnnnnnnnnnnnnnnnnnnnnngnnnnnnnnnnnnnnnnntgcttgagctttttctaacttccccttgcagtctgttgtgtgagcagcctgtttatttctctaatattatgtcagtttattctctttaatggactgtaaaaaaatgtaatcacaagagtgccaaatatcttgaaatgccaaaaggcattttagtttcttttctctgtgctctgagtccacgtacaggaatgcttggagtgtcttttctgttatttatagggattctcttaaggcacaccagctgcctgttttgcatggtatttgcaaaaatgcctcttgcgtgaggaaatcttttaccattttttgtttgcaactttggacctcaagaggtttcccttcccttccccgttccctcttttcttaattcaatattctgtatgttgcaccttgaaccagcacacagggctatttctccaatgtacaataaaagaattgttcctgtgtctc

SEQ ID NO: 73921 - DNA, 666 bp, Homo Sapiens
  misc_feature (159)..(196): n is a, c, g, or t
  misc_feature (198)..(214): n is a, c, g, or t
gttatcaggaatgtgttaaaacaagaagagaacttttctaaggaatgatacatagaaaagattttattttaaaatgagttgtaaagcttgtgtttctgtgttgctgcaagctatctgcccaagttaatgcaaatggacacattttttatgtcagaaaannnnnnnnnnnnnnnnnnnnnnnnnnnnnnnnnnnnnngnnnnnnnnnnnnnnnnntgcttgagctttttctaacttccccttgcagtctgttgtgtgagcagcctgtttatttctctaatattatgtcagtttattctctttaatggactgtaaaaaaatgtaatcacaagagtgccaaatatcttgaaatgccaaaaggcattttagtttcttttctctgtgctctgagtccacgtacaggaatgcttggagtgtcttttctgttatttatagggattctcttaaggcacaccagctgcctgttttgcatggtatttgcaaaaatgcctcttgcgtgaggaaatcttttaccattttttgtttgcaactttggacctcaagaggtttcccttcccttccccgttccctcttttcttaattcaatattctgtatgttgcaccttgaaccagcacacagggctatttctccaatgtacaataaaagaattgttcctgtgtctcaaaaa

SEQ ID NO: 73922 - DNA, 790 bp, Homo Sapiens
  misc_feature (24)..(24): n is a, c, g, or t
actgtgtgaagagatgatactacnaaggagtgtcataacctgtgagctgactgaatgttggtaggtgctccattacaatccaggaaagtctgtgttactgatatttgtgtggaaatctttatttcacttcaatttaaccattagatggtaaaattaagatgctacttgttggtaaaaattggtggactggtttcaatgggtaaatgtgttgtggcaaattaatgtgttggaatattgctctttgtgaatttgtgcttaagtcaatgaatgtgtagtatctccttctgacaagcattccctattgggattttaaagctatgtgcacagaatattagtctcttctacatgttttatttttctatttataattcccttttttgttgttatattttatacacagaatagatcttttttctaacacatatttgaactgaataacagacttaaagaaagcctttgttcacattgctatttacttttgtgtttgggggaaaatacgagggattgattttaaataaaaaacattccatctttcatttaatatcaatatcaaaagaagaagacaaacatctatctttctcatctatatttaagtacctttttgtaatgtagtatcaaagttttttaggtaatgcaaaattttacaaatcatttgtggaatgaatggtaaaactaatctgatgaaatggaaaattattctgcaatattgtaattcatagtttgacttttcataagcaaataaatccctaggatgtaatcaggacttcaaatgtgtaattaaatttttttt

SEQ ID NO: 73923 - DNA, 2284 bp, Homo Sapiens
ggagcgagagcgccccccgagcagcgcccgcgccctccgcgccttctccgccgggacctcgagcgaaagacgcccgcccgccgcccagccctcgcctccctgcccaccgggcacaccgcgccgccaccccgaccccgctgcgcacggcctgtccgctgcacaccagcttgttggcgtcttcgtcgccgcgctcgccccgggctactcctgcgcgccacaatgagctcccgcatcgccagggcgctcgccttagtcgtcacccttctccacttgaccaggctggcgctctccacctgccccgctgcctgccactgccccctggaggcgcccaagtgcgcgccgggagtcgggctggtccgggacggctgcggctgctgtaaggtctgcgccaagcagctcaacgaggactgcagcaaaacgcagccctgcgaccacaccaaggggctggaatgcaacttcggcgccagctccaccgctctgaaggggatctgcagagctcagtcagagggcagaccctgtgaatataactccagaatctaccaaaacggggaaagtttccagcccaactgtaaacatcagtgcacatgtattgatggcgccgtgggctgcattcctctgtgtccccaagaactatctctccccaacttgggctgtcccaaccctcggctggtcaaagttaccgggcagtgctgcgaggagtgggtctgtgacgaggatagtatcaaggaccccatggaggaccaggacggcctccttggcaaggagctgggattcgatgcctccgaggtggagttgacgagaaacaatgaattgattgcagttggaaaaggcagctcactgaagcggctccctgtttttggaatggagcctcgcatcctatacaaccctttacaaggccagaaatgtattgttcaaacaacttcatggtcccagtgctcaaagacctgtggaactggtatctccacacgagttaccaatgacaaccctgagtgccgccttgtgaaagaaacccggatttgtgaggtgcggccttgtggacagccagtgtacagcagcctgaaaaagggcaagaaatgcagcaagaccaagaaatcccccgaaccagtcaggtttacttacgctggatgtttgagtgtgaagaaataccggcccaagtactgcggttcctgcgtggacggccgatgctgcacgccccagctgaccaggactgtgaagatgcggttccgctgcgaagatggggagacattttccaagaacgtcatgatgatccagtcctgcaaatgcaactacaactgcccgcatgccaatgaagcagcgtttcccttctacaggctgttcaatgacattcacaaatttagggactaaatgctacctgggtttccagggcacacctagacaaacaagggagaagagtgtcagaatcagaatcatggagaaaatgggcgggggtggtgtgggtgatgggactcattgtagaaaggaagccttgctcattcttgaggagcattaaggtatttcgaaactgccaagggtgctggtgcggatggacactaatgcagccacgattggagaatactttgcttcatagtattggagcacatgttactgcttcattttggagcttgtggagttgatgactttctgttttctgtttgtaaattatttgctaagcatattttctctaggcttttttccttttggggttctacagtcgtaaaagagataataagattagttggacagtttaaagcttttattcgtcctttgacaaaagtaaatgggagggcattccatcccttcctgaagggggacactccatgagtgtctgtgagaggcagctatctgcactctaaactgcaaacagaaatcaggtgttttaagactgaatgttttatttatcaaaatgtagcttttggggagggaggggaaatgtaatactggaataatttgtaaatgattttaattttatattcagtgaaaagattttatttatggaattaaccatttaataaagaaatatttacctaatatctgagtgtatgccattcggtatttttagaggtgctccaaagtcattaggaacaacctagctcacgtactcaattattcaaacaggacttattgggatacagcagtgaattaagctattaaaataagataatgattgcttttataccttcagtagagaaaagtctttgcatataaagtaatgtttaaaaaacatgtattgaacacgacattgtatgaagcacaataaagattctgaagctaaatttgtgattta

SEQ ID NO: 73924 - DNA, 1801 bp, Homo Sapiens
aacacacgaaaaagcatggactctagacccctggtgatacaagcaggctggtacgctcggatttccgggatatcgtcgaccacgcgttcggtctttaaacacaagatataggtgctgtgtagcctgatagtgtgaaatgtttaatgagggagttgtaccacaaacagtactacaatgattctgaagcacagtgtattcagacagatacagtgaaccaagtgcaatatgtaaggatgaaagaagaagagatgacaaagaaatccaagtaaatgccttgtcttagcaaatgtttttatattaaatcataaggaaggaactacttgccttaaatgttaatatcaaaagagttttctaacaaggttaataccttagttcttaacattttttttctttatgtgtagtgttttcatgctaccttggtaggaaacttatttacaaaccatattaaaaggctaatttaaatataaataatataaagtgctctgaataaagcagaaatatattacagttcattccacagaaagcatccaaaccacccaaatgaccaaggcatatatagtatttggaggaatcaggggtttggaaggagtagggaggagaatgaaggaaaatgcaaccagcatgattatagtgtgttcatttagataaaagtagaaggcacaggagaggtagcaaaggccaggcttttctttggttttcttcaaacataggtgaaaaaaacactgccattcacaagtcaaggaacccagggccagctggaagtgtggagcacacatgctgtggagcacacatgctgtggagattgcagtgtgtctgaggtttgtgtagtagtggaagattttaggtatgtagagcaagttgaaaatggattgagactgcatggtggcataaatgagaaattgcctgtagcatctagtctacttgaaggaagtggagacataaggagagacaaaaacaggtttgtgccataaagtattttttcaaagacaccaagatgtggtaaatgaaaattattagttcacttccctgctgccatgaaactttgccttaagaaggtgctggattccaaggtttgtaaaggcatctcggtaaagactgctttttgaatgcatatgattttgcatcagctagactgagttgattctgaccagacttgatggttttaagtcggaaccgataaattttaaaaaggagaaaaaataatttgacctagtagtataaaacatgaggctttaatggtactttgctatgaaaagaaaacactggtatttccttatgcaaaacacatgtatctttcattatttataagtggcctctcttagctcagttactcaattcatacgtagtattttttaacaataattttatatctgtgtaccaccccatatatttcatattactgtttcacatgtacagctttctacttctttgtaagaacaaccaacaacccaaggtttaagtgattaataggcttgagcaccgggtggcagatgttctatgcagtgtggttcaagtttctttgaccgacttatatgcattgtaatatggaatctaagataccatacacagtctctcatggacctatctctatggtagaattatgacttatgtcttactgtggcaaaattttctgaaatgtgaccttttttggctgattcgctgggttggggactaacttagcattaatgtggcacctttatctggccttctcacgaaacagtctatcatcaatcatatattcggattggtgtgcgggtaagggggttacctccataatcttgccattcacgaccacaaacac

SEQ ID NO: 73925 - DNA, 987 bp, Homo Sapiens
cgatgggtccccgtagtttcccttagagggccttcccaagatgactccgatcttgattgcccagaggtaccgaccgccctcctgtgaatgtggccccatccaacaagctctccccccatcagaaggccttgtccaccctgcttggttccctcctgcccctgaaaatgcaattgaccccctatgagattagtatggctatttctgtctgctgaaccagtagagaaatgagtagtttctcgagtcagcagctttagaatctggggaagcccatacatagcttctgagagctaagagggccctgaaaggtttgcttgttaatagtgaggtccagaggggaaggcaaatttggaagtcagatggttcaatccttgccggagttcaaggctccatccagcaagatatactagccaacttttaagcatgatggcaaggcactgctgaaagaggctttggccagtagaacaattaccattgcacacgtacaatatgatagaaagcactactgtccaaaccaaccagacactacaatctgctatttatttgacaaagtcagtttccagagagaatctaggcaaccatatagttttgaaggactagatgaaacctcaagtctcacaccagtcagctgttaacatccaatcaaggaagtcatttggactttcccatactataccttctcttggtaataaaattgtatgcaattgttgccatgactacatacaactgtatcctatttgtgctactttcctcactgtggccagcagagggctcacaagctttatttccacagctgctgatccagtgacaattcatgaaggaaataaatcataggcatgctagcttatgcgtcatagaaaacgtttttacaactactacgtccactgccctgaagaaactagtcttggttccccggacgcgtgggtcgacgatatcccgggaaatccggaccggtaccagcctgctttttttaccactgttatatgcaca

SEQ ID NO: 73926 - DNA, 972 bp, Homo Sapiens
  misc_feature (847)..(847): n is a, c, g, or t
ggactatagacagtggtaaaaaaagcaggctggtaccggtccggatttcccgggatatcgtcgacccacgcgtcgggagagacaaaaacaggtttgtgccataaagtattttttcaaagacaccaagatgtggtaaatgaaaattattagttcacttccctgctgccatgaaactttgccttaagaaggtgctggattccaaggtttgtaaaggcatctcggtaaagactgctttttgaatgcatatgatttgcatcagctagactgagttgattctgaccagacttgatggttttaagtcggaaccgataaattttaaaaaggagaaaaaataatttgacctagtagtataaaacatgaggctttaatggtactttgctatgaaaagaaaacactgtattccttatgcaaaacacatgtatctttcattatttataagtggcctctcttagctcagttactcaattcatacgtagtattttttaaaataattttatatctgtgtaccaccccatatatttcatattactgtttcacatgtacagctttctacttctttgtaagaacaccaaccaaccaaggtttaagtgattaataggcttgagcaccgggtggcagatgttctatgcagtgtggttcaagtttctttgaccgcacttatatgcattgctaatatggaatttaagataccatacacagtctctcatggacctatctctattgtagaattatgacttatgtcttacttggcaaatttttctgaatgtgacctttttttgctgatttgctgggtttgggattaactagcattattttgccacctttatattgtatttataaaaaaaangtactatcaatcaatcatactactttggattgttgtgctggtgtaatgtggatttaacatcaataaatatttgacaaataatagttgcagttttgtgaagcaaaataaatattcagttttaaaaa

SEQ ID NO: 73927 - DNA, 1231 bp, Homo Sapiens
  misc_feature (969)..(1131): n is a, c, g, or t
  misc_feature (1148)..(1156): n is a, c, g, or t
gatatcaaggcattgtactataacagtggtaaaaaaagcaggctggtaccggtccggaatttcccgggatatcgtcgacccacgcgtccgatttatccaaggaagaggaggaactgtcttcccagatgtccagctttaacgaagccatgactcagatcagggagctggaggagaaggctatggaagagctcaaggagatcatacagcaaggaccagactggcttgagctctctgagatgaccgagcagccagactatgacctggagacctttgtgaacaaagcggaatctgctctggcccagcaagccaagcatttctcagccctgcgagatgtcatcaaggccttgcgcctggccatgcagctggaagagcaggctagcagacaaataagcagcaagaaacggccccagtgacgactgcaaataaaaatctgtttggtttgacacccagcctcttccctggccctccccagagaactttgggtacctggtgggtctaggcagggtctgagctgggacaggttctggtaaatgccaagtatgggggcatctgggcccagggcagctggggagggggtcagagtgacatgggacactccttttctgttcctcagttgtcgccctcacgagaggaaggagctcttagttacccttttgtgttgcccttctttccatcaaggggaatgttctcagcatagagctttctccgcagcatcctgcctgcgtggactggctgctaatggagagctccctggggttgtcctggctctggggagagagacggagcctttagtacagctatctgctggctctaaaccttctacgcctttgggccgagcactgaatgtcttgtactttaaaaaaatgtttctgagacctctttctactttactgtctccctagagatcctagaggatccctactgttttctgttttatgtgtttatacattgtatgtaacaataaagagnnnnnnnnnnnnnnnnnnnnnnnnnnnnnnnnnnnnnnnnnnnnnnnnnnnnnnnnnnnnnnnnnnnnnnnnnnnnnnnnnnnnnnnnnnnnnnnnnnnnnnnnnnnnnnnnnnnnnnnnnnnnnnnnnnnnnnnnnnnnnnnnnnnnnnnnnnnnnnnnnnntttgtggggcccccctnnnnnnnnngaaaaattttttaaaccctttttttgggggcgcgggcccccaaggagaaggagaaagggggaaatttgtgtcccc

SEQ ID NO: 73928 - DNA, 1010 bp, Homo Sapiens
  misc_feature (799)..(799): n is a, c, g, or t
  misc_feature (812)..(813): n is a, c, g, or t
  misc_feature (830)..(830): n is a, c, g, or t
  misc_feature (933)..(933): n is a, c, g, or t
gggggtttacgcggcgttaagacttcgtagggttagcgaaattgaggtttcttggtattgcgcgtttctcttccttgctgactctccgaatggccatggactcgtcgcttcaggcccgcctgtttcccggtctcgctatcaagatccaacgcagtaatggtttaattcacagtgccaatgtaaggactgtgaacttggagaaatcctgtgtttcagtggaatgggcagaaggaggtgccacaaagggcaaagagattgattttgatgatgtggctgcaataaacccagaactcttacagcttcttcccttacatccgaaggacaatctgcccttgcaggaaaatgtaacaatccagaaacaaaaacggagatccgtcaactccaaaattcctgctccaaaagaaagtcttcgaagccgctccactcgcatgtccactgtctcagagcttcgcatcacggctcaggagaatgacatggaggtggagctgcctgcagctgcaaactcccgcaagcagttttcagttcctcctgcccccactaggccttcctgccctgcagtggctgaaataccattgaggatggtcagcgaggagacggaagagcaagtccattccatccgaggcagctcttctgcaaaccctgtgaactcagttcggaggaaatcatgtcttgtgaaggaagtggaaaaaatgaagaacaagcgagaagagaagaaggcccagaactctgaaatgagaatgaagagagctcaggagtatgacagtagttttccaaactgggaatttgcccgaatgattanagaatttcgggcnntactttggaatgtcatnccacttactatgactgaatcctatcgaagagcacagaaaatatgtggtctgggtgttaggaaacgcccactggaataagcaagaaattggccaagaaaagaanatttgatggtgatttccaattccctagcaagtggtctccctctttggtacattgaacccccaagtttgaaagtggaa

SEQ ID NO: 73929 - DNA, 2397 bp, Homo Sapiens
gtagcgaggcctgggtggcgaattcggcacgaggcttcaggcccgcctgtttcccggtctcgctatcaagatccaacgcagtaatggtgaggagcggggtccctaggtcaaggggactcgtgagcggtttaattcacagtgccaatgtaaggactgtgaacttggagaaatcctgtgtttcagtggaatgggcagaaggaggtgccacaaagggcaaagagattgattttgatgatgtggctgcaataaacccagaactcttacagcttcttcccttacatccgaaggacaatctgcccttgcaggaaaatgtaacaatccagaaacaaaaacggagatccgtcaactccaaaattcctgctccaaaagaaagtcttcgaagccgctccactcgcatgtccactgtctcagagcttcgcatcacggctcaggagaatgacatggaggtggagctgcctgcagctgcaaactcccgcaagcagttttcagttcctcctgcccccactaggccttcctgccctgcagtggctgaaataccattgaggatggtcagcgaggagatggaagagcaagtccattccatccgaggcagctcttctgcaaaccctgtgaactcagttcggaggaaatcatgtcttgtgaaggaagtggaaaaaatgaagaacaagcgagaagagaagaaggcccagaactctgaaatgagaatgaagagagctcaggagtatgacagtagttttccaaactgggaatttgcccgaatgattaaagaatttcgggctactttggaatgtcatccacttactatgactgatcctatcgaagagcacagaatatgtgtctgtgttaggaaacgcccactgaataagcaagaattggccaagaaagaaattgatgtgatttccattcctagcaagtgtctcctcttggtacatgaacccaagttgaaagtggacttaacaaagtatctggagaaccaagcattctgctttgactttgcatttgatgaaacagcttcgaatgaagttgtctacaggttcacagcaaggccactggtacagacaatctttgaaggtggaaaagcaacttgttttgcatatggccagacaggaagtggcaagacacatactatgggcggagacctctctgggaaagcccagaatgcatccaaagggatctatgccatggcctcccgggacgtcttcctcctgaagaatcaaccctgctaccggaagttgggcctgggaagtctatgtgacattcttcgagatctacaatggggaagctgtttgacctgctcaacaagaaagccaagcctgcgcgtgctgggaggacggcaagcaacaggtgcaaatggttggggctgcaggaccatctgggtaactctgctgatgatgtcatcaagatgatcgacatgggcagcgcctgcagaacctctgggcagacatttgccaactccaattcctcccgctcccacgcgtgcttccaaattattcttcgagctaaagggagaatgcatggcaagttctctttggtagatctggcagggaatgagcgaggcgcggacacttccagtgctgaccggcagacccgcatggagggcgcagaaatcaacaagagtctcttagccctgaaggagtgcatcagggccctgggacagaacaaggctcacaccccgttccgtgagagcaagctgacacaggtgctgagggactccttcattggggagaactctaggacttgcatgattgccacgatctcaccaggcataagctcctgtgaatatactttaaacaccctgagatatgcagacagggtcaaggagctgagcccccacagtgggcccagtggagagcagttgattcaaatggaaacagaagagatggaagcctgctctaacggggcgctgattccaggcaatttatccaaggaagaggaggaactgtcttcccagatgtccagctttaacgaagccatgactcagatcagggagctggaggagaaggctatggaagagctcaaggagatcatacagcaaggaccagactggcttgagctctctgagatgaccgagcagccagactatgacctggagacctttgtgaacaaagcggaatctgctctggcccagcaagccaagcatttctcagccctgcgagatgtcatcaaggccttgcgcctggccatgcagctggaagagcaggctagcagacaaataagcagcaagaaacggccccagtgacgactgcaaataaaaatctgtttggtttgacacccagcctcttccctggccctccccagagaactttggggtacctggtggggtctaggcagggtctgaagctggggaagggttctggttaaatgcccaagtatggggggcatctgggcccagggcag

SEQ ID NO: 73930 - DNA, 815 bp, Homo Sapiens
  misc_feature (67)..(67): n is a, c, g, or t
tcctacttctggtggtttgagaatgacatggggtaccactccaaattgtcagggtgcccgtctctcncacgactcaagtgcttatcggcatgctgggaggagactctacaggaagttcttgcgctactacagcaagaaccgccaaaccgaggctgtcaggtgctacgagctgctggccctgcacctgtctgtcatccccactgacctgctggtgcagcaggccggccagctggcccggcgcctctgggaggcctcccgtatccccctgctctaggccaaggtggccgcagtctgcctttgcatcctgtcctccagccacccttgcttgccactgttccccatgacgagagcctcctgtctgcagtggccatcctgaggatagggcagagtgcccagggtggccccagggcttctaaaaccccacctagaccaccctccatgtcaggtactgagcaaggccccagatccttctctctggaggaagagggaagcccaggggtcctgtttgtaaaacaacggtggcaacagctcctcttccagagctgtctctgcctttatcctgggagatggggaggaagccccatctctgctgttccccgcgtggaggaagcccacccagcaagctctctcctaccccaggtaaaaggtgctcctttgcctgggtttgaattccagcgctgccacttcctctctgcacctcctggcaagtttcttctattccccacatttaaagcgatggcacctccgtcccagggtggtgtgaggattacccagtgtggtaggtgctcaataaatgttggtcattgttatcactg

SEQ ID NO: 73931 - DNA, 725 bp, Homo Sapiens
  misc_feature (413)..(413): n is a, c, g, or t
cactgaagtagtaggccagagtttggagctgctgcatctgctgttcctgtatcagccagaggtataggtttctggcccacatcctcagtcacccctgttctgaagccacacagtggctccccttcccatccagtcctaactatagttgtttctctgggcctggctaacctatataggttccatgtcagaaacttcatcctcttgttggggaatgcaccctctggagtaggctgacccatgaggctgtgggaattgagtcttaggacacagagaccaggtgtgttgaattttcttccctgcccctaggctgttcaggtcttcctgcagcagtcagggctgcaagccctggaaaggcatcaggaagaggcccagctccaggatcgtgtgtatgctctccagcagacagctcttcnaagggtgatcttgtttctcaatgtcactcattcccctctctcttaacatcaagcttgtttgtccagtagagcctttggagatttaggaccataatgaggtctcatgttctctgctcccacacctaagccaagacctttgggtcccagctcctccccttccactcagcactatccaggcaggaggaccaaaagggactcagtgtggtctacttactctggggccctagaatccctgcccccccgccacccttcatgtttgcttcagcagctggtagcttttgatgagacagaataaagttttatttttatatt

SEQ ID NO: 73932 - DNA, 628 bp, Homo Sapiens
acagctgttgccagtatctaacgtggtgagcgtaatggtgctcacagttctgtgcaatgttgcagaaaagggtcctgcttagtgccagcggctgtggccagggcccctgcttcccgccttgctgcacacactagccttttctgacactgaagtagtaggccagagtttggagctgctgcatctgctgttcctgtatcagccagaggctgttcaggtcttcctgcagcagtcagggctgcaagccctggaaaggcatcaggaagaggcccagctccaggatcgtgtgtatgctctccagcagacagctcttcaagggtgatcttgtttctcaatgtcactcattcccctctctcttaacatcaagcttgtttgtccagtagagcctttggagatttaggaccataatgaggtctcatgttctctgctcccacacctaagccaagacctttgggtcccagctcctccccttccactcagcactatccaggcaggaggaccaaaagggactcagtgtggtctacttactctggggccctagaatccctgcccccccgccacccttcatgtttgcttcagcagctggtagcttttgatgagacagaataaagttttatttttatattaagct

SEQ ID NO: 73933 - DNA, 1252 bp, Homo Sapiens
gcccacaccttccttgctgatttgatatttttggtcatggagaagggtgggattgggtgggaatggggtggaagggtgatggggagctaatgaactagggagaaaaactttccatgtgtgcggtatcgtctttcagaatgtctcctggcatcctaaccatgtaatatgacaattgggggtggggttgaaatagcccataaagacctgtcttcacaacacttgcattgtagagaaaggcttcttatatccttttcaatagactgccctggctctttcctaggccttccactacctcctttctttctcccactttctaggatcatttttatgtaaagtcacatatcccaggccctcaggttgaatccagagctgtagaggttacagtagcatcaccagccttgggggtccagagcctaatttatattcactatccttccaagtcccgggtagcagaagggttgccatagatctcagtttgatcaaaaagaaggcttagaattctgcagttaagctgaggtttaaactaaaaaatgtttccttgggtcagtggttttgaggtccagtagctaggcttttctcttttgtccttcctgttggaatgaaaacatttcgattttccttcatctgtgactggtgccatagacacaggtttatagttttaacttacagtattgtttgaaatttacctgtttttcttgtcaaacctgagcactcctcctgctgaagtttcttatttaattccagagtactgtcctctactctaaggcattacttttaagtgtattatgaaggcagttttcaaaggatatgaccagttggggtaattcaaattaaaaaggaaaagatttgtttggaagtaactggtgtctctaagaggaatttttagatgtcagtttggaggctctttcccccctcaattgagagctcttgttattcagagctccaagactagacctggctaacaaacataggagacaaagttaggaaacattgatacaagctttgtacagagatttgtacatttgtgtaataggccttttcatgctttatgtgtagctttttacctgtaacctttattacattgtaaattaaacgtaacttttgtcatttgggtgcaggctgtgaatttgtctctcagtcactgattgccactgccatctggaaatgtttgctaaaggcacagtcactgggcttgggaggcaatgctccatccccattatattacaaataaagatgccctaaatgaaaaaaa

SEQ ID NO: 73934 - DNA, 1582 bp, Homo Sapiens
  misc_feature (60)..(74): n is a, c, g, or t
  misc_feature (197)..(261): n is a, c, g, or t
tttttcaccaagaaaaacaaagtatgcttttattccctttgtcaagctcagttttagggnnnnnnnnnnnnnnnatagtgacaatccatagatatagacattcctaaaagaaaaataaataattcagtagatatatgtcactgttacctgaatatggaatgaatttgatgttttttattttgttgagacagggtctnnnnnnnnnnnnnnnnnnnnnnnnnnnnnnnnnnnnnnnnnnnnnnnnnnnnnnnnnnnnnnnnngctcgtgatcctcctgcctcaacctcgcaagtagcttgggactacaggcgtgtgccaccagtcctggctaattttttgtagatataaggtctcatgatattgcccaggctgaatttgatgttatttcaagttgattttcatgtgtttgggagcttgtcttgttctcaactactacgcaggtagacagtcttcccccagagactcattagattgcaatatagaggcactttctcatttccctattgttcctaatacagaattgtagagctggagagtaccttcagttttctaaatctattctcaaacaggatatcactaacctctttagaatcattcctcagtatacatcaatttattgagaactgcctaatactcaagaaattaaatcctgagttcagtaggctgtgttccaagcaggaattattttcacttaccaaaatatctcctattacctcaaggtatccttgttgaggaatgctgaaaactaaattttaagtatcaagtctagaccatagagtgctttggtgggagtattttgattacctcctacccatcagaagcaggcagctaatattgtgaactgagtatttttgtcaaaagtcacagggaagagactacagaagaatgagaagggtcaaaaggacctagtgtggcttactacatggatcttgtctcttggaggtctgtcgtagaagaagaaacaaatagaggtgatgaagacacagaacaggctcagtcagcatcctcacccagagatggcaacatctattaagaccaatgcaataccttttcatcttcagcaaatgttgtttcatctgtttttgatccttggcattgtcaaaaacttaactgcaggtccagtgtatatttttccttatttttcccttttagctatctgctaaagtgagtaaatgccacaactgtacttttccaaagaaaaagaactattgacaacttatagcctgtcatgcaggtcatgtttcaaatcaaggctgaaattttcaacagctgtgggaaaaactaaaacacagaaatactgtacagtattagtgtttttttaaagaaattgttagtgcattattgagtatactaaatatctgtgattaaataaattagttctaacttttgattttgggagccccaaaataaaagggagtgttgttttcatggttatgccttgtttgtggagtcaagtgttgatatacttgaggcatgttatgtgtcttctaattaatatttttatcaccttgaatttgtgtctcttccaagcattaaagatactatggatcttaaattccttattaaaaaaatgcaagtgtga

SEQ ID NO: 73935 - DNA, 677 bp, Homo Sapiens
ttcaggatcaagccatccaggatttagggacaacccaagaggtctttagtcctctggcataatttagacatgttttggaagagcatgagttccatatctgagatgagatttaagactttcagtgcagatagtacaagccatttcttcagggttcctctgggggcagctccttcatgaggtcccacctccggggaggggcacagggctccagatagtaagcacttaaggcaaacagtggatggcaccaacttttaaaggtgactctattaatggcttcacctctaaattatatttttacagatatgcacctatgcaacttaacgtggctcttctaagcaggtgaggacttcctcctcaatgctctctataaaaattatttgtgttctatatagtgagttttaccagtaaatgtggcttaatattttaattcttagaatgtgtcttctctacgtgatgtgactaaattctgttttgtttgtggaatgactagcacaggccgactccctctctccctcacttaacaaaagaccaatgagctgttaatcgagctgttatctccatggtattacttgctaaatgcactgatttcataagtatgtggaatccttttccttttgaatctgtatatcatatataagactgaatctacttaataaacactgaacaacaaaccgaaa

SEQ ID NO: 73936 - DNA, 981 bp, Homo Sapiens
gggaataacctggcccacgtgacacctgtgcccggcagagttccttcttgcgcttcctccgtgccaacctggtccaatcgagcatacccagcgcttggcacaccgctcattcattttcacggctgcatccgacaagctgcctcttgcccccagctctggcgtctcccatccaactgccagcagggccaccgtgcccaagccgcgtttgctccagctcctgcagctgcgcactgccgccgagcagggctgcctgcgaggcccgcccagctcggcttccaccgccagcacctcccgcgaggcggcgtgcgaaggcctgggttcaccccgtgcactgtgctccggtagcgcgcgaagtcgtagtcaggcccgctgcgcaggtactggcggtggcctctgcggcatgtggggaccctgaggccgcgcccccaggctctcaggccctgcaccggcgccaaccacctgaaaggcccccaggaagtgtccccagacaccagaggggaggactggtaggtaggaaggacgcttcctgactcccgcaggggaacgcgagacaggcccacccctgctcttggggaggagagagaagccacgaagagtgagtcgtcgggtagtggggacgtgctgtggggcctttttcgtgaaggtgaggacccggtgccccgaaatccccgccccatctgactctgcagccacacaaggacccagctcctcctccaggcacgcccgccgagaacacgcccacgcccggagcgggcgggggaccgaaccctgagcccctccgcgcccccactcactcctccagtcggcggaagccctgcgcgcgctcagcctgcagctggtggatgcgctgcaccagcgtccggatcggggcgtctttccagggccacgccggctcctcgcgtccccgagcttcggtgcctcgtgccgaattcgccacccaggcctcgctaccttaaaccgtatgagtactgcgcaggtcaa

SEQ ID NO: 73937 - DNA, 812 bp, Homo Sapiens
gaacggcagtaactataacggttctaaggtagcgaggcctgggtggcgaattcggcacgaggccgcggcggagcctacggtccctgcagtgcctgctgctgaggaggccaccgaagctcggggacgcgaggagccggcgtggccctggaaagacgccccgatccggacgctggtgcagcgcatccaccagctgcaggctgagcgcgcgcagggcttccgccgactggaggagtggttggcgccggtgcagggcctgagagcctgggggcgcggcctcagggtccccacatgccgcagaggccaccgccagtacctgcgcagcggccctgactacgacttcgcgcgctaccggagcacagtgcacggggtgacccaggccttcgccgccgcctcgcgggaggtgctggcggtggaagcagagctgggcgggcctcgcaggcagccgctgctcgccggccacgtgcgcagcctgcaggagctggagcagacgcggctgggcacggtggccctgctgcagttgatggagacgccagagctggcggggcaggaggacgctgtacggatgcagcagctgaaaatgaaggtaattaaaaccatggaggcgatcagcgaggttctccaggaccttaggtttgatgcggaatctgccgagtgatggcggctccccagggatgcgccgagggagatgggaaacggggcggatggcgcccagcccagccctaactgccagctggctggggtcgcgccccactgcgctgctgaccttcctgcagttccagacacctcccacaataaagagctcctcctctgta

SEQ ID NO: 73938 - DNA, 1079 bp, Homo Sapiens
  misc_feature (293)..(302): n is a, c, g, or t
gtctttattcttgatacaacaccacctcggtgcttgcaacctggaacaaaaccataccatgagagagagggggaaaaaaatctatgcacttaacctacaaaatctctggtgatgacagttgtattgttgctattacatggcataacggtctattatgtggtaggaaaatatagcctgctaaatcctacttaagttgatccactttaaactgagtaactgtataaaacatctattgaaaattcttttccttttgacttagattctgccttacatcaatttttgcatttttggtnnnnnnnnnnccctactacgtatgactctaacctgatacttgctctctaatggctcttaatatatccttgaaatcggctatttcaattttatcagacttttaccagagtaaaacttgcttctgtagcaggcctctcattttttattatgaggtctgtttttaaatacttaatttgaacagctctaagatattgtcacttaggtcatctaaaagcttttagagatttgaacataagttcatttcctgttaatcaaagacattccgtaagttggcaaaagaaattgggagagagaaatagaaggcttgatattctggacagcattaaggttgataggttgatgataaaaacttaaaaccaggacctccattctgtcatgactgacaccatggtagtctgtcagcttgaccagtggagagtcattcatttagcacaagcagctggagatttaaactgccagtactatgtatttggtgtataatgcaacgaagaaatttatccttgaattgagggtgatgcgtgggtcaggaagatgggccagatctacatgatatgagttaaaatgtggtttcagaggagataagcatttctgggagggggatcccagtagtagtaagaagattgtaggtttttaaaccagtcaaacgaagtctgttctgacttcaaatttgcgtaattaaggtcttgaaattattggagaaaccaaggatgtattgtagcgaaagttttatccgcatgggagataagcgaaggttaatatcttttcttgtttttgtgtatgtttattgg

SEQ ID NO: 73939 - DNA, 1236 bp, Homo Sapiens
tgagcggcagtactataacggtttaaggtagcgaggcctgggtggcgaattcggcacgaggcatggccttgcggctcctgaagctggcagcgacgtccgcgtccgcccgggtcgtggcggcgggcgcccagcgcgtgagaggaattcatagcagtgtgcagtgcaagctgcgctatggaatgtggcatttcctacttggggataaagcaagcaaaagactgacagaacgcagcagagtgataactgtagatggcaatatatgtactggaaaaggcaaacttgcaaaagaaatagcagagaaactaggcttcaagcactttcctgaagcggggattcattatccagacagtaccacaggagatgggaagcccctcgccaccgactataatggcaactgtagtttggagaaattttacgatgatccgagaagcaatgatggcaacagttaccgcctgcagtcctggttgtacagcagtcgcctgctgcagtactcagatgccttggagcacttgctgaccacaggacaaggtgttgtgttggagcgctccatcttcagtgactttgtgttcctggaggcgatgtacaaccagggattcatccgaaagcagtgtgtggaccactacaacgaggtgaagagcgtcaccatctgcgattacctgcccccccacctggtgatttacatcgatgtgcccgttccagaggtccagaggcggattcagaagaaaggagatccacatgaaatgaagatcacctctgcctatctacaggacattgagaatgcctataagaaaacctttctccctgagatgagtgaaaaatgtgaggttttacagtattctgcaagggaagctcaagattcaaaaaaggtggtagaggacattgaatacctgaagttcgataaagggccgtggctcaagcaggacaatcgcactttataccacctgcgattactggttcaggataagtttgaggtgctgaattacacaagcattcctatctttctcccggaagtcaccattggagctcatcagactgaccgtgtcttacatcagttcagagagctgccgggccgcaagtacagccctgggtacaacaccgaggtgggaagacaagtgaatctggctgaagtgaaacgggccgcccttctgctccagctgcatcacagtgatggcccaagctgcatcagccgcaaccctccttggaagccatatagcttttaagatccgggggagggta

SEQ ID NO: 73940 - DNA, 802 bp, Homo Sapiens
cgcgaccgcgtcccttgggtcttgatcctgagctgaccgggtagccatggccttgcggctcctgaagctggcagcgacgtccgcgtccgcccgggtcgtggcggcgggcgcccagcgcgtgagaggaattcatagcagtgtgcagtgcaagctgcgctatggaatgtggcatttcctacttggggataaagcaagcaaaagactgacagaacgcagcagagtgataactgtagatggcaatatatgtactggaaaaggcaaacttgcaaaagaaatagcagagaaactaggcttcaagcactttcctgaagcggggattcattatccagacagtaccacaggagatgggaagcccctcgccaccgactataatggcaactgtagtttggagaaattttacgatgatccgagaagcaatgatggcaacagttaccggcctgcagtcctgggttgtacagcagtcgcctgctgcagtactcagatgccttggagcacttgctgaccacaggacaaggtgttgtgttggagcgctccatcttcagtgactttgtgttcctggaggcgatgtacaaccagggattcatccgaaagcagtgtgttggaccactacaacgaggtgacagagcgtcaccatctgcgattacctgccccccacctggtgatttacatcgatgtgcccgttccagaaggtccagaggcggattcagaagaaaggagatcccacatgaaatgaagatcactctgcctatctacaggacattgagaatgcctattaagaaaactttctccctgagatgagtga

SEQ ID NO: 73941 - DNA, 1442 bp, Homo Sapiens
ggagggtgatgcggtggaggtggcgagtcagtcggagagatgcgagggagagtcaggtgacaagaagagagtgtgctgaggacagatggcggacagacaggccgctgcccccaatttttggtgctctttcattcctgcactcaggcacgaggcagacaggaaagacaggcagtgctgcttcgtaacaggcatctttcttgccctaagtatacatcttagaatgtgtggagaaagtcacgctatgggagcacttgggcaggctcaggtgttcactgtagtagaaggagaatgactctagctgatgttgggaccctttgctgtcaccccgcagtccccacagtgcccggtgtgagttgtaagacaatggtggtcagtgattgtcttcgcattttatatacgcacaggtcaaagagaatgaactctaaatgtttcccagtttgatttttctgcttctgtttagccacatgaaatgaagatcacctctgcctatctacaggacattgagaatgcctataagaaaacctttctccctgagatgagtgaaaaatgtgaggttttacaatattctgcaagggaagctcaagattcaaaaaaggtggtagaggacattgaatacctgaagttcgataaagggccgtggctcaagcaggacaatcgcactttataccacctgcgattactggttcaggataagtttgaggtgctgaattacacaagcattcctatctttctcccggaagtcaccattggagctcatcagactgaccgtgtcttacatcagttcagagagctgccgggccgcaagtacagccctgggtacaacaccgaggtgggagacaagtggatctggctgaagtgaacgggccgccttctgctccagctgcatcacagtgatggccaagctgcatcagccgcactctcctggacgccatatagctttaagatcgggggagggtaaataatgcaaaaattgcacagtggaagaaggggtctcacaaaaagcaatccatcctgtagtataggtaatggagttgggggaagcagcttccattctggatgtttggaaccctttagctttgttttggaatggcccaccattctcactggaaaacagtggtctgctgtgaaaggccagctctcggcagcccctgtggtttcagcgctgccgctctgtgtcattcaggttgtgcacattgtttttcttctgacttccagaaataaaagtgtttccatgggaatttccccatcgtacgtctatgtgcgtgcgggcacgtcgaaactgcacacgtgcacacacgctgctctgggccctgtttggtgtggtgtggtttaattgaggcttacattatgctgaagagtttttctaaaggcctactgtatttattttagtaatgtgctacattagagtagaaaaaataagaacgtgaagaagaaatagcaaa

SEQ ID NO: 73942 - DNA, 1127 bp, Homo Sapiens
  misc_feature (148)..(148): n is a, c, g, or t
  misc_feature (157)..(157): n is a, c, g, or t
  misc_feature (753)..(773): n is a, c, g, or t
ggacccagccacactaggagagaaccacctgacttcagggtcgggaaccacccgtgcatcccctctctgctgagagctgttccgtctctcaataaaattcttctctgcccttctcacgcttcgattggcagcatctcctcattcttcntggacacgngacaagaacttgggaactgccatacatgggtacaagctataacacaagcaggctggaacatgcccagcccagccacaggctgagctggtgaacagccaggtgtggcccaggcaggctgagtgggtgggccacctcctgcggcaggtagcatggccaagagaggcctggggagggggggtgtcagcagccagaggtacctggctggcaaatgaccaaagaggtacctgactgtgtcactttgagggcctgtctctggggaccccctcctagtatgaatttatgtatcagttggggtctacttgggagatggaaaccacaacagtgattctaatagcatgaatttaatgtgcagaatttttcattagttctgggtaaaaacagctctagggaatcatggaggttgcaaccacaaaattcagagaggtgacctggctggcgacactggtgataatggtcacctgccatgcagcctttcagctcaggtgggcacactcctctgcccctgcccacttcctctcccaaggtgaatcttgaccacacctgtgcctggcactgtgcacacattctctgttgttcaactctgcgatcaatctggnnnnnnnnnnnnnnnnnnnnncctttttaggagagtaaaaggaaaataaatcttggggccccaaaatcactaagccaaagggaaaagtcaagctgggaactgcttagggcaagcctgcctccaattccattcaaagtcattcccccgctcgctgagatagatgcatatctgattgccttctttggaaaggctcatcagaaactcaaaagaatgtaactctatcttacatgtgttgattgatgtctcatatctccctaaaatgtataaaaccaagctgtcctctgaccaccctgggcacatgtcaggacctcctgaggctgtgtcacaggtgtgcatccttaattttggcaaaataaacttcccaaattggctgag

SEQ ID NO: 73943 - DNA, 1221 bp, Homo Sapiens
  misc_feature (83)..(117): n is a, c, g, or t
actgtacctagacttcatatagggcgccacggctactagcgaacgacgagcgcagcgagtcatgtgagcgaggaagcggccgnnnnnnnnnnnnnnnnnnnnnnnnnnnnnnnnnnncagtcgacggtaccggacatatgcccgggaattcggccattacggccggggacagtaaaagcaaaagcaacagctcaagcagcctccttggagaaaacctgaaaattcaacttgttccaagagaaggtcttgtacgtgcctaagttctagagcctcctgacgtgagcatggctgagagtgaggaccgctccctgaggatcgttctggtagggaaaactggaagtgggaaaagtgcaacagcgaacaccatccttggagaggaaatctttgattctagaattgctgcccaagctgttaccaagaactgtcaaaaagcatcccgggaatggcaggggagagaccttcttgttgtggacactccagggctctttgacaccaaggagagcctggacaccacctgcaaggaaatcagctgctgcatcatctcctcctgcccagggccccatgctattgtcctagttctgctgctgggccgctacacagaggaggagcagaaaaccgttgcattgatcaaggctgtctttgggaagtcagccatgaagcacatggtcatcttgttcactcgcaaagaagagttggagggccagagcttccatgacttcatagcagatgcggatgtgggcctaaaaagcatcgtcaaggagtgcgggaaccgctgctgtgcctttagcaacagcaagaaaaccagtaaggcagagaaggaaagtcaagtgcaggagttggtggagctgatagagaaaatggtgcagtgcaacgaaggggcttacttttctgatgacatatacaaggacacagaggaaaggctgaaacaacgggaagaggtttgaggaaaatctacactgaccaattaaatgaagaaattaaactagtagaagaggataagcataaatcagaggaagaaaaggcagcaaagaaattaaattataaaattaaaatatgatgcacccaataaaaaatataagggcaagaagctgcagagaaatatatttacagatgtttttaataggatttggaagatgctttcagcaaatatggcataggttttgtcgaaatgtaagtttattcttcctaatttactgtgatttgttaatggcatgaatgtca

SEQ ID NO: 73944 - DNA, 802 bp, Homo Sapiens
  misc_feature (106)..(106): n is a, c, g, or t
ctacagatgtgatgacttcgagcaactgcagccaggggatctgtcatccagatgcatccaacagcggagtgggcaagcgtcatccagatcgccgcagccctggccntaagaaccatcaatgtgtccgagacagacctgatatccagaagctgagtgacagactgaagagtctgggggctgagcatgtcatcacagaagaggagctaagaaggcccgaaatgaaaaacttctttaaggacatgccccagccacggcttgctctcaactgtgttggtgggaaaagctccacagagctgctgcggcagttagcgcgtggaggaaccatggtaacctatggggggatggccaagcagcccgtcgtagcctctgtgagcctgctcatttttaaggatctcaaacttcgaggcttttggttgtcccagtggaagaaggatcacagtccagaccagttcaaggagctgatcctcacactgtgcgatctcatccgccgaggccagctcacagcccctgcctgctcccaggtcccgctgcaggactaccagtctgccttggaagcctccatgaagcccttcatatcttcaaagcagattctcaccatgtgatcatcccaaaagagctggagtgacatgggaggggaggcggatctgaggggctgggtgcaggcccctcagttggggctcccaccttccccagactactgttctcctcactgcctcttcctattaggaggatggtgaagccagccacggttttccccagggccagccttaaggtatctaataaagtctgaactctcccttcc

SEQ ID NO: 73945 - DNA, 942 bp, Homo Sapiens
aagggtctggtttggcccttccccccacatagggtttaccaggttcctcccacgcggtaaactgccgcaagcagctctgtggagctttttccccaccaacacagttgagagcaagccgtggctggggcatgtccttaaagaagtttttcatttcgggccttcttagctcctcttctgtgatgacatgctcagcccccagactcttcagtctgtcactcagcttctggatatcaggtctgtctcggaccacattgatggttcttaggcccagggctgcggcgatctggatgaccgcttgccccactccgctgttggatgcattctggatgacagaatcccctggctgcagttgctcgaagtccatcaacatcctgtaggctgtgcagggattgacacccagggtggcagcgctctgaagagggatgtcactcggaacttggatcagtgcttcctcgctgaacacagcctcggtccgccaggttcctaaaccagcatttgctggaatcacccagtctcctggcttcagcccggtcacattgctgcccaccgctaccacctgtgcaacaccttcgttccctccaacagcaggcagttcaggaaggagtccgtagtttccttggatcatatttatgtcagatggattgataggggccgccagcatcttcacacggacatctgatcctctcacagcagctagctccaggttcttgagttcgacgaccttggctggatccccgtggtgcccatagacaagcgcccggacccgggcaggctcggcggatgcggagtaggaggaggcggcaggtccgtgacagccagaagctgggagcagcccccgccactgccgggcgggggttcgcacccgccacagggtactgcagacccacatgctcgctccaaccaacacagagcctgcctcgtgccgaattcgccacccaggcc

SEQ ID NO: 73946 - DNA, 1234 bp, Homo Sapiens
  misc_feature (762)..(762): n is a, c, g, or t
  misc_feature (1080)..(1080): n is a, c, g, or t
  misc_feature (1091)..(1091): n is a, c, g, or t
cagtcgacggtaccggacatatgcccgggaattcggccattacggccgggggggctgagccccaaggacatagtggagatggagctctgccttgcagacacccagcctgcggtcttgggtggtgcctatgatgagttcatctttgctcctcggctggacaatctgcacagctgcttctgtgccctgcaggccttgatagattcctgtgcaggccctggctccctggccacagagcctcacgtgcgcatggtcacactctatgacaacgaagaggtggggtctgagagtgcacagggagcacagtcactgctgacagagctggtgctgcggcggatctcagcctcgtgccagcacccgacagccttcgaggaagccatacccaagtccttcatgatcagcgcagacatggcccatgctgtgcatcccaactacctggacaaccatgacgagaaccaccggcctttattccacaagggcccctgtgatccacgtgaacagcaagcaacgctatgcttcaaacgcgggtgtcagaggccctgatccgagaggtggccaacaaaagtcaaggtcccccctggcaggatctcatgggtccgggaatgaaccccccctgttggaaccaccatttgggacccattcttgggccttctcccgcctgggggcctgccgcggtgcctgggaatttaaggccaaccccccccaaactgtggcccaatgcacactctctattcccgggggaaaaatgggggccttgcccaccanacaaggaaatttcccctccaaggaaccgccttcaacctcctctcttttccaggggggcctttcctttttgaagccctgactctccctcttcctctcttaaggcccaattaaatccctctcttaaagggggaattggagaaccctctctccttgggaaaaagaacttctccttctgggccccatccccctctttgtgcaccacctgtagaaaaaggggggcgaaattttccctcccacacctttgaaaacctcgaaacacaccttggggaattataatttttaaaccgcgcgggggaattgtgcgctcccctctctctncctgaggagcnatttcggtactccttaagttggtaccacaggcgcagctagacccgactgcactcgcgcgtactatatgtaacgcccgtgtcacgagccaggaagacacacaatatgatgtgtggttccgcacgcatcacctacgcgtgttcgg

SEQ ID NO: 73947 - DNA, 1673 bp, Homo Sapiens
gcgtgatgaaggcctacgagtgcggcgcggcctgaaggggcacgcgggggacctgcaaagctagtgaggggcggggcaggcggcgcggtgggggcgggccgagcccggaggccagatgagcggacacagccccacgcgcggggccatgcaggtggccatgaacggtaaggcccgcaaagaggcggtgcagactgcggctaaggaactcctcaagttcgtgaaccggagtccctctcctttccatgctgtggctgaatgccgcaaccgccttctccaggctggcttcagtgaactcaaggagactgagaaatggaatattaagcccgagagcaagtacttcatgaccaggaactcctccaccatcatagcttttgctgtagggggccagtacgttcctggcaatggcttcagcctcatcggggcccacacggacagcccctgcctccgggtgaaacgtcggtctcgccgcagccaggtgggcttccagcaagtcggtgtggagacctatggtggtgggatctggagcacctggtttgaccgtgacctgactctggctggacgcgtcattgtcaagtgccctacctcaggtcggctggagcagcagctggtgcacgtggagcggcccattcttcgcatcccacacctggccatccatctgcagcgaaatatcaacgagaactttgggcccaacacagagatgcatctagtccccattcttgccacagccatccaggaggagctggagaaggggactcctgagccagggcctctcaatgctgtggatgagcggcaccattcggtcctcatgtccctgctctgtgcccatctggggctgagccccaaggacatagtggagatggagctctgccttgcagacacccagcctgcggtcttgggtggtgcctatgatgagttcatctttgctcctcggctggacaatctgcacagctgcttctgtgccctgcaggccttgatagattcctgtgcaggccctggctccctggccacagagcctcacgtgcgcatggtcacactctatgacaacgaagaggtggggtctgagagtgcacagggagcacagtcactgctgacagagctggtgctgcggcggatctcagcctcgtgccagcacccgacagccttcgaggaagccatacccaagtccttcatgatcagcgcagacatggcccatgctgtgcatcccaactacctggacaagcatgaggagaaccaccggcctttattccacaagggccccgtgatcaaggtgaacagcaagcaacgctatgcttcaaacgcggtgtcagaggccctgatccgagaggtggccaacaaagtcaaggtccccctgcaggatctcatggtccggaatgacaccccctgtggaaccaccattggacctatcttggcttctcggctggggctgcgggtgctggatttaggcagcccccaactggccatgcactctatccgggagatggcctgcaccacaggagtcctccagaccctcaccctcttcaagggcttctttgagctgttcccttctctaagccataatctcttagtggattgagccctcttggaaagacttctctgccatccctttgcacctgagaggggaagttctcagctgagctgaagctggattattaaagtggattgtcactcagaaa

SEQ ID NO: 73948 - DNA, 1150 bp, Homo Sapiens
  misc_feature (27)..(27): n is a, c, g, or t
  misc_feature (37)..(37): n is a, c, g, or t
  misc_feature (55)..(55): n is a, c, g, or t
  misc_feature (93)..(94): n is a, c, g, or t
  misc_feature (113)..(113): n is a, c, g, or t
gggattgccctggagccagaattcgcnaggagggaanccaaaaccagggttcctnttagctctgcagagagactgccagcaatgtatgcagcnntgccaaccttcccgacctntatgctgaggggtgtgaggctctagtagtgaagaagctacaagaaatcatgatgcatgtgatctgggccgcactggcatttgcagctattcagctgctgggcatgctgtgtgcttgcatcgtgttgtgcagaaggagtagagatcctgcttacgagctcctcatcactggcggaacctatgcatagttgacaactcaagcctgagctttttggtcttgttctgatttggaaggtgaattgagcaggtctgctgctgttggcctctggagttcatttagttaaagcacatgtacactggtgttggacagagcagcttggcttttcatgtgcccacctacttacctactacctgcgactttctttttccttgttctagctgactcttcatgcccctaagattttaagtacgatggtgaacgttctaatttcagaaccaattgcgagtcatgtagtgtggtagaattaaaggaggacacgagcctgcttctgttacctccaagtggtaacaggactgatgccgaaatgtcaccaggtcctttcagtcttcacagtggagaactcttggccaaaggtttttgcggggaggaggaggaaaccagctttctggttaaggttaacaccagatggtgcccctcattggtgtccttttaaaaaatatttactgtagtccaataagatagcagctgtacaaaatgactaaaatagattgtaggatcatatggcgtatatcttggttcatcttcaaaatcagagactgagctttgaaactagtggtttttaatcaaagttggctttataggaggagtataatgtatgcactactgttttaaaagaattagtgtgagtgtgtttttgtatgaatgagcccattcatggtaagtcttaagcttgttggaaataatgtacccatgtagactagcaaaatagtatgtagatgtgatctcagttgtaaatagaaaaatctaattcaataaactctgtatcagccccccaacatattatttttcattatttgggggatatttcagttccagagc

SEQ ID NO: 73949 - DNA, 1132 bp, Homo Sapiens
ttcacccatcgtacttaaatcttagggccatgaagatcagctagaacaaggaaaaagaaatcccagtataggtaatagtgggcacatgaaaagccaagctgctctgtccaacaccagtgtacatgtgctttaactaaatgaactccagaggccaacagcagcagacctgctcaattcaccttccaaatcagaacaagaccaaaaagctcaggcaagagttgtcaactatgcataggttccgccagtgatgaggagctcgtaagcaggatctctactccttctgcacaacacgatgcaagcacacagcatgcccagcagctgaatagctgcaaatgccagtgcggcccagatcacatgcatcatgatttcttgtagcttcttcacaactagagcctcacacccctcagcatagaggtcggaagggtgggccaggctgccattacaattgctggcagtctctctgcagcagctaagagggacactctggtttttggtttctttgaaccaatctgtattttcccagtctgagtagttgtgaattccacaacaatgcagctgtctctgtacataatcaatagcccggctagcagcatcagggttggttccattgtaggtcttatacactttctgaatgctgcgatcaacctcattttccacctttgctctgtaaacatatcccaaaaccactacaacaacttctgtgacaaaaaccaagagcaggatgatgacaaacgtggcaagtccacagcgactttcccggattgtggcacagcagccaattagcccaatgatgaaaagcagggctcctacagctatgatcactacagcagggatgagcgtgtacacatcttcaaagaagtggtcatagtcatcataagtgatgaagacataggctcccacatagcataaaatgccagctgccccccagaagatgaggttgagaaagaccagcacggtcttggaggaggtgatgccgcactggcccatggcgccggtggcccgcgaaggcccggcccggagagcggggctgcgctcaccgagagagcggcaatggcggcggcgcctcctcgctaggaactgcacggcctgcgcggcgctccccgcagcccctgcgccgtcgcgcagccccccc

SEQ ID NO: 73950 - DNA, 2214 bp, Homo Sapiens
  misc_feature (327)..(358): n is a, c, g, or t
  misc_feature (687)..(700): n is a, c, g, or t
  misc_feature (724)..(733): n is a, c, g, or t
  misc_feature (856)..(875): n is a, c, g, or t
ctctataagcatttttaaaaggcatacccaaaagaggtgtttaaaaagaaagctaatgctagtatatactgcaatgttaggggaatgaacatgttttcctactgcattggggacttctagataggttaatgaaaggccttttattctgttactggacatgaaaactttgtctaatttcttactctattgtacgtttacagtcgcagcactaaaaatggatgacatcaaacatttttaacaaaatgatgtacaaactaaggactatttattgataatgttttgctactcttgtcagacaatggctataaactgaattaggcagtcttnnnnnnnnnnnnnnnnnnnnnnnnnnnnnnnngaacgttgcaaatttgttaaaatgccaaaaaggacagtttaattttgtacagattatgcttacctcaggtttctttagtgtgcttgaatgcccttctttccatataacacttatcttcttcttaattcggcaatggaatatcttttaagttttaaaaaaactggaataattatatctatcttttttgccgtttatatttaggggtttttgttgataaaatcaagtcttggttgtggcttgctgaattaaatatttatgagtggtgcatttttaagtatagtgaacaagacaccatattaagtacagtgataaagcatctatattctgtnnnnnnnnnnnnnntctgcctatgcatgttttttaagnnnnnnnnnntggctgtatcggcctgtatgggactgtaatgcgcttagtggtctgacatatactggaaatgtatgtatactggcgtactttatattctctaaaatgcttaatgcctttgaaattttgtaatcnnnnnnnnnnnnnnnnnnnntctaaaggggagagtattctttaaagtttttaacataagcttgtcaatgcacatgtagatggttagcatgtttagcaaaccttgtgaaattataataagtttgtagttacatgtgaaactctaaatgcatggcaactgttaatgtcataacagtttagttattttgttctgttctgtcatgtgccacaaaatatgtacttttttcacttttttccctttgtatatcagttacgggttacaactggttcattctgaaaacaacaacaacaaaagtccattcatattttttaacaattgtataagtgcccaagtaattcactacagcctaaagccttgcctttgtaatttgacttctgacatgttggcaatcaaagcatgcacttgtaacaatgaaaaagaaaaagcattttatattactactcaataaaatgtgcatgaacttacagaattctcatccttccactgagtccgctgaagggatttatgtgcacaaccaccatgtgtcttctaggtgctggcccaccaccacacatcacaggctgatttccacaggcttcttcctaggggcctcgtgatctgaggggtggtgcctacttccactgtaagaaagaatcttggtggatttgtgtctcaaatcagataagagaagcctgtttaaagagcagatgccatcttctggcttcctcaaggagccagttaaaaaaccagagcattcctttttattgaaaaataaaattaatttgttatcaggttgtttcagttgtattggatgccctatctatctgctaaagcaaaaagtactaggctactaagtgcattttcatcacagaaaagagttgcatttgtattaacaagaaatttgtatacccacgcttcagctactatctaatcatcacccgaagatttaagatacaccaaatttcagtttgtttgtaacattgttcatctttagtgcactttgttttatataataaagtatgcctgttatattaaataataagaatatggcaattagcgatatagcatacccaaacaaagatgttctcgatacagtctggcaaagactatcccaaggttattttaatgaattcagacattttttcctgtggatatttctccatcctaaaaaaagtggcaaccaaggaaaatatttagatgcaacttactagagtgatgatgtgaaagaaatggtgattctggtatcatggtgtttattttctttcttataactgcagagaaaatatcctgactaaaaaaaattcatttttttggattcctttcttttacaaattgtgctgaggcaactatggcatagaaataaacatttgacattaaaata

SEQ ID NO: 73951 - DNA, 705 bp, Homo Sapiens
tttaaagttcatctcccctgccccaaaaaactgatagcatgtgccatatcagaaaaatcctggtcttagcagatcaatatacatagttatttggtcattcgacatatgcactttttaaggaggttcaggcttcattttctgttgaagagtttgttaccatagagtctggctttcgagtcattctatccagttcttcctgaacatttgacaacacagtcttttgtcctgacttcttggctgtgctctgcaccccaccagcaccaggacttccaggagagcctgtctttttactcaacagactgttgaagaagctggccaacaccccttcacttgctgcattatttttgatgtttgggtccggcttttttactgacgtgcctggggaggagctaggcacactggctggccctccccgaccctgggtccttggagagccagagggtcctcttgcaggagattcagaagctctcgtgggagtggctggttgcttggcaaggagtgactgttgcttcattaggaacacctgctcatcttctgctgccaactctttgtcgtggaccagctttctcacgggaggtttcacaataaagtcttcatatgcatcttccggcttcacggttggtaaaattccatgtaaaatagctattttcttttcaatgtccagcctgcaggtataaaaacggcatccctttccacaactaagga

SEQ ID NO: 73952 - DNA, 758 bp, Homo Sapiens
  misc_feature (35)..(35): n is a, c, g, or t
  misc_feature (299)..(323): n is a, c, g, or t
  misc_feature (409)..(433): n is a, c, g, or t
agaatcggcacgagcttaccattccagctgcatgngaaagcaaagcagaaaacagtgccccaaatggaaaaaagatactcacacagaacaaaacagttcttggtcttgttcttggtcttgtcaaaccttgcctgatgctctttctaaagtcaaaatatgaatgctaagaaggcataacctacatccttctctgatttcttcagcagggtcaaaagacagttactagcaatggggaatgcttgtcactgtggagaaagagttttgtatatgtctgataccgttgttataacaaaacaaannnnnnnnnnnnnnnnnnnnnnnnnctacctgcacacccaccagaagagcacaaagcaaggccattgcaacaggcatttaaaaattattatcaaacatgcacatgcttgtnnnnnnnnnnnnnnnnnnnnnnnnnaacaggggcatttgtaaaggtgtccctggaatgtaagatttataatgtttaaggcaaggtgaaggcattgccaagtgtgtgtcgctcataggactagtgtatattcactgaaagttaacctgatgatttgttattgtttgaaccatatgctgatttgcttctggtttctgtttagtgtgttctctctgataaggggctgaaagattctgcatcacacatcctctgagacctaccatgtcgcacactttgttaatgacaaacttcactctacactatacagtaccttgttgatatattcagtaaagtcttattttaaaagaaaaaa

SEQ ID NO: 73953 - DNA, 1030 bp, Homo Sapiens
  misc_feature (52)..(52): n is a, c, g, or t
  misc_feature (102)..(102): n is a, c, g, or t
  misc_feature (104)..(104): n is a, c, g, or t
catagcacggcaattcaacagttggtgactttggcagatgagcgggtaaatntgatcacccaccgatgagagtttcctatccagcaatgatgaaatccgcgncncaatgcgcgggatgtgagggggactgtacgtactgtggagcaccccctcgagtacaccgcaaaagaccgcgcgccgcgtgcccatcccgccccaatgagcgataccggccgttgcggcgcagcacagagcactgagcattggtggcacgtgcggcgcaagcccggcggccgccccttctacctgcccgcgcagtacgtgcgcgagctgcctgcgctgggcaaccctgccgctgacgcgccgccaggtccccccatcgggacccgcagcccctgagccgctcgcctacgactaccggttcgtgagcgcggctgtggcagcggcccccaacggccccccagcggagccccgaggcggggccagctccctgtgcggccctgcgcagcgcggcgccgcgagccagcgcagcagcctggcgcccggcctgcccgcctgcctgtacctgcggcccacggcgcccgtgcggcccgcgcagtccctggacgacctgacgcgcgccgtcgtctcgcctcccgccggcaacctcggaagcagcggcagcttcaaggcctgcagcgtagcgggctcctgggtgtgcctgctgcccctgtcgcgcagcgactcagagaacgtctaagaggccatccaggaggtacgcggcccgccgcggtaggagatcgtgaagcaggtacgaccccgggcgcggaggcggggaggctcgctgaggacagcgcccgcagggagcctgggctcgaggagacccactccgctcagcgtcgggcatgacgcccacctctgtcggaagacttcggatgagctccctctccccagccgcgaaacagtgcaggcccccatccctcatctgcaatttccaggctccaaagctccctggaagcccgaaagatttttcgtaatcaaattggtggcaaaattgcgcttgaactgaaaa

SEQ ID NO: 73954 - DNA, 1559 bp, Homo Sapiens
ccggcagtaactataacggttctaaggtagcgaggcctgggtggcgaattcggcacgaggggcggctgggctgcggaaacgcggccggtccggttccgcggcccaggcagagggactctgcaagcaatggctgcagcgcgcctggcaagagcggcgcctgctgctgcgggagccgcgctacacgctgctggtggccgcctgcctctgcctggcggaggtgggcatcaccttctgggtcattcacagggtggcatacacagagattgactggaaggcctacatggccgaggtagaaggcgtcatcaatggtacctatgactatacccaactgcagggtgacaccggaccacttgtgtacccagctggtttcgtgtacatctttatggggttgtactatgccaccagccgaggcactgacatccgcatggcccagaacatctttgctgtgctctacctggctaccttgctgcttgtcttcttgatctatcaccagacctgcaaggtacctcccttcgtctttttcttcatgtgctgcgcctcttaccgtgtccactccatctttgtgctgcggctcttcaatgacccagtggccatggtgctgctcttcctcagtatcaacctcctgctggcccagcgctggggctggggttgctgctttttcagcctggcagtctctgtgaagatgaatgtgctgctcttcgcccctgggttactgtttcttctcctcacacagtttggcttccgtggggccctccccaagctgggaatctgtgctggccttcaggtggtgctggggctgcccttcctgctggagaaccccagcggctacctgtcccgctcctttgaccttggccgccagtttctgttccactggacagtgaactggcgcttcctcccagaggcgctcttcctgcatcgagccttccacctggccctgttgactgcccacctcaccctgctcctgctgtttgccctctgcaggtggcacaggacaggggaaagtatcttgtcgctgctgagggatccctccaaaaggaaggttccaccccagccccttacacccaaccagatcgtttctaccctcttcacctccaacttcattggcatctgcttcagccgctccctccactaccagttctacgtctggtatttccacacactgccctacctcctgtgggccatgcctgcacgctggctcacacacctgctcaggttgttggtgctggggctcatcgagctctcctggaacacatacccttccacatcctgcagctctgctgccctgcacatatgccatgccgtcatcctgctgcagctctggctgggcccgcagcctttccccaagagcacccaacacagcaagaaagcccactgaagtccacccctttccctcaggacctgagtctaccctcaggacctggggttggttggactctgcccttccaaataaaccttgctaagtccaactctgtgcaacctacatggaggtgggggcagccgatgcctggtccaggctgtgagggacacgtatggagcagataaagaattcactcaagcag

SEQ ID NO: 73955 - DNA, 1228 bp, Homo Sapiens
ggttgggatgagcgctcccagcccacaaaacaacctgagagcaaggttgtttgaagccaagggttccaggcaatgggcccaccaaggagttaggggcaagtgtggggaaaattaccagacggtaggaactgggtaggggaggggaggcggctgaaaccagatgcccaatgaaattggaaggtgaaagaggggaagaaacgatctggttgggtttaagggggctgggggtggaacctttcctttgggagggatccctcagcagcggacaagatactttccccctgtcctgtgccacctgcagagggcaaacagcagggagcagggtgaggtgggcagtcaacagggccaggtggaaggctcgatgcaggaagagcgcctctgggaggaagcgccagttcactgtccagtggaacagaaactggcggccaaggtcaaaggagcgggacaggtagccgctggggttctccagcaggaagggcagccccagcaccacctgaaggccagcacagattcccagcttggggagggccccacggaagccaaactgtgtgaggagaagaaacagtaacccaggggcgaagagcagcacattcatcttcacagagactgccaggctgaaaaagcagcaaccccagccccagcgctgggccagcaggaggttgatactgaggaagagcagcaccatggccactgggtcattgaagagccgcagcacaaagatggagtggacacggtaagaggcgcagcacatgaagaaaaagacgaagggaggtaccttgcaggtctggtgatagatcaagaagacaagcagcaaggtagccaggtagagcacagcaaagatgttctgggccatgcggatgtcagtgcctcggctggtggcatagtacaaccccataaagatgtacacgaaaccagctgggtacacaagtggtccggtgtcaccctgcagttgggtatagtcataggtaccattgatgacgccttctacctcggccatgtaggccttccagtcaatctctgtgtctccgccaggcagaggcaggcggccaccagcagcgtgtagcgcggctcccgcagcagcaggcgccgctcttgccaggcgcgctgcagccattgcttgcagagtccctctgcctgggccgcggaaccggaccggccgcgtcctcgtgccgaattcgccacccaggcctcgctaccttaaaaccgttagtagttactggccgttcca

SEQ ID NO: 73956 - DNA, 1717 bp, Homo Sapiens
gctggaccggtccggaattccttggatcaccgttaagatggcggctgggctgcggaaacgcggccggtccggttccgcggcccaggcagagggactctgcaagcaatggctgcagcgcgcctggcaagagcggcgcctgctgctgcgggagccgcgctacacgctgctggtggccgcctgcctctgcctggcggagacacagagattgactggaaggcctacatggccgaggtagaaggcgtcatcaatggtacctatgactatacccaactgcagggtgacaccggaccacttgtgtacccagctggtttcgtgtacatctttatggggttgtactatgccaccagccgaggcactgacatccgcatggcccagaacatctttgctgtgctctacctggctaccttgctgcttgtcttcttgatctatcaccagacctgcaaggtacctcccttcgtctttttcttcatgtgctgcgcctcttaccgtgtccactccatctttgtgctgcggctcttcaatgacccagtggccatggtgctgctcttcctcagtatcaacctcctgctggcccagcgctggggctggggttgctgctttttcaggtcaacacctcttcctttctggtcccctctcgttttctgcatttccatctcttcccaatttcctgcagcagagggagtaaaggagtagccaagacagcatgggtcactcagggctccacaaagcgagtccaggatctatagaaagtttctgccctgccatcccccaacatacacacatgccctctttccatcctgtcttcctcccagacagcattccctgttgggaattagtccttcacatttctaaatactcagaatatgcctcattcgcatctagtaagcatagagactatgtatctgccccctggcctactccaggctcttccctccaacagttgtgagtgtaggtcccaccttggagtttgttggcgtggcggcgggggggaggttgctgtggtgatggtggggggtatgtctttgggtgttgtgtgcatggccctggagctgatctccacccttcctctcccctgctcaccccagcctggcagtctctgtgaagatgaatgtgctgctcttcgcccctgggttacctgtttcttctcctcacacagtttggcttccgtggggccctccccaagctgggaatctgtgctggccttcaggtggtgctggggctgcccttcctgctggagaaccccagcggctacctgtcccgctcctttgaccttggccgccagtttctgttccactggacagtgaactggcgcttcctcccagaggcgctcttcctgcatcgagccttccacctggcctgttgactgcccacctcaccctgctcctgctgtttgccctctgcaggtggcacaggacaggggaaagtatcttgtcgctgctgagggatccctccaaaaggaaggttccaccccagccccttacacccaagcatcgtttctaccctcttcacctccaacttcattggcattctgctttcagccgctccctccactaccagttctacgtcctggtatttcccacacactggccctatctcctgtgggccatgcctgcacgctggttcacacccctgctcagggtgttggtgctggggctccatcgagctctccttggacattacctttcaatcctgcgtctgttgccctgtttttgcatgg

SEQ ID NO: 73957 - DNA, 770 bp, Homo Sapiens
tggactcgctttgtggagccctgagtgacccatgctgtcttggctactcctttactccctctgctgcaggaaattgggaagagatggaaatgcagaaaacgagaggggaccagaaaggaagaggtgttgacctgaaaaagcagcaaccccagccccagcgctgggccagcaggaggttgatactgaggaagagcagcaccatggccactgggtcattgaagagccgcagcacaaagatggagtggacacggtaagaggcgcagcacatgaagaaaaagacgaagggaggtaccttgcaggtctggtgatagatcaagaagacaagcagcaaggtagccaggtagagcacagcaaagatgttctgggccatgcggatgtcagtgcctcggctggtggcatagtacaaccccataaagatgtacacgaaaccagctgggtacacaagtggtccggtgtcaccctgcagtaaagtatagtcataggtaccattgatgacgccttctacctcggccatgtaggccttccagtcaatctctgtgtatgccaccctgtgaatgacccagaaggtgatgcccacctccgccaggcagaggcaggcggccaccagcagcgtgtagcgcggctcccgcagcagcaggcgccgctcttgccaggcgcgctgcagccattgcttgcagagtccctctgcctgggccgcggaaccggaccggccgcgtttccgcagcaaagccgccatcttaacggtgattccgaagttccggaccggtcca

SEQ ID NO: 73958 - DNA, 2120 bp, Homo Sapiens
  misc_feature (792)..(870): n is a, c, g, or t
  misc_feature (1567)..(1620): n is a, c, g, or t
  misc_feature (1659)..(1952): n is a, c, g, or t
  misc_feature (1979)..(1979): n is a, c, g, or t
  misc_feature (2007)..(2007): n is a, c, g, or t
cgcgctgggtggttcagaagcgaattctgcaccgcgaagcctgagaggcaggtagctgcggcgctgggctggcggcggcgagtccacgtgctccccgcggccggttgaaaccgttggcgggcgctggctgagaggcaatgtttgctgtcttccattggagtgactgaatttctacatgacggctttttgacaagacttaaaacctgtcttggatagagaatatttagccatttacctaaaaatggtattttttacatgcaatgcatgtggtgaatcagtgaagaaaatacaagtggaaaagcatgtgtctgtttgcagaaactgtgaatgcctttcttgcattgactgcggtaaagatttctggggcgatgactataaaaaccacgtgaaatgcataagtgaagatcagaagtatggtggcaaaggctatgaaggtaaaacccacaaaggcgacatcaaacagcaggcgtggattcagaaaattagtgaattaataaagagacccaatgtcagccccaaagtgagagaacttttagagcaaattagtgcttttgacaacgttcccaggaaaaaggcaaaatttcagaattggatgaagaacagtttaaaagttcataatgaatccattctggaccaggtgtggaatatcttttctgaagcttccaacagcgaaccagtcaataaggaacaggatcaacggccactccacccagtggcaaatccacatgcagaaatctccaccaaggttccagcctccaaagtgaaagacgccgtggaacagcaaggggaggnnnnnnnnnnnnnnnnnnnnnnnnnnnnnnnnnnnnnnnnnnnnnnnnnnnnnnnnnnnnnnnnnnnnnnnnnnnnnnnccaccaggaaaactcaaggaatcagaagcctaagaagcgcaaaaagggacaggaggctgaccttgaggctggtggggaggaagtccctgaggccaatggctctgcagggaagaggagcaagaagaagaagcagcgcaaggacagcgccagtgaggaagaggcacgcgtgggcgcagggaagaggaagcggaggcactcggaagttgaaacagattctaagaagaaaaagatgaagctcccagagcatcctgagggcggagaaccagaagacgatgaggctcctgcaaaaggtaaattcaactggaagggaactattaaagcaattctgaaacaggccccagacaatgaaataaccatcaaaaagctaaggaaaaaggttttagctcagtactacacagtgacagatgagcatcacagatccgaagaggaactcctggtcatctttaacaagaaaatcagcaagaaccctacctttaagttattaaaggacaaagtcaagcttgtgaaatgaacatttgtgtatttaaaaattgaatccattctgctgacttcttcctttcactgctgtttataaaatgtgtaatgaattctaacaactcaaattttgctttttgaagctgtatttttaagttaagaaaatatatttttggtataacttttatgagaaaaataaaatatattctggtccaaacttctnnnnnnnnnnnnnnnnnnnnnnnnnnnnnnnnnnnnnnnnnnnnnnnnnnnnnngcctacagccgcggccgctcccctcgtgccgaattcttnnnnnnnnnnnnnnnnnnnnnnnnnnnnnnnnnnnnnnnnnnnnnnnnnnnnnnnnnnnnnnnnnnnnnnnnnnnnnnnnnnnnnnnnnnnnnnnnnnnnnnnnnnnnnnnnnnnnnnnnnnnnnnnnnnnnnnnnnnnnnnnnnnnnnnnnnnnnnnnnnnnnnnnnnnnnnnnnnnnnnnnnnnnnnnnnnnnnnnnnnnnnnnnnnnnnnnnnnnnnnnnnnnnnnnnnnnnnnnnnnnnnnnnnnnnnnnnnnnnnnnnnnnnnnnnnnnnnnnnnnnnnnnnnnnnnnntcggtcttcggctgcgggagggtatanctcctcaaaggcgtatacggttatcaanatcagggataccagaagacatgtgacaaagcaccaaggcacgacgtaaaagcccgtgcgggtttccaaagtccgccctgacacatcaaatcagtcagtcaagtggaacgaaga

SEQ ID NO: 73959 - DNA, 656 bp, Homo Sapiens
  misc_feature (412)..(422): n is a, c, g, or t
caaaatgggtttactaaaatgtagatgacttaactgcctcctccttcgtctgaaaaatgccaatattcaatcatcatgcagcattataacaagccttataagtcctaaagcattaagttgcacttttttgaggaggggtagtgcagtatttctctggccagtatgaatgaagtttatacttaccatatttgatagaaacatagatcaagctatggcacagcgactcatcagatagctagctttgacgtctgggcacaattgaaccaacttccatcgtgaatctttataatgattgactttggtgtatagtgcagtaaacaaatagtgctcctagttaagtatttgtcagcatccttttgtctctaacttgtttctatttttacagccacacaattcttggcatgtattaagnnnnnnnnnnntccctgttcaagtagtttttccacctatcagcactgagtaaatgccataaatccattgaaatggtctaaatgttccatctgttctcctgttttgccagttatatagtaatgaaatacatttgtaaattttatgcaacaaatggcaaacgtatcattattttgaaattgtgtatgtaaaagttatatttttacatgtagactcttgttattatgtgttttaatacattgtatcag

SEQ ID NO: 73960 - DNA, 1613 bp, Homo Sapiens
gggggatcatggcgactttggtcgaactgccggactcggtcctgctcgagatcttctcttacctcccggtacgggaccggatccgcatctccagggtctgtcaccgctggaagaggctggtggacgaccggtggctgtggcgacatgtcgacctgacgctctacacgatgcgacctaaagtcatgtggcacctccttcgaaggtacatggcatcccggctccattccctgcggatgggtggctacctgttctctggctcccaggccccccagttgtcccctgctctgttgagagccctgggccagaagtgccccaacctgaagcgcctctgcctgcacgtggccgacctgagcatggtgcccatcaccagcctgcccagcaccttgaggaccctggagctgcacagctgcgagatctccatggcctggctccacaagcagcaggaccccaccgtgctgcccctgcttgaatgcatcgtgctggaccgcgtccccgccttccgtgacgagcacctgcagggcctgacgcgcttccgggccttgcgctcgctggtgctgggtggtacctaccgtgtgaccgagacagggctggatgctggcctgcaggagctcagctatctgcagaggcttgaggtgctgggctgcaccctgtctgccgacagcaccctgctggccatcagccgccacctccgagatgtgcgcaagatccggctgaccgtgaggggcctctctgcccctggcctggctgtgctggagggaatgccggccctggagagtctgtgcctgcagggtcccctcgtcaccccagaaatgccctcccccaatgaaatcctctcctcctgcctcactatgcccaagctcagagtccttgagctgcaggggctggggtgggagggtcaggaggcggagaagatcctgtgtaaggggctgccccactgtatggtcatcgtcagggcttgccccaaagagtctatggactggtggatgtaactactccacctgcccttgggacccatcccagttttcatcattgagccccagaccctctgagcagcaccttgaagagggcagataatcagacttgaggaaactgaaagccccaggttgagagaacagaggcctagggacctccagaccattggaatcactgtttgccagctgtgtggccttggtcatatcatcagcctctgggaagcctagttcccacatctggaaataaggatgatcatagctacctcacggttacattgcaaagccttactctaaaagctcccagcctccagaggctctcaatgaagagtcaccttcatggtcgtcttcaggaacaggacggatgaagaaggggtggggttaagactcaggggcacctgagggtctgagcccccttatgagtacccaagaaggactgtctatgcatgcacacccacaagcctatacaccatttatatacctacacgcacgcaagagacgcggagagataggcgatgcagactcgcgattcaatgatcgatatgctcataaaagtgctcaattatattttctgtattttgtatgctgtattttccaagacgtatattattttactattaaagaaaaaaatcattttttttcccg

SEQ ID NO: 73961 - DNA, 741 bp, Homo Sapiens
gtaagtcttattagtgctattcttaaaataagtgggctggagaagaatggagctccacatgccagcaccgtatatggaatacaaaagctggggaagcagggcctgccttacaggtgtggctgactctgagcccaggcctgcaggggtggagggcagtccctcagaatcccagaggcagtcccagcctcagaacccaggataggaaatgggtgtgtttagtggggaaagggacggggtgcagacggcagggccagtatggggccccctccctctcctctcctctcctatggtgagcccagcgtgggcaccgggccgtctcagccgtgttcccagggctgggaggacagctctggcccttcttaggcctagcctcgtcccaagctaaatgtaagccagttgggctgtgttaaaggaagcagtgtttttggttcgattctgcctctgtagctcaaggggggcagcccccagagtcctgtgcattctgccaaggctccatagctttgccaaatgcacggagctctgccattccggtgcagtgcaggccttgcgaagggtttatctgcgttcgtctcggtgggcttctcctgcatgggagttgtgttcctgtgcaagggggagctttgctccaggacaggatgactgtcttccctattcttagggacaagtcccaagatgccagaaaggcagtctcccaaggacccaccatgcagaagtgtcaataaaccacaagttctgaaaaaa

SEQ ID NO: 73962 - DNA, 656 bp, Homo Sapiens
  misc_feature (35)..(35): n is a, c, g, or t
cagaaaagagtccctgctgggcatggctagtgggnccggcctggtctccctcctccctttctcttcccaacctttcagacttgggacctctcttttccctctccctcagacacttcccttgtgccccgcccctcagggtgatctctgaacccaaacttgccccaaagaaggttgctctgtcctctccacatccccatctcctccctagggccttgttggggagaggctcctccatctttcccaagtcacaccatcgtttcctacgtggtctggacaagagcaagagcacaccttgtccccaccttctccagagcagccagaacccacctcaggtgccttccccatccggtgcagttaaggcacttctgccagcaccatggtatgagcactagacttggagttaagatttgagagccccctctgtcactgtggaagcttgagcatgttgcttgatctctctgaaccttgtgtttctcatctgtgaaaggtgataatgtggggctgctgtgagatttaaaggacataatgcacctacggtccaagcactgcctggaatacagcagaagctcagcagatactggacaacccatccccttagtagaggcactaaccatgtgacccaaggcaaaagtgcttaagaaaaagtgctttctctg

SEQ ID NO: 73963 - DNA, 1374 bp, Homo Sapiens
  misc_feature (88)..(88): n is a, c, g, or t
  misc_feature (1249)..(1249): n is a, c, g, or t
  misc_feature (1313)..(1313): n is a, c, g, or t
  misc_feature (1332)..(1332): n is a, c, g, or t
  misc_feature (1338)..(1338): n is a, c, g, or t
  misc_feature (1352)..(1352): n is a, c, g, or t
acaagtcccagaagaactacctgaagcaccaaagctccccaccccagcctggtggcagaggaagcaggtggcaccaactcaccaaagnggacttgggagccaccttctcactctgtggaagtactttagtgagagctgactggcaagataaaaaccctgaaattcccagaagttacagatgccttaaagactttctttggaagatcattgcctgtactattccttttttgtgtggcataaataatatattaacctgttacaactgacaacattggttttctgcagctagggagtcttgagtcgagactgctcgccttgatgacttgctcttttttggcagatgtgtggagttggctgttacgacatccctgtgtgatcccagaggaggggcagtagctgggcagaaactgcaggcacacatttgggtggatcacctggcttccagccccttcggggtggtgctcagtgtggggtgatggtatcatagaggaccacggcgcttatcagcattgtttctttggagtctgtgtaatggaatgtatttttcaaatactgatatttgcattttctgtaacaattccttataataaaatgaagtaaaattgtgcatttaaagtggaaactttaataagacatttgtagttacttctaatgcagaagtaccaataagcattaaaaacaaattttagaaaactcctgacgtgaataagtttcttgaccagctgccctccagaaagtttgaattccaacatttttcaggaacatgctgttgacagcagtaaaagtagctattttatgtatgtatttttaatttttaaaagtttcagtaggtttttggggttcaggtggtgtttggttacgtgaggttctttagcggtgatttccaggattttggggcacccatcacccaagcagtgtacactggacccttttatccctcaccccaaccctttcccctgagtccccaaagtccactgtatcattcttaatgcctttacatcctcatggcttagctcccgaaaagtagttattttaaacatactagctgcctgaacttactgtgcccttggcccagatttcagctcatagcaccgagcgtgatcactgaggcagtctcagtaccgtcacctgacccctctgaagttctcaggaggatccactcatgaggagctttctgctggccgaggcgtgaagggcgactggcactgtgggtttcagagaatgctaaggacagtttcaggccttgcanattaaaacctagtgatccataaagcccctgtacaaatcgctaccaatcaagcagctcacgtggncctcacgctgtcctgagcnatgtantcctttttcctgtnctcattttgcttaccctaggtc

SEQ ID NO: 73964 - DNA, 591 bp, Homo Sapiens
cctgtattgcatagtctgcacgtttaatcactttaaaacctctaacattatctcatgtccattaaatagaaccagcaatgctgggcctgtttaaattacaagaaaaaaatcactgtgcaccaacccagtatcttacaaaaccagccgggctggccacgagggcttagggcaggtggggccggcccaaccttgatgactcggaagctgaggtggcgccggttgagcatgatgatcttgtactcgtcggaggcatcatccaggacatggcgcagcgccagcagggagggcgtgttgctgaggatggcgctgcgccatgctgggtcaccctcatgtgagatgaccagccgctcctcgttggccgcaatggcatcgtatagggctgctggctcctcatattcatctggggacgtgaagtggtcctggtgaagcttgagggccatgcgaaccccaggcgccacaacgcggtgaagcaggtccatgtcggcaaagacccactcgtcacgtggggaggtgatgcgaaaatcccccttgaacagggcgtgcaggccgtagaggaagggctccaggcttgcagacatgctgtgagagagc

SEQ ID NO: 73965 - DNA, 1068 bp, Homo Sapiens
  misc_feature (291)..(291): n is a, c, g, or t
caaggcaggtgcctccagttgtgcacgtggatgtggctgtggctgtgtccatgacccacccctgtgctccgtgcctccaccaccactggccaccaggctggcgcagccaaggccgaagctctggctgaaccctgtgctggtgtcctgacaaccctcccctctcttgcacccgcctctcccgtcagggcccaagtccctgttttctgagcccgggctgcctgggctgttggcactcacagacctggagcccctgggtgggtggtggggaggggcgctggcccagccggcctnctctgccctcccacccgatgctgctttcccctgtgggaatctcaggggctgtttgaggatatattttcactttgtgattatttcactttagatgctgatgatttgtttttgtatttttaatgggggtagcagctggactacccacgttctcacacccaccgtccgccctgctcctccctggctgccctggccctgaggtgtgggggctgcagcatgttgctgaggagtgaggaatagttgagccccaagtcctgaagaggcgggccagccaggcgggctcaaggaaagggggtcccagtgggaggggcaggctgacatctgtgtttcaagtggggctcgccatgccgggggttcataggtcactggctctccaagtgccagaggtgggcaggtggtggcactgagcccccccaacactgtgccctggtggagaaagcactgacctgtcatgcccccctcaaacctcctcttctgacgtgccttttgcacccctcccattaggacaatcagtcccctcccatctgggagtccccttttcttttctaccctagccattcctggtacccagccatctgcccaggggtgccccctcctctcccatccccctgccctcgtggccagcccggctggttttgtaagatactgggttggtgcacagtgatttttttcttgtaatttaaacaggcccagcattgctggttctatttaatggacatgagataatgttagaggttttaaagtgattaaacgtgcagactatgcaaaccagaaaaaaaa

SEQ ID NO: 73966 - DNA, 731 bp, Homo Sapiens
  misc_feature (86)..(140): n is a, c, g, or t
cgcagtcctctctccatctttaatggggccccaggtgggcttggggcacgggtgtccttaaatacagcccccatgggcaaggcaannnnnnnnnnnnnnnnnnnnnnnnnnnnnnnnnnnnnnnnnnnnnnnnnnnnnnnacctcagctgcacttgcaggagcgcacgatcatgttggacagctgctccaccttgggcttgcggcccacgtagtacacgatgggcagcggctccagcgcctgcggcacgcagcacggcgccgccgaggcgcccgggttatgctggttgtacagggccaggaccttgctgtactgcgtgtccaggctccaaatgtaggggcagggcccgaggcagaagttggcatggtagcccttgggctcgtggatccacttccagccgaggtccttgcggaagtcaatgtacagctgccgcacgcagcagttcttctccgtggagctgaagcaatagttggtgtccagggctcggcggtgccgggagctttgcagatgctgggccctctccagcggggtggccatgagaagcaggaaaggccggttcatgccatgaatggtggccaggtcacctcggcggccggtagtgaacccgttgatgtccacttgcagtgtgttatccctgctgtcacaggagcagtgggcgctaaggcgaatgccttaattttcctccacggctcaaccactgccgcacaactccggtgacatcaaaagataacc

SEQ ID NO: 73967 - DNA, 2781 bp, Homo Sapiens
gggagagagtatgaagtcgacggcgcgccgaattcggcacgagggcagagccgccgccgccgcccgaaccagcccggatctgagggccctgtccagctgcaggcatgcacaatggtgccaccgcttgtcacccggctccccccaccccttcatttggacccgcagctgctgtgctgctctgtgccatcggctccttgttggtctgagtttcccggatgagctctgggtgtttgtgagtttggtttctctgccctgccccaagcgtgctgagacttggtgccgaaattcaagagccagctctgatagaaagccagcaccagcctcgggagctgctgagccaccaactcccaaagccagcctgcctccagctttactgagcacaggatgcgggggccaagatgatgctgaggcctgatgacatttatgcttaggggacaagagtttgaactcaagggactgtgacccctgcacactggagtggctcattgtggcaggtttctgccaatagacagcccctgacagtggcctcaaggagctgcaggtggggggctcagcctgcacccacttggagcccctgcaaggagcgaaccggtcagcaccaagtaacaccacacacacgcagcacccaggatgatggtttcacttcagtcttccccatcccaggttttatgttgctgggcttccggagagccggtccaagcggaggctttcagtgatttaagtacaaacatgcatctcgtgatagtcctgccttgagagcttaggaatcttccggataagtatgaagcaattcgtaggcctgtttcccatctgattccatagggggctgggtgtggccttcgggttgacatgagaaaggtctttagcaatcatttctgcaccggagatgagttttatcctgtgttggggagaggtgctcaccctccaccctgtgtccctgttttggtagcaagagtgaccgatgtcaagaacgagcatcaaagccagaatcctgcttgtttgcttaaaaatgtaattgggggcggcgggggaggagagggggaaagagacattcgcttggtttagtgaaacgcaggtgactttgtagctctgtggtcagcctacttgtctgctctgagggagagtgcgtggggagccatgctcaccgtggcaaacacaggaaccccatgactcgcccctcacctggcgtggagctgcctggtttgggctggagcagagctggtttcctggaatgttcctttggcccacatatggttctgtcccggtgagctctgttgtcagaggctcacgggacagaaccacatgctagggtctagggcccctgtctactgatagtcagtttgctgtgtcagaaagcacttctgaaagcagatatgagtcaccagacaggcaggatcttacaaaactcacgggcctctttggtctgcatgatggccccatgcgtttcataggctgtccactgagcgggattgtctgctgagtgggatgagccaactccagtttcttaaggaaaccactggaatctgcagcccccacatgcatctgtctaacgcatgcctcgtgttcgttttgcaaacatgcctgtggtggagggtggccagttgtagccctgtgcgtctcaaggctgccttgtgaggccattcccagtgcgtgcccttgagctccttaccaccccttttcctgctcggccctttaatccctgacagacctggactgtgtggctgaagggggacctgcagcactgcagaaatgcctctgcgtggtgccatgaaggaaagaaaccttggcctggtctcgagaagcttcccatgcttcaggaagttagtaagggtggggtggcttgcaggattggcctgtttccagggcctcccacactcattggccagattgtgaactttgtcaggcttgtccctccctgataccaagtatgtcgagaaccgatggccccaccctctggctggtgctgggccggaggtggctatggaggattttggcatgcgtggcctgtcgccacctggacagcgtgacctcaggggttgtccactttacctttatggtgaggcctgtcggatggctaagtccttgaaaccctagagctgtgacgtagaatatgtgctgtctgtgagaccgtgttcccaggagcactgactgcagttgagagagacccattttgctctcccttaccgccccccgccccgggtgctttctgcacaaagcctagagcctggcactcaagcccaccggtggcagctcctagtgactggacatgcctggaagacccctcagccttctgtttgcagaacgttcatttcaggagcttctccttcccacagacatcttacacttgctcgacactgccacctgcagaagcctggcgggctctggtcaccatgtgtctatctgaaggttgcactggccagcatgggcctgtcccaagcgagaggggagacacagtggactgaaaggactggttgaaagtggccaatctctatcagcttaatttggcagagaaaatttgtaacaactctgagcacatgctgggtgaagtcacagctcaaggaaagataaagctgggcggaaggaggtgtgcgtggcttctggggtgggacccagaggggaggctctgggacaggggctggggttcagtgccagggccctgaggaagaaatggggactgatctcaaaattccagaattccctgtacatctgttcacgtgcttgtgtccaggtgtgacttgtaaactgtctagtgtttgcattaaataaaatggcaccgagcag

SEQ ID NO: 73968 - DNA, 914 bp, Homo Sapiens
cctcccttcgggcgctctcgcgctaactgtgctcctccggggcccttcccgcctgctcccagccatggtggcctggcgctcggcgttccttgtctgcctcgctttctccttggccaccctggtccagcgaggatctggggactttgatgattttaacctggaggatgcagtgaaagaaacttcctcagtaaagcagccatgggaccacaccaccaccaccacaaccaataggccaggaaccaccagagctccggcaaaacctccaggtagtggattggacttggctgatgctttggatgatcaagatgatggccgcaggaaaccgggtataggaggaagagagagatggaaccatgtaaccaccacgaccaagaggccagtaaccaccagagctccagcaaatactttaggaaatgattttgacttggctgatgccctggatgatcgaaatgatcgagatgatggccgcaggaaaccaattgctggaggaggaggtttttcagacaaggatcttgaagacatagtagggggtggagaatacaaacctgacaagggtaacatggtgatggccggtaacggcagcaatgacgaccctggatctggcatggtggcagagcctggcacccattgccgggggtggccagcgccctggccatggccctcatacggtgccgtctccagctacatctcctaccagcagaaagaagtctgcttcaggcgcgtcagcagggtctccacgcagactacgtgacgggagagaacctggacgcgtggtatgggaggaagcccaagggaaatactccacgtgacacagcgcagctgaaggagacggcgcgcgccacgagcaaggacgggacggaggccggcacaggcagggatgcaaaagggggccaccggaggtacccgggaccgcc

SEQ ID NO: 73969 - DNA, 1008 bp, Homo Sapiens
  misc_feature (125)..(125): n is a, c, g, or t
  misc_feature (187)..(187): n is a, c, g, or t
ttacttggtgccggacccggtccggttctttgcaggggctcccaagtgggtgcaggttgagcccccccacctgcaagctccttgaggccactgtcaggggctgtctatgggcagaaacctgcccncattgagccatttccagtgtgcaggggtcaacagtccttgagtttcaaaactcttgtccccntaagcataaatgtcatcaggcctcagcatcatcttggcccccggcatcctgtgctcagtaaagctggaggcaggctggctttgggagttggtggctcagcagctcccgaggctggtgctggctttctatcagagctggctcttgaatttcggcaccaagtctcagcacgcttggggcagggcagagaaaaccaaactcacaaaacacccagagctcatccggggaaactcagaccaacaaggagctgatggcacagagcagcacagcagctgcgggtccaaatgaaggggtggggggagccgggtgacaagcggtggcaccattgtgcatgcctgcagctggacagggccctcagatccgggctggttcgggcggcggcggcggctctgcagactgcgtgtgcaacgtggagtatttcacttggggttcctcacataccacggcttccaggttctctcccttcacgtagtctgcgttgagaccctgctgaatgctgaagcagaacttcttctgctggtaggagatgtagctggagacggcaccgatgagggccatggccagggcgctggccaccccggcaatggtgccaggctctgccaccatgccagatccagggtcgtcattgctgccgtaccggccatcacctttacccttgtcaggtttgtattctccaccccctactatgtcttcaagatccttgtctgaaaaacctcctcctccagcaattggtttcctgcggccatcatctcgatcatttcgatcatccagggcatcagccaagtcaaaacctcgtgccgaattcgccacccaggcctcgctcc

SEQ ID NO: 73970 - DNA, 2649 bp, Homo Sapiens
  misc_feature (397)..(705): n is a, c, g, or t
  misc_feature (738)..(755): n is a, c, g, or t
  misc_feature (872)..(881): n is a, c, g, or t
  misc_feature (2157)..(2157): n is a, c, g, or t
cgtagaccaggtggtggacggggtgtaacaagaccaccttggacgaaactacacagatgggaaccgacgagtatttgaagagccccagcttccaaaatgggaaggagaccgtatcagtaagaacaggccgaacagagagccctcgaggccctcccggagaaactcgtgcgtcgtcatggcctgtcgggatgacaccctatacataggagttcgattttataatgatctacaggggacggagcctgtggaaaacggccagcaacgccgccattaagcaggtcgtgccttatgagtgcccttgtagccacatatctatcgctaccaaatcccctagttctgtggataacggtataccgccgttgagtgagatgagtaccgctccccgcacccgaaagcnnnnnnnnnnnnnnnnnnnnnnnnnnnnnnnnnnnnnnnnnnnnnnnnnnnnnnnnnnnnnnnnnnnnnnnnnnnnnnnnnnnnnnnnnnnnnnnnnnnnnnnnnnnnnnnnnnnnnnnnnnnnnnnnnnnnnnnnnnnnnnnnnnnnnnnnnnnnnnnnnnnnnnnnnnnnnnnnnnnnnnnnnnnnnnnnnnnnnnnnnnnnnnnnnnnnnnnnnnnnnnnnnnnnnnnnnnnnnnnnnnnnnnnnnnnnnnnnnnnnnnnnnnnnnnnnnnnnnnnnnnnnnnnnnnnnnnnnnnnnnnnnnnnnnaagaattcggcacgagggccgcggctgtaggcnnnnnnnnnnnnnnnnnnaacagtgaaaacttttaatagtttactgccacagtatcaacttttatatgtgtgcatatgtttaaatacaaattagaccataaataccagatggtaaaatagctgcctctaggctgnnnnnnnnnnctctctaccactaaataaacaatcttaagtaatactgaagaaaacagatgtgaggtaattttccatctaaagtgactacaacctacattaagacattttaactaaaaattcaagtagttataagactcttgtaactcaaaaatgtaactttaatacacattttcaaactaaagaaaaatactttaattataaataggcaaaataaataaaattattcctgctgaaataaaatcaagacattatttatttgaggactgtatatagcccagataaaaaaaatgaaacttacttgagaccctactaagaagctatataatactctaatacaaattatctatacagatacccatataagtatgtaagtatgtgtatacatatatattcaccaatgcatatatggaactttcattctagatgagaactaactgttccttttttttaagaaaagtatattccaattatgaaaatattcttaatttacattaagagatcactttttgtaggatgcacactaatgtgacaaggagcattttccgaacctttagaaacttctttagaaacattcatatcttatcaagttacttctgaatatttgttctactaagtttcaaaaacatcaattaaaaatcaacttctgttttctttttattatccctggttatacaaaatccccatgttcttttattatattgaatgttcagtctactgatttactggccccaagtaaccctcctatactttatccaattttttcaaagttattttccagttttccatagtttctagtaacgcccaacaggaacacattgaatgaaagatcatctgaacagaagcaatacaatttgagtcaaaagaaacaaatgattttacgttgtgtagtgaccgaagaaatcaacactgagtataacatttcagtgttctcagaatgagttttttcattataacaaggtaatatgtataaaccgaatcatatacaatgtgctgagttggcactgaaaagcaaaacaccaaaaacagcaacaacaacaatgcactgaactgtttctccccagccgcccagtctaatcacaggtcatctcccttcacagtaggccagcggtaatcttcggcaaaaacactagaacgattctctaagtaaaaaagaaatgtgtcaataattacttctttattttcaagggtcttccattcttgctttaaaataaacaaagtgcttttataatgttctctcatcccaaagaatgataatctgggaaaacttgaacagaaattcactttngatgtattccatcttccgtttccaagggcacccatgaatgcaccttcacattcctctcaattacaatgcagtctttcttcaaattgatgaaacgtgcacctcctgaagaaaactcttttgaaggagtcccctcatgcaagtttttgatgcagtcaggttcctgagcagaagagtttggatatcagattcagaagtttctgccggaagttcagtttgtctccaaatctcctgagttgagtagcacactcgacttccagctctgctggagcccgcgcggggctcggttgagcgttcttgcgcgccttcttcccaggcatctccgccggtgccgccgcccactcagctacagagcccgggaacctcagcctccaactggagcacctcggacagctgcaggacgcgagctgaacacgaacagtcctgcaggcagggatgctgggatcgggtgtccggacgcgcggagatgccaactacacacggtcccacgcgtcc

SEQ ID NO: 73971 - DNA, 2569 bp, Homo Sapiens
  misc_feature (893)..(909): n is a, c, g, or t
  misc_feature (1807)..(1807): n is a, c, g, or t
ccccatcaagcctttcccaccgaagggtttttattgcaaggatgagaggcatccaagtcccccctggaaaactgggggagacaaataaatgacgctgtgctttttggcgtggggatcgtcattgccatcttggggatcatcacgggggaatttctaccggatctattactggaagaagtgcgggtcgacgattcagaaccccctacgtgcagcactctataagcaagtgggctgcttcctctttggctgtgccatcagccagtctttcacagacattgccaaagtgtccatagggcgcctgcgtcctcacttcttgagtgtctgcaaccctgatttcagccagatcaactgctctgaaggctacattcagaactacagatgcagaggtgatgacagcaaagtccaggaagccaggaagtccttcttctctggccatgcctccttctccatgtacactatgctgtatttggtgctatacctgcaggcccgcttcacttggcgaggagcccgcctgctccggcccctcctgcagttcaccttgatcatgatggccttctacacgggactgtctcgcgtatcagaccacaagcaccatcccagtgatgttctggcaggatttgctcaaggagccctggtggcctgctgcatagttttcttcgtgtctgacctcttcaagactaagacgacgctctccctgcctgcccctgctatccggaaggaaatcctttcacctgtggacattattgacaggaacaatcaccacaacatgatgtaggtgccacccacctcctgagctgtttttgtaaaatgactgctgacagcaagttcttgctgctctccaatctcatcagacagtagaatgtagggaaaaacttttgcccgactgatttttnnnnnnnnnnnnnnnnntgttttactatgtggccttccaaaataggtagtgtttgcctatgtggaaacaacagcaaactaacaccaagtgccagagtcctggatgtgcaattggtttaagtgttcatgttctagtgaacacagcttgttcaggaacaaacactaaaacgatttgagtagaggctgctggtcaccttttgtgacctgaggaatcccaggcctgtgagaaaagcaaaaattcacattgcagcacatgatgccagaaatagcactgaatcaagaaaatagccattgcggagctgccctcttgagtctttctgtccatcccattctattctgtactgtgacttcagttcaggaagttttgttttgtgttttaaataaaaggaaagagcaagtttgctcagtcaagtgatcagatcccgaatctagattcccagttctaaggccttatcacctcccctgcccataggccaacaaccatagttcctcacattagtgattagcagactctttgtggacgagtgaatttcacaaacagcacaatttcagaagaaatcgagggcacaggccctcacttttcttcttttgacgcatcatcctgtgatgttgaaatgtcaattgcaggatgctgatgttgtgcacgtcaatcaccgggcacttgcatactcttagaaacagttcgacttcggttactgccttctcccttgaaatccttgctgcgtgcccaccaggatttcctgtgagggcccaggaatgagcaaggcatggtctgccaccagctgacggaaagcagccttctgtacaacagatgggagggtgaagggggcagaactgaaaatcgaaccaaccttttagctggtgcaaatcagaaggagccagagaagcaggcagtctcatgcatgagagttacccnttcaggatgacagagctgagggtctttgtaaggagttgctcttgctgtgtaaagcactattgtcttggggttgagccctagggcagttcttggtaggttctgctgggcagaacatatgggttaaatctcggtagagagttttcctcatcctctatccgtaagtgtccttccatgcaaggtcccactctaggtgatagacagggaccccttctactgaacctttgaggaaaggaggaaggaagaaatgcgtttagatcttggatgcagacctttcaaagggttaaatgtaaccatatggatcaaccacatgcacatccttactacagaatccgtcctttcatttcaacttatagcaagctatgatttttatatataaatattatataaataatgtataaaacattaaaagttaactatgtaagatattatttctgaaacaatttagctatatccactatgattataaactgtgtctcgacctgtgttatttacattagctgcttaaaaaagcattgagttaatttttttaaatatcaactaaaatatcatagttctgtggtagacattgttttataatgaaataactgcaactagagaaaactgtataaaaacattaaattgtcagtatttttgtaaggttccattttgtaaagagaataatattcaaagacttttgtagcatacaaagtgaaaacttgtatctgcgaaactatacttgtattaaatgtgctttttaaataaaagctcgtaacacaactaaaa

SEQ ID NO: 73972 - DNA, 1574 bp, Homo Sapiens
  misc_feature (129)..(138): n is a, c, g, or t
  misc_feature (244)..(264): n is a, c, g, or t
  misc_feature (1146)..(1157): n is a, c, g, or t
  misc_feature (1167)..(1184): n is a, c, g, or t
ggtgctgggtgggtgtctcatgttcacatctgaggggcctgcagccctgtaccgtggaggcttcccaaggcccccattttatacacccctcgttcgacccatggtaccgggcagagcagagaggccttnnnnnnnnnngcaccacaagccaaagcgtctctggggattaaggatcctttgccataaaactcattttgtgtctcagcagtgcagggattggggatggaaaaagtcgccagttttnnnnnnnnnnnnnnnnnnnnnaaagtggactttccactgtaatccaaccacctaagtttatcaggtgcttcactgaggaagcctagtttttttaagcacaatagcaaaaccatcagctctgtattttctcctgttatttcattacagtagctgcttgtgggaactaggaaaaattcttccaacatattttaaggcctaaaatcttagttccccattctcctaccttatagattcacaggcctttctcgcctaggcatcatagataaacgtaattgtttggggagttgaatttaatgaacttatctaactttgtaacccatcttggctttagtaactttatcaaggtggtggctttagtgaatataatgggtaaactttagaggacgctaaagcctccttttatagcgcttctcaacggtagggagagctgaagggaaaacattctgactgtgtggcagggtgattttcttccttatgaccacttacagtggatatttattgtacttgacccttttatgccctagaatgctgtgagggttaccatgttgaatttgtgcagaagctaaaagcaccagatgtgccagagatgcaatttgtgattatgtttgcactggattgtgatttgaacaggacacttataactaatgagttctttcttttgaggtggggagagggttgtaaatcaagacttcataccctatccttgtagctcggaaattgaggtgtagcttaggctgatgcggagagctgcagacagctggacctccttacacccatcagaccttggaataaaccgaaggtgaatgcagaggactctgaggtgccacccaagagccttttaaaataaatagaagtttttaaaaatgctacttaagagtcactgcagaagcatggagagagagnnnnnnnnnnnngacccaattnnnnnnnnnnnnnnnnnnaggcaagggtttacagagtaacaacttacgtgttgttgtaaattacctcatctgtataccttgtattgggacactatttctcagcactacctgtgtctgcattgcttagatggcaggaaatggaatggccaacatgaaaggttatgttggcaattactctgaaagattttttaaagtatttttaaactttgtttgaagtggtccctcccctcttcctctgcttttttttaagtttgaagccagaaggccctccccaccttgctttattggttgtaattgtattgtaattggtatgactaaaccataactgtgctgggaagaagttgtgccatgaaggtctttaattttttttaataaaaacatttaaataaaacctcgtgccgaattctt

SEQ ID NO: 73973 - DNA, 797 bp, Homo Sapiens
cagtcgacggtaccggacatatgcccgggaattcggccattacggccgggggattcctgtaatggctgcttcctagaaggtcgtgtcacgtggaacctcttaatctcagcatccggagctccaggaagggaaaatttcaagtcagatagaattctatatataccatttctttggaaccttcagccctcaagattccaacatcatgacctcagtttcaacacagttgtccttagtcctcatgtcactgcttttggtgctgcctgttgtggaagcagtagaagccggtgatgcaatcgcccttttgttaggtgtggttctcagcattacaggcatttgtgcctgcttgggggtatatgcacgaaaaagaaatggacagatgtgactttgaaaggcctactgagtcaaacctcaccctgaaaacctttgcgctttagaggctaaacctgagctttggtgtgtgaaaggttccaagaatcagtaaataagggagtttcacatttttcattgtttccatgaaatggcaacaaacatacatttataaattgaaacacacacaactgtttttctttacaacaaataatgcacagaaaaatgcagcctataattggctagttaggtagtcaaagaagtaagatggtgaaatttacataagtaatatttcataatcttagaattctctcaaagcatgttgacactcggaagacaggcaagtcttggccagaatcttaaggaaatcaacactgttcggttataatcactgcctcctgaaatcgttgaggagccttttcaattcagat

SEQ ID NO: 73974 - DNA, 1146 bp, Homo Sapiens
cagtcgacggtaccggacatatgcccgggaattcggccattacggccggggattcctgtaatggctgcttcctagaaggtaatgtacgaactcgtctccaaaggatacttaggttgcaccagtgtatttgtaaaacaggagcaaatttggaccttgccgggccaaagtcgtgtcacgtggaacctcttaatctcagcatccggagctccaggaagggaaaatttcaagtcagatagaattctatatataccatttctttggaaccttcagccctcaagattccaacatcatgacctcagtttcaacacagttgtccttagtcctcatgtcactgcttttggtgctgcctgttgtggaagcagtagaagccggtgatgcaatcgccctttgttaggtgtggttctcagcattacaggcatttgtgcctgcttgggggtatatgcacgaaaaagaaatggacagatgtgactttgaaaggcctactgagtcaaacctcaccctgaaaacctttgcgctttagaggctaaacctgagatttggtgtgtgaaaggttccaagaatcagtaaataagggagtttcacatttttcattgtttccatgaaatggcaacaaacatacatttataaattgacaaacaaatgttttctttacaacaaataatgcacagaaaaatgcagcctataatttgctagttaggtagtcaaagaagtaagatggctgaaatttacataagtaatatttcataatcttagaattctctcaaagcatgtgaaataggaagaaggaagttcttgcccagaatcttaggaaatcaccactgttcggttataatcactgcctcctgaatcgttgaggagtcttttaaattagatttttgttttgttgtctcccaagttaatattatatttagatatcagagagtcaggtaaaaaggaaaacttttatctctagggaaaaaacatttagaaaaatgtattcagtgtatctaatactgaaatgcggaaaaaaatttaatgttaaaaaaaaaactatagacattgacatggaaaagagatttaatgttttgaaaaaaaactttatattaactgagtaacatcctcctgatgagaagtactatattaaatataaacccattatgttataaa

SEQ ID NO: 73975 - DNA, 1423 bp, Homo Sapiens
atcttctggccacaccttattgacagccacccctcaggacatggaaaaggagctaggaattaagcacccactccacaggaagaagcttgttttagcagtgaaagccatcaacaccaaacaggaggagaagtctgcactgctagaccacatttgggtgacaaggtggcttgatgatattggcttaccccagtacaaagaccagtttcatgaatctagagttgacggacgaatgctgcaatacctaactgtgaacgatttactcttcttaaaagtcaccagccaactacatcatctcagcatcaaatgtgccattcacgtgctgcatgtcaacaagttcaacccccactgcctgcaccggcggccagctgatgagagtaacctttctccttcagaagttgtacagtggtccaaccacagggtgatggagtggttacgatctgtggacctggcagagtatgcacccaatcttcgagggagtggagtccatggaggcctcattatcctggagccacgcttcactggggacaccctggctatgcttctcaacatccccccacaaaagacgctcctcaggcgccacctgaccaccaagttcaatgccttgattggtccggaggctgaacaggagaagcgagagaaaatggcctcaccagcttacacaccactgaccaccacagccaaagtccggccaaggaaactaggattttcacacttcggaaacataagaaaaaagaagttcgatgaatcgacggactacatttgcccaatggagcccagtgacggtgtcagtgatagtcacagggtctacagtggctaccggggcctcagcccccttgatgcccctgaactggatgggctggaccaggtgggacagattagctgatgcccttgtcacctgccctctgtgcaccctgagagctcacagtaacactgtgtgtgtcaccatataactgcacctcacccccgcacgtgtgcatgactcgcagagaatattccagcaattgtgtacccctgggccagtctctttgaaccctgagggtggccaggatctggagctgcatctctaaggggccaggctttggggaccattgccaaaggtggactcaggaggaaagacacttaaagacacttttacatgtctagtaattcttgatgttcatcttcagcaccagtggaaacacatgaacttcgatgcaggtccagagaccatggacactcccacgaggctcagctctcaggcaccccctacacttcagttgagggaaaagctcaagtgccttaggcccgtggaccacagtcttggctgagatcaaagggatgagcaacagggacttctgccacagtgacaatggaattgtgttgtgccttacttcagaggtggtctcttctttcttgtaataaaagcaatatttatgcggaaaaa

SEQ ID NO: 73976 - DNA, 1031 bp, Homo Sapiens
  misc_feature (843)..(843): n is a, c, g, or t
atccacatcgggaagccggaattacttgcagggctaacctagtgcctatagctaaggcaggtacctgcatccttgtttttgtttagtggatcctctatccttcagagactctggaacccctgtggtcttctcttcatctaatgaccctgaggggatggagttttcaagtccttccagagaggaatgtcccaagcctttgagtagggtaagcatcatggctggcagcctcacaggattgcttctacttcaggcagtgtcgtgggcatcaggtgcccgcccctgcatccctaaaagcttcggctacagctcggtggtgtgtgtctgcaatgccacatactgtgactcctttgaccccccgacctttcctgcccttggtaccttcagccgctatgagagtacacgcagtgggcgacggatggagctgagtatggggcccatccaggctaatcacacgggcacaggcctgctactgaccctgcagccagaacagaagttccagaaagtgaagggatttggaggggccatgacagatgctgctgctctcaacatccttgccctgtcaccccctgcccaaaatttgctacttaaatcgtacttctctgaagaaggaatcggatataacatcatccgggtacccatggccagctgtgacttctccatccgcacctacacctatgcagacacccctgatgatttccagttgcacaacttcagcctcccagaggaagataccaagctcaagatacccctgaattcaccgagccctgcaagtgggcccagcgtccccgtttcactccttgccagccccctggacatcacccacttggctccagacccaatggnaacggtgaaaggggaaagggtcccctcacaggaacagcccgggagacatctaccacccaaacctggggccaaaaaacttttgtgaaatttcctgggatgccctaatgcttgagcacaaagttacccgtctctgggcaattggaacatttataaaaggaacccttccggcctgggaattttttcaaagg

SEQ ID NO: 73977 - DNA, 1455 bp, Homo Sapiens
  misc_feature (886)..(1011): n is a, c, g, or t
ggctgggtgtagaatcggcacgaaggcacagtgtgctggaatggttatcacaagaaggctgtgctgtcccctcgcaactccaggatggtgtgtagcccagtgactctgaggatcgcccctcctgacagaagattttcgcgttctgcgataccagagcagataatcagctcaacactgtcctcaccatcaagtaatgccccagacccatgtgcaaaggagactgtactgagtgccctcaaagagaagaagaagaaaaggacagtggaggaagaagaccaaatattccttgatggccaggaaaataaaagaagctgtcttgtcgacggtctcactgatgcctcttctgcattcaaagttcctcgacccgggccagatacactccagttcacagtggatgtcttccactttgctaatgactccagaaacatgatatacatcacctgccacctgaaggtcaccctagctgagcaggacccagatgaactcaacaaggcctgttccttcagcaagccttccaacagctggttcccagtggaaggcccggctgacatctgtcaatgctgtaacaaaggtgactgtggcactccaagccattccaggaggcagcctcgtgtcgtgagccagtggtccacgtctgcttcccgtaaccgcaggcatgtgacagaagaagcagatgtcaccgtgggggccactgatcttcctggacaggagtggtgaccatgaagtagagcagtgggctttgccttctgacacctcagtggtgctgctgggcgtaggcctggctgtggtggtgtccctgactctgactgctgttatcctggttctcaccaggaggtgtcgcactgcctcccaccctgtgtctgcttccgaataaaagaagaaagcnnnnnnnnnnnnnnnnnnnnnnnnnnnnnnnnnnnnnnnnnnnnnnnnnnnnnnnnnnnnnnnnnnnnnnnnnnnnnnnnnnnnnnnnnnnnnnnnnnnnnnnnnnnnnnnnnnnnnnnnnnnnnngacaacagcggaggaggcgccgaggcagagagagaacgacagcaagcagagagggacggcaggcgccggcgcccgaacgcaccaggagggagcggagaaggagagcagcaagcgaggcagagaaggcgacagaagagagagagcaacacgacggaccgaggagacgagaagaagagggcgaggagggacggacacgaggagaggggcagccagaaaaagggaggagaggagcaacaacatcaaacggagcggagccagaccgaacggcggaccaacgaagaagaggacgccgccgcagacgcgcaaaagccacgaagagccgagggcacgagaaacagagagcgggagaagacgacacaacgacaacacaaaacaactcacagacaggacgaacggggagccacccgcgagagaaaaagaagaaggaagagcataccacgcgcg

SEQ ID NO: 73978 - DNA, 2520 bp, Homo Sapiens
  misc_feature (1903)..(1925): n is a, c, g, or t
  misc_feature (2081)..(2107): n is a, c, g, or t
  misc_feature (2213)..(2221): n is a, c, g, or t
  misc_feature (2267)..(2286): n is a, c, g, or t
cccaagccttcgggtagggtaagcatcatggctggcagcctcacaggattgcttctacttcaggcagtgtcgtgggcatcagatgagtgccttcagccgctacaagagcagaagcagtgggcatggatggagctgagtacaggaccatacaggctaattgcaccggcacaggaatcggatataacatcatctgggtacccatgggccagctgtgacttctccatccgcacctacacctatgcagacacccctgatgatttccagttgcacaacttcagcctcccagaggaagataccaagctcaagatacccctgattcaccgagccctgcagttggcccagcgtcccgtttcactccttgccagcccctggacatcacccactcggctcaagaccaagggagcggggaatgggaaggggccactcaagggacagcccagagacatctaccaccagacctgggccagatacattgtgaagttcctggatgcctatgctgagcacaagttacagttctgggcagtgacagctgaaaatgagccttctgctgggctgttgagtggataccccttccagtgcctgggcttcacccctgaacatcagcgagacttcattgcccgtgacctaggtcctaccctctgccaacagtactcaccacaatgtccgcctactcatgctggatgaccaaacgcttgctgctgccccactgggcaaaggtggtactgacagaccccagaagcagctaaatatgttcatggcattgctgtacattggtacctggactttctggctccagccaaagccaccctaggggagacacaccgcctgttccccaacaccatgctctttgcctcagaggcctgtgtgggctccaagttctgggagcagagtgtgcggctaggctcctgggatcgagggatgcagtacagccacagcatcatcacgaacctcctgtaccatgtggtcggctggaccgactggaaccttgccctgaaccccgaaggaggacccaattgggtgcgtaactttgtcgacagtcccatcattgtagacatcaccaaggacacgttttacaaacagcccatgttctaccaccttggccacttcagcaagttcattcctgagggctcccagagagtggggctggttgccagtcagaagaacgacctggacgcagtggcactgatgcatcccgatggctctgctgttgtggtcgtgctaaaccgctcctctaaggatgtgcctcttaccatcaaggatcctgctgtgggcttcctggagacaatctcacctggctactccattcacacctacctgtggcgtcgccagtgatggagcagatactcaaggaggcactgggctcagcctgggcattaaagggacagagtcagctcacacgctgtctgtgactaaagagggcacagcagggccagtgtgagcttacagcgacgtaagcccaggggcaatggtttgggtgactcactttcccctctaggtggtgccaggggctggaggcccctagaaaaagatcagtaagccccagtgtccccccagcccccatgcttatgtgaacatgcgctgtgtgctgcttgctttggaaactgggcctgggtccaggcctagggtgagctcactgtccgtacaaacacaagatcagggctgagggtaaggaaaagaagagactaggaaagctgggcccaaaactggagactgtttgtctttcctggagatgcagaactgggcccgtggagcagcagtgtcagcatcagggcggaagccttaaagcagcagcgggtgtgcccaggcacccagatgattcctatggcaccagccaggaaaaatggcagctcttaaaggagaaaatgtttgagcccaaaaataaaatacataaagacaacaaagnnnnnnnnnnnnnnnnnnnnnnncttggtcggccgccttcggcccctcaaaaagcttttcataaaccattccgttgtggcggcgcgggccccagtaagggtaagtggacacatggcccactaccctgttttccctaagaaaaacccctgggcccatggaactagatgctttgggtattnnnnnnnnnnnnnnnnnnnnnnnnnnngggggggtacaacccggaagcggtttcttgaaaaacaatttcccagaaatgggggggtttccctcgggggccccattttcccgtggggaattcttattcccaaccnnnnnnnnnctccctaacgccgcaaggctcccaacttttctccaaaaaattttannnnnnnnnnnnnnnnnnnnttgccgcaattctttattctgggcagggaaacctgggtttgggaaaaattctaaattttaaaggcctatcttctctccgccccagcactattggggaaaaaagcccgcatttccacaaaaagaagcggggccctttttctatgaaaaacccctgtgggaattccgcgcccatggcgggggagctaatttctgagccaaccccttttgtgtagctccgccacctttaggggaaac

SEQ ID NO: 73979 - DNA, 1043 bp, Homo Sapiens
tacagtgagagagaactgttgataacgggatgtgaatttccatgtcaacatagtccagtgcattgttggactttaccaaatcggtttgtaataacacctagaagagctatccgatccatcagtgccagtattcctgtctgggggtactttcccaccgtgtgctggaatggttatcacaagaaggctgtgctgtcccctcgcaactccaggatggtgtgtagcccagtgactgtgaggatcgcccctcctgacagaagattttcgcgttctgcgataccagagcagataatcagctcaacactgtcctcaccatcaagtaacgccccagaaccattgtgcaaggagacagtactgagtgccctcaaagagaagaagaagaaaaggacagtggaggaagaagaccaaatattccttgatggccaggaaaataaaagaaggcgccatgatagcagtggcagtggacattcagcatttgagcccctggtggccaatggagtccccgcttcttttgtgcctaagcctgggtctctgaagagaggcctcaattctcagagctcagatgaccacttgaataagagatcccgaagctcttccatgagctccttgacaggcgcttacacaagtggcatccctagcatccagccgcaatgccattaccagttcctacagctccacatcgaggcatctcacagctctggaagagaaatggccccagttcatcacccttctctagcccagcctcatcccgctcccagacaccggagaggccagcaaacgcaaaataagaagaagaagagctgtgtcatcattccagttcttcaactccattggcagccagacaaggagtcccagggcagaaacaggctgcagatacaaacccccaaggcaagaacacaacaacatcgacattctcagtctacaacctggcaggcatctgggcagcgtaaagctggcacaagttcacgctgctgtcttctcggggaggggaacaagtgaacatgtactcaacactcccagattgggatattcgaatcatggacgaa

SEQ ID NO: 73980 - DNA, 1111 bp, Homo Sapiens
gcccagtggggcagcagcaagcgttggtcatccagcatgagtaggcggacattgtggtgagtactattggcgagggtaggacctaggtcacgggcaatgaagtctcgctgatgttcaggcgtgaagcccaggcactggaaagggtatccactcaacagcccagcagaaggctcattttcagctgtcactgcccagaactgtaacttgtgctcagcataggcatcaaggaacttcacaaagtatctggcccaggtctggtggtagatgtctccgggctgtcccttgagtgaacccttcccattcaccgctccattggtcttgagccaagtgggtgatgtccaggggctggcaaggagtgaaacgggacgctgggccaactgcagggctcggtgaatcaggggtatctttgagctttggtatcttcctctgggaggctgaagttgtgcaactggaaatcatcaggggtgtctgcataggtgtaggtgcggatggagaagtcacagctggccatgggtacccggatgatgttatatccgattccttcttcagagaagtacgatttaagtagcaaattttgggcagggggtgacagggcaaggatgttgagagcagcagcatctgtcatggcccctccaaatcccttcactttctggaacttctgttctggctgcagggtcagtagcaggcctgtgcccgtgtgattagccgtggatgggccccatactcagctccatccgtcgcccactgcgtgtactctcatagcggctgaaggtaccaagggcaggaaaggtcggggggtcaaaggagtcacagtatgtggcattgcagacacacaccaccgagctgtagccgaagcttttagggatgcaggggcgggcacctgatgcccacgacactgcctgaagtagaagcaatcctgtgaggctgccagccatgatgcttaccctactcaaaggcttgggacattcctctctggaaggacttgaaaactccatcccctcagggtcattagatgaagagaagaccacaggggttccagagtctctgaaggatagaggatccactaaacataaacaaggatgcaggtacctgccttagctataggcactag

SEQ ID NO: 73981 - DNA, 730 bp, Homo Sapiens
  misc_feature (66)..(66): n is a, c, g, or t
agaatcgggcacgaggggactagaaggaggacacagggtcctggagggaaggcagctggcaagtancagagcagaaagactttgcacctctggctccagagagctcacaggcaggggctggtccagcccagaggcgatgaagacagtgacgatgatgatggtggtggagatgcaggcgctgactcaggttctgagagctgtgttgtctgcgtgcacatgggtgagccggaaaggagacctgcagagaatgaaacagacacataaaggaaagcctcccagcagcatggctttcaccggcaagttcgagatggagagtgagaagaattatgatgagttcatgaagctccttgggatctccagcgatgtaatcgaaaaggcccgcaacttcaagatcgtcacggaggtgcagcaggatgggcaggacttcacttggtcccagcactactccgggggccacaccatgaccaacaagttcactgttggcaaggaaagcaacatacagacaatggggggcaagacgttcaaggccactgtgcagatggagggcgggaagctggtggtgaatttccccaactatcaccagacctcagagatcgtgggtgacaagctggtggaggtctccaccatcggaggcgtgacctatgagcgcgtgagcaagagactggcctaagcagccaggcccggcccagggagctacaaacccaccaataaaactgatataaggacagac

SEQ ID NO: 73982 - DNA, 1256 bp, Homo Sapiens
aagaaagaaagaaaagaaacagaaataaacttaggacacagcagacggcccatcctgagggtaccacatagcagatgctgggaccttttttcaggtggacgccacatgacctttcctttgcaggcatccatgctgatgttcacaaggcacacagcatttcagctgaagaaagaactggcaggattttcatcacgaaagggcactgtctatcgtttatgaaaatgaagcatatgaagtaaaagtttggaaacagatggaattaaatcttctgacagattttaaaataagatctaaaaaagagcaagacatgctcttggatggggaaacttaatatcagaaaaatgtcaattttcccattttttccatataaatttaatgtaattcaaattccattaccaacagggtgattttttaaaaaactagataaaatgatctgaaagattatgcagcagaataaatgcccaagaattaccagggaagactggaaaaaagactgctgtgggggttttgccttcctggaaataagaccatactgcaaagtcactgtaatcagatcaatatggcattggcagaggactagacaatggaaaggaatggagaatacaaaaataagtttcaggatatatgagaatgagatatatgccaaaggtagtattttgattcggtgggagaagggcagactgtgaagtaagtggtacccagccacaactgaatatccatctgggataaaataaaattgcactcgtcttagagatccaaatcaacttcagatggattaaaactttgaatgtaaaaaacataaatgactaacagtcctgcaaaatatcttggagacaacctgtgccatctggagagtgggaagagcacatgcaaaggccaaggggtggagcagcccagcatgttctggaaaaggtagggctccccaaggctgggataatggtggagacctgggtgtgtgggagcacaggggtgggggcccgtgggccaggaatgcacagagaggggctggtgctctgccgcaggcccaagcccccaaagcccggtcattcccagcaccatcttcacgggtttctgcccaggtctttctgctgcatctcttcctcccccgattccttaatcattttttttaaaatcagttcatgtctttgtaaaccaaattatttctaaaaggcaaatttatattactgccgaaatcaagggtcagtgagctagttgtgtatgttctgaatcacatggaaataaatgcatcgaacatt

SEQ ID NO: 73983 - DNA, 1349 bp, Homo Sapiens
  misc_feature (91)..(105): n is a, c, g, or t
  misc_feature (1241)..(1275): n is a, c, g, or t
ctgagaacacttttcataaatttgaggaactgcctaaatattataggcttgaacatctgaacttgtcctcagcatgaaagcaggtgagacnnnnnnnnnnnnnnnaaacaaatgagcaggtaacacccagagaggttaagtggtttagccactggaaagataaggaagttgggtgtgatgtttacttctctatgatgatgcttctcaaactttcatgtgcatacaactcctttggatctcatcaaaatgtcctgggtccagagtggggcttcagattctgcatttctaataaggctctaggaaatgttgaggctcttggtctgtgggccacacttttaatagcatggactacaacacaaagagggatccaccccggccttcctgggtcatgagaggcctgcttcagcgttatctgcctctccaagcacatccccaagcaaaaggtttcgatgcactgcataaggtggcagctgcctacaagactgcgttaatatattttctgagagcaccgtgactacatgaacagccaaacaagtaacataatttgagtaacataatctaaatttgacaggtctatttgctgagaataaaactcatctcctacttatgaagtctttcttaaagtgaacatgatatataaaggtattaaaaaacccagcatattaaatttcatagtaaaatgccgcatgtgcacatgtatacagatagtatgagttctaagaaattcaatgcactgtaatcagaataaagtgctaccactgctcccagctaaaatcatctcctcttccaaatataaggaaaaacccttgaattgtaaggaaaatgactgcattgcctgccaacacaaggccgcaggctccccatttgatcacagccacacgagcaagaataacaggaaatccaaaggcagaaacaacaattccagtagtgaagaaatatgccagttcccgacaggcactactggttgcatctgagtcataggtgactcttttggcaatgaaatgggggatgggggagatggcgtggaaaatcaggacgaataagggccagtaaacgccataatcctctaaggcacatcccagcataagaaaagtcagtccaatagccccactgaaggataatgccacgagagctttaacgcccgccatgtctcccgaactgggccgcggctgcttccggcttcctgccaccccggccgtaatggccgaattcccgggcatatgtccggtaccgtcgactgnnnnnnnnnnnnnnnnnnnnnnnnnnnnnnnnnnncggccgcttcctcgctcactactcgctgcgctcgtcgttcgctacagcgagctagcgccctatatgattatcat

SEQ ID NO: 73984 - DNA, 2238 bp, Homo Sapiens
  misc_feature (771)..(781): n is a, c, g, or t
gcctaacagcttttggtttgttcatagagaattcttcgcttcatttttgatggctggctctgaaagcaccatgtggagtggaggtggagggagcgaggaaccatgaatgaactcgcaggcagtgccgggcggccccctggctctctgcgttttgcctttaacactaactgtactgttttttctattcacgtgtgtctagctgcaggatgtaacatggaaaacagtaactaaagattaaattcaaaggactttcagaagttaaggttaagtttttacgtttaatctgctgtttacctaaacttgtatgtataatttttgggtgggtatggggaattgctttgctaaaaataagctcccagggtgtttcaaacttagagaagaccaagggacagtattttttatcaaaggaatactattttttcacactacgtcaacttggttgctctgataccccagagcctgattgggggcctcccggccctggctcacgccaagtccctggtgctgggtttgctctcccgctgttgccaggggctggaagctggaggggtctcttgggccatggacatccccacttccagcccatgtacactagtggcccacgaccaaggggtcttcatttccatgaaaaagggactccaagaggcagtggtggctgtggcccccaactttggtgctccagggtgggccagctgcttgtgggggcacctgggaggtcaaaggtctccaccacatcaacctattttgttttaccctttttctgtgcattgnnnnnnnnnnncctcctaaaaggaatatcacggttttttgaaacactcagtgggggacattttggtgaagatgcaatatttttatgtcatgtgatgctctttcctcacttgaccttggccgctttgtcctaacagtccacagtcctgccccgacccaccccatcccttttctctggcactccagtcccaggccttgggcctgaactactggaaaaggtctggcggctggggaggagtgccagcaatagttcataataaaaatctgttagctctcaaagctaattttttactaaagtttttatacagcctcaaattgttttattaaaaaaaagatttaaaatggtgatgcttacagcagtttgtacgagctcttaagtgttgattccatggaacttgacggctttgcttgttttgattcttttccccctacttttcctaatggtttaaattctggaattacactggggttcttttgccttttttagcagaacatccgtccgtccatctgcatctctgtcccatgactcaggggcgcccactctgcttcgattctcctcctgtggaagaaaccattttgagcatgacttttcttgatgtctgaagcgttattttgggtactttttagggaggaatgcctttcgcaataatgtatccattccctgattgagggtgggtgggtggacccaggctccctttgcacacagagcagctacttctaagccatatcgactgttttgcagaggatttgtgtgtgctgcctcaggaggggagggctggtaggagggggggagaggtctctgtcctactgctctccagagggcatttccccttgcgccttctcccacagggcccagcccctctcccctgccccagtccccagggggtactctggagtgagcagtgcccctgtgggggagcctgtaaatgcgggctcagtggaccactggtgactgggctcatgcctccaagtcagagtttccctggtgccccagagacaggagcacaagtgggatctgacctggtgagattatttctgatgacctcatcaaaaaataaacaattcccaatgttccaggtgagggctttgaaaggccttccaaacagctccgtcgcccctagcaactccaccattgggcactgccatgcagagacgtggctggcccagaatggcctgttgccatagcaactggaggcgatggggcagtgaacagaataacaacagcaacaatgcctttgcaggcagcctgctcccctgagcgctgggctggtgatggccgttggactctgtgagatggagagccaatctcacattcaagtgttcaccaaccactgatgtgtttttatttccttctatatgattttaagatgtgttttctgcattctgtaaagaaacatatcaaactaaataaaagcagtgtctttattacttcgcagaagaccaaatccaggaataaaaatcctaccatgt

SEQ ID NO: 73985 - DNA, 1532 bp, Homo Sapiens
  misc_feature (73)..(73): n is a, c, g, or t
  misc_feature (114)..(114): n is a, c, g, or t
tgtgtgaatgtgagcgataccatttcacacaggaaccagttttgacatgatacgaaatttatacgactccctntagggaatttgcccctcgagcccaagaatcggcacgaagcncgactgccttgggacaatagctgcaggagatatatccggggagctcattgctgctatattaccagatatggcactgaatccaataaatgtcaagcgacctgtagagcgaagatttcctatatataaagcagatctgataccgtatcaggacagtcctgaaggtccagaccattcttctgcttcatctggggtccccaaccctcccaaggctcgaacttacactgaaactgtcaaccatcactacttgctctttcaagacacagatttgggttcattccatgatctgctccgtagagaaccaatgctgcgcatgcaggagggagaggggcattctcaactctgcctggacaggctgcagctggaggctattcataaggtacgtttcagcccaaacctggactcctatggatggctggtatctggggggcagtcagggctggttcgaatccattttgtccgtggactcgcctccccactgggccaccgtatgcagcttgaaagccgagcccacttcaatgctatgttccaaccatcctcccccactagacggcctggcttctctccaaccagccatcgccttctgcccactccctagccttggcccacaccagatccttggagtgaagtcggtcaagaacaaatggcccctatgcacagagccataggaactgggggccttccctggacagtgatcatgccaggcctggacctttaggcctgcctccccaggactccttagatcccactctttctacagacttctgtgatcacagccccctgcgggcaggggggctctccctccaccaactctcaaggctcctcagcctaagactatggctcatgagaaacactcaggcctgacctaggcttgggagtcaaactgctcatattgagcatattgttaagtgggtaaagccaagtaaaggtactgggtgtttttgtgaccacttgtgaatgggtgtatggagaactgaaaagggtatctgcatgaaggctcctgtctgactattccaggatccaatattactgccttctgaaacttcctctttagggtaaccatcatgtatgcccacgagggtgatagtaattcgtgagactgaagttgcttagagtacttctttgaccaaggaataccacagacaccctaccgatagaacagtggctcagatcttacttgctcctgcttacgaagtattcccaatcactggtcatctgaccctacttgaacactcctgaacagtcatgttttttaaaatcttcctttatatcaagtcagagagtatacttctataaatttcactcatggatgttaggaaatctagtcatcttccctgtgattgccctgttaagtatttaaccatagctatcatgtgtttcccaaatcttctctagattaaatatcttcagttacttcaaaa

SEQ ID NO: 73986 - DNA, 696 bp, Homo Sapiens
cacagctgctacccagaggccctgctgcacttcgtacccactgcttcaactggcactcccccacgtacgagtatgcgttgagacatttgtacgtgctggtcaacctttgtgagaagccgtatccacttcacaggataaaattgtccatggaccacgtgtgccttggtcactactgaagagctgcctcctggaagcttttccaagtgtgagcgccccaccgactgtgtgctgatcagagactggagaggtggagtgagaagtctccgctgctcgggccctcctggggagcccccgctccagggctcgctccaggaccttcttcacaagatgacttgctcgctgttacctgcttccccagtcttttctgaaaaactacaaattagggtgggaaaagctctgtattgagaagggtcatatttgctttctaggaggtttgttgttttgcctgttagttttgaggagcaggaagctcatgggggcttctgtagcccctctcaaaaggagtctttattctgagaatttgaagctgaaacctctttaaatcttcagaatgattttattgaagagggccgcaagccccaaatggaaaactgtttttagaaaatatgatgatttttgattgcttttgtatttaattctgcaggtgttcaagtcttaaaaaataaagatttataacagaacccaaatattcacgtc

SEQ ID NO: 73987 - DNA, 937 bp, Homo Sapiens
aaaacttgaaggatatttcagtgtcatggacttcctcaaaatgaagtgctattttcttatttttaatcaaataactagacatatatcagaaactttaaaatgtaaaagttgtacactttcaacattttattacgattattattcagcagcacattctgaggggggaacaattcacaccaccaataataacctggtaagatttcaggaggtaaagaaggtggaataattgacggggagatagcgcctgaaataaacaaaatatgggcatgcatgctaaagggaaaatgtgtgcaggtctactgcattaaatcctgtgtgctcctcttttggatttacagaaatgtgtcaaatgtaaatctttcaaagccatttaaaaatattcactttagttctctgtgaagaagaggagaaaagcaatcctcctgattgtattgttttaaactttaagaatttatcaaaatgccggtacttaggacctaaatttatctatgtctgtcatacgctaaaatgatattggtctttgaatttggtatacatttattctgttcactatcacaaaatcatctatatttatagaggaatagaagtttatatatatataataccatatttttaatttcacaaataaaaaattcaaagttttgtacaaaattatatggattttgtgcctgaaaataatagagcttgagctgtctgaactattttacattttatggtgtctcatagccaatcccacagtgtaaaaattcaggaattcaatgaaaaaagtctacccttaaaccctcagatcagtctttccaaagaattactctgtttgcattgttgtgattgacatttgtgaagtcccaagaaaagatctgttttcatgacagtagaaaatagaagtttgcaaattatttctttactcaaagaggattaaaagagaactctaatttta

SEQ ID NO: 73988 - DNA, 764 bp, Homo Sapiens
  misc_feature (33)..(33): n is a, c, g, or t
acatccccttcagtccgaggaccctgccaggtntgaattgtcctagaacatgatggagaagaagcacctcagcagttttcagaggatggagactttgtcatcaacaacgtagaaggaaaaggcattggaaactacagctgcagctaccgcctccaggcctaccctgatatctggtcagagccaagtgatcccctggagctggtgggggcagcagggcctgttgctcaggagtgcactgtagggaacattgtccgaaaagtagcctaatcgtggtggttgttgtagccttgggggtagtgctagccatagagtggaagaagtggcctcgactgcgaaccagaggctcagagacagacggaagagaccagaccattgcccttgaagagtgtaaccaagaaggagaaccaggcacccctgccaattctccttcatcaacctctcagagaatctctgtggaactgcccgttccaatataataatctcctcctttacaagagctttcctctcctctctcttgctctcagagacctataaatccaaccagttaccctgcaagtcagccccatctgctgttccttggtctctaatcacctgagctgggtaaaggggattctgggagttgagagctctgccagggtgagatgtttcctgaagagaggttccccacccctgtaactcctcactgtactgatttactggcgcatgaaattctattaaaaatgcattcttctgaataaaaagagtattcactatttaacttcaaa

SEQ ID NO: 73989 - DNA, 1317 bp, Homo Sapiens
tggaccggtccggaattcccgggatatcgtcgaccccgcgtccgcggacgcgtgggcgcggcgcggacggtagttgctgtggtttccgttctgagctcgcagcttaggagctgaagatcgcggacttagcgttgccgcgtccgagtccggccatcagtggctgcagatccggaggccaggagctcaaccacccttcttcggaacagggccggcctgctgctgtgccctcgacgctcggtgcctgtatctactccggggcctaggtcggctccgggggcggcttaggagaaggccgccggcgagatgttcaaaaacacgttccagagcggcttcctctccatcctctacagcatcggcagcaagcctctgcaaatctgggacaaaaaggtacggaatggccacatcaaaagaatcactgataatgacatccagtccctggtgctagagattgaagggacaaatgtaagcaccacatatatcacatgccctgcagaccccaagaagacgctgggaattaaacttcctttccttgtcatgattatcaaaaacctgaagaagtattttaccttcgaagtgcaggtactagatgacaagaatgtgcgtcgtcgctttcgggcaagtaactaccagagcaccacccgggtcaaacccttcatctgcaccatgcccatgcggctggatgacggctggaaccagattcagttcaacttgctagacttcacacggcgagcatacggcaccaattacatcgagaccctcagagtgcagatccatgcaaattgtcgcatccgacgggtttacttctcagacagactctactcagaagatgagctgccggcagagttcaaactgtatctcccagttcagaacaaggcaaagcaataactggaattgtgactcgagggatagacccctggatgtgactcttctttttaaaaggaaactatgtggaggacgatgcaaaaacatatttatcttagtttgctctgctgtagttctgttatttatacttggtgttgcttgtcatggacaccggtgaacatgccgtaactctgtgactgcattgtaagtgcagtgggggtaagcagtcctgtgagtggcgcatgaacgctggagcttattccgccgcctgccccagtgtggggggagatacctttaccatgaacttacagaattaaagatggcccataaggaattccagaccaatatttcttcctgcggtttattctatgttttatatattatctaaatatatgtatatgctgtgtcatactcataatctggaaatgaataaagtgatatattcctggtttggaa

SEQ ID NO: 73990 - DNA, 481 bp, Homo Sapiens
  misc_feature (464)..(464): n is a, c, g, or t
gtctcagccttgggaaagcaagctgtgggaattcaggtccttgtctggacaaggttgtgtgcttcttccaagacagagctagtgtgatgcttcttctctgtatttcacaggtactagatgacaagaatgtgcgtcgtcgctttcgggcaagtaactaccagagcaccatccgggtcaaacccttcatctgcaccatgcccatgcggctggatgacggctggaaccagattcagttcaacttgctagacttcacacggcgagcatacggcaccaattacatcgagaccctcagagtgcagatccatgcaaattgtcgcatccgacgggtttacttctcagacagactctactcagaagatgagctgccggcagagttcaaactgtatctcccagttcagaacaaggcaaagcaataactggaattgtgactcgagggatagaccccctgatgtgactcttctttntaaaaggaaactatgtg

SEQ ID NO: 73991 - DNA, 1015 bp, Homo Sapiens
  misc_feature (113)..(113): n is a, c, g, or t
  misc_feature (293)..(293): n is a, c, g, or t
ctcgtctacatcgacgtccatgaggcgtacaacatatgtctcatctgccccgtacattttccgtgtttttgatgtgcgaacatcacacgaacgtgactgtagattatcgctcnttggattgcctgagcaagatcgcagaggccattccgagtgtcatgcagtgtcaggctaggccagcaggacaagtgatggtgggacagtgctcctgcctaggaccacctcagccactaccccttgtggacaactgtgagtagctcgatttccccccacctgctgtgcaacttcctgtgctntgaggttggactaacttgtcttcaggagctaattaactgtacagccctccccacgccccacccatacggtcactgcatttggtcagcctgcttcttcaggtcgatgccctccttctgatactccatctccttcaggggaggttggggccccactggactgggtgtcaagatgtgaaagcttatgggagctttaaggagacttcatggtggttccatgcaggtggttctgccatccctgctgatttagcctggtgcctgtgtgtgtccactcacgtacacgtggggtgggggaaacgtgtctacagatgacgctaaatcagttggggtctactctaaacagcattgtgtgtaagaagcatcctcaagctcccagttaagtaacttgactacttttatttgggaatttcagactatagaagctctcttatgttttatgtccagattctgtgaccactagttactgtatcagaactcatcaggtacccacttataaatagcactgatctggctgtatactgatccatcactaacctgttttctaggacccagcgtatgtagcatttgtattgcagtttccctggcttacttgtgttttgcactgatgaattttgacagggtaattgccactttacttgtgcaatactgctgtaaataactgcagatttttaaacaatcttttatgttaattttataaaaataaaactttcaactagttaaaaaaa

SEQ ID NO: 73992 - DNA, 1716 bp, Homo Sapiens
  misc_feature (1411)..(1411): n is a, c, g, or t
tcaactttttaaaatcaaggattgtaaatattgtagatcttttttctgtgtgatgtgtcctactgtttcataatgctgtaacttgtagaaatattgtatatttattttctgcttatttaatgtcttaatttctgaaaagtattaacatccctgtctcccactcccctgccgtcccatgaagttaactcctgagagttgtcgggggtgactggagagctcattgcagaccacgtggtcctccagggtggctctccaccttcgggtcctggtatttccagtcaagtgggtttcaattcttgggctttgccgcccttatgatgaagtgtgtgtttgatgccagtgagaaactcagtctggcaggctacaaaattctactccaagaaatacccagcaaccttctgtttgttccaaagcaactagcttatcatgcaagcaaattttgctgactccaggctttatctttaggaaaacaaaaaaaccaaagtattatcagcaggtgggaaagatttttctattgaaaatttatccctgacaactcagcgtttagaaaagaaataaaatgtgccacttccagaggtgctgcattgcagttgttcagggctagggccacgcaggacaagtgaatgggtgggacaggtggctcctgcctaaggaccacctcaggccactaaccccttgtggacaactgtgagtagctgggtttttccccccacctgctgtgcaacttcctgtgctttgaggttggactaacttgtcttcaggagctaattaaatgtacaggccctccccacgccccacccatacggtcactgcatttgggccagcctgctttcttaaggtcgatgccctcctttctgataatccatctccctccaggggaggttggcgcccccactggactgggtgtcaagatgtgaaagcttatgggagctttaaggagacttcctggtggttccatgcacgaggttctgccatccctgctgatttaccctggagcctgtgtgcgtccactcacctacccctgggggtgccgcgaaaccctgtctaccgcatgacccttccatcagcctgggctcctacctctaatcagtccttgctgctgtaaataaatcactcctcctacgcctcccacgctttcaaaataaacctttggaactaactttattaattgttggggaacatttttctccaaacctaagtagagaaaggcctcctgccctgcaatgggcacgttcaaacggcgcaccaccgaacattacctcggtcgtgaacacccgcccctatagtcctctccactctctggggatatttccccaaaaagaaacttttccacgaacaccctgcggggctaaacatcccgacgcaatttttaaaattacgcatattataaacaacacgttgtcgggctctntttagggcgattatgcctccaataaacacgcggcgaacaccccacttctcaccagtctacaaaccacttgaccacattacttcccatacagcggataaacacaaacgaagaggacagaggatgtagatcctaatttatgagttcttttgtgcgatgacacttttccccccttgggggtgtttagcctttcggtgataatcttttgtgcgacctgacaccttagaaacattatccagcacagcggagtgacaatctgcgccacccccttttctacatctattcaccaaaagaaatagtagacttat

SEQ ID NO: 73993 - DNA, 1020 bp, Homo Sapiens
  misc_feature (216)..(423): n is a, c, g, or t
  misc_feature (431)..(530): n is a, c, g, or t
  misc_feature (563)..(604): n is a, c, g, or t
  misc_feature (634)..(643): n is a, c, g, or t
  misc_feature (694)..(722): n is a, c, g, or t
  misc_feature (726)..(740): n is a, c, g, or t
  misc_feature (819)..(827): n is a, c, g, or t
  misc_feature (867)..(893): n is a, c, g, or t
atttaacaccatgtgattaaggtcggcgctgcctcccccgacccactcagcgatgggaaatgaattggcttgtctagcccccctgctgggtgcttgttcagcccccactctgggctgtggagtgggtgggcaacgggcctgggtagctgggcccaggcaacccacccctccacctctggaggtcccaccaggctattaaaggggaatgttactgcnnnnnnnnnnnnnnnnnnnnnnnnnnnnnnnnnnnnnnnnnnnnnnnnnnnnnnnnnnnnnnnnnnnnnnnnnnnnnnnnnnnnnnnnnnnnnnnnnnnnnnnnnnnnnnnnnnnnnnnnnnnnnnnnnnnnnnnnnnnnnnnnnnnnnnnnnnnnnnnnnnnnnnnnnnnnnnnnnnnnnnnnnnnnnnnnnnnnnnnnnnnnnnnntttttttnnnnnnnnnnnnnnnnnnnnnnnnnnnnnnnnnnnnnnnnnnnnnnnnnnnnnnnnnnnnnnnnnnnnnnnnnnnnnnnnnnnnnnnnnnnnnnnnnnnngggggacccgcggcgtttaaaaaaaaccccaannnnnnnnnnnnnnnnnnnnnnnnnnnnnnnnnnnnnnnnnncccaaagggtttcttaaaataaaataacgnnnnnnnnnngctggcactttatttgagaatgagggggtggaactttttctgccctctttnnnnnnnnnnnnnnnnnnnnnnnnnnnnngaannnnnnnnnnnnnnnagaccccgtggaaattccccccgtggggcgaccacgccccaccccttggcccaccctggccaacaacaataataatttnnnnnnnnnggggggaggaaacagagggcggggagaaacaaaaaagatnnnnnnnnnnnnnnnnnnnnnnnnnnnttcttaaactacacaaaaccgggggggaagcaaccccccgccccacacgtgatttgtggttcttcccgcccccacgaagaacacctttttttccccccaagaataaacccccctttttttgagggag

SEQ ID NO: 73994 - DNA, 661 bp, Homo Sapiens
  misc_feature (356)..(389): n is a, c, g, or t
  misc_feature (453)..(471): n is a, c, g, or t
ttggttgcactaagcttgtcttgaagctttggctggggagtccaggtgcccatggctctcacctgctccccatacacatctctgcacacctggctgaggcattcccagacctaacctcagataatgtgcatgtgatgaacactcccaagtggctaggcctcttgcacctgagcaggtggattctgccccagcactggggctttctctgggctgtccatcatgggtatatctctggattccaggattgctagttagcacctcacatttgagggtctgtgctattcagtctagaatcagagttggatgagaaatcaactttgaacaccacctttggggtggctgcattggctcacacnnnnnnnnnnnnnnnnnnnnnnnnnnnnnnnnnnaggatagcttgaggccaggagttcgagactaaccggagcaacatagtaaggccacatctgtacnnnnnnnnnnnnnnnnnnnttacccaggtttggtggcatgcacttgtagtcccagttgtgggctgaggattatgcaggtgacaaggcaagagactgaaggcacaaactgtttcagtataataaagaaaatagaataataatagtcataattatatatagagatgatcatgaacaattatcaatcattataataaacattattaatcatt

SEQ ID NO: 73995 - DNA, 1158 bp, Homo Sapiens
  misc_feature (100)..(101): n is a, c, g, or t
  misc_feature (151)..(151): n is a, c, g, or t
  misc_feature (463)..(463): n is a, c, g, or t
  misc_feature (946)..(964): n is a, c, g, or t
cctttcccacgctttgagtagtgtgggacaattgttttccacagatccacctgttggtacgatgtcagcatcccgccagccggtgccatttcccttcttnngtcccccccttcctgttttgcctgtctcccctttgtgtttcccccgatcntcctgccccagattcttttcccacgatatgctcattccaggaagggtgcattgacacaaagccctagatcccacgatgaggatgggggtacctgatcccctcagaaagagcctgcagggacagcacatgggaaagccccatggctttgtgatccatctggggatgtgatccatttgggtaaggacttgggtttcagggcatgagttggcttccttgcaggatgcaggtccttaggtgggtggcctctgtctccagctgtagggccctgccaggaagcctctatatgagcctacctccctcctgcagtaccangagaggggttgttatgaacagcccaggggattggttgcactaagcttgtcttgaagcttttgctggggagtccaggtgcccatgtctctcacctgctccccatacacatctctgcacacctggctgaggcattcccagacctaacctcagataatgtgcatgtgatgaacactcccaagtggctaggcctcttgcacctgagcaggtggattctgccccagcactggggctttctctgggctgtccatcatgggtatatctctggattccaggattgctagttagcacctcacatttgagggtctgtgctattcagtctagaatcagagttggatgagaaatcaactttgaacaccacctttggggtggctgcattggctcacacctgtaatctcagcactttaggaggctgaggcaggaggatagcttgaggccaggagttcgagactaaccggagcaacatagtaaggccacatctgtacnnnnnnnnnnnnnnnnnnnttacccaggtttggtggcatgcacttgtagtcccagttgtgggctgaggattatgcaggtgacaaggcaagagactgaaggcacaaactgtttcagtataataaagaaaatagaataataatagtcataattatatatagagatgatcatgaacaattatcaatcattataataaacattattaatcattaaaa

SEQ ID NO: 73996 - DNA, 742 bp, Homo Sapiens
ggaggtgttcaacttggggtcccacctcacaatccacttcttcacccccaaaattcacgcagttgaatgggactctaggtagaagggaagcatgtgttttgtttgaataggagccctaactgtatttacttctttcacagcagggaaggaagagggaagaggcactgtggagaggatgagttgagggagtggggtatctctctgctctgaccttaggtagagtcctccacagaagcatcgaagtggactggcacatatgggctcccttcacaggccacaatgatgtgtctctccttcgggctggtccggtatgcacagttggggtacctggagccgtttgtcaggcggcagtctgtgatgtgcatgctggagttgctcttgtagcagttgccctgcccgttcttgcaggtgaccttttcctggaaacagacattctggacatctaccaggggctcgtgcacaaaggtgttcactggtttgcaccgcccctgtgtcatattccggcgcctcatcatttggttacagtaggtggagctgctgctgggggaactgtctgagtccatatgctgccgctggaatttcttggcccgggattccttgcccagggaaggctggacccagcccagcaccagcagtatcaggacaagcagaaggagccggacaagagacttctccagagccatggtggcctcacttcccagaaaagcgtgtacccataacccgagcgaaccaggggccggtc

SEQ ID NO: 73997 - DNA, 1169 bp, Homo Sapiens
  misc_feature (43)..(83): n is a, c, g, or t
  misc_feature (87)..(121): n is a, c, g, or t
  misc_feature (961)..(968): n is a, c, g, or t
  misc_feature (970)..(971): n is a, c, g, or t
  misc_feature (973)..(989): n is a, c, g, or t
  misc_feature (1017)..(1017): n is a, c, g, or t
ttctctccaactgtatagatcctatagggcgctactctctgtnnnnnnnnnnnnnnnnnnnnnnnnnnnnnnnnnnnnnnnnnccgnnnnnnnnnnnnnnnnnnnnnnnnnnnnnnnnnnncagtcgacggtaccggacatatgcccgggaattcggccattacggccggggatgcagaaactggccttccatctctctcagacaccaagctgcagatccaggcttttctgggaaagtgaggccaccatggctctggagaagtctcttgtccggctccttctgcttgtcctgatactgctggtgctgggctgggtccagccttccctgggcaaggaatcccgggccaagaaattccagcggcagcatatggactcagacagttcccccagcagcagctccacctactgtaaccaaatgatgaggcgccggaatatgacacaggggcggtgcaaaccagtgaacacctttgtgcacgagcccctggtagatgtccagaatgtctgtttccaggaaaaggtcacctgcaagaacgggcagggcaactgctacaagagcaactccagcatgcacatcacagactgccgcctgacaaacggctccaggtaccccaactgtgcataccggaccagcccgaaggagagacacatcattgtggcctgtgaagggagcccatatgtgccagtccactttgatgcttctgtggaggactctacctaaggtcagagcagcgagataccccacctccctcaacctcatcctctccacagctgcctcttccctcttccttccctgctgtgaaagaagtaactacagttagggctcctattcaacacacacatgcttccctttcctgagtcccatccctgcgtgattttgggggtgaagagtgggttgtgaggtgggccccatgttaacccctccactctttctttcaataaaacgcagttgcaaaacccctgnnnnnnnnannannnnnnnnnnnnnnnnngggcgggccggctctagaagtattcccntcgagggggccccaagcttacgccgtaaccccagctttttccttgggaacaaagtgggcccccccttataggggaaggcccgaatttaataagcctaagggccccttgggccccgtcccgttttttttaccaacgcttccggtgggaatggg

SEQ ID NO: 73998 - DNA, 1074 bp, Homo Sapiens
  misc_feature (66)..(66): n is a, c, g, or t
  misc_feature (212)..(419): n is a, c, g, or t
  misc_feature (444)..(459): n is a, c, g, or t
  misc_feature (461)..(461): n is a, c, g, or t
ggggcggacttggaaacgccacacgcgcctttacgtcgtgctttggtgcctttgtcaatttcttcntcgtatccctgatttgtgatacgtataccgccttgatgagtgtacgttcccgcaccgaacgacgagcgcagcgatcatgagcgagaagcggaagacgccaatacgcaaccgcctctccccgcgcgtgcccgatcataatgcagctnnnnnnnnnnnnnnnnnnnnnnnnnnnnnnnnnnnnnnnnnnnnnnnnnnnnnnnnnnnnnnnnnnnnnnnnnnnnnnnnnnnnnnnnnnnnnnnnnnnnnnnnnnnnnnnnnnnnnnnnnnnnnnnnnnnnnnnnnnnnnnnnnnnnnnnnnnnnnnnnnnnnnnnnnnnnnnnnnnnnnnnnnnnnnnnnnnnnnnnnnnnnnnnnaagaattcggcacgaggcctccccnnnnnnnnnnnnnnnntnttttttctaataacgtcatgtaattggaccaaggaagagttgctaaatgaattcagtgaaggatttgaacttctcgaagagctaccaacacccaagttcagctttggaggcagatctggaaacagtgtagcagcattggttttccaaaaaatgtgagactttttcttggacgaattcaggtagctacacagaatctacacagcaaagttaacctgacacagaaaatccttgtgcaaataaatgcttagtaagtacacaggatgcacatgttgaatagagtatactggattggtgaaagaaaataataataatgagcatctaagtggttgggttttagagatcaatcaagaataattttaattttcttttgtatttgaaatgtaaatagttttcttttcgattaaaaaaatttcctataactgctaaacagttaaaaactttaaagtagtaaatgagtttatagaaagcatgtattcttgatttttgtgccttggtaaagttgataactatttatgaatatttgaccaaattattccagcatcagaataataagcaaaataactttgttagtgttttgttagactgtttatgaaatataacaagaaatactaaa

SEQ ID NO: 73999 - DNA, 528 bp, Homo Sapiens
gatttgaacttctcgaagagctaccaacacccaagttcagctttggaggcagatctggaaacagtgtagcagcattggttttccaaaaaatgtgagactttttcttggacgaattcaggtagctacacagaatctacacagcaaagttaacctgacacagaaaatccttgtgcaaataaatgcttacttactttaccagaactcttccctccagtgagttgcaagcgtgacatttgctgtgttttcagcacctgccaacttggaaagcagggtttgtgttcaggacttaggctcacaacccatactttgtggtgcacaatgctggcccagctggcatgctttcgtacctcaatggtgctagacagtcagttacaaagctgtgtggcttcacatgcgctgatctcaatagtcactcctcttcaagctgctttcaactcttattttgtatcaaaggagtgggattggtattattaaactcattgctgaggttatttttcagtgaaaataaattgttttatttagttgaaa

SEQ ID NO: 74000 - DNA, 867 bp, Homo Sapiens
cagtcgacggtaccggacatatgcccgggaattcggccattacggccggggtagagcttggagaatgccatgaaatacttatataattaatttgattgcatgaactaagcaattttactaatgaaaaggttgtatatgtgcaagtcacttttttaaaaaccaagaaaaaactttaatagaggaaatcttattcattaatttatttttctgagtaaaaaaacgaaaccccaaatctcattttatttcaactgttaaacattttgatctgttgacccataggatcaggatttgggaaccactttactaggaaagagcagatcagtaccatttgtataaaaccggcctcattatgtaagaaagaaaatgttacgtgttttcttctttagcttggttgtgggcacttctacagcaaggaccatatcatattcatctttgcatccctggcacagtgcatgagacataagtacttaataaatgcagttgaatggataatgattagtgttatttatggattagaaaaagcatgtttctatttaagtaagctgtaaaaagtattattgaatattttactgtaaatatattgttcacattaaaaaataacttggacggtcttggtgttccctggcatattattcatcttcatggaaaagaatccactgtgggttttctgtagagtgattcgggacacactgggatttatcttgaggattgaacaaaacgtgttcttctgcggtggtccactttggtccaaacgttaaatttatttctcaggttcctaactctggcttgtttaccttttggacaggtttttaatcaactccaaactgggaagaactttttattcttccgcctctactgaaaacactc

SEQ ID NO: 74001 - DNA, 2343 bp, Homo Sapiens
  misc_feature (1954)..(1954): n is a, c, g, or t
caccacccacccccaaccccgcaaaacacaataggctaggtacgaggcctgggctgtttaatcggcacgaggaccacggacttggtctctcctacagtaagagtctgaatcctggacgaggggacacatgggacttccgtgaccctgctccgaggccttcctggtgttgctgtcccccagggagccactggctgtacacacctgggccccaactccccagggcctgctgttgcttgacttcgggggcactgtgagcctattgcagtcccacggtggtactgcgggctgtgggcaccctgcaggaggcacctgtaggccctgtgggggtctgcagccctagtgcacatttcagggcactctggcctgtgtgctgggctccacattggaactgctggacatgggcagtgggcagctgctggagaggaaggtcctaagtacagacagggtacatctgctagaaccgccagcccccggcatggaggatgaggaagagctggagacccgagggaatcttcgtctgctttcagccttgggtctgttttgtgtgggctgggaagccccacagggtgttgagttgccttcagccaaggatctggtgtttgaggaggcctgcgggtactaccagcggcggagcctgcggggtgcccagctcactccagaagaactgagacacagcagcacattccgggcacctcaggctctggcctccatcctccagggccacctgcccccatctgcactgctgaccatgttgaggaccgagcttcgggattaccgaggcttagaacagctgaaggcccagctggtggctggggatgatgaggaggctggttggactgagctggcggagcaggaagtggcacgcctgctgaggactgagttgataggagaccagctagcccagctcaacaccgttttccaagcccttcctacagcagcctggggtgccaccctcagggccctgcagctccagctagatgggaatggcaagctgaggtcccaagcaccccctgatgtgtggaagaaagtgttagggggaataaccgctggaaaggaaccccccaatggaatactgcccccctttgaactcctgtgccagtgtctgtgccagctggagcctcgatggctgccaccctttgtggagcttggcacagcagcagggcgggccgggctggggggcagggggcccaggactgcccctgtatcgccgagctctggcagtgctaggtgaggaggggaccaggcctgaggctctggagctagagctgctcttgagcagtgggcggcctaaagctgtgctccaagctgtcgggcagctggtgcaaaaggaacaatgggatcgggctctggatgctggcctggccctcggcccctccagtcccctgcttcgaagtgaaatcttcaaactgctgctggccgagtttgcccagcaccgccggcttgatgctcacctcccccctcctttgccgcctgtgcccaccagaactggctccagctgagctcctgcttctactgaggacatacctcccagatgaggtggggcccccaaccccattccctgagcctggagcagagccccctctcactgtgggcttgctcaaagccctgctggagcagactggggctcaaggatggctgtcgggcccagttctaagcccatatgaggacatcctatgggaccccagcactccacccccgactccacctcgggacctatgactacccttcaggcatcagaacactcagggcctggaggcttgcttgggactggaggcttgcttggacagttcctctgtgtcactgacacaggaaatcatttctaggacacagtgatcagggaagggtgcctgggacttggagggtcccatgtatggacctgtgtatgcaatactgttctgtcatctggagctatttttaagatgtgtgtgttaaatatatacatagtttaatatcncccccactcgaaacgaacacctccgagaggccgggcctacccacgccatccctcaaggagacaagccctcccgcaaaccgcgtttacttgtcactctgggggctcctaacgcgcccaaggtcaggggactcaccgatatcccccgtcacgttaagaaccactctggcctcgagaaacaaaacatacggcggaccctcgtccactgtgggaatgacctactataaggagagagcaatattttttgaagctgacacgacctatgaaatgatgccacggatataaccccgtgcaaaatagggacgaacatgcgaaccacaccacacagcagccaactcagagtccatgtagatcacgtaacgaaattagcacgcgggcttgcaaataattaa

SEQ ID NO: 74002 - DNA, 498 bp, Homo Sapiens
gcggccgctgcagagcaccgagctgtgtccgggcgggggagcccgcgttgtggcagtggcggcgctccgaggccgcctggtgtggtgcgaggagcggcaggcccgggccgagggcccgtcagggtcgccagcagccgctttcagccactgtgtgtgcgtccggactctggagcccagcggggaagctagcaccagcctgggccgcacacacgtcctgctgcaccactgccctgccttcgggctgctggcctcctgcagacaactcttcctggtgcccactgccaccacctggcctggcgtggcccacgttctactcatctggagcccaggcaagggcaaagtgatggtggctgccccacggcttggtctctcctacagtaagagtctgaatcctggacgaggggacacatgggacttccggaccctgctccgaggccttcctgggttgctgtcccccagggagccactggctgtacacacctgggccccaactcccca

SEQ ID NO: 74003 - DNA, 752 bp, Homo Sapiens
  misc_feature (80)..(80): n is a, c, g, or t
catgcgtgcacagcctgggaaaagacagtactcacggggagctgcaggcccgtcaccaagccctctcccgacccaggctntgtggggcaggcacctggtaccaagggtaacccggctcctggtatggacggatgcgcaggatttaggataagctgtcacccagtccccataacaaaaccactgtccaacactggtatctgtgttcttttgtgctatgaatttggattcctaattgctattgttggttgctggggttttaaatgattgataagcttgtacagttaacttatagagggggagccatatttaacattctggatttcagagtagagatttctgtgttgtctcctagaaagcattacatgtagtttatttcagcatccttgttgggtggggccctggctctcttcccctttggtgggacctcccctttctttgggcttcagttcactcaggaagaaatgaggctgtcgccatctttatgtgcttccagtggaaatgtcacttgctacagacaatagtgcatgagagtctagagaagtagtgaccagaacagggcagagtaggtcccctccatggccctgaatcctcctctgctccagggctggcctctgcagagctgattaaacagtgttgtgactgtctcatgggaagagctggggcccagagggaccttgagtcagaaatgttgccagaaaaagtatctcctccaaccaaaacatctcaataaaaccattttagttgaaaagcaa

SEQ ID NO: 74004 - DNA, 413 bp, Homo Sapiens
ccagtaagtataaatgaaaatattcatatgtaaaatatgttttgcttaatgtggacaatttacacacccaacacatactgtttccaaaattatttctatatgacacaaagtatgatacctttaaaaaggtgagcttatatattgtttattaacctggaaatagacaatttggctctcataccataagcatttaaaaacatatgaaatattttgatttctttatatggtggtgtgtttttatttctgaattttccatgtgctttaatatttgtttaagaatattttttatatctgttcaatttttatcattccccttatcattagaaagtttgacaaaaatacttgaatcttggacctctaaatatacttttagttgtgtttaacttgtttaataaataactttttaagttgaa

SEQ ID NO: 74005 - DNA, 691 bp, Homo Sapiens
ggtttgatgaaatagataattcaggttgtcatttataattttagagtttgcttcacatatacaatgctgtgttacgaaacaatgaacacttttataaaaaatttatttcacacttttatacaaatatccacaggtaatttctaatcatgaaataattttacaatgctagttagtacaaaaatgtatcaaatgcaaacagaccagtgacttgacttgagatgacatttttaacaaccataaatctaaacaccataacatctttgtttctttgttgaaccaccctcccaacacccttttcaggacattcatcttttttttagtaacacaggtctaaaaacactgtcaaagtatcagctccttagcaatctagcaatctaaacacattagggacacaagttccccaagcaagaaactgagactttaaacactgttataacctgttttacagaaatttttgtaaacaaaatatattttgtgactaagaattccaaagtacaaccaaaacaacgtccttagtatcttaaggtttaagatttccgaaaagaaaaaagcccccccaaaacaacagtggcactacaaactgtgttctattctttcaaaacacagacactgcttatactatatccaaaacaaattagcacctgtttgctgttgctccccatataacttaacattgtgaagcatggtaatt

SEQ ID NO: 74006 - DNA, 452 bp, Homo Sapiens
actgcaacaatacattgtgctggccagtgaaggattcagcaaacaaactagggcccttggcttccagttttccacttctcgtacatttgagctggagctgagatgtctccttccctttaagccctggggtccttttcatccaactccatgagtgcagctgggaattcccaggttggaacttgcagacatggggagtggggactgctgatattacatggcataatttcaggtggtcttggctatcgggtctcatggctgccttgggccccattttccctttcagagtcatggccagctcacacactgcaccacacacagccctggtgaggaagccactggggtggagaagggaagcctctgcccagtgccacacaatgcgtcagtagaggaacttaactgagcatggaggccaggtggccacctcctgggccagtgtgtgttgcagtggaaac

SEQ ID NO: 74007 - DNA, 289 bp, Homo Sapiens
cttataatgtaatatgtagtctgggagaaaacatctcccaagttctgttgggccattctccctattggaagtatactaatagtatctgctcactggaacatgccatatatgtcacctgccccacatactgatatcacaataatatgtaaaaccttcatttaaattgtttttgaatgtgtatatcaattgttacagcatatgactgaacttttttcatccttaaaaatttttttaagcaatatgacacaaccactaatgaagaaaaataaagattactgattgacattac

SEQ ID NO: 74008 - DNA, 1539 bp, Homo Sapiens
ggggactccaaagcgaggccggggactgaaggtgtgggtgtcgagccctctggcagagggttaacctgggtcaaatgcacggattctcacctcgtacagttacgctctcccgcggcacgtccgcgaggactcgaagtcctgagcgctcaagtttgtccgtaggtcgagagaaggccatggaggtgccgccaccggcaccgcgggagctttctctgtagagcattgtgcctatttccccgagtctttgctgccgaagctgtgactgccgattcggaagtccttgaggagcgtcagaagcggcttccctacgtcccagagccctattaccccggaatctggatgggaccgcctccgggagctgtttggcaaagatgaacagcagagaatttcaaaggaccttgctaatatctgtaagacggcagctacagcaggcatcattggctgggtgtatgggggaataccagcttttattcatgctaaacaacaatacattgagcagagccaggcagaaatttatcataaccggtttgatgctgtgcaatctgcacatcgtgctgccacacgaggcttcattcgttatggctggcgctggggttggagaactgcagtgtttgtgactatattcaacacagtgaacactagtctgaatgtataccgaaataaagatgccttaagccattttgtaattgcaggagctgtcacgggaagtctttttaggataaacgtaggcctgcgtggcctggtggctggtggcataattggagccttgctgggcactcctgtaggaggcctgctgatggcatttcagaagtactctggtgagactgttcaggaaagaaaacagaaggatcgaaaggcactccatgagctaaaactggaagagtggaaaggcagactacaagttactgagcacctccctgagaaaattgaaagtagtttacaggaagatgaacctgagaatgatgctaagaaaattgaagcactgctaaaccttcctagaaacccttcagtaatagataaacaagacaaggactgaaagtgctctgaacttgaaactcactggagagctgaagggagctgccatgtccgatgaatgccaacagacaggccactctttggtcagcctgctgacaaatttaagtgctggtacctgtggtggcagtggcttgctcttgtctttttcttttctttttaactaagaatggggctgttgtactctcactttacttatccttaaatttaaatacatacttatgtttgtattaatctatcaatatatgcatacatgaatatatccacccacctagattttaagcagtaaataaaacatttcgcaaaagattaaagttgaattttacagttcgtatattcatgtggtcctttgaaagggtattctagaaatcactggaaagaggagaggaaagaaccaagtaaggcaaatggtctgtgaaacccttgggtcctggaagcagtgtgagtgtaaatgtgtagtgtttggtgtcatctaaataaacaaagatgatttctttgacacttgaa

SEQ ID NO: 74009 - DNA, 1092 bp, Homo Sapiens
gtaacaggcaagaaaatgtaagggtaatcttaaaatacacagttaaggcttcacaggaaacacatgagtatactactcacaaaatccttggaataaacgctacttgctcattcaagggcatcatcattccactctagatggcctcttaaagttttttcttactcatgtaggcagatgtaactgctcttctatgcttttatgacacctaataatatcttcattataacaagtagcacattataattgtctttctctgtctccccagcagcctgtaagaaggtcagaactgggtcttttcaaatatatatccacagtccctggtattgtaggaattataaaaatgtcgcaactaatgggtgtcctgccttgggtttagcaatcatatattattgacttctcagaatcctgcaaggtaaacagtatagatgaattacactcaaagaggtcaagtagtcgatgctctgtgagtggcaggttaataacggaagtcccacaaggtaggtccacaacttggacccacaagataatgacagtgtggctgtgtaagactataaaccacagagatgatctcagtaaggatggaaaacagattacgtttttaaaaaggtcatcctcatgaaaaggaaaatgattcctacagaggaatgacagctcgcgaagcttcttaaagtacaacattcaagcaccacagcacatgcctaagggaagcattagaagagattagaaggaaaaggccgtggagacctcaatccctcctcctcccaccgcgggcctggcctccaccgccacctctgccaggcgggcatggaaggggcgacctctccgatgcgcactgccgggcgcgaagccgcccgcgctccctcccccagcgcggcgcgtgccactggcccgggaggcccaggcgtgggcagccgggtacctagctcggccacggtagccgcgcagccggacagtaggaatttgctcgctcggggccatctctgggtcagcggcaaaagcctctcctcctcctccgggacggacattcagcagtagcgcaagacgataacgcactccttctcgccgctgcgctgcaccgcgccgcggcggccg

SEQ ID NO: 74010 - DNA, 1539 bp, Homo Sapiens
tcccgggatcaagctggccctgcacggctgcaagggaggctcctgtggacaggccaggcaggtgggcctcaggaggtgcctccaggcggccagtgggcctgaggccccagcaagggctagggtccatctccagtcccaggacacagcagcggccaccatggccacgcctgggctccagcagcatcagcagcccccaggaccggggaggcacaggtggcccccaccacccggaggagcagctcctgcccctgtccgggggatgactgattctcctccgccaggccacccagaggagaaggccaccccgcctggaggcacaggccatgaggggctctcaggaggtgctgctgatgtggcttctggtgttggcagtgggcggcacagagcacgcctaccggcccggccgtagggtgtgtgctgtccgggctcacggggaccctgtctccgagtcgttcgtgcagcgtgtgtaccagcccttcctcaccacctgcgacgggcaccgggcctgcagcacctaccgaaccatctataggaccgcctaccgccgcagccctgggctggcccctgccaggcctcgctacgcgtgctgccccggctggaagaggaccagcgggcttcctggggcctgtggagcagcaatatgccagccgccatgccggaacggagggagctgtgtccagcctggccgctgccgctgccctgcaggatggcggggtgacacttgccagtcagatgtggatgaatgcagtgctaggaggggcggctgtccccagcgctgcgtcaacaccgccggcagttactggtgccagtgttgggaggggcacagcctgtctgcagacggtacactctgtgtgcccaagggagggccccccagggtggcccccaacccgacaggagtggacagtgcaatgaaggaagaagtgcagaggctgcagtccagggtggacctgctggaggagaagctgcagctggtgctggccccactgcacagcctggcctcgcaggcactggagcatgggctcccggaccccggcagcctcctggtgcactccttccagcagctcggccgcatcgactccctgagcgagcagatttccttcctggaggagcagctggggtcctgctcctgcaagaaagactcgtgactgcccagcgccccaggctggactgagcccctcacgccgccctgcagcccccatgcccctgcccaacatgctgggggtccagaagccacctcggggtgactgagcggaaggccaggcagggccttcctcctcttcctcctccccttcctcgggaggctccccagaccctggcatgggatgggctgggatcttctctgtgaatccacccctggctacccccaccctggctaccccaacggcatcccaaggccaggtgggccctcagctgagggaaggtacgagctccctgctggagcctgggacccatggcacaggccaggcagcccggaggctgggtggggcctcagtgggggctgctgcctgacccccagcacaataaaaatgaaacgtgaaa

SEQ ID NO: 74011 - DNA, 979 bp, Homo Sapiens
caagctggccctgcacggctgcaagggaggctcctgtggacaggccaggcaggtgggcctcaggaggtgcctccaggcggccagtgggcctgaggccccagcaagggctagggtccatctccagtcccaggacacagcagcggccaccatggccacgcctgggctccagcagcatcagcagcccccaggaccggggaggcacaggtggcccccaccacccggaggagcagctcctgcccctgtccgggggatgactgattctcctccgccaggccacccagaggagaaggccaccccgcctggaggcacaggccatgaggggctctcaggaggtgctgctgatgtggcttctggtgttggcagtgggcggcacagagcacgcctaccggcccggccgtagggtgtgtgctgtccgggctcacggggaccctgtctccgagtcgttcgtgcagcgtgtgtacagccctttcctcaccacctgcgacgggcaccgggcctgcagcacctaccgaaccatctataggaccgcctaccgccgcagccctgggctggcccctgccaggcctcgctacgcgtgctgccccggctggaagaggaccagcgggcttcctggggcctgtggagcagcaatatgccagcgccatgccggaacggagggagctgtgtccagcctggccgctgcgctgcctgcaggatggcggggtgacacttgccagtcagatgtggatgactgcaggctaggaggggcggctgtccccagcgctgcgttaacaccgcggcagctactggtgccagtgttgggaggggcccagcctgtttgcagacgggtacactctgtgttgcccaggagggcccccagggtggccccaaccgacggtgttggcgtgcctgcaggcagacgtgcgagctgcgtccaggtggactgttgggggaagtggttgtgttggccctggcagctgctccggctgggttgggtccg

SEQ ID NO: 74012 - DNA, 740 bp, Homo Sapiens
  misc_feature (41)..(41): n is a, c, g, or t
gcgtcagattgagtcaggccaccagcaggaagtagaaactntgaagaaacaagtccaggagctgaagagtcgcctggagagccagtacctgaccagctccctacactttaatggagactttggggatgaggtgacttcaatccccgactcggaaagcaatctggaccagaactgttgtctcgctgcagcacagagattttctctgaagccagctgggagcaggtggataaacaggacacagagatgacccgttggcttcctgaccacctggccgcccactgctatgcgtgcgacagtgccttctggcttgccagcaggaagcaccactgcaggaattgtgggaacgtattctgctccagttgttgtaaccagaaggttccagttcccagccagcagctctttgaacccagtcgagtatgcaagtcttgctatagcagcctacatcccacaagctccagcattgaccttgaactggataagcccattgctgccacttccaactgaagctcagtgacctgggtgggcagtggccaagctgctgttcctatgacaggcccactcaacctgggcagaccgagaggcccgtgcactctggaatgggagcgtggaaccacctgtacagagtgacagatttgggatgcaccactggattgtagattgatttttctttcctgtccccctactccctccctaccttttccatcctcctcctctgccttcaaaaaaggaaactttccctt

SEQ ID NO: 74013 - DNA, 921 bp, Homo Sapiens
  misc_feature (112)..(155): n is a, c, g, or t
gggcgggttagattggggctgggtgacggtgggctcgacaaaagtgatggttcgatactctcggtgcgtgttgcggggtgccagagatgggcgggagtggggggaatacgcnnnnnnnnnnnnnnnnnnnnnnnnnnnnnnnnnnnnnnnnnnnnaaagagagggtttgtaaggtttcgttgggggcgtggggagtccaagtgtcagtggcttttgtgggtagcgcgtggggggtactctcgggactgggtcattggggatgcaggggtttggttaatcgtgggaggggggatacggggtgggtgcctccggacaaatccgtttccggttccctaaagccggaggccaccttctttttagggaggctgccttagcagcagcgtgctccaacaggctctgcaagctgccttccttcatctccctgcagtcctcgccgagcacaggagcccagcccagggtccgggcccctagggcccccctcaccaaggactcagggaagcctctgcacatcaaaccacgtctgtgaggaccccagggaccggcctgcacctacctcagaccctcatccttggagaggaaagaggctctgtccaccactctaccccacaggagggccgcccgccaccaagcctcacctgggggccacagggacactgctctgcctgcctggccctcaaccttccatgaccagcgtgtgcgcagggcctggtcttcctcccccaagccaggcccctgtccccaccccaccaccttccagggtgccaggcagggctggcctccaggcctgtccccgactgccattggcaacagtggccctgcagcccccagccctccccacccaggttttcggcccagtgaagaggccactggccaggcctcccaggcaggtgttttatgttcagcaataaaggttctatccgt

SEQ ID NO: 74014 - DNA, 1258 bp, Homo Sapiens
  misc_feature (36)..(36): n is a, c, g, or t
  misc_feature (159)..(159): n is a, c, g, or t
  misc_feature (854)..(869): n is a, c, g, or t
ttagcttccctatttgcttaaaagtacaggctcccnaagagaggatggagagggagagactgaattgttagtaggtctaaacatcaaagaaaacatttttattagttacttatggaaaatcatctattacaatgataaccttcaagtgacttccattanggctggacaggcggtgagctcagtggattgcagtggtgtgctggtgattttgcacagtgagctctgcggaaggggtcaggctcaactgctgatgtgtctcacacgtagcagacaaggggtgtctgactggcttcttttgcctcaagatggtgtatgtcgtaagtgatgcaatcagctgtctgctttttaaggttgggattgtgctgactttgggattaacatgagcttctttagcaaccaagcatgaacttgattaagaccagaagtttgggagatgagtcctggcattatgtctaggactaaacagtggctttgtatagcaagctgagtaaaggttgacatattccaaaacccttctttttaaaatgaaaaaggatggagagaaggatggaaagcctggacttaaacctttagaaaaaacttctggagagaaatcccttttaaacagttacttttgtcattgcctctggtcatttgtctaaataggaatggaaaattaaaagaaaagcaacaatccaatcttttttctaaaaattatgctggggtctcgactaaaactgaatttgaattggaaaattctggtgttggttggagttccatcttgcaagggataatacaaatcctatgatctctatgcccaatatgctgcctcaactctgagctgtctgcaaggcttagtaagtattgagtggtgnnnnnnnnnnnnnnnnatacaataccatgttaaccacatgagttaaataaatttgagaagttgttttaaaacagtgcttcaaactgagtatctgatgagtctcttatttgatggatggtaacagtgttgcaattatttaagctctgaatgggaagaaggctggttttcagttgatattgttaaaactgcatacccacagtctgagatgaacaagttatttgctgccttcatcgtttttttcagcactggggaaatgttagtttcagccaacctcattttttagttcatctagaagaaaatctagcacattgtattagtttggcttcatcacttgctagctgtatgactgtgggcaagtttcacagcctcaagttctttatcaaaataaaactaaaatgagttacc

SEQ ID NO: 74015 - DNA, 565 bp, Homo Sapiens
cagcggaggcgcttccaccgtttccaggcaccctatcagtacctcaggcacaagatcgacctgccacccaccatctcgctgtcagacggggagaagcccccaccttaccagggcccctgcaccctccagcttcgggaccccaatgtctcctgcacgtgcaactgcaaacgctctttgttccagagcatggagatcacggagctggagtttgttcagatcatcggccactacccggggtcctccttccagcaccagcagagcagtgggccgccctccttgctgaaggggacccggctccaccacacacacatcgcgcccctagagagcgcagccatctggagcaaagagaaggataaacagaaaggacaccctctctagggtccccaggggggccgggctggggctgcgtaggtgaaaaggcagaacactccgcgcttcttagaagaggagtgagaggaaggcggggggcgcagcaacgcatcgtgtggccctcccctcccacctccctgtgtataaatatttacatgtgatgtctggtctgaatgcacaagctaagagagcttgc

SEQ ID NO: 74016 - DNA, 1395 bp, Homo Sapiens
  misc_feature (285)..(337): n is a, c, g, or t
gcggcggaggcgctcgtctcgggaaagctagcggcagaggctcagccccggcggcagcgcgcgccccgctgccagcccattttccggacgccacccgcgggcactgccgacgcccccggggctgccgaggggaggccgggggggcgcagcggagcgcggtcccgcgcactgagccccgcggcgccccgggaacttggcggcgacccgagcccggcgagccggggcgcgcctcccccgccgcgcgcctcctgcatgcggggccccagctccgggcgccggccggannnnnnnnnnnnnnnnnnnnnnnnnnnnnnnnnnnnnnnnnnnnnnnnnnnnngtccatgcaccgcttgatgggggtcaacagcaccgccgccgccgccgccgggcagcccaatgtctcctgcacgtgcaactgcaaacgctctttgttccagagcatggagatcacggagctggagtttgttcagatcatcatcatcgtggtggtgatgatggtgatggtggtggtgatcacgtgcctgctgagccactacaagctgtctgcacggtccttcatcagccggcacagccaggggcggaggagagaagatgccctgtcctcagaaggatgcctgtggccctcggagagcacagtgtcaggcaacggaatcccagagccgcaggtctacgccccgcctcggcccaccgaccgcctggccgtgccgcccttcgcccagcgggagcgcttccaccgcttccagcccacctatccgtacctgcagcacgagatcgacctgccgcccaccatctcgctgtcagacggggaggagcccccaccctaccagggcccctgcaccctccagcttcgggaccccgagcagcagctggaactgaaccgggagtcggtgcgcgcacccccaaacagaaccatcttcgacagtgacctgatggatagtgccaggctgggcggcccctgcccccccagcagtaactcgggcatcagcgccacgtgctacggcagcggcgggcgcatggaggggccgccgcccacctacagcgaggtcatcggccactacccggggtcctccttccagcaccagcagagcagtgggccgccctccttgctggaggggacccggctccaccacacacacatcgcgcccctagagagcgcagccatctggagcaaagagaaggataaacagaaaggacaccctctctagggtccccaggggggccgggctggggctgcgtaggtgaaaaggcagaacactccgcgcttcttagaagaggagtgagaggaaggcggggggcgcagcaacgcatcgtgtggccctcccctcccacctccctgtgtataaatatttacatgtgatgtctggtctgaatgcacaagctaagagagcttgcaaa

SEQ ID NO: 74017 - DNA, 1288 bp, Homo Sapiens
tgccctggcatggggccaggagatcactgggttatcccggttagtgatgccctcacctctccccacaagttgtttacccaatggctggaaaggggtggctactggtcatcgtgaccactggagtcaacacagactgatgtacccacagacaccaaaacttgccccctgagttctgaagcaaggggcaaggctgggcccctagcttgtcctgcccattcctccaggtgttgatcttgattccacttagagaagctgaagctgtgcctccctcccctgtcaagccagttctttcctcttcaggtggctgttctggcccagccccttcccatccccaaggagcccttcagcgcgccctgttgcttctgctagcctacctttccctgccaggcccttgctcagggccatggcatttaactaagtgcacctgtgatcttggccaaaaaaccattgcaactcacagtaagagactgggtttcggggaaggaggggctagggacattttggcactggcctgccctattgtctcccatcctagtctgtcctggtccctggcaacaggaacctgggcagcttatcctgcccacaggtaagcccctgggagcatccacaactggggacctgctcagtgccccccctgccttacagctacatgacagtgctgttttatttgaacaacgtcactggtgggggcgagactgttttccctgtagcagataacagaacctacgatgaaatgagtctgattcaggatgacgtggacctccgtgacacacggaggcactgtgacaagggaaacctgcgtgtcaagccccaacagggcacagcagtcttctggtacaactacctgcctgatgggcaaggttgggtgggtgacgtagacgactactcgctgcacgggggctgcctggtcacgcgcggcaccaagtggattgccaacaactggattaatgtggaccccagccgagcgcggcaagcgctgttccaacaggagatggcccgccttgcccgagaagggggcaccgactcacagcccgagtgggctctggaccgggcctaccgcgatgcgcgcgtggaactctgagggaagagttagccccggttcccagccgcgggtcgccagttgcccaagatcaggggtccggctgtccttctgtcctgctgcagactaaaggtctggccaatgtcttgccccaccccgccagccgcgatacggcgcagttcctatattcatgttatttattgtgtactgactccatctgccccgtcaaataaaaaaccacaaggttcg

SEQ ID NO: 74018 - DNA, 2062 bp, Homo Sapiens
gcgtcatcacgcacgcaccgaagaagctcccactaatgtatgccttaatggtgccgctcttgtccgcgtctacgcttgggaccttggcttctgacttggagagtgtacagctctgcccgacggcaacccagcttgggaagagaagccccagcgtgggctggggctcaaggcgcaggaaggccgagcccggcgcggacgcaggcggctccgggcgggctcagcacccccaggcaccgtctcctagtgaccgcggcgctcgcgggcctggcggccgttgtccgggcgactgcgcagcgcgggcacccccgcggcccctcccctgggcgcgcgcgcgacctgggtgccatggcggcagcggcggtgacaggccagcggcctgagaccgcggcggccgaggaggcctcgaggccgcagtgggcgccgccagaccactgccaggctcaggcggcggccgggctgggcgacggcgaggacgcaccggtgcgtccgctgtgcaagccccgcggcatctgctcgcgcgcctacttcctggtgctgatggtgttcgtgcacctgtacctgggtaacgtgctggcgctgctgctcttcgtgcactacagcaacggcgacgaaagcagcgatcccgggccccaacaccgtgcccagggccccgggcccgagcccaccttaggtcccctcacccggctggagggcatcaaggtggggcacgagcgtaaggtccagctggtcaccgacagggatcacttcatccgaaccctcagcctcaagccgctgctcttcgaaatccccggcttcctgactgatgaagagtgtcggctcatcatccatctggcgcagatgaaggggttacagcgcagccagatcctgcctactgaagagtatgaagaggcaatgagcactatgcaggtcagccagctggacctcttccggctgctggaccagaaccgtgatgggcaccttcagctccgtgaggttctggcccagactcgcctgggaaatggatggtggatgactccagagagcattcaggagatgtacgccgcgatcaaggctgaccctgatggtgacggagtgctgagtctgcaggagttctccaacatggaccttcgggacttccacaagtacatgaggagccacaaggcagagtccagtgagctggtgcggaacagccaccatacctggctctaccagggtgagggtgcccaccacatcatgcgtgccatccgccagagggtgctgcgcctcactcgcctgtcgcctgagatcgtggagctcagcgagccgctgcaggttgttcgatatggtgaggggggccactaccatgcccacgtggacagtgggcctgtgtacccagagaccatctgctcccataccaagctggtagccaacgagtctgtacccttcgagacctcctgccgctacatgacagtgctgttttatttgaacaacgtcactggtgggggcgagactgttttccctgtagcagataacagaacctacgatgaaatgagtctgattcaggatgacgtggacctccgtgacacacggaggcactgtgacaagggaaacctgcgtgtcaagccccaacagggcacagcagtcttctggtacaactacctgcctgatgggcaaggttgggtgggtgacgtagacgactactcgctgcacgggggctgcctggtcacgcgcggcaccaagtggattgccaacaactggattaatgtggaccccagccgagcgcggcaagcgctgttccaacaggagatggcccgccttgcccgagaagggggcaccgactcacagcccgagtgggctctggaccgggcctaccgcgatgcgcgcgtggaactctgagggaagagttagccccggttcccagccgcgggtcgccagttgcccaagatcaggggtccggctgtccttctgtcctgctgcagactaaaggtctggccaatgtcttgccccaccccgccagccgcgatacggcgcagttcctatattcatgttatttattgtgtactgactccatctgccccgtcaaataaaaaaccacaaggttcga

SEQ ID NO: 74019 - DNA, 2255 bp, Homo Sapiens
  misc_feature (622)..(633): n is a, c, g, or t
  misc_feature (1029)..(1041): n is a, c, g, or t
  misc_feature (1154)..(1188): n is a, c, g, or t
  misc_feature (2065)..(2124): n is a, c, g, or t
ggcatagtgaactatagaacaagtgtgtacacaaaagcaggctggtacggtccggaatcccgggatatcgtcgacccacgcgtccggattgatcacgctgaaagggagttgcggcgtggccaaatcttgtggtttagaggtctgaacagaatccaaacacagattcgagtggtgaatgcatttcgtagttctttatatgaagggttagaaaaaccggaatcaagaagttcgattcacaactttatgacacatcctgagtttaggatagaagattcagagcctcatatcccccttattgatgacactgatgccgaagatgatgctcctacaaaacgtaactccagtcctccaccctctcccaacaaaaataacaatgctgttgacagtggaattcaccttacaatagaaatgaacaagtctgctacctcttcatccccaggaagcccactacatagtttggaaacatcactctgattgtaagctgaatgttaacacactagctgcattgtaaagaaacaaattgaaactgggtcttttcacatattgtgatggacaagctagtattcttgtctttggacttcaacagaagacacacttgtacgaatgtagatttatttttttnnnnnnnnnnnngcaaagctttctgccagactgagggtgctttttggggggtgggagaaatgaactgacagataaacagtaactcagcgtaagtgacctgtggatcatcagtagtacccaagcatggtcctgaacagtgtattagcagagctttagtttatctcagtcctggatgggagagagagggaggagtaaaactgggcaagacaaagagccctggatcgttgaattgatagtttaatttctgctgttggctgttaataatttggattatttatgtttataaatgatacagatctgtttacaaggtttgtagatactttttttgttcctgttcatagatgggaagcttccttataactgatgcagagaaaaattagtccttcaaatactgctgtattttcaggnnnnnnnnnnnnnggggtgtttctattgaaactgtactaaatttttgcctacaatttaccttgttaaatattgtagataaattgctaatactaatagccaaatagataacactaatgctttgtttnnnnnnnnnnnnnnnnnnnnnnnnnnnnnnnnnnnatgagcagtggtgttctaatgaagttatgacatctgtcctaattagtttcttaaatacatttactacttaatggttttgaagcaactgtttaatttttaaaatttttgaaaacttgctaataaccttttgttcagaatttagtagattgtttaatgcaggacatcaactacataatgaaagatgcttgaaatgcttttgttatttcaggcaaatcaaattaaatcagactatcaaactacaagagaaccttagtcttttttgtttttgtctaaacatgttagtttagtgatgtcttggtgaactgtgagtgaactgtattgatttttctaatctttagagaccttcacacagcatgagggctgttggcattttgaaaaaggttaataagtagaagcatacatgttttccttttgtttttgaaacttgtttgtaaacataaataaatatgcccttttattaaataaattcatggcaatgtttttttaaaagacatttcagcttctttactcagttctgcatatacagtgcatcagtctgttctctttgaccacaattggaatacatttcaagatggtaacagccccatgaagtaccgctttaattccttgctggtaatctaatagaatcagattaagaaaattaacacaattttaccatttgacatactcttcattgaatttagttgtctaaaatagtctcacaggtaaaaaacataacaacaatgaccaccattgtctttgatacatttattttaattcttaagtggccaaataacagattaggtaaaatgagattacatgaaaaggttctaaaatgatatatttagatgcaataattaaccatatgctagaatgcccacctctaagccaattggannnnnnnnnnnnnnnnnnnnnnnnnnnnnnnnnnnnnnnnnnnnnnnnnnnnnnnnnnnnaccctttagaaactggcatgtgttagggcccagatttcaccagatacacaatcctcaggctgacataaagtttacgaggactgctactataactgagagtgctgaccaagcaagaaacatttagttgatgg

SEQ ID NO: 74020 - DNA, 2473 bp, Homo Sapiens
  misc_feature (1496)..(1506): n is a, c, g, or t
gcggccgccgtcccgacgcgcagctacagccaggagtccaaaactacttacctggaagaccttccaccaccccctgagtatgaattggccccgtccaagttagaagaggaagtggatgatgtctttctcattcgagctcaaggactgccctggtcatgcactatggaagatgtgcttaactttttttcagactgcagaatccgcaacggtgagaatggaatacattttctcctaaacagagatgggaaacgaaggggtgatgccttaattgaaatggagtcagagcaggatgtgcagaaagccttagagaagcaccgcatgtacatgggccagcggtatgtggaagtatatgagataaacaatgaagatgtggatgccttaatgaagagcttgcaggtcaaatcttcgcctgtggtaaatgatggtgtggttcgtttgagaggacttccttatagttgcaatgagaaagacattgtagacttctttgcaggactgaatatagttgacattacttttgtgatggactatagagggaggcgaaaaacaggggaagcctatgtgcaatttgaagaaccagaaatggccaaccaagccctgttgaaacacagggaagaaattggtaatcgatacatcgagatatttccaagcagaaggaatgaagttcgaacacatgtcggttcttataagggaaagaaaatcgcatcttttcctactgctaagtatataactgagccagaaatggtctttgaagaacatgaagtaaatgaggatattcaacccatgacagcttttgaaagtgagaaggaaatagaattgcctaaggaggtgccagaaaagcttccagaggctgctgattttggaactacgtcttctctgcattttgtccacatgagaggattacctttccaagccaatgcccaagacattataaacttttttgctccactcaagcctgttagaatcaccatggaatacagctccagtgggaaggccactggagaagctgatgtgcactttgagacccatgaggatgctgttgcagcgatgctcaaggatcggtcccacgttcatcataggtatattgaactgttcctgaattcatgtccaaaaggaaaataagactctaggggctccagataataagggtgaagcaagaagcatttcatttgcacatctttcttggacttgggatatacagttccagtttattagcagcaactgctagggaaatgattttggtgttttgggttaattgcttctaagaaaagtttcatagtggactgtttagaagaagaaatgaaagatccagtttgggattatgaaataaaccacaaattaaaatttttgtttaaactgtccaggatctgatttaaaaatatggtctttgttttatatgattaaatggtttgttttcatagatgatatgttactcattgtaaagaccacatatttttattcagcagtgttctttaaacgctttcatttaaaaagtaacnnnnnnnnnnngcctgtgaattgagtgctctgatgtaaaacttctcatggagtgaaacagtgatttattttaaccaaacattcaccaaagcaaagaacggtttcagacctttgaactggtatggtttggcagaatagttttaaattttgctgtatttgattacttagagataggaatttttaaaaatcaaaacaaaaaataccacagcttagtgtaaatgacaatttggcggttttatgtctttagaaatgttttgcctttctaagccttgtgctaaaggcgtataacggtggtgcctatctacttaagggggcattctagtcttaacttaaaagttgtctaaactgtccctccctggctttttttggtttggggtagacctaagggtgtttgttagtctcaaaactgtgaagtgacatgtcagaacagtccagactggtaagaaaattaatggcttcacttgaatttaaaccagctctagataggaaaaaaatcagtctcctcatttgctttttaaatggagtagtacatcccatattttagaacaagtaggggtgccttgcttaaataaaaatagcatttaatgtataattgtgtgaagggtttatggataaagctgtacttctgtcacaatgtggcagtactttctgctttaatattaaacagcttgttatttaaatattggacaaaatggctggcttcaaaatatagtcattaataaactaactttatgtgcacctgtgtaggagaatcaaaatcctgtatgctttctttgccttgttcctgttctcagggtgacgactgccaccaggagatgcagttctagttcttaaaattaaatttgcccaggtttctgacaggtgatacctggaagagagactatgtcttctcttacttaatacataaccatctttgattaccagctaagatgcgaaatcactgtactgtagtcaataaatgaagacttgtttcaggctg

SEQ ID NO: 74021 - DNA, 543 bp, Homo Sapiens
aaaaagaaatgtatcaagtgtatgaatcaaagtctgaaagaaagatgaagagccaccagacttctaggtaggtttacatccatcatgttcctcttgactgcctttgtttgtcgtttagttttttgctccactcaagcctgttagaatcaccatggaatacagctccagtgggaaggccactggagaagctgatgtgcactttgagacccatgaggatgctgttgcagcgatgctcaaggatcggtcccacgttcatcataggtatattgaactgttcctgaattcatgtccaaaaggaaaataagactctaggggctccagataataagggtgaagcaagaagcatttcatttgcacatctttcttggacttgggatatacagttccagtttattagcagcaactgctagggaaatgattttggtgttttgggttaattgcttctaagaaaagtttcatagtggactgtttagaagaagaaatgaaagatccagtttgggattatgaaataaaccacaaattaaaatttttgtttaaactgtc

SEQ ID NO: 74022 - DNA, 1432 bp, Homo Sapiens
  misc_feature (1367)..(1390): n is a, c, g, or t
atctaacgccacacctagtgaaaacacaagtcccacagcaggaaccactgaacctggacatcagcagtttattcagcagatgctgcaggctcttgctggagtaaatcctcagctacagaatccagaagtcagatttcagcaacaactggaacaactcagtgcaatgggatttttgaaccgtgaagcaaacttgcaagctctaatagcaacaggaggtgatatcaatgcagctattgaaaggttactgggctcccagccatcatagcagcatttctgtatcttgaaaaaatgtaatttatttttgataacggctcttaaactttaaaatacctgctttatttcattttgactcttggaattctgtgctgttataaacaaacccaatatgatgcattttaaggtggagtacagtaagatgtgtgggtttttctgttttttcttttctggaacagtgggaattaaggctactgcatgcatcacttctgcatttattgtaattttttaaaaacatcaccttttatagttgggtgaccagattttgtcctgcatctgtccagtttatttgctttttaaacattagcctatggtagtaatttatgtagaataaaagcattaaaaagaagcaaatcatttgcactctataatttgtggtacagtattgcttattgtgactttggcatgcatttttgcaaacaatgctgtaagatttatactactgataattttgttttatttgtatacaatatagagtatgcacatttgggactgcatttctggaaacatactgcaataggctctctgagcaaaacacctgtaactaaaaaagtgaagataagaaaatactcttaaagctgagtatttcctaattgtatagaatcttacagcatctttgacaaacatctcccagcaaaagtgccggttagtcaggtttgttgaaaatacagtagaaaagctgattctggttatctctttaaggacaattaattgtacagacacataatgtaacattgtctcaacattcattcacagattgactgtaaattaccttaatctttgtgcagactgaaggaacactgtagtataccccaaagtgcatttgcctaggacttctcagcttctcccataggtagtttaacaggcattaaaatttgtaattgaaatgttgctttcactgaaaaagtgtcttgatgtttcagttatttttaatcgccataaaaaaatagaactatcttttgggtttatctgttttctcatgcacaggcaatacacaaatttaaaatgagttgtgagccaattgtttctgaagtgttttggtagttctattaagaaatagttaaatattgtgcttttcagagcctcagagaaannnnnnnnnnnnnnnnnnnnnnnncagcgaatctgtcctggatggggccagcttaaataatactgg

SEQ ID NO: 74023 - DNA, 1255 bp, Homo Sapiens
  misc_feature (658)..(658): n is a, c, g, or t
cagcttgagtaatgccgactttatatcagcacacccagtgcccccacgttcccgctggcccaggtcccggagaccatgatggcacccacagtggacttcgcaaaggagcgtggggaccccgaaggccaggccacccctcagaggggggtcccatgctaaagcagacggtgccggtgccgcagggcgtcttgagacccacggtggagcccgggcctggcgtgcgggaggcggccacgacggcgcctttctcccaggaactccgggagggaccccaggactcagcgccagggcagccttggcaggtgcagtgaggcagtgacttgtgggggttagatgtgggcctgccccacgtgggcagggatcagccaggcatgggggtccagcggatccgagcggggccacagagctctggaggacttttctgcacaatgaatttctgcttaaaaacagagatcaagaggaaggctctatcctgcagctccggaaatgggtggctgcgtgcttggggtctccgccacgcgggaggacagcccagaggcaccctggtctcaggcagctggttcctaggctgtgtcctccccactggccgggcaccggctggaacggcacgaggaccagcctcactgttctcagaggggtctcgggccactgggtgtgngtggtgctggaggagtcctgcccgctgtgggctctggagggcacggcagcagagcccctggcttttctaggcagagcggcacctgccccatagatcgtgccagctttggctgcaggcgctggggcctcaccgtgtttcctgggggggcccggaccccccaaggcctcgatctgaagctctgaggtctcatggatgcctgctcctggtccgataaacgagatggctgtggtggggaggagcctcaggcggcccgggaccctttggcgtccgtcgctgggaggcggagggacccagagccgaggctgtgcccaggactgtcccgggcgccgggcgatgccaacactttgtgctggttcccgccaaggggtcggcctccgggtccctgccgccaagtgcgtggcgtggtctcggcctccaggtcagacattgctgatacgggcctcccccgggaaggcagcgggatccgtggccctgtccaggggctgtctccacgagtgtttcccccgagctggcctcctggcctccccggcgccctccgggtttctctttcgcggacgcggggtcgacgatatcccgggaattccggaccggtaccag

SEQ ID NO: 74024 - DNA, 680 bp, Homo Sapiens
acagaagaataatggtgcacagaaaatcttggttcagtggttgagtgaatgaatggatgaacaggctcttgcacacaaaggaagagacatgatgtatttgcatccttccctgcttcagccagttttctgaagctcaggagggacaccttgtattgctggatgataaaaacaggagcaaagtgatgaagtgctgacaaggcaacaatagaacatgagagattcactgctgtgtaggaagagatcttcggtgaccatgtagcctgaagctctcattttgtcatcgagggacaccaaaactcagaacagtgctaagctcctacatcctgttctggaaggacaatcctgagcacacgatgagccatataaacttcagactgacgctgagtgaaagaatgctggaaaagcatcacaggccagggcagcaaagtcttcaaggtcatccgtgctctgatgatgtcacgcttcttccctgtctggaagacatttccccaagagcataccaccaacatcagggaaatggaatccaactggtcgctgcaaagtttgctgagcacacagtgataaagatggcaagaaggtcctgagagaaacgcaatatttttgtgcagaatgggatgttctgcctttgtcccatgctttgaaatttaccacatgaaaaataaaattaaatactgatcatc

SEQ ID NO: 74025 - DNA, 955 bp, Homo Sapiens
  misc_feature (715)..(735): n is a, c, g, or t
  misc_feature (737)..(740): n is a, c, g, or t
  misc_feature (742)..(745): n is a, c, g, or t
cctccagaggtggggtgcaccagactcagcactagcactccatcagcactagcacctcactccatcagcactagcacctcactccatcggccccggcaccctgctccatcggcactggcgccctgctccatcggcactaatgctccactcggcgccccactccatcggccccgctccatcggcactaatgccccactcggcgccccactccatcagcactaatgctccactccattggcactaacgccccaactccagcggcactaatgacccgctcctttgacattggtgccccactccatcagcactaacgccctgctccatcggcactggtgtcccactccattgtcactaacgtccggctccatcggcactaccaccccgctccatcatcactatgtccagctccgtcggcactaccaccctgctccatcatcactacgtccagctccaacggcactggtgccccattccatcggcactaacgccccgctccaccggcaccagtgcctcgctccattggcaccaacgcccagctccaccggtactggctccctgctccatcggcactaacgccctgcttcattggcactttgctgctgcctcctgagcactgccttccatgaacagggacagaccagaggccctgcaaggactccccctcagacctccaaagggcaacagaagagtattaataaacgtgaaaacttaaaannnnnnnnnnnnnnnnnnnnnannnnannnnaaaactcgaggcatctatgtcggggtgcggagaaaagaggtaatgaaatgggacatgggccatagctggtttcctgacccaagctttcttgtacaaagggggtagatctggccggcctccctatagtgagtcggaattaatttccaataagccagggtaaacctgccattaatgaaatcggctggcagttacccggggaaattaaaccgg

SEQ ID NO: 74026 - DNA, 730 bp, Homo Sapiens
  misc_feature (639)..(649): n is a, c, g, or t
gcagaagtgctggtagcataaggagaatcgggtcataagcaatcccaaactaccaacaagaggaccttgatcttggcgaaagccctcggtgtggcagctttagccctcctccagatcacatgtgtgcaaattatggcttcagaggtggaagataaacagtgacgggggaacaaacagacaacaagaaggtttggaagaaatctggtttgagactctgaaccttagcactaaggagattgagtaaggacctccaaagttccccggactcatgaattctgggcccttggcccattctgtgcacagccaaggacttcagtagaccatctgggcagctttcccatggtgctgctccaaccatcagataaatgaccctcccaagcaccatgtcagtgtcgtacaatctaccaaccaaccagtgctgaagagattttagaaccttgtaacatacaatttttaagagcttatatggcagcttcctttttaccttgttttcctttggggcatgatgttttaacctttgctttagaagcacaagctgtaaatctaaaaggcacttttttttagaggtataaagaaaaactagatgtaataaataagatcatggaaggctttatgtgaaaaaagttgaatgttatagtnnnnnnnnnnngatatttatgtatgtacagtttgctaaagccaagttttgtttgtattgatttctttgcatttattatagatattataaaat

SEQ ID NO: 74027 - DNA, 516 bp, Homo Sapiens
tgagtactttcttgaaccatgagtcctgtgaccaccctagcagctctaaccctcccttatctgaaaggaagtgtgaggtgaccttgcaggtcccagagttgattgaagaccccatccagaaagaaggcaccctgtgggagagattgcaaggcctaggtctgaatccggaagcttccaccccatggagaagggctggcagtggagctgagctttggagccaaggactgtactgcagtgcagggagagtgaggccagaaaggctgagacaactcagggaaagaaaacctcccttctggctaatagtcaagcaccgcctgagtagaccaacactctcctgtccacaggggcagcagatgaagacacaaccagagaggactaaaaggccccctcagctctcagtcagagggcagagcaacacagaatagacattaaaggaacagactttgaggccaggcagccttgggtgtgcatctgtccctactaagccatgtgacattaaacaagtaagaccacctc

SEQ ID NO: 74028 - DNA, 1181 bp, Homo Sapiens
gggaatgggccgcacgctacgaggcccacacacccagaaggtggagccccggccgggttacgaggaccacccagctgtctggagagatgaagaaaatgaggttcaaagagatgaagtctcttgcctaaagtcagtgacagaaagtgacagagctgggatgtgaatcctggtctgactctacagtcccacatggtagatggaacctccgagcaacacctaaacaaagggagttgatgcctccgaacagagtaatgtcgctggagacactaagcatcgtcggcccctggcaggagctccctaaatatgtgttggatggatggaagaaaggatggatagttcagagtacttcagccttgattcctccgcaacagacacctgaaacttgaccctacataggttcttggccatcgtgatcttccttggacagaatcacctttcagctccggtcatcagactttcccagggaccctcagaaagcccttcagagttgtaactacacaggcaggctgagggattccttaacggggtctgcagctctcctcacctcatccacaagtaggaccgtggcctgttcctcactactgccccaggatcactctgttcccagcccagtccagcaatcacttgtctagctttctggaaccttgagtactttcttgaaccatgagtcctgtgaccaccctagcagctctaaccctcccttatctgaaaggaagtgtgaggtgaccttgcaggtcccagagttgattgaagaccccatccagaaagaaggcaccctgtgggagagattgcaaggcctaggtctgaatccggaagcttccaccccatggagaagggctggcaccagcctggggctggcagtggagctgagctttggagccaaggactgtactgcagtgcagggagagtgaggccagaaaggctgagacaactcagggaaagaaaacctcccttctggctaatagtcaagcaccgcctgagtagaccaacactctcctgtccacaggggcagcagatgaagacacaaccagagaggactaacaggccccctcagctctcagtcagagggcagagcaacacagaatagacattaaaggaacagactttgaggccaggcagccttgggtgtgcatctgtccctactaagccatgtgacattaaacaagtgagtccacctcaaa

SEQ ID NO: 74029 - DNA, 645 bp, Homo Sapiens
cttaaattgaaataaaatgttatacttacggatattgcatagtttaagttagatttattgaaagatttcatctgtcgtgtttcatgtaaatgagaacagattatttgcatgaaaatatatacttcaacaaaaatctgttctttaacagagtagtggtagattattacactaatgagatttcactttggtaaatacttcatgctttcagttttagcctattaattttaggtggacaaatttaacaagttttctgttactttttaaaaagaaaaaatccagaacataagaactatattatgaacacatgatttgaacctgttgtggtaaagatcttgtacaggatgcaaactaaaaacctaatccctgccatcaaatttattagaagagacctatatatgaacaacttaaaggcactgatttctataatagagctctaaaaacatgccaccagtgtatgaataagggaaagattaattttggctggaccaatataaaaaattgtatttgaagaattgatactttaacttggaccttgaaggtaaagcttcaaaagacaggttactgaccattgagtgtttactatgtaccccaatgtgtatatttttctttttaatcttcccaatagctgaataaagtatagatcct

SEQ ID NO: 74030 - DNA, 1104 bp, Homo Sapiens
  misc_feature (88)..(150): n is a, c, g, or t
  misc_feature (190)..(245): n is a, c, g, or t
acatttggaacagtgacaataaatgagacccctttaaactgtcttattttccaccagattgagaaccagatgttctctacacactatnnnnnnnnnnnnnnnnnnnnnnnnnnnnnnnnnnnnnnnnnnnnnnnnnnnnnnnnnnnnnnngtagctacggagcatctgaaatatggctagaaactacatnnnnnnnnnnnnnnnnnnnnnnnnnnnnnnnnnnnnnnnnnnnnnnnnnnnnnnnnctgtagactgactgggtccatagttcatcacctcaaaattctttcaaaatttattatctctttctctccttacatgtttatttcccaggcctaccctggtgattagaacagctgaagggcctttcttgttaggctgtccatgccctaaggatgggttcctgtttatccttgccacgcagctgagcttactgcatgtttatatctcccaaggactgttctctgctcagaaatgccctgtcaagggtgtggcatcacgcagtttcatccaagttgtttcaggaattgctgacactgctgggtgcagttctatcccctaaagcctagggtgtggccctttaacttccccttcagtagaactgggaaaggcagtaccattcctagttatgagtgaagcatccactttcttttgtaacaatgaggaacagaaaggataagactgaagagtgatcttttgtccaactaaaccatttatctccttttgtaggtaaattcaaatcctgcccagttatagttttcagtcactggagaattccaggtaggagccctactttaggtgatcctaggaactcctatgttcagaaaagaattttcttcctactatataattacagtatttagctgtcaattttaagatgaatttggtagagccttatagtaaagtatgtatcttggtcacacacaaagcttggaaaaagtaaaagatgtctaaaccataatcttgtaactcataacatctgggctggggcccggggatctaattgtttagagagccccaaaagtggctcagatgtaaagccagggttaagaaccatctgccttggaagatttaagggaaacatataaacttgtacaaaggaca

SEQ ID NO: 74031 - DNA, 1096 bp, Homo Sapiens
  misc_feature (44)..(83): n is a, c, g, or t
  misc_feature (87)..(121): n is a, c, g, or t
ccccccatgtatcgatcacctatagtggcgctccgctttgtatnnnnnnnnnnnnnnnnnnnnnnnnnnnnnnnnnnnnnnnnccgnnnnnnnnnnnnnnnnnnnnnnnnnnnnnnnnnnncagtcgacggtaccggacatatgcccgggaattcggccattacggccggggagacgcgcgagcgcaagcagcgggttagtggtcgcgcgcccgacctccgcagtcccagccgagccgcgacccttccggccgtccccaccccacctcgccgccatgcgcctccgccgcctagcgctgttcccgggtgtggcgctgcttcttgccgcggcccgcctcgccgctgcctccgacgtgctagaactcacggacgacaacttcgagagtcgcatctccgacacgggctctgcgggcctcatgctcgtcgagttcttcgctccctggtgtggacactgcaagagacttgcacctgagtatgaagctgcagctaccagattaaaaggaatagtcccattagcaaaggttgattgcactgccaacactaacacctgtaataaatatggagtcagtggatatccaaccctgaagatatttagagatggtgaagaagcaggtgcttatgatggacctaggactgctgatggaattgtcagccacttgaagaagcaggcaggaccagcttcagtgcctctcaggactgaggaagaatttaagaaattcattagtgataaagatgcctctatagtaggttttttcgatgattcattcagtgaggctcactccgagttcctaaaagcagccagcaacttgagggataactaccgatttgcacatacgaatgttgagtctctggtgaacgagtatgatgataatggagaggggtatcatcttatttcgtccttcacatctcactaacaagtttgaggacaagactgtggcatatacagagcaaaaaatgaccagtggccaaaattaaaagtttatcccaggaaaacattttttggaatctgcccctcccctggaccgaagaaacataaagattttgataccaggggcaaggaaccttactttatttgccttaactatgaatggggggac

SEQ ID NO: 74032 - DNA, 947 bp, Homo Sapiens
ctggaccggtccggaattcccgggatatcgtcgacccacgcgtccggtcgcgcgcccgacctccgcagtcccagccgagccgcgacccttccggccgtccccaccccacctcgccgccatgcgcctccgccgcctagcgctgttcccgggtgtggcgctgcttcttgccgcggcccgcctcgccgctgcctccgacgtgctagaactcacggacgacaacttcgagagtcgcatctccgacacgggctctgcgggcctcatgcagcgtcgagttcttcgccccctggtgtggacactgcaagagacttgcacctgagtatgaagctgcagctaccagattaaaaggaatagtcccattagcaaaggttgattgcactgccaacactaacacctgtaataaatatggagtcagtggatatccaaccctgaagatacccagagatggtgaacaaacaggtgcttatgatggacctaggactgcctgatggaattgtcaaccacttgaagaatcaggcaggaccagcttcagtgcctctcaggactgaggaagaatttaagaaattcattagtgataaagatgcctctatagtaggttttttcgatgattcattcagtgaggctcactccgagttcctaaaagcagccagcaacttgagggataactaccgatttgcacatacgaatgttgagtctctggtgaacgagtatgatgataatggagagggtatcatcttatttcgtccttcacatctcactaacaagtttgagggacagactgtggcatataccgagccaaaaaatgaccagtggccaaaattaaaaaagtttatcccaggaaaacatttttgggtatctggccctcccctgaccgaaagaccaataagcttttgattacaggggcaagggaccttccttattggccttactatgaatggggaactattgaa

SEQ ID NO: 74033 - DNA, 2354 bp, Homo Sapiens
  misc_feature (2010)..(2072): n is a, c, g, or t
  misc_feature (2112)..(2167): n is a, c, g, or t
tcggcacgaggcctcgccgccgcgcttacgcaagcagcgggttagtggtcgcgcgcccgacctccgcagtcccagccgagccgcgacccttccggccgtccccaccccacctcgccgccatgcgcctccgccgcctagcgctgttcccgggtgtggcgctgcttcttgccgcggcccgcctcgccgcttgcctccgacgtgctagaactcacggacgacaacttcgagagtcgcatctccgacacgggctctgcgggcctcatgctcgtcgagttcttcgctccctggtgtggacactgcaagagacttgcacctgagtatgaagctgcagctaccagattaaaaggaatagtcccattagcaaaggttgattgcactgccaacactaacacctgtaataaatatggagtcagtggatatccaaccctgaagatatttagagatggtgaagaagcaggtgcttatgatggacctaggactgctgatggaattgtcagccacttgaagaagcaggcaggaccagcttcagtgcctctcaggactgaggaagaatttaagaaattcattagtgataaagatgcctctatagtaggttttttcgatgattcattcagtgaggctcactccgagttcctaaaagcagccagcaacttgagggataactaccgatttgcacatacgaatgttgagtctctggtgaacgagtatgatgataatggagagggtatcatcttatttcgtccttcacatctcactaacaagtttgaggacaagactgtggcatatacagagcaaaaaatgaccagtggcaaaattaaaaagtttatccaggaaaacatttttggtatctgccctcacatgacagaagacaataaagatttgatacagggcaaggacttacttattgcttactatgatgtggactatgaaaagaacgctaaaggttccaactactggagaaacagggtaatgatggtggcaaagaaattcctggatgctgggcacaaactcaactttgctgtagctagccgcaaaacctttagccatgaactttctgattttggcttggagagcactgctggagagattcctgttgttgctatcagaactgctaaaggagagaagtttgtcatgcaggaggagttctcgcgtgatgggaaggctctggagaggttcctgcaggattactttgatggcaatctgaagagatacctgaagtctgaacctatcccagagagcaatgatgggcctgtgaaggtagtggtagcagagaattttgatgaaatagtgaataatgaaaataaagatgtgctgattgaattttatgccccttggtgtggtcactgtaagaacctggagcccaagtataaagaacttggcgagaagctcagcaaagacccaaatatcgtcatagccaagatggatgccacagccaatgatgtgccttctccatatgaagtcagaggttttcctaccatatacttctctccagccaacaagaagctaaatccaaagaaatatgaaggtggccgtgaattaagtgattttattagctatctacaaagagaagctacaaacccccctgtaattcaagaagaaaaacccaagaagaagaagaaggcacaggaggatctctaaagcagtagccaaacaccactttgtaaaaggactcttccatcagagatgggaaaaccattggggaggactaggacccatatgggaattattacctctcagggccgagaggacagaatggatataatctgaatcctgttaaattttctctaaactgtttcttagctgcactgtttatggaaataccaggaccagtttatgtttgtggttttgggaaaaattatttgtgttgggggaaatgttgtgggggtggggttgagttgggggtattttctaattttttttgtacatttggaacagtgacaataaatgagacccctttaaactgtcttattttccaccagattgagaaccagatgttctctacacactatnnnnnnnnnnnnnnnnnnnnnnnnnnnnnnnnnnnnnnnnnnnnnnnnnnnnnnnnnnnnnnngtagctacagagcatctgaaatatggctagaaactacatnnnnnnnnnnnnnnnnnnnnnnnnnnnnnnnnnnnnnnnnnnnnnnnnnnnnnnnnctgtagactgactgggtccatagttcatcacctcaaaattctttcaaaatttattatctctttctctccttacatgtttatttcccaggcctaccctggtgttagaacagctgaagggcctttcttgttaggctgtccatgccctaaggaatggttcctgtttatccttgccacgcagctgagctta

SEQ ID NO: 74034 - DNA, 1162 bp, Homo Sapiens
  misc_feature (18)..(18): n is a, c, g, or t
gtctaggagcgagcctgngtggcttactcggcacgagggccggtcttgcagagtagctgcggtgagtgggcgtgtgcgccgagcggtctggcccaagggctgggggccggccgagggtcttcgggagcaggccgcagggcgcggagagatcctgggatcgccgtccgccgctgctacccggcatgtcggcggaggcctcgggcccggctgccgccgcggccccgtccctggaagcccccaagccctcgggtctcgagcctggccccgccgcctacggtctcaagccgctgaccccgaacagcaaatacgtgaagctgaacgtgggcggctcgttgcactacaccacgctgcgcaccctcacgggacaggacaccatgctcaaagccatgttcagcggccgcgtggaggtgctgaccgatgccggaggttgggtgctgattgaccggagcggccgtcactttggtacaatcctcaattacctgcgggatgggtctgtgccactgccggagagtacgagagaactgggggagctgctgggcgaagacacgctactacctggtgcagggcctgattgaggactgccagctggcgctgcagcaaaaaagggagacgctgtccccgctgtgcctcatccccatggtgacatctccccgggaggagcagcagctcctggccagcacctccaagcccgtggtgaagctcctgcacaaccgcagtaacaacaagtactcctacaccagcacttcagatgacaacctacttaagaacatcgagctgttcgacaagctggccctgcgcttccacgggcggctactcttcctcaaggatgtcctgggggacgagatctgctgctggtctttctacgggcagggccgcaaaatcgccgaggtgtgctgcacctccattgtctatgctacggagaagaagcagaccaagtgcatcgtccatgccaaagtgtgcggcccttcctgacatcaccacagtttgagcagcctcccgcgtcctgcagggtagtcaggccccctcctccccaccatcctccctacctccttaactttgtactagactggcctgggcctgcccagctcagcgttatcagtctgtttcatattatttattattttaattttctattaaattattgaaataaagttaagttgag

SEQ ID NO: 74035 - DNA, 1025 bp, Homo Sapiens
  misc_feature (554)..(554): n is a, c, g, or t
tacggctaggtacgaggctgggtggcgaattcggcacgagggacaagctggccctgcgcttccacgggcggctactcttcctcaaggatgtcctgggggacgagatctgctgctggtctttctacgggcagggccgcaaaatcgccgaggtgtgctgcacctccattgtctatgctacggagaagaagcagaccaaggtggaatttccagaggcccggatcttcgaggagaccctgaacatcctcatctacgagactccccggggcccagacccagccctcctggaggccacagggggagcagctggagctggtggggctggccgcggggaggatgaagagaaccgagagcaccgtgtccgcaggatccatgtccggcgccatatcacccacgacgagcgtcctcatggccaacaaattgtcttcaaggactgacctctgacccttccccctgccttcctcttgccttgggacccagtccctctctctttccctccccttcccagacttttgccccggctctgctggccaagtcgtgggtcctcctctgtcccnttcattgcatggcacagctcactttggcccttctccacccatcccaaccccatgtgctaacaacatggtacattccggccccaccactcagagccttccgaagccaacactttgtccccaccctggccctgcgtccttccctctccagctggttaagagggatttagaattccctttctctttttttagtgcatcgtccatgccaaagtgtgcggcccttcctgacatcaccacagtctgagcagcctcccgcgtcctgcagggtagtccgccccctcctccccaccatcctccctacctccttaactttgtactagactggcctgggcctgcccagctcagcgttatcagtctgtttcatattatttattattttaattttctattaaattattgaaataaagttaagttgagaaactggtgctggctcctggggagagggacggggagatgcctgtgttaggaggtatc

SEQ ID NO: 74036 - DNA, 2022 bp, Homo Sapiens
cccggaagaaaacggctcctgtcacagaagtctcgtgattgctctgggagcttgcttagacacttgaaactacaggagaaagaaggatctagcgaaatatggctacagagagccctgctacgcgtcgggtccaggtggcagaacatcctaggttactgaagctaaaggagatgtttaactccaagtttggatctattcccaagttttatgttcgagcaccaggaagagtcaacataataggagagcatatagattattgtggatattctgttcttcctatggctgtagaacaagatgtgctaatagctgtagaacctgtgaaaacgtacgctctccaactggccaatacaaatcccttgtatccggacttcaggactgcagggctaacaacagccagagtgataaaaccaagcagataggccacaaccatttcttatgtggacttaaaggaactcaagaacacttggtctcaccaacccgactggaatgaactgcctggtagatggaaatatcccaccaagttctggccactccagcaccagtgctaagaacagttgtccagacttgataaaaccaagcagtgctggcaaagaatatatccaaggtggaacttacagaaatctgtgccaaaggaacactttggtcttagtaacctgactggaatgaactgcctggtagatggaaatatcccaagcaagttctggcctctccagctccagtgcttaggtctgtagtgctggcttggtgacgctcacagtgctgggaaggaatctatccaaggtggaacttgcagaaatctgtggccaagagtgagcgttacattggcactgaaggaggaggcatggaccagtctatatcatttcttgcagaagaaggaactgccaagttgatagaatttagtcctctgagggcaaccgatgtaaaactcccaagtggagcagtgtttgtgattgccaacagttgtgtggagatgaataaggcagcaacttcccatttcaatatcagggtgatggagtgtcggctggctgcgaagctcctggctaaatacaaaagcttgcaatgggacaaagtactgaggctggaggaggtgcaggctaaactagggattagtctagaagaaatgctgttggtcacagaagatgcccttcatcctgaaccctataaccctgaggagatctgcaggtgtctgggaattagcctggaggaactccgaacccaaatcctgagtccaaacactcaagatgtgctcatcttcaaactctatcagcgggcaaagcatgtgtacagcgaggctgcgcgagtgctccagtttaagaagatatgtgaagaagcacctgaaaacatggtccagctgctgggagagttgatgaaccagagccacatgagctgccgggacatgtatgagtgcagctgccccgagctggatcagctggtggacatctgtcggaagtttggggctcaagggtcacgacttactggagcaggatggggaggctgcacagtatcaatggtacctgcggacaagctgcccagctttctagcaaatgtgcacaaagcttattaccagaggagtgatggaagcttagcaccggagaagcaaagtttgtttgctaccaaacctggaggtgggggctttggttttgcttgaggcctgaaaaaaatgtaaaaagtctgaagagaaactacttagggcacttaggaattggcagggactttctgtgccacagtaaattaatcttccttctgttttgtattatgatgaacggttgctattatatcaagatatattttcaaagaaatggttgaaagctctctatgcttcataatgattctttttccatcttaaaatatggttttactattaagagccaagatcatgcttggacagatcttttaagaataacttactgagatttattgatttgaagattttaaagatgaatggtaaaacacactcttaatactgattacatggattggacttgaattaaatatattgttacaattaaactgataccactg

SEQ ID NO: 74037 - DNA, 2270 bp, Homo Sapiens
  misc_feature (86)..(86): n is a, c, g, or t
  misc_feature (150)..(150): n is a, c, g, or t
  misc_feature (181)..(181): n is a, c, g, or t
  misc_feature (209)..(209): n is a, c, g, or t
  misc_feature (216)..(216): n is a, c, g, or t
  misc_feature (229)..(229): n is a, c, g, or t
  misc_feature (254)..(254): n is a, c, g, or t
  misc_feature (274)..(274): n is a, c, g, or t
  misc_feature (1025)..(1067): n is a, c, g, or t
gccccagctacactttctccgctcttgtgttgattgagcgatacattcacacggaacacttgactgatacgatttatacgatcatntaggaattgccctcgagccagaatcgcacgaggaattatcaaatgcgcatgagagactcaggcntggatgaccaggatgttcgccatccagtatnctcagaaagtgagtttcccagcagttcntaaattnccgagatgagaanggatggaaaactggaaagaggaagnccgagagagatgagctgcgnggagtcatgatattttccaccatggaaccagaggcacctgacttggacttagtagaaatagagcagaagtgcgaggctgtggggaagttcaccaaggccatggatgacggcgtgaaggagctgctgacggtggggcaggagcactggaagcgctgcacgggcccattacccaaggaatatcagaagataggaaaggccttgcagagtttggccacagtgttcagttccagtggctatcaaggtgaaacagatctcaatgatgcaataacagaagcaggaaagacttatgaagaaattgccagtctcgtggcagaacagccaaagaaagatctccatttcctgatggaatgtaatcacgagtataaaggttttcttggctgcttccctgacatcattggcactcacaagggagcaatagaaaaagtgaaagaaagtgacaaactagttgcaacaagtaaaatcaccctacaagacaaacagaacatggtgaagagagtcagcatcatgtcttacgcgttgcaagctgagatgaatcactttcacagtaaccggatctatgattacaacagtgtcatccgcctgtacctggagcagcaagtgcaattttacgaaacgattgcagaaaagctgaggcaggccctcagccgctttccagtgatgtaggacagaacgggccttgaagagaatgccgcgtgctttctcctgacttggggcaatgcaattcaaaactttttttcccctattattcagnnnnnnnnnnnnnnnnnnnnnnnnnnnnnnnnnnnnnnnnnnntgcatttattttattagccaccctaaatgcgtcagttatttagggatggtcttttgttcatttccgcatccattatttaaaccagtggaaattgtctctatttttggaaagtacttaaaagttaccagaattttcaatggaaaatgaggggtttctccccactgatattttacatagagtcataatttatatgtcttataaattataagtcttatataatttataagtctcccacaatcttccagttcttacccagtgtcagataattaattactaattactttcttaaaaacatgaactatgccagaataaaaaatatctatgtttgtatatttttataactcctttcagtcctctggggctcctgtcattgagggaagtcgttacgcctttcactgccacagttacagctcaagtgcttacacttcaagagagaggacgctgggggcccctggggctgctagtgccatcgtggtgtgtggcaggtgggccatcccatgtccctccagggggaccccacagcctggcagatgagcagatacccctggccacccatgtcctcagcgacatttctgatgtgctgctcttatgtgaggaccagtgctttctctctttgcacttccttcctaatcttggttaaggcatgttttatgccatgaagaatacattagaagaattgagggactttgtagagaattttgtggctttggtccgacgggtgagtggctgtgcggaggcctgtgttcgggagggcctgggggaaggagggcacccagcaccccggcgtctctggccctttcttattctttggctcctcatccaccgtgatgagaagcgctgctgtggccacggcacactgcttggcttgggtggcgggttcatggccagttggtgtcatcagcaaagagaaaaagcacaggttagctccccattagatggaaaagtgtagggactgagaagggctgcagcctcagcagtgtacagagtccccggcgctctgaggttggagagaaagaacagaccagcgcccttcctgactacatccgaaacttcacacaggggtgtttctgagcaccagcacttccagcgcttcacttaacggcataaagcaaaacaggaccttggcacaccgtcagctcgaactcaacactggcaggcacccgtctcaccccctgcgggaggagcgctccccgtctcccacaa

SEQ ID NO: 74038 - DNA, 975 bp, Homo Sapiens
  misc_feature (80)..(80): n is a, c, g, or t
tgtgatggcgtaattaccgaacgttgatgtcgattacgatcattagatgcctcggccagatcgagagttcatcctctatntgtagctgttatcctgagatcatagagatgagacttgaggattgtgcttgccaacggtgatgcttgcgagcctgtgtcggaggcctggaaaggaggcaccaacaccccgcgtctctgccctttcttatcttaggctcctcatccaccgtgatgagaagcgctgctgtggccacgccacactgcttggcttgggtggcgggttcatggccagttggtgtcatcagcaaagagaaaaagcacaggttagctccccattagatggaaaagtgtagggactgagaagggctgcagcctcagcagtgtacagagtccccggcgctctgaggttggagagaaagaacagaccagcgcccttcccgactacatccgaaacttcacacagggtgtttctgagcaccagcacttccagcgcttcacttaacggcataaagcaaaacaggaccttggcacaccgtcagctcgaactcaacactggcagccaccgtctcacccctgcggaggagcgctcccgtctcccacaggtgccttaccgcgttccctcccgctgctttcatttttctgacctaataattacgggaaatggaaagtctgggccagcatcaataaaatgacaccaaaaataagtagatgaaatcaaatgaatatgagaacatcttgttcttcaatatcacgggtttttgttaatgtttcataagtaattctccccacttgatttttcttctataaaatcccatagaacaatgtttatgctatagccatttaatatatgtacaaattgtaaagaatatgtataaatgttttacacgaatgtaagagcatgtagaagccaacatataaataaattgtttaaaaaaactgtacagtaaattctcaaagcactttttcaaaacaaaaa

SEQ ID NO: 74039 - DNA, 2276 bp, Homo Sapiens
  misc_feature (442)..(450): n is a, c, g, or t
aacatgtattcagattgagaaatatgattttaatgctttaatctcatgtagtttgtttttaatttcaagcaaaatcttactgtacttgaatgtgccctgttttgttagcacacctagacttgctgtaactgtactcatgtcccagtatgtacgttctttctatgaaagagaaaacactaatcttaaattatatccagcaatgtttctggtatcctttaagaaaagttaagactattatttccttcccttccctgtgcagcattcaaaatcacccctagaaaaagtgagtgttttaatgagacttcctaggaagggatgcactgtaaaacaaaagtattcttgtaactcagttttgtgaaaggtaaaaaactactatgttttaagtacactttagaaagtctcttcaaaacaaacagtcctgtatttgaactctgttcatagnnnnnnnnngaacagtttagacaaaactgctggaaattaaaccaatttcctgcattaagctgagacaagtatatatacagccctatacagtttcatagcttttcctcccccatttatgtgtattggtgacagtgggtataaaacagcctgaaagtgtatgcatgtaccataacatctagacttaatatattgtggagtattcaataaccattatgtagaaggtagataagaattaaaagggtttaatttcctagaaagaaaatggaaaaatggtcatttttaaaaaataaagtttattagatcataatgttgtctgaatttaccacctttgtcagaagtcaactcaaagcttccaatgtagtcagtctataattccttaatcaaagtcagcaatttatggacagcttcagcatctacagttgacctttcactagccaggcaaacttcccgaaataatcgtagtgactgattcatcttctcaaattctcttgcttttctatgtcccttttgaataacttcctctgggagattagcaagccttgctgcattaaagccatagcttttaggacaagctcccttaatgaatttatagaggaacgtaatagtctcctggctggggtcttcacattcattttctaccatgcatgccatatgtcctaggcgcacagcaacattttgagaataatcttctactaatgaatggtagtgagttgaaaataatgtacgacattttatagtctcagcaagttctttaacaactgcatttgctattgccgtcccatcaaatgttgcagtacctcttcctaattcatccacaagcaccagagaatgtgctgttgcatgcatgagtatgctggcagtttcacttaattcaacaaaaaatgtactttcacctgacattattctgtctgaggcaccaagtctagtaaacactctatcaattggtgtgagcctgcacacttcagcaggggacgtaacaacccatctgggccattacagctaataagccagcctgtctcataagcgtagacttgcccccccatatttggtccagtaacaagcacacaataggctttgccattttcctgctcctcttcctcacagcctattagaatgtcattaggaataaaatcatctccaaaaaaagtcttcgtaatgcaaggatggcgtgatcctttaagctctaagaaggggggggtatcttccggcaacagaattactgggcgacacataggaccatcaccccctcgactatagttagccaggcacagtaaaacatccaacactgcgatacactctacagcagactgccagtccttgtaatttttatcaaagttatagaacagtcgccgcatgcagtccttcaatgatacatccctccgttcttcagcatttatgagattagccaacttcttttcaatagttttggtccagtatcgtttacagcccttcttggtagatttcaactcgtattcttctggcaaattgcgagtggtgaaattctcaggaatttccagctggtaacggttcctaccaatcccccaatagactatggtcctacagccaattctgttgcgctgtttctctaggtattccaggaggctctgttcattttctcttatgtcagcaagagcttggtcataatcagagtcaaagcctgctttgggagtaataagtccagtctttcgagccttttcatggtcaaaggctgtatcccatcggttcaattctacagtcaaatcaggaaaacgaccttcaggattttttgtctgcagagagatgacctgcttaaggattttagacttaaaaccatcagcaacttcttccctcgtgcc

SEQ ID NO: 74040 - DNA, 1163 bp, Homo Sapiens
gggaaaactgggtgcagtaactataacggtctctaaggtagcgaggcctgggtggcgaattcggcacgagggacgctcacgggcgcgcggactatcgggcggctaggctctctgaggaggctgccacagtgaagcaaccgtgacaagtggtgcccgaccagggacctgaacgaggaaggtctgccagagcagagaaagtgaaactgatcagacgaactacgaacccctggacgggagagtctgccggcggagaatataaggagatggacaaaccgtgtgggtgccctccaggtgtgtgtgaccatggaacgggagaccggagggatccatggtattcaaccgtgggcctgttacctccagtacgagccatgagccagcggaatctgaatgcaaagacagaacaagggccgaccggagtcacaatgacatccaaccccataacatggggacagatcaagaaaacgacacaagaagctgagaaactactggagcgccagggtcaggcaaaaacccctgactccatgttcttggccatgctagctgtagtgtcctgtgcgtctataggatcgggtgaaccaccaaccggcaattgaaagctgcacagcctgaaattacctttattcaattaatgcaaaaacaaaaggggagatgttggaggccgaaggaatgagggtcgtgaccaactcagtataccactggaggctctgtgagcaaacagcaaactgttctcatgaaagcaggatgttggcgaactgacaaactctgtctgccgccagaaggaatgctgggggcagtcatgtcccaggtcccgtgctccttgaggttatccacaggaacatccagaacctgttgaacaaagaaaggaatcatgtgggcctgtgttaaatcaaatagctgaccgacagttatcccttcctccctattcactctacctaataaatatgaagggctgtaaaagctcaggtccctgttccctaatatcaaggagccccctgaccccttctttcaaacagatccttttgtctgtctcatttctgcattcgtcgtccttcgttcggtccagaagcaaccgcgacagtcctgcatgtgttgatgccacctgtatgtgcaggtgtgacctcaggtgtgtgagtatccctcataccccttatcatcactgccta

SEQ ID NO: 74041 - DNA, 414 bp, Homo Sapiens
  misc_feature (56)..(56): n is a, c, g, or t
cccagcccggcctttgtgggactgaggtggcgctgagtgggagagcagcaggcgantgcgcgaataggcggcgacttggagataaatactgagcacccacaacaggcagccagcaccactgcagattggatactgcaatgatgataagcatggcctgcctttatggaggttctggatgttcctgtggataacctcaaggagcacgggacctgggacatgactgcccccagcattccttctggcggcagacagagtttgtcagttcgccaacatcctgctttcatgagaacagtttgctgtttgctcacagagcctccagtggtatactgagttggtcacgaccctcattccttcggcctccaacatctccccttttgtttttgcattaattgaataaaggtaatttcaggctgt

SEQ ID NO: 74042 - DNA, 410 bp, Homo Sapiens
gaaatggagtctcgctctgtcacccagatgctgttattcataaatgggagtgttgccttccatatcgatttctgaattgggcctctgtttcctagatgacgtcactgaggtaagggcgggttaaagcctgtcctataccaagcaagttgtgcagccaactgggggactgaatcccagtgtgatgtgatgaagaggtgttgaaggtccaccaccagtgccagtgaagtttgtgccaagaggtctgattttcatctctcccctctaaatggccacggggaccccagtcaatgtttcccattaacatagactgttgtctggccaaggggccaagacactgagtccaaggagggggggagaaatatcaaagggagcccattccatataatccatacaatttgagtgatggggct

SEQ ID NO: 74043 - DNA, 838 bp, Homo Sapiens
taactggagaacaaccatcccaggctgcctgcatggcatcagactagccactcctgccaggccgccgggatggttcttctccagttagaatgcaccatggagacgtggtgggactccagctcgtgtgtcctcatggagaacccaggggacagctggtgcaaattcagaactgagggctctgtttgtgggactgggttagaggagtctgtggctttttgttcagaattaagcagaacactgcagtcagatcctgttacttgcttcagtggaccgaaatctgtattctgtttgcgtacttgtaatatgtatattaagaagcaataactatttttcctcattaatagctgccttcaaggactgtttcagtgtgagtcagaatgtgaaaaaggaataaaaaatactgttgggctcaaactaaattcaaagaagtactttattgcaactcttttaagtgccttggatgagaagtgtcttaaattttcttcctttgaagctttaggcagagccataatggactaaaacattttgactaagtttttataccagcttaatagctgtagttttccctgcactgtgtcatcttttcaaggcatttgtctttgtaatattttccataaatttggactgtctatatcataactatacttgatagtttggctataagtgctcaatagcttgaagcccaagaagttggtatcgaaatttgttgtttgtttaaacccaagtgctgcacaaaagcagatacttgaggaaaacactatttccaaaagcacatgtattgacaacagttttataatttaataaaaaggaatacattgcaatccgtaattttaaaaaa

SEQ ID NO: 74044 - DNA, 784 bp, Homo Sapiens
  misc_feature (46)..(46): n is a, c, g, or t
agttgtgagaagtgaaagttttctgtccgtgaactccttgatgctnagcaacaatgccgtagtccagtcagaaaagcatcaatacttcaccagtgaaatatcagagtggttgaccagaaattaacaaaaagtgatcgaccagagctaacaggtgccaaagtggtggtatctggtggtcgaggcttgaagagtggagagaactttaagttgttatatgacttggcagatcaactacatgctgcagttggtgcttcccgtgctgctgttgatgctggctttgttcccaatgacatgcaagttggacagacgggaaaaatagtagcaccagaactttatattgctgttggaatatctggagccatccaacatttagctgggatgaaagacagcaagacaattgtggcaattaataaagacccagaagctccaattttccaagtggcagattatggaatagttgcagatttatttaaggtagttcctgaaatgactgagatattgaagaaaaaatgaatcaggatcatgccttaaaaagaaaacttttgttaaagtattccactgaaatcacagatatttgtgggtattataacaatcattggaaagcatggagagctacatttcataatttgagggaaaatttctaacagatgccagaatgcttgtttatgggattgctgtgtttccttttaattatttgtggttccaaacaattattgtttgaacttttttaattctgtactaaaatctataataaagcttttccacagctttaaaactaaaaaaa

SEQ ID NO: 74045 - DNA, 1388 bp, Homo Sapiens
  misc_feature (19)..(19): n is a, c, g, or t
  misc_feature (46)..(46): n is a, c, g, or t
cccccctggcgcctggggnagggctctcttacggtcccctccgcanggcgcgggtcttccgggatatgggtgggtttttcagcacgaggccgaggttgcggcggaagcggagaccatgttccgagcggcggctccggggcagctccggcgggcggcctcattgctacgatttcagagtaccctggtaatagctgagcatgcaaatgattccctagcacccattactttaaataccattactgcagccacacgccttggaggtgaagtgtcctgcttagtagctggaaccaaatgtgacaaggtggcacaagatctctgtaaagtagcaggcatagcaaaagttctggtggctcagcatgatgtgtacaaaggcctacttccagaggaactgacaccattgattttggcaactcagaagcagttcaattacacacacatctgtgctggagcatctgccttcggaaagaaccttttgcccagagtagcagccaaacttgaggttgccccgatttctgacatcattgcaatcaagtcacctgacacatttgtgagaactatttatgcaggaaatgctctatgtacagtgaagtgtgatgagaaagtgaaagtgttttctgtccgtggaacatcctttgatgctgcagcaacaagtggcggtagtgccagttcagaaaaggcatcaagtacttcaccagtggaaatatcagagtggcttgaccagaaattaacaaaaagtgatcgaccagagctaacaggtgccaaagtggtggtatctggtggtcgaggcttgaagagtggagagaactttaagttgttatatgacttggcagatcaactacatgctgcagttggtgcttcccgtgctgctgttgatgctggctttgttcccaatgacatgcaagttggacagacgggaaaaatagtagcaccagaactttatattgctgttggaatatctggagccatccaacatttagctgggatgaaagacagcaagacaattgtggcaattaataaagacccagaagctccaattttccaagtggcagattatggaatagttgcagatttatttaaggtagttcctgaaatgactgagatattgaagaaaaaatgaatcaggatcatgccttaaaaagaaaacttttgttaaagtattccactgaaatcacagatatttgtgggtattataacaatcattggaaagcatggagagctacatttcataatttgagggaaaatttctaacagatgccagaatgcttgtttatgggattgctgtgtttccttttaattatttgtggttccaaacaattattgttcgaacttttttaattctgtactaaaatctataataaagctttccacagtttacacaacacacccca

SEQ ID NO: 74046 - DNA, 458 bp, Homo Sapiens
ctgtgcttctattatctgatacatagtttgacaatgggtaattctactcagaccctccctactgattggctaggatgcctgtcaggaactcattatgctactggttgtttggggatccccatagtggactactttcaggaatggcatgaattgtaaccaactgagtgctgcccccactgttacggaagtttataaaaccttagttccagaagacccaaaggagagtactggtttgtgtttggtgcttggcctagatccagccaccactctgaaactcatcacatcttcattgacagggagggagcccaggacatatgtgtggctcattgaccagaaggctttcttagtcccaacagccatgaaccatgcacttatggatacccagccttttagggctacgtgaaatgcatccttgtaacatcattgtattctttcaataaatagccttctgagttgaa

SEQ ID NO: 74047 - DNA, 1170 bp, Homo Sapiens
ctcatggaggtaaaaaagggaatgaagagaaaatgaaagaggggcttgaggatgagaaaagagaagagaaagccctgaagaatgacatagaggagcgaagcctgcgaggagatgtgtttttccctaaggtgaatgaagcaggtgaattcggcctgattctggtccaaaggaaagcgctaacttccaaactggaacataaagcagatttaaatatctcggttgactgcagcttcaatcatgggatctgtgactggaaacaggatagagaagatgattttgactggaatcctgctgatcgagataatgctattggcttctatatggcagttccggccttggcaggtcacaagaaagacattggccgattgaaacttctcctacctgacctgcaaccccaaagcaacttctgtttgctctttgattaccggctggccggagacaaagtcgggaaacttcgagtgtttgtgaaaaacagtaacaatgccctggcatgggagaagaccacgagtgaggatgaaaagtggaagacagggaaaattcagttgtatcaaggaactgatgctaccaaaagcatcatttttgaagcagaacgtggcaagggcaaaaccggcgaaatcgcagtggatggcgtcttgcttgtttcaggcttatgtccagatagccttttatctgtggatgactgaatgttactatctttatatttgactttgtatgtcagttccctggtttttttgatattgcatcataggacctctggcattttagaattactagctgaaaaattgtaatgtaccaacagaaatattattgtaagatgcctttcttgtataagatatgccaatatttgctttaaatatcatatcactgtatcttctcagtcatttctgaatctttccacattatattataaaatatggaaatgtcagtttatctcccctcctcagtatatctgatttgtataagtaagttgatgagcttctctctacaacatttctagaaaatagaaaaaaaagcacagagaaatgtttaactgtttgactcttatgatacttcttggaaactatgacatcaaagatagacttttgcctaagtggcttagctgggtctttcatagccaaacttgtatatttaaattctttgtaataataatatccaaatcatcagagagga

SEQ ID NO: 74048 - DNA, 1795 bp, Homo Sapiens
  misc_feature (112)..(223): n is a, c, g, or t
aacgctaggctaggtacgaggcctggtgttatatcggcacgaggtgtgaacagcttcgtgaggtgctggagggcttcaacatggccaaggtgctggcgtcctcagtgatgannnnnnnnnnnnnnnnnnnnnnnnnnnnnnnnnnnnnnnnnnnnnnnnnnnnnnnnnnnnnnnnnnnnnnnnnnnnnnnnnnnnnnnnnnnnnnnnnnnnnnnnnnnnnnnncctcagcagcgagggcagggagagaagtcagccacgccctcacggaagattctggaccctaacactggggagccagctcccgtgctgtcctccccacctcctgcagacgtctccaccttcctggcttttccctctccagagaagctgctgcgcctagggcccaagagctccgtgctgatagcccagcagactgacacgtctgaccccgagaaggtggtctctgccttcctaaaggtgtcatctgtgttcaaggacgaagctactgtgaggatggcagtgcaggatgcagtagatgccctgatgcagaaggctttcaactcctcgtccttcaactccaacaccttcctcaccaggctgctcgtgcacatgggtctgctcaagagtgaagacaaggtcaaggccattgccaacctgtacggccccctgatggcgctgaaccacatggtgcagcaggactatttccccaaggcccttgcacccctgctgctggcgttcgtgaccaagcccaacagcgccctggaatcctgctccttcgcccgccacagtctgctgcagacgctgtacaaggtctagactcaaagcctctcccatcccttggcctggaccagtgagctggggagggactcggatgaactgaggcgcagcctacgccattgccttggacaggactctggccacaggcagggcgggtctgtgtcccatgtgtcctgtcagtcccctgagtatgtgtgtgggtgtggcgcatgtgcaggtctgtgcctcctgtcgggatttgggttttaacgtcttctgctggcccagccctgctctgttgtggggagttggcccccaggggaaagggctgtgagctgctccgccattaaactcacctccacctgagggcgctctgctgatctccgcctgggccctgatggccgtccccacccacctgccttccggcccggctccctggcggagccagaacccaaggagttgcccgcgtgctgtccttcccctctgtgttgtgattgggttgtttcctgccctgcctggggctgcttctcgtcaccaagccctggtcctgcggcagctgtcacccctaccatccataccactgtgctgaccgctcagcctgaagagcagagaatgccatgggtgggactgtgggggtcggatcgtggggttgttggcagagggcaaccctgggccccacaccgtgtggacaggcagacaccagattgtccaggagcaggagctgctgggactgcgctggccccggacctagtgggccttctcctggctgctgagatgtcgtctgtgactggcctggctggagggggagtgttgacaacccaaagctgttctccagtctggggagggagaggcagggtccccaatgtccgagctgcatctggacgctgctcttaaaggacctcctggggcaggggagcggtagggtctggactgggcagatgctgtatgacctccctgagcacccgtgactgccccatgctttcccctttgtgctctgtgtgtgtctgggctgtgcccgggggcttcacaaataaagtcgtgtggcagcttcaaaaaaaa

SEQ ID NO: 74049 - DNA, 849 bp, Homo Sapiens
  misc_feature (724)..(762): n is a, c, g, or t
  misc_feature (781)..(804): n is a, c, g, or t
ccgtgccggtagcgcccgtgccggtagcgccgctgccaccgctcaccatgggcccgggtcctcggctgctgctacctctcgtgctttgcgtggggctcggcgcacttgtgttttcttcgggggccgagggcttccgcaagcgaggcccctcggtgacggccaaggtcttctttgatgtgaggattggagacaaagatgttggcagaattgtgattggcctctttggaaaagttgtgcccaagacagtggaaaattttgttgctctagcaacaggagagaaaggatatggatataaaggaagcaagtttcatcgtgtcatcaaggatttcatgattcaaggaggtgacatcaccactggagatggcactgggggtgtgagcatctatggtgagacatttccagatgagaacttcaagctgaagcactatggcattgggtgggtcagcatggccaacgctgggcctgacaccaatggctctcagttctttatcaccttgaccaagcccacctggttggacggcaaacatgtggtgtttggaaaagtcattgatgggatgacagtggtgcactccatagagctccaagcaactgatgggcatgaccgtccactcaccaactgctcgatcatcaacagtggcaagatagacgtgaaaacgccttttgtggttgagatcgctgattggtgacacaactggcagaaaacaaggatatgctttggcagggnnnnnnnnnnnnnnnnnnnnnnnnnnnnnnnnnnnnnnntgtctttcaattatttgcnnnnnnnnnnnnnnnnnnnnnnnngtattctatcccagatcacaggaaagttataaaaatcaaaccgtc

SEQ ID NO: 74050 - DNA, 1509 bp, Homo Sapiens
gtgctaggtagcgaggcctggtgtgtgtgaattctggcactgaggctgtgccgcatgccgtcgtgggcccctgcgagctgcagctggggctgggaggcgtgggcggcctggccgtgggctggagctggcggccgcggccgtgagcctgcccccaactcgccctcagccggctggccggcgcggccatggaggtctacatcccgtcctttcgctatgaagagagcgacctggagcggggatacacggtgtttaagatagaagtgctaatgaatggaagaaaacattttgttgaaaagagatacagcgaatttcatgctttgcacaaaaagcttaagaaatgtataaaaactccagaaatcccttctaaacatgttaggaactgggtccccaaagtcttggaacagcgacgacaaggcttggaaacatacttacaggctgtcattttagaaaatgaagaacttcccaaactgtttcttgatttcctaaatgtgcgacacttgccctctctaccaaaggcagaaagttgtggatcttttgatgaaacagagtctgaagagtcaagcaaactgtcccaccagcctgtgctgctgttcctcagggatccatatgtcttgcctgcagccagcgattttccaaatgtggttattgaaggagtcctccatgggatattttaccctcatctacagcccaggtagaaatcctacatggctaaaagaagcagaagcaagtttcgaagtcacagtcaaggaaatcaatacctaccaatttaacctaaacgctatgatatataacagctctagctagtggtaaagtgcacagtcccagcttaattcagggcagggacatttccattagaatggtgctcttaaaaatagaaactgaaccggggcggtggtcaggctaaggccaagtgtttaagaagtagagtgtagctgccagcgtagaaacccatgaaaaggaggccacaggagattcctgggagcactgggtgtagcaaaacaaagccactctctgcttcagtcgcaccatttgctaattgaaaatcatatcctgaatcatactgagactgatcaactttggtagcttttttgttcagatcttatgacacactactcttctcaccgtgagattttctcagccagtgatagtacattctgaaatgctggcaccaggagacggccacagacacacactgctaaatgtgaagatggaactaaactggaaattaaattatactgacaatattatggcatttttaagatcatggcattttaatttacattagagtggagttgcatcatactcaggggttagcttccaaggtcagtacataggtaaaatgggctattaggatgatccttgaaagccctttagaagggtgccatgttggaaacctgtacatccacaacaagtagcttttcctcctatgttggaaaaaaagactgtttctttgtttgaagaccaagtgaagttgttggtgtttgttaggggcatcgttacaaaataatc

SEQ ID NO: 74051 - DNA, 949 bp, Homo Sapiens
  misc_feature (204)..(227): n is a, c, g, or t
  misc_feature (388)..(410): n is a, c, g, or t
  misc_feature (426)..(477): n is a, c, g, or t
tttttttgttgatctaaaagtatttaatataaagaacagcaaagcacccttttgtcagaaagaaatccctatgacatatctcagattacactagtcaaatttccctttatctgaatttctttttggatacaaaataataatatcctcatctgtttcagataaatgttcagcattacccaatatggggatcataatgaattcagnnnnnnnnnnnnnnnnnnnnnnnntagccaattcaaagttttttttagttttaaaatagcaccacttgaggaaggggatatatttaagttcaaagtccctaagcaggtggtttactaaagttcaagcaaactaaagggtgacggtttgatttttataactttcctgtgatctgggatagaatacnnnnnnnnnnnnnnnnnnnnnnngcaaataattgaaagnnnnnnnnnnnnnnnnnnnnnnnnnnnnnnnnnnnnnnnnnnnnnnnnnnnnccctgccaaagcatatccttgttttctgccagttgtgtcaccaatcagcgatctcaaccacaaaaggcgttttcacgtctatcttgccactgttgatgatcgagcagctggtgagtggacggtcatgcccatcagttgcttggagctctatggagtgcaccactgtcatcccatcaatgacttttcaaacaccacatgtttgccgtccaaccaggtgggcttggtcaagggtgataaagaactgagagcccatgggtgtcaagcccagcgttggccatgctgacccacccaatgccatagtgcttcagcttggagttctcatctggaaatgcctcaccatagatgctcacacccccagggccatctccagtgggggagtcaccttccttggaatcttgaaatccttggatgacccgatgaaaaccggctttcctttataacccaaaaccctttccctcccggtggctagagc

SEQ ID NO: 74052 - DNA, 406 bp, Homo Sapiens
tgcattggtagatgggaaaacgctagaagagtgatacgctatttcgattctatctcactatattctaaggctgtcattttagaaaatgaagaacttccaaaactgtttcttgatttcctaaatgtgcgacacttgccctctctaccaaaggcagaaagttgtggatcttttgatgaaacaagagtctgaaaagtcaagcaaactgtcccaccagcctgtgctgctgttcctcagggatccatatgtcttgcctgcagccagcggtaatcaaacctgtcatctgctaacagctctttactgatctgaccctgcaccacataaaccacgtttttaatacaggtctaacagagtgacattggtcccgggcttaataataagccaataaaccagtgctcttggtaaaaaa

SEQ ID NO: 74053 - DNA, 641 bp, Homo Sapiens
gcggccgcggccgtgagcctgcccccaactcgccctcagccggctggccggcgcggccatggaggtctacatcccgtcctttcgctatgaagagagcgacctggagcggggatacacggtgtttaagatagaagtgctaatgaatggaagaaaacattttgttgaaaagagatacagcgaatttcatgctttgcacaaaaagcttaagaaatgtataaaaactccagaaatcccttctaaacatgttaggaactgggtccccaaagtcttggaacagcgacgacaaggcttggaaacatacttacaggctgtcattttagaaaatgaagaacttcccaaactgtttcttgatttcctaaatgtgcgacacttgccctctctaccaaaggcagaaagttgtggatcttttgatgaaacagagtctgaagagtcaagcaaactgtcccaccagcctgtgctgctgttcctcagggatccatatgtcttgcctgcagccagcggtaatcaaacctgtcatctgctaacagctctttactgatctgaccctgcaccacataaaccacgtttttaatacaggtctaacagagtgacattggtcccgggcttaataatctgccaataaaccagtgctcttggtaaaa

SEQ ID NO: 74054 - DNA, 1602 bp, Homo Sapiens
  misc_feature (1146)..(1182): n is a, c, g, or t
  misc_feature (1201)..(1223): n is a, c, g, or t
  misc_feature (1351)..(1408): n is a, c, g, or t
gccgtgccggtagcgccgctgccaccgctcaccatgggcccgggtcctcggctgctgctacctctcgtgctttgcgtggggctcggcgcacttgtgttttcttcgggggccgagggcttccgcaagcgaggcccctcggtgacggccaaggtcttctttgatgtgaggattggagacaaagatgttggcagaattgtgattggcctctttggaaaagttgtgcccaagacagtggaaaattttgttgctctagcaacaggagaggtatgtctcaattttatttcctttaaattgggtcttctttctttgaagccaaatataaagatgtcatctgagaaaataagtattaaattagtatgtcagatgaaccttaccacatttgactttattttccaattaaatatgtattatttgggcactcagtgcccttaggcttctggaaattgggagaaaatcatcatcaagtgaaaatatggtttgctctcttttaacttattcacattaatactctacttccataacatatttattttttggtcagctaatgataaatttctctcagtaaaccatagctgggatataatcaagttctgtaggcatttgtttaattttctcagtttgtcctttctagatcaacactgagtttatctttcagtatggcctctgttacttgttattcaactgaagcaatctctttagaaaggatctggcatatacaggaagcaagtctcatcgtgtcatcaaggatttcatgattcaaggaggtgacatcaccactggagatggcactgggggtgtgagcatctatggtgagacatttccagatgagaacttcaagctgaagcactatggcattgggtgggtcagcatggccaacgctgggcctgacaccaatggctctcagttctttatcaccttgaccaagcccacctggttggacggcaaacatgtggtgtttggaaaagtcattgatgggatgacagtggtgcactccatagagctccaagcaactgatgggcatgaccgtccactcaccaactgctcgatcatcaacagtggcaagatagacgtgaaaacgccttttgtggttgagatcgctgattggtgacacaactggcagaaaacaaggatatgctttggcagggnnnnnnnnnnnnnnnnnnnnnnnnnnnnnnnnnnnnntgtctttcaattatttgcnnnnnnnnnnnnnnnnnnnnnnngtattctatcccagatcacaggaaagttataaaaatcaaaccgtcaccctttagtttgcttgaactttagtaaaccacctgcttagggactttgaacttaaatatatccccttcctcaagtggtgctnnnnnnnnnnnnnnnnnnnnnnnnnnnnnnnnnnnnnnnnnnnnnnnnnnnnnnnnnntgaattcattatgatccccatattgggtaatgctgaacatttatctgaaacagatgaggatattattattttgtatccaaaaagaaattcagataaagggaaatttgactagtgtaatctgagatatgtcatagggatttctttctgacaaaagggtgctttgctgttctttatattaaatacttttagatcaa

SEQ ID NO: 74055 - DNA, 804 bp, Homo Sapiens
  misc_feature (111)..(143): n is a, c, g, or t
gtgttttatttgccaaatgttaccaatcagtgagcaagcaagcacagccaaaatcggacctcagctttagtccgtcttcacacacaaataagaaaacggcaaacccacccnnnnnnnnnnnnnnnnnnnnnnnnnnnnnnnnngttggcaaaagaatctcaggaacggccctgggccacctactatattaatcatgctagtaacatgaaaaatgatgggctcctcctaataggaaggcgaggagaggagaaggccaggggaatgaattcaagagagatgtccacggacgaaacatacggtgaataattcacgctcacgtcgttcttccacagtatcttgttttgatcatttccactgcacatttctcctcaagaaaagcgaaaggacagactgttggctttgtgtttggaggataggagggagagagggaaggggctgaggaaatctctggggtaagagtaaaggcttccagaagacatgctgctatggtcactgaggggttagctttatctgctgttgttgatgcatccgtccaagttcactgcctttattttccctcctccctcttgttttagctgttacacacacagtaatacctgaatatccaacggtatagatcacaagggggggatgttaaatgttaatctaaaatatagctaaaaaaagattttgacataaaagagccttgatttttaaaaaaatagagagagagatgtaatttaaaaagtttattataaattaaattcagcaaaaaaagatttgctacaaagtatagagaagtataaaataaaagttattgtttga

SEQ ID NO: 74056 - DNA, 793 bp, Homo Sapiens
catgaaaaaacctgtagtattatgcactctccgaatcctcctgaagcatttcctctacagacatagtgtaccaggaagtgaaatgcaaatgtgcaattttttttaaaggagcttttaaacaaagtaataataattggtgttgagaacatcagttgccttattctaagatttcataaggctgagtttgcacgcttggacttcagttctgctagcatgtaaagagtggtggactttaaaaccgtaagaggtatcattacaagtcacctggaacagactcaaagaacaggttctttgggcaacagacaaagaagaatcaagttctgtgctgtcccgtgagtgtgtctgagtaccattcactggagttgctgcttaggtctgggacgtgtgtgtgactcttaacaattgctgtctgaaaatgagagagaagacttcggaagcacattgtgttcataatgtactccacaatggccagtccaattgctatctatttttttatccagaggcttaattaaatgatgtggtaaaatgatgtttgagcattaagacaatgtaattctttatttctgggtggaaagatataccggattaaatttatctgtttaaaaaaatgacaaaagttatcaccaaaaccccctttcccatcttgcactgtttgttttggattgggtttgggggaaagagatgtttttcttagttgtctactttgtttgaacacttttgttgtggttcaagtgctgttttgtgtgttgggaccaaacagttgtcaataaactttacaagcgagcatctaaaa

SEQ ID NO: 74057 - DNA, 1921 bp, Homo Sapiens
  misc_feature (127)..(143): n is a, c, g, or t
  misc_feature (1814)..(1848): n is a, c, g, or t
aatcattataacaaatcttcaatttatttgaagcaattcagtttcaaaaactttaagttacagcagtcacagaaaaaaacagggaacagtcaaaaacaataaaagaataatcaggagtactgcaaannnnnnnnnnnnnnnnnaacactgtcatggctttattcaaaacacagttgcacaaaagtattaacttcaaagtttttaaggagattcttgaggaacttaacacaatatatacatactgccatacaaagagcattaaaataggaccgaaaacttctacaaaatataaaacccacccttacttatttgcatgaaaataccacccacaaagctaaataagtcttaaaagttatctggaggctctaagtgttgttttcaaaccaaagtactctaattttgattgcacagtaagatgattgataagaaagtcaatatatagatttcattttaaaaataagtattttgtaatctggcatagtatgtaatgagaattgttaggaactagaacagggaatttcagtttttaaaagcagaagaaaaatgttatctttttggggattccaatcccctcactaaacttatccccaagggttttctttcggtcagttgtacaacatttttagtttctccacaagtaacatcataatttttactttaaaacaccaagtcatacattttacattgtagaagcagtagcagcagtactatactcagtatttaaatatgtcccagtatagaagcataacttcaattaatttgctgacactaacttcttaaaaacttacaaatattcaaaacaaagggaaaaaattttagatagccaagatttaaaaagccattgccttgaacatggagcctccatagcaaaagaggagatatacttgtatactcattatattttatttagtagccatgtaaggaaacacacactcacttatcccaaatatttttctacttttaatggacatccacttgaaaacaaatcttaattttaatgtcaatttagtttcaaatacttttccagctgcctagtatattccaattaaatgctattattatatctgttttaaaactgggaattaaaggttagaaatactttgcagagtggtatccaaatcatttgagaggccaacattaaaatttgactttaatgtcttattaatatatcaacaggcaattgttccgacttttgaggaacactaacactgcttccaaaagcacccctgcttttctttcttcatcccactaatattgtcttagatgttgtcaaccaagaaacatttatggtaaggagagcttactgcataaaactgtattgataatatattcttatgtcagaaaatactcaatttcttctacttcacttatttaaaacccagacaggactgaaaggtagttgaggtataagactaaaggttttcctgggtttcacaagtttcccaagttccttttgagagagcgggagggagtgaaacaagaagggaaggtgatcataaaggaattgctaagaagaaaaagaatgcacacctaaaaacaaaataaacaaccatcggcatgtcatgatttgcagcctgacaaaagggctcacctgcatgtctctggacttagtataagcaatttttccttcaaaaataaaatcttatcagtcaccactaaatccatgaaccatattaccgaatagaacctccacaaaatccatgaactatgttgctgaatagaacctttactattctgcttctattttccaagttacttgtgaccccggccgtaatggccgaattcccgggcatatgtccggtaccgtcgactgnnnnnnnnnnnnnnnnnnnnnnnnnnnnnnnnnnncggccgcttcctcgctcacagactcgctgcgctcgtcgttcggcaaaagcgctaccccctataggatcgacag

SEQ ID NO: 74058 - DNA, 575 bp, Homo Sapiens
  misc_feature (62)..(62): n is a, c, g, or t
accctgcttttctttcttcatcccactaatattgtcttagatgttgtcaaccaagaaacatntatggtaaggagagcttactgcataaaactgtattgataatatattcttatgtcagaaaatactcaatttcttctacttcacttatttaaaacccagacaggactgaaaggtagttgaggtataagactaaaggttttcctgggtttcacaagtttcccaagttccttttgagagagcgggagggagtgaaacaagaagggaaggtgatcataaaggaattgctaagaagaaaaagaatgcacacctaaaaacaaaataaacaaccatcggcatgtcatgatttgcagcctgacaaaagggctcacctgcatgtctctggacttagtataagcaatttttccttcaaaaataaaatcttatcagtcaccactaaatccatgaaccatattactgaatagaacctccacaaaatccatgaactatgttgctgaatagaacctttactattctgcttctattttccaagttacttgtgacaaaaaagcaaccaaacactcttagtcaaaaaaaaa

SEQ ID NO: 74059 - DNA, 738 bp, Homo Sapiens
  misc_feature (221)..(296): n is a, c, g, or t
  misc_feature (462)..(496): n is a, c, g, or t
cagtcgacggtaccggacatatgcccgggaattcggccattacggccggggggtaacatgggttacctttgcaccagcttcagtgttaagctcaccctgttctttgaagcacccatgtcagtattagaagaataggcagcagttccttagtttacatatgtttgtgcaattattttctgtactttttgttcattaattttgtcagtattacaccaaactgnnnnnnnnnnnnnnnnnnnnnnnnnnnnnnnnnnnnnnnnnnnnnnnnnnnnnnnnnnnnnnnnnnnnnnnnnnnnatatttcctaattttatttatttcatactgtagtgtacagtattatagttcttcaatatatagatatattttagtaaaaaaggaacatgacgttgatcatttgggcaaattttacgtaaagagaagagcatttattgtgttttggaacattaattgtgagatgggnnnnnnnnnnnnnnnnnnnnnnnnnnnnnnnnnnnccaattactggaaattccaaatttgggaacttttgatacgatcttgtgaaaacactgtattttcgactgaaaattccactttcttcatcttgttttttagctaaaaagagggactgttaaatacaatgtatgataccatgacaaaaatctttcctgaattgtctttgtaaaagtattattgaattttcaatttgtaatttcttttgaaaatgaccatgctcgaataaaaatgtagccaaact

SEQ ID NO: 74060 - DNA, 1503 bp, Homo Sapiens
gtccggaattcccgggatcgctggtggaggttcccgaccgcgctcgctcccgcaactgggggcacggcagaggaggcagggccgacggcggtgggcggtgcgttgcgcaggctcgggcctcccgctcgccgctgcgttgggaccgcgcagcccggtaactgcgcacggctggcctcccggagtcctgcgccgtcgctcctcctggacccgggttcccaggacaacgcctcccggaacgcagggagcaggccgaggccgccgcgtgggcctgcagcgcctcgccgctctctcttccccaggcccgcactcccacttgggctccagggccccagggctgacgttccccccagcttagaccctgagtcgttttcccccgtttcccggctgaattaggttcttcttctccacaggtgtgtgcagtggcctcagggatccggaaagtctaggactgaacttctcctaacatccagtaatggggacctggaacctgggcgtactagagtgccgcgcgtagggctccaggtcgctggcttctgcgctttcttcctctccaaagttgagtatctcctatctgtgtcctcatacatactgccgcctgaggtgccatggcccccaagccgggggccgagtggagcacagccctgtcccatctggtgctgggagtggtgtctctgcacgcagccgtgagcacagccgaggcaagtcgaggggctgctgctggcttcctgctccaggtcttggctgccaccaccacgctggccccagggctgagcacacatgaagactgccttgctgggagcctgggtggccaccgtcatcggccttccccttctggccttcgatttccactgggtgaatggggaccgctcctctgccaacctgctcctgggaggaggcatggtgctggcagtggctggcggccacctcggccctgagggccgctctgtggctggtcaggcaatgctgttggtggtcgcagtgaccatcctcattgtagctgtcttcacggccaacacttatgggatgtcggggggggcgatgctgggtgtggcaggcctcctgagccggctggaggaggacaggctgctgctgctaccgaaggaggatgtctgtcgctgggccttggctgtaggcagctgggcttactgccgggccctgcatacacagcgcctccagtgggagtgacagttggatacagccaggcagggtttctgccctgccgaacactttccctcccacctgcctgctcctggcgccttctccctaggggtagactcttctgcctactgaagtgggtttgctgcacattgactggtcaggggcagagtctgggtgctgtcctttggccacgtgtggggacttgtctagaccagaatgaaagggacagggtcccagacacgtttgggggtcctgattctgggctggacacggttgtggatccagagaagaggcctagtctccaataaatcttaggaatttttgcaggaaaaaccaacaaaaaac

SEQ ID NO: 74061 - DNA, 944 bp, Homo Sapiens
  misc_feature (32)..(32): n is a, c, g, or t
aggagtgaaggagaaaacggcacccaggagcncaggagagaaggggaaaaagggagacaggacaagcaggctcaccgattcctgggctgccagggccagagggcctcccggacctccggggctccaaggtgttcctggaccaaagggggaagcaggactagatggagcaaaaggagagaaaggcttccagggagaaaaaggagaccgtggtcccctgggactacccggtactccaggaccaattggagttccaggcccagcgggaccaaagggcgagaggggcagcaaaggagaccctgggatgacaggaccaacgggagcagctgggcttcctggtttacatggaccacccggggacaagggaaaccggggggagagggggaagaaaggctctagagggcctaaaggggataagggagaccaaggagcgcctggattagatgccccctgcccattgggcgaagatggcttaccagtccaaggctgctggaacaagtgatgcctctaaccttggattggcctgtgtgtgtgtttgtacagtagaatatttattttctatacagtttatcactttgctgaaaatgccagaagtatgatgcatcttacagattattaaaaaagaaagaaaaacctgcatattttgtacagaaaatatcaacctcttcccttttgtttacaagatgttttgtataagcctatgtctctaatacattttttgtttggtcgtaatgtatgcatgatatttgtgcacatttattaagtatcgaagcttaataaattattgtgtcctggtgccaaagggggccagccagaactgaggtgctggctagctcatgtgtgaattcacataaatgtagaggtccatgatatttgctaagctaggtgtgtctaagagtattttaaacccttatggattttcattattaaaggaaatgaaacatggc

SEQ ID NO: 74062 - DNA, 1432 bp, Homo Sapiens
  misc_feature (220)..(285): n is a, c, g, or t
ggtagggaatatagaacagtgggcatacaagcaggctggtacggtccggaatcccgggatatcgtcgaacccacgcgtcccgaaaaaagatccatctttcagaaatcagagcgaggggggtttaggctgaaggagaatgtccagtttcatctgtacatcagcacctctccctgtggagatgccagaatcttctcaccacatgagccaagtcctggaaggnnnnnnnnnnnnnnnnnnnnnnnnnnnnnnnnnnnnnnnnnnnnnnnnnnnnnnnnnnnnnnnnnntgggctcttaagcgatccttccacctcaaccttccaaggagctgggactacagaaccagcagatagacacccaaatcgtaaagcaagaggacagctacggaccaaaatagagtctggtgaggggacgattccagtgcgctccaatgcgagcatccaaacgtgggacggggtgctgcaaggggagcggctgctcaccatgtcctgcagtgacaagattgcacgctggaacgtggtgggcatccagggatccctgctcagcattttcgtggagcccatttacttctcgagcatcatcctgggcagcctttaccacggggaccacctttccaggcccatgtaccagcggatctccaacatagaggacctgccacctctctacaccctcaacaagcctttgctcagtggcatcagcaatgcagaagcacggcagccagggaaggcccccaacttcagtgtcaactggacggtaggcgactccgctattgaggtcatcaacgccacgactgggaaggatgagctgggccgcgcgtcccgcctgtgtaagcacgcgttgtactgtcgctggatgcgtgtgcacggcaaggttccctcccacttactacgctccaagattaccaagcccaacgtgtaccatgagtccaagctggcggcaaaggagtaccaggccgccaaggcgcgtctgttcacagccttcatcaaggcggggctgggggcctgggtggagaagcccaccgagcaggaccagttctcactcacgccctgacccgggcagacatgatggggggtgcagggggctgtgggcatccagcgtcatcctccagaacctcacatctgaactgggggcaggtgcataccttggggagggagtagggggacacgggggaccaccaggtgtccacggttgtccccagcatctcacatcagacctggggcaggtgcgcagtgtggggaggggatggggtgcgtcagggcccagcatcgccgcctggcatctctctgccgcagcatttccccttctgaaccgtccagtgactgctttcaatctcggtttacgtttagaaattgagttctactgagtagggcttccttaagtttaggaaaatagaaattactttgtgtgaaattcttgaataaataatttattcag

SEQ ID NO: 74063 - DNA, 706 bp, Homo Sapiens
atgctttctggatcaaagaaagtgggtgcagtgcttagtctgttgtgtggaagagggcacctcctgggctttcgtggctggagactgtctaccaacattccttccttcaaactagacaaaccctcctctgccacccccagcaaattctcagaggtttccaagctgtagaaaaaggaaggaaggaaggacggcattcacatagctttactttccgcttcaaaatgtcttaagtagcatatgttgttttactgcttttaactttggtgagttctaatttcagaacgttttgttcactgagcaaaaaaacagatgaaacaaccacaggccaggacttcaagtgaggaggacgcctttgtttgccgtggttggtgggagcacacgccggagcccggtaacgtgcctgtgggagtgaccaagggccacccgcccaagggaaaatgttcattcttcatcagctttgctaattctgctttgaggcagtaaaatgcaaaagaccatagaatttgtatttctttttttaaaatacaatttataacattatattttgtactctttatattagaatttgtaactagattgatgtatttaactatttctgaaaaagtaattcaatgttttagttgtgtgataaaaatatttagataaaacatattcattctattggaatttgaaataaataaaaacatcttggagttctgagatttgt

SEQ ID NO: 74064 - DNA, 665 bp, Homo Sapiens
  misc_feature (28)..(29): n is a, c, g, or t
  misc_feature (133)..(133): n is a, c, g, or t
  misc_feature (282)..(282): n is a, c, g, or t
gatccccttcctgcctcctcccagggtnntgccagggccttgctcagtcccttccaccaaagtcatctgaacttccgtttccccagggcctccagctgccctcagacactgatgtctgtccccaggtgctctntgcccctcatgcccctctcaccggcccagtgccccgactctccaggctttatcaaggtgctaaggcccgggtgggcagctcctcgtctcagagccctcctccggcctggtgctgcctttacaaacacctgcaggagaagggccacgganagccccaggctttagagccctcagcaggtctggggagctagagcaaaggagggacctcaggccttccgtttcttcttccagggtggggtggcctggtgttcccctagccttccaaacccaggtggcctgcccttctccccagagggaggcggcctccgcccattggtgctcatgcagactctggggctgaggtgccccggggggtgatctctggtgctcacagtcgagggagccgtggctccatggccagatgacggaaacagggtctgaccaagtgccaggaagacctgtgctataaaccaccctgcctgatcctgcccctgcctgaccccgccacgccctgccgtccagcatgattaaagaatgctgtctcctcttggcaa

SEQ ID NO: 74065 - DNA, 723 bp, Homo Sapiens
gtaccagctggggcaaatcagggcccattcccaactcctataaaatgaaaggactagacctggtctttaagctcccttccgattataacatttggtggtagcaggattgtgcacaaagctcctaatttagaggaaagatctgggttttagtcttttctcctctatcgccgccttaccggttgtacaacattggaccagccattctccccaaggcctcggcattttcattgttaaatgggaacactcctaattcacactgttgctgtgaggattacatttggtaatgaatgatagaatgctttgtacatggaaaaggactatacctttcttttttaactacaaaggcgaacatgtaaccctctacctgtgggcgcacatttgctgtggtgttacgttccactggtagcgcccaacctcccttcattcaagcacattttacgggcctacagggaaggttttcttcctgtcctctcctaagacttgtttatgttcatcatctcttctatactagagctgcagtcttacatttgcttacttcctgacatccacccccaccccagtgatttctccccatctccacctctatattatttgaactaaatgaattcatgaatgaacaaatgagtggatgaatgaatggtaatggataatgggctatgaagtcatatttaaaggcactatctcatttaaaaacaatctaaataaataactacaatgataaaa

SEQ ID NO: 74066 - DNA, 801 bp, Homo Sapiens
ggggcttgaactcggcggcttccgtagcgggagggcgaaagatggcggcggcagtactgggacagttgggtgcgttatggatacataacctgaggagccgggggaagctggccttgggtgttttacctcaatcatatatccacacaagtgcttctcttgacatttctcgaaaatgggagaagaagaataaaattgtttatcctccacaactgcctggagaacctcggagaccagcagaaatctaccactgtcgaagacaaataaaatatagcaaagacaagatgtggtatttggcaaaattgatacgaggaatgtctattgaccaggctttggctcagttggaattcaatgacaaaaaaggggccaaaataattaaagaggttctcttagaagcacaagatatggcagtgagagaccataacgtggaattcaggtccaatttatatatagctgagtccacctcaggacgaggccagtgccctggaaacgcatccgcctaccatgggcagaggtcccctttggggatcatgggagaagggtttattggccattatttttgggaagttgggtgggaaaggggccccccaccctccagcctggaagccaccaaaaaaaccggcaggctggcccccatgggccaaaagaaagtattatttccaggccagccttttcgccaaagcccgggagacccatttcgcgtttccaccacctcccttaatgggaatgaaaagggagaaatttcccacgaacctttccccacccaggggggggaaaatagaataactttttgtcggccccccc

SEQ ID NO: 74067 - DNA, 905 bp, Homo Sapiens
  misc_feature (789)..(793): n is a, c, g, or t
  misc_feature (795)..(803): n is a, c, g, or t
  misc_feature (806)..(809): n is a, c, g, or t
cagtcgacggtaccggacatatgcccgggaattcggccattacggccgggggcttgaactcggcggcttccgtagcgggagggcgaaagatggcggcggcagtactgggacagttgggtgcgttatggatacataacctgaggagccgggggaagctggccttgggtgttttacctcaatcatatatccacacaagtgcttctcttgacatttctcgaaaatgggagaagaagaataaaattgtttatcctccacaactgcctggagaacctcggagaccagcagaaatctaccactgtcgaagacaaataaaatatagcaaagacaagatgtggtatttggcaaaattgatacgaggaatgtctattgaccaggctttggctcagttggaattcaatgacaaaaaaggggccaaaataattaaagaggttctcttagaagcacaagatatggcagtgagagaccataacgtggaattcaggtccaatttatatatagctgagtccacctcaggacgaggccagtgcctgaaacgcatccgctaccatggcagaggtcgctttgggatcatggagaaggtttattgccattattttgtgaagttggtggaagggcccccacctccacctgagccaccaaagacggcagttgcccatgccaaagagtatattcagcagcttcgcagccggaccatcgttcacactctatgatgaggagattcagactccacagtgtatatattttgccatttattttctaaaaataaacaaaaattgaaggccaaaaaannnnnannnnnnnnnaannnnaaaaaacatggtcgggccgcccctcggcccttcgaggaagcttttcctagaccatttcggtttggcggcgccgggccccacctagggtaaagtgac

SEQ ID NO: 74068 - DNA, 855 bp, Homo Sapiens
agaccaggcacagcacggggcaggactgaccacagcaggggacctgatgcgtcttcggcagtctccatatgcagctctctcttatagccttgggttcctcccaggagctctggaggtacaggatttccacaggcctctttcctaaatggaaggaattggaactgaaagggaaaggaaatggaaggaaggggaatttggaggagagaacacgcccacccttgggaagctgcctgtccccagaggagccccaccagggagcagctgccccctcatcagagacctgcagagtcaaccaagcacaggttagagtcccaggaccggaaaccaactgtgggctttctgtacttctcatagctttggagtctggctgtccatcaggaggtcccgagggctctctggggcctgaggctcccacaccagctctcccctggcctcaataaaaccaggtgcatgcctgttcttccatccacactccagggctgcccaccagctgacaggcaccatcaactggcagcaacagagcaggcgcaggtacaaagaaggcagctcactcctgctcttaggagatccaatcagatctgccctgtacagccatgtaggctgtgcgctgcataactccagggacatgagtcacacagacacaatgtgagtgtgctcccccgtcatgcaacatctggacacaactaacagagcatggtgaatacatgctgaattgcattcagtatggctgtgaactaggcctggggacaagaatgaattttacatggaaagaatttcctgtagcaggaacagaggggataacaacagcaataaataataataagaagaagctaccacttcttgagcatgtaccac

SEQ ID NO: 74069 - DNA, 1066 bp, Homo Sapiens
  misc_feature (63)..(63): n is a, c, g, or t
  misc_feature (135)..(135): n is a, c, g, or t
  misc_feature (171)..(171): n is a, c, g, or t
  misc_feature (261)..(261): n is a, c, g, or t
  misc_feature (1003)..(1022): n is a, c, g, or t
ttaagacattagatggctgagcagatcgcaggttcacgtttataactgtacctgcgcaacatntctaaagagatcattctcagaatggatagtgggtatatatacaaatgtaatcatagcgttctccatgtgccntgagcaatcatcatcttgagtcagttggtcgacccncaagagaaagcatgtgccgtaggctgctatgtgtgagtgatgccatcactctttctccacatacagtgcagagagctgtctggagtcacnatctgaacagattctcgggcgctccttctctccttccatcactacagtaagtaaaaggaccatagaggggaaccaggaatctgagaatcagctgtgctcaatagccaacctccctgtccagatgcagctattttggtatctcctatcacatgcactctgaatcagggtttttctataagaaatctttcagaatcagcaaaagtggggatgacccaggcatcttgatttgcaaaatcacaaaactaagttgtcagttatcactgtagatgagcaactcatctttttaaagtatagttactgaactgattctgagaaatctttagagagaaaaaactcaacagtacaaattaactaattgggaaagttagaatgtcctttctgaatttttcattaaaaaaattacattatctgaaataacataaagctactaaactgctttgtattctattaagaaatagctcctaaggatgtagtcttgtttcatagttgttgcactatatcaaaacttaaaatgtaagcccagttcttctctgtatagaaaggaaacattgtgttacttaatgaattatttatacagagcatttgttgccaactgttgttccagccatccacacaggagtctgttctgaggtggcaatagcacatgggaagatgaactttccctgtttgtttacccgttcttctttggctgtatctgatgacagtataagatgttcttaataaagttttatgttctttttgnnnnnnnnnnnnnnnnnnnngcctacagccgcggccgcaagcttattccctttagttgagggta

SEQ ID NO: 74070 - DNA, 817 bp, Homo Sapiens
  misc_feature (737)..(770): n is a, c, g, or t
gggggagcgggccaaggggcggctccggcgggcggactcggagcgggcggcggagtgacccggacagctgtcctctctgacaccaccccggcctgcctctttgttgccatgagagctgcctacctcttcctgctattcctgcctgcaggcttgctggctcagggccagtatgacctggacccgctgccgccgttccctgaccacgtccagtacacccactatagcgaccagatcgacaacccagactactatgattatcaagaggtgactcctcggccctccgaggaacagttccagttccagtcccagcagcaagtccaacaggaagtcatcccagccccaaccccagaaccaggaaatgcagagctggagcccacagagcctgggcctcttgactgccgtgaggaacagtacccgtgcacccgcctctactccatacacaggccttgcaaacagtgtctcaacgaggtctgcttctacagcctccgccgtgtgtacgtcattaacaaggagatctgtgttcgtacagtgtgtgcccatgaggagctcctcccagctgacctctgtcgggacaagttcttccaatgtggggtgatgggcagcagcggccttgggcaaatcctggggggcctcctgtgccagaagttgtggaaactgctagggtgggggctggcatcctgaggcctgggccctcctggaatttgggggccttcgggccctggcctggactggggggnnnnnnnnnnnnnnnnnnnnnnnnnnnnnnnnnnctggtaaaaaagtttagtggaacgggccaccccctgggggggttgca

SEQ ID NO: 74071 - DNA, 1431 bp, Homo Sapiens
  misc_feature (851)..(930): n is a, c, g, or t
ggtcctaggtagcgaggcctgggtggcgaattcggcacgagggactcctcggccctccgaggaacagttccagttccagtcccagcagcaagtccaacaggaagtcatcccagccccaaccccagaaccaggaaatgcagagctggagcccacagagcctgggcctcttgactgccgtgaggaacagtacccgtgcacccgcctctactccatacacaggccttgcaaacagtgtctcaacgaggtctgcttctacagcctccgccgtgtgtacgtcattaacaaggagatctgtgttcgtacagtgtgtgcccatgaggagctcctccgagctgacctctgtcgggacaagttctccaaatgtggcgtgatggccagcagcggcctgtgccaatccgtggcagcctcctgtgccaggagctgtgggagctgctagggtggtgctggcatcctgagtcctggccctcctgggatctggggccctcgggccctgcctgacctggtgcttttttccccatccccatgttccttttattctgtaaaaagttagtggactgcagccctgggggttgcaggctgcggtgcctcaggcccctccttcagcctgtggccacctctggggcacaatgggggctccccactgcccagtctgcccctcgggttgggggagtatcccaggcctctctgtgggacctgggcccctgacgggccttctcagcccgttttgaggacagacagtcccccgaggtaggctacatccccccaccccagctggtctgcttggatttcctacagcccccgtgggcatggaccacctttattttatacaaaattaaaaacaagtttttacnnnnnnnnnnnnnnnnnnnnnnnnnnnnnnnnnnnnnnnnnnnnnnnnnnnnnnnnnnnnnnnnnnnnnnnnnnnnnnnngaagcgacgaacacgcaaaaaaataagccgcagcaaaaggaggccaacaacaacgaacgcggagccaacagcgtagaatagcacggcggcggctcctcaacagaacgacggacacatcttagagagcacaggcacacagctgcggcatctcatagcgacgcgtcgcaacctaggtgagaacgcagaccggcgcggccaggagcgcgcgctagtcccacagacaaccaccaccagacgacaaaacccacgcctggcgcggcccaagccccgagggcagcagcaccaccccaccaccacgcacggacgccaccggacccgaagcagaggagacgacaacctcacgcactaatgaaccgaagatgcagtgagtacgggggcggcagcagcaagcgacgctcagtactatcacgcggacgcgaatgggccgaaacgcgagccgttgtacggacagggctgcaagccgcgcgagaccacagcgcagggcctatacagccaccgcaa

SEQ ID NO: 74072 - DNA, 752 bp, Homo Sapiens
cggagtgacccggacagctgtcctctctgactaccaccccggccgtgcctctttgttgccatgagagctgcctacctcttcctgtgctattcctgcctgcaggcttgctggctcaggcccagtatgacctggacctcgctgccgccgttccctgaccatcgtccagtacacccactatagcgaccagatcgacaacccagactactatgattatcaaggtaacgggctaggggtaggataggagctgggccggcagctggggtggggagaccccctgggaggggtagagggagcagacccccttatcctccctctggctgcgagaggtgacgtcctcggcacctccgaggaacagttccagttgccagtcgccagcgagcaagtccaacaggaagtcatcctcagcccgcaaccaccagaagccaggaatatgcagagcatggagcccacagagcctgggcctcttggtaagggctttcttgacagctggaaaaatggaggcacgccctgaagttggggtggagtagggggtggtgctggtgggctggagggtctttggcccttgcccatgtgggctcttggcagtgtgggcagtatgactgccgtaggctggcatcactcaggcccatccaggcagctccatggaggtcccacactgtccccagtgtgcctggctggaggctaaacttggcagacctaggaaggccccctgacctcacagatactgggaggggcagggagtgtgctgaagg

SEQ ID NO: 74073 - DNA, 1642 bp, Homo Sapiens
  misc_feature (91)..(125): n is a, c, g, or t
  misc_feature (683)..(701): n is a, c, g, or t
cgatcgatcggctgactatattgacaagatactgattggttacatgttgaagaaaacatacaatacaaaatacagaaaaagttggttccgnnnnnnnnnnnnnnnnnnnnnnnnnnnnnnnnnnnaaatactcatcatcatgatttggtcagaacagggctcagagccagaggttggggtgaccgagggtggaggggttgtgggcaatgggttcgtggctgtcacaataatgctgtgataatgctgtggtttcccagcagggaggtgggagcggggagggggctgcagcctgatgagagccagctgaaggaagagctgcctctcccttcctaagccccttcccaaggtctgccccaccgcccaaaccaaagaccactccgaacaaagtgaggatgtggatgctcttgctgggtccgctgttccgcaggagggaaagaaagggtagctgcactgaccccactgtccccatatacaagggttggggggcaagagcatgtggctactcccagcaagggaaaatgggagagcagtagaaaggggaggaagtgggaagagcagaagatcatatatattaaaaaagtgacttaagacttaaaattgaattagtatttgtacagaaaggtgcaggtggaatgactcactccggcctatgatcaaaattatatggagaaatcatggtggannnnnnnnnnnnnnnnnnnagtggtggcccgagtcgttaagtgcgattggttagagtggattccagtcgggtcattcaggcggaggaggcgggggccagcggggcaggcaaggggggctcagttgctgcagcactggctccggctggctgggttgttctcctggaggtccacacctcggtttcggcctggagcaccagttgcattctggggctcgttcttgggaagcttcttagctattgccatgaagatttcgttcacgttcattgcagtctttgctgatgtctccatgaacagcaaactgttgtcgtctgcataggcttgtgcttcctggaattccacggctctcttgctggccaggtctgccttgttacccgcgagtgcaatgacgatgttggggctggcctgcctctgtagctccttcacccagttcttggcccgtgcaaatgtatctgtgttggtgatgtcatagaccacgatggcagcctgggccccccgatagtacatgggggccaggctgtgataccgctcctgtccagctgtgtcccagatctcaaacttgactgttgtgtcatccaggcagacagtctgtgtgaggaaggccgctccaattgtgctctcctggtactcgtgaaactgtcccttgacaaagcggaggacgaggctggatttgcctaccgcagactcccccagcagaaccagcttaaattgacagatcttgttcccagcagctggtccattgggtcgtgctgcgcctccccgacccgccattgcccgtccagctgtagtggtccagagagcgtgcgggtggggactggtgctatgcaaagaggcacttagtggggagggggacctccaaggcggctccggggcggcggcgttacttggggccggggctcggacgggatccgcttctctccccgccggcggtgtcccagcctgtgccgaaacgccacccaggc

SEQ ID NO: 74074 - DNA, 692 bp, Homo Sapiens
  misc_feature (96)..(130): n is a, c, g, or t
  misc_feature (662)..(662): n is a, c, g, or t
gaggtcgatcgatcggctgactatattgacaagatactgattggttacatgttgaagaaaacatacaatacaaaatacagaaaaagttggttccgnnnnnnnnnnnnnnnnnnnnnnnnnnnnnnnnnnnaaatactcatcatcatgatttggtcagaacagggctcagagccagaggttggggtgaccgagggtggaggggttgtgggcaatgggttcgtggctgtcacaataatgctgtgataatgctgtggtttcccagcagggaggtgggagcggggagggggctgcagcctgatgagagccagctgaaggaagagctgcctctcccttcctaagccccttcccaaggtctgccccaccgcccaaaccaaagaccactccgaacaaagtgaggatgtggatgctcttgctgggtccgctgttccgcaggagggaaagaaagggtagctgcactgaccccactgtccccatatacaagggttggggggcaagagcatgtggctactcccagcaagggaaaatgggagagcagtagaaaggggaggaagtgggaagagcagaagatcatatatattaaaaaagtgacttaagacttaaaattgaattagtatttgtacagaaaggtgcaggtggaatgactcactccggcctatgatcanaattatatggagaatcatggtggaccctcc

SEQ ID NO: 74075 - DNA, 968 bp, Homo Sapiens
tatagggctaggtacgaggctgggtggtgaattcggcacgagggctctacacaaccctcaaaaacctgctggcccaaatcaagtctcaccccagtgcctggcccttcatggagcctgtgaagaagtcggaggcccctgactactacgaggtcatccgcttccccattgacctgaagaccatgactgagcggctgcgaagccgctactacgtgacccggaagctctttgtggccgacctgcagcgggtcatcgccaactgtcgcgagtacaaccccccggacagcgagtactgccgctgtgccagcgccctggagaagttcttctacttcaagctcaaggagggaggcctcattgacaagtaggcccatctttgggccgcagccctgacctggaatgtctccacctcggattctgatctgatccttagggggtgccctggccccacggacccgactcagcttgagacactccagccaagggtcctccggacccgatcctgcagctctttctggaccttcaggcacccccaagcgtgcagctctgtcccagccttcactgtgtgtgagaggtctcctgggttggggcccagcccctctagagtagctggtggccagggatgaaccttgcccagccgtggtggcccccaggcctggtccccaagagctttggaggcttggattcctgggcctggcccaggtggctgtttccctgaggaccagaactgctcattttagcttgagtgatggcttcaggggttggaagttcagcccaaactgaagggggccatgccttgtccagcactgttctgtcagtctcccccaggggtggggggtatggggaccattcattccctggcattaatcccttagagggaataataaagctttttatttctctgtgaaaaaaacaacacaaggcaaacaccacacaagccacaaccacaaaaggggggcgcacaaaaaaatacc

SEQ ID NO: 74076 - DNA, 2971 bp, Homo Sapiens
aaggacgcgaggcctgggtggcgcccacgtaacgccgccgccccggagccgccttggaggtccccctccccactaagtgcctctttgcatagcaccagtccccacccgcacgctctctggaccactacagctggacgggcaatggcgggtcggggaggcgcagcacgacccaatggaccagctgctgggaacaagatctgtcaatttaagctggttctgctgggggagtctgcggtaggcaaatccagcctcgtcctccgctttgtcaagggacagtttcacgagtaccaggagagcacaattggagcggccttcctcacacagactgtctgcctggatgacacaacagtcaagtttgagatctgggacacagctggacaggagcggtatcacagcctggcccccatgtactatcggggggcccaggctgccatcgtggtctatgacatcaccaacacagatacatttgcacgggccaagaactgggtgaaggagctacagaggcaggccagccccaacatcgtcattgcactcgcgggtaacaaggcagacctggccagcaagagagccgtggaattccaggccaatgaaacctgtaagtgtaatggctggaaaaaccccaagccccccactgcaccccgcatggatctgcagcagccagctgccaacctgagtgagctgtgccgcagttgtgagcaccccttggctgaccacgtatcccacttggagaatgtgtcagaggatgagataaaccgactgctggggatgggtggtggatgtggagaatctcttcatgtctgttcacaaggaaggaggacgacagacaccaagcaggtctattgcgtacgctcttcaagctactgcggaaatgcatcctgcagatgacccggcctgtggtggaggggtccctgggcagccctccatttgagaaacctaatattgagcagggtgtgctgaactttgtgcagtacaagtttagtcacctggctccccgggagcggcagacgatgttcgagctctcaaagatgttcttgctctgccttaactactggaagcttgagacacctgcccagtttcggcagaggtctcaggctgaggacgtggctacctacaaggtcaattacaccagatggctctgttactgccacgtgccccagagctgtgatagcctcccccgctacgaaaccactcatgtctttgggcgaagccttctccggtccattttcaccgttacccgccggcagctgctggaaaagttccgagtggagaaggacaaattggtgcccgagaagaggaccctcatcctcactcacttccccaaattcctgtccatgctggaggaggagatctatggggcaaactctccaatctgggagtcaggcttcaccatgccaccctcagaggggacacagctggttccccggccagcttcagtcagtgcagcggttgttcccagcacccccatcttcagccccagcatgggtgggggcagcaacagctccctgagtctggattctgcaggggccgagcctatgccaggcgagaagaggacgctcccagagaacctgaccctggaggatgccaagcggctccgtgtgatgggtgacatccccatggagctggtcaatgaggtcatgctgaccatcactgaccctgctgccatgctggggcctgagacgagcctgctttcggccaatgcggcccgggatgagacagcccgcctggaggagcgccgcggcatcatcgagttccatgtcatcggcaactcactgacgcccaaggccaaccggcgggtgttgctgtggctcgtggggctgcagaatgtcttttcccaccagctgccgcgcatgcctaaggagtatatcgcccgcctcgtctttgacccgaagcacaagactctggccttgatcaaggatgggcgggtcatcggtggcatctgcttccgcatgtttcccacccagggcttcacggagattgtcttctgtgctgtcacctcgaatgagcaggtcaagggttatgggacccacctgatgaaccacctgaaggagtatcacatcaagcacaacattctctacttcctcacctacgccgacgagtacgccatcggctacttcaaaaagcagggtttctccaaggacatcaaggtgcccaagagccgctacctgggctacatcaaggactacgagggagcgacgctgatgggagtgtgagctgaatccccgcatcccctacacggagctgtcccacatcatcaagaagcagaaagagatcatcaagaagctgattgagcgcaaacaggcccagatccgcaaggtctacccggggctcagctgcttcaaggagggcgtgaggcagatccctgtggagagcgttcctggcattcgagagacaggctggaagccattggggaaggagaaggggaaggagctgaaggaccccgaccagctctacacaaccctcaaaaacctgctggcccaaatcaagtctcaccccagtgcctggcccttcatggagcctgtgaagaagtcggaggcccctgactactacgaggtcatccgcttccccattgacctgaagaccatgactgagcggctgcgaagccgctactacgtgacccggaagctctttgtggccgacctgcagcgggtcatcgccaactgtcgcgagtacaaccccccggacagcgagtactgccgctgtgccagcgccctggagaagttcttctacttcaagctcaaggagggaggcctcattgacaagtaggcccatctttgggccgcagcccctgacctggaatgtctccacctcggattctgatctgatccttagggggtgccctgggcccacggacccgactcagcttgagacactccaggccaaggtcctcccggacccgatcctgcagctctttctgggaccttcaggcacccccaaggcgtggagctctgtcccaggccttcactgggggtga

SEQ ID NO: 74077 - DNA, 363 bp, Homo Sapiens
aggtccatcgatcggctgactatattgacaagatactgattggttacatgttgaagaaaacatacaatacaaaatacagaaaaagttggttccgtcccctcccactctcccccttacccacccacccccaaatactcatcatcatgatttggtcagaacagggctcagagccagaggttggggtgaccgagggtggaggggttgtgggcaatgggttcgtggctgtcacaataatgctgtgataatgctgtggtttcccagcaaggaagtgggaagcgggaaggggctgcaacctgatgagagccagctgaaggaagagctgcctctccctttctaagccccttcccaaggtctgccccaccg

SEQ ID NO: 74078 - DNA, 1224 bp, Homo Sapiens
gcggccgctgtgtcacactgtgggctcttatcactgtacctgcgagcccccactggtgctggatggctcgcagcgccgctgcgtctccaacgagagccagagcctcgatgacaatctgggagtgtgctggcaggaagtgggggctgacctcgtgtgcagccaccctcggctggaccgtcaggccacctacacagagtgctgctgcctgtatggagaggcctggggcatggactgcgccctctgccctgcgcaggactcagatgacttcgaggccctgtgcaatgtgctacgcccccccgcatatagccccccgcgaccaggtggctttggactcccctacgagtacggcccagacttaggtccaccttaccagggcctcccatatgggcctgagttgtacccaccacctgcgctaccctacgacccctacccaccgccacctgggcccttcgcccgccgggaggctccttatggggcaccccgcttcgacatgccagactttgaggacgatggtggcccctatggcgaatctgaggctcctgcgccacctggcccgggcacccgctggccctatcggtcccgggacacccgccgctccttcccagagcccgaggagcctcctgaaggtggaagctatgctggttccctggctgagccctacgaggagctggaggcggaggagtgcgggatcctggacggctgcaccaacggccgctgcgtgcgcgtccccgaaggcttcacctgccgttgcttcgacggctaccgcctggacatgacccgcatggcctgcgttgacatcaacgagtgtgatgaggccgaggctgcctccccgctgtgcgtcaacgcgcgttgcctcaacacggatggctccttccgctgcatctgccgcccgggattcgcacccacgcaccagccgcaccactgtgcgcccgcacggccccgggcctgagccctggcacccgctggccgcccacccgcgcccgccactcggggcccctgccgcgcatcctgcagcccgcttatgcgtatgtgcacggggccgcccgcctggacctggagaagggacctacggacgcctggaagctgcgacgccctgcactgctcccgcctccaccagcgcctcccactgatgtcgtggtcccgggcctggcccaggggcccctttacatgccctctcccttttataaaattttccattaaaaaccacctattttctaaaaaaaa

SEQ ID NO: 74079 - DNA, 395 bp, Homo Sapiens
atgggtagggtcgtacggtacgcagttgtgggtacaactcaggcccatatgggaggccctggtaaagtggacctaagtctgggccgtactcgtaggggagtccaaagccacctggtcgcggggggctatatgcgggcgaagggcgtagcacattgcacagggcctcgaagtcatctgggaacaggagccaaggcaaacaatcagcccctgctggcccccacacccaccactcacataccccccttgggagaggaggcagaggactggatggggagggtcctgggtggccccggggtttctggagccagcgctgagaatctgaaggctgagactgggattcggacgtgctgagatcaagggtaatgaagcctgctaagaatcagggtctgagagta

SEQ ID NO: 74080 - DNA, 1293 bp, Homo Sapiens
  misc_feature (45)..(85): n is a, c, g, or t
  misc_feature (88)..(122): n is a, c, g, or t
aaaagatcgtatagaatcactatagggcgctagcgcgtctgcaannnnnnnnnnnnnnnnnnnnnnnnnnnnnnnnnnnnnnnnncgnnnnnnnnnnnnnnnnnnnnnnnnnnnnnnnnnnncagtcgacggtaccggacatatgcccgggaattcggccattacggccggggatgtcgtgaagctgggggagctcgtcgccgccgccggcggctagcgggcgtccgcgccatggagcgctacgcggccgccttggaggaggtggcggacggtgcccggcagcaggagcgacactaccagttgctgtcggcgctacagagcctggtgaaggagttgcccagctctttccagcagcgcctgtcctacaccacgctcagcgacctggccctggcgcttctcgacggcaccgtgttcgaaatcgtgcaggggctactggagatccagcacctcaccgaaaagagcctgtacaaccagcgcctgcgcctacagaacgagcaccgagtgctcaggcaggcgctgcggcagaagcaccaggaagcccagcaggcctgccggccccacaacctgcctgtggttcaggcggctcagcagcgagaactagaggccgtggaacaccggatccgtgaggagcagcgggcgatggaccagaagatcatcctggagctggaccggaaggtggctgaccagcagagcacactggagaaggcgggggtggctggcttctacgtgaccaccaacccacaggagctgatgctgcagatgaacctgctggaactcatccgaaagctgcagcagaggggctgccgggcagggaatgcagccctgggactgggaggtccctggcagtcgcctgctgcccagtgtgaccagaaaggcagccctgtcccaccatagccacaggcagcagaagtctgggcagagttcatcttcttgacctttggccactgccttcccagctgcccgcagggggttccccctgctgaggagagaccaggtggaccccagctgcctgtcacccttcatctgggacttgctgtcaaaccctaggatagtctcataaaggggaggctgggccagcctgctgctgtctgcttcaggaccaggcagagagtgaggctgggggttctcacaccttactccaccgggcacatcccaacctgcactggggcccacccgagcgcttgttctggtctcagccgctcccttggcagctgcagcccccatgcagaagaggctcccaggcccaagctctgtgtgacccagagaaataaagatgcctcagtgtggcccaaa

SEQ ID NO: 74081 - DNA, 2099 bp, Homo Sapiens
  misc_feature (142)..(170): n is a, c, g, or t
ctgatctgcggctgtcgaggccgctgaggcagtggaggctgaggctatgatggcggccatggcgacggctcgagtgcggatggggccgcggtgcgcccaggcgctctggcgcatgccgtggctgccggtgtttttgtcgttnnnnnnnnnnnnnnnnnnnnnnnnnnnnnagcagcaggtcccgctggtgctgtggtcgagtgaccgggacttgtgggctcctgcggccgacactcatgaaggccacatcaccagcgacttgcagctctctacctacttagatcccgccctggagctgggtcccaggaatgtgctgctgttcctgcaggacaagctgagcattgaggatttcacagcatatggcggtgtgtttggaaacaagcaggacagcgccttttctaacctagagaatgccctggacctggccccctcctcactggtgcttcctgccgtcgactggtatgcagtcagcactctgaccacttacctgcaggagaagctcggggccagccccttgcatgtggacctggccaccctgcgggagctgaagctcaatgccagcctccctgctctgctgctcattcgcctgccctacacagccagctctggtctgatggcacccagggaagtcctcacaggcaacgatgaggtcatcgggcaggtcctgagcacactcaagtccgaagatgtcccatacacagcggccctcacagcggtccgcccttccagggtggcccgtgatgtagccgtggtggccggagggctaggtcgccagctgctacaaaaacagccagtatcacctgtgatccatcctcctgtgagttacaatgacaccgctccccggatcctgttctgggcccaaaacttctctgtggcgtacaaggaccagtgggaggacctgactcccctcacctttggggtgcaggaactcaacctgactggctccttctggaatgactcctttgccaggctctcactgacctatgaacgactctttggtaccacagtgacattcaagttcattctggccaaccgcctctacccagtgtctgcccggcactggtttaccatggagcgcctcgaagtccacagcaatggctccgtcgcctacttcaatgcttcccaggtcacagggcccagcatctactccttccactgcgagtatgtcagcagcctgagcaagaagggtagtctcctcgtggcccgcacgcagccctctccctggcagatgatgcttcaggacttccagatccaggctttcaacgtaatgggggagcagttctcctacgccagcgactgtgccagcttcttctcccccggcatctggatggggctgctcacctccctgttcatgctcttcatcttcacctatggcctgcacatgatcctcagcctcaagaccatggatcgctttgatgaccacaagggccccactatttctttgacccagattgtgtgaccctgtgccagtgggggggttgagggtgggacggtgtccgtgttgttgctttcccaccctgcagcgcactggactgaagagcttccctcttcctactgcagcatgaactgcaagctcccctcagcccatcttgctccctcttcagcccgctgaggagctttcttgggctgcccccatctctcccaacaaggtgtacatattctgcgtagatgctagaccaaccagcttcccagggttcgtcgctgtgaggcgtaagggacatgaattctagggtctcctttctccttatttattcttgtggctacatcatccctggctgtggatagtgcttttgtgtagcaaatgctccctccttaaggttatagggctccctgagtttgggagtgtggaagtactacttaactgtctgtcctgcttggctgtcgttatcgttttctggtgatgttgtgctaacaataagaagtacacgggtttatttctgtggcctgagaaggaagggacctccacgacaggtgggctgggtgcgatcgccggctgtttggcatgttcccaccgggagtgccgggcaggagcatggggtgcttggttgtttccttcctaataaaataaacgcgggtcgccatgcaaaaaaacctcgtgc

SEQ ID NO: 74082 - DNA, 1036 bp, Homo Sapiens
ttgtagcgaggcctgggtggcgaattcggcacgagggtttgtacgagttcagtggaggagaccgcaagttgagtggaggaggcggcggtggggccccggaccaggtgcctccatggcaggctctgaagagctggggctccgggaagacacgctgagggtcctagctgccttccttaggcgtggtgaggctgccgggtctcctgttccaactccacctagaagccctgcccaagaagagccaacagacttcctgagcccgccttcgaagatgtcttccctgctccctggggcgaggagcagccccctctgagtcccctcggccttgctctctgcccatccgcccctgctatggtttagagcctggcccagctactccagacttctatgctttggtggcccagcggctggaacagctggtccaagagcagctgaaatctccgcccagcccagaattacagggtcccccatcgacagagaaggaagccatactgcggaggctggtggccctgctggaggaggaggcagaagtcattaaccagaagctggcctcggaccccgccctgcgcagcaagctggtccgcctgtcctccgactctttcgcccgcctggtggagctgttctgtagccgggatgacagctctcgcccaagccgagcatgccccgggcccccgcctccttccccggagcccctggcccgcctggccctagccatggagctgagccggcgcgtggccgggctggggggcaccctggccggactcagcgtggagcacgtgcacagcttcacgccctggatccaggcccacgggggctgggagggcatcctggctgtttcacccgtggacttgaacttgccattggactgagctctttctcagaagctgctacaagatgacacctcatgtccctgccctcttcgtgtgcttttccaagtcttcctattccactcagggctgtggggtggtggttgccctacctgtttttgccaaaaataaattgtttaaaacttttcttattaaaaacgttacaaagtaaa

SEQ ID NO: 74083 - DNA, 621 bp, Homo Sapiens
  misc_feature (73)..(73): n is a, c, g, or t
gggaaggaaaggaactttaatgagaaatcaaaacacagggaaccaaagtgcaaatcatccaccccccatgggnggggccatcctgaaccccacatcatcccctcagcccccttcaggcccccagcgcaggcccagggcctggagcttctgcctcaggtagctcttgagctggggcaggcctctctgggactccagttcctcgaagggtagctgtggggagaggagagggcggcaggttacccgcaggctgggagtgaggatgcgccacgggccaggccagggccactcaccggcaggagctggtagcccatcaggcctaggtgccgctccctcagggccctcgagcccagcagcacccggccgtcccggcagaaatgccagcgttcccgcaacaccagcaccaccctgcagggggagggacgtggctcagggcatggcgggcaaggtggccagggctcccccaccctgcctcctttacctctgggcagggtctcgagtagtggcgctagaggcagcctggccctgtgggcaggaccttggtgggtatggcaggaaggggtcctgggtcctcacgggaagcacagcaccagagctgctggcgcacagcaggaagtctggagg

SEQ ID NO: 74084 - DNA, 851 bp, Homo Sapiens
ttcgctctgtccagggcacacaccagggaccatcagatggaaacccaagttaagactgcaaggtgcagacaacacgtggatggggtgaaatgtcaaaggaggagcagtttcggatgatgacgctgactcaagtccctgcaagtgtgacctgccccacaggagggggccgtggccgagaccccaagagctggcccagacgacgaagcgccaccgagtactggtgggcgcgcaccttgctggggttctggcccagccagcgcagcagctccccagggctcttcgcctgttccagaagccgctgcagtccttgcacaaggacctgcactggggcctcctccaacaggccggtcccacccatttgctgggccccaaacagcagggctgtactggagggatcagcagcaggccagacagccgagcaggggaggtctgagcagagagcaggactcgaagcatggagttgggtgatggagacccagcggcgtgaccttggacaagtggcttcgtctctctaagtctcctcacccgtgaaatgaaaacgcagcagcccacctcgcagggcgcagcgtggagcccagagtgcaccgctttgcgatggcagcggagtcggcgaagtcagggggccccaaacacccaccccggcccagggacgccaggagaccgtggccagctgcacgctaacaccagctccacgctgccactcccgcagccactcccacgcaggcgccacccctacatgactccccgggacactgcgcaggtcgctcacctcagtcaggtctcggggcccgggggccgggttccccccgcggcctcctcatcggctagccacacgagtccgcaatcttccc

SEQ ID NO: 74085 - DNA, 1822 bp, Homo Sapiens
  misc_feature (921)..(921): n is a, c, g, or t
ggcctgggtggcgaattcggcacgaggtaggggctgctgggaagatggcggactcggtggctagccgatgaggaggccgcggggggaacccggcccccgggccccgagaccgactgagggagcgacctgcgcagggcccggggagtcatggtctccatcacccaactccatgcttcgagtcctgctctctgctcagacctcccctgctcggctgtctggcctgctgctgatccctccagtacagccctgctgtttggggcccagcaaatggggggaccggcctgttggaggaggccccagtgcaggtcctgtgcaaggactgcagcggcttctggaacaggcgaagagccctggggagctgctgcgctggctgggccagaaccccagcaaggtgcgcgcccaccactactcggtggcgcttcgtcgtctgggccagctcttggggtctcggccacggccccctcctgtggagcaggtcacactgcaggacttgagtcagctcatcatccgaaactgcccctcctttgacattcacaccatccacgtgtgtctgcaccttgcagtcttacttggctttccatctgatggtcccctggtgtgtgccctggaacaggagcgaaggctccgcctccctccgaagccacctccccctttgcagccccttctccgaggtgggcaagggttggaagctgctctaagctgcccccgttttctgcggtatccacggcagcatctgatcagcagcctggcagaggcaaggccagaggaactgactccccacgtgatggtgctcctggcccagcacctggcccggcaccggttgcgggaagcccagcttctggaagccattgcccacttcctggtggttcaggaaacgcaactcaacagcaaggtggtacagaaattggtcctgccctttgngacttgaactacctgcccctggaacagcagtttatgccctgccttgagaggatcctggctcgggaagcaggggtggcacccctggctacagtcaacatcttgatgtcactgtgccaactgcggtgcctgcccttcagagccctgcactttgttttttcccctggcttcatcaactacatcagtggcacccctcatgctctgattgtgcgtcgctacctctccctgctggacacggccgtggagctggagctcccaggataccggggtccccgccttccccgaaggcagcaagtgcccatctttccccagcctctcatcaccgaccgtgcccgctgcaagtacagtcacaaggacatagtagctgaggggttgcgccagctgctgggggaggagaaataccgccaggacctgactgtgcctccaggctactgcacagacttcctgctgtgcgccagcagctctggtgctgtgcttcccgtgaggacccaggaccccttcctgccatacccaccaaggtcctgcccacagggccaggctgcctctagcgccactactcgagaccctgcccagagggtggtgctggtgttgcgggaacgctggcatttctgccgggacggccgggtgctgctgggctcgagggccctgagggagcggcacctaggcctgatgggctaccagctcctgccgctacccttcgaggaactggagtcccagagaggcctgccccagctcaagagctacctgaggcagaagctccaggccctgggcctgcgctgggggcctgaagggggctgaggggatgatgtggggttcaggatggcccccccatggggggtggatgatttgcactttggttccctgtgttttgatttctcattaaagttcctttccttcccaaaaa

SEQ ID NO: 74086 - DNA, 1036 bp, Homo Sapiens
tctccggatgtccgggcggctatctagggtctcctgggaagatggcggactcggtgcctagccgatgaggaggccgcggggggaacccggcccccgggccccgagaccgactgagggagcgacctgcgcagggcccggggagtcatggtctccatcacccaactccatgcttcgagtcctgctctctgctcagacctcccctgctcggctgtctggcctgctgctgatccctccagtacagccctgctgtttggggcccagcaaatggggggaccggcctgttggaggaggccccactgcaggtcctgggcaaggactgcaccggcttctggaacaggcgaagagccctggggagctgctgcgctggctgggccacaaccccaccaaggtgcgcgcccaccactactcggtggcgcttcgtcggctgggccacctcttggggtctcggccacggccccctcctgtggagcaggtcacactgcacgacttgactcagctcatcatccgaaactgcccctcctttgacattcacaccatccacgtgggtctgcaccttgcaggcttacttggcgttccatctgatggccccctggtgtgtgccctggaacaggagcgaaggctccgccctccctccgaaagcacctccccctgtgcagccccttctccgagggtgggcaagggttggaagctgctctaagctgccccccgttttctgcgggatccaccgggagcatctgatcagcagcctggcagaagggcagggccaaaggaactgactccccccgggaatggggctcctgggcccagccacctggccccgggaacaggttggcggggagcccccacctttctgggaagccattggcccaccttcccggggggggttcgggaaacgccaaatcccgacagcaaggggggggacaaaaaagaggggtcccgggcccttttggggggaaatggaaactaacccggccccccggggaaaaaaccagtttttagggccccgggcgcctgaaaaaaagagatccctcggggc

SEQ ID NO: 74087 - DNA, 1333 bp, Homo Sapiens
  misc_feature (874)..(874): n is a, c, g, or t
  misc_feature (1136)..(1136): n is a, c, g, or t
  misc_feature (1148)..(1201): n is a, c, g, or t
gaattcggcacgaggcttaaatcaaaagaatgtccaatggtaggaatttcaaggtgtaggtcagatatttgagaataggggatttttttgatgtgccttaaattataccaaagattactaattattcctctttgcccaaaatacttgcatccaaggttctagtctctgttgctgtgctggtctttagccccactgcttgcactgatgtccctccttttcacggagacctatctgaggtacaggatggggctggcaccagatgatgtcccaccacagtccctcacctccggcctccacatgacagaaccaatttacactcaaccatgacctcacccctccttggtttctccctcgatctgtggccctttttggatgtattcttatctaacaacacaatccggaaagactgaattgaatatttatactaatggttcatatcctttattgctcaatgatctaattaaagggatcattgccacatttcatgtttatatttctacaatttgtttagaaaacatctcctgaccatatcagtagctcgtgttatctttttatcaactgcttcccagagtcctaaaacaatagaaattttggattgaaaagttcagcataaggagtttgagtcagtaaaggatgggataaaggagtcgagatgattcaatgaaaagtatcacaaaaaagagattgatcaacaagagaaataaaaaagcccaagaggaagtggtaggggaaggaatttaagaacagcaataagtaaaactcttaagtaactccaaaaagaaaatgggtacattttgccaaagaccacttatacttgagaacatggaagaatttgcctgatactctctttggggaaaagagtctctcctctttncctccaaccccagtacactcagcctctctgcccccaccttctcctgacttggtcctcactggcttctgcagtacattggaacctgaatggaaagaaagtcttcctggaataattggagtttgtcttgagaggcaaatatagccccaagaatcacaagattcgaggcccatgtaggtcttttacgtagcccaaatccataaattagtctcactttttgtatttatcgtttcatattaaaccctctatatcaaatgttcatcangatttggtaggnnnnnnnnnnnnnnnnnnnnnnnnnnnnnnnnnnnnnnnnnnnnnnnnnnnnnnggtaaattcttaaactgtggaaaccactgaaggtgcttattaactgttctcccagatttgtacaagtattggatgattccttgagtttacagctgtacaaatagtgtggaaaataaactttttttaaaaaag

SEQ ID NO: 74088 - DNA, 895 bp, Homo Sapiens
cagtcgacggtaccggacatatgcccgggaattcggccattacggccgggattgctcaatgatctaattaaagggatcaatgccacatttcaggtgtcatagtttctacaattttgttttagaaaacattctcctggacccatatcagtagctcgtgttatctttgtgatcaactgcttcccagagtcctaaaacaatagaaattttggattgaaaaagttcagcataaggagtttgagtcagtaaaggatgggataaaggagtcgagatgattcaatgaaaagtatcacaaaaaagagattgatcaacaagagaaataaaaaagcccaagaggaagtggtaggggaaggaatttaagaacagcaataagtaaaactcttaagtaactccaaaaagaaaatggtacattttgccaaagaccacttatacttgagaacatggaagaatttgcctgatactctctttggggaaaagagtctctcctcttttcctcaaaccccagtacactcagcctctctgccccaccttctcctgactttgtcctcacttgcttctgcagtacattggaacctgaattgaaagaaagtcttccttgaataattggagtttgtcttgagaggcaaatatagccccaagaatcacaagattcgaggaccatgtaggtcttttacgtagcccaaatccataaattagtctcactttttgtatttatcgtttcatattaaaccctctatatcaaatgttcatcatagattttgtatgatttttataactattttattcattttattagatttattctaaaattttttaatggtaaattcttaaactgtggaaaccactgaaggtgcttagtaactgttctcctaattcgtgagagtatggatggaaattt

SEQ ID NO: 74089 - DNA, 733 bp, Homo Sapiens
  misc_feature (46)..(46): n is a, c, g, or t
  misc_feature (112)..(112): n is a, c, g, or t
tcacatactcattgcatgattaaacttgtccatcagattgtgattntgtgcgtattgaggattgtagctggggtaattttaaaatgttggtatttggatagaactgccagcncaggattttgataaagatcaaaatatatactgtatctaaagtttcttttttaaaagttatttcacttataatcaaaaggtttaaataagtttagtgtatattttatgattagtattattttgtatcgattcagagagaggaaaactgcattcccatagacagggagacttggtgcattaatatccaaagcttagtttaagctggtgatgattagaaaagtggctttcatttgtgttctctggaagattctcagtagtcctgtgggcatgtgaacaagagcatgtgtaatcttcataatgtatgtcttgttagcagaaatgtctgaggcattgctgagatgtaggatgagctgaggtactggttttgtctttcatggttccctattatgttttttgagaaactgagcttttcctgacagtgtttagtttttcttggctatttactatgctattaatagtaacagtttccattatggagcctcagtaggttcttgacatacattaacccattgctattatgtaattttctaataaaatgatgtgataaaacatattttctgtaatatactcatagaatatgtgattataagtaaataaatagatgttggggtagtcctccaaa

SEQ ID NO: 74090 - DNA, 890 bp, Homo Sapiens
ggggctccgactgcggcggcatccgggacggcgggcgggctggccaccacgggacaggaaggcacagagcatggagaatgatgaacttccgtcagcggatgggatggattggagtgggattgtatctgttagccagtgcagcagcattttactatgtttttgaaatcagtgagacttacaacaggctggccttggaacacattcaacagcaccctgaggagccccttgaaggaaccacatggacacactccttgaaagctcaattactctccttgcctttttgggtgtggacagttatttttctggtaccttacttacagatgtttttgttcctatactcttgtacaagagctgatcccaaaacagtgggctactgtatcatccctatatgcttggcagttatttgcaatcgccaccaggcatttgtcaaggcttctaatcagatcagcagactacaactgattgacacgtaaaatcagtcaccgttttttccctacgattacaaaactgccagtcctatatggagtctgatcacaagactgcagtttcttcacagatctcaggaagttgtcgtggggcagaggctttttaaaaacatgtgattagggagctatctttatctgaataataacgaatttttaggtaaaacctgagatagagtactacaaaatcatgttgatgacttcagattttggaagttaaatcatgtctgttatttgcattctttagaaacttgactaagtacctgaattcatatttctattctactgtgcaacatagtgatgattcagaaatttttcctttggggaaaaaaatgaatatgaacatttccattgtgttaagtgtaaaaaggtccagacatgatcataaaatttaaattttatacaaaa

SEQ ID NO: 74091 - DNA, 1843 bp, Homo Sapiens
  misc_feature (88)..(110): n is a, c, g, or t
  misc_feature (257)..(378): n is a, c, g, or t
ggggagagcaaacccagtgactcacctccgccgtgctaactcctcgctagctctccctctcacacacgctcacacccggctcgagatnnnnnnnnnnnnnnnnnnnnnnngggactcggactcctgggacgccgacgctttctccgtggaagacccagtgcggaaggtggggggcggcggcactgccggcggggaccgctgggaaggcgaggacgaggacgaggacgtcaaggataactgggatgacgatgatgatnnnnnnnnnnnnnnnnnnnnnnnnnnnnnnnnnnnnnnnnnnnnnnnnnnnnnnnnnnnnnnnnnnnnnnnnnnnnnnnnnnnnnnnnnnnnnnnnnnnnnnnnnnnnnnnnnnnnnnnnnnggttagaagaacccgaagaacctaaagtgctaacaccagaagaacaattagcagataaactgcggctaaagaaattacaggaagagtcagacctcgaattagcaaaggaaaattttggtgttaataatgcagtttatggaatagatgctatgaacccatcttcaagagatgactttacagagtttggaaagttactaaaagataaaattacacaatatgaaaagtcactatattatgccagttttttggaagtcttagttcgagatgtgtgtatttcattggaaattgatgacttgaaaaaaattaccaattcactgactgtgctttgcagtgaaaaacagaagcaagaaaagcaaagcaaagccaaaaagaagaagaaaggtgtggttcctggagggggattaaaagccaccatgaaagatgatctggcagattatggtggttatgatggaggatatgtacaagactatgaagacttcatgtgacattttatcttttcttggtgtcatctttatgttgcccacaatcccttgaacatgtagcacaacttcctttcctttcagttctgccaaatgctacaatcagaagtgcagtatcttttgtgctggttatttaaccccttgacacttaggtgctaatgtgcaaatgagggaacttggatcttgctgccaaggggttaaaattgggaacctaagttgctactaaatcatagttcaaaacctaataatgttgtcgttgttgctatctgatttcatagcagcagtcactaaattggaaacaaaaggttgcaacgtgacaaaaaaaattgtgtagtatttaccagcaccattcagtaatacagccttaaccatacctccttgaactacttcataacttgtcaagaaaagcagtttgcagcaagggcatgtggtgtgcacctagtattaaaattgctttgtcttaaaattgaacatgaggatattaaaaatacattgtgaagaagactgcttatctcagagtgaagatactgcggctgaaaagcactagtttgatataaaattaaaatgaccaaaaccctccaactttgaagctaaagaaggtaaacctttccattattgcattacatgttgtggaatctctcgagtgcaaagactgtctagttatttatcaggctatttctactgatgaactgcttcaggtgggggagggaaacttatttttatttgcctgatttaagtgtctgagaaacaaatctttgttctcttaggctgcaatggaacaactttaccagggttttggcatttcctttcctttcctttataaaacatgctcagcaaactgcaccagttaactacagtttggtaaattgttatgttaacaattatgacatctgcaatgttttataaagcaactaatttaataaaatcactgttgtgggggaccattccttcacagtctcccccatgtccgcccagcttacatctca

SEQ ID NO: 74092 - DNA, 882 bp, Homo Sapiens
cagtcgacggtaccggacatatgcccgggaattcggccattacggccgggagatttagtcttcatggggttggattatgtcttatattttctctgtcagagttatttcatatatggattttacttgaaggaaatttatagtttactctaaattgatttgttcttggaacttttttacctgctgtgaattgatacctagtaataaaaagctagcatttgcctagatcataactatgtatggtatctagttagaaaaaaacaagcaaaaagctattatgagtttccaagagggacaattaatgcattttcataccaaatgcgaatatttaggtgatcacgtgcatcttttcttgtatggatggaaaaatcaagaattgtacactgtttaatgagttctccatattcctttaggagatatttgctttgcaattacatgttacaattagaataattacaattaaaataatattacatgttacaattagattaatagtgatgagagggaaaaaagacacccttctgtttttttctctcaagccagtctaaaaacttgaagagccatttaaaattaaatgtcactatacttgtattataaattaatacataagtttaaacctgttatatactcagtgcaacagaaaaacccatatgaaggttcaaccactgatgtattttgaatgatcctaaatataagtcttgggtggctaaatggccctctgcttaccagtctgaaaatgaaaccgattatactcatcggccttatttactgtaatacaaactggttaaaactatgttaactgaatgctagtttgaaacaaattatctacattaagtcatcttaatgttttctctttaaaagaaataaaaaaatctgtttcttctg

SEQ ID NO: 74093 - DNA, 1356 bp, Homo Sapiens
  misc_feature (808)..(946): n is a, c, g, or t
  misc_feature (956)..(970): n is a, c, g, or t
  misc_feature (1014)..(1063): n is a, c, g, or t
  misc_feature (1081)..(1089): n is a, c, g, or t
  misc_feature (1191)..(1199): n is a, c, g, or t
  misc_feature (1240)..(1248): n is a, c, g, or t
ggggtgtttgaaagcgaggccaaagtgggtgggagcgcgtgctgttgggagttgcttggaggttggcggcgcggggctgaaggctagcaaaccgagcgatcatgtcgcacaaacaaatttactattcggacaaatacgacgacgaggagtttgagtatcgacatgtcatgctgcccaaggacatagccaagctggtccctaaaacccatctgatgtctgaatctgaatggaggaatcttggcgttcagcagagtcagggatgggtccattatatgatccatgaaccagaacctcacatcttgctgttccggcgcccactacccaagaaaccaaagaaatgaagctggcaagctacttttcagcctcaagctttacacagctgtccttacttcctaacatctttctgataacattattatgttgccttcttgtttctcactttgatatttaaaagatgttcaatacactgtttgaatgtgctggtaactgctttgcttcttgagtagagccaccaccaccatagcccagccagatgagtgctctgtggacccacagcctaagctgagtgtgaccccagaagccacgatgtgctctgtatccagaacacacttggcagatggaggaagcatctgagtttgagaccatggctgttacagggatcatgtaaacttgctgtttttgttttttcctgccgggtgttgtatgtgtggtgacttgcggatttatgtttcagtgtactggaaactttccattttattcaagaaatctgttcatgttaaaagccttgattaaagaggaagtttttatnnnnnnnnnnnnnnnnnnnnnnnnnnnnnnnnnnnnnnnnnnnnnnnnnnnnnnnnnnnnnnnnnnnnnnnnnnnnnnnnnnnnnnnnnnnnnnnnnnnnnnnnnnnnnnnnnnnnnnnnnnnnnnnnnnnnnnnnnnnttttttgcgnnnnnnnnnnnnnnnaaaaaatttttaaaaccttttttttgggcgggggcccccaaagnnnnnnnnnnnnnnnnnnnnnnnnnnnnnnnnnnnnnnnnnnnnnnnnnnggggttgatttccccccnnnnnnnnncccccgggggaaccccagggttttaaaaaaacccaaagggggtcttggggcctttttggggtttataaccggggtgccccgggagttcttttataaattttnnnnnnnnnggcccctttttggaaaagggtgggaattttttaaacttttnnnnnnnnntgagaacccctcccaacggcggtgttggacccctaatccccacggggttataccccccttgggccctttgggataaaaattttccccccgggggaaaacaggggggcg

SEQ ID NO: 74094 - DNA, 840 bp, Homo Sapiens
tggtacggtccggattcccgggatatcgtcgaccacgcgtccgccacgcgtccgcttggaggttggcggcgcggggctgaaggctagcaaaccgagcgatcatgtcgcacaaacaaatttactattcggacaaatacgacgacgaggagtttgagtatcgacatgtcatgctgcccaaggacatagccaagctggtccctaaaacccatctgatgtctgaatctgaatggaggaatcttggcgttcagcagagtcagggatgggtccattatatgatccatgaaccagaacctcacatcttgctgttccggcgcccactacccaagaaaccaaagaaatgaagctggcaagctacttttcagcctcaagctttacacagctgtccttacttcctaacatctttctgataacattattatgttgccttcttgtttctcactttgatatttaaaagatgttcaatacactgtttgaatgtgctggtaactgctttgcttcttgagtagagccaccaccaccatagcccagccagatgagtgctctgtggacccacagcctaagctgagtgtgaccccagaagccacgatgtgctctgtatccagaacacacttggcagatggaggaagcatctgagtttgagaccatggctgttacagggatcatgtaaacttgctgtttttgttttttcctgccgggtggtggtatgtgggggtgaacttgcgggatttatggtttcagtggtactgggaaacttttccatttttattccaggaaatctggttcatgggttaaaaggccttgaatttaaaggagggaagtttttttattaacccaaagaaa

SEQ ID NO: 74095 - DNA, 799 bp, Homo Sapiens
ggggcgtgctgttgggagttgcttggaggttggcggcgcggggctgaaggctagcaaaccgagcgatcatgtcgcacaaacaaatttactattcggacaaatacgacgacgaggagtttgagtatcggttagtgctggcgcgggagcaatagcgagggtcgtgagctttggccgctgagggcacaaggaattagtaacaggaactgaggcgatagaattggcgcatgcgtacgagacatgtcatgctgcccaaggacatagccaagctggtccctaaaacccatctgatgtctgaatctgaatggaggaatcttggcgttcagcagagtcagggatgggtccattatatgatccatgaaccagaacctcacatcttgctgttccggcgcccactacccaagaaaccaaagaaatgaagctggcaagctacttttcagcctcaagctttacacagctgtccttacttcctaacatctttctgataacattattatgttgccttcttgtttctcactttgatatttaaaagatgttcaatacactggtttgaatgtgctggtaactgcttttgcttcttgagtagagccaccaccaccatagcccagccagatgagtgctctgtggacccacagccttaagctgagtgtgaccccagaagccacgatgtgctctgtatccagaaccacttggcagatggaagaagcatctgaagtttgagaccatggctgttacagggatcatgtaaacttgcctggtttttgttttttccctgccgggatggttttatggggtgggggac

SEQ ID NO: 74096 - DNA, 1047 bp, Homo Sapiens
  misc_feature (817)..(817): n is a, c, g, or t
  misc_feature (957)..(957): n is a, c, g, or t
  misc_feature (993)..(993): n is a, c, g, or t
  misc_feature (998)..(998): n is a, c, g, or t
  misc_feature (1007)..(1007): n is a, c, g, or t
  misc_feature (1017)..(1017): n is a, c, g, or t
  misc_feature (1036)..(1036): n is a, c, g, or t
ggcctgggtggcgaattcggcacgaggctcagggtcccttttctcttccccgtcttctctcagccacatctctcttatcctatcttggtgaagaagcttgcttggctaggagagaggtcagggacgagaagatagtgacgagaaagttccatgagactctcagaagtcccagcctgaacatcaaacctgaataaccaggagagacgtaacctcggcatactttcagtggtttacctcctgcccacgctgcaggtttttcaggtccttgctcgagtgtgtgctcataggcgtaaataaacgtgctatcagcagcctgcgtcagccagcccagctatttaagcaggctggcatcagcaaacacagcttccaaacccagggcttgcgcttgcctttgcctcttccaccgcgcagggaccatgtcggcggagaccgcgagcggccccacagaggaccaggtggaaatcctggagtacaacttcaacaaggtcgacaagcacccggattccaccacgctgtgcctcatcgcggccgaggcaggcctttccgaggaggagacccagaaatggtttaagcagcgcctggcaaagtggcggcgctcagaaggcctgccctcagagtgcagatccgtcacagactaaggagatggcaggcattgacagcttcactccatgaaggccatctctgtttctctcctccgcttaaccaagctggtgtggtttttcagcatagtggtgtatgttccattgctagctgtcctgctgtttaacacagtggttgtattttttttctaaatgtacataattagaaaagaaaatanacaatagggaagctatgtgtatcttctgtgtaaagcagtggcttcactggaaaaaatgggggtgggctaggcatttccctttgagtcatggatgaacaggatgggtgtgaaaaaccatctaaagtttgcttttggacccntcacctccccagtaggccaatttggcttttcataantcccnttaggccantccgggggcntttgtttggaaaaggttantttggaggggg

SEQ ID NO: 74097 - DNA, 1253 bp, Homo Sapiens
  misc_feature (84)..(118): n is a, c, g, or t
  misc_feature (1167)..(1185): n is a, c, g, or t
agactgtatcgatcactatagggggctactcgtctgtagccgaacgacgagcgcagcgaagtcagtgagcgaggaagcggccgnnnnnnnnnnnnnnnnnnnnnnnnnnnnnnnnnnncagtcgacggtaccggacatatgcccgggaattcggccattacggccggggagcttccaaacccagggcttgcgcttgcctttgcctcttccaccgcgcagggaccatgtcggcggagaccgcgagcggccccacagaggaccaggtggaaatcctggagtacaacttcaacaaggtcgacaagcacccggattccaccacgctgtgcctcatcgcggccgaggcaggcctttccgaggaggagacccagaaatggtttaagcagcgcctggcaaagtggcggcgctcagaaggcctgccctcagagtgcagatccgtcacagactaaggagatggcaggcattgacagcttcactccatgaaggccatctctgtttctctcctccgcttaaccaagctgttgtggtttttcagcatagtgttgtatgttccattgctagctgtcctgctgtttaacacagtgttgtattttttttctaaatgtacataattagaaaagaaaataacaataggaagctatgtgtatcttctgtgtaaagcagtggcttcactggaaaaatggtgtggctagcatttccctttgagtcatgatgacagatggtgtgaaaaccatctaagtttgcttttgaccatcacctcccagtagcaatttgctttcataatccatttagcaatccaggcctctgttgaaaagataatatgagggagaagggaacacatttccttctgaacttacttccctaagtcactttccttatgtatcatctaatacaatgatggttgagtgaaaatacagaaggggtgtttgagtattcagatttcataaaacacttccttggaatatagctgcattaacttggaaagaagcctgttgggccagaagacagaaactccaactggcaaaaaagcaagcatctaagaaaaaaaaccaccaaagttcttgaatttactatatttaaatgcattggttaagtttattttgctaaataaagtgaactgctttttgtctctaaaatgatattctaaataaaaccttaactttttgttgnnnnnnnnnnnnnnnnnnngaccgcgtatgcggccggaaggttttttccttttgtgaggttaattttggtttggcactggcgtcgtt

SEQ ID NO: 74098 - DNA, 415 bp, Homo Sapiens
actttcagaagctgggattggcagtgggcaggaatggggtggcccagttcctggatgggccccagcacttgggctgacccgcctccccacaggagccgtgtgtgagttctgccagccccgggagtctgagctgtatcagaaggaggtatcccatctgaatgccctggaggagcgcttctcgcgcctctggacgcagtgccagcgctgccagggcagcctgcacgaggacgtcatctgcaccagccgggactgccccatcttctacatgcgcaagaaggtgcggaaggacctggaagaccaggagcagctcctgcggcgcttcggaccccctggacctgaggcctggtgaccttgcaagcatcccatggggcgggggcgggaccagggagaattaataaagttctggacttttaaa

SEQ ID NO: 74099 - DNA, 2132 bp, Homo Sapiens
caggtcaggctggggttaagtcggcacgaggcgcgtgcagatggacatgctgcaggtgctgctgcgggagtacaagctccgctcctacacgctcaatgccgtgagcttccacttcctgggcgagcagaaggaggacgtgcagcacagcatcatcaccgacctgcagaatgggaacgaccagacccgccgccgcctggctgtgtactgcctgaaggatgcctacctgccactgcggctgctggagcggctcatggtgctggtgaacgccgtggagatggcgagggtcactggcgtgcccctcagctacctgctcagtcgtggccagcaggtcaaggtcgtatcccagctgttgcggcaggccatgcacgaggggctgctgatgcccgtggtgaagtcagagggcggcgaggactacacgggagccactgtcatcgagcccctcaaagggtactacgacgtccccatcgccaccctggacttctcctcgctgtacccgtccatcatgatggcccacaacctgtgttacaccacgctccttcggcccgggactgcacagaaactgggcctgactgaggatcagttcatcaggacccccaccggggacgagtttgtgaagacctcagtgcggaaggggctgctgccccagatcctggagaacctgctcagtgcccggaagagggccaaggccgagctggccaaggagacagaccccctccggcgccaggtcctggatggacggcagctggcgctgaaggtgagcgccaactccgtatacggcttcactggcgcccaggtgggcaagttgccgtgcctggagatctcacagagcgtcacggggttcggacgtcaggatgatcgaggaaaaccaagcagctggtggagtctaagtacacagtggagaatggctacagcaccagtgccaaggtggtgtatggtgacactgactccgtcatgtgccgattcggcgtgtcctcggtggctgaggcgatggccctggggcgggaggccgcggactgggtgtcaggtcacttcccgtcgcccatccggctggagtttgagaaggtctacttcccatacctgcttatcagcaagaagcgctacgcgggcctgctcttctcctcccggcccgacgcccacgaccgcatggactgcaagggcctggaggccgtgcgcagggacaactgccccctcgtggccaacctggtcactgcctcactgcgccgcctgctcatcgaccgagaccctgagggcgcggtggctcacgcacaggacgtcatctcggacctgctgtgcaaccgcatcgatatctcccagctggtcatcaccaaggagctgacccgcgcggcctccgactatgccggcaagcaggcccacgtggagctggccgagaggatgaggaagcgggaccccgggagtgcgcccagcctgggcgaccgcgtcccctacgtgatcatcagtgccgccaagggtgtggccgcctacatgaagtcggaggacccgctgttcgtgctggagcacagcctgcccattgacacgcagtactacctggagcagcagctggccaagcccctcctgcgcatcttcgagcccatcctgggcgagggccgtgccgaggctgtgctactgcggggggaccacacgcgctgcaagacggtgctcacgggcaaggtgggcggcctcctggccttcgccaaacgccgcaactgctgcattggctgccgcacagtgctcagccaccagggagccgtgtgtgagttctgccagccccgggagtctgagctgtatcagaaggaggtatcccatctgaatgccctggaggagcgcttctcgcgcctctggacgcagtgccagcgctgccagggcagcctgcacgaggacgtcatctgcaccagccgggactgccccatcttctacatgcgcaagaaggtgcggaaggacctggaagaccaggagcagctcctgcggcgcttcggaccccctggacctgaggcctggtgaccttgcaagcatcccatggggcgggggcgggaccagggagaattaataaagttctggacttttgctataaaacaaaaacaaaagggcgggcggtttaaaagtatcctcgagggcccaagttaaaccgtaccatt

SEQ ID NO: 74100 - DNA, 1475 bp, Homo Sapiens
gtcaaggagcgaggcctgggtggcgggaaacgctgtttgaagcgggatggatggcaagcggcggccaggcccagggcccggggtgcccccaaagcgggcccgtgggggcctctgggatgatgatgatgcacctcggccatcccaattcgaggaggacctggcactgatggaggagatggaggcagaacacaggctgcaggagcaggaggaggaggagctgcagtcagtcctggagggggttgcagacgggcaggtcccaccatcagccatagatcctcgctggcttcggcccacaccaccagcgctggacccccagacagagcccctcatcttccaacagttggagattgaccattatgtgggcccagcgcagcctgtgcctggggggcccccaccatcccgcggctccgtgcctgtgctccgcgccttcggggtcaccgatgaggggttctctgtctgctgccacatccacggcttcgctccctacttctacaccccagcgccccctggtttcgggcccgagcacatgggtgacctgcaacgggagctgaacttggccatcagccgggacagtcgcggggggagggagctgactgggccggccgtgctggctgtggaactgtgctcccgagagagcatgtttgggtaccacgggcacggcccctccccgttcctgcgcatcaccgtggcgctgccgcgcctcgtggccccggcccgccgtctcctggaacagggcatccgtgtggcaggcctgggcacgcccagcttcgcgccctacgaggccaacgtcgactttgagaatccggttcatggtggacacggacatcgtcggctgcaactggctggagctcccagctgggaaatacgccctgaggctgaaggaaaaggctacgcaatgccagctggaggcggacgtgctgtggtctgacgtggtcagtcacccaccggaagggccatggcagcgcattgcgcccttgcgcgtgctcagcttcgatatcgagtgcgccggccgcaaaggcatcttccctgagcctgagcgggaccctgtcatccagatctgctcgctgggcctgcgctggggggagccggagcccttcctacgcctggcgctcaccctgcggccctgtgcccccatcctgggtgccaaggtgcaaagctacgagaaggaggaggacctgctgcaggcctggtccaccttcatccgtatcatggaccccgacgtgatcaccggttacaacatccacaacttcgaccttccggaggtggtctctcgggcccacaccctcaaggtacaaacattccctttcctgggccgtgtggccggcctttgctccaacatccgggactcttcattccagtccaaccagacgggccggcgggacaccaaggttgtcagcatggtgggccgcctgcaagatgcacatgctgccaggtgctgctgcgggagtacaagctccgctcctacacgctcaatg

SEQ ID NO: 74101 - DNA, 589 bp, Homo Sapiens
tcgtggtccctccccctcggcccaccattgtaaaataatcagaaacttgttctattttgtggcagtgacaatagttttatattaaaagaaaaaatacagttttcatacagcaaaatctacaatatcattgttttatttaatataaagatcgctacccaccttccttccatggttcccaccctccacgttattttccctttctgcagcggttgcactacaggtagctactgtgtattatggacaaatgagaaatgaattctttttctggctgtccatctattttatttcaaataaggaaaagtgtatttggatttatgtgtaaatacatctagtgatgacattttttcaatgtttttaaaaaccgtgtacagtactacatgtggtagagcgttttctcaaatcgtctattgtagcaaaaatgttttggtcgtaaaccggtttggtctcccttttgtgttctctggccacttctctcctcttcctcctgcccctggttccctcctctcctcccacccccacaaccagtaccaatgtacatagtaattgtaatgttttagactttacagaaactttcctgtattctgtatat

SEQ ID NO: 74102 - DNA, 1465 bp, Homo Sapiens
  misc_feature (1335)..(1347): n is a, c, g, or t
ttcattctcatttactgtctaaagttgaggagatgggatgtcccagatgatagggctcctgggatttcagacccaagaccagcaggactccagtcacctctaccccagctctccaggacacagcgctcccaactctgagtgacgtcccacctctggtccttgcagcacaaccaacgtgggaatcacaccctccagacctcccacagctccaccccagactgggcgccggccctgcctccatttcagctgtgacaacctcagagccgtgttggcccaagcatgacaaggacgtatgaaaacttccagtacttggagaataaggtgaaagtccaggggtttaaaaatgggccacttcctctccagtccctcctgcagcgtctctgctctgggccctgccatctcctgctgtccctgggcctcggcctcctgctgctggtcatcatctgtgtggttggattccaaaattccaaatttcagagggacctggtgaccctgagaacagattttagcaacttcacctcaaacactgtggcggagatccaggcactgacttcccagggcagcagcttggaagaaacgatagcatctctgaaagctgaggtggagggtttcaagcaggaacggcaggcagttcattctgaaatgctcctgcgagtccagcagctggtgcaagacctgaagaaactgacctgccaggtggctactctcaacaacaatggtgaggaagcctccactgaagggacctgctgccctgtcaactgggtggagcaccaagacagctgctactggttctctcactctgggatgtcctgggccgaggctgagaagtactgccagctgaagaacgcccacctggtggtcatcaactccagggaggagcagaattttgtccagaaatatctaggctccgcatacacctggatgggcctcagtgaccctgaaggagcctggaagtgggtggatggaacagactatgcgaccggcttccagaactggaagccaggccagccagacgactggcaggggcacgggctgggtggaggcgaggactgtgctcacttccatccagacggcaggtggaatgacgacgtctgccagaggccctaccactgggtctgcgaggctggcctgggtcagaccagccaggagagtcactgagctgcctttggtgggaccacccggccacagaaatggcggtgggaggaggactcttctcacgacctcctcgcaagaccgctctgggagagaaataagcactgggagattggaagcactgctaacattttgaattttttctctttaattttacaaacgatggtatagtgttcttaagcnnnnnnnnnnnnnccaacttttaacaagtccacttcatgaaggtcatatttttacatgataaaaatgcactcattcacccgagtagaccatgactttgaccaaatatgcatgcctaggtgactaccactcc

SEQ ID NO: 74103 - DNA, 575 bp, Homo Sapiens
  misc_feature (494)..(506): n is a, c, g, or t
gaagaacgcccacctggtgtcatcaactccagggaggagcagaatttgtccagaaatatctaggctccgcatacacctggatgggcctcagtgaccctgaaggagcctggaagtggttggatggaacagactatgcgaccggcttccagaactggaagccaggccagccagacgactggcaggggcacgggctgggtggaggcgaggactgtgctcacttccatccagacggcaggtggaatgacgacgtctgccagaggccctaccactgggtctgcgaggctggcctgggtcagaccagccaggagagtcactgagctgcctttggtgggaccacccggccacagaaatggcggtgggaggaggactcttctcacgacctcctcgcaagaccgctctgggagagaaataagcactgggagattggaagcactgctaacattttgaatttttttctctttaattttaaaaagatggtatagtgttcttaagcnnnnnnnnnnnnnccaacttttgaaagtcaacttcatgaaggtataatttttacataataaaaatgcactcatttaaagagt

SEQ ID NO: 74104 - DNA, 1049 bp, Homo Sapiens
  misc_feature (86)..(86): n is a, c, g, or t
  misc_feature (98)..(98): n is a, c, g, or t
  misc_feature (121)..(121): n is a, c, g, or t
  misc_feature (126)..(126): n is a, c, g, or t
  misc_feature (136)..(136): n is a, c, g, or t
  misc_feature (144)..(144): n is a, c, g, or t
  misc_feature (155)..(155): n is a, c, g, or t
  misc_feature (177)..(177): n is a, c, g, or t
  misc_feature (190)..(190): n is a, c, g, or t
  misc_feature (201)..(201): n is a, c, g, or t
  misc_feature (216)..(216): n is a, c, g, or t
  misc_feature (219)..(219): n is a, c, g, or t
  misc_feature (234)..(234): n is a, c, g, or t
  misc_feature (238)..(238): n is a, c, g, or t
  misc_feature (241)..(241): n is a, c, g, or t
  misc_feature (245)..(245): n is a, c, g, or t
  misc_feature (257)..(257): n is a, c, g, or t
  misc_feature (267)..(267): n is a, c, g, or t
  misc_feature (299)..(299): n is a, c, g, or t
  misc_feature (302)..(302): n is a, c, g, or t
  misc_feature (327)..(327): n is a, c, g, or t
tccgagatgtggatacagctgaccccctgcccctcttgttttttaataacggtggagaagtgggcacaaggaccaagtgtgggtcngtgatcaccttntattagtgtgagtgggatgcagntttcntccccagatntccccccntgattacaccngtggattgccccacagccccgntgtgagtggggtntctccctgacntatgttgtgtgcccntgnagatactcgcaggcnagcnagntgcncagaagtcaccnagcgacttgntggatgccagcgcagtctcgccacattctcgntanatcgaggagcagcaggccacacagnagctgatcatggatgaacaggatcaacagctggagatggtgtctgggagcatccaggttctgaagcacatgtccggccgcgttggagaagagctggacgagcagggcatcatgctggatgccttcgcccaagagatggaccacacccagtcccgcatggacggggtcctcaggaagttggccaaagtatcccacatgacgagtggtgagtcccctcaggggaggggtcagtcctggtgggggcaggttgtaggtggtaccctctccccgtgacccctgaccttctcgttcccagaccgccgacagtggtgtgccatcgccgtgctagtgggggtgcttctcctcgttctcatcttactattctctctctgaccccagccctccctggcaggctggtcccttaagcctggggagccaccaagcactttggagctggcctcgccccctaggaggagagggtccctcctgggtagctggagagtagagggtcccgcctggggagctgtccccatggctctcccctagagccagtgggacccttcaggaccctgggctggaaccaccaccactggtcctgtctcaagtgcacttagggggtggtggaggcagggacacctgagacacacctttctccatttccagttccaggaccccaaagccatttgcccctgtgccttatacacgtgccaacctggaaataaaatgtcagccttttttatatgt

SEQ ID NO: 74105 - DNA, 427 bp, Homo Sapiens
  misc_feature (80)..(80): n is a, c, g, or t
caatccgaggaactgggccttgaaccgaaattccgaactcggacccgaataggcccagacagaactccgacaccgccccntacggtgcggcacgagagggctaaggggcgggggcatgtgcaccggaagctgcctctgcccacaaccaagatggctgaggagagggcggaagtgtccgcacgtcgggcctccgaggcttttctttctccccatggctctcccctagagccagtgggacccttcaggaccctgggctggaaccaccaccactggtcctgtctcaagtgcacttagggggtggtggaggcagggacacctgagacacacctgtctccatttccagttccaggaccccaaagccatttgcccctgtgccttatacacgtgccaacctggaaataaaatgtcagccttttttatatgtaaa

SEQ ID NO: 74106 - DNA, 1238 bp, Homo Sapiens
tagtacgaggcctggttaaatcggcacgaggcgggggcgggggtggcggcgcgttctcctcggttgggagggaaccagcccgcgaacccaggccgggaggggggttcggcctgggggggaagggactgacatgtctctcgaagaccccttttttgtagtccgaggcgaggtgcagaaggcggtgaacacggcccgcgggctgtaccagcgctggtgcgagctcctgcaggaaagcgcggcggtcggacgcgaggagctggactggacgaccaatgagctgcggaatggcctgcgcagcatcgagtgggacctcgaggacctggaagagaccatcggtatagtggaagccaacccaggcaagttcaagctcccagccggggacctgcaggagagaaaggtgttcgtggagcggatgcgagaggcagtccaggaaatgaaggaccatatggtcagcccaacagccgtagcatttttggagaggaataacagagagatactcgcaggcaagccagctgcccagaagtcacccagcgacctgctggatgccagcgcagtctcggccacatctcgctacatcgaggagcagcaggccacacagcagctgatcatggatgaacaggatcaacagctggagatggtgtctgggagcatccaggttctgaagcacatgtccggccgcgttggagaagagctggacgagcagggcatcatgctggatgccttcgcccaagagatggaccacacccagtcccgcatggacggggtcctcaggaagttggccaaagtatcccacatgacgagtgaccgccgacagtggtgtgccatcgccgtgctagtgggggtgcttctcctcgttctcatcttactattctctctctgaccccagccctccctggcaggctggtcccttaagcctggggagccaccaagcactttggagctggcctcgccccctaggaggagagggtccctcctgggtagctggagagtagagggtcccgcctggggagctgtccccatggctctcccctagagccagtgggacccttcaggaccctgggctggaaccaccaccactggtcctgtctcaagtgcacttagggggtggtggaggcagggacacctgagacacacctgtctccatttccagttccaggaccccaaagccatttgcccctgtgccttatacacgtgccaacctggaaataaaatgtcagccttttttatatgtaaaaaaa

SEQ ID NO: 74107 - DNA, 1151 bp, Homo Sapiens
gtggcggcgcgttctcctcggttgggagggaaccagcccgcgaacccaggccgggaggggggttcggcctgggggggaagggactgacatgtctctcgaagaccccttttttgtagtccgaggcgaggtgcagaaggcggtgaacacggcccgcgggctgtaccagcgctggtgcgagctcctgcaggaaagcgcggcggtcggacgcgaggagctggactggacgaccaatgagctgcggaatggcctgcgcagcatcgagtgggacctcgaggacctggaagagaccatcggtatagtggaagccaacccaggcaagttcaagctcccagccggggacctgcaggagagaaaggtgttcgtggagcggatgcgagaggcagtccaggaaatgaaggaccatatggtcagcccaacagccgtagcatttttggagaggaataacagagagatactcgcaggcaagccagctgcccagaagtcacccagcgacctgctggatgccagcgcagtctcggccacatctcgctacatcgaggagcagcaggccacacagcagctgatcatggatgaacaggatcaacagctggagatggtgtctgggagcatccaggttctgaagcacatgtccggccgcgttggagaagagctggacgagcagggcatcatgctggatgcccttcggcccaagagatggaccacacccagtcccgcatggacggggtcctcaggaacgtggccaaagtatcacacatgacgagtggtgagtcccctcaggggaggggtcagtcctggtgggggcaggttgtaggtggtaccctctccccgtgacccctgaccttctcgttcccgaccgccgacagtggtgtgccatcgccgtgctagtgggggtgcttctcctcgttctcatcttactattctctctctgaccccagccctccctggcaggctggtccccttaagcctggggagccaccaagcctttggagctggcctcgccccctaggaggaaagggtccctcctgggtacctggaaaagtaaaaggtcccgcctggggagctgtccccagggctctcccctagagcccatgggaccctttcaggaccctgggctggaaccaccacaccgggtcctgtctcaagtgccctta

SEQ ID NO: 74108 - DNA, 728 bp, Homo Sapiens
gaaacatctgcttttctgtccttcgtactgcatttccagaccaaggagctggtctgctggtggaccaaacctcgtgagccagccacccctgacccaaatgaggagagctctgattctcccatccgggagcagtgatgtcaaacttctgctgctggggaaatctcatcagcagggagcctgtggaaaagggcatgtcagtgaaatctgggaatggctggattcggaaacatctgcccatgtgtattgatggcagagctgttgcccacaagcgccttttatttagggtaaaattaacaaatccattctattcctctgacccatgcttagtacatatgacctttaacccttacatttatatgattctggggttgcttcagaagtgttatttcatgaatcattcatatgatttgatcccccaggattctattttgtttaatgggcttttctactaaaagcataaaatactgaggctgatttagtcagggcaaaaccatttactttacatattcgttttcaatacttgctgttcatgttacacaagcttcttacggttttcttgtaacaataaatattttgagtaaataatgggtacattttaacaaactcagtagtacaacctaaacttgtataaaagtgtgtaaaaatgtatagccatttatatcctatgtataaattaaatgaggtggcttcagaaatggcagaataaatctaaagtgtttattaaaaaa

SEQ ID NO: 74109 - DNA, 732 bp, Homo Sapiens
cgcaaatgtgctctagtcagtccagctcatctgccaaaatgtagggctaccgtcttggatgcatgagctattgctagagcatcatccttagaaatcagtgccccagatgtacatgtgttgagcgtattcttgaaagtattgtgtttatgcatttcaatttcaatggtgttggcttcccctccccaccccacgcgtgcataaaaactggttctacaaatttttacttgaagtaccaggccgtttgctttttcaggttgttttgttttatagtattaagtgaaattttaaatgcacagttctatttgctatctgaactaattcatttattaagtatatttgtaaaagctaaggctcgagttaaaacaatgaagtgttttacaatgatttgtaaaggactatttataactaatatggttttgttttcaatgaattaagaaagattaaatatatctttgtaaattattttatgtcatagtttaattggtctaccaagtaagacatctcaaatacagtagtataatgtatgaattttgtaagtataagaaattttattagacattctcttactttttgtaaatgctgtaaatatttcataaattaacaaagtgtcactccataaaaagaaagctaatactaatagcctaaaagattttgtgaaatttcatgaaaactttttaatggcaataatgactaaagacctgctgtaataaatgtattaactgaaacctaaaa

SEQ ID NO: 74110 - DNA, 1488 bp, Homo Sapiens
ggaagcgggcctcaagatgtgggggacttgcccccctgacatggggcagcccatagcaggccttgtgcgtggggggactcgacccccctgacatggggttgcctgagccaggccgcgtgacgtggggctgcctggccgcggctctcacatggtggttcctgctgcactgatggcccaggggtctctggtatccagatggagctctcgctccctcagcagctgtgactttcacccaggacccaggacgcagccctccgtgggcactgccggcgccttgtctgcacactggaggtcctccattacagaggcccagcgcacatcgctggccccacaaacgttcaggggtacagccatggcagctccttcctctgccgtgagaaaagtgcttggagtacggtttgccacacacgtgactggacagtgtccaattcaaatctttcagggcagagtccgagcagcgcttggtgacagcctgtcctctcctgctctccaaaggccctgctccctgtcctctctcactttacagcttgtgtttcttctggattcagcttctcctaaacagacagtttaattatagttgcggcctggccccatcctcacttcctctttttatttcactgctgctaaaattgtgtttttacctactactttggtggttgtcctcttttcggcaaagttggagcgagtgccaagctctccatctgtggtcctttctgccaagagcgactcatagtaaccaggatgggagagcagctgccttattctgaatcccaaaaattacttgggggtgattgtcacagaggagggacagaaagggtatctgctgaccaccagcctgcctacccatgcccatgtctccattcctgctcaagcgtgtgtgctgggccggggagtccctgtctctcacagcatctagcagtattattaaatggattcattttaaaaatagctcctatattttgtaacatgtctcaaacactcatactgggttccacaatccactgttagaatacctatggttagggcttctgaactaaaataatggaaaattttaacaatttgtatagtgcctggatcattactagtgccataaccctgcttcttcaacatttcacagaacttctcttttatataaaggcaagagcacaaaatgagttcagatgatcacaaacaggtgagttttgttggagaagaaagttggagtaggagactttcacaagtggtttccatggagatagaatgaagcattctgtggtcaagtaagtttagggagctattcatgtttcacttgctttgtggagattcacactatgcactgggaaagtatctgaaaagtcttataataaagaaacaggcttaactttgtgtaagaacactgtttatcaatgtcatttggctatagaaacattttctcctgctgattgtgtgtgtgaaacatgtattaacattccaatgaactagcatttaataaagcacaatattggaaaa

SEQ ID NO: 74111 - DNA, 685 bp, Homo Sapiens
tgggggcctatttgagagctgttatatggatcatcctcctggagagggttcttaagcctctgagaccgggtttggggctgaggctttctgacccacacaagtcatgctgacccctgaagggccgcaggccagatcttgccaggtgagcactttccccgctcacattcaggatagggcgagggggttggtaccgattcaccctcagggcctagatttgggggcttcagcttgctgcagataggtgctcccttcactctcacctgaggctgggctggagcctggtgtctgccccaccctgctggtcagccccctaggacctgagccccgtaagcctggactggccacgccctggggcagcagcactgggtgcttggcgctcacgaccttcctgggcccctgggtccctcacttctcccttgtttctaccttcctggcttgtcagattcccacagctcttaaggagaaattcagtatttactgcagcatgtgttttcagtgtgatggttcatctaggtaccctagcctgtcattgctggagttggaaatctctgttgtctgctgttgttttgtgaaacaagcgtgtgaggttataagtttccctcaacgtaccacactaaccacatttccctaagttttgatgtgtagtgttttcactgccattcagttcaaaatattttctcatttc

SEQ ID NO: 74112 - DNA, 784 bp, Homo Sapiens
  misc_feature (749)..(749): n is a, c, g, or t
  misc_feature (768)..(768): n is a, c, g, or t
tttccagttctgggcaccatgcccagggaccttgtaagcagaggtcccttgtcagaaaacattagtcacattcactggtaattctacattatagcctcattcatgtgaagacaacacagtaatcttagtacagtgcttctcaaactacaaagtgcctgtgaatcacctggggactttgttgcaatgtagatttagatttaataggtttggagcagagcccaaacttctgcatttctataaataacaaacttcaatacgatgttgatgctgttggttcacaaatcatacttgagtagcaaggtcccaggtacctctgccttcccatatttgaaccacattttacctgaaggtctccttgtggctggttatcccaagaaaaataaggcagaaaactcagaatttctgccatgggaaaattctaccctgcacacaggagttaagttctctgactctcattgcccagactcaggatcctgcttcttgcccagattgatttggcagagtcctcctatttagctgatgacaaatcctggctcagcctaaccagccttggctgatgccactctgccagcaacccaaacattagtggtgtggagaacctcctaaaatatagattcctaggctctaatcctgagattctgactcattcagtctgaggtgtgcctcaagaataaacagacatcttaggtgattctaaggcatttctagatttgagagaaggaatgcatgtaccactttgatagattgangaaactgtatcttactgcntatatatcttttacat

SEQ ID NO: 74113 - DNA, 509 bp, Homo Sapiens
aatgttgtttcatgacttgatttttctcataagccaatgtatttgtaggtttactggattttatttttagggagtgggtaatttcttcccttttttgattaagttggttcagctatggtgctattcagtaggtatcttcagtgtcaggtcccgtagctgaatgccattgttattataattattatttgtaatcacattgtaagcttgaatttgggcttgtacctgcatcttttgtattctgtacatctggttacttagactttgggagtccaatttggtttcagtcatgtatgtctactttgtagtttaagtagacttcatcaactatggtctattttgggtttgtagttttaatttagaattgtgttaaattgatgttttgcatttgacttcatttgacattagttgaagtaaattatttaatttttgaattctggaatttgaacatttactgtaatttgtaatataactgctgtgaaatacttgaataaagatgacaagaaaaacaa

SEQ ID NO: 74114 - DNA, 796 bp, Homo Sapiens
  misc_feature (476)..(508): n is a, c, g, or t
ggaatagacaaaccattatttggtacaactaaaggcaactggcatggactcaaatattttggggaagaaaaagactaaaagttctaaggaagaaaatgcgaaccttgatagtttgaaatagttaaaaagacagtgtagaaactgtttaggcagtttgattatggactattagatgatacttgggtctgataatggtataaggagaataaagtatttagggatccaatattacgcctgcagctttttccaaatagttcatgggggagggggatgtgtaagtggttaactgaagtctaactagataggtttgttgtaagcttaggatgtttacagttcttcatgttaagttgagcgtgatgggaagggaaagaatgctgatctttaaatttttgtccttagttaagttctgtatttagtgaattaattgcatcctaaaaagtcaaacttgaaaagcacattttaaatggcaaatctannnnnnnnnnnnnnnnnnnnnnnnnnnnnnnnngtaaacagaccatcagaagagaacaatggtacagagcaggggtcagcagatggattttgtaaagcatcaacttgtaaatattttcaagtttattagctgtatggctctggtttctgttccctgttccaaatgttaaagtctactgttgtattctaaaagcagccatggactgaatgtagctgtgttccaataaaacttacacaaaagcaggcagtgggccataatttgcaacacctgattcacagcataattttgtcacaaactgaaagtgttcctcaattaaagtga

SEQ ID NO: 74115 - DNA, 1044 bp, Homo Sapiens
  misc_feature (288)..(288): n is a, c, g, or t
  misc_feature (331)..(332): n is a, c, g, or t
agaggcccgggaaatacaggttttggggcgcttgggacccactgctaagcccgttttccatattttcactcccccaaagaaaaagaacttcccggctggtgaaaaaagcccctttccaaacttttgggcgggccttctggattttccctcttttgtccccgggggacccccctttgccctggaggatttggcatgcgtttattggcgcgggcctttgtccctcccaagggaaaatccaccttcgccagcttggaaatttacagcctggtttacatcaacccccagaancccggcagctgggctcccttctcgtcccgcggcctcaccactnntggttttagtcaacagcgcatgtggcttcccctggaagacgagtgatttcatgccctggaatgtatttgacgggaagctttttcatcagaagtacttgcaatctgaaaagggttatgctgtggaggttcttttagaacaaaatagatctcggctcaccaaattccacaacctgaaggcagtcgtctgcaaggcctgcatgaaggagaacagacgcatcactggccgagcccactggggctcacaccacgcagggaggtggggaagacagggctccagctaccacaggacgggctctgggtatagccgttccagtcagggacagccgtggagagaccagggaccaggaagcagacagtatgagcatgaccagtggagaaggtactagtcaacctccagaaagagtatggagagaaaaagaggcacacctggacgcagagccctgccagcgccctcctctgctgttgcagctgcaaggagaccatgcctgtgggagccaggcctcgcttgcatgaagaaggaacgatgcctttttcaatggtgtctccctcccattgtgcagaagagcttttgttggcttctctcccgagcttgtgcctgattctgtggcccaaaacaatcattgttaacatcttcatgtgtttcattctgatctttcattcatatatatgatgcctagctaatttcattttaaaataaatgggaatctgttgt

SEQ ID NO: 74116 - DNA, 936 bp, Homo Sapiens
  misc_feature (53)..(53): n is a, c, g, or t
ggtagggttaacacgcagatctgtgactccactcctgagccgggttctctggngatgcaacccttaaatttgcgttttttaatgaccctccctctgatttaagtacggggatactgctgacctggtgctgccttgccaccctttacatgctgtgtcatttgggttaagacatttgacaacttactaatcttctgactatgtgttcccacagggaggtggggaagacagggctccagctaccacaggacgggctctgggtatagccgttccagtcagggacagccgtggagagaccagggaccaggaagcagacagtatgagcatgaccagtggagaaggtactagtcaacctccagaaagagtatggagagaaaaagaggcacacctggacgcagagccctgccagcgccctcctctgctgttgcagctgcaaggagaccatgcctgtgggagccaggcctcgcttgcatgaagaaggaacgatgcctttttcaatggtgtctccctcccattgtgcagaagagcttttgttggcttctctcccgagcttgtgcctgattctgtggcccaaaacaatcattgttaacatcttcatgtgtttcattctgatctttcattcatatatatgatgcctagctaatttcattttaaaataaatgggaatctgttgtattctgattttttattagcaacactagattatgaggggttatctcctgttattaaaaagtcagaaaacactatacagtagtcctcccttgtctgcgggggagacatcccaagaccctcagtggatgcctgagactggatagtatggaatcctacatatctataccgtggctttttcctctacgtacataccatgataaagcttaacaaagaacagtgagagattaacagcaaccaataactaataaaagctatgtgaatgtgaaa

SEQ ID NO: 74117 - DNA, 479 bp, Homo Sapiens
caggtaagttcatcacctgcatctccagaagaaatcagtcacatgtctgtcttaataacataaatcttccatatcaagtaccaaagtaaacagaactcagatattgaatcctgctgacctggtgccgagttaacttggtttcaaaacactcttgcttcctccagaaagagtatggagagaaaaagaggcacacctggacgcagagccctgccagcgccctcctctgctgttgcagctgcaaggagaccatgcctgtgggagccaggcctcgcttgcatgaagaaggaacgatgcctttttcaatggtgtctccctcccattgtgcagaagagcttttgttggcttctctcccgagcttgtgcctgattctgtggcccaaaacaatcattgttaacatcttcatgtgtttcattctgatctttcattcatatatatgatgcctagctaatttcattttaaaataaatgggaatctgttgt

SEQ ID NO: 74118 - DNA, 671 bp, Homo Sapiens
  misc_feature (302)..(315): n is a, c, g, or t
ttcacgtgtgcttcaaagccctgagaagaatatttctttggaccccaggcactaggggccacctgcctgggagtctccctgcctcactcctctaggcaggggagtgatgcttcaggacgtgacaggctgttctaacatgtgtctacctgagggctagttgaaggatccaggagtattttcttcttgggtgggccctgaacaaagccaaaaattgtagaaaccagtctagaaaaagtcctgctcatctgtggccactgccttctagccgtcctccaccttgcagaaagaatctagcctttggnnnnnnnnnnnnnnatcggggtcatttgctattcccctctgatattcaaccctatagaaggagcctggactctgatccctctgtacaggctggatggaaggggccctccacacttcctgggaggtcagagacaaactgtttcagagagtcagatggacttcccaagacttgttgagagatgtgacatggttcttggatttcctctgtagcagcctcctggacttcctgaggactcgacattgtccacagatgtactggccattacatgaaacaagaaaccaagcatctttgctgttgttaattattatatgtgccattgttacaggagattataggctagtctgtaataaattatcttatagcagccaaa

SEQ ID NO: 74119 - DNA, 781 bp, Homo Sapiens
caaccagaaaattgtgatctctccatgtaatatgtacatgtttcatactagatgtaactcctcaaggcaggaatgtttatcttgttgttcctgcagcacctaatgtaaagtgccttgcacagggtaggtgctcatgacgtgtagaatgagtgagtaacttcctgcctcatcaggatgaaatgtggttcacttcccctgtgttcaacactacaaagctactcctgccagaagagggcagagttctttcttgggtttgaactggcttttttgggttgaaccagatcatcccacatccttagcactacttaaccttcttttcctgaagattacatatcagtgtcctgcgtttttatctaatattagagctgaggttcctaggaaaattttgaagtggggaagattatggagaaaatgaaatggaaatttggggagggtggtttgtcagtataaggccctgtggggtaatcatattttagttattacttgttaaaagggtaacagaacctctgtttctttaccaagtcgctggttggccatttctccaattgatgaactaccattggttttagctctttctcatttgggattcccctcaattgcttacatgattctggtacttagagtctaatagagttgctgtgaatatgtagtgctgtacataatggcagttttgtaaatgtgagataaccttgaatatgttgtggtttgtatacagagccattagtattgttattttggccacttttttattcaaaataaataacataattatttgtaaaaa

SEQ ID NO: 74120 - DNA, 619 bp, Homo Sapiens
  misc_feature (176)..(186): n is a, c, g, or t
  misc_feature (269)..(337): n is a, c, g, or t
  misc_feature (609)..(609): n is a, c, g, or t
aattcggaacgaggattaaatgctaaacgtcctaagaattatatatgtgtttacctatgacttttttttgaaataaacagaacagtcatctaaaaacataaggttttggaaaggagatgctttttcaattcttaccatctgattaggtggaatgttttatagacttttggtgttgnnnnnnnnnnngtttgataacaatgcattttgcttggaataccccccaatccagaaaagttggtgacttctctccattgtatatatgtacatannnnnnnnnnnnnnnnnnnnnnnnnnnnnnnnnnnnnnnnnnnnnnnnnnnnnnnnnnnnnnnnnnnnntaatgtaaagtgccttgcacagggtaggtgctcatgacgtgtagaatgagtgagtaacttcctgcctcatcaggatgtaatgtggttcacttcccctgtgttcaacactacaaagctactcctgccagaagagggcagagttctttcttgggtttgaactggcttttttgggttgaaccagatcatcccacatccttagcactacttaaccttcttttcctgaagattacatatcagtgtcctgcgtttttatctaatattagagctgaggntcctaggaaa

SEQ ID NO: 74121 - DNA, 678 bp, Homo Sapiens
gaatgggctacaccccagattacatagtgtatcacgagttggtcatgaccaccaaggagtatatgcagtgtgtgaccgctgtggacggggagtggctggcggacgtgggccccatgttctatagcgtgaaacaggcgggcaagtcacggcaggagaaccgtcgtcgggccaaagaggaagcctctgccatggaggaggagatggcgctggccgaggagcagctgcgagcccggcggcaggagcaggagaagcgcaccccctggccagtgtcaggtctacgaagatctacactccaggccggaaagagcaaggggagcccatgacccctcgccgcacgccagcccgctttggtctgtgagctgaggctgtccccagagaggatggcagcagggcagttcctgctggaccagactctctggcagaggaggtggagttcttccatgcaggagcacggcatggcgggagcggggctgcagagtatccgatggtctgccggggcagcgggaggtggctggacccatcgcatctaaaactggcccaggacacttggtgtatgcgtgacttggctgtggctgtcttttttaatccttgtgtaaagcagcaaaaaagacctaaagggaattgtaatttggttataattcaggatttggaaataaatttattatttgtaaaacatga

SEQ ID NO: 74122 - DNA, 943 bp, Homo Sapiens
  misc_feature (33)..(33): n is a, c, g, or t
taggaaagtgcatctgtgctgccttatttcccnccaggcagcccagcttcaagggaattcgggggagtacgtgaacatcccgcacaggggatgccttgccacttgcaccccaccagcttcccttttttggaatggggctacaccccagattacatagtgtatcacgagttggtcatgaccacccaaggagtatatgcagtgtgtgaccgctgtggacggggagtggctggcggagctgggccccatgttctatagcgtgaaacaggcgggcaagtcacggcaggagaaccgtcgtcgggccaaagaggaagcctctgccatggaggaggagatggcgctggccgaggagcagctgcgagcccggcggcaggagcaggagaagcgcagccccctgggcagtgtcaggtctacgaagatctacactccaggccggaaagagcaaggggagcccatgacccctcgccgcacgccagcccgctttggtctgtgagctgaggctgtccccagagaggatggcagcaggtattgggtcctcagccttctggcgggagccctgaggctgcggacaaagccctttcatctgaggactttcatctgtgcatatcacggccccccagggcagttcctgctggaccagactctctggcagaggaggtggagttcttccatgcaggagcacggcatggcgggagcggggctgcagagtatccgaggtgctgccggggcagcgggaggtggctggacccatcgcatctaaaactggcccaggacacttggtgtatgcgtgacttggctgtggctgtcttttttaatccttgtgtaaagcagcaaaaaagacctaaagggaattgtaatttggttataattcaggatttggaaataaatttattatttgtaaaaccctcgtgccggaatcgccacccaggcctcgctaccttggacc

SEQ ID NO: 74123 - DNA, 1291 bp, Homo Sapiens
ggggaaaccgaaaccgctgtgctgtgggcgcagcgccgagattgattcaccttcacctgtgctgcactccagctgacccaagtaggaagccagacgagctgtaaaacatgaacggaagagtggattatttggtcactgaggaagagatcaatcttaccagagggccctcagggctgggcttcaacatcgtcggtgggacagatcagcagtatgtctccaacgacagtggcatctacgtcagccgcatcaaagaaaatggggctgcggccctggatgggcggctccaggagggtgataagatcctttcggtaaatggccaagacctaaagaacctgctgcaccaggatgctgtagacctctttcgtaatgcaggctatgctgtgtctctgagagtgcagcacaggttacaggtgcagaatggacctataggacatcgaggtgaaggggacccaagtggtattcccatatttatggtgctggtgccagtgtttgccctcaccatggtagcagcctgggctttcatgagataccggcaacaactttgaaaaacttgctctctttcaatactcccaatgaagatacatttcactcaccctccacccctgctattctgccatgtctttccctctctctgcatagccagatttgaagtgactgatacccaccccaaaccttgctgttcacagtctccaattcttcatattctaatgggaaagtaaaggtattgtttgaaggaaaactgaagaaaagacttggcttagaacaaatgaggagttatatattttactaggacttttgatagaaattcagctacaacccaaagagagaaagattgagtcttcctgtcaccataggcaataccttttttcttagctggcatgccataaaggccagctatgtgatattagaggaagaaaggatttttctttttaatgatcttccttgggaaattattgtggcctttatttaatttctaactacgtacctgggtgcctatatcgacaaagagtgagaagagcatttttacttttttaaaaaagcaaatacatatatacacatacgtatgcaaatattatagtataatagtgatccctatggagaattaaaggtgagaaagctactttgtggtgtctaggtttctgataaaagggatgatcttaactgaagaatttaaagagatacttaaacagagcaaatgtagtaggaacaagggagtgagccttataagaggacgttcagtctcatttattaaaataataactgagactgggagaggtggctcatgcctgta

SEQ ID NO: 74124 - DNA, 953 bp, Homo Sapiens
  misc_feature (705)..(818): n is a, c, g, or t
gcaggctggtaccggtccggaattcccgggatatcgtcgacccacgcgtccgggtttcggtagcgacggtagctctagccgggcctgagctgtgctagcaccccccccaggagaccgttgcagtcggccagcccccttctccacggtaaccatgtgcgaccgaaaggccgtgatcaaaaatgcggacatgtcggaagagatgcaacaggactcggtggagtgcgctactcaggcgctggagaaatacaacatagagaaggacattgcggctcatatcaagaaggaatttgacaagaagtacaatcccacctggcattgcatcgtggggaggaacttcggtagttatgtgacacatgaaaccaaacacttcatctacttctacctgggccaagtggccattcttctgttcaaatctggttaaaagcatggactgtgccacacacccagtgatccatccaaaaacaaggactgcagcctaaattccaaataccagagactgaaattttcagccttgctaagggaacatctcgatgtttgaacctttgttgtgttttgtacagggcattctctgtactagtttgtcgtggttataaaacaattagcagaatagcctacatttgtatttattttctattccatacttctgcccacgttgttttctctcaaaatccattcctttaaaaaataaatctgatgcagatgtgnnnnnnnnnnnnnnnnnnnnnnnnnnnnnnnnnnnnnnnnnnnnnnnnnnnnnnnnnnnnnnnnnnnnnnnnnnnnnnnnnnnnnnnnnnnnnnnnnnnnnnnnnnnnnnnnnntcccttttgcggccgcctcgcccccggaaaaatttttcaaaacctttcttttggcgcgcggccccaaaaggaaagggaacttggccatacctgttcccaaggaaaccctggccagacataagggttggattcccc

SEQ ID NO: 74125 - DNA, 1118 bp, Homo Sapiens
  misc_feature (719)..(719): n is a, c, g, or t
  misc_feature (1022)..(1022): n is a, c, g, or t
ggggcttagatgcgccacggtttcggtagcgacggtagctctagccgggcctgagctgtgctagcaccccccccaggagaccgttgcagtcggccagcccccttctccacggtaaccatgtgcgaccgaaaggccgtgatcaaaaatgcggacatgtcggaagagatgcaacaggactcggtggagtgcgctactcaggcgctggagaaatacaacatagagaaggacattgcggctcatatcaagaaggaatttgacaagaagtacaatcccacctggcattgcatcgtggggaggaacttcggtagttatgtgacacatgaaaccaaacacttcatctacttctacctgggccaagtggccattcttctgttcaaatctggttaaaagcatggactgtgccacacacccagtgatccatccaaaaacaaggactgccaccctaaattccaaataccagagactgcaaattttcagcccttgcctacgggaaacctctcgaatggtttgaacccttttggttgcggttcttgtacacggggccattccccctgtaacctaagattttgtacgtgggggttaataacacaaccaaatctttaccatccaaccaacgcccctaaccactgtcggggaaccttttaatttttttcccccaatttcccccatttaattcttacccggggccaccccacagggttggagtccacctccctccnttcccaaaaaaattccccacttttgccctttcttttgaaaaagagaattttaatactctccctgcacatgcgccacgcaattgcgccggttccatcaccctccccgcccccgcttctcgtaggactccgcagcagacaacccttatatttacgagacgcgccgcctatttctattcccactcccctattctcggtcgcactcttcggcgcactgcctcacgtagcgaactctcatatacggcacgccaccattattttccgatactaccacccgctctagcgtcacaatgtttcctcttccanccccagattttctgcgtgcacgtcgcacccacctgtcatcttatctattttgcctgcccccttttccccctcctcttactgcactctccgccgccg

SEQ ID NO: 74126 - DNA, 839 bp, Homo Sapiens
  misc_feature (727)..(753): n is a, c, g, or t
  misc_feature (756)..(758): n is a, c, g, or t
  misc_feature (760)..(768): n is a, c, g, or t
  misc_feature (772)..(774): n is a, c, g, or t
  misc_feature (776)..(782): n is a, c, g, or t
ggggggagcagggcggggcctgagcactaggcggcggcggctggcgtggggctgcttagatgcgccacggtttcggtagcgacggtatctctagccgggcctgagctgtgctagcaccccccccaggagaccgttgcagtcggccagcccccttctccacggtaaccatgtgcgaccgaaaggccgtgatcaaaaatgcggacatgtcggaagagatgcaacaggactcggtggagtgcgctactcaggcgctggagaaatacaacatagagaaggacattgcggctcatatcaagaaggaatttgacaagaagtacaatcccacctggcattgcatcgtggggaggaacttcggtagttatgtgacacatgaaaccaaacacttcatctacttctacctgggccaagtggccattcttctgttcaaatctggttaaaagcatggactgtgccacacacccagtgatccatccaaaaacaaggactgcagcctaaattccaaataccagagactgaaattttcagccttgctaagggaacatctcgatgtttgaacctttgttgtgttttgtacagggcattctctgtactagtttgtcgtggttataaaacaattagcagaatagcctacatttgtatttattttctattccatacttctgcccacgttgttttctctcaaaatccattcctttaaaaaataaatctgatgcagatgtgtaaaaannnnnnnnnnnnnnnnnnnnnnnnnnngannnannnnnnnnnaaannnannnnnnnccatggggggccgcctcggcccttcgaaaactttctaaaccattcggtttgggcccg

SEQ ID NO: 74127 - DNA, 926 bp, Homo Sapiens
  misc_feature (781)..(808): n is a, c, g, or t
cagtcgacggtaccggacatatgcccgggaattcggccattacggccggggagatgcgccacggtttcggtagcgacggtagctctagccgggcctgagctgtgctagcacctcccccaggagaccgttgcagtcggccagcccccttctccacggtaaccatgtgcgaccgaaaggccgtgatcaaaaatgcggacatgtcggaagagatgcaacaggactcggtggagtgcgctactcaggcgctggagaaatacaacatagagaaggacattgcggctcatatcaagaaggaatttgacaagaagtacaatcccacctggcattgcatcgtggggaggaacttcggtagttatgtgacacatgaaaccaaacacttcatctacttctacctgggccaagtggccattcttctgttcaaatctggttaaaagcatggactgtgccacacacccagtgatccatccaaaaacaaggactgcagcctaaattccaaataccagagactgaaattttcagccttgctaagggaacatctcgatgtttgaacctttgttgtgttttgtacagggcattctctgtactagtttgtcgtggttataaaacaattagcagaatagcctacatttggatttattttctattccatacttctgcccacgttgttttctctcaaaatccatttcctttaaaaaataaatctgatgcacatgtgaaaaccacccaccgtcggaacccacggaccccgacgaccgccgacttgcgcccgcccacatatcannnnnnnnnnnnnnnnnnnnnnnnnnnntcggcccttcaagaaagcttttctagaacctttttcttttgggccgcgcgggccccccgtgaggatcaagggacactgggggttaaaaccctggtttccttcagggagaaacccgggt

SEQ ID NO: 74128 - DNA, 1223 bp, Homo Sapiens
  misc_feature (312)..(312): n is a, c, g, or t
tcacacggctgggggcagcaaaattgcaggcacaaggaggatgcgggagttatctgctcagaattcatgtctctgagactgaccagtgaagccagcagagaggcctgtgcagggcgtctggaagttttttacaatggagcttggggcactgttggcaagagtagcatgtctgaaaccactgtgggtgtggtgtgcaggcagctgggctgtgcagacaaagggaaaatcaaccctgcatctttagacaaggccatgtccattcccatgtgggtggacaatgtttcagtgtccaaaaggacctgacacgctgtnggcagtgcccattcatctccatgggagaaggagactggccagcccctcgggaggagaccgggatcacatgtgacaacaagattaaggacttcaggaaggacccacttcctgttctggacgtgtggagatctggcatggaggttcctgggggacagtgtgtgatgactcttgggacttggacgatgctcaggtggtgtgtcaacaacttggctgtggtccagctttgaaagcattcaaagaagcagagtttggtcaggggactggaccgatatggctcaatgaagtgaagtgcaaagggaatgagtcttccttgtgggattgtcctgccagacgctggggccatagtgagtgtgggcacaaggaagacgctgcagtgaattgcacagatatttcagtgcagaaaaccccacaaaaagccacaacaggtcgctcatcccgtcagtcatcctttattgcagtcgggatccttggggttgttctgttggccatttccgtcgcattatcctccttgacctaaaaagcgaagaccagagacagcgggcttgcagtttccctcaagaggagagaacttagcccacccaaattcaatacccgggagatgaattcctggcctgaatgcagatgatctggacctaatgaattcctcaggaggccattctgagccacactgaaaaggaaaatgggaatttataacccagtgagttcagcctttaagataccttcgatgaagacctggacttattgaatggagcagaaattcacctctctcactgactattacaagttgcatttttatggaggtcttcttctcctaagaatcctaagactgctgctgaatttataaaaattaagtttgtgaatgtgactacttagtggtgtatatgagactttcaagggaattaaataaataa

SEQ ID NO: 74129 - DNA, 1020 bp, Homo Sapiens
  misc_feature (929)..(929): n is a, c, g, or t
ctgtaacattgatagaaaaccggaaggaattaaaaacaatgcagatgggtgtacttcctttctctcccagtcccaagccaacccatttttccttggaatgcaaaaatggtctggaaagagatatgggggtcctgtgaacagaacagggagtcattatctttttcttctttaccaatagacgatgacaaatgtggatggtgaggaagtaaaacgtcaataaagcagtatcataaataaaaaaataaataacgtttattctgtaccacgcggctgtcagtgtccggagtctccagggcagagcgccccggggagggctgggccctcagagcagcaggagggcgcccagggacagctcaccctggcccagcaggcggccccgatcccggccgcgaccctcatcccgggccttgacgcgaacggccaggcggcgcacctcgtcttccgagaggccgtcgaagcaaaagtcctggtcaaaggaggccttgcggctgcgccccaccacagcgctgcattgccaacgcgcagtgcccggcggccgcaggacgaggctgaggcggcagcggacggcgcggggcccgggggcgcctccgaacaggctctccgcgcggagcagccggaggcggagacgccgggttcccggacagtactcagcagccaggcgcagggcgtcgccggcgcggcccagagccacggtgcccttggcctccaggcgctcaggaagcggggccctggatgacagcgggctcgaggagggggcccgggccggggactcggatcccgcgcggcgctcctcgtcctcgttcccgctggagacggagcggacgcgggccaggcggcgactccttccagcccgcagcgcgcgactcagcagcccgtcggggacgcgcaggaggcggcagcggcggggccccgcagcgagcgcgtcctgnggcaggcggggaccgccgggggccgcgggggtggccgggcccggacctcgcgggccgcacagggtccccaggggggcgtccgggcctccgc

SEQ ID NO: 74130 - DNA, 1182 bp, Homo Sapiens
  misc_feature (123)..(123): n is a, c, g, or t
  misc_feature (138)..(138): n is a, c, g, or t
  misc_feature (174)..(174): n is a, c, g, or t
  misc_feature (471)..(603): n is a, c, g, or t
  misc_feature (843)..(887): n is a, c, g, or t
  misc_feature (1032)..(1083): n is a, c, g, or t
gttcagtggaaataagcttccacaaaattcatggccctccatttttatttttgggctccaataaattgggcaccgtgaaatttttttgaccataattgggggagtggtctttcctttttttcnggactaaaataatcnttctcaaagcattcccagctcttcaatgatactatntatggcactgaatgcacattctttcccagaaagcccgagacagtatgctctcatctgaaattagtctgctggatagctgtcactctagggtgagatacccttttggctgtcactctagaatgagacatcctaagtaaggtccactgttttatggatcccatttcttcttctttcctggttttcatcctcattttgctggagaatttcctcaagatacttcctcagtaagggtgcaaaggagactttctgaaaatttgcctgacagaaaatgtcttcactttgatgttcttcttgacnnnnnnnnnnnnnnnnnnnnnnnnnnnnnnnnnnnnnnnnnnnnnnnnnnnnnnnnnnnnnnnnnnnnnnnnnnnnnnnnnnnnnnnnnnnnnnnnnnnnnnnnnnnnnnnnnnnnnnnnnnnnnnnnnnnnntgagctaatcgtgatgacctcatttgttttctccctggccactttaatatcttccttctatccttaatattccaaaattttacaatattgtgtctagatgtagattgtattgggccctctcaaatctggagacttagctggctctgttcttcaattctttttctttttatttcttcacctacactgtctctgttctctcttccaggaactcctaacattacatattgattgtctatgtcnnnnnnnnnnnnnnnnnnnnnnnnnnnnnnnnnnnnnnnnnnnnnatctggagagattccctcaactttattttccagactgtataccaaatacttttagcagtcttattttattttcaaagagatcttcttattctcagtcttctctttcttttcttgctttttaagagacagggtctcactctgtccnnnnnnnnnnnnnnnnnnnnnnnnnnnnnnnnnnnnnnnnnnnnnnnnnnnntgggctcaaagtgatcttcccacttcagcctcccaagtagctaggaccacaggcacatgccaccatgcttggctaatttttaaaaattatttttgtaga

SEQ ID NO: 74131 - DNA, 1342 bp, Homo Sapiens
  misc_feature (720)..(766): n is a, c, g, or t
  misc_feature (911)..(962): n is a, c, g, or t
  misc_feature (1049)..(1103): n is a, c, g, or t
tcttgactatttaagcttctcaagcatcccagctcttcaatgatactatctatggcactgaatgcacattcttcccagaaagcccgagacagtatgctctcatctgaaattagtctgctggatagctgtcactctagggtgagatacccttttggctgtcactctagaatgagacatcctaagtaaggtccactgttttatggatcccatttcttcttctttcctggttttcatcctcattttgctggagaatttcctcaagatacttcctcagtaagggtgcaaaggagactttctgaaaatttgcctgacagaaaatgtcttcactttgatgttcttcttgacagtctgccttactatgaaattctaggtacaaaaatttcccttaaagctctgaaagatgttgatcccattgacttctgggcattcagtgttggctgatgacaaatctgttagcagtctatttctcatccatttttgtgttgagctaatcgtgatgacctcatttgttttctccctggccactttaatatcttccttctatccttaatattccaaaattttacaatattgtgtctagatgtagattgtattgggccctctcaatctggagacttagcttgctctgttcttcaattctttttctttttatttcttcacctacactgtctctgttctctcttccaggaactcctaacattacatattgattgtctatgnnnnnnnnnnnnnnnnnnnnnnnnnnnnnnnnnnnnnnnnnnnnnnnatctggagagattccctcaactttattttccagactgtataccaaatacttttagcagtcttattttattttcaaagagatcttcttattctcagtcttctctttcttttcttgctttttaagagacagggtctcactctgtccnnnnnnnnnnnnnnnnnnnnnnnnnnnnnnnnnnnnnnnnnnnnnnnnnnnntgggctcaagtgatcttcccacttcagcctcccaagtagctaggaccacaggcacatgccaccatgcttggctaatttttaaaaatnnnnnnnnnnnnnnnnnnnnnnnnnnnnnnnnnnnnnnnnnnnnnnnnnnnnnnngttttccgtttctttgtagtatcctgtttttcatcttaaatacacctcaaatctctctggagatggaattaaaattaagttattctttccacattgtctttgtttccctcagagtttgtcatattttcaaggcccctaattctacctcgtgacttttcttattcctcttccctccccatcgcccatgtctgggaatttctaactcaccattcccatttaagaatcaacataactgttaa

SEQ ID NO: 74132 - DNA, 748 bp, Homo Sapiens
  misc_feature (503)..(503): n is a, c, g, or t
tttccatgtaaacatcttcattacatctttaatgctctcacgtggagctgctctgggttaaattacagctgtatgcatcctgaattcctggcagcctccagtcgactcaagtgctaacgtatttatagcatttagaggagggaataaatccagaaccttccccatgggggcttcctaggcctttccctcctgacacatggcatttgcccagtggaaggtctgcatacactacccctgcatcccctccagccagcagcggacagtgacggtggagaggctgggcacgggacatgcctctgtgcatgcttgtgtgcatatgtatgcccagcgtaaaaaaatgccctgctcttgtggtctgtctctgcccaatggcttgccaggacccctggtatcagccctgaccctccaaggcttatggagaggccaagtgcagggacccatctccccactctctaaacactgaacggctcttcccatagatgggatggaggtggggaattcanacatagactaagttttttagatgtttttctgaagtgcaatccctcacccactttcaggcagtcataactgccccctctagcctgcagcctgtgattactgccctcagaccaacagcctctcccaaccccagatcctcattagagcccaagacagggagccgttttcagaagcaggtgagcccagtgaaacaatgcagtggagagaggaacgtgctgtgcgtgcttcctcttccctgcagtcctga

SEQ ID NO: 74133 - DNA, 1269 bp, Homo Sapiens
  misc_feature (1008)..(1012): n is a, c, g, or t
  misc_feature (1014)..(1080): n is a, c, g, or t
  misc_feature (1083)..(1112): n is a, c, g, or t
tgcggcaagggcgccagcgcgaacgggcccgggacaaggcagcgagggtacttcggggcacgctagcacgaagggccccaggcagcccccaggggttgccctcctggcccatggagtaagaggcccgagatccctgggcaacaatggccagttcgagcctcgcatccccttacgccggagcccaaggcagtctgggaacatgccgcgttctctgcgcagcactctgtgcctttgttccaggtggtctcaccctcctgtccctggctgggctagtggtcctgtccaggctcctgcagcgccccccctcactttgacactggactaggatgcagcctcccttctgtgtccccttgagggtaccctgggtcccctcatcaggggcagaggcatgaaagagtcggggctggatggccaggggcttctgggcccgacgcctagtgcagcccctggggtcgtggtttgacatttgtctgcctggtgcaaacaaggaatccttgcctttaaggtgacaggccctccacaggcttccagacttgaaggaaaaggtttaagaaagaaaacaaaaccaacagttagtggagtcaaagcccagacactgtaaatagaaccccctccaccaccccccgccgcccagcatcctacctggactgcggtgctacgagggcctgcgggcctttgctgtgtgccaccctccctgtaagtctatttaaaaacatcgacgatacattgaaatgtgtgaacgttttgaaaagctacagcttccagcagccaaaagcaactgttgttttggcaagacggtcctgatgtacaagcttgattgaaattcactgctcacttgatacgttattcagaaacccaaggaatggctgtccccatcctcatgtggctgtgtggagctcagctgtgttgtgtggcagtttattaaactgtcccccagatcgacacgcagctagcctcctgcattgtatggttataaatagcaccctagtgagtgctgtcgtccagtcnnnnnannnnnnnnnnnnnnnnnnnnnnnnnnnnnnnnnnnnnnnnnnnnnnnnnnnnnnnnnnnnnnnnnnngtnnnnnnnnnnnnnnnnnnnnnnnnnnnnnncttggtcggccgccttcggcccctcaaaaagcttttctaaacctttcgtttggccgcggcgggcccagaagggaaaggggaacatgggccataaccgggttcccaaaggaaaaaccccgggcaaggaacaaggggcttggagattccccccccaaat

SEQ ID NO: 74134 - DNA, 1305 bp, Homo Sapiens
  misc_feature (939)..(947): n is a, c, g, or t
  misc_feature (1210)..(1249): n is a, c, g, or t
ttgcaccagtttctggaggcccttgtcatttcaaaaaggatagtctcttttcttactctggcaaacctgtgagtgattccacaaagatacagtattacttagctatctgaattatgatagaaaaggtcctagttaggttcctatataaagcatttggaagatgaccttgttgcccttgaaacttgaaaatagggattctggggtgaggatacaaagacattgtcttgcatatccataagcaggtcttagagcattattccaaactctagctgtttcagtagttctatgaggattgcaagtcataggtgtgtgtggcatatcagtccatctccctcatctccattctcagtttcttccccacaaaatttggaatcaaagcttttatgacgtttgccaattgcagaacttcttcagctaaggttaatttgacgctatgataaaactgagagatgtcaaaaagcctcttagaaattttaatcttgaaagacttttcagggtatctcattttttaggtgggggtggcaggtgtatttcttttttaacaaataaaaggcatttaagtaaaactaaaatgaaaaaagtaggccttctgacattgtgtacttggtggttctgtccctctgcctgtaacaaatctcatttttgttaccaagaactgtatgaaagaagtaaatccaccccgattctgtatgattaattccatctgtgtttgtcatttctgactggaaaacttcttactccataccttgttcgatatggaggacaaataattggattgtctgataagtctgccaataaactatccagaaatagcaagtgtaatagtccccactatacgaattttatggtttgtataaacactaacattttccccttctgtagttgtatgaaaaaacaaatattgttagcatagtagataaattgttatgaaataccagnnnnnnnnntctgtatcttttactgagaacacccaatacccagataaatgactgtatcaggatttcatttgcatgttagtccacagagttgcccagaaccctaaatttattcataagagaaaatattgattaattattggtcattcctcataagtgtagctgttgatgtgtgcgtctgattattgcttttttaattttatgaaaattgtgtaaaattacattttttttccaggggagaaaaaaacatcaaacaaaaacatctaaatcatccnnnnnnnnnnnnnnnnnnnnnnnnnnnnnnnnnnnnnnnncccttacagaaaccacagaaatattcccttagaataaaatagtatatttgtatttg

SEQ ID NO: 74135 - DNA, 1455 bp, Homo Sapiens
gaatgagttttttaaattttttagatgaccaaaacttgcagggcaggggatgcccagaagagtggtgagatagtaaaacacttattccctcatcctttcaggttttcaggttgcccatttatattcatttacatgtcatttgactgtctcactttttacccagaacagtaacaacccacaccgtcttccttcagggatttccaactggcactctgtgggtgctacacagaatgcaatttaatggatatttctcagcctggttcagaataaattgatcctttgatcccagaaagtatatactgaagtgtgggataaagattatgattaggggagggttggagacaaaagctgtaaattactatggctgatttatttctactatatacatatatattttttgcttttgtatatcctatataggaaactaagcattgtattttttttaacaaatctaaaaaagcactatgaactacaggtgtttgactttcaaaatatattttgtattgttaatatcttcacattgtgtgaatactggaagctgcagatctttgctaggacgcaataaatttatatactttttgaggggttcttctggggtgctaatcaggcccctgttatgcttagggggagccctggtgctacttgcttgaagttttcagtgtaagtaccctgatgccttttggaccttgggatcagatcaagagttttggagatcaggtaccaaggaaataaggacagtctagctgcctcaagtgaggggccctttgcatagctctccttccccctcactgaagctgggtagcctattggggttgagagggaaaatgtgaaatctcagaatttatctcccttagaagagagccagtaacttatgtacaaggatgaaagaaaggtcgcagcagtagctttggggaaagggaggaagatatggcacttctccaaccccggaaaacattgcttttgaaaactgctgataaaatatgagccggttattacttctgtttgggagactgtgctctctgtggtgcctctcttggctctactccacagataccagacctcttctaagaggatgagcagaccagctttgaggttgacctgtttctctttgtctgccttcccaaaacaccagcccccaggaagacattaagcagccttaagcttaaattcctactccctcttccaaatttggctcacttgccttagatccaaggcagggaaaggaaaagaaggggggtctctggctttattactcccctaagtctttactctgacttccccaaacccagaaagattttctccacagtgttcatttgaaagaggagtattttgtcccattttccccttcctcattatcaaacagccccagtcttccttgtctctgctaagaaagtagaggcatgatgatctgcctctcaactgccctaagtcctagctaagtatcatgtgaaaaaa

SEQ ID NO: 74136 - DNA, 802 bp, Homo Sapiens
aaggtagcgaggcctgggtggcgatttcggcacgagggagaagttctgggaattctacaaggcagactggtgcgtgtggcctgctgcgcagttcgtgaacttcctcttcgtgcccccccaatttcgagtcacctacatcaacggcctgacgctgggctgggacacgtacctgtcctacttgaagtaccggagcccagttcctctgacacccccaggcttgtgtggccctggacacccgagcagactgaactgtctgcttcctggaccagatgcaagactgtctcctggcggaccaccccctctgacagaaggggaatgggctcctgcagcaagctcgggtcttgagccacgtcccagcaccacttcagctccggagcattgggctgagccgccctttccaagctcacttctgggactgagtttcctcaaccggaacacacccatgaagatggatgatcatcccctagcccttctcagcaggaacctcatgtgacctgtgaccaagatgtcccatcctcagcacagggcccactctgccaaccagtctcaagcaccagcccctcaacactgccatccacctggctctgggccaagccaccaatccagagctccctcaggtcctgggactaaggcggggacatgactgatcccctcagagcaggctcaggcctggagtcggcccccaaaagtttcacatagggccaggcagcctctgtgtttctttccctggtcctgaactgtggaaatgccattaaactctctctataatgtaactgaaactgctggctgggcgcagtggctc

SEQ ID NO: 74137 - DNA, 763 bp, Homo Sapiens
  misc_feature (763)..(763): n is a, c, g, or t
cggccgcgcggacctggggcgccgcgggcaaacagatctcggtttcctaaaaaactaaaccgcctggggctgtcgtcccagagcccggcagttaggaccatgcgggaagtgtcctggggcatatagtcatactgatgaggtgaaagatacacctcggaaccaagggccaccctctacttttaaggacaatggcgccgggaccaagaaactacacttcccagaaaaccgtgcggccgtggcaaactcttctgggtctagcgtgcgctcacactaatgtttatctcccgggacgtgggcagaccttgtaccaggcgagctctcgcctttgctagcaaaagagctcctctcttcccaaaccctgctactacgctgtccaccctgtatggtctttgaggtctttgaggtttttttggaattcacttgctggagactacagctcacagaacgccctgggctggattgtgccagctgtagttcgcgaaccaaggacatttcctggaaatgcatgcggccacgtatctgtgacagaaatggcagttctcacgtgcgttacgccccctggaaggacttggaaatacggaacttgagtgagcactgagaggacacagaccctcatcctgggaggagtcactcctcccgcagccatcagagcctgacaaccgcttctcaccagaggcgcttcttagaccctgaccttgcccggctcacccaaaggggcaatggccttctttgtatgcaagccagacagtctactgttgtatan

SEQ ID NO: 74138 - DNA, 751 bp, Homo Sapiens
  misc_feature (20)..(20): n is a, c, g, or t
ggcacgaggctgaccattgngacagtaaaaatggtcctgcaagaactgcagtattcagcggggctccaaaaagcatctattgctggcaccatctgacgtggcaggctgggggatttttatcaaagatcctgtgcagaaaaatgaattcatctcagaatactgtggagagattatttctcaagatgaagctgacagaagggggaaagtgtatgataaatacatgtgcagctttctgttcaacttgaacaatgattttgtggtggatgcaacccgcaagggtaacaaaattcgttttgcaaatcattcggtaaatccaaactgctatgcaaaagttatgatggttaacggtgatcacaggataggtatttttgccaagagagccatccagactggcgaagagctgttttttgattacagatacagccaggctgatgccctgaagtatgtcggcatcgaaagagaaatggaaatcccttgacatctgctacctcctccccctcctctgaaacagctgccttagcttcaggaacctcgagtactgtgggcaatttagaaaaagaacatgcagtttgaaattctgaatttgcaaagtactgtaagaataatttatagtaatgagtttaaaaatcaactttttattgccttctcaccagctgcaaagtgttttgtaccagtgaatttttgcaataatgcagtatggtacatttttcaactttgaataaagaatacttgaacttgtccttgttgaatc

SEQ ID NO: 74139 - DNA, 449 bp, Homo Sapiens
gccccccatgcctataaggagatcatccttgtggtcacctcactgacctctaccctcgtttctgaacactcggccggcagaaggctgccacatgcaactcagaaactcaatgcatcccagctctgaaacataccattgttcaagttgaacagaaagctgcacatgtatttatcatacactttccatcttctgtcagcttcatcttgagaaataatctctccacagtattctgagatgaattcatttttctgcacaggatctttgataaaaatcccccagcctgccacgtcagatggtgccagcaatagatgctagagaataaaacacaatcgcatcatcaaaaaaggacggtgaaaatggactggggacaaagtagactacagaatgaaaacaaaagctatcactgtaaatccttagaacaaacaggtctgaggatttacagtgatagc

SEQ ID NO: 74140 - DNA, 1238 bp, Homo Sapiens
  misc_feature (76)..(108): n is a, c, g, or t
  misc_feature (149)..(186): n is a, c, g, or t
  misc_feature (637)..(825): n is a, c, g, or t
  misc_feature (829)..(837): n is a, c, g, or t
  misc_feature (849)..(858): n is a, c, g, or t
  misc_feature (887)..(977): n is a, c, g, or t
  misc_feature (1041)..(1041): n is a, c, g, or t
  misc_feature (1071)..(1081): n is a, c, g, or t
agagagcatccggggccagcccggcccacctggacctcagagaccccccggcatcggctacgaggggcgccagggnnnnnnnnnnnnnnnnnnnnnnnnnnnnnnnnnttcatttcctggccctcacaggcagactatcagcgttcccnnnnnnnnnnnnnnnnnnnnnnnnnnnnnnnnnnnnnnaaccatgggcgcctcctcaggggtgaggctctgggctacacgccaggccatgctgggccaggtgcacgaggttcccgagggctggctcatcttcgtggcatggctcggaccccaacgggcgcaggctgaccgagagctactgtgagacgtggcggacggaggctccctcggccacgggccaggcctcctcgctgctggggggcaggctcctggggcagagtgccgcgagctgccatcacgcctacatcgtgctctgcattgagaacagcttcatgactgcctccaagtagccaccgcctggatgcagatggccggagaggaccggcggctcggaggaagcccccaccgtgggcagggagcagccggccagcccctggccccaggacctggctgccatactttcctgtatagttcacgtttcatgtaatcctcaagaaataaaaggaagccnnnnnnnnnnnnnnnnnnnnnnnnnnnnnnnnnnnnnnnnnnnnnnnnnnnnnnnnnnnnnnnnnnnnnnnnnnnnnnnnnnnnnnnnnnnnnnnnnnnnnnnnnnnnnnnnnnnnnnnnnnnnnnnnnnnnnnnnnnnnnnnnnnnnnnnnnnnnnnnnnnnnnnnnnnnnnnnnnnnnnnnnnnnnnaaannnnnnnnncccccgggggcnnnnnnnnnntttctaaaactttttttggggggcccggnnnnnnnnnnnnnnnnnnnnnnnnnnnnnnnnnnnnnnnnnnnnnnnnnnnnnnnnnnnnnnnnnnnnnnnnnnnnnnnnnnnnnnnnnnnggggggaaccgaggcctgggaaaaaaccgagggggggctcgggaggttcccggggctttacccnagggggaagaaggggggtcatataaaaaannnnnnnnnnngggcaaattttaaagagggggggaaaaactttaacaccccgcgcgcaggggaaccctccccccacgggggtaaaaatatctcacaaggcgccgagaggaaaccccccccgggccgcctgtcataaaaaaatctccccccgggaaaaagagggggggg

SEQ ID NO: 74141 - DNA, 587 bp, Homo Sapiens
acgggcgcaggctgaccgagagctactgtgagacgtggcggacggaggctccctccggccacgggcacggcctcctcgctgctggggggcaggctcctggggcagagtgccgcgagctgccatcacgcctacatcgtgctctgcattggctgtctcctaggaaacccatatccttaccctccttgggactgaaggggcccccctggccatcggcccactcggaaccatgggcgcctcctcaggggtgaggctctggctacacgccaggccatgctgggccaggtgcacgaggttcccgagggctggctcatcttcgtggccgagcaggaggagctctacgtccgcgtgcagaacgggttccggaaggtccagctggaggcccggacaccactcccacgagggacggacaatgaagtggccgccttgcagccccccgtggtgcagctgcacgacagcaacccctacccgcggcgggagcacccccaccccacgcgccgccgctggcgggcagatgacatcctggttctgtaattgtgtgtgatgtgaagccaattcagacaggcaaataaaagtgaccttttacactg

SEQ ID NO: 74142 - DNA, 1838 bp, Homo Sapiens
ctgcctccaagtagcagcggctggatgcggatggcggacagagccgacttccagtgcttccagcaggcgcgggccgtggggctggcgggcacctccggcgcctttcctgtcctcgcgcctgcaggacctgtacagcatcgtgcgccgtgccgacgcgcgcagccgtgcccatcgtcaacctcaaggacgagctgctgtttcccagatggaaggctctgttctcaggctctgagggtccgctgaagcccggggcacgcatcttctcctgtgacggcaaggacgtcctgaggcaccccacctggccccagaagagcgtgtggcatggctcggaccccaacgggcgcaggctgaccgagagctactgtgagacgtggcggacggaggctccctcggccacgggccaggcctcctcgctgctggggggcaggctcctggggcagagtgccgcgagctgccatcacgcctacatcgtgctctgcattgagaacagcttcatgactgcctccaagtagccaccgcctggatgcggatggccggagaggaccggcggctcggaggaagcccccaccgtgggcagggagcggccggccagcccctggccccaggacctggctgccatactttcctgtatagttcacgtttcatgtaatcctcaagaaataaaaggaagccaaagagtgtatatttttaaaagtttaaaacagaagcctgatgctgacattcacctgccccaactctcccctgacctgtgagcccagctgggtcaggcagggtgcagtatcatgccctgtgcaacctcttggcctgatcagaccacggctcgatttctccaggatttcctgctttgggaagccgtgctcgccccagcaggtgctgacttcatctcccacctagcagcaccgttctgtgcacaaaacccagacctgttagcagacaggccccgtgaggcaatgggagctgaggccacactcagcacaaggccatctgggctcctccagggtgtgtgctcgccctgcggtagatgggagggaggctcaggtccctggggctagggggagcccttctgctcagctctgggccattctccacagcaaccccaggctgaagcaggttcccaagctcagaggcgcactgtgacccccagctccggcctgtcctccaacaccaagcacagcagcctggggctggcctcccaaatgagccatgagatgatacatccaaagcagacagctccaccctggccgagtccaagctgggagattcaagggacccatgagttggggtctggcagcctcccatccagggcccccatctcatgcccctggctgggacgtggctcagccagcacttgtccagctgagcgccaggatggaacacggccacatcaaagaggctgaggctggcacaggacatgcggtagccagcacacagggcagtgagggagggctgtcatctgtgcactgcccatggacaggctggctccagatgcagggcagtcattggctgtctcctaggaaacccatatccttaccctccttgggactgaaggggaaccccggggtgcccacaggccgccctgcgggtgaacaaagcagccacgaggtgcaacaaggtcctctgtcagtcacagccacccctgagatccggcaacatcaacccgagtcattcgttctgtggagggacaagtggactcagggcagcgccaggctgaccacagcacagccaacacgcacctgcctcaggactgcgacgaaaccggtggggctggttctgtaattgtgtgtgatgtgaagccaattcagacaggcaaataaaagtgaccttttacactgaaaaaa

SEQ ID NO: 74143 - DNA, 1344 bp, Homo Sapiens
ctcaggaatgtcggattttactggggattttgacaagaacaccacaaggtggtcagggctgaaggtggggggagcccagggactgaggggcacagaagagggagcagtggactctgtggaggccagggaggcttcccatggctggtcctggactgagccctgaatgaaggtgggtccagtggagtgcatggcagagtacatggcctccaggagcagcgtggaactgatgctaacagatcccatccagcagcgattggcgctctctttcaggtgcccagatagatgacaacaatcccaggcgcaccggccaccgcatcgtggcgccccctggtggccgctccaacatcaccagcctcggttgaacgtggatgcgcggaggagctagcctgaaggattctgggaatcatgtccatcccttttcctgtcagtgtttttgaaacccacagttttagttggtgctgatggagggagggggaagtcgaaggatgctctttcccttttctgtttaggaagaagtggtactagtgtggtgtgtttgcttggaaattccttgccccacagttgtgttcatgctgaatccacctcggagcatggtgttttcattcccccttcctagtgaaccacaggttttagcattgtcttgttctgtcccttccacttctaactccactggctccatgattctctgagtggtggttcctttgcaccctgtagatgttctaggatagttgatgcatgttactaaattacgtatgcaagtctgtgagtgcgtctgaggggacatcgccaaggactgactgagacacgatgccgagacctcaagccctgaggggcagtcccaaaacccttacagtgaagatgtttactcattgcccccacctctggtccacactagaaagaagctcgccccacctccacctgtgagatccgtgaattctcggaatggcaggggaagccttgcactaggttgcagagaagcatcctccacatcctgtgtcagaaaccctggtctccgtggcacttgtaactcaccgtgctgtcttctggtctgtgtgtgttcttcaagccagctctaggcttcaggccgagccaggttcacactcagaaagaggtctccccatccccattcggggctgacgatggggggctgatggctgcccctgcgtggcctgagtcctggtccctctgaggcagttgacggggcagtcagatttttaaagttttgtacaaagttttcctttgtaatcactcccatttttacttaacaaccaacttgttgtggctcttatttctgaattcaaagcttgtgaaaaaataaagaaaatgaactgcccaaaaaacaaa

SEQ ID NO: 74144 - DNA, 969 bp, Homo Sapiens
  misc_feature (48)..(96): n is a, c, g, or t
aattaggctaggtacgaggcctggggttgaattcggcacgaggctgcnnnnnnnnnnnnnnnnnnnnnnnnnnnnnnnnnnnnnnnnnnnnnnnnncgccgatccgggcggtgctggcagtccggagcggcggcgggcgggccgagcagccggggcagccgcgcgtgggcatccacgggcgccgagcctccgtccgtgtctctatccctcccgggcctttgtcagcgcgcccgctgggagcggggccgagagcgccggttccagtcagacagccccgcaggtcagaccggccgggccgagggcgccagagggggccatgtcgtaccaggcaagaagagcatcccgcacatcacgagtgaccgactcctcatcaaaggtggacggatcatcaacgatgaccaatccctttatgctgacgtctacctggaggatggacttatcaaacaaataggagagaacttaatcgttcctggtggagtgaagaccattgaagccaacgggcggatggttattcccggaggtattgatgtcaacacgtacctgcagaagccctcccagggatgactgcggctgatgacttcttccaagggaccaggtcggcactggtgggcgggagcacgatgatcattgaccatgtgttctgaacctgggtcagcctactggacctctttcgagaagtggcacgaagcagctgaacacccaaatcctgctgtgattactcccctccacgttgaacatcacaagctggtacgatggccgtccgggagggagctggaggttgctggtgccggacaagaaggcgtccactcccttcccagtcctacaatgggcctataggatgtctacccaaatgttccgacagcaaactcaatgatacctttacctgccttaagggctgggagctgtgaactggtgcacgcgaacacggccattggagctcccgacaaagcgtctggaaaggccaaggcc

SEQ ID NO: 74145 - DNA, 2298 bp, Homo Sapiens
aaacgggcagtactctaacggttctaaggtagcgaggcctgggtggcgaattcggcacgagggtcgtaccagggacaagaagagcatcccgcacatcacgagtgaccgactcctcatcaaaggtggacggatcatcaacgatgaccaatccctttatgctgacgtctacctggaggatggacttatcaaacaaataggagagaacttaatcgttcctggtggagtgaagaccattgaagccaacgggcggatggttattcccggaggtattgatgtcaacacgtacctgcagaagccctcccaggggatgactgcggctgatgacttcttccaagggaccagggcggcactggtgggcgggaccacgatgatcattgaccatgttgttcctgaacctgggtccagcctactgacctctttcgagaagtggcacgaagcagctgacaccaaatcctgctgtgattactccctccacgtggacatcacaagctggtacgatggcgttcgggaggagctggaggtgctggtgcaggacaaaggcgtcaattccttccaagtctacatggcctataaggatgtctaccaaatgtccgacagccagctctatgaagcctttaccttccttaagggcctgggagctgtgatcttggtccatgcagaaaatggagatttgatagctcaggaacaaaagcggatcctggagatgggcatcacgggtcccgagggccatgccctgagcagacctgaagagctggaggccgaggcggtgttccgggccatcaccattgcgggccggatcaactgccctgtgtacatcaccaaggtcatgagcaagagtgccagccgaaatcatcgctctggccaggaagaaagggcccctagtttttggagagcccattgccgccagcctggggaccgatggcacccattactggagcaagaactgggccaaggctgcggcgttcgtgacttcccctcccctgagcccggaccctaccacgcccgactacttgacctccctactggcctgtggggacttgcaggtcacaggcagcggccactgtccctacagcactgcccagaaggcggtgggcaaggacaactttaccctgatccccgagggtgtcaacgggatagaggagcggatgaccgtcgtctgggacaaggcggtggctactggcaaaatggatgagagaccggagtttgtcgctgtcaccagcaccaatgcagccaagatctttaacctgtacccaaggaaagggcggattgccgtgggctcggatgccgacgtggtcatctgggaccccgacaagttgaagaccataacagccaaaagtcacaagtcggcggtggagtacaacatcttcgagggtatggagtgccacggctccccactagtggtcatcagccagggcaagatcgtctttgaagacggaaacatcaacgtcaacaagggcatgggccgcttcattccgcggaaggcgttcccggagcacctgtaccagcgcgtcaaaatcaggaataaggtttttggattgcaaggggtttccaggggcatgtatgacggtcctgtgtacgaggtaccagctacacccaaatatgcaactcccgctccttcagccaaatcttcgccttctaaacaccagcccccacccatcagaaacctccaccagtccaacttcagcttatcaggtgcccagatagatgacaactaatcccaggcgcaccggccaccgcatcgtggcgccccctggtggccgctccaacatcaccagcctcggttgaacgtggatgctgcggaggagctagcctgaaggattctgggacatcatgtccatcccttttcctgtcagtgttttgtgaaaccccacaggtttacatggtgctgatggaggaagggggaagtcgaaggatgctctttccccttttctgtttaggaagaagtggtactagtgtggtgtgtttgcttggaaaattcccttgcccccagtttgtgttcatgctgaatcccccctcggagcatggagttttcattccccccttcctagtgaaccacaagttgtaccattggcctagatcctgtcccttccactttctaactccactggttccatgaattctctggaaggtgggttccttttgcaccctgtaaaatgttctagggaaaattgtatgctctgttactaaaattacggaagccaaaacttgtgaacggcatttgtgaggggaacctcccccagggacggaactgaaaaccccatggccctagacctccaaacccctgaaggggcagctccc

SEQ ID NO: 74146 - DNA, 603 bp, Homo Sapiens
  misc_feature (587)..(587): n is a, c, g, or t
tgcggccgccgacgctgcgcatccgccgccccgcgccccgcgacctgcccctcggccgggacaatggccagagtgaccgactcctcatcaaaggtggacggatcatcaacgatgaccaatccctttatgctgacgtctacctggaggatggacttatcaaacaaataggagagaacttaatcgttcctggtggagtgaagaccattgaagccaacgggcggatggttattcccggaggtattgatgtcaacacgtacctgcagaagccctcccaggggatgactgcggctgatgacttcttccaagggaccagggcggcactggtgggcgggaccacgatgatcattgaccatgttgttcctgaacctgggtccagcctactgacctctttcgagaagtggcacgaagcagctgacaccaaatcctgctgtgattactccctccacgtggacatcacaagctggtacgatggcgtctcgggaggagctggaggtgctggtgcacgacaaaggcgtcaattccttccaagtctacatggcctataaagatgtctaccagatgtccgacagccagctctatgaagcctntaccttccttaaggcc

SEQ ID NO: 74147 - DNA, 448 bp, Homo Sapiens
caggctagctcctccgcgcatccacgttcaaccgaggctggtgatgttggagcggccaccagggggcgccacgatgcggtggccggtgcgcctgggattgttgtcatctatctgggcacctgaaagagagcgccaatcgctgctggatgggatctgttagcatcagttccacgctgctcctggaggccatgtactctgccatgcactccaccttagcagaagtcgtaaccccgccccatcttcaggtgttcgccactggacccaccttcattcagggctcagtccaggaccagccatgggaagcctccctggcctccacagagtccactgctccctcttctgtgcccctcagtccctgggctctcccccccttcagccctgaccaccttgtggtgttcttgtcaaaatccccagtaaaatccgacattcctgagacaggtgatcaaac

SEQ ID NO: 74148 - DNA, 765 bp, Homo Sapiens
aaaataaaacattctcctcacatatggaggtgacgctcgtgtcccagcagtagtaggacatggccttagaggtacgtacctgcagagagctggctatttcaaatgactcgggaacaagaaggcaggctgcagtttaaagaagggggtgggtccagcgtgcaggcacgcttgccatgtgcctccacccactcccagccaggcattaatggcaggagattggccagctcttctctgtcacattcctatttctgacttctgcctggctttcagtttctgccccaccttggctttttcccagcttgaacctaatagaactccagagtttggggggaggcccagccctttgttttctgctcttgaagcatattcacacataaaaagttgtattctcttatacaaactgttttgaggctcttaccgtagtcgaaggtatcttagatcttccttagtgatctcattaagaatatccgaaagtgtataaccctcttcaacaatctgaaacaaagatcagatccttaagagctgagcagctgtgtaacaacagcataagaatttctttgttgtaaatttaccttttcaattgtctttgcatcagctccttgcagccgcaaccagtctataagctctttatctgttctctgcccgtaggggcctgctgggttctctgtaatacctgtaacgattggcaatttgttatatattagtctaaccataaaactcttcaaaagtaaccagttggattaataaatgattccagaatgtaaa

SEQ ID NO: 74149 - DNA, 961 bp, Homo Sapiens
  misc_feature (440)..(463): n is a, c, g, or t
tctctgtgtttagagagatactataccctagaaactctgaacacgccagaatgctgaaatgcccttctacctttgggtttacagccccctccacataaattaagaaattcagtatttctgcactcttagctggattctaaagttctgtatagctcgtaatgatggtatttttatagcagccttttaacagaactagttaatttcgtgtatatgaatctttctcgaagatctggtcaaaactgtattcagtttcctgcccagaatgatcagattgaaggtggttggtttttattattatttagtgtgattgatagtatctagaatggcaggtggtgcataaaagttaaagagaggggaaagattacttagtttggttatacagttataaacaccatgcagtgtattcggtggactgtgctatttctgtttatcctttgggnnnnnnnnnnnnnnnnnnnnnnnngccttcacagtgagactgcaaatgattgttctcataacgtatattattaataaatgtggtcctataatttatactgaaattaccttaggatatttttgcataatactctcttactgcttacattctataaatttttcacgtgataattgtctttgcgtaactgggaaaaatgccgaataacttcctttattatctggaaaaattaaatttgttcatttatattttctacttactaaattgagtttttaaaaagacttagtgtgacatttgacagtgtctttcaaacgaacttctctaacaagtttatagttattttcctgtttcaacactattagaagtcttataaattatgctaattagcatggcagtcatgttacacactcttaacattgccaaagaactgttgatttcgtttgagaaaaccctgggactgtgtgtgtgtaggttttgttttgattttaacaaccaaaaatagaaataaaattagaactgcgtttt

SEQ ID NO: 74150 - DNA, 1313 bp, Homo Sapiens
  misc_feature (1221)..(1243): n is a, c, g, or t
ctggaccggtccggaattcccgggatatcgtcgacccacgcgtccggcggccgggagcggacttaccttaccttctctgccttcggcgcgcttctcagccgggccgccgacccaaaggagccgtccgactatgtctaacatggagaaacacctgttcaacctgaagttcgcggccaaagaactgagtaggagtgccaaaaaatgcgataaggaggaaaaggccgaaaaggccaaaattaaaaaggccattcagaagggcaacatggaagttgcgaggatacacgccgaaaatgccatccgccagaagaaccaggcggtgaatttcttgagaatgagtgcgcgagtcgatgcagtggctgccagggtccagacggcggtgacgatgggcaaggtgaccaagtcgatggctggtgtggttaagtcgatggatgcgacattgaagaccatgaatctggagaagatttctgctttgatggacaaattcgagcaccagtttgagactctggacgtccagacgcagcaaatggaagacacgatgagcagcacgacgacgctcaccactccccagaaccaagtggatatgctgctccaggaaatggcagatgaggcgggcctcgacctcaacatggagctgccgcagggccagaccggctccgtgggcacgagcgtggcttcggcggagcaggatgaactgtctcagagactggcccgccttcgggatcaagtgtgacggcagaacccgctctgaggtttcctggccatagccaccctttgaaatgctctctgtgtgttagagagatactataccctagaaactctgaacacgccagaatgctgaaatgcccttctacctttgggtttacagccccctccacataaattaagaaattcagtatttctgcactcttagctggattctaaagttctgtatagctcgtaatgatggtatttttatagcagccttttaacagaactagttaatttcgtgtatatgaatctttctcgaagatctggtcaaaactgtattcagtttcctgcccagaatgatcagattgaaggtggttggtttttattattatttagtgtgattgatagtatctagaatggcaggtggtgcataaaagttaaagagaggggaaagattacttagtttggttatacagttataaacaccatgcagtgtattcggtggactgtgctatttctgtttatcctttgggnnnnnnnnnnnnnnnnnnnnnnngccttcacagtgagactgcaaatgattgttctcataacgtatattattaataaatgtggtcctataattt

SEQ ID NO: 74151 - DNA, 516 bp, Homo Sapiens
tgcggccgcccggggacaagaaggagccggcggcagccccggactcggtgcggaagatgccgcagctgacggcaagcgccatagtcagcccgcacggcgacgagagcccccggggcagcggcggaggcggccccgcgtcggcctctgggcccgccgcctctgagagcaggcccttgccgcgcgtgcatcgggcgcgcggggcaccccggcagcagggccccgggaccggcacccgcgacgttttccagaagagccgtttcgccccgcgcggcgccccgcactttcgtttcatcatagccgggcggcaggctgggaggcgctgccgcgggcgccttttccagactgccttccccgcgccgtacgggcctagcccggcctcgcgctacgtgcagaaactgcccatgatcggccgtaccagccgccccgcccgccggtgggcgctctcggactactcgctgtacttgccgctctgagtcagtggccccttcgttccttgtaaataaatcccgcccccgg

SEQ ID NO: 74152 - DNA, 1674 bp, Homo Sapiens
  misc_feature (37)..(37): n is a, c, g, or t
  misc_feature (81)..(81): n is a, c, g, or t
  misc_feature (89)..(89): n is a, c, g, or t
  misc_feature (118)..(118): n is a, c, g, or t
  misc_feature (130)..(130): n is a, c, g, or t
  misc_feature (150)..(150): n is a, c, g, or t
  misc_feature (217)..(217): n is a, c, g, or t
  misc_feature (243)..(243): n is a, c, g, or t
tcatgtctgaggaagtaccactcaattgtcaccgttngccagtgtgggttaagtccactgtgctgcccgtgcgctgtcagnactgctgnaagctctggatgtgacaatgcaaggcccncaagacgctganctggcaccgtaccaataccncagcaggcgtcacacacccttccttttctacaaggactccattggatctcaaagaacactggacctntgggttctttctggggggatatttcntaaggcatgtggcctttatctcaacggaagccccctcttcctccctgggggccccaggatgggggggccacacgctgcacctaaagcctaccctattctatccatctcctggtgttctgcagtcatctcccctcctggcgagttctctttggaaatagcatgacaggctgttcagccgggagggtggtgggcccagaccactgtctccacccaccttgacgtttcttctttctagagcagttggccaagcagaaaaaaaagtgtctcaaaggagctttctcaatgtcttcccacaaatggtcccaattaagaaattccatacttctctcagatgggaacagtaaagaaagcagaatcaactgcccctgacttaactttaacttttgaaaagaccaagacttttgtctgatcaagtggttttacagctaccacccttaggggtaattggtaattacctggagaagaatggctttcaatacccttttaagtttaaaatgtgtatttttcaaggcatttattgccatattaaaatctgatgtaacaaggtggggacgtgtgtcctttggtactatggtgtgttgtatctttgtaagagcaaaagcctcagaaagggattgctttgcattactgtccccttgatataaaaaatctttagggaatgagagttccttctcacttagaatctgaagggaattaaaaagaagatgaatggtctggcaatattctgtaactattgggtgaatatggtggaaaataatttagtggatggaatatcagaagtatatctgtacagatcaagaaaaaaagggagaataaaattcctatctcatattatgcatgtgacccatggaatctcataactgaaatgacttgaaggatgaaaattttggggatacaagattggtgaactaaaatgctgacagagaggtttccagagctaactcgtgcctggggcggccttacaataagcagatgcctgaaagaagtcggccacatccgccgtctgctaatgcccatcacccttcaagcccagtttaaagacctgtcatatttaattgtatttatttgatgcttacaagatgatgtgatactgtagcctaaagcaaatgacacatagcattgcttataaagttggtaaccctgctatattatattgcaaacaaatcgtaacttggagactatgtttaagggactcaactgtaattatgggagcatcagtatgcaaatagtggttggcttctgccatcagccaaaagatgacattcagggaaaatggagaggctgcctgcaccgtttttttatgttaaatgaaagaaaggtgaaatagctacttctcgtcttcttgaaaaatttggttcttattctgtatatgacttccttacagtgctacattaacaggatatttcattacatgcatctggtatcaaaaaa

SEQ ID NO: 74153 - DNA, 982 bp, Homo Sapiens
  misc_feature (841)..(890): n is a, c, g, or t
gaaaagacagagtagagactccccgagggcgatgccagtccctccactccagaggagaacgaaaccacgacaaccagcgccttcaccatccaggagtactttgccaagcggatggcagcactgaagaacaagccccaggttccagttccagggtctgacatttctgagacgcaggtggaacgtaaaagggggaagaaaagaaataaagaggccacaggtaaagatgtggaaagttacctccagcctaaggccaagaggcacacggagggaaagcccgagagggccgaggcccaggagcgagtggccaagaagaagagcgcgccagcagaagagcagctcagaggcccctgctgggaccagagttccaaggcctctgctcaggatgcaggggaccatgtgcagccgcctgagggccgggacttcaccctgaagcccaaaaagaggagagggaagaaaaagctgcaaaaaccagtagagatagcagaggacgctacactagaagaaacgctagtgaaaaagaagaagaagaaagattccaaatgaatccttcccagccggggccttccgaccactcagctgtcagggcactgcgggggcagacacctctggcctgaagtcacagcagagttcaccccagagcgcctgggcgcatcttgtggcatgcccatgggctgccgagtcctgccctctcgccacatttcccccaagttacattcccaggaggacctttttaatgttctcaatcgtggctctcagacacaaataaatttttttgtaaactctgagcccttcagcaagagagtttaattataatcattacaaatacatgcattcatgtaannnnnnnnnnnnnnnnnnnnnnnnnnnnnnnnnnnnnnnnnnnnnnnnnncactatctccgtttgctctcggttcccttcaataacaatgaatggtgctttcttctgaaagactcagcctaattaaaggattaagaggcaat

SEQ ID NO: 74154 - DNA, 1272 bp, Homo Sapiens
  misc_feature (1168)..(1194): n is a, c, g, or t
ggcaatctccaaaatgaatgacttcatgaggatgcagatactgaaggaagggagtcattttccaggaccgttcatgaccagcataggcccagctgagagccatccccacactcctcagatgcctccatcaacaccaagcagcagtttcttaaccacgaaaagtgaagacacaatctccaaaatgaatgacttcatgaggatgcagatactgaaggaagggagtcattttccaggaccgttcatgaccagcataggcccagctgagagccatccccacactcctcagatgcctccatcaacaccaagcagcagtttcttaaccacgttgaaaccaagactgaagactgaacctgaagaagtttccatagaagacagtgcccagagtgacctcaaagaagtgatggtgctgaacgcaacagaatcatttgtatatgagcccaaagagcagaagaaaatgtttcatgccacagtggcaactgagaatgaagtcttccgagtgaaggtttttaatattgacctaaaggagaagttcaccccaaagaagatcattgccatagcaaattatgtttgccgcaatgggttcctggaggtatatcctttcacacttgtggctgatgtgaatgctgaccgaaacatggagatcccaaaaggattgattagaagtgccagcgtaactcctaaaatcaatcagctttgctcacaaactaaaggaagttttgtgaatggggtgtttgaggtacataagaaaaatgtaaggggtgaattcacttattatgaaatacaagataatacagggaagatggaagtggtggtgcatggacgactgaccacaatcaactgtgaggaaggagataaactgaaactcacctgctttgaattggcaccgaaaagtgggaataccggggagttgagatctgtaattcatagtcacatcaaggtcatcaagaccaggaaaaacaagaaagacatactcaatcctgattcaagtatggaaacttcaccagactttttcttctaaaatctggatgtcattgacgataatgtttatggagataaggtctaagtgcctaaaaaaatgtacatatacctggttgaaatacaacactatacatacacaccaccatatatactagctgttaatcctatggaatggggtattgggagtgcnnnnnnnnnnnnnnnnnnnnnnnnnnnaataaaatggcatattttgcatctacaacttctataatttgaaaaaataaataaacattatcttttttgtgaaagaaa

SEQ ID NO: 74155 - DNA, 728 bp, Homo Sapiens
caggagtttagcactgcttcggatggacccggccatcggggagttcattttggtggacaaggatgtgaagataaaaaagaaaggtaaaatctacagccttaacgagggctacgccaaggactttgaccctgccgtcactgagtacatccagaggaagaagttccccccagataattcagctccttatggggcccggtatgtgggctccatggtggctgatgttcatcgcactctggtctacggagggatatttctgtaccccgctaacaagaagagccccaatggaaagctgagactgctgtacgaatgcaaccccatggcctacgtcatggagaaggctgggggaatggccaccactgggaaggaggccgtgttagacgtcattcccacagacattcaccagagggcgccggtgatcttggggtcccccgacgacgtgctcgagttcctgaaggtgtatgagaagcactctgcccagtgagcacctgccctgcctgcatccggagaattgcctctacctggaccttttgtctcacacagcagtaccctgacctgctgtgcaccttacattcctagagagcagaaataaaaagcatgactatttccaccatcaaatgctgtagaatgcttggcactccctaaccaaatgctgtctccataatgccactggtgttaagatatattttgagtggatggaggagaaataaacttattcctccttaaaaaaa

SEQ ID NO: 74156 - DNA, 1092 bp, Homo Sapiens
aaggtagcgaggcctgggtggcgcctcagcacgagggattcacccgccggttcctggcctggcccagttgcaccacgagcgctgcggacactcggggcggcagtcggtctgtcagtcctcccgccaggtcccgcggcccgcacctgccgcccgcacctgcagctccgcacctgcggccagtgcctactgccctctcttgccgcccgcacctgcagccccgcacctgccgcttgcacctgcagccccgcgctctacccggttcaagcatggctgaccaggcgcccttcgacacggacgtcaacaccctgacccgcttcgtcatggaggagggcaggaaggcccgcggcacgggcgagttgacccagctgctcaactcgctctgcacagcagtcaaagccatctcttcggcggtgcgcaaggcgggcatcgcgcacctctatggcattgctggttctaccaacgtgacaggtgatcaagttaagaagctggacgtcctctccaacgacctggttatgaacatgttaaagtcatcctttgccacgtgtgttctcgtgtcagaagaagataaacacgccatcatagtggaaccggagaaaaggggtaaatatgtggtctgttttgatccccttgatggatcttccaacatcgattgccttgtgtccgttggaaccatttttggcatctatagaaagaaatcaactgatgagccttctgagaaggatgctctgcaaccaggccggaacctggtggcagccggctacgcactgtatggcagtgccaccatgctggtccttgccatggactgtggggtcaactgcttcatgctgtgacccggccatcggggagttcattttggtggacaaggatgtgaagataaaaaagaaaggtaaaatctacagccttaacgagggctacgctaaggactttgaccctgccgtcactgagtacatccagaggaagaagttccccccagataattcagctccttattggggccccggtatgtgggcctccatggttggcttgatgttcatcgcactctggtctaccgacgggatatttctgtaccccgactaaccagaagagcccaac

SEQ ID NO: 74157 - DNA, 347 bp, Homo Sapiens
cccacttggttgcagagcatccttctcagaaggctcatcagttgatttctttctatagatgccaaaaatggttccaacggacacaaggcaatcgatgttggaagatccatcaaggggatcaaaacagaccacatatttacccctttggcagagcctaggaggcccagatgaagaacctggggccactctgccagaaaagagcaggccccagggttgtgaccacgtctctgaagggctggcctggctgggtggcaatctcggagaatgccaggaaggagactccaggaatttccaacagtaggagcacagaagatggcaacgccatgtattccctcacgtagccatct

SEQ ID NO: 74158 - DNA, 688 bp, Homo Sapiens
  misc_feature (33)..(33): n is a, c, g, or t
ccaccaaacagagatccagatcagaaggtgccntacatcttccggacaaccagtgggtgggctttgatgatgtggagagcttcaaaaccaaggtcagctatctgaagcagaagggactgggcggggccatggtctgggcactggacttagatgactttgccggcttctcctgcaaccagggccgataccccctcatccagacgctacggcaggaactgagtcttccatacttgccttcaggcaccccagagcttgaagttccaaaaccaggtcagccctctgaacctgagcatggccccagccctggacaagacacgttctgccagggcaaagctgatgggctctatcccaatcctcgggaacggtccagcttctacagctgtgcagcggggcggctgttccagcaaagctgcccgacaggcctggtgttcagcaactcctgcaaatgctgcacctggaattgagtcgctaaagcccctccagtcccagctttgaggctgggcccaggatcactctacagcctgcctcctgggttttccctgggggccgcaatctggctcctgcaggcctttctgtggtcttcctttatccaggctttctgctctcagccttgccttccttttttctgggtctcctgggctgcccctttcacttgcaaaataaatctttggtttgtgcccctcttccc

SEQ ID NO: 74159 - DNA, 1974 bp, Homo Sapiens
  misc_feature (1511)..(1597): n is a, c, g, or t
  misc_feature (1827)..(1836): n is a, c, g, or t
gctggaccggtccggaattcccgggatatcgtcgacccacgcgtccgagcagatgaggaagtggcaggcaggcaggctggccccggggacttctctctggccctgctccctccgagcgctccgccgttgcccgcctggcccctacggagtccttagccaggatggaggctgttgtgaacttgtaccaagaggtgatgaagcacgcagatccccggatccagggctaccctctgatggggtcccccttgctaatgacctccattctcctgacctacgtgtacttcgttctctcacttgggcctcgcatcatggctaatcggaagcccttccagctccgtggcttcatgattgtctacaacttctcactggtggcactctccctctacattgtctatgagttcctgatgtcgggctggctgagcacctatacctggcgctgtgaccctgtggactattccaacagccctgaggcacttaggatggttcgggtggcctggctcttcctcttctccaagttcattgagctgatggacacagtgatctttattctccgaaagaaagacgggcaggtgaccttcctacatgtcttccatcactctgtgcttccctggagctggtggtggggggtaaagattgccccgggaggaatgggctctttccatgccatgataaactcttccgtgcatgtcataatgtacctgtactacggattatctgcctttggccctgtggcacaaccctacctttggtggaaaaagcacatgacagccattcagctgatccagtttgtcctggtctcactgcacatctcccagtactactttatgtccagctgtaactaccagtacccagtcattattcacctcatctggatgtatggcaccatcttcttcatgctgttctccaacttctggtatcactcttataccaagggcaagcggctgccccgtgcacttcagcaaaatggagctccaggtattgccaaggtcaaggccaactgagaagcatggcctagataggcgcccacctaagtgcctcaggactgcaccttagggcagtgtccgtcagtgccctctccacctacacctgtgaccaaggcttatgtggtcaggactgagcaggggactggccctcccctccccacagctgctctacagggaccacggctttggttcctcacccacttcccccgggcagctccagggatgtggcctcattgctgtctgccactccagagctgggggctaaaagggctgtacagttatttccccctccctgccttaaaacttgggagaggagcactcagggctggccccacaaagggtctcgtggcctttttcctcacacagaagaggtcagcaataatgtcactgtggacccagtctcactcctccaccccacacactgaagcagtagcttctgggccaaaggtcagggtgggcgggggcctgggaatacagcctgtggaggctgcttactcaacttgtgtcttaattaaaagtgacagaggnnnnnnnnnnnnnnnnnnnnnnnnnnnnnnnnnnnnnnnnnnnnnnnnnnnnnnnnnnnnnnnnnnnnnnnnnnnnnnnnnnnnnnngagggggggcgccggcggcaaaagagatccccccgggggggcgcccaggtttacggcgcggcccccgcgttctttgggcccacggggggccccccataagaggggggctgctatattaaacgccagagcaggcgggcccggagcgctacaaacccccgtcgggccgacggggcaaccaatgtgcgctactgcggcacaccctggggcggaacgaaccccaatactccgcnnnnnnnnnncggcaacatcggcggggacacacacccccacaaacgaatcttcaagcccctcaggggcacacaatacaccctcccacggctgcaaccgcggcggtcacccccagcgccgcaattgctgtgcgggcaggaacgactgga

SEQ ID NO: 74160 - DNA, 636 bp, Homo Sapiens
aacactagtggtattgtcagatgccgttagtatctgagatgtacttacggcagggttctaagagctctgaaagaagcgctctgttagatgcagactggcagcatcctccttgataaaagcagaaaagcaaagaggtaattggagttgaatcaagttaatagggaaggttggtagtaaatgctgttagtgtgacatgattctgaaacccagagctcagaactaactgtgagatgtaccatgaactaacaattctttgaaaggacctgcagaagcatttttaatacctcattctgtctatgcaagatgaaaatccatggagttttttcttggcttttgtaccaaatttaggggtcttgcatgtcagcaagtgatatatattgtttataaatgcaagctatttctggaggggaaaaatgtgtgtggctcttacgttttctgggaattttgtaacaagttacacgcacaagtgttagaaactttggcataactcaatttggagtattttttaaatgctgtatctttaaagaaaagtaaaattgtcttaaatctaattgacacttctgtaatgagaggcaaccttataactctggagttgtagtttgacagaaccatcagtaaagacataagcaaataaaa

SEQ ID NO: 74161 - DNA, 1092 bp, Homo Sapiens
  misc_feature (646)..(795): n is a, c, g, or t
gggtcttcgctgatgtccccacctgcttccttagatatttggtaaccatgtctggcctcgcttttccgtggggctctgggcccctcagcctcttacgctgttccgtgccatgcatcctgctctttcttgccttcctcggctgcttcacccttgcacccccctgccgtggcaaacgcggggttcacgagtcccgtgcatcatggacgctttctgttgcccgcattgatgcacgcatgtggtggccctctgatcttgacaagccttctgctctgcccaggccgtcccaaccaggaatctccgaggctcccaggggccccgcttctccgtacatccccagctcctaggtctcagagtaacttccccacctggtggtcttacccgcagccagcagagctttaggcttccaggacaccctgccttcaaagccaacttgagtggtgaggaaagtgggcaggggcagactgcaggtggccgtcgttgcctggcatcccggccagcgtggcggggactcacaaaggacagctgtttagggtcttctcccctcacccatgctttcatcatcccctccgcacagcctccccgtccaggccttctaaccacagcctacccagggcctgccgcattcctgcactcagaagtctgcagnnnnnnnnnnnnnnnnnnnnnnnnnnnnnnnnnnnnnnnnnnnnnnnnnnnnnnnnnnnnnnnnnnnnnnnnnnnnnnnnnnnnnnnnnnnnnnnnnnnnnnnnnnnnnnnnnnnnnnnnnnnnnnnnnnnnnnnnnnnnnnnnnnnnnngggcgagagtgcccagggctgatatatattggaaatatcacccctgaagccatcgctggcccccacctcctgtggactgatgccccagggattcccaccccacttctgcaaccccaggtatccttcattatccaccccatcccagactcccaccccagggattgcccgtgaagactttggcctagcaaattgtgttggttatgtgagtgttgttttaatcagagatgtacatgattgccaatctgcatttcttaccagtgtgaccacactgttacgatgcaattctagccaaaaaaa

SEQ ID NO: 74162 - DNA, 515 bp, Homo Sapiens
gggtgccaagaggccttcctcactttcctctgtgtgatgtgtatctgcagcctgatcggtgccatggcacagacaccctcagtcatcatcctcatcaggacagtcagccctgaactcaagtcttacgctttgggagttctttttctcctccttcgtttgttgggcttcatccctccacccctcatcttcggggctggcatcgactccacctgcctgttctggagcacgttctgtggggagcaaggcgcctgcgtcctctacgacaatgtggtctaccgatacctgtatgtcagcatcgccatcgcgctcaaatccttcgccttcatcctgtacaccaccacgtggcagtgcctgaggaaaaactataaacgctacatcaaaaaccacgagggcgggctgagcaccagtgagttctttgcctctactctgaccctagacaacctggggagggaccctgtgcccgcaaaccagacacataggacaaagtttatctataacctggaagaccatgagtg

SEQ ID NO: 74163 - DNA, 901 bp, Homo Sapiens
  misc_feature (806)..(850): n is a, c, g, or t
cggcaccatctgggtcgactgttcccgcacgctttgtagcccagggcgggcgtgttgtgttactccggtctccttttctaaggcgtcccgtcggtcgttctccctcctttggccgcttgtgattatcacttcttcccgaagtgtccctccggcccccgaccgggtcccggaccgagcatcctcatttggcttccccgatcctccgctcctcccgctggcattccacgtctgctacactcttttcgccagcctccagggactagagagaacctctgtctccctcggcggcacaccccctttcagagggccactgggttaggacctgaggacctcacttggcccctgcaaggcccgcttttcagggaccagtccaccaccatctccacgttgagtgaagctcatcccaagcaaaggagccccagtctcccgagcgggtaggagagtttcttgcagaacgtgttttttctttacacacattatggctgtaaatacctggctcctgccagcagctgagctgggtagcctctctgagctggtttcctgccccaaaggctggcttccaccatccaggtgcaccactgaagtgaggacacaccggagccaggcgcctgctcatgttgaagtgcgctgttcacacccgctccggagagcaccccagcagcatccagaagcagctgcagtgttgctgccaccaccctcctgtctgcctcttcaaagtctcctgtgacattttttctttggtcagaagccaggaactggtgtcattccttaaaagatacgtgccggggccaggtgtggtggctcannnnnnnnnnnnnnnnnnnnnnnnnnnnnnnnnnnnnnnnnnnnnaaagtcaggacgagaccatcctggctaacacggtgaaaccctgtctctact

SEQ ID NO: 74164 - DNA, 609 bp, Homo Sapiens
aacaaacatattatccgaattttttttctgcaagccactgatagtctctgctaactagcttaattgacctttttacaaagtttgatccccaagcatcctcaactaaatcattgaatacttcaatcaggatattatctgctttactttacaaataaaaccaaatcttttgtcaacaggatgaaacccatcttaaaggaaagaaaaggaattggtgtgaagagagaagttagagaagggaaatgcagtgaattactatctgtgtccatcaggaagtttgtcctgttaaccaaatggttactgcactaccagggttactggtttattttccagggagctgataaagcaggagaactgttgctgcatgttttctatttggactccgtcacaatatggtaggatatccctcaccaactcccgacactcagcagacttgtttttatatttttttctttcttgtacattcttactacgtattttttgacttaagaatgacatctttagacgcatttcagagccaatgatgatatttgctttagataattattatattattataaatatagccatattattttgaattcaaataaatttctatactggtaaaaaaaa

SEQ ID NO: 74165 - DNA, 996 bp, Homo Sapiens
  misc_feature (100)..(100): n is a, c, g, or t
  misc_feature (148)..(148): n is a, c, g, or t
  misc_feature (155)..(155): n is a, c, g, or t
cctcccccgccagtttggtacgtgatcaccacctccgtgagtgtttccagtccgctgatgccgacacagtatgtccccacctgtttgaaagattcacgtngacatctaacagctcctacatccggcgagagatgcatccttcattgtntactgcntgagcccatgggccaaccatgcagtgcacgctcttagggtgaaaggaggagtgggcacgcctgggcatggccacgtactctctgagccgctttgctcacagcatcatcagcctcacgcggcgctgactgcatccctgctgcagaagcaggcgtgagtaggggtcagcgtgcaacgtgggagctggaggtcggggtgtgatctctgggttgttagacacatccctgtggttgaaacatgcacgtgaaatgacagtgagatgcctgtgtcccctccgggacatgagtgcacagcccacaacgcgagctcccgggcagcggctccatcgtgcctgtggattgtcttctaggaatggaccacttcttgtacggcctctcggatgagatgaagcaggcccacagagagcagctctttgctgtcagccacgacaagctcctggccgtgagcgatagatacctcggcactgggaagagcacacacggcctggccatcctcggacccgagaacccgaaaattgccaaggacccatcctggatcatccgatgagcagccgtggcgctcgactgcacaggagcccgagacaatacacctccgagctgaatatgaaaagtcagaaatgctactgctttttccaagaatattatgtcattgagtgtcgccaaagcccttgactggcgagtcaaaaactcagatctatcttaagagtgaccaggaagaggttcattgaaataatcatgcatgaagcgccaaagatgcaccatgtagaattttcactttgtactggcaggctcgttttacctcattctagaatatttaagaatctaaaaataaagggcaactctg

SEQ ID NO: 74166 - DNA, 3735 bp, Homo Sapiens
gtccaccacaacccgcgacccccggttcagttgtcagatagccggcttttaacgacgggcagtaactataacggtcctaaggtagcgaggctgggtggcgaattcggcacgaggcgcaatgtggcgctgcggcgggcggcggggcctgtgtgtgctgaggcggctgagcggcgtgacatgcacaccacagagcgtggcgatggaacagtaaccgggcttgtgagagggctctgcagtataaactaggagacaagatccatggattcaccgtaaaccaggtgacatctgttcccgagctgttcctgactgcagtgaagctcacccatgatgacacaggagccaggtatttacacctggccagagaagacacgaataatctgttcagcgtgcagttccgtaccactcccatggacagtactggtgttcctcacattcttgagcataccgtcctttgtgggtctcagaaatatccgtgcagagaccctttcttcaaaatgttgaaccggtccctctccacgttcatgaacgccttcacagctagtgattatactctgtatccattttccacacaaaatcccaaggactttcagaatctcctctcggtgtatttggatgccacctttttcccatgtttacgcgagctggatttctggcaggaaggatggcggctggaacatgagaatccgagcgacccccagacgcccttggtctttaaaggagtcgtctttaatgagatgaagggagcgtttacagacaatgagaggatattctcccagcaccttcagaacagacttcttcctgaccacacgtactcagtggtctccgggggtgacccactgtgcatcccggagcttacatgggagcagcttaagcagtttcatgccactcactatcacccaagcaatgctaggttcttcacgtacggtaattttccattagaacagcatctgaaacaaattcacgaggaagcactgagcaaattccagaaaattgaaccaagcaccgtggtgccagctcagacaccctgggacaagcctagggaattccagataacatgtggccccggattcatttgctacagatcccctctaaacaaacaaccatcagcgttagcttcctcttaccggacatcacccgacacatttgaagccttcacattaagtcttctgtcttcactcctgacttctgggccaattctcccttttacaaagccttgattgaatctggccttggcacagacttttctcctgatgtgggatataatggctacacgagggaggcctacttttagggtcggcctccaagggattggcggagaaagacattgagaccgtcagaagcctcatagacagaacgattgatgaagtagttgagaaagggatttgaaaatgatcgaaattggaggctttacttcataaaattgaaatacagatgaaacatcagtctaccagctttgggctgatgctgacatcatacatagcttcttgctggaaccatgatggggaccctgtggagctcttgaagttgggaaatcagttagctaaattcagacagtgcctgcaggaaaatccaaaatttttgcaagaaaaagtaaaacagtattttaagaataaccagcataagctgactttatcgatgaggccagatgacaagtatcacgagaagcaggcacaggtggaagccacgaagctcaagcagaaggtcgaggctctgtcccccggagacaggcagcagatctacgagaaaggtctagaattacggagtcaacaaagcaaacctcaagatgcctcttgtctgccagcgttgaaagtttccgatattgaacccaccatacctgtcacagagttggacgtggtcctgacagctggagatatccctgttcagtactgcgcccagcccaccaatggcatggtgtatttccgggccttctccagcctgaacacactccccgaggagctgaggccctatgtgcccctcttctgcagcgtcctcaccaagctgggctgcgaccttcttgactaccgggagcaggctcagcagatagaattgaagaccggagggatgagtgcttctccccacgtgctccccgacgactcacacatggacacctacgagcagggtgtgcttttctcctctctctgcctggatcgaaacctgccagacatgatgcagctatggagtgaaatatttaacaacccgtgctttgaagaagaggagcacttcaaggtgctggtgaagatgaccgcccaggagctcgccaatggaattcctgactctgggcacctgtacgcatccatcagggcaggccggaccctcacgcccgcaggggacctgcaggagaccttcagcgggatggatcaggtgcggctgatgaagaggattgcagaaatgacagatatcaaacccatcctgaggaagctcccacgtatcaagaaacacttgttaaatggtgataatatgaggtgttcagtgaatgcgactcctcagcagatgcctcagacagaaaaagcggtcgaagacttccttagaagcatcggtcggagtaaaaaggaacggaggcctgtgcgcccacacacggtcgagaaacctgtgcccagcagctctggtggagatgcccacgttccccatggctcccaggtcattaggaagctggtcatggaacccaccttcaagccctggcagatgaagactcacttcctgatgcccttcccggtgaattacgtgggtgaatgcatccgaactgtcccctacacggacccagatcatgccagtcttaaaatccttgcacgtttgatgactgccaaattcttgcatacagaaattcgagaaaaaggcggtgcttatggtggaggcgcaaaactcagccacaatgggattttcaccctttactcttacagggacccaaatacaatagagacgctccagtcttttgggaaggctgtcgactgggctaagtctggaaaattcacacagcaagacatcgacgaagccaaactttctgtcttctcaaccgtagatgctcctgtcgctccttcagacaaaggaatggaccacttcttgtacggcctctcggatgagatgaagcaggcccacagagagcagctctttgctgtcagccacgacaagctcctggccgtgagcgataggtacctcggcactgggaagagcacacacggcctggccatcctcggacccgagaacccgaaaattgccaaggacccatcctggatcatccaatgagcagccgtggcgctcgactgcacaggagcccgagacaatacacctccgagctgaatatgaaaagtcagaaatgctactgctttttccaagaatattatgtcattgagtgtcgccaaagcccttgactggcgagtcaaaaactcagatctatcttaagagtgaccaggaagaggttcattgaaataatcatgcatgaagcgccaaagatgcaccatgtagaattttcactttgtactggcaggctcgttttacctcattctagaatatttaagaatctaaaaataaaggggcaacttctgactttgaaaaacggcggagcgaacggcccataaaagccttggcggccgccctcggcccccgaaaaagctttccaaaaccaattggggttggggcccgggggccccagaaggtcaagagaacggggccccttacctggttgcctaagggagaaccccggggcaataaacaaagggcttgggatttccccaccccaat

SEQ ID NO: 74167 - DNA, 1445 bp, Homo Sapiens
gaggcctgggtggcgaattcggcacgagggtcaaagccctgcgtccttcggcccccagagcggagaagcgcgcaaggcaccggtggcagcggcgacggcagctgcgacagcaacccctgctgggccgaaactgggcagagcggagcagacgtctgaagcagcgcgagtgaggcgcgagggtagcgcccgcgcccgggaagacccctcggcgcgaaccggcagcccagccccgggtcccggttcccaaggccccgcctctagggcctggggactaatcggattgagagcgcgccggcccgggccgcgaactcgccaattgcggagggcggtggccaccgcccaatccggagcagacaggtgcgaggtccggaaggcggaggccaatcggcggcggttgcgacctgctggggcaggtctcggccaataaggaggctcgagtgacatcttcgcgcaccaatcgggagtgagggagcattcgtgcccgctcgcccttccggccagacctctatttaccaggggcgtgcagcccgcttgccaatcagagcgcggctgagcggccccgcagccaacccccgaggagcggccggctggcgtccgccgcgcccaggagttggggatgtcctacaaacccatcgcccctgctcccagcagcacccctggctccagcacccctgggccgggcaccccggtccctacaggaagcgtcccgtcgccgtcgggctcagtgccaggagccggcgctcctttcagaccgctgtttaacgactttggaccgccttccatgggctacgtgcaggcgatgaagccacccggcgcccagggctcccagagcacctacacggacctgctgtcagtcatagaggagatgggcaaagagatccggcctacctatgctggcagcaagagcgccatggagcgcctgaagagaggtatcatccatgcccgggccctagtcagagagtgcctggcagagacagagcggaacgcccgcacgtaacaggaagcgcctcggcctcagcgtctggacctatccggccactgcagagcacccgcttctccctggccttcatcccgagttgcactaaccatcctgggcttcctgtcctgtgtcccttggtgggtcccctccaggaaccaaggagtggccctccaggtggcagcactaaggacacccccccacaacaagagttagcagcgaggtccccatgagtcccacccatgacctgccgacagtgttgcccaccggaacttttgtggcccctaccgctcagcccttcccagcacttctcccactttgtcccgagcctccttctcccccagcaggggcacaggcctggcacctccctgccttgtgtcctgagccatagtgactcttttatctgtgtgtcttttgctaaatatgccctttttatattaataaaagatgatttggagttgtgctctca

SEQ ID NO: 74168 - DNA, 1373 bp, Homo Sapiens
  misc_feature (738)..(803): n is a, c, g, or t
gttcaaagccctgcgtcttcggcccccagagcggagaagcgcgcaaggcaccggtggcagcggcgacggcagctgcgacagcaacccctgctgggccgaaactgggcagagcggagcagacgtctgaagcagcgcgagtgaggcgcgagggtagcgcccgcgcccgggaagacccctcggcgcgaaccggcagcccagccccgggtcccggttcccaaggccccgcctctagggcctggggactaatcggattgagagcgcgccggcccgggccgcgaactcgccaattgcggagggcggtggccaccgcccaatccggagcagacaggtgcgaggtccggaaggcggaggccaatcggcggcggttgcgacctgctggggcaggtctcggccaataaggaggctcgagtgacatcttcgcgcaccaatcgggagtgagggagcattcgtgcccgctcgcccttccggccagacctctatttaccaggggcgtgcagcccgcttgccaatcagagcgcggctgagcggccccgcagccaacccccgaggagcggccggctggcgtccgccgcgcccaggagtaggggatgtcctacaaacccatcgcccctggctcccagcagcacccctgtgctccagcacccctgggccgggcaccccggtccctacaggtgaggatccagctccacccctgctcgcctgccgggcggtcgaggtctcgaagagaagacggcctgnnnnnnnnnnnnnnnnnnnnnnnnnnnnnnnnnnnnnnnnnnnnnnnnnnnnnnnnnnnnnnnnnncgtggtcacgtaagggcttgtaggtggagcgcagtgggagggatttgtccctgaagttgatcagcatggaatgaagcatcctttggagggaatcgggcgaacccggtcctgggcttggaaaagctgggaggcggcgtccctgccccgcgctgacctcttactcgcgcctgttgctgcaggaagcgtcccgtcgccgtcgggctcagtaccaggagccggcgctcctttcagaccgctgtttaacgactttggaccgccttccatgggctacgtgcaggcgatgaagccacccggcgcccagggctcccagagcacctacacggacctgctgtcagtcatagaggagatgggcaaatgagatccggcctacctatgctggcagcaagagcgccatggagcgcctgaagagaggtaagtgaggacaggccgccctgctcaggaaaaccgacactggactatccttcatgagggaaggaaggacatctggaggtcacctgagccaagcctaacaggatgtccagtatttattaccagagcaggtgtaatgaatcgaattcgaactcgagtcca

SEQ ID NO: 74169 - DNA, 1264 bp, Homo Sapiens
  misc_feature (227)..(349): n is a, c, g, or t
  misc_feature (1186)..(1186): n is a, c, g, or t
  misc_feature (1236)..(1236): n is a, c, g, or t
gagtggcatgcgcggggcccaattgaatccgagctcgttatggatccgcttgatagaaccagttaaatcatcgggggttcttttggttaggttcataggcgcccggtttctccccggggtttttatatggtaggaaatcaagcatgcatactttatcaggtggtccctgggaacacatagtagctagttccatttctttcttgggatcttgtgtcgaatgagaaagnnnnnnnnnnnnnnnnnnnnnnnnnnnnnnnnnnnnnnnnnnnnnnnnnnnnnnnnnnnnnnnnnnnnnnnnnnnnnnnnnnnnnnnnnnnnnnnnnnnnnnnnnnnnnnnnnnnnnnnnnnnactaaagttcagaaatttctgtaagacaagtacattaatgaaatgtttccaaagaaatactgaacaatatatactctagtttgctgaggttccagctcaagagttcaaacctaattcttgtgcaataaaaatcagcatggatcttagatgatctagaatacactgtgttttgaaatccacagctggtttcatttttaaccattatgaaaaaccagtactcctattccatcaaatgtgttttataagcaataataaattcagatccactgtattatgcaacatacatctttggaaagcaacataaacagtgagatcagatcagtagaaatatacacagttaaaagaaatacacaaagtactgtagttttattaaaaactactacttgagaaagaaatctttccacaaatagcataaaactgtagaatgatgaaaggatttgggaaagctttacaaaagcttaattccaattgtatcttcctgagggtggtggcaaagggtatttccttccttctctgggatatccctgtctccctccacgatcatctcgtctgggtggatacccaccaggcccagctagcatctggtactggtttggctggaaggctgcattctgggtttgcagcatccggttccatgggagcagaggttcagccccaacgcctctgtcaaactttgctgctggaaaaggggaggaggacctcgccaggaatcctggggcctcatatttgacataagttttggaatctgggcttgtcctctcaaaagcggcctgtataagtttccctggtaagtcacaggtggtggtgcagcattgctgtaaatgccagttcctgagnctcttggcatcacatggcccaaagtcctgaaggctgcctgatccaggtgnacaggctccggtcacggttaaagccaag

SEQ ID NO: 74170 - DNA, 1414 bp, Homo Sapiens
  misc_feature (1100)..(1112): n is a, c, g, or t
  misc_feature (1328)..(1361): n is a, c, g, or t
ggggagtcacgcgcgccggacgccacccgacaggaggggaaacggggcagctctcaaaaccctggaggcgcagaccgtccacacgagacagggacgcccgctcggctccgctccgcgctgatcctcaaggtctcgcggtttccccgccgcccacccggacgccgacgaaagccagcgagctcctcagcctcaggcatctgcatctgggaccgacctcctgggctggctgatcaaagaggaagcagcagcaatgtctgctgtggggactgcaactccatacctgcatcatcctggtgatagtcacagtggccgagtgagtttcttgggggcccagcttcctccagaggtggcagcaatggcccggctactaggggacctagacaggagcacgttcagaaagttgctgaagtttgtggtcagcagcctgcagggggaggactgccgagaggctgtgcagcgtcttggggtcagcgccaacctgccggaggagcagctgggtgccctgctggcaggcatgcacacactgctccagcaggccctccgtctgccccccaccagcctgaagcctgacaccttcagggaccagctccaggagctctgcatcccccaagacctggtcggggacttggccagcgtggtatttgggagccagcggcccctccttgattctgtggcccagcagcagggggcctggctgccgcatgttgctgactttcggtggcgggtggatgtagcaatctccaccagtgccctggctcgctccctgcagccgagcgtcctgatgcagctgaagctttcagatgggtcagcataccgctttgaggtccccacagccaagttccaggagctgcggtacagcgtggccctggtcctaaaggagatggcagatctggagaagaggtgtgagcgcagactgcaggactgacccctcacttgaccagtcccattcagatccggcttggacaggcacctgagatggtgccaaagtgcagctgactcttcccacgacagccctgcccttcccatgaggcaggctcttcagtgagtgtttgaacgtaattatgtagttttctgtttaattgaaaaagagagctatgccnnnnnnnnnnnnnggaagtaaagcagctaaaaacatgtttctataggtgagtgttggacctcacaccctccccttccctgtacatttgtctttggtgctggacgtggccatgtgaggccaggttgaggccctttgtagacaacatacagttgctcagcctggccccatgtagccaggtgcttttgtagatcttgtgttttaggttgggcattttcactcttctgccttnnnnnnnnnnnnnnnnnnnnnnnnnnnnnnnnnncggctgaggggaggggaaacattgtaaaataaatcataaaaattaacttgggg

SEQ ID NO: 74171 - DNA, 1237 bp, Homo Sapiens
  misc_feature (1196)..(1196): n is a, c, g, or t
agcacgagggttaagggtggctttagaggctcagtccccgcgacgccgcgctggttggtgctcctgcgccggaggagttctgcgtctcggggtggtgactgggtccagaatggcttcggattcggggaaccaggggaccctctgcacgttggagttcgcggtgcagatgacctgtcagagctgtgtggacgcggtgcgcaaatccctgcaaggggtggcaggtgtccaggatgtggaggtgcacttggaggaccagatggtcttggtacacaccactctacccagccaggaggtgcaggctctcctggaaggcacggggcggcaggcggtactcaagggcatgggcagcggccagttgcagaatctgggggcagcagtggccatcctgggggggcctggcaccgtgcaggggtggtgcgcttcctacagctgacccctgagcgctgcctcatcgagggaactattgacggcctggagcctgggctgcatggactccacgtccatcagtacggggaccttacaaacaactgcaacagctgtgggaatcactttaaccctgatggagcatctcatgggggcccccaggactctgaccggcaccgcggagacctgggcaatgtccgtgctgatgctgacggccgcgccatcttcagaatggaggatgagcagctgaaggtgtgggatgtgattggccgcagcctgattattgatgagggagaagatgacctgggccggggaggccatcccttatccaagatcacagggaactccggggagaggttggcctgtggcatcattgcacgctccgctggccttttccagaaccccaagcagatctgctcttgcgatggcctcaccatctgggaggagcgaggccggcccatcgctggcaagggccgaaaggagtcagcgcagccccctgcccacctttgagcaggacctcaccttggctctgttgctgtcctccagggcgagcactttccacttccagagggggccagagggactttgcctgcccagtctttggagagctcagtacagggcaggagctgctgtggtgttcccttggcaaatgaaagttttattttcgtttgggacttggtgttttgtgcttgtctccatgccccttatgggcttggtgaacatagctctgcttctttcctttgtatcagggcaccccttagcacttggagcanacaacctgaattcagactacacacacactgaagtcccatcc

SEQ ID NO: 74172 - DNA, 900 bp, Homo Sapiens
tcctgcgccggaggagttctgcgtctcggggtggtgactgggtccagaatggcttcggattcggggaaccaggggaccctctgcacgttggagttcgcggtgcagatgacctgtcagagctgtgtggacgcggtgcgcaaatccctgcaaggggtggcaggtgtccaggatgtggaggtgcacttggaggaccagatggtcttggtacacaccactctacccagccaggaggtgcaggctctcctggaaggcacggggcggcaggcggtactcaagggcatgggcagcggccagttgcgtgagtgaccactgtggccttggcccctctcggagggaggtggctcagagctggtacaaatctaatcataggattctcaggctctgggttggagtggctttgaggaaggtgtgaaaattatgtgagactccctgcccttcccgagctgctgaagaggtgtgctgggtgaggtggcaagccagcccaagtgtctaataccttgcagagaatctgggggcagcagtggccatccggggggggcctggcaccgtgcagggggtggtgcgcttcctacagctgacccctgagcgctgcctcagcgaaggaactattgacggcctggagcctgggctgcatggactccacgtcccatcagtacggggaccttacaaacaactgcaacaactgtgggaatcactttaaaccctgatggaacatcctcaggggggccccccagactctgaccggacagggccaagaggaccttgcctgcccagtccttgggggagctcagatcctacgagactggtacccacaaggaagaaatgggtacttttgggaaaacaggaaaaaggcgtccggaatcagggaaatcagaaaaatagcagccttggcacccacgg

SEQ ID NO: 74173 - DNA, 757 bp, Homo Sapiens
  misc_feature (215)..(242): n is a, c, g, or t
tcttgagggttttccatgttgcgtcatcatcaacattttgggggttgtgttggatgggatgatctgttgcagagggagaggcagggaaccctgctccttcgggccccaggttgatcctgtgactgaggctccccctcatgtagcctccccaggcccagggccctgaggcctgctagaatcactgccgctgtgctttcgtggaaatgacagttccnnnnnnnnnnnnnnnnnnnnnnnnnnnnacattagtcattggaccacagccattcaggaactaccccctgccccacaaagaaatgaacagttgtagggagacccagcagcacctttcctccacacaccttcattttgatgttcgggtttttgtgttaagttaatctgtacattctgtttgccattgttacttgtactatacatctgtatatagtgtacggcaaaagagtattaatccactatctctagtgcttgactttaaatcagtacagtacctgtacctgcacggtcacccgctccgtgtgtcgccctatattgagggctcaagctttcccttgttttttgaaaggggtttatgtataaatatattttatgcctttttattacaagtcttgtactcaatgacttttgtcatgacattttgttctacttatactgtaaattatgcattataaagagttcatttaaggaaaattacttggtacaataattattgtaattaagagatgtagcctttattaaaattttatatttttcaaaaaaa

SEQ ID NO: 74174 - DNA, 1143 bp, Homo Sapiens
  misc_feature (622)..(634): n is a, c, g, or t
  misc_feature (958)..(968): n is a, c, g, or t
cagttacacggtgacttttaatagcatacagtgtaactggagttacattattcacagaggccattaagacttctcttattagacaatataactccagttacacggtgacttttaatagcatacagtgatttgatgaaaggacgtcaaacaatgtggcgatgtcgtggaaagttatctttcccgctctttgctgtggtcattgtgtcttgcagaaaggatggccctgatgcagcagcagcgccagctgtaataaaaaataattcacactatcagactagcaaggcactagaactggaaaagaccacagaaaacaaagaatccaaccctttcatcttacaggtgaacaaactgtgatgatgcacatgtatgtgttttgtaagctgtgagcaccgtaacaaaatgtaaatttgccattattaggaagtgctggtggcagtgaagaagcacccaggccacttgactcccagtctggtgccctgtctacaccagacaacacaggagctgggtcagattcccctcagctgcttaacaaagttcctcgaacagaaagtgcttacaaagctgccttctcggatactgaaaggtcgagttttctgaactgcactgattttattgcagttgnnnnnnnnnnnnngctattccaaagatttcaagctgttctgagacatcttctgatggctttacttcctgagaggcaatgtttttactttatgcataattcattgttgccaaggaataaagtgaagaaacagcaccttttaatatataggtctctctggaagagacctaaattagaaagagaaaactgtgacaattttcatattctcattcttaaaaaacactaatcttaactaacaaaagttcttttgagaataagttacacacaatggccacagcagtttgtctttaatagtatagtgcctatactcatgtaatcggttactcactactgcctttnnnnnnnnnnnccagcatatttattgaaaacatgagacaggattatagtgccttaaccgatatattttgtgacttaaaaaatacatttaaaactgctcttctgctctagtaccatgcttagtgcaaatgattatttctatgtacaactgatgcttgttcttattttaataaatttatcagagtgaa

SEQ ID NO: 74175 - DNA, 2613 bp, Homo Sapiens
  misc_feature (2066)..(2108): n is a, c, g, or t
cgccatatcgtcgaccacgcgctctgccctgacaagactcagatgattgtactggttactgaatgggttgacctctctctagtaggtagacgtgcaatggacacatagagaaccagcagaaatccaccaatgtacgtctatcaggcccaccatgtgagcaggaataagagagggcaagtggttggaacaaggggtgggttccgaggatgtaccgtgtggctaacaggtctctctggtgctggaaaaacaacgataagttttgccctggaggagtaccttgtctcccatgccatcccttgttactccctggatggggacaatgtccgtcatggccttaacagaaatctcggattctctcctggggacagagaggaaaatatccgccggattgctgaggtggctaagctgtttgctgatgctggtctggtctgcattaccagctttatttctccattcgcaaaggatcgtgagaatgcccgcaaaatacatgaatcagcagggctgccattctttgaaatatttgtagatgcacctctaaatatttgtgaaagcagagacgtaaaaggcctctataaaagggccagagctggggagattaaaggatttacaggtattgattctgattatgagaaacctgaaactcctgagcgtgtgcttaaaaccaatttgtccacagtgagtgactgtgtccaccaggtagtggaacttctgcaagagcagaacattgtaccctatactataatcaaagatatccacgaactctttgtgccggaaaacaaacttgaccacgtccgagctgaggctgaaactctcccttcattatcaattactaagctggatctccagtgggtccaggttttgagcgaaggctgggccactcccctcaaaggtttcatgcgggagaaggagtacttacaggttatgcactttgacaccctgctagatgatggcgtgatcaacatgagcatccccattgtactgcccgtctctgcagaggataagacacggctggaagggtgcagcaagtttgtcctggcacatggtggacggagggtagctatcttacgagacgctgaattctatgaacacagaaaagaggaacgctgttcccgtgtttgggggacaacatgtacaaaacacccccatatcaaaatggtgatggaaagtggggactggctggttggtggagaccttcaggtgctggagaaaataagatggaatgatgggctggaccaataccgtctgacacctctggagctcaaacagaaatgtaaagaaatgaatgctgatgcggtgtttgcattccagttgcgcaatcctgtccacaatggccatgccctgttgatgcaggacactcgccgcaggctcctagagaggggctacaagcacccggtcctcctactacaccctctgggcggctggaccaaggatgacgatgtgcctctagactggcggatgaagcagcacgcggctgtgctcgaggaaggggtcctggatcccaagtcaaccattgttgccatctttccgtctcccatgttatatgctggccccacagaggtccagtggcactgcaggtcccggatgtattgcgggtgccaatttctacattgtggggagggaccctgcaggaatgccccatcctgaaaccaagaaggatctgtatgaacccactcatgggggcaaggtcttgagcatggcccctggcctcacctctgtggaaatcattccattccgagtggctgcctacaacaaagccaaaaaagccatggacttctatgatccagcaaggcacaatgagtttgacttcatctcaggaactcgaatgaggaagctcgcccgggaaggagagaatcccccagatggcttcatggcccccaaagcatggaaggtcctgacagattattacaggtccctggagaagaactaagcctttggctccagagtttctttctgaagtgctctttgattaccttttctatttttatgattagatgctttgtattaaattgcttctcaatgatgcattttaatcttttataatgaagtaaaagttgtgtctataattnnnnnnnnnnnnnnnnnnnnnnnnnnnnnnnnnnnnnnnnnnngtcaaactgaagaccaaatcttagcaggtaaaagcaatattcttatacatttcataataaaattagctctatgtattttctactgcacctgagcaggcaggtcccagatttcttaagggttgtttgaccatgtgtctagttacttgctgaaaagtgaatatattttccagcatgtcttgacaactgtactcttccaatgtcatttatcagttgttaaatatatcagattgtgtcgtcttctgtcgaattgacaacaaaaaattttgtttctactcttaaagaaggtgggtcaatagattttcctgaaattttagttatgtggtaaaaggttaggggatcaatttacggtgggaaccgcggggaaaacatggcaaggggaattttgaaatgggggcttggcaagttggtaaaatgggggaaaagaccaggggtaaaaggaaagggaaggggggaacctgggtatgagaggggagggaaaaaaggagacacgatttgggtggggagg

SEQ ID NO: 74176 - DNA, 1457 bp, Homo Sapiens
  misc_feature (81)..(143): n is a, c, g, or t
  misc_feature (305)..(327): n is a, c, g, or t
aaaatttattttaaaacatgaaacccaagctgaatagaaaccacagaaattacattgacgagatttttagtatttgccaannnnnnnnnnnnnnnnnnnnnnnnnnnnnnnnnnnnnnnnnnnnnnnnnnnnnnnnnnnnnnncacagcgacagtacatacagccatggccctacagaggctggaggagggggaaatgcaaaatgattcaggcctcagttcctggatgttaaatcacactggggtgggggaggtcagatgcccaggccgggggggtaaaccaggaggctgagtcttaaggagatnnnnnnnnnnnnnnnnnnnnnnnacaaatatgaagtggttcagtacacaaccattatggttaaacacaaaacaaagatcccacaggagaggccctggtcccccgcctgcccccttgtctggggttctggggtccagggggctgcctcaccacccctctcagggctggggcagagctggccccagggcaggagcaaatgttgcttggaactcgaattgcatagtgagatgggtgggtgggcaatgggccaggggctgctcccaaccaggcccattcactaccaaccttgccatgacatgtggggggccctggggtagtggatgcctgctggggagcactctcagtgaggtaagcccctgggctcctccctcttgtccccagggccaccctgtcctcccaacgaggctgtgggcctgggggctgcaagaccccctgtgcagggtgagagtgggggctggccatggcagcaggcaccagccagatgccccagtaggtgtggcgaggtcatgggatggagtagttaggaacacggcaccgaaaactcagaacaaaaatacaaccaatggcaggcgctcccctccacctactgaggtggggtttgaaccccttttgattttccccgtttcctttcttcaaccttggtgagtagaaagtcacagacgggcacacacgcacaccacggtcaggagtcccgagacagcacgaggctggaagccctggcctcaccgcctctcacgctatgtccattcacctggcaggcagcctcacggccatggacagcatttgtgcttctgagcggtcgcagggcgtttggcgggcacccacgccagggtgccagggcctctctcgtggccctaggcctggagaactccctggcgggtcaagcccagaggaaagactgggcaggttggctgtggcggggcctccgaggggggctcagaatgtcagccaggcggggcctgaagcagaggcccctccactgaggtttggtcatgcctggggagctcagacgccccggcttggggccccaggcccatggactcccctccccactctgccctcccatattccccctttttggtcccagacaccagcacaaagaaaggagggttcacagcctcgtgccgaattaacaccaggtctcgtactagcta

SEQ ID NO: 74177 - DNA, 142 bp, Homo Sapiens
tttttgctttttaaaatttattttaaaacatgaaacccaagctgaatagaaaccacagaaattacattgacgagatttttagtatttgccaagaaaaaaagcccccaaagaaataaaaatcagcccccaaacccagttctaa

SEQ ID NO: 74178 - DNA, 647 bp, Homo Sapiens
ggcccgcgcgcccgcgcggcggaggagaggtgttaagtgtgatgcttccataatacatttggatgctgtcagctaagttcacttctgaactaaggggttcctccaaatgttggctgaaattcatcccaaggctggtctgcaaagtctgcaattcataatggagctactgtactggctattggaaggaggagattctgaagataaggaggtaaaacctgtttagaaattaaaaatgagttacgatttaaagaaaattcagatgactcattgtgagtgctagttctcttgtaggatgccactggaaatgttgaaatgaaaaatattcagccgttggtctttgaaatttcctgtgatgtgtttcaatctagatgcaaagaacatggaaaaatcaaagtgctcgagtggtttaaatatgttttgggtattcctgtttatagactataatacttttccaattaaaatcctcagttgtcacgcagaagaaggttaagctgtatttgattgccagttttactgaaaatgcttagtattttacagtatcaccaaatatattttgtttagccaaggtataggaaaaataaaataaattgtataggttgacttttttctaaaatgtctttattggattgaatgaatgtttatacctg

SEQ ID NO: 74179 - DNA, 607 bp, Homo Sapiens
  misc_feature (528)..(528): n is a, c, g, or t
catgcacacaaatataatttacaaactataacattagctcgtttatggtgtaccattcagtcacttttagtgtattcagagttgtgcaaacatcattatctaattcaagaagctttgcattaccccaaaaatgaaccctttagctattaccaatcactcacagttccccctaatcctgctagtcctaaaaaactctaacttactccttttccgtagatttgactattttaaatatttcctataaatgcagtcatacagtatgtggcttatccacggatgaaggcaaaaatgacgatttagtcagtctagcattctcagagagcgttataacgcctagtacagtccggggtcctgggtgcgttctgcactgagtcggcttggggcaggaagtcatttaagcgacctccttccacttgccccagcgcctcaccccttcctgctctagactacagttcccaaaaatccttgcggctctagtcaacatctggcccgaagctggcgaccttttcctgtttctcagggaactcnctggggttggccggtaccatggaggaagattgtcttcagcgtgcagggccagcgtcctacggcagtttcactcctgagc

SEQ ID NO: 74180 - DNA, 1477 bp, Homo Sapiens
agacatgaagaaggattttattatgcacagactccccccttactctgcgggagatggggcagagctgtcaacaccaggtggaaagttaccgaggctggacagtgtagtgagactgcagtttaaagaccacattgtcctcacagtactgccggatcaagatcaatctgatgaaactcaagaaaagatggtgtacatctatcattccttaaagaatagtagagagacacacatgatgggaaatgaggaggaaacagagtttcatggacttcgcttccctttgtcacatttggatgcactgaagcaaatttggaatagtccagctatttctgtcaaggacctgaaacttactacagatgaggaaaaggaaagcctggtattatccatctggacagaatgtatagatctcaagtagtctagagcctttgcagaatcaaatgcctactattttatatgcatatattaaaagaaaagcaaagacctgagccgaggagaggatgaattcaagtttccttacctgcgtatctactaacaaacatgagacctccctgttacaggtggtcagttggccaaatgtactaacgggcacatgaaagaaagaacagcaaattaccaagtgtctcagaaaatgacaaaaccatattttgacaagtttatttaatccagtgtggtagaaaaggcacaattccaatgtatcatttagaattgaatgtcattaacctggctttgttctttggaagaaacaacttctttaaagagcttctttggctctagaaaaatttcaaacaattaaaataagaaaaaattttaaactggttttttataatgaaaatatacatacctttgtgtatagacaagcccatgcccattaaaataaagttatcctgtaacataaattttattaaataatacttccccacagatgagaggcacgcaacacctatggacaaaagggagttacagaggctgcttaaaagatggagaaaagcctgagattgaaggaggaaaaaaacccagtatttaaagtctataaaaaatactcaaaatagtgggtcttcgagtttaaaatagtcattgttattttacattctaaagtgcatgtaggttgatattttttaaaatatcattggagaatttaatctttctttataaaaatagagcatttttctgctttctggcaaaagttggggataaaaggaaaaaaagttgtcaaaatgtaattttcagtccaattcaccaggaaaacatgcttgtgaattgtgcagtaaaaggtggtaatgactactggaagctaagtcaaaggtgatttcctacctgattttacttacttaaataaaagttacttacaatgggagtgaaaaactgaggtttctgttatttagtagagaaatcaactccacgtttacttaaagagatggtaaggtcaaggttcaaatgctactgtgttttaatttggatatttgaaatttctcttgaggca

SEQ ID NO: 74181 - DNA, 1149 bp, Homo Sapiens
  misc_feature (856)..(885): n is a, c, g, or t
gaagagacgaggaaagaaaagacattgttgaatagtcagttagaactggaaagaatgaaagttgaacaagaaaggaagaaagccatttttactcaagaaacaataaaagaaaaggaacgcaagccattttctgtttctagcactcccaccatgtcacgctcaagttcaataagtggtgttgatatggcaggactacagacatcttttctgtctcaggatgagtctcatgatcactcatttggaccaatgcctatatcagcaaatggaagcaatctttatgatgctgtaaggatgggagcaggatcaagcataattgaaaacctacagtctcagctaaagctaagggaaggggaaatcactcatttacagctagaaattggcaatctagaaaaaactcgatcaataatggctgaagaactagttaaattaacaaatcaaaatgatgaacttgaagagaaggtgaaggagatacccaaacttagaactcagctaagagatttggatcaaaggtacaacactattctgcagatgtatggagaaaaagcagaagaggcagaagaacttcgattagatctcgaagatgtaaaaaatatgtacaaaactcaaatagatgaacttttaagacaaagtctcagttaacttgtgaaaattgaattcccatcaaactgaatgtaagcatttaatatctaaacatttaatgtggacttccaataaattcttttatagaattagaaagtgggatttactgtagagtgtaaaaatttttttaaaattgttttacactatgtagtaatatttacagttaaattattttgtgcaatatttgaactttatttttgaaactattctttaaagnnnnnnnnnnnnnnnnnnnnnnnnnnnnnncttgaatagcacagagatttattactttatcctcatataaatatggctagagaagaagaatggtgttcatatatgtattgtagatatacaactagttgtatctataatttgtaagtgtttatatatatattaagaacatttgaagagtaatgttaacatactgaaactttgaaatctttcacatttaaaatttcaacatatcttaattactgctcatgaaaatgtacattaagtgttaaagtaaaaaattattaaatctgtggc

SEQ ID NO: 74182 - DNA, 1158 bp, Homo Sapiens
  misc_feature (573)..(594): n is a, c, g, or t
  misc_feature (609)..(679): n is a, c, g, or t
tacgtggagtcaccatgctgagtcgcccttttcagcgctccatcaacgcacacctgctatcgtggaacagcctagaaaccaagggactccaccaccaagtcacttcccctgctcgtgcagaggcacgggatgagtctgggtgacctctgcgccatgcgtgcgagacacgtgtgcgtttactgttatgtcggtcatatgtctgtacgtgtcgtgggccaacctcgttctgcctccagctttcctggttagcgcaacgcggctccacgaccacacgcacttcagggtggaagctggaagctgagacacaggttaggtggcgcgaggctgccctgcgctccgctttgctttgggattaatttattctgcatctgctgagaggggcaccccagccatatcttacactttggtaaagcagaaaaccaggaaaattttcttaaaatatccacaatattccttgagtgagtcagaatctatagccggttagtgatggtttcagacagaatcgtgttcgtgtctgttttgctcgattcttttcctaagttaaataaatgcaaggcctctgaactctgaatnnnnnnnnnnnnnnnnnnnnnncaacaaccactcatnnnnnnnnnnnnnnnnnnnnnnnnnnnnnnnnnnnnnnnnnnnnnnnnnnnnnnnnnnnnnnnnnnnnnnnaatcttttgtcggcgcgctaacccccgtttttttgtgtacacaagggggggccctaatatgggatggcgctgtcattatataacaagccgagtagcggctaatcgcccccctatttattacaacaacacgtgctctgtgatacgggtggaacacaccttgcgtgcctactcgggggtcaccttttgtggttgggaggcagcccctcactactcttaggcgggggtgcgagccaaccacactattgggtggccacaacaataattgccttctatggcggacaactattatacgaaccgctctcatcgagcgggagccatgtactcatagcacccttctccagcagaggcgtatatccaacggtgcctacaaacaacctgtgggctgataaatatactcgatgcgcgtgataaaacaacctactgctgcgccagccgggagtagttgagtgcgtggctcaaactccactttatacccgggt

SEQ ID NO: 74183 - DNA, 1569 bp, Homo Sapiens
tcgctaggtggaggctgcgctagaatcggcacgctgctgggagacggcgggatctctttcgccatggctgccgggccgatctccgagcggaatcaggatgccactgtgtacgtggggggcctggatgagaaggttagtgaaccgctgctgtgggaactgtttctccaggctggaccagtagtcaacacccacatgccaaaggatagagtcactggccagcaccaaggctatggctttgtggaattcttgagtgaggaagatgctgactatgccattaagatcatgaacatgatcaaactctatgggaagccaatacgggtgaacaaagcatcagctcacaacaaaaacctggatgtaggggccaacattttcattgggaacctggaccctgagattgatgagaagttgctttatgatactttcagcgcctttggggtcatcttacaaacccccaaaattatgcgggaccctgacacaggcaactccaaaggttatgcctttattaattttgcttcatttgatgcttcggatgcagcaattgaagccatgaatgggcagtacctctgtaaccgtcctatcaccgtatcttatgccttcaagaaggactccaagggtgagcgccatggctcagcagccgaacgacttctggcagctcagaacccgctctcccaggctgatcgccctcatcagctgtttgcagatgcacctcctccaccctctgctcccaatcctgtggtatcatcattggggtctgggcttcctccaccaggcatgcctcctcctggctccttcccacccccagtgccacctcctggagccctcccacctgggatacccccagccatgcccccaccacctatgcctcctggggctgcaggacatggccccccatcggcaggaaccccaggggcaggacatcctggtcatggacactcacatcctcacccattcccaccgggttgggattgccccatccaggggatgtctcagatgcagcttgcacaccatggccctcatggcttaggacatccccacgctggacccccaggctctgggggccagccaccgccccgaccaccacctggaatgcctcatcctggacctcctccaatgggcatgcccccccgagggcctccattcggatctcccatgggtcacccaggtcctatgcctccgcatggtatgcgtggacctcctccactgatgcccccccatggatacactggccctccacgacccccaccctatggctaccagcgggggcctctccctccacccagacccactccccggccaccagttccccctcgaggcccacttcgaggccctctccctcagtaaattcacattttccttcctcctgttacattttcccaatatcttttctattccttggaccaatcagagatgctgtagctccttggggcaaaggtactaatccctttcagcacccccactccattcccctttttaatgtaactttttccacaggaggtatttcttttttatgttggtcctgagtattttgcaaatgcacagagaaaataaaactaaactccttgtttaaaa

SEQ ID NO: 74184 - DNA, 1021 bp, Homo Sapiens
  misc_feature (112)..(120): n is a, c, g, or t
ccaggaaggaggaggatttcccaccccccgttgggggaaattgggtgagggaatgtggaagtttcccatgacccagggatttccctgccccctgggggtttccctgcccaannnnnnnnnccaattgtctggaggcccccaggaaggccataaggttggtggggggcatggctggggggtatccccagggtgggagggcttccaggagggtggcactgggggtgggaaggagccaggaggaggcatgcctggtggaggaagccccagaccccaaatgatgataccacaggattgggagcagagggtggaggaggtgcatctgcaaacagctgatgagggcgatcagcctgggagagcgggttctgagctgccagaagtcgttcggctgctgagccatggcgctcacccttggagtccttcttgaaggcataagatacggtgataggacggttacagaggtactgcccattcatggcttcaattgctgcatccgaagcatcaaatgaagcaaaattaataaaggcataacctttggagttgcctgtgtcagggtcccgcataattttgggggtttgtaagatgaccccaaaggcgctgaaagtatcataaagcaacttctcatcaatctcagggtccaggttcccaatgaaaatgttggcccctacatccaggtttttgttgtgagctgatgctttgttcacccgtattggcttcccatagagtttgatcatgttcatgatcttaatggcatagtcagcatcttcctcactcaagaattccacaaagccatagccttggtgctggccagtgactctatcctttggcatgtgggtgttgactactggtccagcctggagaaacagttcccacagcagcggttcactaaccttctcatccaggccccccacgtacacagtggcatcctgattccgctcggagatcggcccggcagccatggcgaaagagatcccgccgtctcccagcagcggttccgcctcgtgccgaattcgccacccaggcc

SEQ ID NO: 74185 - DNA, 720 bp, Homo Sapiens
gcagaccaccccttactccagcgagcaccaccgtgtcccggcactccacccttgcagaactgtgatcccatagagagcaggctccggaagagaatccagggctgctggcgccagctcctgaaagaatgcaaggagaaggacgtggccagacagggggacatcaacgcctccgatttcctggctcttgtggagaaattcaacctggacataagcaaagaggagtgtcagcagctcattataaaatacgacttaaagagcaacgggaaatttgcatactgtgacttcattcagagctgtgtcctcctgctaaaagcaaaggaaagctcactgatgcacaggatgaagatccagaatgcacacaagatgaaagaagccggcgcggagacgccatctttttactctgctctgctgcgtattcagcccaaaattgtgcactgctggaggccaatgcggcgcacgttcaaaagctatgatgaggctggaacagggctgctaagcgtcgcagatttcaggacggtcctgagacagtacagcatcaacctctctgaggaagagttcttccatattctggagtattacgataagacgctgtcttcaaaaatctcctacaacgacttcctccgggcattcctccagtagacacccctgctgtgtgcccagcgggacgacagccacagggcctgtttcaaggctaataaaatcctataatttggggaaaaa

SEQ ID NO: 74186 - DNA, 491 bp, Homo Sapiens
gtatttggaatgttacacacacacacagaggaaatgtattaggtctatcatcaattatggtctttgtttatgaccttcaaaaagctttataaagaaaaaatttaagtgccaatgtagtgaaagaaagttaaaaattcctaaagacgcaagtctgagtgcatttaccaggtctaagaatatatttaaaggttgggggcaaggcatgattgatgcacatttaagaagaaaaatatggaacccattaaggtaggtcaagttctttggagagtgttgagaatgaagatgtattaaactctggctatcttggaggagattccaaagtacatggagttctccagctctttatcagttgaaatctgtttcatcgtggccaatagataattaagactaacttttcagcaaactgatttctcctatattcaaacacaaaaatctttaccacacgttcagagctgatattctataacagcacaaataagaatcctggttta

SEQ ID NO: 74187 - DNA, 596 bp, Homo Sapiens
  misc_feature (202)..(324): n is a, c, g, or t
  misc_feature (434)..(502): n is a, c, g, or t
  misc_feature (577)..(577): n is a, c, g, or t
atagaacataattcagcactaaaaagaaatgggctatcttgtcctcaaaagatgaggaaacttaaaagcatattactaagtaaaagaaggcagtctgaaaaggctacttactatataactgcaactatgtaacatgcgaaatgatggagatggtttgcagggttaaggggatgatatgtaataaacaggaagagcagggatnnnnnnnnnnnnnnnnnnnnnnnnnnnnnnnnnnnnnnnnnnnnnnnnnnnnnnnnnnnnnnnnnnnnnnnnnnnnnnnnnnnnnnnnnnnnnnnnnnnnnnnnnnnnnnnnnnnnnnnnnnnacaactatgatgtctcaatgtaggttcctcattttaacaaaggtactaccatggttgggggaggtgttgaaaagggcgaaggatacatatatatgtgcattagggtatannnnnnnnnnnnnnnnnnnnnnnnnnnnnnnnnnnnnnnnnnnnnnnnnnnnnnnnnnnnnnnnnnnnntctaaaaaggaatctaaccatctaaaaatgtttttaataacaaaaattaaatcaatattaaaaaccacttcgccnatttgtataagaactctca

SEQ ID NO: 74188 - DNA, 1132 bp, Homo Sapiens
  misc_feature (75)..(109): n is a, c, g, or t
aaaaacctgtatactcttggcgctgccgctcttcgaacgacgagcgcagcgagtagtgagcgaggaagcggccgnnnnnnnnnnnnnnnnnnnnnnnnnnnnnnnnnnncagtcgacggtaccggacatatgcccgggaattcggccattacggccgggggcccttggctggggaagggtggcatggagcctctccggctgctcatcttactctttgtcacagagctgtccggagcccacaacaccacagtgttccagggcgtggcgggccagtccctgcaggtgtcttgcccctatgactccatgaagcactgggggaggcgcaaggcctggtgccgccagctgggagagaagggcccatgccagcgtgtggtcagcacgcacaacttgtggctgctgtccttcctgaggaggtggaatgggagcacagccatcacagacgataccctgggtggcactctcaccattacgctgcggaatctacaaccccatgatgcgggtctctaccagtgccagagcctccatggcagtgaggctgacaccctcaggaaggtcctggtggaggtgctggcagaccccctggatcaccgggatgctggagatctctggttccccggggagtctgagagcttcgaggatgcccatgtggagcacagcatctccaggagcctcttggaaggagaaatcccccttaccacacacttccatccttctcctcctggactgcatctttctcatcaagattctagcagccagcgccctctgggctgcagcctggcatggacagaagccagggacacatccacccagtgaactggactgtggccatgacccagggtatcagctccaaactctgccagggctgagagacacgtgaaggaagatgatgggaggaaaagcccaggagaagtcccaccagggaccagcccagcctgcatacttgccacttggccaccaggactccttgttctgctctggcaagagactactctgcctgaacactgcttctcctggaccctggaagcagggactggttgagggagtggggaggtggtaagaacacctgacaacttctgaatattggacattttaaacacttacaaataaatccaagactgtcatatttagctgg

SEQ ID NO: 74189 - DNA, 662 bp, Homo Sapiens
cctgcagacctgccttaatgctcagaatcgaagtatttcaccaagaatacttgtgttttaaacagcccttcccctggacggtgcggccatgagggcctcatgttacggcattgccttttctttctgtggatccagtatcttcctcggctttttagggagcaggaaaaatgcgtctgagagcaactctttttaaaaacctgccctgttgtatataactgtgtctgtttcaccgtgtgacctcccaagggggtgggaacttgatataaacgtttaaaggggccacgatttgcccgagggttactcctttgctctcaccttgtatggatgaggagatgaagccatttcttatcctgtagatgtgaagcactttcagttttcagcgatgttggaatgtagcatcagaagctcgttccttcacactcagtggcgtctgtgcttgtccacatgcgctgggcgtctgggaccttgaatgcctgccctggttgtgtggactccttaatgccaatcatttcttcacttctctgggacacccagggcgcctgttgacaagtgtggagaaactcctaatttaaatgtcacagacaatgtcctagtgttgactactacaatgttgatgctacactgttgtaattattaaactgattatttttcttatgtcataa

SEQ ID NO: 74190 - DNA, 717 bp, Homo Sapiens
  misc_feature (32)..(32): n is a, c, g, or t
atcccaagatatgctgacactgtcctgtagcnttcatattatacttgctagtttaggtctctatagaagccctatataatttagaatatgcccactgaatatctttaatagaaagtaacataaagctagtattcaatgtagagtattttcatatgtttttcacagcccgttacaaattggcaatgtttggttaatgtttgtattacttggaaatcgctacagcttggactatttttttctaaatttttagcattagtccatttctgctgctaacaattgaatccagaaatctactttctccatcttccactgttagtgccagtgagcaatactgttgtgcaacaaaaatgtcactttatctcagtgtgaatgagtagtctaaattccctttctaccattgatttaaatatatatattggtaagagagactgcccatgtgtttagaatagaattttttaaatgaaatgatcaacaggtggaatttgaaatatattcttctacaaaagagatttctttcccttttatattttgatgattgttttcttaagattaagatatgttcttgctcttttataagattatttaaattatgtttccctctgattttttttcaccattgtatttactaagttattggatttacatgaaatctggcactttagggtgttctttttctcacagagtatatttaataaaaatgctgtgtatatagtaaaa

SEQ ID NO: 74191 - DNA, 1102 bp, Homo Sapiens
tcatccaccgcatgaagctggagagtgcatctacttcctccctggaggatcgggtgaagcggaatatctactctttacagagaacttcggtagctctggagaagaactttatgaaaagatgaaaactgtcccctctcttattggttttcctgcattttccagggaagctgctgaccccttaattctctttataagagttcaaatgacttctttcacagatgtcaaaccaccagtgttcaaagtgaccctgcttcattgagtcctgaaacagctcacttcctttgagagctagtgtgacttgctttgtgggacactcagtaactttgggttttgactctttaacgggtgggcactggaccatctcggtgggagtgcttgtgccactctggaaggctgttccctggggttgtgatgtttatcatgccacttccttcttacctgtgccaacagacctatttcactgcctcagcgtacaccagacccttcagaaacctctctggtgtcacccagatagattgtgcttactgagacaaatgaacgtttacttgatttagaagataatgtgacagaatgatgtcaggttaggtcaaagccaagggagtgacagaatctggaaaatcaaacaatacaaaaagccctaaatgaactgttaactatttgatctttggatgtaaaattgtaatgcgtatatgtacaaatgtacaatttttacatgcttttaaaaaaggttagctttgtgaaaataccttgtttggtcaatgactttactgggtaatagaaccacattgaaccttgatggcaagtaatacaataaggcaggccagctcgtttttctctctgaatctggctggtttaggaggagcctgggtttatcgacgagatctggagtatctattcttttccactgcttgcagtctccaatgtaggcagtgtaaaggtatagtaaaatgattttaggagtcagaaccaaattgccaatatgctccatggctcctaaaggaaaataaatggaagtcttgatttggggttcacttcttacgtgtagtaaccttactacaattacgattttcaggagttgttgctagtcttttcagtcagtact

SEQ ID NO: 74192 - DNA, 1623 bp, Homo Sapiens
  misc_feature (792)..(792): n is a, c, g, or t
  misc_feature (1496)..(1568): n is a, c, g, or t
ggggcctgggtggcgaattcggcacgagggcggcagagctggagtgaagggagctagtggccctcaaaagggaactcgcttcagacctttgtcttttgaggtgcccaaaccattgtttcctgtggcaggggtccctatgatccaacaccatattgaagcctgtgcccaggtccctggaatgcaggagattctgctcattggcttctaccaacctgatgagcccctcacccagttcctagaagccgcccagcaggagtttaaccttccagtcaggtacctgcaggaatttgcccccctaggcacagggggtggtctttaccattttcgagaccagatcctggctgggagccccgaggcattcttcgtgctcaatgctgatgtctgctccgacttccccttgagtgctatgttggaagcccaccgacgccagcgtcaccctttcttactccttggcactaccgctaacaggacgcaatccctcaactacggctgcatcgttgagaatccacagacacacgaggtattgcactatgtggagaaacccagcacatttatcagtgacatcatcaactgcggcatctacctcttttctcctgaagccttgaagcctcttcgggatgtcttccagcgtaatcagcaggatgggcaattggaggactcaccaggcttgtggccaggggcaggtaccatccgcctagagcaggatgtgttttcagccctggcagggcagggccagatatacgtgcatctcactgatggtatctggagtcagatcaagtccgcaggttcagnccctctacgccttcccgcctctacctgagccgataccaggacactcaccccagaacggctggccaagcacaccccagggggcccatggatccggagggaatgtgtacatccacccgaccgccaaggtggccccctcggctgtgctgggccccaacgtctccatcgggaagggggtgaccgtgggtgagggtgtgcggctccgggagagcatcgtcctccatggagccactttgcaggagcacacgtgtgttctgcatagcatcgtgggctgggggagcaccgtgggacgctgggcccgcgtggagggtacccccagtgaccctaaccccaacgatccccgagcccgcatggacagtgagagcctcttcaaggacgggaagctgctgcctgctatcaccatcctgggctgccgagtccggatccctgccgaggtgctcatcctgaactcgattgttctgccacacaaggagctgagccgaagcttcaccaaccagatcatcctctgagtagggctgccagaaggcccccagctcctacccactccccttgaggctgctgcctgcttggccagcctctgtccagaaaggaccagagaaagccaggctggatcgtcacatgccggggagcaatgtggatggcctggggactcctgggttttctccctcccgactccctaataaaccccgtgaaccttggagccagcnnnnnnnnnnnnnnnnnnnnnnnnnnnnnnnnnnnnnnnnnnnnnnnnnnnnnnnnnnnnnnnnnnnnnnnnnctaagaaacccttcccttcctggaaacatggaatgctgaaaacccagggggattg

SEQ ID NO: 74193 - DNA, 945 bp, Homo Sapiens
ggaatatagaacagtggtacaaaaagcaggctggtccggtcggatattcccgggatatcgtcgacccacgcgtcgccacgcgtcgcagagctggagtgaagggagctagtgtttaggtagcagtcaccattatgctcaaagcggtgatcctgattggaggccctcaaaagggaactcgcttcagacctttgtcttttgaggtgcccaaaccattgtttcctgtggcaggggtccctatgatccaacaccatattgaagcctgtgcccaggtccctggaatgcaggagattctgctcattggcttctaccaacctgatgagcccctcacccagttcctagaagccgcccagcaggagtttaaccttccagtcaggtacctgcaggaatttgcccccctaggcacagggggtggtctttaccattttcgagaccagatcctggctgggagccccgaggcattcttcgtgctcaatgctgatgtctgctccgacttccccttgagtgctatgttggaagcccaccgacgccagcgtcaccctttcttactccttggcactacggctaacaggacgcaatccctcaactacggctgcatcgttgagaatccacagacacacgaggtattgcactatgtggagaaacccagcacatttatcagtgacatcatcaactgcggcatctacctcttttctcctgaagccttgaagcctcttcgggatgtcttccagcgtaatcagcaggatgggcaatttggaggactcaccaggcttgtggccagggcaggtaccatccgcctagagcaggatgtgttttcagccctggcagggcagggccagatatacgtgcatctcactgatggtatctggagtcagatcaagtccgcaggttcagccctctaagccttcccgctctacctgagccgattaccaggacactcacccagaa

SEQ ID NO: 74194 - DNA, 819 bp, Homo Sapiens
tggaccggtccggaattcccgggatcagagctggagtgaagggagctagtgtttaggtagcagtcaccattatgctcaaagcggtgatcctgattggaggccctcaaaagggaactcgcttcagacctttgtcttttgaggtgcccaaaccattgtttcctgtggcaggggtccctatgatccaacaccatattgaagcctgtgcccaggtccctggaatgcaggagattctgctcattggcttctaccaacctgatgagcccctcacccagttcctagaagccgcccagcaggagtttaaccttccagtcaggtgtttgtgcacacactcgtatatgggggggtggggatgccctaggcctctgagttcttggaagtgggttgagtcagcatttgctggagttcatcctcgcctactagaaggattcttgtttggacatcaatgaatctctgagtatatagagtttctctgtgggccttgggcaggagtagtcctgggagcaagcggtggcggtcaggtgccctggctcatggtatctgtttcctaagatccactgagctgcctctcgggtccctgggggacacgtacctgcaggaaatttgcccccctaggcacaaggggtggtctttaccattttcgagaccagatcctggctgggagccccgaggcattcttcgtgctcaatgctgatgtctgctccgacttccccttgagtgctatgttggaagcccaccgacgccagcgtcaccctttcttactccttggcactacggctaacaggacgcaatccctcaactacggctgcctcgttgagaatc

SEQ ID NO: 74195 - DNA, 845 bp, Homo Sapiens
  misc_feature (713)..(713): n is a, c, g, or t
  misc_feature (717)..(717): n is a, c, g, or t
ccgcctgtaggctcctggaactatacagataggtaaagagttccaagttcgtccagcccatgtgcaaagtcaacagtatttgccttaagatttcatatatatatatttttttgcattgactgctgagagctcctgtttactaagcaagcttttgtgtttattatcctcatttttactgaacattgttagttttggggtaatggaaacccactttttcattgtaatgactttgggggcttttgttagtaagggtgggtggggtgatgggttgcagacggaggtcaggtcttcctctttcctgagactggatctgttcaaacagcaaacgcccacagatggcccagaggtggtggtagtcagggtgtgtgggtgtttttagggttctttagtgttgtttctttcacccaggggtggtggtcccagccagtttggtgctgacggtgagaggaaattagaatctgtttgcaaattgtccaacccaccccctcaacatgaggggcttccattttctgtgttttgtaagggaactgtttccttcatgccgccatgttcctgatattagttctgatttctttttaacaaatgttatcatgattaagaaaatttccagcactttaatggccaattaactgagaatgtaagaaaattgatgctgtacaaggcaaataaagctgtttattaaccctcgaaaccacaaccccccatcgccaccnattntttccttggccgggccgccttccgggcccttgaagaaagcctttctaaacccatttcccttggggcgcccgggggccccagaatgggtaaacgtgaacatgggcccatgaaactggttttcttaaaga

SEQ ID NO: 74196 - DNA, 578 bp, Homo Sapiens
caagaattcggcacgaggttaaccagtgtgttgatgttaaagtcaaaggctgcagtatgtctatattcttgctgtactcattggtagtttcagtatatgtaatgtgagtttaaatagtgaaattgtatctcatattaacatttcaaatgctcatattgaaaatggaaaatagtaaacacgggaattgattttattctggttgtctataatacttcattttaaatgtaaatggccactctgcatttgcaaggcccggtggttgacatctgtgtggtttgttagatgagacaaaatgaccattaaatgagtttatagattattctgtatcaagataaatctgattccagttaagctataaacttgtgggattttcttgtagccctatagttctgtgacttcatttgctatacgctttaaatgtgttgagcagcctatgaacctaaagacatactgcagtttgttcataaatgtattcagtcttttattctttataattgtgtgtaaatgttaactaaacagtggattcctctcgtgttacagttttgagtgaattattaaagaagttaaaatgcaataaa

SEQ ID NO: 74197 - DNA, 612 bp, Homo Sapiens
cggctaggtgcgaggcatgggtgttgaattcggcacgaggcaggctcgtactcaaggtcaggtcgcgctcctgctcccgttcctactcccgctccagatctagaagtcggagcaggtcgcgctcctccagaagccgctcccggtcccagtcgcggtcccggtccaagtcgtactccccaggaagaagacgccggtcacggtccaggagccccaccccgccttcctctgctggtctgggttctaattcggcgcctcccatccctgactcaaggctcggagaagagaacaaaggccatcagatgctggtgaagatgggctggagcggctcaggcggcctcggtgcgaaggagcaagggatccaggaccccatcaagggcggggacggccgggacaagggggaccagtataaaggcgtgggcgtggctctggatgacccctatgagaactaccgcaggaacaagagctactccttcatcgcccgcatgaaggccagggacgagtgtaagtaggcgcccatgccgggagccgcgccggtggccagcggtgccggctgtgggaccttcctggctgactggcagaggaagattgcagtgacagctcagttcttacacc

SEQ ID NO: 74198 - DNA, 960 bp, Homo Sapiens
accacaaacatacggctaggtacgaggctgggtgttgaattcggcacgaggtgggcgtggctctggatgacccctatgagaactaccgcaggaacaagagctactccttcatcgcccgcatgaaggccagggacgagtgtaagtaggcgcccatgccgggagccgcgccggtggccagcggtgccggctgtgggaccttcctggctgactggcagaggaagattgcagtgacagctcagttcttacaccgtctccacttgtggagagccacaggaagagaaggaagaccagcgcatgcccagtgggaacgccgtgctccatggcgtggagggcacgggtgccacccacaaaccacaccaggaggcgctgcagccaccagggccccaggctcgttttcctttatagcgaagcaaaaaacacaagaccctccgcccgagtaaattcttcagccacgaagggatggatgtgcatctgccctaagtcagattgaagcctcctcctaggctccaggaggagcatgtgcaggaagggttggcctgagccagagccggcaccccagctccttcctccagctccccgcacccaccggccctgacctggcttcccctcggctgtgtagggacaaagccgaagcccagtgccatgactgccgcggattgaaaaacagaaacacaaaactttgacttgacttgcgaagtgaagcagggttttcatttttactctccttggtttaggtctagaaagaagaatacctgacctgagaggaggcccagtgagattctgaaacctaattcttcgaaggcgtactggcccttagttcagttattttagttgtataagttgatattcccttcctggaatgtagccatttgctgttatctgggaaacaagattctaacaggaaaccagcctaagacacttcaggttgagcgctgcctcggagtctgtgcccgtcgcgtc

SEQ ID NO: 74199 - DNA, 1358 bp, Homo Sapiens
tatacggctaggtacgaggctgggtggtgaattcggcacgagggagctactccttcatcgcccgcatgaaggccaggacgagtgtaagtaggcgcccatgccgggagccgcgccggtggccagcggtgccggctgtgggaccttcctggctgactggcagaggaagattgcagtgacagctcagttcttacaccgtctccacttgtggagagccacaggaagagaaggaagaccagcgcatgcccagtgggaacgccgtgctccatggcgtggagggcacgggtgccacccacaaaccacaccaggaggcgctgcagccaccagggccccaggctcgttttcctttatagcgaagcaaaaaacacaagaccctccgcccgagtaaattcttcagccacgaagggatggatgtgcatctgccctaagtcagatgaagcctcctcctaggctccaggaggagcatgtgcaggaagggtggcctgagccagagccggcaccccagctccttcctccagctccccgcacccaccggccctgacctggcttcccctcggctgtgtagggacaaagccgaagcccagtgccatgactgcccgcggattgaaaaacagaaacacaaaactttgacttgacttgcgaagtgaagcagggttttcatttttactctccttggtttaggtctagaaagaagaatactgacctgagaggaggcccagtgagattctgaaacctaattcttcgaaggcgtactggcccttagttcagttattttagttgtataagttgatattttttttctggaatgtagccatttgctgttatctgggaaacaagattctaacaggaaaccagcctaagacacttcaggttgagcgctgcctcggagtctgtgcccgtcgcgtcccctgcttgagttttgcacttggaagaaccctgcaccggctggcgtgtgcgacggcccagtcccatccagagcatggagcccgaccccagccagcgccttccactccatcatttcatttcacacccccgaagggaggggaggccaggaggggagctgctcctgccagaagctggtgggtgaccgttgggaatcggccacacctggtgtccatgggcagcctggtgcaattccattcatttgtacagaaacatttttgaaaaattcttttcaataagatgcaaaatcttccaacttttcaacccaacgtgatgaatatttgattttgttctagatttcctgtagctgtgaattgttaaaatgtatgattcaggataaaacgtaaacacgtgctgttagtaatttcttgtggatttcattgttttgccttcaaataaagcctttttttaaagacctt

SEQ ID NO: 74200 - DNA, 1238 bp, Homo Sapiens
actataccctcaatggaggcaagctttggatcaggcaacctgcctcccatttctccccttctcctccgcccaattccaggccccactgctccccgtcctccacgccctgaatatcccattcttccacagtaatgggggcctagcagacatcttcacggtctttgccgagacaccagttacagatccagccacaggagccgtgaaggagaagatcacagcttttgtggtggagaggggcttcgggggcattacccatgggccccctgagaagaagatgggcatcaaggcttcaaacacagtcagaggtgttctttgatggagtacgggtgccatcggagaacgtgctgggtgaggttgggagtggcttcaaggttgccatgcacatcctcaacaatggaaggtttggcatggctgcggccctggcaggtaccatgagaggcatcattgctaaggcggtgagtaccctgcccgagtccctaggtaacccaaacagaagtctcactgtcccccttgccatgtgtccctgatcacttgcaggcactccctacactagaaactcctcccctaccagcagcccgacttgctagcttaggtctccatccagcgtagactgaactctggttgtatgcaaaacccatccctctggcgcaagcccagcccctctcctagggagactgcagaaccacactgaaccacagcgggatgtgtggaccctcttccaggtagatcatgccactaatcgtacccagtttggggagaaaattcacaactttgggctgatccaggagaagctggcacggatggttatgctgcagtatgtaactgagtccatggcttacatggtgagtgctaacatggaccagggagccacggacttccagatagaggccgccatcagcaaaatctttggctcggaggcagcctggaacgtgacagatgaatgcatccaaatcatggggggtatgggcttcatgaaggaacctggagtaaagcgtgtgctccgagaatcttcgcaatcttccggatccttgagcgggacaaatgacattcttcggctgttcggtgggctctgcaagggctgtatggacaaaggaacaggagactctctgggcctgagcagtgctctaaagaatccctttgggaaatgctggccctcctgctaggagaggcagggccaacagctgaagcggatcggccacggctggacaggactgctgagtctccacggactgttcacc

SEQ ID NO: 74201 - DNA, 2278 bp, Homo Sapiens
tatacggctaggtagcgaggcctggggtgtggaagttcggcacgaggggcgccaggacgtgggcgtgcaggacgcgggcgtgcaggacgccagagctgggtcagagctcgagccagcggcgcccggagagattcggagatgcaggcggctcggatggccgcgagcttggggcggcagctgctgaggctcgggggcggaagctcgcggctcacggcgctcctggggcagccccggcccggccctgcccggcggccctatgccgggggtgccgctcagctggctctggacaagtcagattcccacccctctgacgctctgaccaggaaaaaaccggccaaggcggaatctaagtcctttgctgtgggaatgttcaaaggccagctcaccacagatcaggtgttcccatacccgtccgtgctcaacgaagagcagacacagtttcttaaagagctggtggagcctgtgtcccgtttcttcgaggaagtgaacgatcccgccaagaatgacgctctggagatggtggaggagaccacttggcagggcctcaaggagctgggggcctttggtctgcaagtgcccagtgagctgggtggtgtgggcctttgcaacacccagtacgcccgtttggtggagatcgtgggcatgcatgaccttggcgtgggcattaccctgggggcccatcagagcatcggtttcaaaggcatcctgctctttggcacaaaggcccagaaagaaaaatacctccccaagctggcatctggggagactgtggccgctttctgtctaaccgagccctcaagcgggtcagatgcagcctccatccgaacctctgctgtgcccagcccctgtggaaaatactataccctcaatggaagcaagctttggatcagtaatgggggcctagcagacatcttcacggtctttgccaagacaccagttacagatccagccacaggagccgtgaaggagaagatcacagcttttgtggtggagaggggcttcgggggcattacccatgggccccctgagaagaagatgggcatcaaggcttcaaacacagcagaggtgttctttgatggagtacgggtgccatcggagaacgtgctgggtgaggttgggagtggcttcaaggttgccatgcacatcctcaacaatggaaggtttggcatggctgcggccctggcaggtaccatgagaggcatcattgctaaggcggtagatcatgccactaatcgtacccagtttggggagaaaattcacaactttgggctgatccaggagaagctggcacggatggttatgctgcagtatgtaactgagtccatggcttacatggtgagtgctaacatggaccagggagccacggacttccagatagaggccgccatcagcaaaatctttggctcggaggcagcctggaaggtgacagatgaatgcatccaaatcatggggggtatgggcttcatgaaggaacctggagtagagcgtgtgctccgagatcttcgcatcttccggatctttgaggggacaaatgacattcttcggctgtttgtggctctgcagggctgtatggacaaaggaaaggagctctctgggcttggcagtgctctaaagaatccctttgggaatgctggcctcctgctaggagaggcaggcaaacagctgaggcggcgggcagggctgggcagcggcctgagtctcagcggacttgtccacccggagttgagtcggagtggcgagctggcagtacgggctctggagcagtttgccactgtggtggaggccaagctgataaaacacaagaaggggattgtcaatgaacagtttctgctgcagcggctggcagacggggccatcgacctctatgccatggtggtggttctctcgagggcctcaagatccctgagtgagggccaccccacggcccagcatgagaaaatgctctgtgacacctggtgtatcgaggctgcagctcggatccgagagggcatggccgccctgcagtctgacccctggcagcaagagctctaccgcaacttcaaaagcatctccaaggccttggtggagcggggtggtgtggtcaccagcaacccacttggcttctgaatactcccggccagggcctgtcccagttatgtgccttccctcaagccaaagccgaagcccctttccttaaggccctggtttgtcccgaaggggcctagtgttcccagcactgtgcctgctctcaagagcacttactgcctcgcaaataataaaaatttctagccagtaaaaa

SEQ ID NO: 74202 - DNA, 673 bp, Homo Sapiens
  misc_feature (49)..(62): n is a, c, g, or t
ccaaggactaataggatacctttccattaaacaccagtgattctcaggnnnnnnnnnnnnnnggagcaaaacaaatgatgtgtacacctgctttgttatggtccaccagtgaccagcttcaatgaggggaaccattctggagggctgcggtctcctgtgcaaacagacatgaggcagaagagtaaaaagaccaacccagtgggacctagaatactttgtaactctttaataactgaggtcaggaccgctcttctgccttccccttcccttaacgtgctttttcccatttccatgatttaaggcaatggttttcccagtatgtgacattttccttcctgtttttcaggtatatcaaagagtttacatattccaattcacatttttacatctgagacgggttttttaagttcataattatgaaagaaatatgtatattgagcttggggaaataaaaatggccttttcttaaattattattattggtaatacaacctcttcattaaataacaatgtagcatgaaaaatttatgattgaaatgtagttttcattccatattaagatacagtttctgagaagaatcattgaatggactagaatatgtcaaaaattgatcctgtgtagtttgggttcagggctgacttaaaataaagcacatcctgcaaagtcaaaaaa

SEQ ID NO: 74203 - DNA, 1131 bp, Homo Sapiens
  misc_feature (43)..(84): n is a, c, g, or t
  misc_feature (88)..(122): n is a, c, g, or t
agaaagaaagactatctacctatatggcgcatcgctggctttnnnnnnnnnnnnnnnnnnnnnnnnnnnnnnnnnnnnnnnnnnccgnnnnnnnnnnnnnnnnnnnnnnnnnnnnnnnnnnncagtcgacggtaccggacatatgcccgggaattcggccattacggccggggacggcacgagactgcgaaggagaacgcagcaagcccaggcggcggtggaaaggctggaggacacacctaaacatgtggaatcccaatgccgggcagccagggccaaatccatatccccccaatattgggtgccctggaggttccaatcctgcccacccaccacctattaatccaccctttcccccaggcccctgtcctcctcccccaggagctccccatggcaatccagctttccccccaggtgggccccctcatcctgtgccacagccagggtatccaggatgccaaccgttgggtccctaccctcctccatacccaccgcctgcccctggaatccctcctgtgaatcccttggctcctggcatggttggaccagcagtgatagtagacaagaagatgcagaagaaaatgaagaaagctcataaaaagatgcacaagcaccaaaagcaccacaagtaccacaagcatggcaagcattcctcctcttcctcctcctcttccagcagtgattctgactgaatacaggccctggacccttccctcaagtctcaccagttctgctctcccatcaagcttcagatgccatgttgtactgggggaatgtagcccttgtgctccccaccccctacctccacctgagcctcaccctgctgttgagccctgagtggctaggggaaatgggaagaggattgccatggcctggccatcttgttgctgcttggttagatcatatagctaatgaattaggcagggcagctattttttgaagatgatggaactaaatgttgaaaaacaagttgagatcggtaaaaagtgattttttacttccaccttataaaacttggcgattgggggaaggtttgtgggaaattcatttatgaagaaaaaacctatctttttttggaaggtggggcaaccttggggaaattttattgggcaataacatttcccacaccgg

SEQ ID NO: 74204 - DNA, 1153 bp, Homo Sapiens
ggtccggaattctcgggatatcgtcgacccacgcgtccgcgcagcaagcccaggcggcggtggaaaggtgatggggctggaggacacacctaaacatgtggaatcccaatgccgggcagccagggccaaatccatatccccccaatattggggtgccctgggaggttccaatcctgcccacccaccacctattaatccaccctttcccccaggcccctgtcctcctcccccaggagctccccatggcaatccagctttccccccaggtgggccccctcatcctgtgccacagccagggtatccaggatgccaaccgttgggtccctaccctcctccatacccaccgcctgcccctggaatccctcctgtgaatcccttggctcctggcatggttggaccagcagtgatagtagacaagaagatgcagaagaaaatgaagaaagctcataaaaagatgcacaagcaccaaaagcaccacaagtaccacaagcatggcaagcattcctcctcttcctcctcctcttccagcagtgattctgactgaatacaggccctggacccttccctcaagtctcaccagttctgctctcccatcaagcttcagatgccatgttgtactgggggaatgtagcccttgtgctccccaccccctacctccacctgagcctcaccctgctgttgagccctgagtggctaggggaaatgggaagaggattgccatggcctggccatcttgttgctgcttggttagatcatatagctaatgaattaggcaggggagctattttttgaagatgatgaactaaatgttgaagacaagtttgagatctgtaaaatgtgattttttacttccacttataatacttgtgattggggaggtttgtggaaattcaattatgatgaaaaacctatcttttttgtaatgttggcatacttggggaatttagtggcaaatacattccccagcaggccttttgttggttgcactaactgcaaggttgctgggaagtagagtccatttggttgatgagctttgactgcggttttggaaccttacctctcctccttagcccaatatgctgtcttgggtcctattcaaataaagttatttctcctggaaataaaaaatacatatcgggtacgagctgcgagt

SEQ ID NO: 74205 - DNA, 807 bp, Homo Sapiens
ggggactgcgaaggagaacgcagcaagcccaggcggcggtggaaaggctggaggacacacctaaacatgtggaatcccaatgccgggcagccagggccaaatccatatccccccaatattgggtgccctggaggttccaatcctgcccacccaccacctattaatccaccctttcccccaggcccctgtcctcctcccccaggagctccccatggcaatccagctttccccccaggtgggccccctcatcctgtgccacagccagggtatccaggatgccaaccgttgggtccctaccctcctccatacccaccgcctgcccctggaatccctcctgtgaatcccttggctcctggcatggttggaccagcagtgatagtagacaagaagatgcagaagaaaatgaagaaagctcataaaaagatgcacaagcaccaaaagcaccacaagtaccacaagcatggcaagcattcctcctcttcctcctcctcttccagcagtgattctgactgaatacaggccctggacccctccctcaagtctcaccagttctgctctcccatcaagcttcagatgccatgttgtactgggggaatgtagcccttgtgctccccaccccctacctccacctgagcctcacccggctgttgagccctgaaggggctaagggaaatggcgaaaaaagatggcccatggccctggcccatcctggtggctggcttgggtaagaccctattagctaagggaattagggaaggggaagctatttttttggaagaggagtgaaccaaaatgggggaagaaaac

SEQ ID NO: 74206 - DNA, 820 bp, Homo Sapiens
  misc_feature (731)..(731): n is a, c, g, or t
ggggcgaaggagaacgcagcaagcccaggcggcggtggaaaggtgatggggctggaggacacacctaaacatgtggaatcccaatgccgggcagccagggccaaatccatatccccccaatattgggtgccctggaggttccaatcctgcccacccaccacctattaatccaccctttcccccaggcccctgtcctcctcccccaggagctccccatggcaatccagctttccccccaggtgggccccctcatcctgtgccacagccagggtatccaggatgccaaccgttgggtccctaccctcctccatacccaccgcctgcccctggaatccctcctgtgaatcccttggctcctggcatggttggaccagcagtgatagtagacaagaagatgcagaagaaaatgaagaaagctcataaaaagatgcacaagcaccgaaagcaccacaagtaccacaagcatggcaagcattcctcctcttcctcctcctcttccagcagtgattctgactgaatacaggcccctggacccttcccctcaagtctcaccagttctgctctcccatcaagcttcagatgccatgttggactgggggaatgtagcccttgtgctccccacccccctacctgcacctggagcctcaccctgctgttgaacccctgaggggcttaggggaaatgggaagaagaattgccatgggcctggccatctttggtgcctgcttggnttaaaatcttataagctaatgaatttaggcaggggggagcctattttttggaaaatgatggacctaaatggtgaaaaacaagttttgaa

SEQ ID NO: 74207 - DNA, 797 bp, Homo Sapiens
  misc_feature (779)..(779): n is a, c, g, or t
ggagagccgagactgcgaaggagaacgcagcaagcccaggcggcggtggaaaggctggaggacacacctaaacatgtggaatcccaatgccgggcagccagggccaaatccatatccccccaatattgggtgccctggaggttccaatcctgcccacccaccacctattaatccaccctttcccccaggcccctgtcctcctcccccaggagctccccatggcaatccagctttccccccaggtgggccccctcatcctgtgccacagccagggtatccaggatgccaaccgttgggtccctaccctcctccatacccaccgcctgcccctggaatccctcctgtgaatcccttggctcctggcatggttggaccagcagtgatagtagacaagaagatgcagaagaaaatgaagaaagctcataaaaagatgcacaagcaccaaaagcaccacaagtaccacaagcatggcaagcattcctcctcttcctcctcctcttccagcagtgattctgactgaatacaggccctggacccttcccctcaagtctcaccagttctgctctcccatcaagcttcagatgccatgttgtactgggggaaatgtagccccttgtgctccccacccccctacctccacctgaaacctcacccctggctggttgagcccctgaagtgggctagggggaaaatggggaaagagggattgcccatgggccctggccccatctttgttgcctgccttggggttagaacctaataaccttaatgaaattaanggccaggggggagcctat

SEQ ID NO: 74208 - DNA, 858 bp, Homo Sapiens
ggggcgaaggagaacgcagcaagcccaggcggcggtggaaaggctggaggacacacctaaacatgtggaatcccaatgccgggcagccagggccaaatccatatccccccaatattgggtgccctggaggttccaatcctgcccacccaccacctattaatccaccctttcccccaggcccctgtcctcctcccccaggagctccccatggcaatccagctttccccccaggtgggccccctcatcctgtgccacagccagggtatccaggatgccaaccgttgggtccctaccctcctccatacccaccgcctgcccctggaatccctcctgtgaatcccttggctcctggcatggttggaccagcagtgatagtagacaagaagatgcagaagaaaatgaagaaagctcataaaaagatgcacaagcaccaaaagcaccacaagtaccacaagcatggcaagcattcctcctcttcctcctcctcttccagcagggattctgactgaatacaggccctggacccttccctcaagtctcacaagtcctgctctcccatcaagcttcagatgccatgttgtactggggggaatgtagcccttgtgctccccacccccctacctgcacctgagcctcaccctgctgttgagcccctgaatgggttagggggaaatggggaaaaagggattgcccgtggccctggcccatctttgtttggcggccttgggtttagaaccatattagcctaatggaaattaagccaggggcagcgcattttttttgtgaaaatggatcgcacactaaaatggggggcaaaaacaacggtttgggagaaactcgggtaaaaaaaggggggaa

SEQ ID NO: 74209 - DNA, 742 bp, Homo Sapiens
tccggagctaagcagaacaggaaagttaatatagagaattactggctttaacagtgaactggaataatgagggcttcactggtaaaatgcttctgaattgactggaaatccatttggggtgctggggaacgttattcccagagaggtgcctcagtggaggcgctgtgtctcctacgcaacttctgagggctggagggtgccaagggcagctgctgaccgcctggtgcttcaggagctgggtgctggggaagccacatgcactgcggcgtccagaggcagaagcacaaccaacaagaaccacgaaggaggcgcctttcctcctataatgcctgtttggtgccctctactgacaaagcttatcccctttcaaaaaacagccaactgaaaaagctgaatttggaacataaagtcaataaatccataaccagcaatactatggggcctggggtgcgctggcctttagtgagtggagtggggcgaaggatgctgcatgtcctgcagtgggcacagcggccctgcacgggggagaaccatccctgtaaagtgtcagtagtagcccctgtgtcagtcagggtccctgcaagaaatggcagtgcactcacataaggacagtttgagaagagtctcctgacaaggtgagtgtggctctctgcggctactaacagcctgagcctttacctccccaggcctgaacaggggcatggaaagggctgcctgacagggtgacaggagctgtgacctt

SEQ ID NO: 74210 - DNA, 571 bp, Homo Sapiens
tcctgggtggctgcgaactacgacaacacggcgatcaggccgagaaacaagcccatattcgccacgtcaaacggcagcagcgctatcaacgccagtatcgacaccgaacctgcctgcaggggcaaaatccaactgtagccgtcgccccaagcgtgagttccagcggttctgcacggcggcggcccacagcagcttggccacccctgttcggttgtatactccggagtataaaccgaacagggaaagtttaatatagagaatttactggctttaacagtgaactggaataatgagggcttcatctggtcaaatgcttcgtgaactgacgtggaaatccattctggggtgcatggggaacgttaattccctagacgaggtgcctacagtggaggcgcatgtgtctccgtacgcaacttctgagggccgagagggtgccaagggcagctgctgaccgcctggtgcttcaggagctgggtgctggggaagccacatgcactgcggcgtccagagcagaagcacaccaacagaaccacgacgagcccttctcctatatcctttcgttaactccgcc

SEQ ID NO: 74211 - DNA, 484 bp, Homo Sapiens
  misc_feature (298)..(316): n is a, c, g, or t
gatggagaagcccgccttgacagccaccacgcaggatgtcccatccgggagatgaatgcagcagtgcttggtggccttgtccttctcgggtgccaaagtcctgcaggcctccgacaggtccaggctccccgcagaggacacagagccctgcgactctcggcgacacaggcctccattggcatgcagggcgtcttgacaggggaaacacagtgactcacgtcaatcagaaccctgtttattcggtcacatctcccaaccctctgccccctttaggctgagcagacagacgccaggaagnnnnnnnnnnnnnnnnnnnaccaggcatcactttgccgtctctggtggagacgagtcacatgtgtcttcctaaccctggaagccagtcagggaccaacaagggctctacccaccatgcagcagagatgctactctctgccctgtctactgccacatcctggctccaaaacatgcttggctcatggca

SEQ ID NO: 74212 - DNA, 524 bp, Homo Sapiens
ggctacactcgcttctggaagtccccgctgtaccagaaatgccatctggcggaagtggaggggagtgcactcccggactcgaagcaggtccccagcagccaggcttccaagcacagcctcggttcagaccactccagtgtgtccacgccaaaaaagttaagtggaaaatcaaaatccggccgatccctgaatgaagagctgggggatgaggacagcgagaagaagcggaaaggcgcgtttttctcgtggtcgcggaccaggagcaccgggaggtcccagaaaaagagggagcacggggaccacgcagacgacgccctgcatgccaatggaggcctgtgtcgccgagagtcgcagggctctgtgtcctctgcggggagcctggacctgtcggaggcctgcaggactttggcacccgagaaggacaaggccaccaagcactgctgcattcatctcccggatgggacatcctgcgtggtggctgtcaaggcgggcttctccatcaaagacatcctgtccggactctg

SEQ ID NO: 74213 - DNA, 558 bp, Homo Sapiens
atgccgctcacagagtccggacaggatgtctttgatggagaagcccgccttgacagccaccacgcaggatgtcccatccgggagatgaatgcagcagtgcttggtggccttgtccttctcgggtgccaaagtcctgcaggcctccgactggggagcagcgagacaagcagccgtgagggaaccagcgtcacaggggtgcggggcacctcccagagcagcccagctggcccaggccgcacgtgctggggaggctggcgccctgccacggtcccacctgcagctccccaggtgcacacatctcaggctcagtccacactgcctgaggtgctgggttttgtgaattaacacgagagagcggtcatcattctctcagctctgggcctcaagggccatcgtgctcagaaggcacatctgggcttctccacccagaagcagggctgtcctgcggggcccactgaagctgccctgtgaggaccactccctcccagggctctgggttccagcaccctgtcctctctatacacagctccccatgcacatcgttccaatggaaacgtc

SEQ ID NO: 74214 - DNA, 511 bp, Homo Sapiens
tgcggccgcggacctcttcctggtgggcggggacaagcctctggtgctgcaccaagacagtagcatcttggagtcaagggacctgcgcctagaaaagcgcaccttgtttcggctggatcttgttccgattaaccggtcagtgggactcaaggccaagcccaccaagcccgtcacggaggtgctgcggcccgtggtggccagatacggcctggacctcagtggcctgctggtgaggctgagtggagagaaggagcccctggaccttggcgcccctatatcgagtctggacggacagcgggttgtcttggaggagaaggatccttccagaggaaaggcatccgcagataaacagaaaggtgtgccagtgaaacagaacacagctgtaaattccagctccagaaaccactcggctacgggagaggaaagaacactaggcaagtctaattctattaaaataaaaggagaaaatggaaaaaatgctagggatccccggctttcaaagagagaagaa

SEQ ID NO: 74215 - DNA, 1027 bp, Homo Sapiens
  misc_feature (29)..(29): n is a, c, g, or t
  misc_feature (62)..(121): n is a, c, g, or t
  misc_feature (123)..(124): n is a, c, g, or t
  misc_feature (137)..(137): n is a, c, g, or t
  misc_feature (146)..(147): n is a, c, g, or t
tcatagcaccccagcttacacttatgctnccgctcgtatgtgtgtggaatgtgagcgatacnnnnnnnnnnnnnnnnnnnnnnnnnnnnnnnnnnnnnnnnnnnnnnnnnnnnnnnnnnnngnnccctcgagcccangaatcgcanncgaggtgcttcggtgcgtttgctttctgaggatctccagtgtcacaacaaacacatgccagccctgttttacaggcagccctggaggagttgggatagaggccacattgactgagggtagttgccagggtcctgcagttatacacaaagtccttaggataagaccatggccttgagagcatgtggcttgatcatcttccgaagatgcctcattcccaaagtggacaacaatgcaattgagtttttactgctgcaggcatcagatggcattcatcactggactcctcccaaaggccatgtggaaccaggagaggatgacttggaaacagccctgagggagacccaagaggaagcaggcatagaagcaggccagctgaccattattgaggggttcaaaagggaactcaattatgtggccaggaacaagcctaaaacagtcatttactggctggcggaggtgaaggactatgacgtggagatccgcctctcccatgagcaccaagcctaccgctggctggggctggaggaggcctgccagttggctcagttcaaggagatgaaggcagcgctccaagaaggacaccagtttctttgctccatagaggcctgagctgactggagcagagtcatttgcttcagcaggatccttgtgggccttctaagatgaagccaccctcaggtccagggaaggttgtgctggtatttggctcatgacagccaagagcagatttgtgaaatcggctcaactcccaggtgagagcaagcaaaaatcttggctgggtggaaaggaaggcaaaagagtaaaaattaaaaaggccaggcccagtaagtgtaccttgtactttataaataaacctcaagcagctcaaggttgtccttct

SEQ ID NO: 74216 - DNA, 1778 bp, Homo Sapiens
ttttttttactcgccagtttcattattattaaagaatccatttgaatgtcagctcaacacagcctcctataccgaggcattgtgaaccgcatctccccagcttctccaggcttttccaagaatcagggacactgtagcctgttggtctcagtgtatgacagacacggaggaagcacatctttagctgatacttaaacagagaccctgagcgcacatacacccgcgcacacatgcatggagcttcaccttctctgtcattctgcagtgaccaggagagcaagagctcccacctcccttcaaaacactgtgcccatcccgggcactaaggcctctttaaagcacggcacctccacgagggacagcctgcgttcctgggctggctgggtgcagctctcttttcaggagagaaagctctcttggaggagctggaaaggtgcccgactccagccatgctggcgctactgtgttcctgcctgctcctggcagccggtgcctcggacgcctggacgggcgaggactcggcggagcccaactctgactcggcggagtggatccgagacatgtacgccaaggtcacggagatctggcaggaggtcatgcagcggcgggacgacgacggcgcgctccacgccgcctgccaggtgcagccgtcggccacgttggacgccgcgcagccccgggtgaccggcgtcgtcctcttccggcagcttgcgccccgcgccaagctcgacgccttcttcgccctggagggcttcccgaccgagccgaacagctccagccgcgccatccacgtgcaccagttcggggacctgagccagggctgcgagtccaccgggccccactacaacccgctggccgtgccgcacccgcagcacccgggcgacttcggcaacttcgcggtccgcgacggcagcctctggaggtaccgcgccggcctggccgcctcgctcgcgggcccgcactccatcgtgggccgggccgtggtcgtccacgctggcgaggacgacctgggccgcggcggcaaccaggccagcgtggagaacgggaacgcgggccggcggctggcctgctgcgtggtgggcgtgtgcgggcccgggctctgggagcgccaggcgcgggagcactcagagcgcaagaaacggcggcgcgagaacaagtgcaaagccgccctgagcgcggcccccacccggcggcggccagggacccccgaggcccccctctgcctttgagcttctcctctgctccaacagacaccttccactctgaggtctcaccttcgcctctgctgaagtctccccgcagccctctccaccaagaggtctccctataccgagacccaccatccttccatcctgaggaccgccccaaccctcggagccccccactcagtaggtctgaaggcctccatttgtaccgaaacaccccgctcacgctgacagcctcctaggctccctgaggtacctttccacccagaccctccttccccaccccataagccctgagactcccgcctttgacctgacgatcttcccccttcccgccttcaggttcctcctaggcgctcagaggccgctctggggggttgcctcgagtccccccacccctccccacccaccaccgctcccgcggcaagccagcccgtgcaacggaagccaggccaactgccccgcgtcttcagctgtttcgcatccaccgccaccccactgagagctgctcctttgggggaatgtttggcaacctttgtgttacagattaaaaattcagcaattcaaaaaaaa

SEQ ID NO: 74217 - DNA, 765 bp, Homo Sapiens
  misc_feature (53)..(105): n is a, c, g, or t
ggagggacaagaggcaccaaaagctcctgtccaggtctgggcctccctcgggnnnnnnnnnnnnnnnnnnnnnnnnnnnnnnnnnnnnnnnnnnnnnnnnnnnnnattcccaaactctgcagccactgacttcagctagccatgctggatgctaagacatagagtcccggccatcaaggccagtccatctcagtggcatctagacatgcacagagatgaccagggagcccctaagggacagagaggcacaccctgcctcctgatcccatctgggggctgcatgaaggaggggcacaggtgtggccttgaaggctgggtaaggggctgggagggctttaggggcattccagggggcaggcacagaactggaggctctgccgggcacacccacaggagagcaatggctggagggtgacatggactgcagggtgtggccgcggcagcccagctcttaaggggacagcctgggaaaacagacttagggacaatgatcttgagccatgaaatgatgtccaatgccccttgtgccacctgacatcagcctgattaatgaacaaacagaagaggaagcaggggacctgtgtgtccctctctctgcttttctgtctttctctgtgccccctctcttatgtctctcacgctgtctcttgtccttgtttttaactctgacacgccgtgggaacttggctcacttcctagggggaagctgtctggactggcccagagatgggcaccaccatttcccaataaacacaagataaaatc

SEQ ID NO: 74218 - DNA, 989 bp, Homo Sapiens
ggggagaacgaaagatggcggcgcccgtaaggcggacgctgttaggggtggcggggggttggcggcggttcgagaggctctgggccggcagtctaagctctcgcagcctggctcttgcagccgcaccctcaagcaacggatccccatggcgcttgttgggcgcgttgtgcctgcagcggccacctgtagtctccaagccgttgaccccattgcaggaagagatggcgtctctactgcagcagattgagatagagagaagcctgtattcagaccacgagcttcgtgctctggatgaaaaccagcgactggcaaagaagaaagctgaccttcatgatgaagaagatgaacaggatatattgctggcgcaagatttggaagatatgtgggagcagaaatttctacagttcaaacttggagctcgcataacagaagctgatgaaaagaatgaccgaacatccctgaacaggaagctagacaggaaccttgtcctgttagtcagagagaagtttggagaccaggatgtttggatactgccccaggcagagtggcagcctggggagacccttcgaggaacagctgaacgaaccctggccacactctcagaaaacaacatggaagccaagttcctaggaaatgcaccctgtgggcactacacattcaagttcccccaggcaatgcggacagagagtaacctcggagccaaggtgttcttcttcaaagcactgctattaactggagacttttcccaggctgggaataagggccatcatgtgtgggtcactaaggatgagctgggtgactatttgaaaccaaaatacctggcccaagttaggaggtttgtttcagacctctgatgggccgagctgcctgtggacggtgctcagacaagtctgggattagagcctcaaggacattgtgtgattgcctcacatttgcaggtaatatcaagcagcaaactaaattctgagaaataaacgagtctattactg

SEQ ID NO: 74219 - DNA, 1297 bp, Homo Sapiens
  misc_feature (1015)..(1077): n is a, c, g, or t
  misc_feature (1086)..(1106): n is a, c, g, or t
gggaggagaggagaacttagagaaggaaggcggcgggtgtcagggctatgagtgcttttaaggaaggtctccatagaaggttcccccagcaaagtagggaggggtactccccgagaggagtcgaggtgccggagcctgctgcctcgccgacgctgggaggagccccgtgtcccgccgcgcttgccaagggttggctgcgcgtgcggcgggagtagaggcgccttgcgcaccaggaagtgactgtttccccgccgcagcaaaccaggccatccgctggccttttagtttgccgcctcaggtttgtaagaggatttattggttacgaaggaaggtggatttcagtgtgttctttggatgtcaggccttaagagaagagtcccactgcacagcctcagatacttcatctccatggtgggtctcttctccaaaccaggactgcttccctggtatgccagaaatccaccaggatggtcacagctctttctgggcacagtatgtaagggagatttcacccgtgtgatagccacgaaatgtcagaaaggacaaaaaagtcagaagaaaccaagccatcttggaccactagatggttcctggcaggaaaggctggctgatgttgtgacaccactctggaggttgagctatgaagaacagctcaaggtgaaatttgcagctcagaagaaaattttacaaagactagagtcttacatccaaatgctcaatggagtcagtgtgacaacggctgtacccaaatctgagaggctctcttgtcttctccatcctattataccctctcctgtcatcaatggttaccgaaataagtccaccttctctgtgaaccgaggtccagatggcaatccaaagactgtggggttctacctgggaacttggagagatgggaacgttgtctgtgtgcagtctaatcatctgaaaaacatccctgagaaacacagtcaagtggcgcagtactatgaagtattccttcgacagtctccattggagccctgccttgtatttnnnnnnnnnnnnnnnnnnnnnnnnnnnnnnnnnnnnnnnnnnnnnnnnnnnnnnnnnnnnnnnaccatctcnnnnnnnnnnnnnnnnnnnnntgtagttatccctaggagcaatagcaccaattaactctcacccgtggaggaagaattggttattggagagaccctaagggaaaggagattttcagagagactgaatacctataattgtgctgtgtagtgtggaggcaaaaagctccaaaatctagtataacataataaactggatattgaaaactgactgt

SEQ ID NO: 74220 - DNA, 1881 bp, Homo Sapiens
  misc_feature (1632)..(1632): n is a, c, g, or t
  misc_feature (1634)..(1660): n is a, c, g, or t
cggctaggagcgaggcctgggtggagaactcggcacgagggacccgcacaaaacccctgcctccccagttgtccacatcaggggcctgattgacggtgtggtggaagcagaccttgtggaggccttgcaggagtttggacccatcagctatgtggtggtaatgcctaaaaagagacaagcactggtggagtttgaagatgtgttgggggcttgcaacgcagtgaactacgcagccgacaaccaaatatacattgctggtcacccagcttttgtcaactactctaccagccagaagatctcccgccctggggactcggatgactcccggagcgtgaacagtgtgcttctctttaccatcctgaaccccatttattcgatcaccacggatgttctttacactatctgtaatccttgtggccctgtccagagaattgtcattttcaggaagaatggagttcaggcgatggtggaatttgactcagttcaaagtgcccagcgggccaaggcctctctcaatggggctgatatctattctggctgttgcactctgaagatcgaatacgcaaagcctacacgcttgaatgtgttcaagaatgatcaggatacttgggactacacaaaccccaatctcagtggacaaggtgaccctggcagcaaccccaacaaacgccagaggcagccccctctcctgggagatcaccccgcagaatatggagggcccacggtgggtaccacagccattaccatgatgagggctacgggccccccccacctcactacgaagggagaaggatggcctccccctagtggggggtcaccgtcgggggcccaagtcgctacgacacccagtaccaggatgagggctacgggccccccccacctgagtatggccctcacgccgacagccctgtgctcatggtctatggcttggatcaatctaagatgaactgtgaccgagtcttcaatgtcttctgcttatatggcaatgtggagaaggtgaaattcatgaaaagcaagccgggggccgccatggtggagatggctgatggctacgctgtagaccgggccattacccacctcaacaacaacttcatgtttgggcagaagctgaatgtctgtgtctccaagcagccagccatcatgcctggtcagtcatacgggttggaagacgggtcttgcagttacaaagacttcagtgaatcccggaacaatcggttctccaccccagagcaggcagccaagaaccgcatccagcaccccagcaacgtgctgcacttcttcaacgccccgctggaggtgaccgaggagaacttctttgagatctgcgatgagctgggagtgaagcggccatcttctgtgaaagtattctcaggcaaaagtgagcgcagctcctctggactgctggagtgggaatccaagagcgatgccctggagactctgggcttcctgaaccattaccagatgaaaaacccaaatggtccatacccttacactctgaagttgtgtttctccactgctcagcacgcctcctaattaggtgcctaggaagagtcccatctgagcaggaagacatttctctttcctttatgccattttttgtttttgttatttgcaaaagatcttgtattcccntnnnnnnnnnnnnnnnnnnnnnnnnnnnaaatgctaggtttgtagaggcttacttaaccttaatggaaacgctggaaatctgcagggggagggagaggggaactgttatctcccaagattaaccttcacttttaaaaaattattgtacatgtgatttttaattttcctgttcatacatttgtgctgcccatgtactcttggcacatttcaataaaattgtttggaaaataaacacagcacttgctgcga

SEQ ID NO: 74221 - DNA, 889 bp, Homo Sapiens
cgctcccgcgcccgctcccgcccccggcgcgtctcctccgggcccgcgccgcggcgggctcagtcctcagcggggcgcgtggcgagcggactcgactcggcaccgctgtgcaccatggcccgggccctgtgccgcctcccgcggcgcggcctctggctgctcctggcccatcacctcttcatgaccactgcctgccaggaggctaactacggtgccctcctccgggagctctgcctcacccagttccaggtagacatggaggccgtcggggagacgctgtggtgtgactggggcaggaccatcaggagctacagggagctggccgactgcacctggcacatggcggagaagctgggctgcttctggcccaatgcagaggtggacaggttcttcctggcagtgcatggccgctacttcaggagctgccccatctcaggcagggccgtgcgggacccgcccggcagcatcctctaccccttcatcgtggtccccatcacggtgaccctgctggtgacggcactggtggtctggcagagcaagcgcactgagggcattgtgtaggcggggcccaggctgcccgcgggtgcacccaggctgcagggtgaggccaggcaggcctgggtaggggcagcttctggagccttgggacagagcaggcccacaatgccccccttcttccagccaagaagagctcacaggagtccagagtagccgaggctctggtattaacctggaagcccccctggctggaggccaccgccaccctaggaagggggcagggacgtgaccttgacttacctctggaaagggtcccagcctagactgcttaccccatagccacatttgtggatgagtggtttgtgattaaaagggatgttcttgaacttgg

SEQ ID NO: 74222 - DNA, 505 bp, Homo Sapiens
  misc_feature (20)..(20): n is a, c, g, or t
  misc_feature (30)..(30): n is a, c, g, or t
  misc_feature (57)..(57): n is a, c, g, or t
  misc_feature (66)..(66): n is a, c, g, or t
  misc_feature (81)..(81): n is a, c, g, or t
  misc_feature (92)..(92): n is a, c, g, or t
  misc_feature (99)..(99): n is a, c, g, or t
  misc_feature (140)..(141): n is a, c, g, or t
ctgaattgcgaaagttgctntctggcaatnaagtgacagttttcttgcatgatgccntattcagantgcccatctaagcanggcgtcgaccngccgcanatctctacccttcatcgtgtcccatcacgtgacctgctgtnncggcactgtggtctgcagacaagcgcactgagggcattgtgtagcggggcccaggctgcccgcgggtgcacccaggctgcagggtgaggccaggcaggcctgggtaggggcagcttctggagccttgggacagagcaggcccacaatgccccccttcttccagccaagaagagctcacaggagtccagagtagccgaggctctggtattaacctggaagcccccctggctggaggccaccgccaccctaggaagggggcagggacgtgaccttgacttacctctggaaagggtcccagcctagactgcttaccccatagccacatttgtggatgagtggtttgtgattaaaagggatgttcttg

SEQ ID NO: 74223 - DNA, 1314 bp, Homo Sapiens
  misc_feature (1268)..(1268): n is a, c, g, or t
taggctaggtacgaggctgggttgtgaatcggcacgaggcacggatcatggccgcagccgctctggggcagctgtttgagggcatgaaggcgttcaaaggcaaagaccagcaggtgcgcctcttccgcccctggctcaacatggaccggatgctgcgctcagccatgcgcctgtgcctgccgagtttcgacaagctggagttgctggagtgcatccgccggctcatcgaagtggacaaggactgggtccccgatgccgccggcaccagcctctatgtgcggcctgtgctcattgggaacgagccctcgctgggtgtcagccagcccacgcgcgcgctcctgttcgtcattctctgcccagtgggtgcctacttccctggaggctccgtgaccccggtctccctcctggccgacccagccttcatccgggcctgggtgggcggggtcggcaactacaagttaggtgggaattatgggcccaccgtgttagtgcaacaggaggcactcaagcggggctgtgaacaggtcctctggctgtatgggcccgaccaccagctcaccgaggtgggaaccatgaacatctttgtctactggacccacgaagatggggtgctggagctggtgacgcccccgctgaatggtgttatcctgcctggagtggtcagacagagtctactggacatggctcagacctggggtgagttccgggtggtggagcgcacgatcaccatgaagcagttgctgcgggccctggaggagggccgcgtgcgggaagtctttggctcgggcaccgcttgccaggtctgcccagtgcaccgaatcctgtacaaagacaggaacctccacattcccaccatggaaaatgggcctgagctgatcctccgcttccagaaggagctgaaggagatccagtacggaatcagagcccacgagtggatgttcccggtgtgaagctgcaggctgtgctccagatccaccgacccgtagcatctcgtcacgccagcactcgcctccctaccaatgactcacctgaagtgcaatacgaaataaaaggccagcgggcggcgtctgggtctctggcgcccccatgtggttgcgacactcccaaagccgtaagggccgacccaggcatcttggcccccagcccctcgtcgcgggttcaggtccgcccattactccttgtcgtgcggtcaaggatacaccttggccccgattccggatctctccgttctcaggccagacccctggtgctgccgttgattttttttnctctgtctttgctgcaattttgaaataaaatgccaaagaacacaca

SEQ ID NO: 74224 - DNA, 1337 bp, Homo Sapiens
gactaggactacagtgtcaaacacaggttataaacgaggcagaactataacggttctaaggtagcgaggctgggtggcgaattcggcacgagggccgcacggatcatggccgcagccgctctggggcagatctgggcacgaaagcttctctctgtcccttggcttctgtgtggtcccagaagatatgcctcctccagtttcaaggctgcagacctgcagctggaaatgacacagaagcctcataagaagcctggccccggcgagcccctggtgtttgggaagacatttaccgaccacatgctgatggtggaatggaatgacaagggctggggccagccccgaatccagcccttccagaacctcacgctgcacccagcctcctccagcctccactactccctgcagctgtttgagggcatgaaggcgttcaaaggcaaagaccagcaggtgcgcctcttccgcccctggctcaacatggaccggatgctgcgctcagccatgcgcctgtgcctgccgagtttcgacaagctggagttgctggagtgcatccgccggctcatcgaagtggacaaggactgggtccccgatgccgccggcaccagcctctatgtgcggcctgtgctcattgggaacgagccctcgctgggtgtcagccagcccacgcgcgcgctcctgttcgtcattctctgcccagtgggtgcctacttccctggaggctccgtgaccccggtctccctcctggccgacccagccttcatccgggcctgggtgggcggggtcggcaactacaagttaggtgggaattatgggcccaccgtgttagtgcaacaggaggcactcaagcggggctgtgaacaggtcctctggctgtatgggcccgaccaccagctcaccgaggtggggaaccccatgaacatctttgtctactgggacccacgaagatggggtgctggagctggtgacgccccgctgaatggtgttatcctgcctgggagtggtcagacagagtctactggacatggctcagacctgggggtgagttccggtggtggaacgcacgaatcaccatgaaagccagttgctgcggggccctggaggaagtgccgcttgcggaagtcttaggtccgggcacaccgcttgtgccaggtcgtgcccattgcaccaaatctgggatccaggaaaggaaactcccaatttccaccactggaaatgggcgcacagaaacctcgcgtcacgaagaggagagaagaccactcggatcccaacccacggggagttcccgcgacaacgcgtgtccaacacgacaccgagaattcacaaaggctcacatacgaaga

SEQ ID NO: 74225 - DNA, 655 bp, Homo Sapiens
  misc_feature (152)..(210): n is a, c, g, or t
agatcaccatcgaccccacgtgcagctggaagccagtgcccgtgaagcctgacatgcacatcaaggaggagccggatgggccagcactgaagcgtgccgcaccgtgagccccgcccacgtgctcatgcccagcgtgatggagatgatcgccnnnnnnnnnnnnnnnnnnnnnnnnnnnnnnnnnnnnnnnnnnnnnnnnnnnnnnnnnnnagcgactaccctggccagggaatgtcccaaggccaattcccttggcagcaatgagaagaaatgcccttttccaaatagcgacttctgcaaaacccgctgttgtttgtgggttccagcttcctggggcctggaactttccctgagtccttcccacccaccacgcccagcaccccaacccttgctgagttcaccccgggaccaccccccatctcctaccagtctgacattcccagcagcctcctgacttcagagaagtctaccgcctgcctcccaagccagatggcaccagcaggtcacctggaccccactcacaatcctgggacaccaggactacacacctccaaccttggggcccctccaggtccccagcagcaccattcaaaccctcccccagcgtcccgccagtcctgggccaagcgagcttaggacatacgggtgcaatgcc

SEQ ID NO: 74226 - DNA, 1085 bp, Homo Sapiens
ccagtaactataacggtcctaaggtagcgaggcctgggtggcgaattcggcacgaggattagtacagctgtggtttttaaagccacctctctgtctccaccccatgggcccacacccaggtgggggaggaggaagccactgcatctgttggctcaggaccccagcctgtgcgagcagggcgcctgggctgttgtgtctcctgtctgtgccgatctctattaaaggactccctcttggtgggcctggccgagtccctcctttgtgctcccagggactattttctcctcgtaagccagcgacctgcctaaagcttgggctgtgcctgcaaagcttgtgcaggacctgggggccaggtcgaccttcaagtggctttcggggccccaggttgagctctggatgtttcaagccaaggctcggctattcccgccccatagtaaatttccttttccctggaattttccaagttggcttcagctgaagagctgttttgtgaagcatcccaggcttgcccaggagagacatttgccactatgtcaccttatctgggcttgccctggggcactgagacagttgtttggcagccccagcccagccaggggctcatccttctcagctcttgtccctgggaggcctctgcttgtcacttcccagagattgcagaggtgtgtcctgcctaccatctgcctgtccagcttggtgggggtccgggtcaccatttcctccagtctggggcccatctgagggcttccagccgcagcaggagagctctttccggccctctctggactgagggaaccgacagtgcaggaaacggcggcagcgagcagcaacgcacagcgctgtgcctgagtggccgcgaaagagctggcacaagttcccactcgggcacgggcctaagtgacaggcccaggcgcccatgcctgcggaggaccaatgactgggtcccggaccgttgtagtgccccacctgggcacttgcacgtgttgcaaagacgacgaatgctaccaggagggcagtggcacacacactgggcaactgcggcaacagacacagggtgggacgcagaacgccgaaaagccccacga

SEQ ID NO: 74227 - DNA, 707 bp, Homo Sapiens
cggcagtaactactcaacggtcttaaggtagcgaggcctgggtggcgaattcggcacgagggaggaggggagcgctgggcatcctcaggctggcggccaaggcctgcccctggaggcactagaggagggcatctgtctgtgggagcccagaggctgcagggaggaggaggagggaggtatctggtgtgagcgttgcccctgcgacatttgggaccacacaggtgggcttccttattccctgacaaagcctctgtttccagctcttccgccctctctggatgagggaacagaagtggaggaaacaaaagaagcagcagcacgcacagtcctgtcgctgggtgcggagacagcctggcaaagtcccactcagccatggcctgatgcaggccccaggccctcctttcttgggtgtcaaatgactgtgtcctggacatctgatgcaccacctgccctgcctgttgcaaacgtgatgctcccgggtgcagtggagaaactaggagactgggacaagcaaaaggctgcaaacaacccagaagcccatcctcagaagactggagaaatgattgaggaatgcatgggcaccgtggccctgtgctccatcacaaacacctctcagaaacaacgtgggatgaaaaagcaagacagttcatacagtatgatgccatttttataaagctcagaagcaaatatgtgtggaattcataccc

SEQ ID NO: 74228 - DNA, 1986 bp, Homo Sapiens
  misc_feature (65)..(97): n is a, c, g, or t
  misc_feature (230)..(230): n is a, c, g, or t
  misc_feature (783)..(783): n is a, c, g, or t
  misc_feature (835)..(835): n is a, c, g, or t
  misc_feature (1719)..(1782): n is a, c, g, or t
cgggcagtgccaagctaaaattaccctcactaaagggaataagcttgcggccgcatacgcggtcnnnnnnnnnnnnnnnnnnnnnnnnnnnnnnnnngccaggcccaccaagagggagtcctttaatagagatcggcacagacaggagacacaacagcccaggcgccctgctcgcacaggctggggccctgagccaacagatgcagtggcttcctcctcccccacctggngtgtgggcccatggggtggagacagagaggtggctttaaaaaacacagctgtactaattcttcactttcacagagcaggggaacttgggagcgcagcccgctagagaatctttacacagagctgaatctgagagcccacccacccaccttggccaggccgaagctcactgtcccccacccattggaggttcctccctgatctgtctgcacatgggaaggagcagagcgcgcagggagaccgggctgtacaacaggaacatgctggctggacagctggctcccctctcccagctgttagtgtttctacactatgtacattgttgtgctttgtagctcccccaccccgaggcctctgcttgaagctggggtggggagaggaacctgacaccacacacggctgggctgccagagctccaggcccccaagaggctgccattcagcgaggttccaagagctggactgctgggcacaggggccactggagccaaaggcccaggggacagagccagccctgccagatgcccagctctgcccagtggaggagttgttgaanacagaaggatcaatgctggacaagaagcaggctgggtgggggcaggcagggngtggaaggacaaggtgtgaggctgtgagaccaggggcgtgagatgtgtgtgtggacaaggctggacagggctgggcaggggcacctcagcaaaaaccgttctgcagcagcaggcttggcagagggaggtggcaagggctgccggcctgggagcccctcccatcgagcacagggctgcttccaattcagggccagggctggcggcagaaggctctggctccaggtgtgttttgggggaggtttgggaaagaccaccgggtgtcccatggggctgggcatgaagggcagcgctgtggtgacatctgtgagcgtgtccccgccgggcttggggtaaacacaggatcagttgttctcacaacagagaaagcaggtcgtcattgttgttcgtagggaggtcgggtgggcccaaagtaggacagtagctcatcagggttggtcagttccgggagcaggtccagagctggttctggggcctccccggctccaaacatgctggggggccccatcacgcctgtggcaggactgaaggccagttcacccgtaggtcctaagctcgcttggcccaaggactgccgggacgctgggggagggtttgaatggtgcagctggggacctggaggggccccaaggttggaggtgtgtagtcctggtgtcccaggattgtgagtggggtccaggtgacctgctggtgccatctggcttgggaggcaggcggtagacttctctgaagtcaggaggctgctgggaatgtcagactggtaggagatggggggtggtcccggggtgaactcagcaagggttggggtgctgggcgtggtgggtgggaaggactcagggaaagttccaggccccaggaagctggaaccctggccagggtagtcgctnnnnnnnnnnnnnnnnnnnnnnnnnnnnnnnnnnnnnnnnnnnnnnnnnnnnnnnnnnnnnnnnatcatctccatcacgctgggcatgagcacgtgggcggggctcacggtgcggcagcgcttcagtgctggcccatccggctcctccttgatgtgcatgtcaggcttcacgggcactggcttccagctgcacgtggggtcgatggtgatctcctccctcgtgtccgaaatcgccacccaggcctcgctacttaggaccgtatgagaa

SEQ ID NO: 74229 - DNA, 427 bp, Homo Sapiens
taatcagctcggtaccccatttatgcgtgggaaggactcagggaaagttccaggccccaggaagctggaacctgtgagaggagagtcggggcctgggtgagggctggggaaggccaccgctggcagaggagccaggagggaggctggctgtggcatgggtgggacttgcagtgctcacccacaaacaacagcgggttttgcagaagtcgctatttggaaaagggcatttcttctcattgctgccaagggaattggccttgggacattcctaggagtgaaggtctcggaggttataggaatgggagcagccacaaacaatacgcaccacgcgtgtgaggtgggtcccagaggggggccccagatggggccagtcctgtgaggtgttccagccaggagccccttaatccaaacggggaaggaagggtgg

SEQ ID NO: 74230 - DNA, 1266 bp, Homo Sapiens
aaaggggcctcctaatccttatgtaagctttgtcatagttattaaaaagacggtatcatattagaaagcccccacccactttcccaatgctgtatacattatacaaacccgtgacaaatgtattaccatttccaaatacctctctgttcattaatttacacttgcatagaaagggaagaagaaaacaataatatatggttattataaaaacaaaatatccatttctctttggatagtcagtgttttactctttcagtagaacacacagtcagcactcaacatcgtgggccaaggagccatggagcttctgatttaatggaacttggaattggcatttgctgaaaagggcaacactgtacgtcaggaaacattggttggccggatgaatacttcacattgcctgtggcctgctgggaacatttgggcagcaagatggaaacgtgctgtgaatctgctccatgacctccgtgaaatccgtgctggtgtcgtgcggtggggccaacaggtcctctcccgctgccgggtggaactgtggcccggaggcatctggatcaagcgagtagctcagtgcaaaatgctgaggaaaagcccatggggaaacaccattgattcgggaatcaaattcaggctgctccaacaactgtcggaggcggtggagctgaaactccagctgtttattgtgatcttctaaaatctgcatcctaacctccagccgacctttgtgctgcctgaggagttttgcttctgctataagttctgaatcctcagacgtgtgatggggagatataatcgactctggcggtgaaccgacagggagcccccttcggaggtgctggtccttcagctgctcatactccacctgtagatttctttgttcttcctccaggtcagcaatgatcctctccagttctccacgttcttccctctctactgacttcaggatctgagctgggctctgcggctggctcactggggactctcctccgagtgtttggcaatactgctggatgagggcgtgctcgtcttccacacttcctgtggtggagctgctatcagtgagaaaagacccattagtcctttccatctgggccagtcgtgtggcatattgttctattcttgaatgggtgtcatcatgaaacagttgaggagattgtgagggggtctctaagttgtcaccttcaagaactgtctggacaggcaggtaaccaagtcgagggtgtttggcaaagtacttcttcgacctgaacttgttcttaagtacctttg

SEQ ID NO: 74231 - DNA, 1872 bp, Homo Sapiens
  misc_feature (718)..(718): n is a, c, g, or t
  misc_feature (788)..(788): n is a, c, g, or t
  misc_feature (1104)..(1104): n is a, c, g, or t
  misc_feature (1788)..(1797): n is a, c, g, or t
caggcggtacgccccggagatacgggattgtaaagccaaaccccctaaaggtctccacactgctgtttaacggcacacttgacaatggcttcagcagcacgcttgacaatgatgtgggaggaggtcacatgccctatctgcctggaccccttcgtggagcctgtgagcatcgagtgtggccacagcttctgccaggaatgcatctctcaggttgggaaaggtgggggcagcgtctgtcctgtgtgccggcagcgctttctgctcaagaatctccggcccaatcgacagctagccaacatggtgaacaaccttaaagaaatcagccaggaggccagagagggcacacagggggaacggtgtgcagtgcatggagagagacttcacctgttctgtgagaaagatgggaaggccctttgctgggtatgtgcccagtctcggaaacaccgtgaccacgccatggtccctcttgaggaggctgcacaagagtaccaggagaagctccaggtggcattaggggaactgagaagaaagcaggagttggctgagaagttggaagtggaaattgcaataaagagagcagactggaagaaaacagtggaaacacagaaatctaggattcacgcagagtttgtgcagcaaaaaaacttcctggttgaagaagaacagaggcagctgcaggagctggagaaggatgagagggagcagctgagaatcctgngggagaaagaggccaagctggcccagcagagccaggccctacaggagctcatctcagagctagatcgaangtgccacagctcagcactggaactgctgcaggaggtgataattgtcctggaaaggagtgagtcctggaacctgaaggacctggatattacctctccagaactcaggagtgtgtgccatgtgcccagggctgaagaagatgctgaggacatgtgcagtccacatcactctggatccagacacagccaatccgtggctgatactttcagaagatcggagacaagtgacgcttggagacacccagcagagcatacctgtgaaatgaagagagatttgatagttatcctatggtcctgggtgcccaacacttccactctnggaaaacattactgggaagtagatgtgacaggaaaggaggcctgggacctgggtgtctgcagagactctgtgcgcaggaaggggcactttgtgcttagtcccaagagtggcttctggacaatttggttgtggaacaaacaaaaatatgaggctggcacctacccccagactcccctccaccttcaggtgcctccatgccaagttgggattttcctggactatgaggctggcatggtctccttctacaacatcactgaccatggctccctcatctactccttctctgaatgtgcctttacaggacctctgcggcccttcttcagtcctggtttcaatgatggaggaaaaaacacagcccctctaaccctctgtccactgaatattggatcacaaggatccactgactattgatggctttctctggacactgccactctccccattggcaccgcttctcagccacaaaccctgcctcttttccccatgaactctgaaccacctttgtctctgcagaggcatccggatcccagcaagcgagctttagcagggaagtcacttcaccatcaacattcctgccccagatggctttgtgattccctccagtgaagcagcctccttatatttggcccaaactcatcttgatcaaccaaaaacatgtttctgccttctttatgggacttaagnnnnnnnnnnctcctctccatctctaggatgtcgtctttggtgagatctctattatatcttgtatggtttgcaaaagggctttct

SEQ ID NO: 74232 - DNA, 2538 bp, Homo Sapiens
  misc_feature (1123)..(1123): n is a, c, g, or t
ggcagtcactcataacggttctaaggtagcgaggcctgggtggcgaattcggcacgaggaattaaaaatggttctcggctcagtgaactttctaaagtgcagatttctgagctttcatttcctgcctgtaacacggttcatcccgagttactccctgagtcttcaggcgacgatggccaagggcttgtgacttctgcaagcgacgtgactggaaaccacgcagcacttcacagggatcctagtgtgttctctgctggtgattccccagcggaggctccttctgcgctgttgccaggggccaccccctggtcagcctgaagccactcagctgacagggccaaaacgggctggccaggcagctctgtcagaacgaagccctgtggctgatcggaagcagcctgttcctccaggacgtgctgcgcgttcaagccagtctccaaaaaagccgttcaatagtattattgagcacctgtcagtggtattcccatgttacaacagcactgagcttgctggttttattaaacaaagtgcgaagcaaaaacaagaactcactctcaggattgagtattcgatgaacattgtccaaagagtgacagaacaccattctagatgaacagaaaaacgaaaaagccaaacccaggaaaggacaagaggacttatgagcccagcttctgccacccccgtgaccaggtcctcccagggctcaccctcggtggttgttgaaccatcacccaaaaccaagggggcagaaagcagaagatgtccctgtgaggattgcactgggtgcaagttcctgtgaaatatgccacgaggtgttcaaatcaaaaaacgtgcgtgtgctcaaatgtgggcacaagtatcacaaagggtgctttaagcagtggcttaaagggcagagcgcttgcccggcctgccagggtcgtgatctcctgacagaagagtcaccttctggaagaggctggcccagtcagaatcaggagctgccttcctgctcttctaggtagtcacacttcactaaagtgtcatccaccagtgtgttgaatccgaagaatgacaattttctaccactggtgtaaaaaacaaacatttgaagacccttgtgcattgtgtgtcacaaagctanatacatggaaatcgttaatatcgctgatattaagtaatttccccactctgagtgaatactttgatgatggccaacagtggctaataaaatgacggctaccacactcatgggtcactgggggctgcgcagggcctctttgaggtgggtggcttcttttggaaagtactatgaacgtctcgaagcagtattctagtgataagaattcttaacatagccaagcgccccacgttgttccccacgttgttccccttttctgtttgaaaaacctgttctggtagctccacaagagagatgatactgactttttaaattttttacaagagtctgtattcctgatatgcctatatttttcctcaaagattctgcattttaaggatgggcataagcaaactatattttaataatttatagttaatgttaaaatattggctgatttagaccaaaagattcaaatctcctctttgtgaaatcccatctgcatttgattttttattattttatgttcccccgttagattgttttaagtgtttgcttttcatcttttatagatgtaatctgattttcaaaaatcattaacactttttaattagtatcgactaagactttttccccctggaatcgaggctgtgtgtccgtcatcccagcccccggttggagcctgctctttgaactccgctgccttccttagcagcttctgtcctcttctgtgagtcagtcagcgagtgcttgggatccgcatccagccgtgctgagcacacaacaggctgtgtgtggaaatggccaccaccattctccttccccaccccaccacaaaaagagaagctgtgtctttagacaaccctgaggtatctgtgttacaatcgttctgtgtttgatatttgtgtaaagtatgcatgcagtcttgtactgtgacctaagaacaaaactgtaactgcattagaaaccatgaaaaaattagatattgttttgtgacttttagacagtggtaaatatagaaccatgaattctggtcacattccatttctctccaacatgaaggatcaaaaaatgtttttcaatgtgttctttgttccactggaaacttagagtcatgagtttatgagctgatttggtcaccttcctctgcctttgttcactgtgagttctgatgtcttagtgacttagttcttagaagctcacgccttagtttgaaacagattctccacggtggtccccaaaacactgtctgcatatccataagaattgagcgctatgggtgttaacgtgcatgaggatcagtttgcagcagcaagtacaaaaggagaagaggaacatccgttgaatgagtgtgttttgtacataacttcagatacttgtgaacatgccttatatttgtccaacaactgtcagaataaagaacattctaaaatgagaaa

SEQ ID NO: 74233 - DNA, 913 bp, Homo Sapiens
ggctaggtacgaggctgggtggcgaattcggcacgagggaaatcagcaacacacttacaaatgagaaaatgaaaatagaagagtatataaagaaagggaaagaggattatgaagagagtcatcagagagctgtggctgcagaggtatccgtacttgaaaactggaaggagagtgaagtgtataagctacagatcatggagtcacaagcagaagcctttctgaagaagctggggctgattagccgtgatcctgcagcatatcctgacatggagtctgatatacgttcatgggaattgtttctttctaatgttacaaaagaaattgagaaagcaaaatctcagtttgaagaacaaattaaggcaattaaaaatggttctcggctcagtgaactttctaaagtgcagatttctgagctttcatttcctgcctgtaacacggttcatcccgagttactccctgagtcttcaggccacgatggccaagggcttgtgacttctgcaagcgacgtgactggaaaccacgcagcacttcacagggatcctagtgtgttctctgctggtgattccccaggggaggctccttctgcgctgttgccagggccaccccctggtcagcctgaagccactcagctgacagggccaaaacgggctggccaggcagctctgtcagaacgaagccctgtggctgatcggaagcagcctgttcctccaggacgtgctgcgcgttcaagccagtctccaaaaaagccgttcaatagtattattgagcacctgtcagtggtattcccatgttacaacagcactgagcttgctggttttattaaaaaagtgcgaagcaaaaacaagaactcactctcaggattgagtattgatgaaattgtccaaagagtgacagaacacattctagatgaaca

SEQ ID NO: 74234 - DNA, 689 bp, Homo Sapiens
gggagccctgtgattgtccagctcatgctccgaggaggttcccagctgcagtgtgcatgcggggggaacccaggtggagcctgccagcctccctgcagtaggaaaacaatgccagggatccagggagactaaggtggccggaactcgcggtcacagtactggagagagacacacagatctaagtcgggggccagagggagctccctcaactaggcagcacagccctactgatcagcgcatgtgtgtaaggaaccacctcaggccagagaaagagccatgtgagaagattagaaggaacagtggtgctgacacaggacctagggtagggcctgttcccaccaccctagctggaaaacctcatgatttatggggcactgggtagaaaacacaagtgagaaaccctagatgggcactgccacctgacacagctatacagcaggacctgaaaggatcacactgcatcctaggacaaagctcaaaagtacctctgggactacaaaaatattcagtgcccaagaaggtaaaatgtacaatgtctagcatccagtagagaggcatgaaaagcaggaaaatacattgcataatacagagaaaaattaatcacaactgacctggatctcagatgctagaaatagtagacaaagatgttatttcccagtgcaaataaagaaataaagatagcaagatga

SEQ ID NO: 74235 - DNA, 555 bp, Homo Sapiens
cgcaatagacccacactcacacctacaagacagcgtaggtccgaggcctgcgtgttaatctggcacgagggtgggtgttgggctggagacactgtggggacctggagatggctcacagcctccctcacctcctgtaagagaagctgcttgggaccaagcactccatcggctgacagcagcctctgtggtccgggacaatgagcagctggccctccgaggaggggcagagaccacagctgaccggggccatgcccggaggtgctggcttcgagcccttcagacaagtaaggtcagctctgccccctcctgcttcacttgccctgtagctgtggatgctactactagggaggtcctgcctggggccctgcaggtgtgcagctcagagcccgctgagcccccaggaacccctcctgcctctcacagccatctagatgcagctcctctgcccactgttgtctactctaaaggacttcagagaggctctccagcaggcgcctgggactcggaccaaaatggcaactccaagcgtgctttgggggaccctgccactcccac

SEQ ID NO: 74236 - DNA, 842 bp, Homo Sapiens
  misc_feature (766)..(799): n is a, c, g, or t
gcccaccaagggcagtattcaagtcgctgccttcactgttgtggcctgcccggtcaggctaacagagtttgtgacggcggcccatgctgagccgacagggagacggggaggtggcggcgaggaccttccgtgggagtggcagggtcccccaaagcacgcttggagttgccattttggtccgagtcccaggcgcctgctggagagcctctctgaagtcctttagagtagacaacagtgggcagaggagctgcatctagatggctgtgagaggcaggaggggttcctgggggctcagcgggctctgagctgcacacctgcagggccccaggcaggacctccctagtagtagcatccacagctacagggcaagtgaagcaggagggggcagagctgaccttacttgtctgaagggctcgaagccagcacctccgggcatggcctgtggaaccaaggagcagtctgtggagcccccaccacccaccctctacagagggctcatagaaaaaattgcagtgttctccccagcttctccctctatcgactttaacagagtagattgccttgctaggcccagaaccagctcagactccccaactttgacaagaagtgatcaggctgaatcttcaacccatagcagagcaagagccccctggctgcccagaaattcagcactctggacaacacccagaggaagcattagctggcacattttcctccacctgcttctgcactaataaaacttggaaatgttctctctcttcatgannnnnnnnnnnnnnnnnnnnnnnnnnnnnnnnnngagcctcggccgattcaacacccagcctcgtactagctagttt

SEQ ID NO: 74237 - DNA, 953 bp, Homo Sapiens
agcgtctgagaaggccctgtgccctaaaggacacccctcgcccccatcttcatggagggggtcatttcagagccctcggagccaatgaacagctcctcctcttggagctgagatgagccccacgtggagctcgggacggatagtagacagcaataactcggtgtgtggccgcctggcaggtggaacttcctcccgttgcggggtggagtgaggttagttctgtgtgtctggtgggtggagtcaggcttctcttgctacctgtgagcatccttcccagcagacatcctcatcgggctttgtccctcccccgcttcctccctctgtggggaggacccgggaccacagctgctggccagggtagacttggagctgtcctccagaggggtcacgtgtaggagtgagaagaaggaagatcttgagagctgctgagggaccttggagagctcaggatggctcagacgaggacactcgcttgccgggcctgggcctcctgggaaggagggagctgctcagaatgccgcatgacaactgaaggcaacctggaaggttcaggggccgctcttcccccatgtgcctgtcacgctctggtgcagtcaaaggaacgccttcccctcagttgtttctaagagcagagtctcccgctgcaatctgggtggtaactgccagccttggaggatcgtggccaacgtggacctgcctacggagggtgggctctgacccaagtggggcctccttgtccaggtctcactgctttgcaccgtggtcagagggactgtcagctgagcttgagctcccctggagccagcagggctgtgatgggcgagtcccggagccccacccagacctgaatgcttctgagagcaaagggaaggactgacgagagatgtatatttaattttttaactgctgcaaacattgtacatccaaattaaaggaaaaaaatgaaaccaaaa

SEQ ID NO: 74238 - DNA, 1248 bp, Homo Sapiens
taagtgtttccactgactgttaaggcaagagggggcatgtgttgtcagagaaactcttgctggaagggtcaggttcctaggctacccacaaaggattctgcccccaacacagccgcaccaatgacaagccaacattggtgcaaagagctgccgtgaaccacagcctaaatctttgtcttaatgggaaaacatatgaggtcagaagtcaagaaactggggacatcttgacctgacccctccccacaaaggtggccacaggagcccaaccaccccggcagtctgagtgagacacgggctgcagcaacccacctgcccctgagcagccccttgtgagtgagcccagaggcctgaaccaggatcttcaaggatcgccctgccctcattaatggtggctcttgctatccgtccccatcccaccccacggtgtgccaggacccgaccgacctctcaaaggccacattacgagtgtccaggtgggtggagacgataggagaggtgaggcgactggccacatgctcctcgctgggccgcatggcggccagcagtgtttcgggctcctgcagagtgagccccagtgtctccacatgcaccacctgccggtcatggtccacttccatcaccagggctcctgcctcctggcccttgaagatgaagctcctccggccccgctgccaggtcatgtgcctcgaagcccaggagactggtgtctactcgcaggctctcaaccccgcttccacacgcggtacacatcgcttgggcacatcttagacacaaggggcacccagctggtgaactcccacttcatctcaacgtagaaatcgggggcctggcgaagtttgttgagcagttccggaatgcccgccagcctctgcgtggccctctggtagtcccgatactggagcaccagctgcaccatctcggggtctccagtgctgactgcctcctgcaggactgcgggcacacaggctgcccagccctggcggttctctttgcccacgttggcattgtgtcgaaggagcactctcacagactccaggtttcccagagacacggccagctccagtggggtccgcccgcgggggtcctcctgttcaatgtcgtgctggtggctgtgcagtgcggcctccagttcgcgatgccggttcgcccagacgagccaggtgcagcagggaaggtggggcccagggccaggccatgctgggcctcagcgccgcatcccggccccgcctcggcttcgggcctggcacg

SEQ ID NO: 74239 - DNA, 1037 bp, Homo Sapiens
  misc_feature (76)..(76): n is a, c, g, or t
  misc_feature (79)..(79): n is a, c, g, or t
aaacacagatccgtgacatactggttcatccagaagaagaggtcagagacttgggatctctatccaagtctcttcnttntggagcatggcagtcatgtgtaggcactccccccacagatgcaaacctgcagactccgtgctgagctgtgacccgagccagaatgccgtgggtgattgtgagtgatggccctttgagctgccctctagagagcaaatccagtttcctgagctcctgaatgatatctgtactggctcgctcagatgcagaagctccattgaccatgagcccttgtgaacatcagtggccacaggcccagtgtgctgcttggcactgcactagtttaggacctgcagcatgtaggtagcgtcctagtgtttataatacaaagctgctctgcacagcttttctgattcttcttgcaatctcctgaggattatctgccccatttttaaaacgaggtggaatacccaaggtcatgtagccagtgagtgctctggaaagccaaagcagctcatcccttcctggggaccacactgctctgctccaccagaccacactatgaaataggaataagtgctcctgttgcaggactgctgggaaaacaggtggggtgggacttaagtcaccataattttgaagacttgcatgcagagggctccaggaattgtagacattaaggaatttcactttcagttctacccactacttaagtacttgtcatgtactcttagaggaggccagtaatgatcagaaccattttactttaaaattaataatattgtattagagaatatattaaatggttatattgggttatgttaggatatatacttgaatggaaatacatgtactattagcaatcatatttcatttatccctgtaattagacaagaaagcataatatagctctactcatgggtacacataccagtgtataagatttttagaagtttactttttaaaaataaaagcaaaatgtaagatcttaagagttatgatcattaactctaccagatatggagatttgctgtgcccc

SEQ ID NO: 74240 - DNA, 608 bp, Homo Sapiens
  misc_feature (490)..(538): n is a, c, g, or t
ggggaacggaaacctcgcagggtcagaccgtagcgacgcgggaagtccggacgcagtagctccctgaagcggaggcgaaggggagtttaagccccagcggcggcaatggcggagaggcccgaggacctaaacctgcccaatgccgtgatcaccaggatcatcaaggaggcgctcccggacggtgtcaacatctccaaggaggcccggagcgccatctcccgcgccgccagcgtcttcgtgctgtacgccacatcctgtgctaacaactttgcaatgaaaggaaagcggaagacgctgaatgccagtgatgtgctctcagccatggaagagatggagttccagcggttcgttaccccattgaaagaagctctggaagcatataggcgggagcagaaaggcaagaaggaggcctcagagcaaaagaagaaggacaaagacaaaaaaacagactcggaagagcaagacaagagcagggatgaggacaatgatnnnnnnnnnnnnnnnnnnnnnnnnnnnnnnnnnnnnnnnnnnnnnnnnntagacaactgaaaagggcgggagactgtggcaccttggaaggtaccacttgaaatgagacgtgctacgtg

SEQ ID NO: 74241 - DNA, 1397 bp, Homo Sapiens
  misc_feature (23)..(23): n is a, c, g, or t
  misc_feature (25)..(25): n is a, c, g, or t
  misc_feature (84)..(118): n is a, c, g, or t
  misc_feature (1128)..(1172): n is a, c, g, or t
  misc_feature (1339)..(1339): n is a, c, g, or t
  misc_feature (1367)..(1368): n is a, c, g, or t
aggactatatacctcatatgggncnatcgctgttgcagccgaacgaccgagcgcagcgaagttagttagcgaggaagcggccgnnnnnnnnnnnnnnnnnnnnnnnnnnnnnnnnnnncagtcgacggtaccggacatatgcccgggaattcggccattacggccgggggttatggcctttgacaagagggattctgaacgactaaattagtcagttgctcgcttttgtttacttaatatgtatggttagatggtttttgatcatgtcagtcttccactagttcccctcaaattaagtaataataacttccatgctgcctgctgtgttccagatcacagaggcgagcacaaggtctcaggtaaaaactggaggcgtttgcttatggtcagcctatgtttgatttgcacagtctttgactaatgagtagctttacttaagactgcttcagaatgaggtaaggctttagagaatacttacttagaatgctgtgggagaataacaaagatctgttctgctcgtcttgcacttgacagaagcgattaacgtcgaacttttgttgttatcgatagacgccgacttggtgccaagaacctttcgtatattggcctagtagatgatcggcgctgcgtggtgtggcgagtaatctgatcacagatattcttaaatcagcagtgtggaatggtattagtcaaacatggtgccagtgtcttttacaaaagagcagatggcatagtgtcgagatgtaccttactctcgtgctactgtacagcttgaggatctgtcatcacctcccggtaacgttgtaaaaacccaggctgcctcttctggtagtccatctcccagacttgtgactatgggcttttcattcttcaatgcatgaccgagtgccaaacttgattatctctaggcacagctttctccctctgtgcctcctgcttcctttctctctcctgcctctcctctgctccccatcccactttctcatctgcctccttttctcacttctgtcagtctgtaagctttgataacctgcttaatactccaaagtgtgagttcctctgatctcttgattccttagttctaatctcacgttttgtttttaagagatggagtctctcactctgtgnnnnnnnnnnnnnnnnnnnnnnnnnnnnnnnnnnnnnnnnnnnnntgaaatcctgggctcaggtgatcctcccgcctgagcctcctgagtatctgggactacagatgcgtgccaccaagcctggctaattttgtctcatgtcttctaaaaaatatttttgtgaaagccccttcgcaaaaaaacttaaaggggaaatctggatgggggctcanggaaatctaactcttccctaaaaccatnncctctttaactggcttcctaaaaataata

SEQ ID NO: 74242 - DNA, 1111 bp, Homo Sapiens
  misc_feature (532)..(579): n is a, c, g, or t
ggggacgcagtagctccctgaagctgaggcgaaggggagtttaagccccagcggcggcaatggcggagaggcccgaggacctaaacctgcccaatgccgtgatcaccaggatcatcaaggaggcggtgagcagctcggggggggcggacgaacgggcaggagggaagcaggtgctggaacggcagctttgctcacccccggtctcctcgcagctcccggacggtgtcaacatctccaaggaggcccggagcgccatctcccgcgccgccagcgtcttcgtgctgtacgccacatcctgtgctaacaactttgcaatgaaaggaaagcggaagacgctgaatgccagtgatgtgctctcagccatggaagagatggagttccagcggttcgttaccccattgaaagaagctctggaagcatataggcgggagcagaaaggcaagaaggaggcctcagagcaaaagaagaaggacaaagacaaaaaaacagactcggaagagcaagacaagagcagggatgaggacaatgatgnnnnnnnnnnnnnnnnnnnnnnnnnnnnnnnnnnnnnnnnnnnnnnnntagacaactgaaaagggcgggagactgtggcaccttggaaggtaccacttgaaatgagacgtgctacgtgtttctgtgaagcttttccatgctgggcagagtagtctcaggcaaaagtgcctgaaaaagatcagaataaaaactgactagaaataccgtcaaaaccagcacttaccaaactcagagcatctgagtagcagaatcctgttttgcttcaatcaatctgaagttatggcttttgacacgagggattctgaacgataaattagtcagtttgctcgctttgttacttaaatgtatggttccgctggctttgatccggagcttcctagtcccaattagtataatacttcctgctgccgctgggttccgatccagagggcggtccaacaagggctggtatggcagctgtttgatgcagttgaaagagtctttacacgccagaaagctgaaacctcgggggggaaaaacgctctcgaaataatttgatccgcccctttgtagcgcggaacacctccagggacacccacac

SEQ ID NO: 74243 - DNA, 760 bp, Homo Sapiens
  misc_feature (51)..(212): n is a, c, g, or t
  misc_feature (529)..(626): n is a, c, g, or t
gtgtgagttcctctgatctcttgattccttagttctaatctcacgttttgnnnnnnnnnnnnnnnnnnnnnnnnnnnnnnnnnnnnnnnnnnnnnnnnnnnnnnnnnnnnnnnnnnnnnnnnnnnnnnnnnnnnnnnnnnnnnnnnnnnnnnnnnnnnnnnnnnnnnnnnnnnnnnnnnnnnnnnnnnnnnnnnnnnnnnnnnnnnnnnnnngtctcatgtcttctaaaaattattttgtgaagccccttcacaaaaaaccttaagggaaatctgatggtgctcaggaatctaactctccctaaaccatcctctttaactgcttctaaaatatctctgttggcctttcttagcctttttctgtttccattcagtgctccaagcgctttttgtttctaagttgagtgcttggggtttgacaggtagtgacgtgtagtttgacactgttaacttgttaaatacagtgaaaagtttgtgagtgaagaatgctgagaagattgtaatgctttgtacaaataaaagtcttgttnnnnnnnnnnnnnnnnnnnnnnnnnnnnnnnnnnnnnnnnnnnnnnnnnnnnnnnnnnnnnnnnnnnnnnnnnnnnnnnnnnnnnnnnnnnnnnnnnnttggtggggcggcctcgccccccaaaaattttttaaaacctttcgttgggggcggggccccaaaaggaaagggacctgggccaaagttgttcccaagaaaacccgggaaagagaaagggctgggattccccccc

SEQ ID NO: 74244 - DNA, 775 bp, Homo Sapiens
  misc_feature (354)..(406): n is a, c, g, or t
  misc_feature (565)..(609): n is a, c, g, or t
ggtaactgaattttgtttttcatagacccacttggcccaaaacctttctatattgcctgtagatgatcggcctgctggtgtggtagtaatctgatcacagatattcttaaatcagcagtgtggaatggtattagtcaaacatggtgccagtgtcttttacaaaaacagatggcatagtgtcagatgtaccttactctctgctactgtacagctttaggatttgtcatcacctcccggaaggtgtaaaaccccaggcttcctcttcttgtagtccatctcccagacttgtgactatggcttttcattcttcaattcatgacgagtgccaaacttgattttctctaggcacagctnnnnnnnnnnnnnnnnnnnnnnnnnnnnnnnnnnnnnnnnnnnnnnnnnnnnnccatcccactttctcatctgcctccttttctcacttctgtcagtctgtaagctttgataacctgcttaatactccaaagtgtgagttcctctgatctcttgattccttagttctaatctcacgttttgtttttaagagatggagtctctcactctgtgnnnnnnnnnnnnnnnnnnnnnnnnnnnnnnnnnnnnnnnnnnnnntgaaatcctgggctcaggtgatcctcccgcctgagcctcctgagtatctgggactacagatgcgtgccaccaagcctggctaattttggctcatgtcttccaaaaattattttgtgaagccccttcacaaaaaaccttaaagggaaaatctgatggtgctccagga

SEQ ID NO: 74245 - DNA, 2037 bp, Homo Sapiens
  misc_feature (450)..(496): n is a, c, g, or t
  misc_feature (1610)..(1771): n is a, c, g, or t
ggaagtccggacgcagtagctccctgaagcggaggcgaaggggagtttaagccccagcggcggcaatggcggagaggcccgaggacctaaacctgcccaatgccgtgatcaccaggatcatcaaggaggcgctcccggacggtgtcaacatctccaaggaggcccggagcgccatctcccgcgccgccagcgtcttcgtgctgtacgccacatcctgtgctaacaactttgcaatgaaaggaaagcggaagacgctgaatgccagtgatgtgctctcagccatggaagagatggagttccagcggttcgttaccccattgaaagaagctctggaagcatataggcgggagcagaaaggcaagaaggaggcctcagagcaaaagaagaaggacaaagacaaaaaaacagactcggaagagcaagacaagagcagggatgaggacaatgatnnnnnnnnnnnnnnnnnnnnnnnnnnnnnnnnnnnnnnnnnnnnnnnagtagacaactgaaaagggcgggagactgtggcaccttggaaggtaccacttgaaatgagacgtgctacgtgtttctgtgaagcttttccatgctgggcagagtagtctcaggcaaaagtgcctgaaaagatcagaataaaaactgactagaaataccgtcaaaaccagcacttaccaaactcagagcatctgagtagcagaatcctgttttgcttcatcaatctgaaggttatggccttttgacaagagggattctgaacgactaaattagtcagtttgctcgcttttgtttacttaaatgtatggttagatggtttttgatctgcagtcttccctagtcccccaaataagtaataataacttccatgctgcctgctgtgttccagatcacagaggcagccaaggctcaggaaaaactggggctttgcttatggtcagcctatgtttgattgcacagtctttgacaatagtagcttactaagactgctcagaatgagtaagctttaggaaactactaaaatgctgtgggagaataacaaaatccgttctctctcttcacttgacagaagcattaactgaattttgtttttcatagacccacttggccaaaacctttctatattgcctgtagatgatcggcctgctggtgtggtagtaatctgatcacagatattcttaaatcagcagtgtggaatggtattagtcaaacatggtgccagtgtctttaacaaaaacagatggcatagtgtcagaatgtacctaactctctgctactgtacagctttaggatgttgtcatcacctccccgaaggtgtaaaacccccaggcttcctcttcttgtaatccatctcccagacttgggaactagggctttctcattcctcaattcatgaccagtgccaaacttgattttctctaggcacagctttctccctctgtgcctccgtgcttcctttctctctcctgcctctcctcgtgctccccatcccactttctcagtctgcctccttttctcacttctgtcagtctgtaagctttgataacctgctgtgatactccaaagtgtgagttcctctgatctcttgattccttagttctaatctcacgttttgnnnnnnnnnnnnnnnnnnnnnnnnnnnnnnnnnnnnnnnnnnnnnnnnnnnnnnnnnnnnnnnnnnnnnnnnnnnnnnnnnnnnnnnnnnnnnnnnnnnnnnnnnnnnnnnnnnnnnnnnnnnnnnnnnnnnnnnnnnnnnnnnnnnnnnnnnnnnnnnnnngtctcatgtcttctaaaaattattttgtgaagccccttcacaaaaaaccttaagggaaatctgatggtgctcaggaatctaactctccctaaaccatcctctttaactgcttctaaaatatctctgttggcctttcttagcctttttctgtttccatctcagtgctccaagcgctttttgtttctaagttgagtgcttggggtttgacaggtagtgacgtgtagtttgacactgttaacttgttataaaccccgggggtttgtgga

SEQ ID NO: 74246 - DNA, 798 bp, Homo Sapiens
  misc_feature (162)..(188): n is a, c, g, or t
  misc_feature (523)..(531): n is a, c, g, or t
ccaatttacactaaataatttattttcccaaaatgtgtatgtgttctgaggcgtgacacatgatacagttccattggtcattctctatcaatcataatatgacaggacacaagaggctaaaaatggctcatcataatttattttatgttaaaatgtacagcnnnnnnnnnnnnnnnnnnnnnnnnnnngaagtgactgactaaaaagagaacagataaatacaagagtgtcgctggatcctattttatacaaggattacgcctctcctgcttggcccttactgtcaccctgtacaggtacaaaggctacaaaaaaggaagcaatataaacagacacaaataacttttttgcttttttacatgcgatttgtaagcttagtttgagctattcacaagctacttttctatttttccttaaaaaataactccaatattttataaagatagaaaaatctacagatggaatgaaaatgtaaagttagaggcatttccataaaatagcaactttacaccaaattcactannnnnnnnnaaatcctgccaagtatttggacatatatgaaatgtttcaaaacctgacagataaacactgagatatgcttcattcaataaacagaagtctgcatttataaaacagaaagctgccttttttccccaaagaaatctgtcaccaaaatggaaaagggtctcaactttacaccaaacatttagcaataaaacccttttgactaaccaaatgggaatagcttttatagctctttacagttttataattaacaaaaatatagttttttttaaa

SEQ ID NO: 74247 - DNA, 460 bp, Homo Sapiens
  misc_feature (56)..(82): n is a, c, g, or t
ataggatccagcgacactcttgtatttatctgttctctttttagtcagtcacttcnnnnnnnnnnnnnnnnnnnnnnnnnnngctgtacattttaacataaaataaattatgatgagccatttttagcctcttgtgtcctgtcatattatgattgatagagaatgaccaatggaactgtatcatgtgtcacgcctcagaacacatacacattttgggaaaataaattatttagtgtaaattggagttatgggattttctgatttgttttgactttgggggaggggttgccaataaataagagtaatatctaataaaaccatcacatataccaaatacctatttaataaattaatttataatggattttaatgcttttcatgaaagtttattttatgcgagtgcataccttctgtatgccaatcattgtctttaaaataaagtgaaaatgtttttttcaaa

SEQ ID NO: 74248 - DNA, 480 bp, Homo Sapiens
  misc_feature (417)..(438): n is a, c, g, or t
catcccccagcacactataatatagtgaactggaaaagtcccttccagaaacagcttggccagctttgtgaacctttgacatctgaaaacaaccaaggatccatctgggcttctcttccccagctttttgcctgatgccattttattgacagacaatggactttgaagtcagcctttgcctttgagaaagttcaagaactatggttggtcacgtctatctacaacctaatcctactctttggtagtctctgcagcagccacagccttagcagagctggggttcctgtcttctgcacacgattgactttcttgatgggtaattttttttaagattataccaacagtggatcagctgggttttggccaggaagttgtctttgtggactctgcctgcatggcttagtagtagaaggaaannnnnnnnnnnnnnnnnnnnnnataattcagtttaatcaataaacatgtatttattgactgtta

SEQ ID NO: 74249 - DNA, 1006 bp, Homo Sapiens
  misc_feature (53)..(53): n is a, c, g, or t
  misc_feature (82)..(82): n is a, c, g, or t
  misc_feature (162)..(162): n is a, c, g, or t
  misc_feature (181)..(181): n is a, c, g, or t
  misc_feature (184)..(184): n is a, c, g, or t
  misc_feature (197)..(197): n is a, c, g, or t
tcatatcatgcagcagtccgatgagcgcatggccaccatattgagtgccatcnagcacccagctacatttgtccgctctatntggtgatgtgacgatacattcaccagaacacttgactgtacgattatagaccattagggattgcctcgagccagatcgcnacgagtcctcctgcaaacnatnttgagagagacgngaccagcccaggaaagatgagtatacgtcccagatgtcgctccccgccacgagactgcggaccatcctcatagtttacagcattccccatgtatccagggccctgagcaccccaatcccggaaagccgttcactgccagagggtttccccgccagtgctaccttccagacaacgcccagggccgcaaggtcctagagctcctgaaggtggcctggaagaggcggctcatcttcacagtgggcacgtccagcaccacgggtgagacggacaccgtggtatggaacgagatccaccacaagacagagatggaccgcaacattacgggccacggctatcccgaccccaactacctgcagaacgtgctggctgagctggctgcccagggggtgaccgaggactgcctggagcagcagtgacctcgcaccccagcacgcccgcctctggtggccaccccgctgccccatggctggctgggtggccaggcaggaagtgcccagcccgagaggctgggaggtttgttgagggtgtggggtgtgccccacctgaagccggggctccccctgcctgcctctctctcctcctcccctctgggaattgggcagccctgggcagttgtactcatgggggcttaggatgcagctacctcagtgcgcagggcccgtctgtcctctgggggctgcttcgggcccgcggtgctcggggcctggtgtggggcgagtagagacttccccagcctggacgggcgtgggttctgggtcagcttcttttacctcaattttgtttgcaataaatgctctatagccaaagcc

SEQ ID NO: 74250 - DNA, 2543 bp, Homo Sapiens
  misc_feature (50)..(50): n is a, c, g, or t
  misc_feature (363)..(373): n is a, c, g, or t
  misc_feature (1954)..(1962): n is a, c, g, or t
  misc_feature (1986)..(1994): n is a, c, g, or t
  misc_feature (2045)..(2061): n is a, c, g, or t
  misc_feature (2385)..(2385): n is a, c, g, or t
  misc_feature (2419)..(2419): n is a, c, g, or t
gcaggctggtaccgctccggatttcccgggatatcgtcgacccacgcgtncgcctccctaggggttggggaaggacccaccccggtcagcacagtgccttttcctctcctgctctgagccagggtggggcattccctctagattcaggtttgggcaggggtcctatagtccctgccatggggctgcttccctgtcccttccctcccctttgctggcctactctggcataattcaagtgtcttcttgccttggggatccttagtggcatcaaatggcaacatggaatattgtcctccatgcccctccagaaggacctaggagagtaggtgagctttccaaagtgagagacgaatctttctttcnnnnnnnnnnnaaagggcaggatgggtatgctttgggctttctccttctgtggccccggaggaaggagagactgaggcaaggcaaagtgatagtacactgaagcagaaccggaaacacccaggaactgttcagaaatctcagaagaaatctgcttctcttcgatggaaagatataattaacgatcaaagagctctaagaaaattgcaaagaagccttaatgttcaagctttagaaagatcagagcaatttttctctttcagtccaaactaagactctctgtatttaaatctctctggggcaagagggctagatttcctcattttgttatgagactagattggtaccagtagatcagctgcctagcgagggcaggtttcttctttgcatctgtgtggcttgcttccagtctggcctgtcctttccagctgccttttgtctagcctgctatggggggccagattatcttgataagagcaggtgatttggggactagctgggttggcaggaaaagagcaggatggatctcttgggacaggttcccccaggagtataaacacaaggagccaggattgtgctggcagccaaggaaacagtagtgcctgtttgagttggcagagagggccttggcacctcttgcatccaggcagtcttgtgagatgggggcacatagcactggggaaagcagaactccattctcacctctattttgagcttcagtgctttatttcagtatgaggaaaaacaacaacaaactgaagtgcgctttccgtcctttcaaaggacaactgtcgggaagggagagccgagttgcgaggtaggaggggagcactggcagggagagacattcttgactcctctcttccctggtgtgttgtgatccagggaatgaaaagaaatttgaccctggattggttctctccttggacttaaggaatcttaccttttccttccacaaagttctcccaggcaaggaccagctgcccattctgagcccagggcagcctcttcaaccattattggtctaacctggcttgtcaggaaaccaagcccacccttccacattgggcctggctgctctattctgtaccaagtactggagaaaaagcatcaagttcttagcccttgtagcttctaccctagtttcccatcctctctctgtggaggccaaaccaactctttgccagcagccacaacatgcattgacagcggcacagtgagatataactgatgggctttgaacctggttggccggggaagctgtaggggtggatagagctggctttccttctgggctgtctccatctgaccctaccccttccatgtcccaccccactcccaccaaaaagtacaaaatcaggatgtttttcactgtccattgctttgtgttttaataaacaatttgcagtgacaaaaacataccgagcacgcatcatgccgcatccgcaccgtcgcaaccaacggtgcgcttcccaccggcgtgtgactgtacgaatccgtcgggccctccgtctccatagaattgacggtatacctcgctctgcatgggatacacaccagtaaatccaacggaaaaggaagaatgggttgtgtnnnnnnnnncctcgcttgcgcctcataggaaannnnnnnnncaagaccccttctctttttggtgggccacgcgcccccaccatgagggcgannnnnnnnnnnnnnnnncaacaaagtggttctgttcccacaagaaaaagagaccgcggttggggctgacagagaaggggtcggtagtagccctgccgtcgcaaaagagaaaataatgccgccgggggaaggaccaaacctacatcttgcgtcgccgcgcacctcccccgtaggtggggctctccgcgcgcggccttcatctacctcttagtccacctccgggcgggagtgctgggcgcggcgctcgactctatcatctaatatgtacacctcgcctctcatgctattatttagatgtagacgagaggcggcgtgaaggagatatcgaacaccatctcacgngcaggacacgggtgaggccactcctaccgccagntcatcgttagagaaacgcgagctccccgccggcagatctctcccccccaccgcgcgcgcccagaacactacacgatctgtgcgccccggggcgtcccatactcagagtggaaatcataatcttc

SEQ ID NO: 74251 - DNA, 1375 bp, Homo Sapiens
  misc_feature (1236)..(1236): n is a, c, g, or t
ccatgtgaactataaccagtggtaaaaaaagcaggctggtccggtcggtttccgggatatcgtcgaccacgcgtcggcggcggcggcggcggtcgaaagcggagtgaaagagggaggcagggagccggagagccggaaccggagtcgcagcggcggagacccctgtgcggtgcggagggggcggcggccccgactctgacccgcgccgggggtgggccatggcggagatcagcgacctggaccggcagatcgagcagctgcgtcgctgcgagctcatcaaggagagcgaagtcaaggccctgtgcgctaaggccagagagatcttggtagaggagagcaacgtgcagagggtggactcgccagtcacagtgtgcggcgacatccatggacaattctatgacctcaaagagctgttcagagtaggtggcgacgtccctgagaccaactacctcttcatgggggactttgtggaccgtggcttctatagcgtcgaaacgttcctcctgctgctggcacttaaggttcgctatcctgatcgcatcacactgatccggggcaaccatgagagtcgccagatcacgcaggtctatggcttctacgatgagtgcctgcgcaagtacggctcggtgactgtgtggcgctactgcactgagatctttgactacctcagcctgtcagccatcatcgatggcaagatcttctgcgtgcacgggggcctctccccctccatccagaccctggatcagattcggacaatcgaccgaaagcaagaggtgcctcatgatgggcccatgtgtgacctcctctggtctgacccagaagacaccacaggctggggcgtgagcccccgaggagccggctacctatttggcagtgacgtggtggcccagttcaacgcagccaatgacattgacatgatctgccgtgcccaccaactggtgatggaaggttacaagtggcacttcaatgagacggtgctcactgtgtggtcggcacccaactactgctaccgctgtgggaatgtggcagccatcttggagctggacgagcatctccagaaagatttcatcatctttgaggctgctccccaagagacacggggcatcccctccaagaagcccgtggccgactacttcctgtgaccccgcccggcccctgccccctccaacccttctggccctcgcaccactgtgactctgccatcttcctcagacggaggctgggcgtggggggggnctgtcctggctctgctgtcccccaagagggtgcttcgagggtgaggacttctctggagaggcctggagacctagctccatgttcctcctcctctctccccacttgaaccatgaagtttccaaaaaaagaggaagagaag

SEQ ID NO: 74252 - DNA, 473 bp, Homo Sapiens
  misc_feature (444)..(444): n is a, c, g, or t
ccgggagcccgtaaccatcattaagtctctgaccacccacaaaagcagaatcggtccatcaccagtgacacagctccaaggtggggctggtcacgataggagatgagggcggagcgcactaagacaggccacgcccgaggtcgcccacagagcgggtgcagaagccgcagactgccaccttaagtgccagcagcaggaggaacgtttcgacgctatagaagccacggtccacaaagtccaccatgaagaggcagtcggtcgcagggacgtcgccacctactctgaacagctcttttatacatcacagtgttagtggcacaaaatgtactgacatttcaaaaacacaaatcaaatctgttttgattttgtttcaccaccacttgtcaaatacataacgtatacatgtgcatggctcattcatgcatatttttatacaagattaanatacacccatagtaaagtgagcaaagaag

SEQ ID NO: 74253 - DNA, 1142 bp, Homo Sapiens
  misc_feature (111)..(111): n is a, c, g, or t
aagttgtgctgacaccaaacacatccagtttataatcagtacattggaaagctggtattgatgtagaaccagtgcataactttttatggggttttgttattggtttttttntgtaaagtgtgaataaaaggtatgtttactcatttttcctgaacactgtgttggtaatgtgcatcatgacaatttccagtgaaggtgagctggagctggttggactaatgagactgaggaagcagcttttcctacgatctgcattatgtaatcacaggtccagagagctttatggaagcgggagaggaggagcacttactcatgttgtatttgttaatggaggatgtcatcttttcatagatgctggaactagagtgcacttgttagatgctaaaggtttgagctttacacaaaatgtcttcatctgtatttgttattgtctacaatatatttgaatttggggcagcatattaagatgtaatggcctgttatgtcttgaaaatacttgttttgcctcttccaggcatactgcattctgtggatcagtttgaacagcttctccaccttatttggacagtgataaattgaaccaagagtgtagatttacaagtgtaaccttcaaaagaggaagaactatttggggtctgtaggtaatgaacagtcacaccaaaatagactatgatgcttttgttaagaaaggtttcatgttttagatattttccgtgtcctaaataattttcaataatctataatccctaaaatgcaataaaaactagtatgttttcacggtgtatattttgtttgcaaaaattctgtaacaaatatatttaatgtgttgccataatgtcatttcagtatttttgctggataaatccattttagaaatgtcttacaaaaagtttagggcatgttttctgttttaaagaccagaagtttgaaggcacccaaatccttgtcgccaatctcctgaagtacagctttaccatattagtggtcattatttatgctttgagagtttcaatattgttcgtcaagttaacttatggcataatttaagctaaagttgtagaaatgaattgttgagtgcaattgcatagtcccaaagataggcagagaacatctccagaaatgtgtgtgtttactatgattta

SEQ ID NO: 74254 - DNA, 1419 bp, Homo Sapiens
ctggatctcggccacggatcttttgctcgcgaaagttcctccgtctagctgcacacaacgctgctgcaggaaaccgaggtaagggatttgccgagacttagctccaccacactccccgaggccccgccctcctctctggccctcccctaggcccaggtgtctcgcgttgcacgtgcagttgttgtggttctacgtcacgtggtcccggaagtcaagacagacccgcctcaaacatggcggcgcccagcgcgcgaggacgtgatccgcttctgctccggcttggattgtagccttgacgaggtctgagcgaccatggaccggccggggttcgtggcagcgctggtggctggtggggtagcaggtgtttctgttgacttgatattatttcctctggataccattaaaaccaggctgcagagtccccaaggatttagtaaggctggtggttttcatggaatatatgctggcgttccttctgctgctattggatcctttcctaatgctgctgcattttttatcacctatgaatatgtgaagtggtttttgcatgctgattcatcttcatatttgacacctatgaaacatatgttggctgcctctgctggagaagtggttgcctgcctgattcgagttccatctgaagtggttaagcagagggcacaggtatctgcttctacaagaacatttcagattttctctaacatcttatatgaagagggtatccaagggttgtatcgaggctataaaagcacagttttaagagagattcctttttctttggtccagtttcccttatgggagtccttaaaagccctctggtcctggaggcaggatcatgtggtggattcttggcagtcagcagtctgtggagcttttgcaggtggatttgccgctgcagtcaccacccctctagacgtggcaaagacaagaattacgctggcaaaggctggctccagcactgctgatgggaatgtgctctctgtcctgcatggggtctggcggtcacaggggctggcaggattatttgcaggtgtcttccctcgaatggcagccatcagtctgggaggtttcatctttctgggggcttatgaccgaacgcacagcttgctgttggaagttggcagaaagagtccttgaagcagagacaagcctcacctccacttctgtcaagagaggggcctgcagtgcaaaccctcttccgctgagcagctgtctgaactataggccccagtgctgaagaccagttgtgctaagataccggcatggagattgtgccatccgtggtataggctggctggtatgaagtcattggcctgtatgccagagagctaagagaagaaaacggggtctgtggcggtactctgaacaatttcctcagaacctcttaataaataagtttggtaatgctgagaaaaaaaa

SEQ ID NO: 74255 - DNA, 1373 bp, Homo Sapiens
atggcacgaggcggcgccagcgcgttgaggacgtgatccgcttctgctccggcttggattgtagccttgacgaggtctgagcgaccatggaccggccggggttcgtggcagcgctggtgctgctgcattttttatcacctatgaatatgtgaagtggtttttgcatgctgattcatcttcatatttgacacctatgaaacatatgttggctgcctctgctggagaagtggttgcctgcctgattcgagttccatctgaagtggttaagcagagggcacaggtatctgcttctacaagaacatttcagattttctctaacatcttatatgaagagggtatccaagggttgtatcgaggctataaaagcacagttttaagagagattcctttttctttggtccagtttcccttatgggagtccttaaaagccctctggtcctggaggcaggatcatgtggtggattcttggcagtcagcagtctgtggagcttttgcaggtggatttgccgctgcagtcaccacccctctagacgtggcaaagacaagaattacgctggcaaaggctggctccagcactgctgatgggaatgtgctctctgtcctgcatggggtctggcggtcacaggggctggcaggattatttgcaggtgtcttccctcgaatggcagccatcagtctgggaggtttcatctttctgggggcttatgaccgaacgcacagcttgctgttggaagttggcagaaagagtccttgaagcagagacaagcctcacctccacttctgtcaagagaggggcctgcagtgcaaaccctcttccgctgagcagctgtctgaactataggccccagtgctgaagaccagttgtgctaagataccggcatggagattgtgccatccgtggtataggctggctgagatgtgtccagcccccccttgtggggtgtgagaagaaaccagctgcaactcaagtgactaggggggcccagctggcttcgtgcaggagggcacgacggacagattctacgccttacagacagacaggacttaaacctaaaaggaaaagccattcactgcaagtgtggatggcacttgcacccctggctctacagacagggaagcctgttgcaggggcatccacacatgagcagtgctcacctgaagctccttccggcgcatgtggagtcccaccgcacagcagcctaggggtctatgaagtgcaatataaatccaaggccttccatccttcccaccccgcaccaaaaactcctgtgaacaaatgtggttgtagcctctataaattccagccatgcgttaaggcaccagaactatttccccaccccctccaaaattaaacagcaacctgatacgaaaaa

SEQ ID NO: 74256 - DNA, 767 bp, Homo Sapiens
  misc_feature (54)..(54): n is a, c, g, or t
  misc_feature (69)..(70): n is a, c, g, or t
gcacgagcatactgaaaaattcagtcaagctgaatttattcagaatgcttaccngagctctttcatatnntgcacaggaacaaaagagaacacggactcccgctccctacccagaataaaaggacacccagaagaaactcactcagggaggtggggggttgggggcgagggctggaagaacaatgcaggagggggtggcatctccttcagcttcagcagtgtgccgagaagagggctaatttgaggaacaggatggtggtgcggagccctggcctgagggccgaggcagaacttccccttttcttgggccttggcccgttacaaagaggggtgttgcagcagctgatgcaaactgagttcagtttccctggggagcagaaggactggtacccggcagaggcgatgagacaggccgctgatgatgcacaggacttgcggtacatgatccctgtaacacagacccaaaggagctgagttaacgtgcaccggcaaaagaatagctgtccctctcagcccaaatccaaacggacagctcttccttactcctcccacagcccagagactaggtgaggtcagggaagtgcttcggattgtctcattgatattcaagatagatggtgaaagagacaggcactatttcattagttttaacaaaactgttccaaaagcgatttgagatgccaatacctgtgaatacctgttaataaagagctgttaaatagacttatttacattttaagtcagagttcacactgtgtacaagaaaa

SEQ ID NO: 74257 - DNA, 1834 bp, Homo Sapiens
tttatccttactgaagaaccaatttgcatccctgttgagaatacagggcttgtggccagtaataactctcccttttaggattcctgtctttccccattttttttctatccccagttgccatcacagcgtaacggtgcagggaggtatatgagggttgctaagggaaagcagaggtgcccctcactcaaacctacattcagaaaaaaatttccttcattattgattggatgtcttaaatgcaaagacttacacagaaactgggaagggaggacctatttcagacaaggattcaccatggaatttttatgaatatccttataaaataggacttgggatgcagatggattatttctttaagtcttgcaacttcagaaaagcctgagacacataccccctcctactatatatagtgattataaatagtatatttacctccaaaaaatttaacactgtgccctaatgcaagaaaaatctgtggtataacaatgtactcatgttctgtagctctttactgaaggcctcatgtcaaaggcggggaaggaaagcaattctgtggctctgcacttctacccaagtctgaagagaagtgagccaagttaaatgaaggtcaaggatgctcctcctggtcctctcaggggctggtaaagtcttatatgacgttttctggggagtcattactctgtccaaagtcgaggtagctcagaggccttcaggccgctgatacttccagaaggccacctccccatcatcactgcaggaggccagtagccctggctccttggggttccaggccacacagttgacatcctgggaatgggcctgatgcaagtgggctgtcagggagaaggtgggctgctgtggatccgagttgggatcctcctgaaacacgcggatcgcgtcatccccacaagctgtggccagagcccctgtcagctgacaccaagcaatgtcataaatggtccttgagtggaagccggacaaagtacagatacatttccaactggggtcagagccgctgcatgccaccccttgttcattgcctggtagatactgacgccagatacgcacagtacggtcatcactacaagacgccaggcgctggccactcgggtcaaaggccaagctccacacagtggattcatggccctcaagggtggcacagcatacccagtcatcctcttcctccccggtacagcttcactgtgtcatcatagctggcagaagctaagagctcctgacttgggtgccaaaccacatgcttgacatcctgtgtgtgggagtggagaacactgacacattcatactcatcctcttcatcaacttcccagacccaaacgctcttatctcggctgcaagtggccaggaggttgccagatggggcccaagccactgacttgacctcattttcatggccctcgagagtggttacacactcaaagtcatcctggttcttcttccaaatgcaagtggtagcatcaaagctggcagaggccaggtaattaccgcagggggaccaggctaccttccgcacggtgcgctggtggccttcagaaaggacagacttgcagatccagctgtcaccctccgtgccccagatgcggattctccggtcgccgccgcacgaggccagcagggtccccgcggggttccaggccaggaaccagcagcgggagtccgggtgcgccgggacacggcccagcagcaccagcgagtccttcatgtcggcccgacgcagggggaggtgggggcgggcagagtccgctgagcagacagcgggtctcaccgcgcgcgtctgcgtaccgcccactccaggcttccgcggccgacagagccc

SEQ ID NO: 74258 - DNA, 1047 bp, Homo Sapiens
  misc_feature (155)..(155): n is a, c, g, or t
  misc_feature (168)..(168): n is a, c, g, or t
  misc_feature (205)..(205): n is a, c, g, or t
  misc_feature (212)..(212): n is a, c, g, or t
cagaatgatggtatcattatagcccacgtaacatttgtccggtctattttgggattggcggaacaatccaccgggacgttgcatgatagaattatcgactcttgggaattgcctaggcaaagatcgcagggcatccctgaaatttaacagctacntgcaaggatgtcntataagaaccactgtgttaagcagaggaacctctttnttctctntgttgtgaaggcagggacacaggatggagagatgaccaagtcaccttctgttggttaatatggtataatgcatggctttgtgcacagcccagtgtgggattacagctttgggatgaccgcttacaaagttctgtttggttagtattggcatagtttttctatatagccataaatgcgtatatatacccatagggctagatctgtatcttagtgtagcgatgtatacatatacacatccacctacatgttgaagggcctaaccagccttgggagtattgactggtcccttacctcttatggctaagtctttgactgtgttcatttaccaagttgacccagtttgtcttttaggttaagtaagactcgagagtaaaggcaaggaggggggccagcctctgaatgcggccacggatgccttgctgctgcaaccctttccccagctgtccactgaaacgtgaagtcctgttttgaatgccaaacccaccattcactggtgctgactacatagaatggggttgagagaagatcagtttgggcttcacagtgtcatttgaaaacgttttttgttttgttttgtaattattgtggaaaactttcaagtgaacagaaggatggtgtcctactgtggatgagggatgaacaaggggatggctttgatccaatggagcctgggaggtgtgcccagaaagcttgtctgtagcgggttttgtgagagtgaacactttccactttttgacaccttatcctgatgtatggttccaggatttggattttgattttccaaatgtagcttgaaatttcaataaactttgctctgtttttctaaaaataaaaa

SEQ ID NO: 74259 - DNA, 639 bp, Homo Sapiens
cacctctcttctcacagcatacatcagatgattcttcaccagatccatggcctgttcgatcttgttgtctatggccaccacgctggctccggaggcactgccaagacaaaaagcaaagcgacccattacccactcggttctactcttgagtacatggcagttgtggccaaagtcctccatctgcctcggctcttcctctctctctccttctcgcctccctggcccagagttccggacagtttgtccccagatccttccttggcccctgcaggaagctgcatctcctcatccaggccggctcagcgctgctgccgccgccccgagttccaaccgatcggagctgcttgcgagtcctggggcgcgcaggccaccgtggcctgctcgggcaatatgcaaacaatggggctgtgcgacccggggagtcccccacagccggcctacaaggtcccaggcaaacctacccggctctgaagctagctaggaattccttctcggctggtaagcttccggccttctcccaagcggcgcacggcgctcggccagccccctgcccagccctgtctggtcctgcccgccgcccctctgcctccggctgcctctgcggctgcagcagctggttttcacggcgcagcggccgca

SEQ ID NO: 74260 - DNA, 847 bp, Homo Sapiens
cagtcgacggtaccggacatatgcccgggaattcggccattacggccggggggcagagccactaaacttgttttacctagttctttccagtttgtttttggctccccaagcatcatctcacgaggagaactttacacctagcacagctggtgccaagagatgtcctaatggacatggccacctgggtccactccagcgacagacccctgacaagagcaggtctctggaggctgagttgcatggggcctagtaacaccaagccagtgagcctctaatgctactgcgccctgggggctcccaggccctgggcaacttagctgcaactggcaaaggagaagggtaagtttgaggtgtgacaccagtttgctccagaaagtttaaggggtctgtttctcatctccatggacatcttcaacagcttcacctgacaacgactgttcctatgaagaagccacttgtgttttaagcagaggcaacctctctcttctcctctgtttcgtgaaggcaggggacacagatgggagagattgagccaagtcagccttctgttggttaatatggtataatgcatggtttgtgcacagcccagtgtgggattacagcttgggatgaccgcttacaaagtttctgtagggttagtattggcatagcttttactatatagcccattaaatgcggtatatattaccattagggtagactctgtatcttagtgtcggatgtatacattatatagcttccactacatgttgaggctaacccagactgggagtttgcgggccttactcttagggaagttgcgatgggttcattaccatagaccagttgctttgaggaacaatcgcag

SEQ ID NO: 74261 - DNA, 1344 bp, Homo Sapiens
  misc_feature (81)..(115): n is a, c, g, or t
  misc_feature (321)..(378): n is a, c, g, or t
aaagtgtatccgatcacttaggggtccgcttgtgagccgaacgacgagcgcagcggagtctagtgagcgaggaagcggcgnnnnnnnnnnnnnnnnnnnnnnnnnnnnnnnnnnncagtcgacggtaccggacatatgcccgggaattcggccattacggccgggggagtctgggttggactggcggccgtggagtttgtgacatacgaggtgacacccctcgagtcacttcccttcaactccagctggagcgcctgcttggctatgggttcgttctgcagccttcgccccgctcctagcctcagggccggactccagcgnnnnnnnnnnnnnnnnnnnnnnnnnnnnnnnnnnnnnnnnnnnnnnnnnnnnnnnnnncgcacgaaacccggccagagcttcctagcagcccgagccatgaacaccgaaatgtatcagacccccatggaggtggcggtctaccagctgcacaatttctccatctccttcttctcttctctgcttggaggggatgtggtttccgttaagctggacaacagtgcctccggagccagcgtggtggccatagacaacaagatcgaacaggccatggatctggtgaagaatcatctgatgtatgctgtgagagaggaggtggagatcctgaaggagcagatccgagagctggtggagaagaactcccagctagagcgtgagaacaccctgttgaagaccctggcaagcccagagcagctggagaagttccagtcctgtctgagccctgaagagccagctcccgaatccccacaagtgcccgaggcccctggtggttctgcggtgtaagtggctctgtcctcagggtgggcagagccactaaacttgttttacctagttctttccagtttgtttttggctccccaagcatcatctcacgaggagaactttacacctagcacagctggtgccaagagatgtcctaaggacatggccacctgggtccactccagcgacagacccctgacaagagcaggtctctggaggctgagttgcatggggcctagtaacaccaagccagtgagcctctaatgctactgcgccctgggggctcccagggcctgggcaacttagctgcaactggcaaaggagaagggtagtttgaggtgtgacaccagtttgctccagaaagtttaaggggtctgtttctcatctccatggacatcttcaacagcttcacctgacaacgactgttcctatgaagaagccacttgtgttttaagcagaggcaacctctctcttctcctctgttacgtgaaggcaagggacacagatgggagagattgaccaagtcagccttctcttgcctat

SEQ ID NO: 74262 - DNA, 1156 bp, Homo Sapiens
  misc_feature (870)..(878): n is a, c, g, or t
acaatcacatcttttaaaggtcttggggtttttcaactgtttaacactattgccaatgttttttaagtcggtgccttttgttcaggggtagtactccccataaattctgggggaccctgttttttatcccaaatttttaccgatgtgtgtaaaaggggtattaataccctgatttcgtcagatacccctttgagacaagatctcgtgccaaagatttcttatatttggaacccaagatggttaaaccaagcaaatgctttggagcctttctaacgattccttcctgttctaatttgccatcctttgtccgtggatggaacactgtctggaccttggttgccaacaactctgtgggggtttctgaaggtggtcccctttgattgggttgcctgccctgtcaggggacttgccacccctgacaagtgtaaagggcaacagtcctgttcttgtggccctgggccaaaaccaagtgctgatggacgcgtgatcagcttcctgttttctttcccatactttgcaattacacccacctgcaaaaagtgtcgtaaatgcaaattttgtatgttctttacaggcctacagaaattgaaaatgaccaaaatcaggaaccacagatttgtgcccattcctaatattttgttctgcaaattaatgtataatttgaggtgaaattcagttataaagtcaaggacgaatttgcacagtgatatatttctatgtgtatgcaagtacaagtatataatatgtcacctggcacattcattttctcagttgaagaagagaaaatttgaaaatgtccttatgcttttagagttgcaacttaagtatatttggtagggtgagtgtttccactcaaaatatgtcaacttnnnnnnnnntaggccctttcataaaaaccaaactctagcaagatgcaaatgcatggcaaatcctgtcggtctccagttggttatctgaatagtgtcaccaattccaccaagacagtgctgagattggaaaagggcactcatttggattgccttacttctcttgccttaaatatatcccatatatttaatatgtcaaaaagggcttgaggtgaatttcattaaatggaataatatgatgccactttgcagctaaaataagctcagtgatacctccttgttaaaaaaaa

SEQ ID NO: 74263 - DNA, 1025 bp, Homo Sapiens
catcctggcgtcaggcctccttcctgccttacccaggacagcccagttgcagctgggttggtcccacagtcccacacacacacagcccgagtgtggtgcctcacgtgggctgccccgtgcctacccacagccacagaccccgcacctggaggaggacttgaaggaggtgctgcgttctgaggctggcatcgaactcatcatcgaggacgacatcaggcccgagaagcagaagaggaagcctgggctgcggcggagccccatcaagaaagtccggaagtctctggctcttgacattgtggatgaggatgtgaagctgatgatgtccacactgcccaagtctctatccttgccgacaactgccccttcaaactcttccagcctcaccctgtcaggtatcaaagaagacaacagcttgctcaaccagggcttcttgcaggccaagcccgagaaggcagcagtggcccagaagccccgaagccacttcacgacacctgcccctatgtccagtgcctggaagacggtggcctgcggggggaccagggaccagcttttcatgcaggagaaagcccggcagctcctgggccgcctgaagcccagccacacatctcggaccctcatcttgtcctgaggtgttgagggtgtcacgagcccattctcatgtttacaggggttgtgggggcagagggggtctgtgaatctgagagtcattcaggtgacctcctgcagggagccttctgccaccagcccctccccagactctcaggtggaggcaacagggccatgtgctgccctgttgccgagcccagctgtgggcggctcctggtgctaacaacaaagttccacttccaggtctgcctggttccctccccaaggccacagggagctccgtcagcttctcccaagcccacgtcaggcctggcctcatctcagaccctgcttaggatgggggatgtggccaggggtgctcctgtgctcaccctctcttggtgcatttttttggaagaataaaattgcctctctctttg

SEQ ID NO: 74264 - DNA, 1525 bp, Homo Sapiens
  misc_feature (1140)..(1140): n is a, c, g, or t
  misc_feature (1372)..(1372): n is a, c, g, or t
aacggctaggtagaggctgggtgggaatcggcacgagggttcctcacggaggtcaaatttactcaggaaccagctgcactaggctgttgttgatactgtcctctgcagatggttcctcagggaggtcaaatttactcaggtcacaccaagcatcacatcagcagcaagtcctgccaccccgccagccttccgccctggtgcccagtgtgaccgagtaccgcctggatggccacaccatctcagacctgagccggagcagccggggcgagctgatccccatctcccccagcactgaagtcgggggctctggcattggcacaccgccctctgtgctcaagcggcagaggaagaggcgtgtggctctgtcccctgtcactgagaatagcaccagtctgtccttcctggattcctgtaacagcctcacgcccaagagcacacctgttaagaccctgcccttctcgccctcccagtttctgaacttctggaacaaacaggacacattggagctggagagcccctcgctgacatccaccccagtgtgcagccagaaggtggtggtcaccacaccactgcaccgggacaagacacccctgcaccagaaacatgctgcgtttgtaaccccagatcagaagtactccatggacaacactccccacacgccaaccccgttcaagaacgccctggagaagtacggacccctgaaacccctgccaaagaccccgcacctggaggaggacttgaaggaggtgctgcgttctgaggctggcatcgaactcatcatcgaggacgacatcaggcccgagaagcagaagaggaagcctgggctgcggcggagccccatcaagaaagtccggaagtctctggctcttgacattgtggatgaggatgtgaagctgatgatgtccacactgcccaagtctctatccttgcctcaccctgtcaggtatcaaagaagacaacagcttgctcaaccagggcttcttgcaggccaagcccgagaaggcagcagtggcccagaagccccgaagccacttcacgacacctgcccctatgtccagtgcctggaagacggtggcctgcggggggaccagggaccagcttttcatgcaggagaaagcccggcagctcctgggccgcctngaacccagccacacatctcggaccctcatcttgtcctgaagtgttgagggtgtcacgagcccattctcatgtttacagggggttgtgggggcgaaaagggggtctgtgaatctgagagtcattccaggtgacctcctgcagggagcctttctgccaccagccccctccccagactcttcagtgggaggcaacagggccatgtgcctggccctgttgcccgagccccacttgnggggcggcttcctggtgcctaaccaacaaagttccaccttccagggcctgccttggtttccctcccccaaggccccccgggaagctcccgtcagcttcctcccaagcccaccgtcaaggcctgggcttcttttccgaaccctgcttatagggg

SEQ ID NO: 74265 - DNA, 2616 bp, Homo Sapiens
  misc_feature (2186)..(2186): n is a, c, g, or t
ggctaggtacgaggctgggtgttgaatcggcacgaggaggagcgcgggacctgctgacacgctgacgccttcgagcgcggcccggggcccggagcggccggagcagcccgggtcctgaccccggcccggctcccgctccgggctctgccggcgggcgggcgagcgcggcgcggtccgggccggggggatgtctcggcggacgcgctgcgaggatctggatgagctgcactaccaggacacagattcagatgtgccggagcagagggatagcaagtgcaaggtcaaatggacccatgaggaggacgagcagctgagggccctggtgaggcagtttggacagcaggactggaagttcctggccagccacttccctaaccgcactgaccagcaatgccagtacaggtggctgagagttttgaatccagaccttgtcaaggggccatggaccaaagaggaagaccaaaaagtcatcgagctggttaagaagtatggcacaaagcagtggacactgattgccaagcacctgaagggccggctggggaagcagtgccgtgaacgctggcacaaccacctcaaccctgaggtgaagaagtcttgctggaccgaggaggaggaccgcatcatctgcgaggcccacaaggtgctgggcaaccgctgggccgagatcgccaagatgttgccagggaggacagacaatgctgtgaagaatcactggaactctaccatcaaaaggaaggtggacacaggaggcttcttgagcgagtccaaagactgcaagcccccagtgtacttgctgctggagctcgaggacaaggacggcctccagagtgcccagcccacggaaggccagggaagtcttctgaccaactggccctccgtccctcctaccataaaggaggaggaaaacagtgaggaggaacttgcagcagccaccacatcgaaggaacaggagcccatcggtacagatctggacgcagtgcgaacaccagagcccttggaggaattcccgaagcgtgaggaccaggaaggctccccaccagaaacgagcctgccttacaagtgggtggtggaggcagctaacctcctcatccccgctgtgggttctagcctctctgaagccctggacttgatcgagtcggaccctgatgcttggtgtgacctgagtaaatttgacctccctgaggaaccatctgcagaggacagtatcaacaacagcctagtgcagctgcaagcgtcacatcagcagcaagtcctgccaccccgccagccttccgccctggtgcccagtgtgaccgagtaccgcctggatggccacaccatctcagacctgagccggagcagccggggcgagctgatccccatctcccccagcactgaagtcgggggctctggcattggcacaccgccctctgtgctcaagcggcagaggaagaggcgtgtggctctgtcccctgtcactgagaatagcaccagtctgtccttcctggattcctgtaacagcctcacgcccaagagcacacctgttaagaccctgcccttctcgccctcccagtttctgaacttctggaacaaacaggacacattggagctggagagcccctcgctgacatccaccccagtgtgcagccagaaggtggtggtcaccacaccactgcaccgggacaagacacccctgcaccagaaacatgctgcgtttgtaaccccagatcagaagtactccatggacaacactccccacacgccaaccccgttcaagaacgccctggagaagtacggacccctgaagcccctgccacagaccccgcacctggaggaggacttgaaggaggtgctgcgttctgaggctggcatcgaactcatcatcgaggacgacatcaggcccgagaagcagaagaggaagcctgggctgcggcggagccccatcaagaaagtccggaagtctctggctcttgacattgtggatgaggatgtgaagctgatgatgtccacactgcccaagtctctatccttgccgacaactgccccttcaaactcttccagcctcaccctgtcaggtatcaaagaagacaacagcttgctcaaccagggcttcttgcaggccaagcccgagaaggcagcagtggcccagaagccccgaagccacttcacgacacctgcccctatgtccagtgcctggaagacggtgngcctgcggggggaccagggaccagcttttcatgcaggagaaagcccggcagctcctgggccgcctgaagcccagccacacatctcggaccctcatcttgtcctgaaggtgttgagggtgtcacgagcccattctcatgtttacaggggttgtggggggcaaaagggggtctgtgaatctgagagtcattcaggtgacctcctgcagggagccttctgccaccagccccctccccaaactcttcgggtgggaggccacaggggcccatgtgcctgcccctgtttgccccagccccacgctgtgggggcgggctccttggtggctaacaaacaaaagttccccccttcccagggtcttgggcctgggatcccctccccccaagggcccacagaggggaagcttcccggttccagctttctctcccccccagc

SEQ ID NO: 74266 - DNA, 810 bp, Homo Sapiens
cccacgcttgggggtataaaaaagcagctgtcggccgatacggatgcggaacagctcagctgttgtcagcgagtgagacgggagagcgtgggtcactgcccctcctgccagcggctcttcatggtcctgctcctcaagggcgtacctttcaccctcaccacggtggacacgcgcaggtccccggacgtgctgaaggacttcgcccccggctcgcagctgcccatcctgctctatgacagcgacgccaagacagacacgctgcagatcgaggactttctggaggagacgctggggccgcccgacttccccagcctggcgcctcgttacagggagtccaacaccgccggcaacgacgttttccacaagttctccgcgttcatcaagaacccggtgcccgcgcaggacgaagccctgtaccagcagctgctgcgcgccctcgccaggctggacagctacctgcgcgcgcccctggagcacgagctggcgggggagccgcagctgcgcgagtcccgccgccgcttcctggacggcgacaggctcacgctggccgactgcagcctcctgcccaagctgcacatcgtcgacacggtgtgcgcgcacttccgccaggcgcccatccccgcggagctgcgcggcgtacgccgctacctggacagcgcgatgcaggagaaagagttcaaatacacgtgtccgcacagcgccgagatcctggcggcctaccggcccgccgtgcacccccgctagcgccccaccccgcgtctgtcgcccaataaaggcatctttgtcgggagtgagggtgtcctgacatct

SEQ ID NO: 74267 - DNA, 1047 bp, Homo Sapiens
ctttgtagggactgtgcctaggtagcatgtcctaacatttgttctggtcttgcataacttcagtaatctttgtcattatatgtaactttgttgctctgtatggcataatattgtatccataaacatggtaattttgatacagttatacttttacagtggtacataatccaaggactagtatagaattaagctgagtgcaagatgagggagggaagggctttcttggtaatttagatgtgaaacctctacagagctatcatgtaaaaactacataaggtggttgtgctactgtataattgggggtgataataccaggaattttaataagattttgtaaagaatatccagaaaagtagtgaacttattttcagtagacatagaaaacaatgtgaatatttaaggtctgtgactatagttaaacttcactaagaatttgcagaattgttttgagatgtgtgaataaaggtaattttattgaatcttcattggtgctaatgatggacagttaaaaagatagctagtgtatattgttatgggtcagtacttattagtacttccaaaattgaatttgaaatgctatgtattcacttttcactctgtaaatgtaattctttacaatgactttatttattaaagggcagccagttgtcatttttacaggattgtgtgagctattcaaactcttcaacccctgaacagggtattaagcttccaaaataatgatggggataaatatggaaatcctttttaagttgtatttccattaaacaaaaacccttataattcatactatcatgaatttgctttatccatctcatttgcataacagttcatctgtctggtcccattaggctctaccaaagaaagactctgatgagtggacattattactgtgactcttgtaagtagccataaataaaccaaaatagtatcaaatttaggtatgaaattccacatgtgcaaagtactgttaaggtgataacatttttgatgagatttaaaaaaatatttgaaatattaaaaagcattatctttaaacatccaaaa

SEQ ID NO: 74268 - DNA, 556 bp, Homo Sapiens
cccccaacacagacctcagaaaaattgcgattgaggaagtagcatgatcctaaatgtgttgctgaaatcaggcagcccgagcctctggtctctccagagagcccgtcttcacatttctctattcctcagcactcacccgaaactgaacagatggggagtggtcttgattgtcaagataaaactggtgaagaaagctaaatgctgagaaactgagcatctattgtcgtgtttaagcttagctgggtcctttctagtttgtttttacagcttactaggtgaagtagtttgcactatttttgcaataaattcatggaaaacctaacagttacttgttttgtttcttactgtgtgtatataaactaatactaaaagtttggcatagtgttttttcacctccttacataacccctaacatgcacagaatgctgtaaatctgataaaatatgatgtgaatgatattttataaagttattttgtatggtgtcaattttgttttgcctcatagtatgtcagcaaaaaattaaataaaagtcctcctatttacagatgcctcttc

SEQ ID NO: 74269 - DNA, 1113 bp, Homo Sapiens
  misc_feature (94)..(102): n is a, c, g, or t
tttatgatatagttattttttattgtgtaagcccttattagttcctccctcatcccatcttaaaatattcaacaatagatagtggctcaaaaannnnnnnnnaaaaaaacagactgccatgaaaaccaaatcttttcttcctgtaatagtggcttcctagtgttatttctcattaatgggagtatccgtggacttaactgtatattgcattttagttctggtcgtgtaataatttaatgacttcacacataaaaaactaatcttgtcttgagttttaaaaagttactagcacccatggttaaggaaggaaaactgtagctcacttcttcaatacatttgtttcttttcaattcatgaaatcagagaatatggaagaaacaggatgacagtcaccaagagtggttgaaactacaaactatcacgcaattgaaaataccacattaaagatatatttatatacagaaaatggagcaatgccaataaaattttataatttaaaaaagttacttgttaaaggcagatttcataagttgtgtttacaatcatccatttaatcatctccaaaaaaaggatgaatttattattttaaactaacattctgtaagttaaagagaataatcaagttgtctcatggactggaaggtgacttattaattccctttcatttccaaacctcatcaagcagtcactacatttatgaggcaagtcagctgaatgcttgaaatctagatgaattttaagatcttcaatttgtcctgttgaatattcacaatattgacataaataaatcccttcagataaatgtgaatttaaatgcttgcaatattctagcatacttgaaaagcctttcccacagtcatcacaaacatgaggaaaaatttttgtatgttcaatagcaacatgcctgttaacatttgtgtgaagtctactccgaaaaccacatacttgacatacaaagaagtttttacatttgtcaaaggtaattttgcttaagaggctatactgtccatgttcaccattgttatacttatcacttaactctattaatttacatgcatgctcatttaccacatggctatgcaagtcttctggatcattagtttcatgttcaca

SEQ ID NO: 74270 - DNA, 1292 bp, Homo Sapiens
  misc_feature (13)..(13): n is a, c, g, or t
  misc_feature (612)..(612): n is a, c, g, or t
cggcttggtactncggtccggaattctccgggatgtccaaaggacgctagctgttgcacctgttcctccctgcgcgtaagatagaggataaatctcctggcaaagcccagaatgaccacagccctggaacctgaggaccaaaaaggacttctgataattaaggcagaggaccattactggggacaggattccagctcacaaaagtgcagtcctcacaggagggaactctatagacaacacttcaggaagctctgctatcaggatgcacctggaccccgtgaagctcttacccagctgtgggagctctgccgtcagtggctgaggccagaatgccacaccaaggagcagattttagacctgctggtgctagaacagttcctgagcattcttcctaaagacctgcaagcatgggtgcgtgcacaccatccagagactggagaggaggcagtgacggtactggaggatctggagagagagcttgatgaacctggaaagcaggtcccaggcaattcagaaagacgggacatactcatggacaagttggcccccttgggaaggccatatgaatcactgactgtccagctccatcccaaaaagacccagctggagcangaagctgggaaaccacaaaggaatggtgataaaactaggactaagaatgaagagttgttccagaaggaagatatgcccaaagacaaggaattccttggggagataaatgacagactgaacaaagatactcctcagcatcctaagtccaaagatattattgaaaatgagggcagatcagaatggcaacagagggaaagaagacgatataaatgtgatgaatgtgggaaaagtttcagtcatagctcagaccttagtaaacacaggagaactcacacgggagagaagccctataaatgtgatgagtgtggaaaagccttcattcagcgctcacatctcattggacatcatagagtacacacgggagtaaaaccctataaatgtaaagaatgtgggaaagacttcagtgggcgcacaggtcttattcagcatcagagaatccacacaggtgaaaaaccctatgaatgtgatgagtgtggaaggcctttccgagtaagttcagctcttattagacatcaaagaattcataccgcaaataaactctactaatatagcagtaatatcaaaagttctttggacactcaggcctaactagttatcaaagaatctattttagaaaccttgagtttcctcaatgtggtcaaagcttcagtcatcattaaacttctctggaccaaaaaaaa

SEQ ID NO: 74271 - DNA, 656 bp, Homo Sapiens
gacctgccagttgatttgtgagagatgtactatcctcattcagctgatgagaaagcagactcttaccggggtttgagaaacttggcaaggccatgtagttcgtaggctgatgagaaccatgctctccccactcccctgagacgccttcgacaggttttaggaattgttatccaggtcatgatggtttggccctgttccactcgtttcccactcttctccctggaagattggggctggatggcactcttaggaacctaggtagggtgtacatagtcctgttgtgagacagttttaacgtaaacagtgtgataaggttttggcttctggccctttgggtctgacctgatacagcaattagagagggttgtcagaatgccgtctgcacagttttaagctgaatgtccttgctttacaggagcaggagcagtgacttcacctgagaacatcccagcgggaggacaagagaaatcatgtttattcctcaggaatactgaagtgccctggagtaagctgccattcttctgtaacaatgttatcagtaatgctttaaactccagcacctggttatgcatttgaaaccaagtctgtttcttgttttgtattttctctctggaagttgtaaggaggtggtcttaaataaatttaacaaaaatagg

SEQ ID NO: 74272 - DNA, 1092 bp, Homo Sapiens
  misc_feature (44)..(61): n is a, c, g, or t
  misc_feature (108)..(108): n is a, c, g, or t
  misc_feature (282)..(985): n is a, c, g, or t
taacctcactaaagggaataagcttgcggccgcggctgtaggcnnnnnnnnnnnnnnnnnncctatttttgtttaatttatttaagaccacctccttacaacttccangagagaaaatacaaaacaagaaacagacttggtttcaaatgcataaccaggtgctggagtttaaagcattactgataacattgttacagaagaatggcagcttactccagtgacttcacctgagaacatcccagcgggaggacaagagaaatcatgcctcgtgccgaattcttnnnnnnnnnnnnnnnnnnnnnnnnnnnnnnnnnnnnnnnnnnnnnnnnnnnnnnnnnnnnnnnnnnnnnnnnnnnnnnnnnnnnnnnnnnnnnnnnnnnnnnnnnnnnnnnnnnnnnnnnnnnnnnnnnnnnnnnnnnnnnnnnnnnnnnnnnnnnnnnnnnnnnnnnnnnnnnnnnnnnnnnnnnnnnnnnnnnnnnnnnnnnnnnnnnnnnnnnnnnnnnnnnnnnnnnnnnnnnnnnnnnnnnnnnnnnnnnnnnnnnnnnnnnnnnnnnnnnnnnnnnnnnnnnnnnnnnnnnnnnnnnnnnnnnnnnnnnnnnnnnnnnnnnnnnnnnnnnnnnnnnnnnnnnnnnnnnnnnnnnnnnnnnnnnnnnnnnnnnnnnnnnnnnnnnnnnnnnnnnnnnnnnnnnnnnnnnnnnnnnnnnnnnnnnnnnnnnnnnnnnnnnnnnnnnnnnnnnnnnnnnnnnnnnnnnnnnnnnnnnnnnnnnnnnnnnnnnnnnnnnnnnnnnnnnnnnnnnnnnnnnnnnnnnnnnnnnnnnnnnnnnnnnnnnnnnnnnnnnnnnnnnnnnnnnnnnnnnnnnnnnnnnnnnnnnnnnnnnnnnnnnnnnnnnnnnnnnnnnnnnnnnnnnnnnnnnnnnnnnnnnnnnnnnnnnnnnnnnnnnnnnnnnnnnnnnnnnnnnnnnnnnnnnnnnnnnnnnnnnnnnnncccgttcagcggacgctgcgcttatccggtactacgtctgagtcaacccggtagacacactatcgcactgcacagcactgtaacagatagcaacgagtagttggcgg

SEQ ID NO: 74273 - DNA, 845 bp, Homo Sapiens
  misc_feature (542)..(554): n is a, c, g, or t
  misc_feature (556)..(557): n is a, c, g, or t
  misc_feature (613)..(625): n is a, c, g, or t
  misc_feature (676)..(676): n is a, c, g, or t
  misc_feature (681)..(682): n is a, c, g, or t
  misc_feature (684)..(684): n is a, c, g, or t
  misc_feature (698)..(712): n is a, c, g, or t
  misc_feature (719)..(741): n is a, c, g, or t
gggtctcgcgagactttcaggggtcggagcgcgggggccggccgagaggaaagctggaggcgcgggtggggaacatgtctgagtcggagctcggcaggaagtgggaccggtgtctggcggatgcggtcgtgaagataggtactggttttggattaggaattgttttctcacttaccttctttaaaagaagaatgtggccattagccttcggttctggcatgggattaggaatggcttattccaactgtcagcatgatttccaggctccatatcttctacatggaaaatatgtcaaagagcaggagcagtgacttcacctgagaacatcccagcgggaggacaagagaaatcatgtttattcctcaggaatactgaagtgccctggagtaagctgccattcttctgtaacaatgttatcagtaatgctttaaactccagcacctggttatgcatttgaaaccaagtctgtttcttgttttgtattttctctctggaagttgtaaggaggtggtcttaaataaattaaacaaaaataggaaaannnnnnnnnnnnntnncaccacctctgaactcctctcccctcctgttcttcctccctgtcccacttatcctnnnnnnnnnnnnntgttattcttttcttttccccctgtagcgcgcccgctacacgatgaagtanaaaanntnctttttgtggtggnnnnnnnnnnnnnnngtaaaannnnnnnnnnnnnnnnnnnnnnnggcggcgcggccccctccggggtgccggcgccccggcccaaaaagttctctctcccaaaaaaacacccggggacacaaccaaacggctgtggttttttctcccc

SEQ ID NO: 74274 - DNA, 556 bp, Homo Sapiens
ggaaagctggaggcgcgggtggggaacatgtctgagtcggagctcggcaggaagtgggaccggtgtctggcggatgcggtcgtgaagatagaatcctggtaattgatgtccacccgagaaatccctgcagatgttccagcctctgtctagtccagatagccaaaggaagggtactggttttggattaggaattgttttctcacttaccttctttaaaagaagaatgtggccattagccttcggttctggcatgggattaggaatggcttattccaactgtcagcatgatttccaggctccatatcttctacatggaaaatatgtcaaagagcaggagcagtgacttcacctgagaacatcccagcgggaggacaagagaaatcatgtttattcctcaggaatactgaagtgccctggagtaagctgccattcttctgtaacaatgttatcagtaatgctttaaactccagcacctggttatgcatttgaaaccaagtctgtttcttgttttgtattttctctctggaagtggaagggagtgggcttaaataaatta

SEQ ID NO: 74275 - DNA, 1840 bp, Homo Sapiens
  misc_feature (52)..(52): n is a, c, g, or t
  misc_feature (843)..(890): n is a, c, g, or t
  misc_feature (1103)..(1111): n is a, c, g, or t
  misc_feature (1211)..(1211): n is a, c, g, or t
  misc_feature (1256)..(1314): n is a, c, g, or t
  misc_feature (1612)..(1612): n is a, c, g, or t
  misc_feature (1617)..(1617): n is a, c, g, or t
  misc_feature (1634)..(1634): n is a, c, g, or t
  misc_feature (1665)..(1665): n is a, c, g, or t
  misc_feature (1668)..(1668): n is a, c, g, or t
  misc_feature (1747)..(1747): n is a, c, g, or t
  misc_feature (1773)..(1773): n is a, c, g, or t
  misc_feature (1803)..(1803): n is a, c, g, or t
gagttccccagcgaggacacacactccacgagagcagcccctccactctgcncaggagaggggccgaccctcctcgggaaccggccagccgcgtggctcccagcatccatcaggacaagcccacgtgggtcctccctgcgtgctcagagggtctgtccagccctgggaagcgaccttggcctcagttcacagcctggtgctcatctgctggcaccgggcatccacccatcagcccccgccctgtccctccgaaggacacccagcaggcaccccccggggaggcaggggcagaggtcagaaggggtgtctgggacctggatggccagcagggacaggggcattgtcatctcaaaggcccaacccccagaggccacaccagtcctcccagggagtcctcgagtcgccctgcccagagccctggcaccagagacgccaagagcctgtggggtgactcggagcagcaggtgtggccccgggcgggcggcaccgcgtccagggcagcctccctccgctgagtgacacgggacaccagtgcccggccgacgcgcctttgcaggagaaatgtgcaaacctctgtggataccatttcatttccattcttgtgttgtctccaaggcccctttggagatatacttggtgttggttgtgttttttggttccttttcagagaactgtaaaccgaggctgacgtgctccactgactgtgccgaggggcgggggcaggaggacggcaagacctatttataatatttagcgaactcggtctccctcagatcccccgcgagggaggctgctggacccacccccagtccccccagtaaaagcctccactggcaaaatatnnnnnnnnnnnnnnnnnnnnnnnnnnnnnnnnnnnnnnnnnnnnnnnnccaccccgggcggaccgctccataataacccgtccaggggggccaagcttaccccttacccatcttttttttgacaaagcgggccccctatacagaatttcatattaaaaacctaggcacctggtccccccttttttcctaccttccccaactgggaaaaaaccggcacacccttggggtatctttttttaaaaagaaccctttccttttctnnnnnnnnncgacaataattttggcaacaaacttacccctatccgaaagatttttaatacgcctccctaagggggaaatatctaataaaatctttgtgaaagttggganacaagtggggggcaaacccctgcgccacccatactatcattggcnnnnnnnnnnnnnnnnnnnnnnnnnnnnnnnnnnnnnnnnnnnnnnnnnnnnnnnnnnntattattaccacatgggagaagaccgcgcggatttcctaaggtgtgcgatgggagggaatgctacaacacaaccccaatggttcactagagggtcgatatgttttctaagggccgcaccatgacggagctccctgcgcagatacgtttggtactgtgatataaatacaacacatcaccacacacctcgaacaaactgtgttgctgcagagaagcgatcgcatatacttaacgcctcactaatacaacagaacccatatccctaagcccactcgttctactcgctagagagcagcactngcganacacacagcatacactnagtacgtcgcgcaccgtgctacgtgcctgcngcnatcaatatataacaatatagtgtgttcacattatataagggccgtctgtcgcacctctgctatgcgcgtgtgcaccacntagttcccagcacgatgggatgggcnctgggctcctccaatacatgtatcgtttgncgaccgcccacctacctcaagcacatcatatgtcatt

SEQ ID NO: 74276 - DNA, 530 bp, Homo Sapiens
gaaggctgctgttaaataactttaatggttgatgtgggagtcacaagggaggtatgtttgctccaagggttcttcagtgccatcctcaaagctggttagtgcagggaggtagggcagagttggttccagttttcttccaggaagggtttagggaggtcccagcgagccccaggaatgagtccctcggtaccatggcaaccacaatttaagaggggcttctgcccacccctgcagcctaccccaggtccagcaaaggaacaggaggccaaactggcaaacttgctataaacagcgccgtatccaaagcccaactgcgcatgggtcattttctcttctgggcagatcctatgccagcacctttctctctcacactggtgactggagccaagtgcgaggttggcctttgctgcaaaggcctctggtccgtggggatcgctgaggtgggagggcggcaaccgagcgagccctaggggagtggtctggggagacagcatccagggaaaaggttcggggtcttcccacgggaaggg

SEQ ID NO: 74277 - DNA, 1950 bp, Homo Sapiens
  misc_feature (22)..(22): n is a, c, g, or t
  misc_feature (126)..(126): n is a, c, g, or t
  misc_feature (184)..(184): n is a, c, g, or t
  misc_feature (1381)..(1395): n is a, c, g, or t
  misc_feature (1494)..(1508): n is a, c, g, or t
atgcctatcatgtgctcctgantgtttaggtcccttatttagtttagtagagttaggagaatctttttcctcagttatgtagagagtgagatacgtgtagtatggtgagattctaaattacttttntgtctaggatgaggtagataatctcagagtctgtgtattactcagttgagacaacctncagccattcttgtcaacctttaagtagcatttccagcattcacacttgatactgcacatcaggagttgtgtcacctttcctgggtgatttggttttctccattcaaggagcttgtagctctgagctatgatgcttttattgggaggaaaggaggcagctgcagaattgatgtgagctatgtggggccgaagtctcagcccgcagctaagtctctacctaagaaaatgcctctgggcattcttttgaagtatagtgtctgagctcatgctagaaagaatcaaaaagccagtgtggatttttagactgtaataaatgaggcaaaggatttctattccagtgggaaggaaacctctctactgagttgtgggggatatgttgtatgttagagagaaccttaaggagtccttgtatgggccatggagacagtatgtgataacataccgtgattttcatgaagaaattcttctgtcttagagttctcccctgctgcttgagatgccagagctgtgttgttgcacacctgcaaaacaaggcacatttccccctttctctttaaagccaaagagagatcactgccaaagtgggagcactaaggggtgggtggggaagtgaaatgttaggcgatgaattcctgagcaccttgtttttcttccaaggttcgtagctcctctctgcccttccaagcctgtaacctcggaggactatcttttgttctttatcctttgtcttgtttgagtgggtcagccccagaggaactgataagcaaatggcaagtttttaaaggaagagtggaaagtactgcaaataaaaatccttatttgtttttgtagactttgtaatgcatatcattagccctcactgtgatcattactgctgtggctctgaactggcacatagtacagtggatggaaggtgcccgcacaccagctgagaactggttctggcctaggtgggctctagaaccatttacacagcatgaaagaaacaggttgggttaggagcagaaagaaataaggctcacacccctccagacactaccttataagcactgcagaacctgaaacagatggcagaaggaatggaatgctacaggggccagcaggagtgaccacagggaggggacagctcagtgactggagcattcaggaagaggctttccagggaacactggacattgcttagtgaccttttgttccnnnnnnnnnnnnnnncttttactgttctgaaagactttgagtctgtggttcaccaccagcccatcagtgtttctttgaggtgattgcattagggaagttggctctgggattgcnnnnnnnnnnnnnnnggtggaacatgttttccttaaaagatggaaggttttagaaaatatactaggccatctggttagaaaaaacagaccagactagaaaaagctgtgaatttgattttgtagattaaacaaagccagatgattaaaatgtgatttatttataaactgtgctaatgtctattattatgattttgtggttttttattagggggtatgagtgagggaagccctatatccttcattggattagacatatatagtgaatagtggaagagtctgtcaagctcactattttagaatttaccctgcatatgtaatgtcatgtttttaagacctcagctatgcagggatattggcctcttctagggacatatgggatgaaggtctctagtgaaatctactaaaagcccatgttagaatagtgatcatgagctaacactacagtaatcctcgtgcc

SEQ ID NO: 74278 - DNA, 778 bp, Homo Sapiens
aaaattcggggagccatcttttttcgaaggccaaggggacgcttgttttaccatgggccagggaatcttggaatcagaccagaccagacgagtgagcctaaaaaaacactggccgatcacctgggaatgattgctgggggcacaggcatcacacccatgttgcagctcattcgccacatcaccaaggaccccagtgacaggaccaggatgtccctcatctttgccaaccagacagaggaggatatcttggtcagaaaagagcttgaagaaattgccaggactcacccagaccagttcgacctgtggtacaccctggacaggcctcccattggctggaagtacagctcaggcttcgttactgccgacatgatcaaggagcaccttcctcctccagcgaagtccacgctcatcctggtgtgtggcccgccaccactgatccagacggcggctcaccctaacctggagaagctgggttatacccaggacatgattttcacctactaacacctccatgtgctcagcaattttgcatgtcccttttcatctgtttcagagtaagttcaatttcaccacggtaaactgggatgttttcaaaagtgccttgccatgtaccttcgcgcacacactggttctcctcttttgggtgtgggcctaacaaaaagggctcaaggggctggagactggctgctggggcctccttgcttggaggctggaaagagctccatttcagtatctttctcccgtggttttgtgaaataaactcaagtacaaagcaaaa

SEQ ID NO: 74279 - DNA, 730 bp, Homo Sapiens
acacccccaaatatcctgaaggggggaaagatgactcagtatttgcagaacatgaaaatcggggagaccatcttttttcgagggccaaggggacgcttgttttaccatgggccagggaatctgggaatcagaccagaccagacgagtgagcctaaaaaaacactggccgatcacttgggaatgattgctgggggcacaggcatcacacccatgttgcagctcattcgccacatcaccaaggaccccagtgacaggaccaggatgtccctcatctttgccaaccaggctggaagtacagctcaggcttcgttactgccgacatgatcaaggagcaccttcctcctccagcgaagtccacgctcatcctggtgtgtggcccgccaccactaatccagacggcggctcaccctaacctggagaagatgggttatacacaggacatgatttttcacctactaacacctccacgtgctcagcaattttgcatgtcccttttcatctgtttcagagtaagttcaatttcaccacggtaaactgggatgttttcaaaagtgccttgccatgtaccttcgcgcacacactggttctcctcttttgggtgtgggcctaacaaaaagggctcaaggggctggagactggctgctggggcctccttgcttggaggctggaaagagctccatttcagtatctttctccgtggttttgtgaaataaactcaagtacaaagcag

SEQ ID NO: 74280 - DNA, 1090 bp, Homo Sapiens
gtgtgagccactgcacccaacccacgcccatttttaacaaatgaagaaactgaggcttgcagaggttagatcatttgcccaaaatcacatgctggatccagaactagagcccccagtcttgttattctcaacactttttcctccacactacagggacttgatcttaacaccacagacatggcaagctcagagccaaaaatcaatatatgccctatttacttaatccagagtttctcaacctggcactaataacattttgagctggattattctttgtttgggggtgggagggcgctgccccacgcatggtaggaagttgagcagcatccctggcctctacccatagatgtcactagcaccccctcccgcagttctgacaaccaaaaatgtctccagactttgccaaatgtgggggtgggagggaacggccccaattgagaacccaccagtttagcccttccggggaagacaggctctgtgctaaccacttttccaggatcacctcataaaaccctcaccacatcaagagatgctatgatgtctatttttgcaactagggaaaatgagggtaggcaaacccagaggctccaggaaagcagcgatcttgtctgtaagctcaccactgcataccagcacctagcacaatgcctagcacgaggtaaattgctcaataaatggaggttggtcgaataagatacaaggaagtcaagcaattgtcctagataagtaattgtccttacatagtacgtggtctgagtctaacacatatagctcagagtccagacttaaatttactccctttcctcacaattagtggtggtcccatgacccaaggtccgggtgccactcaaacaggaatcctgatatccacgtttcctcattctccacagtgctgattcctaggcaattcctcagctcccagttcccacgggcaagctcctggagtccccactcccgcccctagaccccagttgtcgggaatccaagttccacaccctcagcgggtgacatcccgggaattccggacccggtaccattcccgtggtctttatttttaagggagtagactaaatagaatactgatataata

SEQ ID NO: 74281 - DNA, 2294 bp, Homo Sapiens
  misc_feature (2003)..(2033): n is a, c, g, or t
  misc_feature (2221)..(2236): n is a, c, g, or t
cggtcctaaggtagcgaggcctgggtggcgaattccgcacgaggggaccggaccccgagcggctgggagcgcacgcgagcgggccgtggccgcgcgggcagcgccctgagcctgtcccgcgcccgcgggcccggccgagcaggagcagctcccggggatgcccgggcggctcggagcgcgggcagcggcagccgtgcggtgagggcggtggcgcccgcgggacctgcgactgccaggaactcctgccaccgccaccggctcccatggcccacatacccagtgggggtgccccagcagcgggggcagcccccatgggcccccagtattgcgtgtgcaaggtggagctgtcagtgagtggccagaacctactggaccgggatgttacctccaagtccgaccccttctgtgtcctctttacagagaacaatggcagatggatcgagtacgacaggacagaaaccgcgatcaacaacctcaaccccgccttctccaagaagttcgtgcttgactaccacttcgaggaggtacagaagctcaagttcgcgctctttgaccaggacaagtccagtatgcggctggacgagcatgacttcctgggccagttctcctgcagcctgggcacgatcgtctccagcaagaagatcactaggcctctgctgctgctgaatgacaagcctgcggggaagggcttgattacgatcgctgcccaggagctgtccgacaacccgcgtcatcacactaagcctggcgggcaagaggctgggacaagaaggacctctttgggaagtcagacccccttttcgggagttttataagccaggagacgatggcaagtggatgctggtccacaggactgaggtgatcaagtacacactggaccctgtgtggaagccattcacagtgcccttggtgtccctgtgtgatggggacatggagaagcccatccaggtcatgtgctacgactatgacaatgacgggggccatgacttcatcggcgagttccagacctcagtgtcacagatgtgtgaggctcgagacagcgtcccgctggaagttcgagtgcatcaaccccaagaagcagaggaagaagaagaactataaaaactcgggcatcatcatcctgcgatcctgcaagataaaccgagactactccttccttgactacatcctgggaggctgccagctcatgttcaccgttggaatagactttacagcctccaacgggaatcccctcgacccttcctctttgcactatatcaaccctatgggcaccaacgaatatctgtcggccatctgggctgttgggcagatcattcaggactacgacagtgataagatgtttccagctctgggattcggggcccagttacccccagactgaaggtctcccatgagtttgccatcaacttcaaccccaccaaccccttctgctcaggtgtggatggtattgcccaggcgtactcagcttgcctgccccacatccgcttctacggtcctaccaatttctcccccatcgtcaaccacgtggcccggtttgcggcccaggccacacaacagcggacggccacgcagtacttcatcctcctcatcatcacggacggggtcatcagtgacatggaggagacacggcatgccgtggtgcaggcttccaagctgcccatgtccatcatcatcgtgggcgtgggcaatgcggacttcgctgccatggagttcctggatggggacagccgcatgctgcgctcccacacgggggaggaggcagcccgcgatattgtgcagttcgttccctttcgagagttccgcaacgcagcaaaagagaccttggccaaagctgtgctggcggagctgccccaacaagttgtgcagtatttcaagcataaaaacctgccccccaccaactcggagcccgcctgagctccagtgcccagcagcagcatgtcagctgagcctcctgccctcccccaggaacatgcacgctcactctgcttccttgtgggtggccnnnnnnnnnnnnnnnnnnnnnnnnnnnnnnncaaccggacctccacccccaacttcctccagcccagctgggcttcctttgttggagtcaactgttgatgcttccaggccaaactggcttcctctcctcctctccccacctttgccattcttaagtattgaatgtactttgtataattttagtggaattgttattgagaataaaatttttacaatcatnnnnnnnnnnnnnnnngaccgcgtatgcggccgcaagcttattccctttagtgagggtaattttagcttggcac

SEQ ID NO: 74282 - DNA, 404 bp, Homo Sapiens
aaaaaagaaattcatttgtttaatattttcggtcttggggaacccgcgtatatggagggcctgctacatagagaagactgagggatattctgtgcatccgtttctacggatcctctaaatcggcctttgttttcagccaggatttagtgcccagctgtgtcctttggaggccccacatggagctagcaaagtttgctaaatcgggttttgcaagaggactgtctgctccatactgggagtagttaccgcaaactgccctatgaaattggttggagttcttactgttagcatgtttattactttatcagggctctctgtaggagagtctatgagaaaatcttctggtttctgctgaaagaatcgtgttttgttggggtttttttcccgaaaaatattatttttaa

SEQ ID NO: 74283 - DNA, 728 bp, Homo Sapiens
tagcatcatcaccaaggctccatccctgtgtgcactccagtgcggccatgctgaaaattgctgagatggaatacagcggtgccaacagcatcttcctgcgactgctgctggataagaagtatgcactgccttaccgggtgctggatgccctagtcttccacttcctggggttccggacagagaagcgtgaactgcctgtgctgtggcaccagtgcctcctgactttggtccagcgctacaaggccgacttggccacagaccagaaagaggccctcttagaactgctccggctgcagccccatccacagctatcgcccgaaatcaggcgtgagcttcagagtgcagtcccccgcgatgtggaagatgttcccatcaccgtggagtgaggaaaacagtcagctgtcctggccaaaggggtttggaaggacaccaagacccccgttggtgactgaagatgacactgagctttaatggctgaagacccagatcagggcagtgacagatcacagggacatctgtggctcccagtccaggacaggaaggactgagggtctggctggttccctcttccattctaggcccttatccctgtttagttctgagagccaacttgagataccatatgctagcattcccagtccccagctggggcttggtgtgagtactttttctatggctattgtgtcaggtcactgtggataaaggcaaagacagatatttattgaaaa

SEQ ID NO: 74284 - DNA, 936 bp, Homo Sapiens
  misc_feature (762)..(826): n is a, c, g, or t
  misc_feature (839)..(847): n is a, c, g, or t
cttgttaaaaaacattccaaattgaaatagatgagaggaagagatagcatggcatgcagcacacacggctgctccagttcatggcctcccaggggtgctggagatgcatccaaagtggttgtctgagacagagttggaaaccctcaccaactggcctcttcaccttccacattatcccgctgccaccggctgccctgtctcactgcagattcaggaccagcttgggctgcgtgcgttctgccttgccagtcagccgaggatgtagttgttgctgccgtcgtcccaccacctcagggaccagagggctaggttggcactgcggccctcaccaggtcctgggctcggacccaactcctggacctttccagcctgtatcaggctgtggccacacgagaggacagcgcgagctcaggagagatttcgtgacaatgtacgcctttccctcagaattcagggaagagactgtcgcctgccttcctccgttgttgcgtgagaacccgtgtgccccttcccaccatatccaccctcgctccatctttgaactcaaacacgaggaactaactgcaccctggtcctctccccagtccccagttcaccctccatccctcaccttcctccactctaagggatatcaacactgcccagcacaggggccctgaatttatgtggtttttatacattttttaataagatgcactttatgtcattttttaataaagtctgaagaaattacctggttttacaaaccacaacaccacattnnnnnnnnnnnnnnnnnnnnnnnnnnnnnnnnnnnnnnnnnnnnnnnnnnnnnnnnnnnnnnnnnccccgaaacaaannnnnnnnncccaacaaataaaaccccaccaggggggccacaaatgagagcccaacctttctctgacaaagggcccgcaaaaaaggggggcactaacg

SEQ ID NO: 74285 - DNA, 965 bp, Homo Sapiens
ttcaccaccagatgagcatcgggcgcgggaagctgccagccgaggagttcaaggccaaggtggaggctgtggtggagaagctgggggtccccttccaggtgctggtggccacgcacgcaggcttgtaccggaagccggtgacgggcatgtgggaccatctgcaggagcaggccaacgacggcacgcccatatccatcggggacagcatctttgtgggagacgcagccggacgcccggccaactgggccccggggcggaagaagaaagacttctcctgcgccgatcgcctgtttgccctcaaccttggcctgcccttcgccacgcctgaggagttctttctcaagtggccagcagccggcttcgagctcccagcctttgatccgaggactgtctcccgctcagggcctctctgcctccccgagtccagggccctcctgagcgccagcccggaggtggttgtcgcagtgggattccctggggccgggaagtccacctttctcaagaagcacctcgtgtcggccggatatgtccacgtgaacagggacacgctaggctcctggcagcgctgtgtgaccacgtgtgagacagccctgaagcaagggaaacgggtcgccatcgacaacacaaacccagacgccgcgagccgcgccaggtacgtccagtgtgcccgagccgcgggcgtcccctgccgctgcttcctcttcaccgccactctggagcaggcgcgccacaacaaccggtttcgagagatgacggactcctctcatatccccgtgtcagacatggtcatgtatggctacaggaagcagttcgaggccccaacgctggctgaaggcttctctgccatcctggagatcccgttccggctatgggtggagccgaggctggggcggctgtactgccagttctccgagggctgagccccgcccagctcccctccaccaataaacgctgtttctcccttg

SEQ ID NO: 74286 - DNA, 1435 bp, Homo Sapiens
  misc_feature (88)..(122): n is a, c, g, or t
acagctgatatccactcacttgggcgctggtccgtactgccgaaacgaccgagcgcagcgaagtccgagtgagcgaggaagcggccgnnnnnnnnnnnnnnnnnnnnnnnnnnnnnnnnnnncagtcgacggtaccggacatatgcccgggaattcggccattacggccgggggccctaggcttccgcgagatcttcggtgggggtacgggtgttttacgccaggacgctgatgcgtttgggttctcgtctgcagaccctctggacctggtcacgattccataatgtaccacaacagtagtcagaagcggcactggaccttctccagcgaggagcagctggcaagactgcgggctgacgccaaccgcaaattcagatgcaaagccgtggccaacgggaaggttcttccgaatgatccagtctttcttgagcctcatgaagaaatgacactctgcaaatactatgagaaaaggttattggaattctgttcggtgtttaagccagcaatgccaagatctgttgtgggtacggcttgtatgtatttcaaacgtttttatcttaataactcagtaatggaatatcaccccaggataataatgctcacttgtgcatttttggcctgcaaagtagatgaattcaatgtatctagtcctcagtttgttggaaacctccgggagagtcctcttggacaggagaaggcacttgaacagatactggaatatgaactacttcttatacagcaacttaatttccaccttattgtccacaatccttacagaccatttgagggcttcctcatcgacttaaagacccgctatcccatattggagaatccagagattttgaggaaaacagctgatgactttcttaatagaattgcattgacggatgcttaccttttatacacaccttcccaaattgccctgactgccattttatctagtgcctccagggctggaattactatggaaagttatttatcagagagtctgatgctgaaagagaacagaacttgcctgtcacagttactagatataatgaaaagcatgagaaacttagtaaagaagtatgaaccacccagatctgaagaagttgctgttctgaaacagaagttggagcgatgtcattctgctgagcttgcacttaacgtaatcacgaagaagaggaaaggctatgaagatgatgattacgtctcaaagaaatccaaacatgaggaggaagaatggactgatgacgacctggtagaatctctctaaccatttgaagttgatttctcaatgctaactaatcaagagaagtaggaagcatatcaaacgtttaactttatttaaaaagtataatgtgaaaacataaaatatattaaaacttttctattgttttctttccctttcacagtaactttatgtaaaataaaccatcttcaaaagagctagaat

SEQ ID NO: 74287 - DNA, 2533 bp, Homo Sapiens
aggtagcgaggcctgggtggcgaattcggcacgaggcgtgggctgcagttggaacgatggcggcggcagctgccgccgggcctagcccggggtctggacctggggactccccagaagggcccgagggggaggctccggagcgtcggcggaaggcgcacgggatgctgaagctttactacggcctctcggaaggggaggcggcgggacgccccgcggggcccgaccccctggacccgactgatctgaacggggcgcacttcgacccggaagtttacctagacaagctgcgtagagagtgccctctggcccagttgatggacagtgagacggacatggtgcggcagatccgggctctagacagcgacatgcagaccctggtctatgagaactacaacaagttcatctcagccacagacaccatccggaagatgaagaacgatttccggaagatggaggatgagatggaccggctggccaccaacatggcagtgatcaccgacttcagcgctcgcatcagcgccacgctgcaggaccgccacgagcgcatcaccaagctggcaggggtccacgcgctgctgcggaagctgcagttcctctttgagctgccctcgcgcctcaccaagtgcgtggaactgggcgcctatgggcaggcggtgcgctaccagggccgcgcgcaggccgtgctgcagcagtaccaacacctgccctcgttccgcgccatccaggacgactgccaggtcatcacggcccgcctggcccagcagctgcggcagcgctttagggagggcggctcaggcgccccggagcaggcagagtgcgtggagctgctgctggccctgggcgagcctgcggaggagctgtgcgaggagttcctggcgcacgcccgcggccggctggagaaggagctgagaaacctggaggccgagctggggccctcacctccggctcccgacgtgttagagttcaccgaccatggaggcagtggcttcgtgggcggcctctgccaggtggcggcggcctaccaggagctgtttgcggcccagggcccagcaggtgccgagaagctggcggccttcgcccggcagctgggcagccgctattttgcgctggtggagcggcggctggcgcaggagcagggtggtggtgacaactcactgctggtgcgggcgctggaccgcttccaccggcgcttgcgggctcccggggccctgctggccgctgccgggctcgcagacgctgccacggagatcgtggaacgagtggcccgcgagcgcctgggccaccacctgcagggtctccgggcggccttcctgggctgcctgacagacgtccgccaggcgctggcagcacctcgcgtggctgggaaggagggccctggcctggccgagttgctggccaatgtggccagctccatcctgagccacattaaggcctctctggcagcagtgcaccttttcaccgccaaagaggtgtccttctccaacaagccctacttccggggtgagttctgcagtcagggtgtccgtgagggcctcatcgtgggcttcgtccactctatgtgccagacggctcagagcttctgcgacagccctggggagaaggggggtgccacaccacctgccctgctcctgctgctctcccgcctctgcctggactacgagacggccaccatctcctacatcctcactctcactgatgaacagtttctggtgcaggatcagttcccagtgacgcccgtgagcacgctgtgtgcagaggccagggaaacggcgcggcggctgctgacccactacgtgaaggtgcagggcctggtcatatcacagatgctgcgcaagagcgtggagactcgcgactggctcagcactctggagccccggaatgtgcgggccgtcatgaagcgggtggtggaggataccaccgccatcgacgtgcaggtggggctcctgtacgaagagggtgttcgcaaggcccagagcagcgactccagcaagaggactttctccgtgtacagcagctctcggcagcagggccgctacgcccccagctatacccccagtgccccgatggacaccaacctcttgagcaatatccagaagctattctctgaacgtattgatgtgttcagccctgtggagttcaacaaggtgtcggtgctgaccggcatcatcaagatcagcctgaagacgctgctggagtgtgtgcggctgcgcacctttgggcgcttcgggctgcagcaggtgcaagtggactgccactttctgcagctctacctgtggcgttttgtggccgacgaagaactcgtgcacttgctgctggacgaagtggtggcctctgctgccctgcgctgcccagaccctgtgcccatggagcccagtgtggttgaggtcatctgcgagcgcggctaggcgcagccgctgccatgcaccggtctgtccctgcaccccatggcacccaggatctggtctcggtggtccttccccgcaggcaggtgtcaggaccggcctaataaacatgtgtggcctcctcaaaaaaa

SEQ ID NO: 74288 - DNA, 358 bp, Homo Sapiens
ggtggggggagggggctctgtggggtgggacattcacatcatttcactctggtctgagtggtggcctgagaaccatggtggcatggaccaccctcatccatgcaactccaggccccatgggaacggatgtggaaggaagaactgtcaccctcttaaggcccagggtcggagcccagggcctctcccttcctgtcgttcaatggacgtggtggtggctgttccacacccattttgttgcagttcctgtgagacaggagaggctgagccaagggaactgtgaaggggatgggcaggagggcttgtgcagggttttgtaagcagtgatctagtttcattaaaaaaagaaaacaataaccat

SEQ ID NO: 74289 - DNA, 868 bp, Homo Sapiens
taaggcattaagtgaacccctttgccctggggaggttcagcccagtccctgctctccagatttccgggccttagggggaggagcatcttttcctcatggatcaactgtccatgtttgactgtgcctaacttgccagatcatgggtcagggagacaggccaaggcaggtattggaaggtggatggccaggtccttttccccagtgaccactctccatctagaagcactctgcttcagctgcggcaggctcttccggggactctgggagcctgctggttagatggaggagttgagcctctgacacctccaggttctgcctgccaagggttcctccgcagccgggctgagctgagcaggagcaatgggctctcgcttctgtcctgaggttcttgggtggtgagcaagagagctaagggcaggaggtcttacgtggtgcctcataggggatagagatgccagagactccactggaagcgggggtctccggggtgggtcttcagcacctgccacacatctgggggaggctccaagcccatctgcttggcccgacaccagcgctgcagccgtgtgatcccggtgcagggcccgtactgccaggccaggtcaaactgcctcagcagctccagctccgcttcctcctcgtcgcggggctggggctcctccccgggtaggaatcagtgatgagccgcttccggcccatggcggccacccaggcaggcagagaaggaggcaactgcggggaagaggagagaccggccagtgggcgcgagaaagacagctgctgagagagacagacggggccaggccagcggcgggcagacaagcggacgcgtgggtcgacgatatcccgggaattccggaccggtcca

SEQ ID NO: 74290 - DNA, 919 bp, Homo Sapiens
gggctctctcggtttgtctgggtcatcttgtctgcccgccgctggcctggccccgtctgtctctctcagcagctgtctttctcgcgcccactggccggtctctcctcttccccgcagttgcctccttctctgcctgcctgggtggccgccatgggccggaagcggctcatcactgattcctacccggttgtgaagaggagggaggggcccgctgggcacagcaagggggagctggcacccgagctaggggaggagccccagccccgcgacgaggaggaagcggagctggagctgctgaggcagtttgacctggcctggcagtacgggccctgcaccgggatcacacggctgcagcgctggtgtcgggccaagcagatgggcttggagcctcccccagaggtgtggcaggtgctgaagacccaccccggagacccccgcttccagtgcagtctctggcatctctatcccctatgaggcaccacgtaagacctcctgcccttagctctcttgctcaccacccaagaacctcaggacagaagcgagagcccattgctcctgctcagctcagcccggctgcggaggaacccttggcaggcagaacctggaggtgtcagaggctcaactcctccatctaaccagcaggctcccagagtccccggaagagcctgcgcagctgaagcagagtgcttctagatggagagtggtcactggggaaaaggacctggccatcaccttccaatacctgctgcctgtctccctgacccatgatctggcaagttaggcacagtcagacatggacagttgatccatgagggaaaagatgctctccccacctaaggccagggaatctggagagcaggactggctgagctccccagggcaagtgggttcactaatggcttatcaaataaagaatatt

SEQ ID NO: 74291 - DNA, 1134 bp, Homo Sapiens
tctgggtcatcttgtctgcccgccgctggcctggccccgtctgtctctctcagcagctgtctttctcgcgcccactggccggtctctcctcttccccgcagttgcctccttctctgcctgcctgggtggccgccatgggccggaagcggctcatcactgattcctacccggttgtgaagaggagggaggggcccgctgggcacagcaagggggagctggcacccgagctaggtctctgaggtgtgagggaggcaggaggagtggacacggaggggcctagaggaggcccctagaggggcggaggggccgatggaaagggaaaggtggcctgtcctcccctcccgacaccaggtctagctgcggggtggcagaggcaaagcggtggtgaggaaggctgggaggtgaggggcaggagactgaagccaacctcgtactgaagagcagctgtcattgcaggggaggagccccagccccgcgacgaggaggaagcggagctggagctgctgaggcagtttgacctggcctggcagtacgggccctgcaccgggatcacacggctgcagcgctggtgtcgggccaagcagatgggcttggagcctcccccagaggtgtggcaggtgctgaagacccaccccggagacccccgcttccagtgcagtctctggcatctctatcccctatgaggcaccacgtaagacctcctgcccttagctctcttgctcaccacccaagaacctcaggacagaagcgagagcccattgctcctgctcagctcagcccggctgcggaggaacccttggcaggcagaacctggaggtgtcagaggctcaactcctccatctaaccagcaggctcccagagtccccggaagagcctgcgcagctgaagcagagtgcttctagatggagagtggtcactggggaaaaggacctggccatcaccttccaatacctgctgcctgtctccctgacccatgatctggcaagttaggcacagtcagacatggacagttgatccatgaggaaaagatgctctcccacctaaggccaggaatctgagagcaggactggctgagctcccagggcaaggggttcactaatgcttatcaataaagaatattgagcctggaaaaaa

SEQ ID NO: 74292 - DNA, 2050 bp, Homo Sapiens
ggaagatcttcttccgctctgaggcgctactgaggccgcggagccggactgcggttggggcgggaagagccggggccgtggctgacatggagcagccctgctgctgaggccgcgccctccccgccctgaggtgggggcccaccaggatgagcaagctgcccagggagctgacccgagacttggagcgcagcctgcctgccgtggcctccctgggctcctcactgtcccacagccagagcctctcctcgcacctccttccgccgcctgagaagcgaagggccatctctgatgtccgccgcaccttctgtctcttcgtcaccttcgacctgctcttcatctccctgctctggatcatcgaactgaataccaacacaggcatccgtaagaacttggagcaggagatcatccagtacaactttaaaacttccttcttcgacatctttgtcctggccttcttccgcttctctggactgctcctaggctatgccgtgctgcagctccggcactggtgggtgattgcggtcacgacgctggtgtccagtgcattcctcattgtcaaggtcatcctctctgagctgctcagcaaaggggcatttggctacctgctccccatcgtctcttttgtcctcgcctggttggagacctggttccttgacttcaaagtcctaccccaggaagctgaagaggagcgatggtatcttgccgcccaggttgctgttgcccgtggacccctgctgttctccggtgctctgtccgagggacagttctattcacccccagaatcctttgcagggtctgacaatgaatcagatgaagaagttgctgggaagaaaagtttctctgctcaggagcgggagtacatccgccaggggaaggaggccacggcagtggtggaccagatcttggcccaggaagagaactggaagtttgagaagaataatgaatatggggacaccgtgtacaccattgaagttccctttcacggcaagacgtttatcctgaagaccttcctgccctgtcctgcggagctcgtgtaccaggaggtgatcctgcagccccgagaggatggtgctgtggaacaagacagtgactgcctgccagatcctgcagcgagtggaagacaacaccctcatctcctatgacgtgtctgcaggggctgcggggcggcgtggtctccccaagggacttcgtgaatgtccggcgcattgaacggcgcagggaccgatacttgtcatcagggatcgccacctcacacagtgccaagcccccgacgcacaaatatgtccggggagagaatggccctgggggcttcatcgtgctcaagtcggccagtaacccccgtgtttgcacctttgtctggattcttaatacagatctcaagggccgcctgccccggtacctcatccaccagagcctcgcggccaccatgtttgaatttgcctttcacctgcgacagcgcatcagcgagctgggggcccgggcgtgactgtgcccccctcccaccctgcgggccagggtcctgtcgccaccacttccagagccagaaagggtgccagttgggctcgcactgcccacatgggacctggccccaggctgtcaccctccaccgagccacgcagtgcctggagttgactgactgagcaggctgtggggtggagcactggactccggggccccactggctggaggaagtggggtctggcctgttgatgtttacatggcgccctgcctcctggaggaccagattgctctgccccaccttgccagggcagggtctgggctgggcacctgacttggctggggaggaccagggccctgggcagggcagggcagcctgtcacccgtgtgaagatgaaggggctcttcatctgcctgcgctctcgtcggtttttttaggattattgaaagagtctgggacccttgttggggagtgggtggcaggtgggggtgggctgctggccatgaatctctgcctctcccaggctgtccccctcctcccagggcctcctgggggacctttgtattaagccaattaaaaacatgaatttaa

SEQ ID NO: 74293 - DNA, 1082 bp, Homo Sapiens
  misc_feature (656)..(713): n is a, c, g, or t
  misc_feature (909)..(918): n is a, c, g, or t
cggtccggaattcccgggatggcgctactgaggccgcggagccggactgcggttggggcgggaaaagccggggccgtggctgacatggagcagccctgctgctgaggccgcgccctccccgccctgaggtgggggcccaccaggatgagcaagctgcccagggagctgacccgagacttggagcgcagcctgcctgccgtggcctccctgggctcctcactgtcccacagccagagcctctcctcgcacctccttccgccgcctgagaagcgaagggccatctctgatgtccgccgcaccttctgtctcttcgtcaccttcgacctgctcttcatctccctgctctggatcatcgaactgaataccaacacaggcatccgtaagaacttggagcaggagatcatccagtacaactttaaaacttccttcttcgacatctttgtcctggccttcttccgcttctctggactgctcctaggctatgccgtgctgcagctccggcactggtgggtgattgcggtcacgacgctggtgtccagtgcattcctcattgtcaaggtcatcctctctgaggtcagtggctcaaggtctggccagcctggtgggcatcaaacctggatgggaaggcttctaaaaaggagcattttcccaaattnnnnnnnnnnnnnnnnnnnnnnnnnnnnnnnnnnnnnnnnnnnnnnnnnnnnnnnnnnctttgggaatccataaggggaatcttcctttccccccggtttccccggactttaaccccccctggagccctcttagggaaacacaaaaggggttttttttctcccacgcccaaaacccccagtttattccccggcggggcaaaaattttgagaaggggtttcccccaaaaaagttgtgtttttcaactgaaaaaannnnnnnnnnttggcgacacatattgggcgggggctataaaattgcggtaaccccccacaatacgggaggaccctcgtggctaccgtggggaggacaacacctcgaccttgagagatgttgacaaaccacctccctcctctccacgacgtttggtcccagcatggaagcacgca

SEQ ID NO: 74294 - DNA, 554 bp, Homo Sapiens
acaggccgactctagttgatcccccctaggtatatgtcgtgccgtgaaagggaacttcaatggtgtacacggtgtccccatattcattattcttctcaaacttccagttctcttcctgggccaagatctggtccaccactgccgtggcctccttcccctggcggatgtactcccgctcctgagcagagaaacttttcttcccagcaacttcttcatctgattcattgtcagacgctgcaaaggattctgggggtgaatagaactgtccctcggacagagcaccggagaacagcaggggtccacgggtaacagcaacctgggcggcaagataccatcgctcctcttcagcttcctggggtaggactttgaagtcaaggaaccaggtctccaaccaggcgagaacaaaagagacgatggggagcaggtagccaaatgcccctttgctgagcagctcagagaggatgaccttgacaatgaggaatgcactggacaccagcgtcgtgaccgcaatcacccaccagtgccggagccgcagcacgacatatacctagggg

SEQ ID NO: 74295 - DNA, 1018 bp, Homo Sapiens
  misc_feature (633)..(705): n is a, c, g, or t
gagcatgtgaactatagaacagtggtaacaaaaagcaggctggtacggtccggaattccgggatatcgtcgacccacgcgtcgggcctttcgggtggtcaggaagatggcggcctctggggcggagccgcaggtcctggtacaatacttggtgttacgaaaggatctatcacaagctccgttctcctggccggcgggcgcactggtagcgcaggcttgtcacgcggccaccgcggccttgcacactcaccgcgaccacccgcacacagccgcttacctccaagagctggggcgcatgcgcaaagtggtcctcgaggccccagatgagaccaccctaaaggagctggccgagaccctgcaacagaagaacattgaccacatgctgtggcttgagcaaccagagaatatcgccacttgtattgctctccggccctaccccaaggaagaagtgggccagtatttgaagaagttccgattgttcaagtaactgctgctttgatgtgtttgaatacgcaggccacccattccaaagcatcatgtgttccttgcagtgtcagcttgctcccgtctttcagttgtgacaatttcttgagggttaagcacatgttcatattaaagttgtcattaataactnnnnnnnnnnnnnnnnnnnnnnnnnnnnnnnnnnnnnnnnnnnnnnnnnnnnnnnnnnnnnnnnnnnnnnnnnacacgaaaacaaacgcaggagaggcgcgaaaacggaagacacagcgagagggcagcgcacagagtaagcagcgacgcgccatatagaacgcaaaagggagggcccacgcagagacgggcggaatcagacagagaggaacagcgcagcaggaaaagcaaacaggacgcgcacagcaacataaacaccacgcgagcgagagcgcacactgcgggaacacgaacgcacaacaaacggcacgaagagatgacgacaaaacaagagagcacagacacaccacccaagaaaacgaatgccaccacagcgacagaaggac

SEQ ID NO: 74296 - DNA, 758 bp, Homo Sapiens
gcgcaccgccgctacttggccccgcaaacgcaccgccactcacacctgcagctacgcgggctgcggcaagacctacaccaagagttcgcatctgaaggcgcatctgcgcacgcacacaggtgagaagccctaccactgcaactgggacggctgcggctggaagtttgcgcgctcagacgagctcacgcgccactaccgaaagcacacgggccaccggccattccagtgccatctgtgcgatcgtgccttctcgcgctccgatcacctggcgctgcacatgaaacggcacatgtagccgggacgcccccgcccacctgcgcgcggccgtggcgggtcccacgcgccgggcgcggccccctcccaaactgtgactggtatttattggacccagagaaccgggccgggcacagcgtggctacagagggtctccctcgatgacgacgacgacgacgccaccaccccagcccccgtctgtgactgaaggcccggtgggaaaagaccacgatcctccttgaccgagttttgtttttcaaaatggtgcaataatttaagtggcatcttctctcccaccgggtctacactagaggatcgaggcttgtgatgccttgtgagaaataagggccttaatttgtactgtctgcggcattttttataatattgtatatagtgactgacaaatattgtattactgtacatagagagacaggtgggcatttttgggctacctggttcgtttttataagattttgctgggttgg

SEQ ID NO: 74297 - DNA, 1455 bp, Homo Sapiens
aaacacataggctaggtacgaggcctgggtgttgaattcggcacgagggcggggcgggccatggcggcgaacctgagccggaacgggccagcgctgcaagaggcctacgtgcgggtggtcaccgagaagtccccgaccgactgggctctctttacctatgaaggcaacagcaatgacatccgcgtggctggcacaggggagggtggcctggaggagatggtggaggagctcaacagcgggaaggtgatgtacgccttctgcagagtgaaggaccccaactctggactgcccaaatttgtcctcatcaactggacaggcgagggcgtgaacgatgtgcggaagggagcctgtgccagccacgtcagcaccatggccagcttcctgaagggggcccatgtgaccatcaacgcacgggccgaggaggatgtggagcctgagtgcatcatggagaaggtggccaaggcttcaggtgccaactacagctttcacaaggagagtggccgcttccaggacgtgggaccccaggccccagtgggctctgtgtaccagaagaccaatgccgtgtctgagattaaaagggttggtaaagacagcttctgggccaaagcagagaaggaggaggagaaccgtcggctggaggaaaagcggcgggccgaggaggcacagcggcagctggagcaggagcgccgggagcgtgagctgcgtgaggctgcacgccgggagcagcgctatcaggagcagggtggcgaggccagcccccagaggacgtgggagcagcagcaagaagtggtttcaaggaaccgaaatgagcaggagtctgccgtgcacccgagggagattttcaagcagaaggagagggccatgtccaccacctccatctccagtcctcagcctggcaagctgaggagccccttcctgcagaagcagctcacccaaccagagacccactttggcagagagccagctgctgccatctcaaggcccagggcagatctccctgctgaggagccggcgcccagcactcctccatgtctggtgcaggcagaagaggaggctgtgtatgaggaacctccagagcaggagaccttctacgagcagcccccactggtgcagcagcaaggtgctggctctgagcacattgaccaccacattcagggccaggggctcagtgggcaagggctctgtgcccgtgccctgtacgactaccaggcagccgacgacacagagatctcctttgaccccgagaacctcatcacgggcatcgaggtgatcgacgaaggctggtggcgtggctatgggccggatggccattttggcatgttccctgccaactacgtggagctcattgagtgaggctgagggcacatcttgcccttcccctctcagacatggttccttattgctggaacaggagcctgggagttgaccattcagcactcttcaggaataggaccc

SEQ ID NO: 74298 - DNA, 1193 bp, Homo Sapiens
tagtcatagtacgagactgggttttaaatcggcacgaggctgctgaggagcctggcgcccagcactcctccatgtctggtgcaggcagaagaggaggctgtgtatgaggaacctccagagcaggagaccttctacgagcagcccccactggtgcagcagcaaggtgctggctctgagcacattgaccaccacattcagggccagggctcagtgggcaagggctctgtgcccgtgccctgtacgactaccaggcagccgacgacacagagatctcctttgaccccgagaacctcatcacgggcatcgaggtgatcgacgaaggctggtggcgtggctatgggccggatggccattttggcatgttccctgccaactacgtggagctcattgagtgaggctgagggcacatcttgcccttcccctctcagacatggcttccttattgctggaagaggaggcctgggagttgacattcagcactcttccaggaataggacccccagtgaggatgaggcctcagggctccctccggcttggcagactcagcctgtcaccccaaatgcagcaatggcctggtgattcccacacatccttcctgcatcccccgaccctcccagacagcttggctcttgcccctgacaggatactgagccaagccctgcctgtggccaagccctgagtggccactgccaagctgcggggaagggtcctgagcaggggcatctgggaggctctggctgccttctgcatttatttgccttttttctttttctcttgcttctaaggggtggtggccaccactgtttagaatgacccttgggaacagtgaacgtagagaattgtttttagcagagtttgtgaccaaagtcagagtggatcatggtggtttggcagcagggaatttgtcttgttggagcctgctctgtgctccccactccatttctctgtccctctgcctgggctatgggaagtggggatgcagatggccaagctcccaccctgggtattcaaaaacggcagacacaacatgttcctccacgcggctcactcgatgcctgcaggccccagtgtgtgcctcaactgattctgacttcaggaaaagtaacacagagtggccttggcctgttgtcttcccctattttctgtcccagctcatccgtgtctctgaagaacaaatatgcttttggaccacg

SEQ ID NO: 74299 - DNA, 838 bp, Homo Sapiens
ggcagtaactcatacggttctaaggtagcgaggcctgggtggcgaattcggcacgaggggccgcttccaggacgtgggaccccaggccccagtgggctctgtgtaccagaagaccaatgccgtgtctgagattaaaagggttggtaaagacagcttctgggccaaagcagagaaggaggaggagaaccgtcggctggaggaaaagcggcgggccgaggaggcacagcggcagctggagcaggagcgccgggagcgtgagctgcgtgaggctgcacgccgggagcagcgctatcaggagcagggtggcgaggccagcccccagaggacgtgggagcagcagcaagaagtggtttcaaggaaccgaaatgagcaggagtctgccgtgcacccgagggagattttcaagcagaaggagagggccatgtccaccacctccatctccagtcctcagcctggcaagctgaggagccccttcctgcagaagcagctcacccaaccagagacccactttggcagagagccagctgctgccatctcaaggcccagggcagatctccctgctgaggagccggcgcccagcactcctccatgtctggtgcaggcagaagaggaggctgtgtatgaggaacctccagagcaggagaccttctacgagcagcccccactggtgcagcagcaaggtgccggctctgagcacattgaccaccaaattcagggccaggggctccagtgggcaagggctctgtgcccgtgccctgtacgaactaccaggcagcgagaaacaagagatctcctttggaccccgagaacctcattcacgggcatcgaaggtgatccg

SEQ ID NO: 74300 - DNA, 953 bp, Homo Sapiens
tagcgaggcctgggtggcgaattcggcacgagggcggagactgcggggcgggccatggcggcgaacctgagccggaacgggccagcgctgcaagaggcctacgtgcgggtggtcaccgagaagtccccgaccgactggtgggcggcgagacgggccagggtcgggccaggggctgcctcagggggctctctttacctatgaaggcaacagcaatgacatccgcgtggctggcacaggggacaggcgagggcgtgaacgatgtgcggaagggagcctgtgccagccacgtcagcaccatggccagcttcctgaagggggcccatgtgaccatcaacgcacgggccgaggaggatgtggagcctgagtgcagcatggagaaggtggccaaggcttcaggtgccaactacagctttcacaaggagagtggccgcttccaggacgtgggaccccaggccccagtgggctctgtgtaccagaagaccaatgccgtgtctgagattaaaagggttggtaaagacagcttctgggccaaagcagagaaggaggaggagaaccgtcggctggaggaaaaacggcgggccgaagaggcacagcggcagctggagcaggagcgccgcgcagcgtgagctgcgtgaggctgcacgccgggagcagcgctatcaggagcaggggtggcgaggccagcccccagaggacgtgggagcagcagcaagaagtggtttcaaggaaccgaaatgaacaggagtctgccgtgcacccgagggagattttcaagcaaaaggagaggggcatgtccaccaactccatctccagtcctcaacctggcaagctgaaggagccccttccctgaagaagcagctccccccaaccagaagaccacttttggcagagaagccggctgcttggccatcttcagggccccagaaacctccctgcctgaggaagccgggggc

SEQ ID NO: 74301 - DNA, 879 bp, Homo Sapiens
ccggccgggcccggaagctacagcagcggcgcggagactgcggggcgggccatggcggcgaacctgagccggaacgggccagcgctgcaagaggcctacgtgcgggtggtcaccgagaagtccccgaccgactgggctctctttacctatgaaggcaacagcaatgacatccgcgtggctggcacaggggagggtggcctggaggagatggtggaggagctcaacagcgggaaggtgatgtacgccttctgcagagtgaaggaccccaactctggactgcccaaatttgtcctcatcaactggacaggcgagggcgtgaacgatgtgcggaagggagcctgtgccagccacgtcagcaccatggccagcttcctgaagggggcccatgtgaccatcaacgcacgggccgaggaggatgtggagcctgagtgcatcatggagaaggtggccaaggcttcaggtgccaactacagctttcacaaggagagtggccgcttccaggacgtgggaccccaggccccagtgggctctgtgtaccagaagaccaatgccgtgtctgagattaaaagggttggtaaagacagcttctgggccaaagcagagaaggaggaggagaaccgtcggctggaggaaaagcggcgggccgaggaggcacagcggcagctggagcaggagcgccgggagcgtgagctccgtgaggctgcacgccgggagcagcgctatcaggagcaagggtggcgaggccagcccccagagcaggacgtgggaaccagcagcaagaaattggtttccaagggacccgaaatggaacagggagtctggccgggcacccaaagggagaattttcaggccaaaaggaggaaggggccatggtccacc

SEQ ID NO: 74302 - DNA, 816 bp, Homo Sapiens
  misc_feature (22)..(22): n is a, c, g, or t
  misc_feature (670)..(745): n is a, c, g, or t
ctggtggctctgacctgctacntctggaaaaagaatcaaaaactggaatacaaatattccaagttagtaatgacgactaactcaaaagagtgtgaactcccggctgcagacagttgtgctatcatggaaggagaagataatgaagaggaagttgtatattccaataaacagtcactactaggaaaactcaaatctttggcaaccaaggaaaaagaagaccattttgaatctgttcaactgaaaacctcaagatccccaaatatatgaagagacagtgctgtagccttgagactaatgaacaaagaaacctgctctagttttacaggaccatattttagggtctgtcctcatacctgtcacattggtgatctcacagaggagggccatgccgctgaaaagggaaggagattgaaacatttgattgccttatcacatggtcaagtaccttgccaaataaaggaaagcaaatgatttgggtctcaactgaagatgaagctcaactcaggaagagatttatctgtatatacacataactgaaaaccaagtttaagcccaccaatgcactgctgatgcatgccatataattaatgggtaacttttattctttatgatgtctacataacaagtgtgatttggaaggcacatgtgagcatatgcattatgatccaannnnnnnnnnnnnnnnnnnnnnnnnnnnnnnnnnnnnnnnnnnnnnnnnnnnnnnnnnnnnnnnnnnnnnnnnnnncctgaccttaaaacagcttttctactaaaaaatggtgagcaatgaagacaataaatttttcatttttccat

SEQ ID NO: 74303 - DNA, 938 bp, Homo Sapiens
  misc_feature (84)..(118): n is a, c, g, or t
tgaatttatcactcactatagggcgctagcgtctttgcagcgaacgaccgagcgcagcgaagtagtgagcgaggaagcggccgnnnnnnnnnnnnnnnnnnnnnnnnnnnnnnnnnnncagtcgacggtaccggacatatgcccgggaattcggccattacggccgggggtgggctgccgggctggcccagcttagggttttcaggaaatttggaagctgccgcagtagttggagtctaaggactcgtgacaatcttcgggtgcccttcgagagaaaaggggaggatgccactggagtcatcctcttcaatgccactatccttcccatctctcttaccctcagtaccacacaatactaacccttcccctcctctgatgtcttacatcacctcccaggagatgaagtgtattcttcactggtttgccaattggtcaggtccccagcgtgaacgtttcctagaggacctggtagctaaggcagtgccagaaaaattacaaccactgctggatagtctggagcagcttagtgtgtctggggcagaccgaccaccttctatctttgagtgccagctacatctttgggatcagtggtttcgaggctgggctgagcaggagcgcaatgaatttgtcagacagctggagttcagtgagccagacttcgtggcaaagttttaccaagcagtggctgctacagctggtaaggactgataggcattcagaccaaagaagataaccatagctgatggagccatgactctctacaatgataactcaattcaaatgtgtcgcctaaagctctggaactggtattcccaccagctgacccgaactcactgaccagtacaggcatggttattttcaaccattaatagcatgtcaaactggaactccctatttggtaaatggttatcaaatctaaggcaatcccagcctcatcc

SEQ ID NO: 74304 - DNA, 1079 bp, Homo Sapiens
ggtccggaattccttcgatgcgtgggctgccgggctggcccagcttagggttttcaggaaatttggaagctgccgcagtagttggagtctaaggactcgtgacaatcttcgggtgcccttcgagagaaaaggggaggatgccactggagtcatcctcttcaatgccactatccttcccatctctcttaccctcagtaccacacaatactaacccttcccctcctctgatgtcttacatcacctcccaggagatgaagtgtattcttcactggtttgccaattggtcaggtccccagcgtgaacgtttcctagaggacctggtagctaaggcagtgccagaaaaattacaaccactgctggatagtctggagcagcttagtgtgtctggggcagaccgaccaccttctatctttgagtgccagctacatctttgggatcagtggtttcgaggctgggctgagcaggagcgcaatgaatttgtcagacagctggagttcagtgagccagacttcgtggcaaagttttaccaagcagtggctgctacagctggtaaggactgataggcattcagaccaaagaagataaccatagctgatggagccatgactctctacaatgataactcaattcaaatgtgtcgcctaaagctctggaactggtattccaaccagctgaccgaactcactgaccagtacaggcatggttatttcaacattaatagcatgtcaactggactcctatttgtaaatgttatcaatctaagcaatccagctcatcagtctactagtttgcttctttccgagagatgtcaagtcctcaagaatttgatggcttcttctgcagctataaccacaaggaacctacacattgtaactcaagtccactgctggctcatgaaatgtgtaaagtagaaccctccttcccgagaaataagacaggacaataaaaggtggcgtttttgtactttacctggattccattggctggttttaccactcctatcagattgtagtgtaattgtgtgatacgcaaaccattagtttacccagtgatgatttaataaaattatgaaaaatcac

SEQ ID NO: 74305 - DNA, 1141 bp, Homo Sapiens
ctgaagcttcttggtggcccttgctagcccaggaagaaacttacattttgatttttttgtaccatggctttggttcacaaattgctgcatggtacttattttctcagaaaattctctaagccaacttctgccttgtatccattttggggtattcgctttgcagagtattcaagtagtcttcagaaaccagtggcttctcctggcaaagcctcctcacagaggaagactgaaggggatttgcaaggagatcaccagaaagaagttgctttggatataacttcttctgaggagaagcctgatgttagtttcgataaagcaattagagatgaagcaatataccattttaggcttttgaaggatgaaattgtggatcattggagaggaccggaaggccaccctctgcatgaggtcttgctggaacaagccaaggttgtctggcaattccgggggaaagaagatttggataagtggacagtgacttctgataagacgattggaggcagaagtgaagtgtttttgaaaatgggcaagaataaccaaagtgcactgctatatggaactctgagctctgaggcgcctcaggacggggagtctacccgaagtgggtactgtgcaatgatatccaggattccaaggggtgcttttgagaggaagatgtcttacgattggtcccagttcaatactctgtatctccgtgtacgtggggatggtcggccttggatggtgaatatcaaggaggacacagatttcttccagaggacgaatcagatgtatagttacttcatgttcacccgcgggggaccctactggcaggaggtcaagattcctttttccaaatttttcttctctaatcgaggaagaatccgggatgttcagcatgagcttccgcttgataagatctcttctataggattcaccttggctgataaagtggatggtccattcttcctggagatagattttattggcgtgtttactgatccagctcatacagaagaatttgcctatgaaaattctccagagcttaacccaaggctttttaaataaagatcatatggtagttttgttttactaatctaagggtactagcatctacaatgatatagacaaaataaaatatttctttaatggcatccaaaaa

SEQ ID NO: 74306 - DNA, 995 bp, Homo Sapiens
  misc_feature (154)..(183): n is a, c, g, or t
  misc_feature (252)..(284): n is a, c, g, or t
  misc_feature (892)..(931): n is a, c, g, or t
aaaatacatgcacacatatttttatttaacttaggccctgattattagtatataaaacagaaaaaccaagtgccttggtaatttacatatcttctccaaatctttaaagaaccaagctctaaaaaacacacgtaaagatatttaagtcataaannnnnnnnnnnnnnnnnnnnnnnnnnnnnntctaatgaccttcaggaaccataatccaataatatatttaataggtaagatctcattcatcaatatacnnnnnnnnnnnnnnnnnnnnnnnnnnnnnnnnnctaactttgattaagacatgtgcccttagtaagggcacttacaattagaaaggtttatcggtagcactttgaggtagcatattttgtaaagtcacagggctgctctgcagtttctcctggatacaaaggtagaggccatcagcctttgcccctagaagaggaaagtgaaattatctgtactcattgccagtgtcagcctgaacacactttctaccacccacccttggccatccctcctctacactttatgcgtcgggggtttagaacaacgtaaaggcattttgctgcttctttcctcttggtacggcagcatcccaggctgtggagccagttgcctcttgccgcatgtgattcaccagcaggagacgcatgcaccctgtggaaagggaagctgggcatcacagcatgctttttaattggctttaacatttcattaagtaagagtgactcattcctgcaaggctttaaagaggttcatttctgagtattctctccacgattctgaccctagaaagcgctcctttttttcctccctgggtgtaatcattttggggtatcattaagctttctgggattttcctggcaggagggtgaacagaaaagctttnnnnnnnnnnnnnnnnnnnnnnnnnnnnnnnnnnnnnnnngaccgcgtatgcggccgcaagcttattccctttagtgagggtaattttagcttggcactgcccg

SEQ ID NO: 74307 - DNA, 705 bp, Homo Sapiens
tttattctgattagccagactacaaagtgaccagtcacctggtaagtcctgtatggtaggaagtgggtgtgctctcgggtcctaaatgtggtctgtgctttacagccatcacacacatgctagttatttacctgatgcccttgcttgaaggccctataaattcttatacttaaaacaaaaagccagtaatgagttgtgatcaccccaaaaggcacagttgggctaaaataatgatgatatcaggggtaaacatatttttttgagaagttggtctggatctctgaacactgacaatttgtcattttgtctcagttgtcaaagtaaaaaaagcccagttgtcatccgtcttcaatatttttaaccagaaagtcacctgagtacggagtcccaatataaagtatttgggaccacctccctaacaaagctgttagggtaaattctgtgtgcacgcccaactccctcctgtcttccacagtctcctacaaaaaaaacagatggagaataatgtctacatgcaattgtttttactgcaattgtattttaaaatattttcaagaagagaaatactttaatatgtcaatatgtccagagaaaaaacctgtagttaaatatcagttgtgcaatttcttcctacttgcctaggctctaattagtcagcaatcaggtttaataaaggacatttgaaatttctgttatcatgaaaaa

SEQ ID NO: 74308 - DNA, 706 bp, Homo Sapiens
acgaggctggaataatcataagaaaggaaaagactgttccaagcttgggaaaaagtgtatttatcagcagttagtgagaggaagaaaaatcagaagaagttcagaggaacacctaagacaaaccaggtcggagaccatgagaaacagcgtcaaatcatcttttcatgatcccaagctgaaaggcaagccctccagagagcgttatgtgacccacaaccgagcacattggtgacagaccttcggggcctgtctgaagccatagcctccacggagagccctgtggccgactctgcactctccaccctggctgggatcagagcaggagcatcctctgctggttcctgactggcaaaggaccagcgtcctcgttcaaaacattccaagaaaggttaaggagttcccccaaccatcttcactggcttccatcagtggtaactgctttggtctcttctttcatctggggatgacaatggacctctcagcagaaacacacagtcacattcgaattcgggtggcatcctccggagagagagagaggaaggagattccacacaggggtggagtttctgacgaaggtcctaagggagtgtttgtgtctgactcaggcgcctggcacatttcagggagaaactccaaagtccacacaaagattttctaaggaatgcacaaattgaaaacacactcaaaagacaaacatgcaagtaaa

SEQ ID NO: 74309 - DNA, 1458 bp, Homo Sapiens
ggcacgagggagcatgcctcatgggcacgaggtgggcctagcagagagacagggagaaaggaggacatcacgggtcctggaagcccaagtgtggactcctcttctgtgacgacagtaccccggccctccacaccatctcgtctggctctcttcctgcggcagcagagcctgggtggctctgagtctccaggcccagccccttgctcaccagggctttctgcatcccccgcctccagccctggccgacggcctacccctgcagaggagcctggagagctggaagacaattaccaggatcatggcctgagggggccaagaaggttcgtctggtgccaaaggagggagctggggaactgctagagggcatctccgagggcatggcaggactagaaggctttgggcaggagctccgggagctagaggtggcattgagcaatgggggaactggctcagagtcccccttagaacctccactgccccttgaggaggaggaggcctacgagagcttcacctgtccccctgagccccctggccccttcctcagcagccctttgcggactctcaaccagctgccaagccagcccttcactggccccttcatggctgtgctctttgccaaactcgagaacatgctgcagaactccgtctatgtcaacttcctgctgacggggctggtggcccagctggcctgtcacccccagcccctgctccgctctttcctgctcaacaccaacatggtcttccagcccagtgtcaagtccctgctgcaggtgctgggctctgtgaagaataagattgagaactttgcggcttcccaggaggacttcccagcactgctgtccaaagccaagaagtacctcattgcccgtggcaagttggactgggctgagggccctgcagcaggacctgccccacgccgttctgatcccctagtgaagagccggaggccatccttgggggagttactcctgcggcatgcacacagtccaaccagggcccggcaggcggcacaattggtccttcagcctgggcgagacggagcaggacttggcctaagtgggggctcccctggggcttcaactccagttctactcacccggggcggggcccctgaacgccaaggtgaggctcttcgagtcaagaatgctgtctactgtgcagtcattttccctgaatttctcaaggagttggctgccatctcccaggctcatgccgtcacctcgcctttcttgttggagacttcagaggaaggatctggccctctcatctcaggctgtgggcccctcaatccttaactttcttccatggacaatcagggccatgggtggcccgggctggggctagggcacaggctcctttttatgtttggaggcagtggcaaaaggactttttaatttatttcagatgaatgttttatggagaacttgttgcaatatgtataaaagggaaatctctaaa

SEQ ID NO: 74310 - DNA, 664 bp, Homo Sapiens
gttcctgtgaagaccaagtataattttaataaccggggaagcctgacctctgaacctgtaacattggttccaattcagaccaaaatgatagatgtggattctcttacagacaaagagtgcgactggctcaacaattaccacctgacctgcagggatgtgattgggaaggaattgcagaaacagggccgccaggaagctctcgagtggctcatcagagagacgcaacccatctccaaacagcattaataaatacctccccggttttgtttttgtaaaatgctctggaggaaggaagaaacgtggcagatccctgacatctttcccctttcctttccttcttccctacctcccctttttactttagactttaagaagaacagaaaatcttcttatcctctttgatattttattgcaaacactcagtcttttatgattttttaattgttgagaacaagccaagaataaaattgctgcaccagaaggagggtccctccaaagttgaacacttggtgaaaggaagatgccccgacttctttggccagtgatggggaatcagtgagtgctccatgatggtcatgttccaggtgctagtacatcattcatgatcaccttaatgctcatgagactatatttatgatcagtgaataaaaatgtcagaactgtg

SEQ ID NO: 74311 - DNA, 1804 bp, Homo Sapiens
tactccatctcagtgaggagtgctggtgagtgttcttcctgaaggatccaggtttggtgtggacccctggatcattcctacagattattggaagaaaatggccaaagttctgagaagtgccggccatcacctcattcctgtcaaggagaacctcgttgactaaatctggacagaccgtcctgagcgcccttgcaagcctctcctcacactgggcctggattacacaggcatctcctggaaggacaaggttgcagaccttcggttgaaaatggctgagaggaacgtcatgtggtttgtggtcactgccttggatgagattgcgtggctatttaatctccgaggatcagatgtggagcacaatccagtatttttctcctacgcaatcataggactagagacgatcatgctcttcattgatggtgaccgcatagacgcccccagtgtgaaggagcacctgcttcttgacttgggtctggaagccgaatacaggatccaggtgcatccctacaagtccatcctgagcgagctcaaggccctgtgtgctgacctctccccaagggagaaggtgtgggtcagtgacaaggccagctatgctgtgagcgagaccatccccaaggaccaccgctgctgtatgccttacacccccatctgcatcgccaaagctgtgaagaattcagctgagtcagaaggcatgaggcgggctcacattaaagatgctgttgctctctgtgaactctttaactggctggagaaagaggttcccaaaggtggtgtgacagagatctcagctgctgacaaagctgaggagtttcgcaggcaacaggcagactttgtggacctgagcttcccaacaatttccagtacgggacccaaacggcgccatcattcactacgcgccagtccctgagacgaataggaccttgtccctggatgaggtgtaccttattgactcgggtgctcaatacaaggatggcaccacagatgtgacgcggacaatgcattttggggacccctacagcctacgagaaggaatgcttcacatatgtccctcaagggccacatagctgtgagtgcagccgttttcccgactggaaccaaaggtcaccttcttgactcctttgcccgttcagctttatgggattcaggcctagattacttgcacgggactggacatggtgttgggtcttttttgaatgtccatgagggtcccttgcggcatcagttacaaaacattctctgatgagcccttggaggcaggcatgattgtcactgatgagcccgggtactatgaagatggggcttttgaaatgcagaaacagggccgccagaaagctctccatgtggctcatcagagagacgcaacccatctccaaacagcattaataaatacctccccggttttgtttttgtaaaatgctctggaggaaggaagaaacgtggcagatccctgacatctttcccctttcctttccttcttccctacctcccctttttactttagactttaagaagaacagaaaatcttcttatcctctttgatattttattgcaaacactcagtcttttatgattttttaattgttgagaacaagccaagaataaaattgctgcaccagaaggagggtccctccaaagttgaacacttggtgaaaggaagatgccccgacttctttggccagtgatggggaatcagtgagtgctccatgatggtcatgttccaggtgctagtacatcattcatgatcaccttaatgctcatgagactatatttatgatcagtgaataaaaatgtcagaactgtgaaa

SEQ ID NO: 74312 - DNA, 786 bp, Homo Sapiens
ccatagcagtgacaaatcatttgtgatgtgaccagatgtggacatatctaaaagaattcgagattcgatctggatgagctccttatgggtataccccattgtgtgatagccgcagggaaatggatggatatcgtttctggaaaacaggatactgggcatcacatcttttaagacggaaataccatatcagtgctttatatgtagtggatctcaagaagttcaggagaattggagcaggtgacaggctcaggagccagtatcaagctctcagtcaagatccaaacagtctttcaaacctagatcaggatctccccaataatatgatttaccaagtcgccattaagtctcttcctcaagactggctgtggtgtgaaacctggtgtgatgatgaatccaaacaaagagccaaaacaattgatctgtgcaataatcccaaaacaaaagaatccaaactaaaagctgctgccagaattgtcccagaatgggtggagtatgatgctgagataagacaactattagatcatcttgaaaacaagaagcaagatacaattttgacacatgatgaactctagcactggtgtatatgagaaggaaggcgaaagcatgacaggaaacctgccgcctgctggggaagtctggagcccctgctgagacgatttggaagtctcgttaagatcagtgacatattctttaattttaaaaaattgtaattatttaaaacagttatttaatgtattgaatgagtttaagttatataataaatgaccattgagtatttaaaaaaaa

SEQ ID NO: 74313 - DNA, 2373 bp, Homo Sapiens
cccggtagtaaaacatttactagagagcaagcagaaaggaatgcacatcttaaagaaaccttcacaaagtcacaaaagtcaaagtttgtatatttcttttcctttttataaacgataaacaaaaatcatcaaaatcatttcagcaaaagacttttctatcattggggcaagttaaaaaaaatacaatgagatagaagacactttaaaagctgttgttgggtttcttgtttaattttaaatttagcaataccatctcaaacctggagcaatcctggaacagttaccaggatcaccttttcccttcaatccttgtggcttctgggaatcttcagagcctgggtctgaaaggtgtttcctacatgtctcagggctggatgcaaacctggctggggacctgagcatcaactcccatttagaatcagacatctcccttccctgcaaatgtctacaactaccaaattgctccccaacagttagctcaatggattgaatttgcagaagccaactcctaaaatggggactgcctggccatacaactaagaaaaagaactcaatttatagatgcttataaggtgacaccttagtaaaaaatataagctacatacaatataaacctagagtgagttttgtgccctagaagaccctttatcccaagataacctcaacttacccgcatgacaactcacctagagccaaaagaagcttcccagctctcactgcttccaaggaccaaaacagcttcccaagaaaacatccgaaaattccttctgatgaaggggtaatgtctccaagctccagctctccactaagggcagggggtccttacactttggaccccaacccagccctgagacacctcagttaccaaaatctttctaaaaattaaggacaactgatttcacgctttagcacatcccctctaactgtcccatcgacttttcttgcgtttaggcggctctgggacagcaaagccgtcagctgtcttatcagtcttgctgtccaccttgtccatcttgctgctgtccactttgggttccatcttgggctccatcttgctctcacgattaaaagcttctttcctgctttccccattccgaccatcatttgcaccccggttctccccatgccggcctgcgcttcctccatgtctgttctccccgtgccgatggccatcagtatgacggctgctgctttctggatgccggtatccatctcccatggcgaccaccatcttccgtgacgtggactatcgctatgccgattgccagtctctccgtgactgtgacggctgctgccccggttctcagtatatctctctcttttcccgttgctgcccccagtcccttctcggctgttattccctgaagctgtgttgttgactccttgggctccggcagacgggtaggtcacaggggcaccactgatgttgccagtattgccaaagcctgggatgcccttggcggcactggtgacggggctgtcaggactgttatggccctgttgtgctgagttagttggaacagaattcaagctccctgcactagtccacccacttgccccagcagcagaactcccagccttctgattacttaaactggctgcaacaaagtgactcttgtactgtgactggaaagctgctttcattgccgttagtcgatctcccatagctcctgtggaaggcttgtaggcctcataattgctcattacattgttatttcctcgatccatgttctcagagcccaggccaggccgctccctgtagcctaggcctcctccaccaatgttcagcttttttcctttccctcctttgaatcgagatttccgaaaccaggcattctgcattgccagatctaggagttccttagaaacgtgttgattggctccttccaagttccggaccaggtcaccagcaaaattgctgtccttgggagtgagtagggtataggccacacctttctcacccgctcttcctgtgcggccaatcctatgcgtgtgggtatcaatgtctcgtgccacatcatagttaatgacagtcttaattgaaggaatgtccagaccacgggctgcaacatctgtggccaccaggactgggatgtcctttttcttaaagtctgaaatgaccttgtttctctcactctgatccatatccccatggagcagcccaagattatgaccctcctgtttaaggttattcgctagctcttcagcattggcttttttagtaacaaagaggaggacactccctgaagaggtaaattctaccagacgccgggtaagccagttccatttactaggtccagaatggagaatctccacaatctgtgtcacatcttcacggacgcgtgggtcgacgatatcccgaaattccggacc

SEQ ID NO: 74314 - DNA, 1567 bp, Homo Sapiens
cattcctgctgaaaactcaccaactcgccagcaattccattccaagccagtagattctgacagcgatgatgatcccttggaggcattcatggctgaagtggaggatcaggcagctagagacatgaagaggcttgaagaaaaggacaaggaaagaaaaaacgtaaagggtattcgagatgacattgaagaggaagatgaccaagaagcttattttcgatacatggcagaaaacccaactgctggtgtggttcaggaggaagaggaagacaatctagaatatgatagtgacggaaatccaattgcacctaccaaaaaaatcattgatcctcttccccccattgatcattcagagattgactatccaccatttgaaaaaaacttttacaatgagcatgaagagataaccaacctcactccacagcagttaatagatctccggcataagctcaatcttcgggtctctggtgctgcacctcctagaccaggaaatagctttgctcattttgggtttgacgaacaacttatgcaccagattcggaaatctgaatacacacagcccactccaatacagtgccagggtgtgcctgtggcattaagtggtagagacatgattggtattgccaaaacaggtagtgggaaaactgcagccttcatttggcccatgttgattcatataatggaccagaaggagttggaaccaggtgatggaccaattgcagtgattgtgtgtcctaccagggagctttgccagcagatccatgcagaatgtaagcggtttggaaaagcatataatcttcgatcagtggccgtatatggaggagggagtatgtgggagcaggccaaggcccttcaggagggggcagagattgttgtgtgtaccccaggtcgactgatagatcatgtgaaaaagaaagctaccaatcttcaaagagtctcttaccttgtgtttgatgaagcagatcgaatgtttgacatgggatttgagtaccaagttcgatccatagcaagtcatgttcgtcctgacaggcagactctcttatttagtgcaacttttcggaagaagattgaaaagttggccagagacatcctggatcgaccctattcgaggggtgcagggagatattggacaagcaaatgaagatgtgacacaaattgtggagattctccattctggacctagtaaatggaactggcttacccggcgtctggtagaatttacctcttcagggagtgtcctcctctttgttactaaaaaaggcaatgctgaagagctagcgaataacctttaacaggagggtcataatcttgggctgctccatggggaaatggatcagagggagagaaaaaggtcctttcagactttaagaaaagacatccactactggtggcccgatgtccgcccgtgtctgcacttcttcattagatgcattactagatggcgcagacttaacccccctagatgccccaggaagcgcggaaggggcacctcctccgacatttcggctcgatgagaccctcaacatgagaatcgccattaggagccctcgggagcgccgtttcgaaaccc

SEQ ID NO: 74315 - DNA, 1538 bp, Homo Sapiens
ggtccggaattcccgggatatcgtcgacccacgcgtccggcggggaatccttccgcccttcttaggaggggctgcattgcagggggagagtgaactgacagactcagtcactgaagagggaaaaggagtgagaagacaaagccgtcaaagccccaacagctttgtatttctccagcccggcgcagaccccggagctcccgaggcactccctccatctttggaacacgccagtaattgattgataacaggaagctatgagggaccctgtgagtagccagtacagttcctttcttttctggaggatgcccatcccagaactggatctgtcggagctggaaggcctgggtctgtcagatacagccacctacaaggtcaaagacagcagcgttggcaaaatgatcgggcaagcaactgcagcagaccaggagaaaaaccctgaaggtgatggcctccttgagtacagcaccttcaacttctggagagctcccattgccagcatccactccttcgaactggacttgctctaaggccaagacttctctctcccatcaccttgccctcattgtcttccctctcaagccccttcctttccactcctttcccattttaatcttgttctctccctactgtgttggtggtgctgatgaatctgccagagttgagttctatgtatttatttatctatctgtctactccatttctctcaaaagccctcaagtcacaaagtaaatggttcaagcaatggagtactgggtcacagggattcctcctttcccccccaaatattaactccagaaactaggcctgactggggacacctgagagtagtatagtagtgcaaaatggaagactgatttttgactctattataatcagcttcagagattccttaaaccttcctaatttcctgctccagggcagtaaacaccaaatatttcttccagggggtgatgaaaacctcggaaggtttaaatttgaggttatctgctacaaaacagtatttctaaaaggctaaagtggataagtctcttgccttttttttgatcctgctcttatattcttttttttcctcagagaaatcaggagggtagttagaggtataaaacaggaggaaatattatggaaaatgaaaatagggaaaataattgaatcattttagaagtagctaatttcttttctcaaaagagtgtcccttcttcacacctactcactttacaactttgctcctaactgtgggttgaaaactctagctaaagaaagttatcaaatcttaacatgcattcctactattatgatagtttttaaggtttcaattcaatcttctgaacggcataagtcctattttagccttacctcctgcatttgcaatacgtaatactgatcagtgggcacagttcttcagctacattgagaccctgaaatgaacaattatattctgactcgacatcttgtccccaatccttccaaaaatattgatggtgatttgtgctaccatttactcgtttatttaataaagacattcaatcccaggaaaaaaa

SEQ ID NO: 74316 - DNA, 989 bp, Homo Sapiens
  misc_feature (693)..(693): n is a, c, g, or t
ggtccggaattcccgggatatcgtcgacccacgcgtccgtcgacccacgcgtccggtcactgaagagggaaaaggagtgagaagacaaagccgtcaaagccccaacagctttgtatttctccagcccggcgcagaccccggagctcccgaggcactccctccatctttggaacacgccagtaattgattgataacaggaagctatgagggaccctgtgagtagccagtacagttcctttcttttctggaggatgcccatcccagaactggatctgtcggagctggaaggcctgggtctgtcagatacagccacctacaaggtcaaagacagcagcgttggcaaaatgatcgggcaagcaactgcagcagaccaggagaaaaaccctgaaggtgatggcctccttgagtacagcaccttcaacttctggagagctcccattgccagcatccactccttcgaactggacttgctctaaggccaagacttctctctcccatcaccttgccctcattgtcttccctctcaagccccttcctttccactcctttcccattttaatcttgttctctccctactgtgttggtggtgctgatgaatctgccagagttgagatctatgcatttatttatctatctgcctactccatttctctcaaagcccctcaagtcacaaagtaaattggttcaagcaantggaagtactggggtcacaggggattccctcccttttcccccccaaaataatttaacttccacaaaactaaggcctgacctggggggacacctggagaggtagtattagtagtggcaaaaatggggaggactgaatttttttggactcctaataataaattcaggctctccaaagaattccctttaaaaccccttcccctaaatttcccctggctccccagggccgagttaaaaccccaaatatattttccttcctcaggggggggtggaagggaaaaaacctctccgggaagggt

SEQ ID NO: 74317 - DNA, 944 bp, Homo Sapiens
gaaatctgtatctgtagtgagatagcattgtgaactgacaggcagcctggacatagagaggagaagaaagtcagagagggtgacaagatagagagctatataatggccggctggaaatgctgggctgacggtgcagtctgggtgctcgcccacttgtcccactatctgggtgcatgatcttgagcaagttccttctggtgtctgctttctccattgtaaaccacaaggctgttgcatgggctaatgaagatcatatacgtgaaaattatttgaaaacatataaagcactatacagattcgaaactccattgagtcattatccttgctatgatgatggtgttttggggatgagagggtgctatccatttctcatgttttccattgtttgaaacaaagaaggttaccaagaagcctttcctgtagccttctgtaggaattcttttggggaagtgaggaagccaggtccacggtctgttcttgaagcagtagcctaacacactccaagatatggacacacgggagccgctggcagaagggacttcacgaagtgttgcatggatgttttagccattgttggctttcccttatcaaacttgggcccttcccttcttggtttccaaaggcattttattgcttgagttatatgttcactgtccccctaatattagggagtaaaacggataccaagttgatttagtgtttttacctctgtcttggctttcatgttattaaacgtatgcatgtgaagaaagggtgtttttctgttttatattcaactcataagactttgggataggaaaaatgagtaatggttactaggcttaatacctgggtgattacataatctgtacaacgaacccccatgatgtaagtttacctatgtaacaaacctgcacttatacccatgaacttaaaatgaaagttaaaaataaaaaacatataca

SEQ ID NO: 74318 - DNA, 2130 bp, Homo Sapiens
cgcaatgatcgactccttgtctatggattcattcctcactgcacacaagcaactctgtgtgcactaattcaagagaaagaattttgtacaatggtgtcgactactgagcttcagaagacaactggaactatgatccacaagctggcagcccgagctctaatcagagattatgaagatggtattcttcacgaaaatgaaaccagtcatgagatgaaaaaacaaaccttgaaatctctgattattaaactcagtaaagaaaactctctcataacacaatttacaagctttgtggcagttgagaaaagggatgagaatgagtcgccttttcctgatattccaaaagtttctgaacttattgccaaagaagatgtagacttcctgccctacatgagctggcagggggagccccaagaagccgtcaggaaccagtctcttttagcatcctctgagtggccagaattacgtttatccaaacgaaaacataggaaaattccattttccaaaagaaaaatggaattatctcagccagaagtttctgaagattttgaagaggatggcttaggtgtactaccagctttcacatcaaatttggaacgtggaggtgtggaaaagctattggatttaagttggacagagtcatgtaaaccaacagcaactgaaccactatttaagaaagtcagtccatgggaaacatctacttctagcttttttcctattttggctccggccgttggttcctatcttcccccgactgcccgcgctcacagtcctgcttccttgtcttttgcctcatatcgtcaggtagctagtttcggttcagctgctcctcccagacagtttgatgcatctcaattcagccaaggccctgtgcctggcacttgtgctgactggatcccacagtcggcgtcttgtcccacaggacctccccagaacccaccttctgcaccctattgtggcattgttttttcagggagctcattaagctctgcacagtctgctccactgcaacatcctggaggctttactaccaggccttctgctggcaccttccctgagctggattctccccagcttcatttctctcttcctacagaccctgatcccatcagaggttttgggtcttatcatccctctgcttactctccttttcattttcaaccttccgcagcctctttgactgccaaccttaggctgccaatggcctctgctttacctgaggctctttgcagtcagtcccggactaccccagtagatctctgtcttctagaagaatcagtaggcagtctcgaaggaagtcgatgtcctgtctttgcttttcaaagttctgacacagaaagtgatgagctatcagaagtacttcaagacagctgctttttacaaataaaatgtgatacaaaagatgacagtatcccgtgctttctggaagtaaaagaagaggatgaaatagtgtgcacacaacactggcaggatgctgtgccttggacagaactcctcagtctacagacagaggatggcttctggaaacttacaccagaactgggacttatattaaatcttaatacaaatggtttgcacagctttcttaaacaaaaaggcattcaatctctaggtgtaaaaggaagagaatgtctcctggacctaattgccacaatgctggtactacagtttattcgcaccaggttggaaaaagagggaatagtgttcaaatcactgatgaaaatggatgacgcttctatttccaggaatattccctgggcttttgaggcaataaagcaagcaagtgaatgggtaagaagaactgaaggacagtacccatctatctgcccacggcttgaactggggaacgactgggactctgccaccaagcagttgctgggactccagcccataagcactgtgtcccctcttcatagagtcctccattacagtcaaggctaagtcaaatgaaactgaattttaaactttttgcatgcttctatgtagaaaataatcaaatgataatagatacttataatgaaacttcattaaggtttcattcagtgtagcaattactgtctttaaaaattaagtggaagaagaattactttaatcaactaacaagcaataataaaatgaaacttaaaatatttc

SEQ ID NO: 74319 - DNA, 1209 bp, Homo Sapiens
cattgccctacctacctgcagatattggaaatgcagaaggggagcctgtggtacctgaacgacagattagaataagtgagaaacctggtgctccagaagataaccaagaagaggaggatgaaggcttgggagttgatctctctttcattggctctcatgcttttgctcgaatggaaggagatattgacaagcaaagaaaactgatccttcagggacaattatcagaggcagctctgcagaagcagcatcaaagaaattataatcgctggttatgtcaagcaagatctgaggatctgtctgatattgcttctctaaaagccttataccaaacaggtgttgataactgtggtcgaacagtgatggtggtagttggaagaaacattcctgtaacattaatagatatggacaaggctctcttatatttcattcatgtaatggatcacattgctgtgaaggagtatgtattagtgtattttcacaccctgaccagcgaatacaatcacctggactccgacttcctgaagaaactctacgatgttgttgatgtcaagtacaagaggaatttgaaggctgtttattttgtacatcccacatttcgttcaaaggtgtcaacatggttttttaccaccttttctgtctcaggactgaaggacaaaatccaccatgtggacagcctccaccagctgttttctgccatatcaccagaacagattgactttcctccttttgtccttgaatatgatgccagggaaaacgggccttactatacatcatatcccccatcaccagatttgtgaccctgcccatctttcagtgcttcttggttcccaggatgccacttcctccacgaatagctacctgttgaagtgatattcattgttgctgtacagatccagagagccttttgtccccacctctctggtatttttttattgactgtatattttctggcacataagcaatctaaaaatggtaggccattctgaactgcacacattttaaatttgtatatttatatgaaatggaaatgttcatttttagattgttaatagaaattggggagcaacttttgagtatctttagtttcctgaaggacaccgaattctccattagataaaccaccaagactgttcacatcatctctctaacattgcacgcttcctttgtgtacttaagtgattctcgaaatatacagaaccaatgtatgct

SEQ ID NO: 74320 - DNA, 1004 bp, Homo Sapiens
  misc_feature (63)..(63): n is a, c, g, or t
  misc_feature (74)..(74): n is a, c, g, or t
  misc_feature (79)..(79): n is a, c, g, or t
  misc_feature (103)..(103): n is a, c, g, or t
  misc_feature (111)..(111): n is a, c, g, or t
  misc_feature (119)..(120): n is a, c, g, or t
  misc_feature (122)..(122): n is a, c, g, or t
  misc_feature (216)..(216): n is a, c, g, or t
  misc_feature (272)..(272): n is a, c, g, or t
cggcgtactgaactgagacctgtaccgcttgaacagtcgattatttctcacgcttgtgtgccncagcgtcacantgtgntaaggctggagtttactccagccntaatcctncaagtccnnantacctaagaggaacacccggtgaatcaacgtaactacacccagactggacaagtcagtctgcagtgaaaggatgacggtgttctgtcactcttntctgctaggactgtaatgagaacaaacacggataatctgaatgtactcagaagctntgatgcaggtgtagatttctttcccggaacaaacaacttatcagaagacggaaatctgtcactggagaagcctttgcttctacatactggaatgggacggttatgcacactggatgaatctgtctccctggcaaccatgattgatcgaataaaaagacacctaaaactatctcatattcgcttagcccttggggtggggagaaccttagagtctcaagtcaaagtcgtggccctgtgtgctggttctgggagcagcgttctgcagggtgttgaggctgacctttacctcacaggtgagatgtcccatcatgatactttggatgctgcttcccaaggaataaatgtcatcctctgtgaacacagcaacactgaacgaggctttctttctgaccttcgagatatgctggattctcacttggagaataagataaatattatcctatcagagactgacagggaccctcttcaggtggtataattgcagaaacatcaggataacacattctacaaatcagctggatgccaacttaaatttgtaacatgagtcagtgggactggtgtgcttccagagagtgtcttcgagggtatcatcatttccggtttgttaatcttattcaccaaatgttctatcgctcgtaaggtaaaactgtaatataactaccatattaaataacaaatgttcattataaactctaggaaagattgaataaaatctgtttacttaacattctt

SEQ ID NO: 74321 - DNA, 1045 bp, Homo Sapiens
  misc_feature (21)..(22): n is a, c, g, or t
aaaactatacctggtctatgnngtagcgaggcccctggggggtgtttagataatcggcacgaggattccgggactgaaactggaactttactgatttctgtatgttgtcatctagcgtacgcccagtccccacgacagtcgcggttatgtagattccctgatctgcaattcttcccgttccttcatggatttgaaggctctcctttcttccttgaatgactttgcatccctctcgtttgctgagagttgggacaatgttggattactggtggaaccaagcccaccacatactgtaaatacactcttcctgaccaatgacctgactgaggaagtgatggaggaggtgctgcaaaagaaggcagacctcattctctcctaccatccgcctatcttccgacccatgaagcgcataacctggaacacatggaaggagcgcctggtgatccgggctctggagaacagagtcggtatctactctcctcatacagcctatgatgctgcgccccaggacgtcaacaactggttggctaaagggcttggagcttgtacctccaggcccatacatccttccaaagctcccaactaccctacagagggaaaccaccgacgtacgcaattcaacgttcaactacacccaagacctggacaaagtcatgtctgcagtgaaaggaattgacggtgtttctgtcacttctttttctgctaggactggtaatgaggaacaaaacacggattaatctgaatgtactcaggaaggctttgatgcagggtggtagaattttcttttcccgggaacaaacaacttttatcagaaagaaggaaacttctgtcactgggagaagccttgtttctacctactggaatgggacggtttgcccacgggatggaatctgttttcctggcaacctgttggtcgataaaagagactaaaaatttcaattgctaagccgcggggggggacactgtcacaaactcggccgtggttggttgaaacgattgagggtggggcacacggagcccggatggggctccgaaattcgtgcca

SEQ ID NO: 74322 - DNA, 1244 bp, Homo Sapiens
  misc_feature (159)..(168): n is a, c, g, or t
gaccgcgccgcccttggtggtttcagcgccttgaagattttgaggacattggaaaaccttgggcaaggaaaattccggcacccatttgggggattccctggggagggcccccacccggggggggccgaaccgcaaggggcaggtgatggaatagggttnnnnnnnnnnagtaacgaatatgaaatatttaggttctttaattcgatcaatcatgttgccagggagacagattcatccagtgtgcataccgtcccattccagtatgtagaagcaaagcttctccagtgacagaatttccgtcttctgataaagttgtttgttccgggaaagaaaatctaccacctgcatcaaagccttctgagtacaattcagattaatccgtgtttgttcctcattaccagtcctagcagaaaaagaagtgacagaaacaccgtcaattcctttcactgcagacatgactttgtccaggtcttgggtgtagttaacgttgaattctactcggtggtttccctctgtagggtagttgggagctttggaaggatgtatgggcctggaggtacaagctccaagccctttagccaaccagttgttgacgccctggggcgcagcatcataggctgtatgaggagagtagataccgactctgttctccagagcccggatcaccaggcgctccttccatgtgttccaggttatgcgcttcatgggtcggaagataggcggatggtaggagagaatgaggtctgccttcttttgcagcacctcctccatcacttcctcagtcaggtcattggtcaggaagagtgtatttacagtatgtggtgggcttggttccaccagtaatccaacattgtcccaactctcagcaaacgagagggatgcaaagtcattcaaggaagaaaggagagccttcaaatccatgaaggaacgggaagaattgcagatcagggaatctacaaaccggactgtcgtggggactcatctatgcctcatttcagtgccacttcaggccttttccaggacagtgaaaaaccacgagacacagccagttaagtctgagtcaggacccctgtcccactagtgcgctgtgctctggtgcggcagggcagttttctgacccaatctcctcttctgctgtcctctgcagcaccaagataacaatcacagccggccccaaccggcacctaccgcgaaggtcacaactacactcgcgggtttttaaatcgcccactactcaccagtcc

SEQ ID NO: 74323 - DNA, 789 bp, Homo Sapiens
  misc_feature (478)..(478): n is a, c, g, or t
  misc_feature (623)..(623): n is a, c, g, or t
  misc_feature (742)..(742): n is a, c, g, or t
ggggcagagaagtttccgggactgaaacttgaactttacctgatttctgtatgttgtcatcttgcgtacgcccagtccccacgacagtccggtttgtagattccctgatctgcaattcttcccgttccttcatggatttgaaggctctcctttcttccttgaatgactttgcatccctctcgtttgctgagagttgggacaatgttggattactggtggaaccaagcccaccacatactgtaaatacactcttcctgaccaatgacctgactgaggaagtgatggaggaggtgctgcaaaagaaggcagacctcattctctcctaccatccgcctatcttccgacccatgaagcgcataacctggaacacatggaaggagcgcctggtgatccgggctctggagaacagagtcggtatctactctcctcatacagcctatgatgctgcgccccagggcgtcaacaactggttggctanagggcttggagcttgtaccctccagcccatacatcctttcaaagctcccaacctacctacagagggaaaacaccgagtagaattcaacgttaactacacccaagacctggacaaagtcatgtctgcagtgaaaggaatttgaccntgtttctggcactttctttttctgctaggactggtaatggagaaacaaacacgggattaatctgaatttgtactcaaaaggctttggatgccaggtgggtaaatttttcctttccgggnaaacaacaacttttatcagaaagaacggaaatttctgtccacctgga

SEQ ID NO: 74324 - DNA, 409 bp, Homo Sapiens
aaagcaaatgacaaagacccagtttaccagctttacttttttaaacctaagcttaacattacatatttaaacaattgtcaaaacttactaagttgccagcattcatgcacaactagaaaacatccttaatttatattaaaccagaaatgtattaccattaatgtattaatatctttcactactaaatactgaaaaaaattgaaattatttctgtagaagaatcgtcctggcaatgttaacttcacagcaggccgacactacgtggctcacatttcagacacaatgaaaagcaggtccatgctggtgttagtgtacaatcttgtcctacactaaagagtcaagactcaccttggagtacgtttaataaaaaagcaaagtgcatacagagatttacaacaattttaaagac

SEQ ID NO: 74325 - DNA, 1594 bp, Homo Sapiens
  misc_feature (1508)..(1534): n is a, c, g, or t
acggcaagtaactactaacggttttaaggtagcgaggcctgggtggcgaattcggcacgagggggggcctggggaaggaaggagttcagaggaagggtgtcccctgtcctcttgatgtcaccctccgctcctgggacacgtgctctctctgtctctgggtcttctggctgtgcacgtttgtgtgtccttgtaaatatgttttaggaagaaagcaaaagggactgaactagcctctggtaggattgcaggggtccagccttgcctgtttccgaagcccccacactgcctttcgccccactgagactggtcccctcaaaaggtagacaaaacagcagctccctgtggagctgaagggcggcctcaaagtggctttttgttagacaaggttaaggtttcctcatgagcaaggttgcagatcggtccttcctcagctccttgatttgtgaccttgaccaaggggcctgccacccagcccctccagtgccctctcctcgatgcctcgctccttcctgcccccagtcccctggcttaggcaggtaggggaattagggccatgctggaagaagcttaaccatgtgttcaaagaacggtttcttgcttgcttggtcctggaactccccttggctgccccaggcctccttggcccatgggtgctgggggaggtggatgtcagatctggtaggttgcagcagagcaacaataaatgtgccttgagagaacactcagcagagggtccaagggtgatggagaaggaagcatggcctgggagcttggaagggaggggtggtgggtggcggcatcttgactgccccctgttgtcccacacgtggggggtggtcaccccccttcactccagcccgcctgccttcagccttccatgagcttcacctgcttccaacttcactttggagggggtggggtccgttggcatcaacacggggaccctctgcttcaccaaagcccgagccctcagcccctggggagaacaaatggctgagctttgatacctggggtcgtcgagaggctgcgggctggcggcagtcccaggggagagacaccacagaaggagacccagacatcccgaggaagttcccagcagagcaaactgctttccagcctgaagcctgcttaaactgtgtgatgtgcaataactgagcttagagttaggaattgtgttcaagtgcttggatttccgtctgtagatttaactgctgaaattgtatctctcagtaattttagatgtcttttaaaaaattgaaaaacaaagtgttagactgtgtgcgtgtgcgttgatgggcactcaagagtcccgtgagtcatccagccctgcctttcccctgcgcccccatcctctcacgtcccgccctgcctccacttggggaccctgcctcgtgtcgtctttatctgcctattactcagcctaaggaaacaagtacactccacacatgcataaaggaaatcaaatgttatttttaagaaaatggaaaataaaaactttataaaccccnnnnnnnnnnnnnnnnnnnnnnnnnnngaccgcgtatgcggccgcaagcttattccctttagttgagggttaattttagcttggcac

SEQ ID NO: 74326 - DNA, 1293 bp, Homo Sapiens
  misc_feature (80)..(114): n is a, c, g, or t
  misc_feature (1241)..(1253): n is a, c, g, or t
aaaatgtatgatcactataggggctgcgcgtatagccgaacgacgagcgcagcgaagtcagtgagcgaggaagcggccgnnnnnnnnnnnnnnnnnnnnnnnnnnnnnnnnnnncagtcgacggtaccggacatatgcccgggaattcggccattacggccggggagcataaggagaattattttttactcccttataaagcccagtatcaatgaaaagggagagagagaactagaaccaatcacaacctctcaagccctgcagattgctggcagagctggcagattcagctcacggtttaaagaaggagaggttacaacaatgaatcatgaagatctcagtttattaaaggaaattttgaagaggcctgtggatcctataagggcagctggtcttcatccaactgctgagcagattgaaatgtttgcctaccatctccctgatgcaacactgtccaatctcattgatatttttgtagacttttcacaagttgatgggcagtattttgtctgcaatatggatgattttaaattttctgcagagttgatccagcatattccactaagtctgcgagtgaggtatgttttctgcacagctcctatcaacaagaagcagccttttgtgtgttcttcactgttacagtttgccaggcagtatagcaggaatgagcccctgacctttgcatggttacgccgatacatcaaatggcctttacttccacctaagaatattaaagacctcatggatcttgaagctgtccacgatgtcttggatctttacttgtggctaagctaccgatttatggatatgtttccagatgccagccttattcgagatctccagaaagaactagatggtattatccaagatggtgtgcacaatatcactaaattgattaaaatgtctgagacgcataagctgttgaatttggagggctttccatcagggagccagtcacgattgtcaggaaccttaaagagccaagctagaaggacacgcggcaccaaagctctagggagtaaagctactgagccacccagccccgatgcaggagagctgtcccttgcttccagattggtgcagcaaggactcctcactccagacatgctgaaacagctagaaaaagagtggatgacacaacaaactgaacacaacaaagaaaaaacagagtctgggactcatccaaaagggacgagaagaaagaagaaggaacctgattcggactagttttctgttcctgnnnnnnnnnnnnnatttaattttgcaaataaaaatttattttgaatccttaaa

SEQ ID NO: 74327 - DNA, 2591 bp, Homo Sapiens
  misc_feature (12)..(12): n is a, c, g, or t
  misc_feature (36)..(36): n is a, c, g, or t
  misc_feature (85)..(85): n is a, c, g, or t
  misc_feature (90)..(90): n is a, c, g, or t
  misc_feature (238)..(238): n is a, c, g, or t
  misc_feature (244)..(244): n is a, c, g, or t
  misc_feature (294)..(294): n is a, c, g, or t
  misc_feature (422)..(422): n is a, c, g, or t
ccctcagtgctntgggcttagagcagaagcacactntgtatgatgttgcagtcagagagtgtgtggtagctgattcacagaaccngcagntggtggcagacacgtgtgggccactgaaccagcctaggaggagacaagtcccaaagttccgactggagaaggggtaaaagttgctttggtgagtgagaaaagctgggcgtgtgatccatcccctcacgttcagaaactcccagctgtntacctngactctcaccacagccagcacatacacctagctgtttttcccttcctccnacacttgagggacgcagcaacagctaggatctgcattttcaggttccgagcctgacccctggaactgaccagcgctcgattgtcagccttggcctggggttttgaccttgccagtgaagtttcggttntgaagtgattaaatgtcacttcctcatcagtttcacttctggaggttttcttatcctactccctggtgccagggacgtacctgggagtttgaatcaggcccatttgagcgtggcagccgtgttgggtgaaggtccggggctcggtgaggcactgggggggttttcgggaggaaaatgaaaatgcttctagaatgagtgaaccacatcatagctctcactgttctgatttttcaatagctactttttttagcagacaccagagccacactcaaatggctaagtaggttatgacctctctggattatttttgaatgcccaactgttgcattcaagttttctgactaataagaaattaagcattcatccttcgtatcactgcagaagcaacagtgggggcacagggagggaactcttgacactgagccactaaaatatggactaattttttggacaaatcttcaaacggactgtgctactgtatttgtctcaaagctaccaagtttgtgcaataagtggaagggatgtcatccttcttcaataaatgctgaatgacattcaagctgattttctagaccactgagaaaatctttatttacaataaatttcaataaaatttgcataaatatattcccaatgtacaattttcacctctgatttcttcatatcatttaaaaagttagtctgtcctgttctccttattcctttcagacaccagtgtggcgctgacattggcaggtggaggggagctgccagggagctggggggtggctgagggctcaggctgcttggggtggacctctctctgggccgccaggctttcagctccatccctgccctccagtttcctctccatggtcgccaccaggatcttgagccacgtgttctcggtaaggaggttttctgaggcatcggccagctcctgcagcttgcgggccagctcctgcagctcacgtgtcttctgctcatagagggcctgcagctgctcactgtgtgcgtggagcaggctgtgctgctcttccagggcccgctgctgctgccgcagccggtgctcatctctgcgggcactggagagctgggactccacctgcacttgtgctcgctggaggctgcttatttctgctctcagtttctggatctctctctccaagtgggagatgtgcccccgctgtaagactgcctcgctctgaagacactccttggtaggagagttagccacattctgggggctggaagcagggtctgagtgatgcaaaatgaacctcaacaggtttggaagggtgatggggacgtcttcggggtatttcacacttaggtcctttctgttgcagggaaaaaacaagacagtaggaagacgatcgaccataaattcccaaggaaggtcattctgagacacgtcaatccttgccacagtgaatgtgtccatgggcaggttccgagctagctggatgaagatgtgattgagggatggacagaagccgcaccacggagcgtaatagagcaggagaacgtcctgtttttgaaggactacttcccaaaaggtatcagttgtcacttcagtgattaaatgctgagacgggaactgggcagagccacttccaatgagatgccttttcaagggactatagagaacgctgaagttttgaataaaagactctagggtgagcttcatcagtgcttgctttggatccaagatgtaatgagattcttctttcacgtcaacaattgccgcaaattctttcacctgagtggagctcggagcacccagtctctctgcatataaccaaaacaaatttgaatccaaaaggtagatgttgagagtcttgttggttctgcagctcaggcctgtgaagtttgtgctagtcatgtccacttctggaaagagatacctgttctcctcaatgtgaggaacggagcttggggcatcaacctcacatttcttctcaagggaagaaaatgcaacagtaggggcttcaaagacaccttgttcagagtcgatgaagcctgacacacccctgcttatggtcctgcaacatgcagtgtagtagctgaaggggctataggaagttaaaaaattgctgcattctatgctgtctgatgccacatgataaaaggtctgctccttgaggtagaaagaatccagagctgctgccatttcaaaaaagctgcact

SEQ ID NO: 74328 - DNA, 636 bp, Homo Sapiens
gctcttcttgctgctagacattttattcttgatgtagctgaatgtacgactgacttttgttccactcttccattcagaatctttcttggaggggctatgtggcaggaaattatagttctcttctgttatactctcagtcagattagcacgggtatggtggaaggtactggtggaagggccgtgaatagtccaatccaggatggctgatggtcattaatgagatggatttggtcaagggagaggaaatggctgatgtacagtaattaaatcccggctgcttagatctgtgacatatctgctgatcaaacatcctatgttctctcgggtctgactccagatcctcttctgaaagtgacaccaaagagtcaacccgttcctcaccacggaatgggtgtctgagctcttcggcattggcagagcttacttctagagatgaggatggctggtttccgacaccaactcctccggtcaagccttctagactgaaacttctcctatgaatgggaggtccctgacaacatccccaagaactcgcattgaactccggtggttcatttctgcatcgctggctataagcggggtctcgggaaccaaagggagcacacagctcttcttaaaatggacggtgtaacgccc

SEQ ID NO: 74329 - DNA, 765 bp, Homo Sapiens
  misc_feature (186)..(186): n is a, c, g, or t
ccaagggcaacgggagaagaggagatggacagtatcattaagtgcctcaaactgctcggtctaaggaggctccatggctttcttttctccttccgaaggcacagctggggcctggggaaaatgcagccagcgatgcagaaatgaaccacgggagttcaatgcgagttctgggggatgttgtcaggnagacctcccattcataggagaagtatgagctggtgcccctctggtgtgcagtactctgctggcctgagtgctgactttaattacagaagtttcagtctagaaggcttgacaggaggagctggtgtcggaaacaagccatcctcatctctagaagtaagctctgcaaatgccgaagagctcagacacccattcagtggtgaggaacgggttgactctttggtgtcactttcagaagaggatctggagtcagaccagagagaacataggatgtttgatcagcagatatgtcacagatctaagcagcagggatttaattactgtacatcagccatttcctctccattgacaaaatccatctcattaatgacaatcagccatcctggattggacaattcacggcccttccacagtaccttccacaataccagtgctaatctgactgagagtataacagaagagaactataatttcctgccacatagcccctccaagaaagattctgaatggaagagtggaacaaaagtcagtcgtacattcagctacatcaagaataaaatgtctagcagcaagaagagcaaa

SEQ ID NO: 74330 - DNA, 1447 bp, Homo Sapiens
gtattagtcgtgagcacaaagttttgagaccttgggcgttgtttcttgatgtgggaggggaggtgttagtgcatgcaagggttgaactagatagaccctgccttagtagagggtgggactataatcttagaggccagaacttgatccagaagttgctgtccacagaagtgctttctatttcatcatttttgtttctagggctctttttctgtagccaggtcttcccaaggattttagtatttgcattggagttgaggtttactctaatgatggtggcccagctgtgcccagaggacagccagggcaggccccgggagggagtttagaaagacagtcctggtgaatgggcttcaagtggtcacaaagagggtggctgtgaggtgaccccagacactgcagaacgatgtgcaccctctgcgttttggatgtccttggaatgtgggagcctaaaaataaccctgtggatggaattggggcagcggctgctggagatctgtgtgccttgccttccttcagcaggaccgtctaggtgcgcagccacctatggatgcgtcccagccagccccgtcgctctcgtccatcctcagagacaaagaagagggcagggagtttgggcttggttttgaactttcctttcaatgtagcaaagcattcctagttaaccagagccttggaatctactgcctgctggccaggctttaaaatgaaaagtgttttaatgctgccataaaagggagccgggggggaggaaggaaaaataaaggcatctttccaagtactcatctaatttaattgtcaaaagattgataggccatgaattacttctccatctcactaagggttaaaggcgtgcaaccccccactggctgtgtcccctgccaccgaagtgagtgacctgccctacaaccaggtgggaccacctgtgctgcagtccggaggggcttctgcaggaagcactcaccccccacaccttccccggcctgagcttcccctacctttcgtcaccacctgagggcatgagcacaggccatggggcgtgcctggtgagtctgcctgtggttcaggcttagcctgtggtctcctgtgtgctgctgcccgcatgggatgcgcaggggaggcgtggggatccgcaggagggtggttgggatacaccggatacctctgctctcattgcttgtttgcaaatgctctatggacatttgtgtgctaaatcctattaaataaaaaagacgggttaaaacccagatgctgtatattcatttgtaattatgtataaagtgaagcagttttaaactgtaaagatttttttcagtgtgttttctcgaattttgccacaacatactggcttcgtattttatttatctttctttctagttaccagcttcagacccttgtaaagtctccctcagccctttcaaaaaataataaatttcctgtgaagttctgg

SEQ ID NO: 74331 - DNA, 1248 bp, Homo Sapiens
  misc_feature (718)..(766): n is a, c, g, or t
aaaatatgtttttattggtctttgcagtctcacgtcacaaaataacaaaatgaacacaaggcagatagagctggttggggagcacagacatgtggtggccttgaaagcagcttttccccttaagtctctagaacctgccatgagtaattaagacagtctttgaggatggggctgtcaggtgggggcgtttcagcaggtgccgacgagcgccttacaaacgactggctgaacacctttcctcccaggcctctctgccccagcatcactcaatctgctcagtcctcgactgctgcaggggaatgcgtgctcagagagagatgacacttctgaggtggcccccagctctgggtgcagaggagccggggtggggtattcaggccacacttccctgtggccacaggggaaaggaccaggggaaaaaatggggcagggatggccagctaacaaggggcctttggctttgtcctaattacccgggcttctggtttcctggaggacaaaaagcaggcggcaagtattctgggtaaaatcctcccaaagtcttcccccaccgtccccccagtgggggactatgggttactgtgatcaagagacacctgaacataaaacacaactacacttctaccaaaatcaaactcaaatccacacaacaaaacagaattgagcaatcttaccagggattgaaaactgagggtgtgagatgctgggctgagggccnnnnnnnnnnnnnnnnnnnnnnnnnnnnnnnnnnnnnnnnnnnnnnnnntgagggctccagggatggctgccagggccttccatggccacgatctctcacatctcctcgccagtgtggcaacccctccagcagctgggacttacctttgtactggggagtgaatttgcgcatctcagcagggagggtctcgtagaactgatgttcccttgggaccaggggcttgcacagggttgtctcattgaagcggagcacgcatgagtgccccccgacctggtggacaaagggctccagaaggacgcctttggcgcggggctccacatccatggccctgaaggctgggctcatcctccgggcgcagatggcggggagatgggggaggcagcggagtccagcggccagtacgtcttctgtctgttgtttgtccgtgtgtccctctcgtcttggctccttggcctgttctggccaggatgctctgccgcctcagccgggttcctcggcgtttccgtcctattgtttctctcgcaccaaaa

SEQ ID NO: 74332 - DNA, 1016 bp, Homo Sapiens
  misc_feature (834)..(877): n is a, c, g, or t
ataatgtattttacaggggacatcagcagccaccagcatggtggggtctttgttggggagtgggggagtcttttgtaaatcaagtaagaatccattaaagaaattaattttaaatgtgcattacctggttacataaaggactctagaacaacttaggttcttttgggactgttgaaacattgtctttaaggacagaatgtactgggtgcctttctctgtactctgaatatgcatgtgtattgcggtggggatgggggagttgggggccctcacttggtccttctctgttgtttttttccaggacaaagccaaaggccccttgttagctggccatccctgccccattttttcccctggtcctttcccctgtggccacagggaagtgtggcctgaataccccaccccggctcctctgcacccagagctgggggccacctcagaagtgtcatctctctctgagcacgcattcccctgcagcagtcgaggactgagcagattgagtgatgctggggcagagaggcctgggaggaaaggtgttcagccagtcgtttgtaaggcgctcgtcggcacctgctgaaacgcccccacctgacagccccatcctcaaagactgtcttaattactcatggcaggttctagagacttaaggggaaaagctgctttcaaggccaccacatgtctgtgctccccaaccagctctatctgccttgtgttcattttgttattttgtgacgtgagactgcaaagaccaataaaaacatattttataagaacaaaaggcctgggtgcctacccgtgtgggggcactgtgggaagcctttgctagggtgtctnnnnnnnnnnnnnnnnnnnnnnnnnnnnnnnnnnnnnnnnnnnnttacccagtcttcccttactcttggatgcttcttaaccctcaggcaaacctgtgttccccctgtattcaggctctgctttaaagcaagccatgaggctgttggagtttctgtttagggcattaaaaattcccgcaaact

SEQ ID NO: 74333 - DNA, 444 bp, Homo Sapiens
  misc_feature (45)..(45): n is a, c, g, or t
  misc_feature (237)..(237): n is a, c, g, or t
ggaggatgagcccagccttcagggcccatggatgtggagcccccngccaaaggcgtccttctggagccctttgtccaccaggtcggggggcactcatgcggtgctccgcttcaaatgagacaaccctgtgcaagcccctggtcccaagggaacatcagttctacgagaccctccctgctgagatgcgcaaattcactccccagtacaaaggtgtctcttgatcacagtaacccgatnagtcccccactggggggacggtgggggaagactttgggaggattttacccgagaatacttgccgcctgctttttgtcctccaggaaaccagaagcccgggtaattaggggacatcagcagccaccagcatggtggggtctttgttggggagtgggggagtcttttgtaaatcaagacaaagccaaaggccccttgttagctggccat

SEQ ID NO: 74334 - DNA, 940 bp, Homo Sapiens
  misc_feature (837)..(837): n is a, c, g, or t
  misc_feature (895)..(895): n is a, c, g, or t
  misc_feature (898)..(898): n is a, c, g, or t
ttttttggtgcgagagaaacaataggacggaaacgccgaggaacccggctgaggcggcagcagagcatcctggccagaacaagccaaggagccaagacgagagggacacacggacaaacaacagacagaagacgtactggccgctggactccgctgcctcccccatctccccgccatctgcgcccggaggatgagcccagccttcagggccatggatgtggagccccgcgccaaaggcgtccttctggagccctttgtccaccaggtcggggggcactcatgcgtgctccgcttcaatgagacaaccctgtgcaagcccctggtcccaagggaacatcagttctacgagaccctccctgctgagatgcgcaaattcactccccagtacaaaggtgtggtatctgtgcgctttgaagaagatgaagacaggaacttgtgtctaatagcatatccattgaaaggggaccatggaattgtggacattgtagataattcagactgtgaaccaaaaagtaagctcctaaggtggacaacaaacaaaaaacatcatgtcttagaaacagaaaagacccctaaggactgggtgcgtcagcaccgtaaagaggagaaaatgaagagccataagttagaagaagaatttgagtggctaaagaaatctgaagtcttgtactacactgtagagaagaaggggaatataagttcccagcttaaacactataaccccttggagcatgaaatgtcaccagcaacagttacagagaatgaaggagaatgcaaagcatcgggaacagtacaaatttatcttactggaaaaacctgacttcccgctatgaggtngccttgtgtccttggactcaagatggggcacacgacaacatggtggatgatggcttcnaangagaaggcaggccaaccagaatccgaaaatgttcagcagagc

SEQ ID NO: 74335 - DNA, 1339 bp, Homo Sapiens
  misc_feature (1083)..(1126): n is a, c, g, or t
tacggcgaggtgcgaggctgggtggtgaattcggcacgagggagaaacaataggacggaaacgccgaggaacccggctgaggcggcagagcatcctggccagaacaagccaaggagccaagacgagagggacacacggacaaacaacagacagaagacgtactggccgctggactccgctgcctcccccatctccccgccatctgcgcccggaggatgagcccagccttcagggccatggatgtggagccccgcgccaaaggcgtccttctggagccctttgtccaccaggtcggggggcactcatgcgtgctccgcttcaatgagacaaccctgtgcaagcccctggtcccaagggaacatcagttctacgagaccctccctgctgagatgcgcaaattcactccccagtacaaaggtgtctcttgatcacagtaacccatagtcccccactggggggacggtgggggaagactttgggaggattttacccagaatacttgccgcctgctttttgtcctccaggaaaccagaagcccgggtaattaggacaaagccaaaggccccttgttagctggccatccctgccccattttttcccctggtcctttcccctgtggccacagggaagtgtggcctgaataccccaccccggctcctctgcacccagagctgggggccacctcagaagtgtcatctctctctgagcacgcattcccctgcagcagtcgaggactgagcagattgagtgatgctgggggcaaagaggcctgggaggaaaggtgttcaacccagtcgtttgaaaggcgctcgtcggcacctgctgaaacgcccccacctgacagacccatcctcaaagactgtcttaattactcatggcaggttctagagacttaaggggaaaagctgctttcaaggccaccacatgtctgtgctccccaaccagctctatctgccttgtgttcattttgttattttgtgacgtgagactgcaaagaccaataaaaacatattttataagaacaaaaggcctgggtgcctacccgtgtgggggcactgtgggaagcctttgctagggtgtctnnnnnnnnnnnnnnnnnnnnnnnnnnnnnnnnnnnnnnnnnnnnttacccagtcttcccttactcttggatgcttcttaaccctcaggcaaacctgtgttccccctgtattcaggctctgctttaaagcaagccatgaggctgttggagtttctgtttagggcattaaaaattcccgcaaactataaagagcaatgttttcagtcttttaggattagaagaattacataaaaattaataaacattttcaatgatgga

SEQ ID NO: 74336 - DNA, 1195 bp, Homo Sapiens
  misc_feature (933)..(976): n is a, c, g, or t
ggggcagccattttggtgcgagagaaacaataggacggaaacgccgaggaacccggctgaggcggcagcagagcatcctggccagaacaagccaaggagccaagacgagagggacacacggacaaacaacagacagaagacgtactggccgctggactccgctgcctcccccatctccccgccatctgcgcccggaggatgagcccagccttcagggccatggatgtggagccccgcgccaaaggcgtccttctggagccctttgtccaccaggtcggggggcactcatgcgtgctccgcttcaatgagacaaccctgtgcaagcccctggtcccaagggaacatcagttctacgagaccctccctgctgagatgcgcaaattcactccccagtacaaaggacaaagccaaaggccccttgttagctggccatccctgccccattttttcccctggtcctttcccctgtggccacagggaagtgtggcctgaataccccaccccggctcctctgcacccagagctgggggccacctcagaagtgtcatctctctctgagcacgcattcccctgcagcagtcgaggactgagcagattgagtgatgctggggcagagaggcctgggaggaaaggtgttcagccagtcgtttgtaaggcgctcgtcggcacctgctgaaacgcccccacctgacagccccatcctcaaagactgtcttaattactcatggcaggttctagagacttaaggggaaaagctgctttcaaggccaccacatgtctgtgctccccaaccagctctatctgccttgtgttcattttgttattttgtgacgtgagactgcaaagaccaataaaaacatattttataagaacaaaaggcctgggtgcctacccgtgtgggggcactgtgggaagcctttgctagggtgtctnnnnnnnnnnnnnnnnnnnnnnnnnnnnnnnnnnnnnnnnnnnnttacccagtcttcccttactcttggatgcttcttaaccctcaggcaaacctgtgttccccctgtattcaggctctgctttaaagcaagccatgaggctgttggagtttctgtttagggcattaaaaattcccgcaaactataaagagcaatgttttcagtcttttaggattagaagaattacataaaaattaataaacattttcaatgatggaaaaaaa

SEQ ID NO: 74337 - DNA, 944 bp, Homo Sapiens
  misc_feature (521)..(549): n is a, c, g, or t
gctggaccggtccggaattccctggatgagaaacataggacggaaacgccgaggaacccggctgaggcggcagcagagcatcctggccagaacaagccaaggagccaagacgagagggacacacggacaaacaacagacagaagacgtactggccgctggactccgctgcctcccccatctccccgccatctgcgcccggaggatgagcccagccttcagggccatggatgtggagccccgcgccaaaggcgtccttctggagccctttgtccaccaggtcggggggcactcatgcgtgctccgcttcaatgagacaaccctgtgcaagcccctggtcccaagggaacatcagttctacgagaccctccctgctgagatgcgcaaattcactccccagtacaaaggtaagtcccagctgctggaggggttgccacactggcgaggagatgtgagagatcgtggccatggaaggccctggcagccatccctggagccctcactccctcccactctgtgcttnnnnnnnnnnnnnnnnnnnnnnnnnnnnnggccctcagcccagcatctcacaccctcagttttcaatccctggtaagattgctcaattctgtttagttgtgtggatttgagtttgatttcggtagaagtgtagttgtgtttatgttcaggtgtctcttgatcacagtaacccatagtcccccactggggggacggtgggggaagactttgggaggattttacccagaaatacttgccgcctgctttttgtcctccaggaaaccagaagcccgggctaattaggtaaggacggggagcagcgttgagtcagatgggcatgcccggagtggggaggccctgtgcttgattagcccaaggcccttggctggttccagaattgtcccacaattgctatatgaacgcaacccttcgattcccatatgct

SEQ ID NO: 74338 - DNA, 1492 bp, Homo Sapiens
aagtttgcagatgagtttggggcctctggcaacatagagactaaggaactgggtaagaaaaaaacaaatgttacaatcatgttacttacaacgcttcttcctgctaaattaaaagttctttctgctcctcacccccttccaggtgtggtatctgtgcgctttgaagaagatgaagacaggaacttgtgtctaatagcatatccattgaaaggggaccatggaattgtggacattgtagataattcagactgtgaaccaaaaagtaagctcctaaggtggacaacaaacaaaaaacatcatgtcttagaaacagaaaagacccctaaggactgggtgcgtcagcaccgtaaagaggagaaaatgaagagccataagttagaagaagaatttgagtggctaaagaaatctgaagtcttgtactacactgtagagaagaaggggaatataagttcccagcttaaacactataacccttggagcatgaaatgtcaccagcaacagttacagagaatgaaggagaatgcaaagcatcggaaccagtacaaatttatcttactggaaaacctgacttcccgctacgaggtgccttgtgtccttgacctcaagatgggcacacgacaacatggtgatgatgcttcagaggagaaggcagccaaccagatccgaaaatgtcagcagagcacatctgcagtcattggtgtgcgtgtgtgtggcatgcaggtgtaccaagcaggcagtgggcagctcatgttcatgaacaagtaccatggacggaagctatcggtgcagggcttcaaggaggcacttttccagttcttccacaatgggcggtacctgcgccgtgaactcctgggccctgtgctcaagaagctgactgagctcaaggcagtgttggagcgacaggagtcctaccgcttctactcaagctccctgctggtcatttatgatggcaaggagcggcccgaagtggtcctggactcagatgctgaggatttggaggacctgtcagaggaatcagctgatgagtctgctggtgcctatgcctacaaacccatcggcgccagctctgtagatgtgcgcatgatcgactttgcacacaccacctgcaggctgtatggcgaggacaccgtggtgcatgagggccaggatgctggctatatcttcgggctccagagcctgatagacattgtcacagagataagtgaggagagtggggagtgagcttgctagctgctccagtacttgagagcgactctgtgtcccaggcacagctgtgctgcgtcagggaggaagccagtatggccaggtggtggctcctgcagcctggagctgatgtgcagtggcctctgtgagccccagcctgagccagtcccagctgtgcttggagtctttatttattttaactatttcttcaacattccacatttgatgatgatacctctttcttccctgagtgtatatgttctaatacaaatctttttgtttattgtaa

SEQ ID NO: 74339 - DNA, 916 bp, Homo Sapiens
ttggtgcgagagaaacaataggacggaaacgccgaggaacccggctgaggcggcagcagagcatcctggccagaacaagccaaggagccaagacgagagggacacacggacaaacaacagacagaagacgtactggccgctggactccgctgcctcccccatctccccgccatctgcgcccggaggatgagcccagccttcagggccatggatgtggagccccgcgccaaaggcgtccttctggagccctttgtccaccaggtcggggggcactcatgcgtgctccgcttcaatgagacaaccctgtgcaagcccctggtcccaagggaacatcagttctacgagaccctccctgctgagatgcgcaaattcactccccagtacaaaggggacatcagcagccaccagcatggtggggtctttgttggggagtgggggagtcttttgtaaatcaagacaaagccaaaggccccttgttagctggccatccctgccccattttttcccctggtcctttcccctgtggccacagggaagtgtggcctgaataccccaccccggctcctctgcacccagagctgggggccacctcagaagtgtcatctctctctgagcacgcattcccctgcagcagtcgaggactgaccaaattgagtgatgctggggcagagaggcctgggaggaaaggtgttcagccagtcgtttgtaaggcgctcgtcggcacctgctgaaacgcccccacctgacagcccccatcctcaagactgtcttaattactcatggcagggtctagagacttaaggggaaaagctgcttttcaagccaccacatgtctgtgctcccccaccagctctatctgccctggggttcattttggtaaatttggggaccgggaaactggcaaaggcccaattaa

SEQ ID NO: 74340 - DNA, 720 bp, Homo Sapiens
accaaacgcagggtgactctgctcatattctttgacccagaaagactggagaaggtatgtgctttaagtgctgctctacctgaaaagaaatcctttaaattacctatggaagtgatgtcctcagataatcttaatgactattttggcatttataaatagaaatgattatggactttgatctgccatacggaggttcggaacctggagaacggctgtgataagtaggttttgattgagtgaaagcatgagcttgttcagagtgaggggcatagtgaaaaaggaacagccatgcctcaaaatcaaatcatttgcattcccacagcatcctgaataccgactacctcttcacttgctaaagcagctaaactgtgaagctctaagtggtttgggtttgttgtttaaccttagcgagatcctttaactgcagcaatattcaagccagatatttggaagcaaatgatatttcctcttgcagtgtccacaaatctgaatattaggggcatgaaattaggcttaccatctgatttgtaattacaattttggaattctctgttttagttgctgaggcctgagttttctggctcttaaagcatagatcatttcacctgatgtttttgaagcatcctaagtacagtagagtagaaaactgatttctttgttaattgtacactgaataatgccttttaaaaatcaaaataaaattaacaaataatggtgaaa

SEQ ID NO: 74341 - DNA, 807 bp, Homo Sapiens
tattacggctaggtacgaggctgggtgggaatcggacgagggggccggggggtcttcactccagggtctcgctccctgcccttggggcccggggccatgcagtacctggagtgtcctgcagggcggaaagcgaagccgggccctgaagtccggggcagtcacccggggctcctgggccgctctgccgggctggggctgagcagcgatcctgctttgtcccagaagtccagagggatcagccccagaacacaccctcctccccgggacgccgcagctttctggaggctgaggaaggcatgaagagtgggctccacctgctggccgactgagaaaagaatttccagaactcggtcctattttacagattgagaaactatggttcaagaagagaggacggggcttgagggaatctcctgattctccttatatgacctcaaactgaccatactaaacagtgtagaaggtctttttaaggctctaaatgtcagggtctcccatcccctgatgcctgacttgtacagtcagtgtggagtagacggtttcctccacccagggttgactcagggggatgatctgggtcccattctggtcttaagaccccaaacaagggttttttcagctccaggatctggagcctctatctggttagtgtcgtaacctctgtgtgcctcccgttaccccatctgtccagtgagctcagcccccatccacctaacagggtggccacagggattactgagggttaagaccttagaactgggtctagcacccgataagagctcaataaatgttgttcctttccacatc

SEQ ID NO: 74342 - DNA, 1085 bp, Homo Sapiens
ttgctggaatatgataagactttttaaagttcagtgttgaaactccttatggaaaagaaaaggagatattacttttccactttctatttcctgtctgtggctttgaggtaaaagaacactaaggttcctgtgaagttccctctgccattccaccagcacaacaatcccagggaattcctgagccgtctacctcctaaatttgtaatcataactctgggcatgtctatacagctctctagttcagtttcaaaatccacagcatttggaaacaaaatgacacagttgcattctttaaatgccagtcatgaaatcatcacttaaaaaaacaaagagaaactagatagaatatatataaatatatgtgtcaaataaaattatttcatttttaaaggtattttatttggtatgttgaaaacatgtcaatgacggcttctaaaagccctggggaggagcctcaaataccatgctgcagtaaattttgtcccaacattgtcatgtgcaatcagtgaatttcagttacaccaaaataataatctaacctgtctgaacatgcaacttccctttttattccctgcaaaactaaattcccttctttaaaaaatgattaaatttgaggatcaagttaaaatccactatattccaagttaaactctgagggttctgcactatagcatgattttaaattcatattggcattcacttttctgaattttcctatgcgtaaacaaaataaatttcctggaccatatttagtgaaaaattaaaagagatttacattgcactgtgaagttccaataaattctcaattgatcggggtttatctcttagctcaatgtcatacaacctctacatgacgcaagcatatggacaaaaaggattttaaatacaaaacccttagctctgtgtcataaataaatttgggtaaaaacgcaggccttccactgagtcatcacggcaaagatggcccatcttctctgcaagcagcaacctttctttggctaggaggacagacattcccacaagcttagcaaactcttctgatgttagggatcccttttctgaaacctaatagaaacacacagcag

SEQ ID NO: 74343 - DNA, 1147 bp, Homo Sapiens
  misc_feature (262)..(262): n is a, c, g, or t
  misc_feature (860)..(875): n is a, c, g, or t
attgatgataatagatattggggcattgtttctgtctcatgagaattcttttattcattaccataagccttcactgatactataagcattattttaaatgacgctgatcttaagtctgaaataaatggaaagcagaaaaggtgagccagttgatttgaatgcattggatattagtgttagaaacaatgtatagtttagattgaaactgaactgacttatttagcacttaaacaaaaatttgacaatgtttttaggttttttnaagacagcttagtgtggtgatacttagaattctatggtttgatgtttcttttagaaatgagaagtatagttttattttttaatataaaaaatggttttaatactaaaactagtaatttgatactagttgtttataaacattgtaaaatatatcttttaaacaaattatcttggtagttaattcataagggtgggtttgggtaggaatagcagagtactttcagagggaaaggggagtcattcagaagtgatagcattttatttgtttgaatactctgccagtaaaatcagctgtacttagaaagttatctgttgtgtagaataatgatgtagagtttactaatcagtgaggatgtcttgtttttattttctgcaaactctgcctcactttaaaatgcattataacaatacctaattaaagataattttggctctgaaagttaccttattttttgttgagttagtgacttcatttttcttgccacaatataagcttttgagggatttttttaaattggtgcttttaataagcaaataaatcccagggttttattttcttcagtgatacccctatagaaactcttaaatgtatttgcgcnnnnnnnnnnnnnnnntttcttatgcatgctcgatgcattttcgtcctgagaaaaatgttctctacagaaactacccgtgtgtaaaaagaagattggcttaaaatggctactgtgatgggaacagtgtcttagggagatgcagcttggacttgaggtaaattgaatactttacaactgtggtttagagtttgctttaatgacattgtatgtaaaaggtcacatgattgctgtaattttgtattcattatggtttcctcaataaatgtacattgatgactattaaaaaa

SEQ ID NO: 74344 - DNA, 947 bp, Homo Sapiens
  misc_feature (208)..(216): n is a, c, g, or t
gcataactaattttaaacagttttcagatagtgaatatgagtagtctaataagaacagtttttttccatgtgaagcaactctttcaatgtatataatgttagtgtgtttctttctaaatttaggatagaaaagtgaatagtgtgcaaaaagtatagctacattgcatctgccattgaaacataaatggggtatggaaacgttcaagcnnnnnnnnnctctttatgcagtatagataagcttggtttggtaaatgcacaagtccaatcattgaatcaacttaatttttttatgtacttgaagtcattttattactctttaacactcatgctgaagttctgatattttgttgaaatccattgttttactctttgcatatttgttggctctttgcatattaatatattagactacatgcaaatacagtctgtcttgccattgtctgttgaagtgcaggtttgatccagccagtatagaactagctctgtaggggtgaggaggactgtgctgtgtatcatccttgatggtgttccttcaaggagcattgcacttgccttcccagaccttccaccttaggttctgctgcaaaaagcaccagtgctgaagatgctgcaagcaccaaatcatagctcataaaatcaggtcctgagatagttacccataaagaggaatcctttgagtgtatgccattggtgagccgatgagcatggaccatagaagggctcaatgtagaagaaactacccgtgtgtaaaaagaagattggcttaaaatggctactgtgatgggaacagtgtcttagggagatgcagcttggacttgaggtaaattgaatactttacaactgtggtttagagtttgctttaatgacattgtatgtaaaaggtcacatgattgctgtaattttgtattcattatggtttcctcaataaatgtacattgatgactatt

SEQ ID NO: 74345 - DNA, 478 bp, Homo Sapiens
gaggctgttgattttgattcatttaaggtttaaaatctttattaattgcaaacagtgcaattatttatacttcacagtgccttaccagaccttccaccttaggttctgctgcaaaaagcaccagtgctgaagatgctgcaagcaccaaatcatagctcataaaatcaggtcctgagatagttacccataaagaggaatcctttgagtgtatgccattggtgagccgatgagcatggaccatagaagggctcaatgtagaagaaactacccgtgtgtaaaaagaagattggcttaaaatggctactgtgatgggaacagtgtcttagggagatgcagcttggacttgaggtaaattgaatactttacaactgtggtttagagtttgctttaatgacattgtatgtaaaaggtcacatgattgctgtaattttgtattcattatggtttcctcaataaatgtacattgatgactattaaa

SEQ ID NO: 74346 - DNA, 491 bp, Homo Sapiens
ataaaaatgcaatctacaactaaccaaaactcaacaggctctcaagtttcaatgagcccctttatattatcaattgtacatacctatcattgactattaaaacataacatacacataaatgtggtgtagtaactatgtaacttaagaaatttaacagttcatggaacatttaagatcaagtgaatagcactttaaaatgaaaagtgatcaaaagcaggtacattacaccctataccatattatgtatgggaatacatttcatatttctcaattatgatttgccaattttaccttctacattgagcccttctatggtccatgctcatcggctcaccaatggcatacactcaaaggattcctctttatgggtaactatctcaggacctgattttatgagctatgatttggtgcttgcagcatcttcagcactgtgtgtgaaaatgaaggcagtatttttgaatatttttctttgttgcagagataagcaggag

SEQ ID NO: 74347 - DNA, 1012 bp, Homo Sapiens
tgtccgtgcttctctacgactctttgctactaatctggtagccaaaggtgtttgagctccgttctgcatccggggggcaccgtggatcagaggtggagagattagtccggcagttcagctcccagggccatcgctggtacccgaagctgccggcaggatgctccagtgttctcgtgccggccgctctggatgaagagcgtgttcagtaagaggaaaccatccagggtcacccggtcctcccgcacgccgcccgccacattcctgcaccaccaccgtcttcacgtcctccagggcctgcggggccagggggtgcccaaagcaggatttctggaaagcgttgagctcttcgtcactgagcgcctggtccaggtcctgatctgagagcctgaagatgcgcgtcagcgcctgggcgcacgcgggcctcaactgcttggcctcagggtcatagaggggggctgtgggatgcaggacggccttctgggcgtagtagaacagctctgagatgttcctcaggttcttggccgaacactccacgcaggtctcaatctcgggaaactggctcatgatggggagcacggcctccatggagctccccgaccgcaggtctgacttgttgcccactgggcccctgcgtggtccccccgttcaccagtgggatccacttagttcgaatcttctcaatggtggtctcctcagagacgtcatacaccacacacaccacgtttgccttgtggatctcctcccgcagctcctcgtccgtctgctcggcttctgagtagtccacgatgtgggtgggcaccttctccggggtgacgtccgcggggatcgtgatctcctccgcgcggggagggacctcctcggggaactcctcgcccaccagggacaggatcagcgacgtcttccccacctgggcctcgcccagtaacaggatgcgcacgtcccgcctcatagctgccgcccggagccgctccccgacccggaacccggccccgacctggtcctcaagcctttc

SEQ ID NO: 74348 - DNA, 934 bp, Homo Sapiens
  misc_feature (855)..(855): n is a, c, g, or t
  misc_feature (881)..(881): n is a, c, g, or t
gagcgaggcctgggtggcgaattcggcacgaggggactactcaggtagcggccgtagcctcccgggggcccggcccgcagcggtccggcgggcctgctgggtccgcagtggagtctctttgtccccctagaagccgagcagacggacgaggagctgcgggaggagatccacaaggcaaacgtggtgtgtgtggtgtatgacgtctctgaggaggccaccattgagaagattcgaactaagtggatcccactggtgaatggggggaccacgcaggggcccagggtgcccatcatcctagtgggcaacaagtcagacctgcggtcggggagctccatggaggccgtgctccccatcatgagccagtttcccgagattgagacctgcgtggagtgttcggccaagaacctgaggaacatctcagagctgttctactacgcccagaaggccgtcctgcatcccacagcccccctctatgaccctgaggccaagcagttgaggcccgcgtgcgcccaggcgctgacgcgcatcttcaggctctcagatcaggacctggaccaggcgctcagtgacgaagagctcaacgctttccagcacaaatcctgctttgggcaccccctggccccgcaggccctggaggacgtgaagacggtggtgtgcaggaacgtggcgggcggcgtgcgggaggaccagctgaccctgaatggtttcctcttcctgaacacgctcttcatccagcgcggccggcacgagaccacctggaccatcctgcggcgcttcggctacagcgatgccctggagctgactgcggactatctctcccctctgatccacgtggcccccccggctgcagcacgngagctcaaccaccttgggctaccagntttgtgccagaagagtggtttgaggaagcacggaccaagggaacggcggacgg

SEQ ID NO: 74349 - DNA, 1345 bp, Homo Sapiens
ctaggttgaatcaaagcaagttgtcttcagagactgggatccgagatagaaaacacacagtgaagtttaatcaggaacccaacctccggtcctctgctacaaccacggaaacggctccaaacttgaggggggaccccccaacgcctgcttttggcccaaagctctgccttccagccctcctcatacccactggccacctaggaccaggaaaggggggtagagccctgagaattctgggtctggggtcaccagctcccacacctgtgctccccggccccacacacatgatgcccaggggtgggcaatccctgacagcggtggccggcacttgggagctcctgctcagccacctgccacggcccaccctgggggtccggcaggagccagggcagtgcatggcagcataaggccccgctgcagatcgactgccttcagaaacaaaaagtcccggcgcaaaggcgttcccggagtggcagcctggcctgcaccccagctgtgctgcccctgcagagccccagcagcgaggcacacccaggtcaggggagggggcttgggtaccaggggcctcactggctcttcaccaggaccctgtagagtgagaagctgaggactgcggccacggcggccccgacaacccccagcagcccccggagccagaaggaagagggatgcagctctgcgtggaccaaatgtgggaaggcggccatggtggcgagctgggtgaagatggtggtgctgggctcggctgggccagcacaggagaacggcacgggagcgggtagccggtgcttgcggcaaaactcggccggtgatgggccagacaccgcgacaccttcgggcaggtcggccttggaggagacaaagaggcagggggtctgcccgtccatgtaatggtgcttgtagacgctggcacaatgtgcaaaggactttgggtcactgccatcaaacatcaagcaggcaacgtcacaggtggcgtccagcgatgtggccagcagaccatctgtgcccacctcacagaggatcaagtacttctcctgcccattgacctgcaccgtgtcgatggcgtagccgggaggctgctccctcgtgtcctggtgccccaggccgcggccgagaaaggcctgcaggaaggcagacttgcccactccacgggcccctaccaccttgcacaggaggacgctccgctgcgtctgtcccttctcctggtccagcctcttctcacgagtgactgtgatggcatgggcctggtcctgctcacagagggtggggtagcccaggtagcctaggtgtccaaggcagctccggacgtccaggtaggtcaccagggtccactggcagaggtatc

SEQ ID NO: 74350 - DNA, 646 bp, Homo Sapiens
aggtttgagggggaatgcccggagacgcatggtgcaacctatgatcgatcaatccaaccgcatagggcagggtgcagccttcagcccagagggccagcccatcgggggctataccgagacagagccacacgtggccttccggcctccagaatcagtggggatgagtttgaacttggaaggagaatggcattatctatagaggctgatgcgggagaaggacccactccggctgtgacccccagcctcacacctggctctggttcccgcctggtcctccggcttcaggaccccacctccaaaggcctctccgctcaacgcctacctccctagggccctgctgggacatgggggcctgagtgcccacccaaggggctctcaaggacaccggcaaggcctccaggccctgagccccgcttctgccttcacctctgcctgggacccgagctgggctcctgggccttggtccccagaagatggcagctagggcctcgccgccaggacagagaagggacagggtggctgggcagtcagggaaggagggtcgcccggatccgacattttggagagattccttcaccctcctgtcccccccacctcccttctctaatttcttcttttttttaatgataaagtcttaaaaacacgg

SEQ ID NO: 74351 - DNA, 1546 bp, Homo Sapiens
ggtcctaggtagcgaggcctgggtggcgatctcggcacgagggggagctgctgcggcggttgcggcggggacttcaggggtcgcgggggagggcgagcccgggcccggggagaatgcggccgctgaggggaccgccccatccccgggccgcgtctctccgccgaccccggcgcgcggcgagccggaagtcacggtggagatcggagaaacgtacctgtgccggcgaccggatagcacctggcattctgctgaagtgatccagtctcgagtgaacgaccaggagggccgagaggaattctatgtacactacgtgggctttaaccggcggctggacgagtgggtagacaagaaccggctggcgctgaccaagacagtgaaggatgctgtacagaagaactcagagaagtacctgagcgagctcgcagagcagcctgagcgcaagatcactcgcaaccaaaagcgcaagcatgatgagatcaaccatgtgcagaagacttatgcagagatggaccccaccacagcagccttggagaaggagcatgaggcgatcaccaaggtgaagtatgtggacaagatccacatcgggaactacgaaattgatgcctggtatttctcaccattccccgaagactatgggaaacagcccaagctctggctctgcgagtactgcctcaagtacatgaaatatgagaagagctaccgcttccacttgggtcagtgccagtggcggcagccccccgggaaagagatctaccgcaagagcaacatctccgtgtacgaagttgatggcaaagaccataagatttactgtcagaacctgtgtctgctggccaagcttttcctggaccataagacactgtactttgacgtggagccgttcgtcttttacatcctgactgaggtggaccggcagggggcccacattgttggctacttctccaaggagaaggagtccccggatggaaacaatgtggcctgcatcctgaccttgcccccctaccaacgccgcggctacgggaagttcctcatcgctttcagttatgagctctccaagctggagagcacagtcggctccccggagaagccgctgtctgacctgggcaagctcagctaccgcagctactggtcctgggtgctgctggagatcctgcgggacttccggggcacactgtccatcaaggacctcagccagatgaccagtatcacccaaaatgacatcatcagtaccctgcaatccctcaatatggtcaagtactggaagggccagcacgtgatctgtgtcacacccaagctggtggaggagcacctcaaaagtgcccagtataagaaaccacccatcacagtggactccgtctgcctcaagtgggcaccccccaagcacaagcaagtcaagctctccaagaagtgagcagcctggcccctgctgtcggacctgagcctcctggctcccagcctgtaaatatgtatagacctgttttgtcatttttttaataaagtcagttctggtggccctggactttggaggggaaggggaggccaagaaaaa

SEQ ID NO: 74352 - DNA, 741 bp, Homo Sapiens
  misc_feature (124)..(124): n is a, c, g, or t
attcggcacgagggtaatgaatgtggaaaagctttcaggcagagctcagagctgattactcatcagagaatacatagtggagagaaaccctatgaatgtagtgaatgtggaaaagctttcagtntgagctcaaaccttatcagacatcagaggattcatagtggggaggaaccttatcagtgtaatgaatgtggcaaaactttcaaaagaagctcagcccttgttcagcatcagagaattcattctggggatgaagcttatatatgtaatgaatgtgggaaggctttcaggcacagatcggtccttatgcgccatcaaagagtccacactataaagtaatttgtgaatactgtgaatagtgtaaatacttcagtcagatttttaagtttgttagtcaaaagagtttactttggagcaaaactccataaaggttataaaatactaggtcttgagtctagcttgctttgtgcagcatttcccagtgctaatgtaaagtgtcccttgaaagcttttcctgtgactaatcagaacagaatacagaagaatcattacttccagctcttctcttattaggaatactcaggaaatacgaaaagtgggaatgtaacattgaaacctcattttgtatgaaagtgtcatgaatatagcaacccaggctctgtcactgcatctgattgttagtgtgccaggttatggggctggtgtggactgtgtgaggcacttcgactcaggaactaaaaa

SEQ ID NO: 74353 - DNA, 1042 bp, Homo Sapiens
  misc_feature (227)..(227): n is a, c, g, or t
  misc_feature (253)..(253): n is a, c, g, or t
  misc_feature (267)..(267): n is a, c, g, or t
  misc_feature (279)..(281): n is a, c, g, or t
tatgtcgatacgactctttggatgcctggagcaaatcgcagggcgaactggtttccgatgatttgcggcacagcggcgtcaccacatatagtcagtgtctcccggtgagactgtctgccggacaggagacccggagccctgggtgcagtgagcaccgttgacctgatgctagagcgtctcgcggtgcgcgtgtatgcgtccggccttcggcgctgtgggaccgccgnttgtcaccaagtgcgccgcctccgtncacaaggagcccgncagtgcagcgcnnngcggtgttactgggtggactctcagcagaagcggtatgttccagtaaaaggagaccatgtgattggcatagtgacagctaaatctggagatatattcaaagttgatgttggagggagtgagccagcttctttgtcttacttgtcatttgaaggtgcaactaaaagaaacagaccaaatgtgcaggttggagatctcatctatggccaatttgtggttgctaataaagacatggaaccagagatggtctgtattgacagctgtggacgagccaatggaatgggtgtcattggacaggatggtctgctttttaaagtgactctgggcttaattagaaagctattagctccagattgtgaaatcatacaggaagtgggaaaactctatccactggagatagtatttggaatgaatggaagaatatgggttaaggcaaaaaccatccagcagactttaattttggcaaacattttagaagcttgtgaacacatgacgtcagatcaaagaaaacagatcttctccagattggcagaaagttgatataggtggacttttttacaggtcagttgaggcaaaaaactatgggttttttcaggtgaacctcccccatttaaatactcagaagataaggtgtgaatgtatgtattattagagtccgaaagtatttttataagttactggttttcacccacgcttttgtgggagagaaaatcattgcaaaatcattttttttgttcggtacaataaagtttactaaaaaacc

SEQ ID NO: 74354 - DNA, 829 bp, Homo Sapiens
gaaaacagcaggagagggtggctcaggacttagggacagggtatagcttagatggtggaaagcaaaggagagcaggaagttgtaaatcactggctaatgagaaaaggagacagctaactctaggatgaagctgtgactaggctggagttgcttccttgaagatgggactccttgggtatcaagacctatgccacatcacactggggctagggaagtaggtgatgccagccctcaagtctgtcttcagccagggacttgagaagttatattgggcagtggctccaatctgtggaccagtatttcagctttccctgaagatcaggcagggtgccattcattgtctttctctcctagccccctcaggaaagaaggactatatttgtactgtaccctaggggttctggaagggaaaacatggaatcaggattctatagactgataggccctatccacaagggccatgactgggaaaaggtatgggagcagaaggagaattgggattttagggtgcagctacgctcaccctaaacttttggtggcctggggcatgtcttgaggcccagactgttaaccaggctctgctggcctgtttactcgtcaccacctctgcacctgctgtcttgagactccatccagccccaggcacgccacctgctcctgagcctccactatctccctgtgacgggtgaacttcgtgtactgtgtctcgggtccatatatgaattgtgagcagggttcatctattttaaacacagatgtttacaaaataaagattatttcaaacccgtgtgctgcctggatgagtcctgtggctgtaacggtaccgagc

SEQ ID NO: 74355 - DNA, 871 bp, Homo Sapiens
  misc_feature (639)..(764): n is a, c, g, or t
  misc_feature (772)..(786): n is a, c, g, or t
atcttggtgttatgtaaaaaattgaggtgatgttcattgcaagctcatctattacgtactatatggtacacagtctatgagtcattagtattcattttaatatgtaaaaaatcttgatgctgtattgatttgtttgcatttaagatgacagtgagaaaatgataagcataaagagaagtatcaggttatttgctttttccaaacttttcagatgaactattgtttagtacagagactgagcaaatactacaaaattcaacttaaccttcatttcattggtttaaatgcgttattaaccatcttaagtgcaaactaatcattgtaaattatattttagcatggtctgcctcaaatagtaatgtatttttctgcattcacttggatatatttagaatcacttttttcctcctgtatcaaggaagaggtatgtgctgatttgtttggatatttgacaaggcactctgatgtgacttccctgactactaccttcatatttcatttcaaattcaaacttctgaggttgcagcatatatgaattgcattttcaaaagaagatttgtaagaattaaactatatttatgagtaaacttttgaggtttctgctgtattgtttcaaatgtaataaactttacttctgtnnnnnnnnnnnnnnnnnnnnnnnnnnnnnnnnnnnnnnnnnnnnnnnnnnnnnnnnnnnnnnnnnnnnnnnnnnnnnnnnnnnnnnnnnnnnnnnnnnnnnnnnnnnnnnnnnnnnnnnnnnnnnnctggccgnnnnnnnnnnnnnnnaaaaattttttaaaacctttttttgggcgcccggccccaaaaggaaaggaaacagggcaaaattttttccaaaaaaaacccgggc

SEQ ID NO: 74356 - DNA, 1499 bp, Homo Sapiens
  misc_feature (953)..(1079): n is a, c, g, or t
  misc_feature (1104)..(1104): n is a, c, g, or t
  misc_feature (1108)..(1110): n is a, c, g, or t
  misc_feature (1242)..(1250): n is a, c, g, or t
  misc_feature (1262)..(1270): n is a, c, g, or t
  misc_feature (1409)..(1418): n is a, c, g, or t
agcatgtgactatagaacagtgtggtacaaaaagcaggctggtacggtccggaattcccgggatatcgtcgacccacgcgtcggacgcagcagccaccgccgcgtccctctctccacgaggctgccggcttaggacccccagctccgacatgtcgccctctggtcgcctgtgtcttctcaccatcgttggcctgattctccccaccagaggacagacgttgaaagataccacgtccagttcttcagcagactcaactatcatggacattcaggtcccgacacgagccccagatgcagtctacacagaactccagcccacctctccaaccccaacctggcctgctgatgaaacaccacaaccccagacccagacccagcaactggaaggaacggatgggcctctagtgacagatccagagacacacaagagcaccaaagcagctcatcccactgatgacaccacgacgctctctgagagaccatccccaagcacagacgtccagacagacccccagaccctcaagccatctggttttcatgaggatgaccccttcttctatgatgaacacaccctccggaaacgggggctgttggtcgcagctgtgctgttcatcacaggcatcatcatcctcaccagtggcaagtgcaggcagctgtcccggttatgccggaatcattgcaggtgagtccatcagaaacaggagctgacaacctgctgggcacccgaagaccaagccccctgccagctcaccgtgcccagcctcctgcatcccctcgaagagcctggccagagagggaagacacagatgatgaagctggagccagggctgccggtccgagtctcctacctcccccaaccctgcccgcccctgaaggctacctggcgccttgggggctgtccctcaagttatctcctctgctaagacaaaaagtaaagcactgtggtctttgcnnnnnnnnnnnnnnnnnnnnnnnnnnnnnnnnnnnnnnnnnnnnnnnnnnnnnnnnnnnnnnnnnnnnnnnnnnnnnnnnnnnnnnnnnnnnnnnnnnnnnnnnnnnnnnnnnnnnnnnnnnnnnnngaataaatgagaattttattaatantttnnncccgtggggggcgccgccctgcccccaaaaaattttcaaaaaccatctttgtttggcgcccggggcgccggagatctcccccacagaaaaaatgccttgtatccaagagaatgccgtgggccagaaacaaannnnnnnnnatttcccacccnnnnnnnnngccgtccccccgggaaacaaacaacggggttgcaaacaaaaactcccaaaagggggcctccccgaagcgaacaacctctgggggcccgaacaaaaggggggacctccacgaaaaaacctcttaagtgaaagcatttggnnnnnnnnnntccgggcccgcatatttacaaaaacgcggggagactactattcccggaaatatttttcccgccggacaacggaaagcccct

SEQ ID NO: 74357 - DNA, 1931 bp, Homo Sapiens
  misc_feature (1389)..(1430): n is a, c, g, or t
  misc_feature (1646)..(1679): n is a, c, g, or t
agcccctgtctggatgacttcttgcggctgttctacccctccccctccccgcggtaccttgcacttttctccctccctgccccctctcgagtccaccctccgggccttctgcccctgatcgcttggttttccttgcagtcgcctgctgctgtcgtcgggaggaaagatgaatgggagggctgattttcgagagccgaatgcagaggttccaagaccaattccccacatagggcctgattacattccaacagaggaagaaaggagagtcttcgcagaatgcaatgatgaaagcttctggttcagatctgtgcctttggctgcaacaagtatgttgattactcaaggattaattagtaaaggaatactttcaagtcatcccaaatatggttccatccctaaacttatacttgcttgtatcatgggatactttgctggaaaactttcttatgtgaaaacttgccaagagaaattcaagaaacttgaaaattccccccttggagaagctttacgatcaggacaagcacgacgatcttcaccacctgggcactattatcaaaagtcaaaatatgactcaagtgtgagtggtcaatcatcttttgtgacatccccagcagcagacaacatagaaatgcttcctcattatgagccaattccattcagttcttctatgaatgaatctgctcccactggtattactgatcatattgtccaaggacctgatcccaaccttgaagaaagtcctaaaagaaaaaatattacatatgaggaattaaggaataagaacagagagtcatatgaagtatctttaacacaaaagactgacccctcagtcaggcctatgcatgaaagagtgccaaaaaaagaagtcaaagtaaacaagtatggagatacttgggatgagtgaaaaattacatcattggacatgaaggagtttcaacatccagcttcatctaggtggtcatgattacctgcatgctttgagctcagcagcagtcttcataaacacatttaaaacaagatcctgggtttttgtggtttgacttctatggtgttttaaaaaaacacagatttttagtgttaatattgtgtaaatgtactcaccttagggattcatttgaatgatggtattataccatgattgtatacagtttgtgaaattgttgcaagggcaaagataactcttaaaaaaccgtcgagattacaatgctctagaatcagcatataagaaaataaatgatatctgcatgttgaattggggtggatggggggagcaagcataatttttaagtgtgaagctttgcatcaagaaattattaaaaagctttttttctccagtattttctgtattatcttaatgtttatggcaaataaaatgtaaaggaacatgcnnnnnnnnnnnnnnnnnnnnnnnnnnnnnnnnnnnnnnnnnnggggggggccccctaaaaaaatatctccccgcggggggcccaaatttaccgggaaccccttttcctgggtacacacagggagcgccccacaagaagagagcgcgctataatacagcacaggaccgggccaggacgttcacacaagcgcgtgcgaagactgggaaacactggcacacggagacacccccgggcacgaggacacccaccacacagcgnnnnnnnnnnnnnnnnnnnnnnnnnnnnnnnnnncaccaacacccctccccgacacacgaggagaaattatctaaaaacacgccccctaagggaagcaaaccacataaccacaaacactcataacacagcgcgaataaataaaaggggggcgtcacaaacaacacactagccgccgcgataatacaccgcgaccgccgcggctcgcagaaaaacacaaaatggccggcacaacaacgaagcaaaaccaaagatcaagcgagcaccaacacttttttaccagccccg

SEQ ID NO: 74358 - DNA, 864 bp, Homo Sapiens
cagtcgacggtaccggacatatgcccgggaattcggccattacggccggggaccttccgccattttcctgcctgtgagggtggacagatcgcgctcgggtctcggcctcctgagtgccggaaagatgacatggcgagggctgattttcgagagccgaatgcagagcgttccaagaccaattccccacatagggcctgattacattccaacagaggaagaacaggagagtcttcgcagaatgcaatgatgaaagcttctggttcagatctgtgcctttggctgcaacaacgtatgttgattactcaaggattcaattacgtaaaggaatactttcaagtcatcccaaagtatggttccatccctaaacttatacttgcttgtatcatgggatactttgctggaagaactttcttatgtgaaaacttgccaagagaaacttcaagaaaccttgaaatattccccccttggagaagctttacgagtcaggacaagcacgacgatcttcaccacctgggcactattatcacaaagtcaaaatatgactcaagtgtgagtggtcaatcatctttggtgacatccccagcagcagacaacatagaaatgcttcctcattatgagccaattccattcagttcttctatgaatgaatctggtcccactggtattactgatcatattgtccaaggtagaaacttctcttgaaagtgaatttcaacattttatggtccaacgtatgtatcaaactttatttgatgacctttttctgcttggatatcacctgtgtgttctaccatcaatcatcaagctaaagtcagcatgtttgttccatttgtttcttcattccttcaacttttcttgagacca

SEQ ID NO: 74359 - DNA, 1248 bp, Homo Sapiens
  misc_feature (16)..(16): n is a, c, g, or t
gatttcggaacgaggntggttttgtcctattcctccaaatgcagcagggctttagttgtctgttaaagctgcactataatttggtatctacattttatcacacaaaggaacctccccttttgacaacaactgggctaggcagctgttaatcacaacatttgtgcatcacttgtgccaagtgagaaaatgttctaaaatcacaagagagaacagtgccagaatgaaactgaccctaagtcccaggtgcccctgggaggcagaaggagacactcccagcatggaggagggtttatcttttcatcctaggtcaggtctacaatgggggaaggttttattatagaactcccaacagcccacctcactcctgccacccacccgatggccctgcctcccccatcccatccccaacatccctgtaccaccttctctcacatcttctaaagctttgtacaaatcacaatggtgcacttccaacaaaatatatcaataggtgttttcctctcttattttgtaaatagtattattttagctattaagctggataccttctttcaaattcagccattcagttgtaaagttgggaagaagtttcttgacaagactctgcaattaaatgcttaaaatttggaggggatccttccttgattacatcaagtatgttggtacatgggtttatacaagttcctcttgagaaggcaaaaagaccaccatgtgtgagagctctttgacttggccaataggggcctatcttaatgcacttgtttggacacatttctgatcttatttgtaaaggctgcaaaaggagaggatgaaatgctgtaaaagtaggaaatgaagtggaagctggaagaaaatgtaattggtggtacagctatgggccagatggtggaggggagggtggggacccctgccggcaagcagagtgtcacagctggctttcctcacttgggaaaagggtactgccggtctagcagcctcctctgtactcagccaggacacccagcgcgtgggacctgtttgtgtctgttttgcttccttgggaacggcacagtcactcaccctgccatttgcggaaatgacctggtgcactttgactgttaagcaatgcgttattgctgtagtcaaggttagtgcaagcaaggaaacattcccagtaaggtatttgtttccattttctgtctgtgcttctgtcagaaacttgctaggactttagtggccaataaaaaagaaattcctaatttcaacctt

SEQ ID NO: 74360 - DNA, 882 bp, Homo Sapiens
ctcatcctgagacggtctctacccatgtttaacccaaagagtgcaggccaggttccttatccttctgatgaaggatgagagagctcatttagaagtcagagcaaactagggtctcagtattgagaaacgcagcctgccagggaatcacagagacatcggggtgcccgcgatggccctcatgaagccatgcctcgacggcattcaggaagccctgcaaacgtgctttttgaactcattggccaggtgtgatttttacacaaggtaaacgtggtcaagggcatcggggaatttgctccaagcagatagctccctctgaggaaccaaaggaagcaagtttccacgatttctgaagagctggtataggaagtttctttcttccttttgtgttacatgtgcattaaacagaacaagctgtgtgtcatcacagattgtactgtgggctcagaaaccgtgagagagcccccaccgtggacaccggctctagggccacaggaaaaggaacgtttccaggcattttgtctccagggctcccgctggacaggcacgtactgccctggggagtaaatgcggagagttcacgaactgtgcccaacgcatgttatagccagggtcctactaactactcagtaaaagaacgtattgttgtattcctccagtgttaagctatagccatgttaaaagtcactgtgcatttattctcagcatcaaataccttgtaacgtcttctctgccttgttagtgcatatttttacttttctgatactgtaaagaatatatccagtatgtaaatgaatgttctataaatcttttgtatagtcattttctctgctccttaaatatcatctctattcagagtataataaaattatgaacttggtaaaa

SEQ ID NO: 74361 - DNA, 723 bp, Homo Sapiens
  misc_feature (417)..(461): n is a, c, g, or t
ggcaatgataaaaacacttaatgtattctgacatgagtgctctaatagcctccttctcctcatttttaaactgcatacattactttcaaaataggtatagatattctgtcccgccttttgagctattagcctgttcctgtttccctttgtcacctaagcaaggctttttctgagaaggtagtgaatggtttcaaatgttgcatactataagaataatcattgggtaactgttgtttagaccaacacttagaaatactatatttgtgccttttcatttttaattttaatgtgtgttgatatttggagcacaaataatgaaggtgccataatatggcttgccaatgttacctccttgaatagtcatgtgtcattgtcttgaattggtaattggagaaccttgcatgaaatatgtgatcnnnnnnnnnnnnnnnnnnnnnnnnnnnnnnnnnnnnnnnnnnnnncatacctgtatttgcttggggcttgtgtgtggtatgttacaaagagtgaatttctggaaatagaaatcagttaaatgttgaaagttcaggttagcagaaatatttcatttaaatatgctttactttggaggacaattgattaacagaggaaatgataattttcaaaaatgtgatcaatttactgcatgatgaaatgtgaaaacagtgcctttttaggacatcaattataataaaattgttttaaaatattaacaaagatctc

SEQ ID NO: 74362 - DNA, 1294 bp, Homo Sapiens
  misc_feature (90)..(182): n is a, c, g, or t
  misc_feature (184)..(286): n is a, c, g, or t
  misc_feature (299)..(299): n is a, c, g, or t
  misc_feature (325)..(325): n is a, c, g, or t
  misc_feature (387)..(387): n is a, c, g, or t
ctcgcaccgacgacgagccagcgatcatgacgaggagcgaagacccccatagcaacgcctgtcccgcggttgccgatcataatgcagctnnnnnnnnnnnnnnnnnnnnnnnnnnnnnnnnnnnnnnnnnnnnnnnnnnnnnnnnnnnnnnnnnnnnnnnnnnnnnnnnnnnnnnnnnnnnncnnnnnnnnnnnnnnnnnnnnnnnnnnnnnnnnnnnnnnnnnnnnnnnnnnnnnnnnnnnnnnnnnnnnnnnnnnnnnnnnnnnnnnnnnnnnnnnnnnnnnnnccaagaaatcgcnacgagggcgctgcacgcattactgcntagaggaggtggctggcggcgctgtagctgtgcgcctggctacaagctgggggacgacctcntgcagtgtcaccccgcaggagagtatgacctgcggcgctgggagaagtgggagctggacctggacatcaaggaggtcttcgtccaccccaactacagcaagagcaccaccgacaatgacatcgcactgctgcacctggcccagcccgccaccctctcgcagaccatagtgcccatctgcctcccggacagcggccttgcagagcgcgagctcaatcaggccggccaggagaccctcgtgacgggctggggctaccacagcagccgagagaaggaggccaagagaaaccgcaccttcgtcctcaacttcatcaagattcccgtggtcccgcacaatgagtgcagcgaggtcatgagcaacatggtgtctgagaacatgctgtgtgcgggcatcctcggggaccggcaggatgcctgcgagggcgacagtggggggcccatggtcgcctccttccacggcacctggttcctggtgggcctggtgagctggggtgagggctgtgggctccttcacaactacggcgtttacaccaaagtcagccgctacctcgactggatccatgggcacatcagagacaaggaagccccccagaagagctgggcaccttagcgaccctccctgcagggctgggcttttgcatggcaatggatgggacattaaagggacatgtaacaagcacaccggcctgctgttctgtccttccatccctcttttgggctcttctggagggaagtaacatttactgagcacctgttgtatgtcacatgccttatgaatagaatcttaactcctagagcaactctgtggggtggggaggagcagatccaagttttgcggggtctaaagctgtgtgtgttgagggggatactctgtttatgaaaaagaataaaaaacacaaccacgaagcc

SEQ ID NO: 74363 - DNA, 702 bp, Homo Sapiens
tgaaagcaaagaatctacaacaaaagacaatgatgaattcatgatgttgctatcaaaagttgagaaattgtcagaagaaatcatggagataatgcaaaatttaagtagtatacaggctttggagggcagtagagagcttgaaaatctcattggaatctcctgtgcatcacatttcttaaaaagagaaatgcagaaaaccaaagaactaatgacaaaagtgaataaacaaaaactgtttgaaaagagtacaggacttcctcacaaaggtcagcctcagatgtcacaacctctgtgaagctctccccagctctcctagcatcacgtcatcttgacagctatgaattccttaaagccattttaaactgaggcattaagaagaaatgcactcaccatgagcaccaacttctgcatctgcctgatcatatttaaaggaacagagaaatatttgtaattaatctgcccagtaaataccagctcgtagcagttggcaggtgcatgtctagataaaatttcttgcagctaatttaaactttctacacgcaccagtagataatctcaatgtaaataatacatttcttcttggctctttaatgtaagccaacatggagaggaagatcttgacttatattctgtaccacatacacttctgtggacttttagcatttgtgggtagacttaataaagcatgtataaaagtggaaa

SEQ ID NO: 74364 - DNA, 1017 bp, Homo Sapiens
ggtaccggtccggaattctacaaatatacggcgacccacgcgtccgcttgcctttcatgccttggcgtttcctttggcggattttctgttttcggaagttgctgggttcgttttattcagcggcagtggtgctttcccgaatctcagaatgcctgttaaaagatcactgaagttggatggtctgttagaagaaaattcatttgatccttcaaaaatcacaaggaagaaaagtgttataacttattctccaacaactggaacttgtcaaatgagtctatttgcttctcccacaagttctgaagagcaaaagcacagaaatggactatcaaatgaaaagagaaaaaaattgaatcaccccagtttaactgaaagcaaagaatctacaacaaaagacaatgatgaattcatgatgttgctatcaaaagttgagaaattgtcagaagaaatcatggagataatgcaaaatttaagtagtatacaggctttggagggcagtagagagcttgaaaatctcattggaatctcctgtgcatcacatttcttaaaaagagaaatgcagaaaaccaaagaactaatgacaaaagtgaataaacaaaaactgtttgaaaagagtacaggacttcctcacaaagcatcacgtcatcttgacagctatgaattccttaaagccattttaaactgaggcattaagaagaaatgcactcaccatgagcaccaacttctgcatctgcctgatcatatttaaaggaacagagaaatatttgtaattaatctgcccagtaaataccagcttcgtagcagttggcaggtgcatgtctagataaaatttcttgcagctaatttaaactttctacacgcaccagtagataatctcaatgtaaataatacatttcttcttggctctttaatgtaagccaacatggagaggaagatcttgacttatattctgtaccacatacacttctgtggacttttagcatttgtgggtagacttaataaagcatgtataaaagtggc

SEQ ID NO: 74365 - DNA, 1018 bp, Homo Sapiens
  misc_feature (663)..(719): n is a, c, g, or t
  misc_feature (743)..(751): n is a, c, g, or t
ccaccggcaggttgtactagggaatttcaggaactagagatgactgagtcctcgtagccatctctctactcctacctcagcctagaccctcctcctcccccagaggggtgggttcctcttccccactccccaccttcaattcctgggccccaaacgggctgccctgccactttggtacatggccagtgtgatcccaagtgccagtcttgtgtctgcgtctgtgttgcgtgtcgtgggtgtgtgtagccaaggtcggtaagttgaatggcctgccttgaagccactgaagctgggattcctccccattagagtcagccttccccctcccagggccagggccctgcagaggggaaaccagtgtagccttgcccggattctgggaggaagcaggttgaggggctcctggaaaggctcagtctcaggagcatggggataaaggagaaggcatgaaattgtctagcagagcaggggcagggtgataaattgttgataaattccactggacctgagcttggcagctgaactattggagggtgggagagcccagccattaccatggagacaagaagggttttccaccctggaatcaagatgtcagactggctggctgcagtgacgtgcacctgtactcaggaggctgaggggaggatcactggagcccannnnnnnnnnnnnnnnnnnnnnnnnnnnnnnnnnnnnnnnnnnnnnnnnnnnnnnnngagtgagaccctgtctcttaaagnnnnnnnnngtcagactgctgggactggccaggtttctgcccacattggacccacatgaggacatgatggagcgcacctgccccctggtggacagtcctgggagaacctcaggcttccttggcatcacagggcagagccgggaagcgatgaatttggagactctgtggggccttggttcccttgtgtgtgtgtgttgatcccaagacaatgaaagtttgcactgtatgctggacggcattcctgcttatcaataaacctgtttgttttacacgtcg

SEQ ID NO: 74366 - DNA, 1194 bp, Homo Sapiens
aaggtagcgaggcctgggtggcgattcggacgaggaaatggcggctccccaagacgtccacgtccggatctgtaaccaagagattgtcaaatttgacctggaggtgaaggcgcttattcaggatatccgtgattgttcaggacccttaagtgctcttactgaactgaatactaaagtaaaagagaaatttcaacagttgcgtcacagaatacaggacctggagcagttggctaaagagcaagacaaagaatcagagaaacaacttctactccaggaagtggagaatcacaaaaagcagatgctcagcaatcaggcctcatggaggaaagctaatctcacctgcaaaattgcaatcgacaatctagagaaagcagaacttcttcagggaggagatctcttaaggcaaaggaaaaccaccaaagagagcctggcccagacatccagtaccatcactgagagcctcatggggatcagcaggatgatggcccagcaggtccagcagagcgaggaggccatgcagtctctagtcacttcttcacgaacgatcctggatgcaaatgaagaatttaagtccatgtcgggcaccatccagctgggccggaagcttatcacaaaatacaatcgccgggagctgacggacaagcttctcatcttccttgcgctagccctgtttcttgctacggtcctctatattgtgaaaaagcggctctttccatttttgtgagatcccaaaggtgccagttctggccctttcagctcctgtttcaggatctgtcctggttcctgagctctaggctgctaagctgagccacacacccctccgtttgcaccagttgcctgcaggttggatggaacacagtgccccacttttctgcaagtagctggcttgtaaagggtgaacagagccatgggaggaaggtctggcattgggatgccgccctggggacatacgaaccgcctccttccaccattgtgcactatgggaggccgctgctgcgtggagcacttaaagtccagcctccaggaccggatgcccctcctgtctcccgctcccatcgtgcccttaaatgccagatctggtggagggaagagagaagaggtaggaagaaaggtgatgaaaactcctggtcattccttgaataaacttgattttatttaatagaataaaatgtatttgattttgtaagataaaaa

SEQ ID NO: 74367 - DNA, 1220 bp, Homo Sapiens
gagcatagggctaggtcgaggctggggtgttaattcggcacgagggcttcctgctggatctggagctgcaggagcgcgggggcggcgcctgcgactgtccgagtacgtcttcctgcggctgccgggagcccgcgtaggggatgcagacggagaaagtcccgaacccgctcccgccgcctccgtgcgccccgacggccgccccgagctctgccggccactgcgcctggcctggcgccaggacgtgatggttcacttcatcgtgccagtgaaaaaccaggcacggtgggtggcacagttcctggcggacatggctgcgctgcacgcgcgcaccggggactcgcgtttcagcgtcgtcctggtggatttcgagagcgaggatatggacgtggagcgggccctgcgcgccgcgcgcctgccccggtaccagtacctgagacgaaccgggaacttcgagcgctccgccgggctgcaggcgggagtggacgcggtagaggacgccagcagcatcgtgttcctctgcgacctgcacatccacttcccacccaacatcctggacggcatccgcaagcactgcgtggagggcaggctggccttcgcgcccgtggtcatgcgcctgagctgcgggagctcgccccgggacccccacggttactgggaggtgaacggctttggcctttttgggatctacaagtcggactttgaccgggttggaggaatgaacacggaggagtcccgagaccagtgcgggggtgaagactgggagctcctggacagggtcctgcaggcagggctggaggtggagcggctccgactgcggaatttctatcaccactaccactccaagaggggcatgtggagcgtccgcagcaggaagggctctcgcacgggggcgtcttgaggacgggcagcccctcccagccccggtgggagtcccgaggcagctgctgggggctgggctttgagctcggtcccgagagacccggcagggctggtcagaggggcacagccaccgcctgtgcctgcccctctctggcccactgggcgtcgtgcccctccccggagaggcagccttcacggcgggtcagggcctggccttggtccccactctgcgatgatttctgtgaaattttgctgtagcgatgacattgttttcagaatttccaagagttctgtctgttctgttttttattcagaatgaaatgaaatattttttttagttc

SEQ ID NO: 74368 - DNA, 1573 bp, Homo Sapiens
cctaggtagcgaggcctgggtggcgaattcggcacgagggagaaacgagttgtggctgaggaccccggcggcagacgcaggttcgggaccatgagctggattccttttaagattgggcagcccaagaaacagattgtgcccaaaacagtggagagagactttgaaagggagtatggaaaacttcagcagctggaagagcagacccggaggctgcagaaagacatgaagaagagcaccgacgcagacctggccatgtcaaaatctgccgtgaagatatccttggacttactctccaatcccctctgtgagcaagaccaggaccttctgaacatggtgacggccctggacacggccatgaagcggatggatgccttcaatcaggaaaaggtgaaccagatccagaagactgtgatcgagcccttaaaaaagttcggcagtgtcttcccgagcctcaacatggctgtgaagaggcgggaacaggccttgcaggactacaggaggctgcaggccaaggtggagaagtatgaggaaaaggagaagacggggccagtgctggccaagctccaccaggcacgagaggagctgcggcctgtgcgggaggactttgaagccaagaacaggcagctgctggaggagatgccgcgcttctacggcagccgcctcgactacttccagcccagcttcgagtccctcatccgagctcaggttgtgtactactcggaaatgcacaagatctttggagacctgtcccatcagcttgaccagccaggccactccgatgagcagcgggagcgggagaacgaggccaaactcagtgagctccgggccctctccattgtggccgatgactgaatccccgtcactcttggaggactcctgtgacgtggtcagcctcattcatccttgcccttctcagggctagctgctcctctcacaggctggggacagaggtggccctggttcacttgccggccctttgcaatgaatgactcttcctgagcctggcaccaggagccctaggcaggccgccgtctccccactcacagccccagcaggtaagcagtgtagacaaacccttggggcttttttatttggagaaccgtccagcatgcatcctggcccacggcctgagcaagctgcagcccttctgaggccatgggcttcgttggctaagttgggggtcttagccttgcatgcgttgtgggcatcaaatctacctccaaaagacccatcctggggagccctctggcccctcgttgccttttcacttcaaaacctcttttttctgggagaggccctgaaccctgtgcgggagagctggtcctccagccctggcaggccctcagccagcttcccagcaagacaaagggcacccttgtggctttgggacctaagtggttggggttcccgaggtcactgaggactggtacctcgggaacgcaagctgtcagtggaactgtcccacaagaattcacaggtctcaaagcaggaacagtgggtttgtgtctcacctgagtatctggaattttattttttcaagtaaaattttcaatgaaacgtccacatagtattg

SEQ ID NO: 74369 - DNA, 1186 bp, Homo Sapiens
  misc_feature (613)..(659): n is a, c, g, or t
  misc_feature (942)..(942): n is a, c, g, or t
  misc_feature (979)..(987): n is a, c, g, or t
  misc_feature (1068)..(1102): n is a, c, g, or t
aggtaacttcaaaataagagatgagtttattttcaaatgtgaaatcatgtcaacattttaatccaaactcaatatatttaacacacatatttaagaggcttactacatcatgcaattggattagaacacctttacaatcctatgaagagagtacagtgcagaaaagtcatatctttacattaaccaacaaaatcttagcaattatattttagtcttacatcactacagggtttaaaagtgatcgctgcaaaatcagattttaaaaatatcttccacaatcatgatttttgtccttcactgttcaagtaaaatcttgtgtcatccagttgcaaaatcttattattgataacacgtatacgtgtatacaaaccacactgcaaattaacaaaagaattgtacccagtcaggctgacaaagtttaataaagggacacttctaatctaatcatttcatcttgtaagtaatattgttattctctacatctattcatttgccatgttttaggaaagagcacattcatactttcaaacatgcaaaacatgataaactagaataaatggcacttgaaaaaccattataaaagagacttgcctgaagtcgtttcatttgaccnnnnnnnnnnnnnnnnnnnnnnnnnnnnnnnnnnnnnnnnnnnnnnntacattatagagaatattaagttgaacttcatttgccgttttatagaactacaccacttctgcaaataagtatgttaattggtctgttctttggtgaaaacagagctatgatttcatagttatgttgagggagcagttagcaagtgtgctccacaacaaaaagaaatcagacaatctaaaggacattggctactggttgcctttattctcagcaccacgaaatggagaaatcttcagcaaaacaagctcctaaacaccagatattctcttttatttaaaattngttcaacatgacacaatgcctgttgcgtaacctggcnnnnnnnnnctaaaacacacagctttttgctctttcttccccggccgtaatggccgaattcccgggcatatgtccggtaccgtcgactgnnnnnnnnnnnnnnnnnnnnnnnnnnnnnnnnnnncggccgcttcctcgcatcactgactcgctgcgctcggtcgttcgaatgaccgcgctagcgccctataggatgaattcaagttct

SEQ ID NO: 74370 - DNA, 2352 bp, Homo Sapiens
  misc_feature (2281)..(2309): n is a, c, g, or t
gagcgcttgggagttaggttgtttgccggcgtagcggccagcgcctgagcccgcccttgatcttcgctgtggcatggcggacgaggggaagtcgtacagcgaacacgatgatgaacgcgttaatttccctcaaagaaagaagaaaggccggggtcccttccggtggaaatatggtgaaggaaaccgtaggtctggaagaggcggttctggtattcggtcttcccgccttgaggaagatgatggagatgtggcaatgagtgatgcccaggatggtccccgagtacgatacaacccctataccacccgacctaaccgtcggggtgatacttggcatgatcgagatcgcattcatgttactgtgcggagagacagagctcctccagagagaggaggggctggcaccagccaggatgggacctcaaagaactggttcaagattacaattccttatggcagaaagtatgacaaggcatggctcctgagcatgattcagagcaagtgcagtgtgcccttcacccctattgagtttcactatgagaatacacgggcccagttcttcgttgaagacgccagtactgcctctgcattgaaggctgtcaactataagattttggatcgggagaaccgaaggatatctatcatcatcaactcttctgctccaccccacactatactgaatgaactgaagccagaacaagtagaacagctaaagctgatcatgagcaaacgatacgatggctcccaacaagcccttgacctcaaaggcctccgttcagacccagatttggtggcccagaacattgacgttgtcctgaatcgcaaaagctgtatggcagctaccctgaggatcattggaagagaacatccctgagctattgtccttgaacttgagcaacaacaggctgtacaggctggatgacatgtctagcattgttcagaaggcacccaacctgaagatcctaaacctttctggaaatgaattgaagtctgagcgggaacgggacaagataaaggggctgaagctagaagagctctggctcgatggaaactccctgtgtgacaccttccgagaccagtccacctacatcaccgccattcgcgaacgatttcccaagttactacgcctggatggccatgagctaccccgcaccaattgcctttgatgttgaagcccccacgacgttaccgccctgcaagggaagctattctggaacagaaaacttgaagagtctggtcttgcacttcctgcaacagtactatgcaatttacgactctggagaccggcaagggctcctggatgcctaccatgatggggcctgctgttccctgagcattcctttcattcctcagaaccctgcccgaagcagcttagccgagtatttcaaggatagcagaaatgtgaagaagcttaaagaccctaccttgcggttccggctgctgaagcacacgcgtctcaacgttgttgccttcctcaatgagttgcccaaaacccagcacgacgtcaattccttcgtggtagacataagcgcccagacaagcacattgctgtgtttttctgtcaatggagtcttcaaggaagtggacggaaagtcccgggattctttgcgagccttcacccggacattcattgctgttcctgctagcaattcagggctatgtattgtaaatgatgagctatttgtgcggaatgccagttctgaagagatccaaagagccttcgctatgcctgcacccacgccttcctccagcccggtgcccaccctctctccagagcagcaggaaatgttgcaagcattctctacccagtctggcatgaacctcgagtggtcccagaagtgccttcaggacaacaactgggactacaccagatctgcccaggccttcactcatctcaaggccaagggcgagatcccagaagtggcattcatgaagtgatcgtagtcatgcctcagaagcagtcccccctgtaaatagtccttggatattaccgtctggttgtcgtctgtcatctcctcctgtctggcccgaggccgccccgtgactgtgaccgagggagggagggctgcctgatccctctcctcgcctgccttctggaagacttcagaagattgagcctcactggtgccaggaagccaaagcttactttgtagaactgacactaaactacccgaaggacttaggtgctttgtgtacttaaccccaggacctccttactttttaatataaagagtgatgttgtatttcgtgttctgcactttttaatataaagagtgatgttgtnnnnnnnnnnnnnnnnnnnnnnnnnnnnngaccgcgtatgcggccgcaagcttattccctttagttgagggt

SEQ ID NO: 74371 - DNA, 878 bp, Homo Sapiens
ggtgggtggcggtggaagttaagggagtcagggctatcgctcctcgagactcgcagtcgcggccactgcagtcacttcgccagttagcccttagggtaggagtcgcgccggcagcagccatgagcggcggcgtgtacgggggagatgaagttggagcccttgtttttgacattggatcctatactgtgagagctggttatgctggtgaggactgccccaaggtggattttcctacagctattggtatggtggtagaaagagatgacggaagcacattaatggaaatagatggcgataaaggcaaacaaggcggtcccacctactacatagatactaatgctctgcgtgttccgagggagaatatggaggccatttcacctctaaaaaatgggatggttgaagactgggatagtttccaagctattttggatcatacctacaaaatgcatgtcaaatcagaagccagtctccatcctgttctcatgtcagaggcaccgtggaatactagagcaaagagagagaaactgacagagttaatgtttgaacactacaacatccctgccttcttcctttgcaaaactgcagttttgacagcatttgctaatggtcgttctactgggctgattttggacagtggagccactcataccactgcaattccagtccacgatggctatgtccttcaacaaggcattgtgaaatcccctcttgctggagactttattactatgcagtgcagagaactcttccaagaaatgaatattgaacttggttcctccatatatgattgcatcaaaagaagctgtcgtgaaggatctccagcaaactggaaaaagaaaagagaagttgccctcgggtacgagggtcttggcacaatt

SEQ ID NO: 74372 - DNA, 1029 bp, Homo Sapiens
ggatcgagggcccccgggcgcggtgttaaatcggcacgaggcgcttgttgcctgaggtgggtggcggtggaagttaagggagtcaggggctatcggctcctcgagactcgcagtcgcggccactgcagtcacttcgccagttagcccttagggtaggagtcgcgccggcagcagccatgagcggcggcgtgtacgggggagatgaagttggagcccttgtttttgacattggatcctatactgtgagagctggttatgctggtgaggactgccccaaggtggattttcctacagctattggtatggtggtagaaagagatgacggaagcacattaatggaaatagatggcgataaaggcaaacaaggcggtcccacctactacatagatactaatgctctgcgtgttccgagggagaatatggaggccatttcacctctaaaaaatgggatggttgaagactgggatagtttccaagctattttggatcatacctacaaaatgcatgtcaaatcagaagccagtctccatcctgttctcatgtcagaggcaccgtggaatactagagcaaagagagagaaactgacagagttaatgtttgaacactacaacatccctgccttcttcctttgcaaaactgcagttttgacagcatttgctaatggtcgttctactggggctgatttttggacagtggagccactcataccactggcaattccagtcccacgattggcttatgtccttcaaacaagggcattgtgaaatcccctcttggctggagactttattactaatgcagtgcgagagaactcttccaagaaatggattttggatggtccctccatttttggattgcttcaaagaaggcgttctgggaggtctccccactggaaaaaggggaagggccgggccgagtggggcccttttgttggggtcccgggacccgggtacggggcatactttagagggggaaccggttatccgggtgttcggggggcaaattcccggggaaggcggccggggaacg

SEQ ID NO: 74373 - DNA, 2133 bp, Homo Sapiens
ggggagctccggggtgtgtggacgccgctttgttgcctgagatgaagttggagcccttgtttttgacattggatcctatactgtgagagctggttatgctggtgaggactgccccaaggtggattttcctacagctattggtatggtggtagaaagagatgacggaagcacattaatggaaatagatggcgataaaggcaaacaaggcggtcccacctactacatagatactaatgctctgcgtgttccgagggagaatatggaggccatttcacctctaaaaaatgggatggttgaagactgggatagtttccaagctattttggatcatacctacaaaatgcatgtcaaatcagaagccagtctccatcctgttctcatgtcagaggcaccgtggaatactagagcaaagagagagaaactgacagagttaatgtttgaacactacaacatccctgccttcttcctttgcaaaactgcagttttgacagcatttgctaatggtcgttctactgggctgattttggacagtggagccactcataccactgcaattccagtccacgatggctatgtccttcaacaaggcattgtgaaatcccctcttgctggagactttattactatgcagtgcagagaactcttccaagaaatgaatattgaattggttcctccatatatgattgcatcaaaagaagctgttcgtgaaggatctccagcaaactggaaaagaaaagagaagttgcctcaggttacgaggtcttggcacaattatatgtgtaattgtgttatccaggattttcaagcttcggtacttcaagtgtcagattcaacttatgatgaacaagtggctgcacagatgccaactgttcattatgaatcccccaatggctacaattgtgattttggtgcagagcggctaaagattccagaaggattatttgacccttccaatgtaaaggggttatcaggaaacacaatgttaggagtcagtcatgttgtcaccacaagtgttgggatgtgtgatattgacatcagaccaggtctctatggcagtgtaatagtggcaggaggaaacacactaatacagagttttactgacaggttgaatagagagctgtctcagaaaactcctccaagtatgcggttgaaattgattgcaaataatacaacagtggaacggaggtttagctcatggattggcggctccattctagcctctttgggtacctttcaacagatgtggatttccaagcaagaatatgaagaaggagggaagcagtgtgtagaaagaaaatgcccttgagaaagagttcccaagcttctaccttccttttgtcaccttacgtttcatagctttagtatactcaggaaaagaatgaccatcttttgtagaatgtttatacatttttgcatatttcaatttccacttaaattttttaaagctttaactggctctataaattaagtttgtgctttccttgaaatgcacttattcttattacaagcattttataattttgtataaatgtctattttctctaaatattttgctttcagtaaaatgctttccaactctgtttagtgtattaattaccagtggattggtagaactgctttttattgactagtaaaagttactgcctatgctttttaccttaggcttacagaattaaataaaaattagccattccagaaatatattttggactgttgtgcactgtgattactactttaaggactaaatgtatttctcattattttgaatcaaagtcctccgtttattaacagcaatacccacatcctcttcatagcctattaacaacagaggtaaaactattattcaaattcaaaaactacggtattgcctttgctgtggcagttaccatcaccttcacactctaaggtagcaggtgacatttaaagcctgcttaaatgtcagaatttataaagtgggaatctcatctgaactttatacctgatttttagaagcaaattagcttctaccaaattagctaattagcatgccatattcacacttagaacaactgattagtaaagtcacttgactaaaaacagaatttctttataaaccacttaacatatttactcctgtacacagactattcaaga

SEQ ID NO: 74374 - DNA, 478 bp, Homo Sapiens
cagtcgacggtaccggacatatgcccgggaattcggccattacggccggggatgtctcttgtcagctgtctttcagaagacctggtggggcaagtccgtgggcatcatgttgaccgagctggagaaagccttgaactctatcatcgacgtctaccacaagtactccctgataaaggggaatttccatgccgtctacagggatgacctgaagaaattgctagagaccgagtgtcctcagtatatcaggaaaaagggtgcagacgtctggttcaaagagttggatatcaacactgatggtgcagttaacttccaggagttcctcattctggtgataaagatgggcgtggcagcccacaaaaaaagccatgaagaaagccacaaagagtagctgagttactgggcccagaggctgggcccctggacatgtacctgcagaataataaagtcatcaatacctcaaaaagaaaatcacctaacg

SEQ ID NO: 74375 - DNA, 1018 bp, Homo Sapiens
  misc_feature (650)..(650): n is a, c, g, or t
acctggtaagtgggactgtctgggttggccccgcactttgggcttctcttggggagggtcagggaagtggagcagccttcctgagagaggagagagaaagctcagggaggtctggagcaaagatactcctggaggtggggagtgaggcagggataaggaaggagagtatcctccagcaccttccagtgggtaagggcacattgtctcctaggctggacttttcttgagcagagggtggggtggtaaggaaagtctacgggccccgtgtgtgtgcacatgtctctgtgtgaatggacccttccccttcccacacgtgtatccctatcatcccacccttcccaccagagccatagccatctgctggtttggttatttggagagtgcaggccaggacaaggccatcgcttggggcatgaatcctctgcgtactgccctggccagatgcaaattccctgccatgggattccccagaaggttctgtttttcaggtggggcaagtccgtgggcatcatgttgaccgagctggagaaagccttgaactctatcatcgacgtctaccacaagtactccctgataaaggggaatttccatgccgtctacagggatgacctgaagaaattgctagagaccgagtgtcctcagtatatcangggtgaggaggggctggggtggtggcggggggctctctgcctgggcctggggctgccctggggccagcggtcctccctgccacccttcatagatggctatgcctcggctctctctgagatctttaaactctggcttcttcctcctcaatcttgacagaaaaagggtgcagacgtctggttcaaagagttggatatcaacactgatggtgcagttaacttccaggagttcctcattctggtgataaagatgggcgtggcagcccacaaaaaaagccatgaagaaagccacaaagagtagctgagttactgggcccagaggctgggcccctggacatgtacctgcagaataataaagtcatcaatacctc

SEQ ID NO: 74376 - DNA, 1010 bp, Homo Sapiens
  misc_feature (42)..(42): n is a, c, g, or t
  misc_feature (99)..(99): n is a, c, g, or t
  misc_feature (101)..(101): n is a, c, g, or t
  misc_feature (105)..(105): n is a, c, g, or t
  misc_feature (290)..(290): n is a, c, g, or t
  misc_feature (301)..(301): n is a, c, g, or t
gaaatggcacctctgactttagaagtcacatgattgcaggangagatctgaagagaaatcatagcaggttctagcgatagatgagacatacagccatgncnatgnaccttgaccaccactgaccaaatggatagactctgagagcccttgggagtctgtaatcccaaacattaccagtcccctccccagtgggttgaccacacaggtgcagcctcacagaagaaagctttccgttcttcaggatttggactagagtcaaactcatttcagcaccagctgcgaatccaggnatcaagaaatntcaggaaggctttgatggtggctggtgcctctctgtacatcagccctgggcttctctgcttgtcagagggattaaaagggtggagggcagatcctggtacaccccccacagaggacgactttggatagcagccacagctaaaaaaccctcccctcaagaagtctcagaactccaggctacatatcgtcttcttcgtgggaaagatgtggaatttcctaatgactatccgtcaggttgtcttctgggctgtgtggacctaattgactgcttgtcccagaagcaatttaaggagcagtttccagacatcagtcaagaatctgattctccatttgttttcatctgcaaaaatcctcaggaaatggttgtgaagtttcctattaaaggaaatccaaaaatctggaaattggattccaagatccatcaaggagcaaagaaggggttaatgaagcagaataaagctgtctgacccaggagaaaaggaactatacagcatagtggagttttgtgtactaaaattgctatctactggtcctttggaattgaagtagtagaaacctaaaggcttggcgtcaggcttgaatatctcagaacttaaactcttaccaaaatctgtatatttttcttaaggagtgggattcctactttatgtaatggggtcgaaatctttgaacacattatttataaaaacctgtttaaaaattctaaaaaa

SEQ ID NO: 74377 - DNA, 779 bp, Homo Sapiens
  misc_feature (35)..(35): n is a, c, g, or t
caaaaagatagggccaacaggctctgggccacttntacatatcccacatagggctattccaacctggagacaaggaatacagagaagagtatgagataatcaaattgctactcagttgataagaatgttaacatactaagttataccagggagagagtgactaaccacattctttaaatatcaatagcttagtcagattgattattgtgctatattgtgaattgagaggtattaagtttcatgaggctttgtcattagtattcctgcttctaccaagaaggtatttaatatatgtgttggcctattattgatgtaaaagttatttaaataagttaatgttagaaacattattcaatttaaatactgaaaacatttcaaagagattttgtttttgttatagcatagcaaagtaaattggaacaatcatacaatgacattttttaaaccaaaattttgtaacttttataacttggagttaagttagcttgagtaacaaaaaggtaaagtggtttttgtttagagttacgaaatgttagtactttttctatgtttaacaaattggcagtttgtcagttatgacatttttgtgtaataaatattttgtatttgtttgaagcatgctttgttttatatagagaatatttattttaaaaatatgtctctcatataccctattaattgtattattgatataatctttttggtttccttcagcaattccaaattttccttcagcctttctggatttcacagatttataaaatctttgtgtctttcac

SEQ ID NO: 74378 - DNA, 666 bp, Homo Sapiens
agagaccatcccaggaagttgtggggttggggaggcctagggttaggcaagaccttgaggcaggggttgaagccagggagtggtcagccagcactgtccctgcctgtccccatcccacagagggcaaggagttggtgcacacctacaagggctgcatcaggtcccaggactgctactccggcgttatatccaccaccatgggccccaaggaccacatggtaaccagctccttctgctgccagagcgacggctgcaacagtgcctttttgtctgttcccttgaccaatcttactgagaatggcctgatgtgccccgcctgcactgcgagcttcagggacaaatgcatggggcccatgacccactgtactggaaaggaaaaccactgcgtctccttatctggacacgtgcaggctggtattttcaaacccagatttgctatgcggggctgtgctacagagagtatgtgctttaccaagcctggtgctgaagtacccacaggcaccaatgtcctcttcctccatcatatagagtgcactcactccccctgaaaagctatctgaacagaggaagataatgtagtgtgaagtccccatttgtcctcagcctgtaactccccgtgtgcctataaagaagttaatagagcaagcctgagtcctgtgggcgtga

SEQ ID NO: 74379 - DNA, 661 bp, Homo Sapiens
gatggatagttttacatttcactggactagataaaaaatggtgctaatatttatgtagcttgatgctatagttgctttggtatcaaacttaatacctaacccatataagatccttattatataattttgtgatcagtaaaatgatattttaaagagtgatcttaaaaatatgacctggtcattgcacaacgtttgcatttgaaatgaatttttgtactatagggtggatatggagttattcagtgcaagtgtgtgcttaatatcaaaccctatgcaaggagctatgtctagatttttggtccaaatttgcctccttcaagcctactagtgtgagatggaaaaaaatcgattgctcttttaatattatttccattttgaaattctcgacacttgaatgaaggcagtagaggcctctttttggatttctcttctaataacaaaactttatttagggaaggtttccctgtgctatcgtaagtttgttttgagcactgcattcactttaaaattctggaggaacaaaggctgggcacataatcacaaagcccaggccacacaataattcggggttgtattttctaagaactatgtattgtttttagcttatagttaatattgtatttacttggaaaaatgtgaataaagttaattaacattaaaa

SEQ ID NO: 74380 - DNA, 1051 bp, Homo Sapiens
  misc_feature (81)..(115): n is a, c, g, or t
aactgtaatcatatagggcgctagctcggctacatcgaacgaccgagcgcagcgaagttagtgaagcgaggaagcggccgnnnnnnnnnnnnnnnnnnnnnnnnnnnnnnnnnnncagtcgacggtaccggacatatgcccgggaattcggccattacggccgggattgtatgatttttatacttctgccgaatagacttagaatcagatgaattgtctgtgtgtcttgcaaaagagttggggacaacttgggcaggcctatgaagtgcatagggagtgtatgtcttctgaatggttttattgttcttgtaatctagcttaaagaaatgttaactgggagggtgctgaggccactcactgcattaatttgtgtgtttagagttctgttgtcaaaagaaaactaatgaataaattagttggtcattctagaatttaaagttctaagattagtataaagagtatatagattgttaatccccaccagctagactttgaacttaagtcagacttaaagatttgagaaattatttgtgtcatttactagacgtgatttttagttctgtttgattatatttcctacacaaacttcttatttaacaggatagcctactaaattaaatgtttcttatttcacttaactcatttgattaaactgtattctaaaacatttggggtttttccccctattcagttttaatcttggaatatgcatttgtaaattgtgatgtcattgagactatatttatatttgacttggcaacattaacatgtcctaagacttagtgcagagaagcttggcagtacgttctttgacttaaggatggcataaaataatcatttttgaacctgtgtaataaagcttgaaagcagggaaaagaatttccttttcccccttttttgtgttgtctataggaattaacttgggattgttttgtgggtttttgtttgttttaaatgtaaattgagaatcttttataagaaataaaagcattattgggtgcctttgtttgtaaaccaaaaagtaataaatgaatccctatatttccattat

SEQ ID NO: 74381 - DNA, 2081 bp, Homo Sapiens
gggcagggcgcgctgcccggagctgcctgggttgcgctgccggccacgtccccgcgccgggcctcaggctccttcctactgtccgagggccaccaggccgccgggggcctgctgcgcccggatgcgtctgttactagagtggagagtctaccttcgtctcacatgtgccacaaaggatggcatggcccgggagtgccccaccacgtggctttcaccccctgcaaagccagacttcgcccagcgacacagtgtcaagcccacagctctccaaggaggaagatggtccaggctgggagcatccccttagcagcagcctctgatcccttggccaagcaggagggaaccattagcagcctgaggagctggctggctgggagcctcggggaccgcccagccttgctcccagctcacccacaagatgtggacagctcttgtgctcatttggattttctccttgtccttatctgaaagccatgcggcatccaacgatccacgcaactttgtccctaacaaaatgtggaagggattagtcaagaggaatgcatctgtggaaacagttgataataaaacgtctgaggatgtaaccatggcagcagcttctcctgtcacattgaccaaagggacttcggcagcccacctcaactctatggaagtcacaacagaggacacaagcaggacagatgtgagtgaaccagcaacttcaggaggtgcagctgatggtgtgacctccattgctcccacggctgtggcctccagtacgactgcggcctccattacgactgcggcctccagtatgactgtggcctccagtgctcccacgactgcagcctccagtacaactgtgggcctccattgctcccacgactacagcctccagtatgactgcgggctccagcactcccatgacaattgaactccccgcgcccacgtccacttccacagggcggaccccggccactaccgccactgggcatccatctctcagcacagccctcgcacaagtgccaaagagcacgccgttgccaagaacagcaaccctggccacattggccacactgtgctcagactgtagcgaccacagcaaacacaagcagccccatgagcactcgtccaagtccttccaagcacatgcccagtgacaccgcggcaagccctgtaccccctatgcgtccccaagcacaaggtcccattagcaaggtgtcagtggaccagcctgtggttaacacaacaaataaatccacacccatgccctcaaacacaaccccagagcccgcccccacccccacagtggtgaccaccaccaaggcacaagccagggagccaactgccagcccagtgccagtacctcacaccagcccaatccctgagatggaggccatgtcccccacgacacagccaagccccatgccatatacccagagggccgctgggccaggcacatcccaggcaccggagcaggtagagactgaagccacaccaggtactgattccactgggccaacacccaggagctcagggggcactaagatgccagccacggactcgtgccagcccagcacccaaggccagtacatggtggtcaccactgagcccctcacccaggccgtggtagacaaaactctccttctggtggtgctgttactcggggtgacccttttcatcacagtcttggttttgtttgccctgcaggcctatgagagctacaagaagaaggactacacccaggtggactacttaatcaacgggatgtatgcggactcagaaatgtgaggggggcgggggcctggcgggaggcctggccccttcctcgtcctttccttttgcctttgagaccaaaccaagtgcttccaaattcttttggtgcaattgaggagatatgccagatgcttaaacacatttaattgctgtcagattaattccatgatcactaaagagttgctgcttttttcatatttatttttgtaaatgattctgtgcccaggagcagctgggggttccacctcagggtggggcgggcaggaccccgtctccccaggtgtcggagcctgacctgaattaaagtactgactgctcgccacaaa

SEQ ID NO: 74382 - DNA, 687 bp, Homo Sapiens
  misc_feature (52)..(52): n is a, c, g, or t
  misc_feature (229)..(288): n is a, c, g, or t
agcatttatcatgatactgctgaccagaagtgactgctgtgtagctgtaatntgtcatgtaattgaagactgagaaaatgttgggtccagtcgtgcttgattggaaattgttgtttctaaatctatatgagaattgacaataagtatttttattataactcagcccatacatatatactatgtatgcagtgcatctgcatagaacagttccttatccttggccttctgnnnnnnnnnnnnnnnnnnnnnnnnnnnnnnnnnnnnnnnnnnnnnnnnnnnnnnnnnnnngtaaacaaaaatcaaataatgcatatcagaatctttatatggaagaaatcctttattgcctttcctttgtttccttgtaaaggcaccctgttctgttatggtttttcattatataaaattattatatctatatatgacatatgctaaaatttcttggagagtgttaatcttttctgtgactaaatagcaataataagtggaaaattagaaattatttccaggtattatatttgtcacaggccattgtaaataccaagtatattgtgtctgccataatttttaaaaatacattcattgtcttcagtcatacagcaagacacatgagacatagattagaaaacatgttgtacaattttaatttacaactgttggaaataaaaatcacttaatttttttcca

SEQ ID NO: 74383 - DNA, 1175 bp, Homo Sapiens
cgagaaaggagatgtaatggatgttattgaaaaacctgaaaatgacccagagtggtggaaatgcaggaagatcaatggtatggttggtctagtaccaaaaaactatgttaccgttatgcagaataatccattaacttcaggtttggaaccatcacctccacagtgtgattacattaggccttcactcactggaaagtttgctggcaatccttggtattatggcaaagtcaccaggcatcaagcagaaatggcattaaatgaaagaggacatgaaggggatttcctcattcgtgatagtgaatcttcgccaaatgatttctcagtatcactaaaagcacaagggaaaaacaagcattttaaagtccaactaaaagagactgtctactgcattgggcagcgtaaattcagcaccatggaagaacttgtagaacattacaaaaaggcaccaatttttacaagtgaacaaggagaaaaattatatcttgtcaagcatttatcatgatactgctgaccagaagtgactgctgtgtagctgtaatttgtcatgtaattgaagactgagaaaatgttgggtccagtcgtgcttgattggaaattgttgtttctaaatctatatgagaattgacaataagtatttttattataactcagcccatacatatatactatgtatgcagtgcatctgcatagaacagttccttatccttggccttctgttttattgtttttttctttgctgttttccctttgcttctaatattacagttttgtattttgtaaacaaaaatcaaataatgcatatcagaatctttatatggaagaaatcctttattgcctttcctttgtttccttgtaaaggcaccctgttctgttatggtttttcattatataaaattattatatctatatatgacatatgctaaaatttcttggagagtgttaatcttttctgtgactaaatagcaataataagtggaaaattagaaattatttccaggtattatatttgtcacaggccattgtaaataccaagtatattgtgtctgccataatttttaaaaatacattcattgtcttcagtcatacagcaagacacatgagacatagattagaaaacatgttggacaattttaatttacaactgttggaaataaaaatcacttaattttttttcc

SEQ ID NO: 74384 - DNA, 1172 bp, Homo Sapiens
cagtcgacggtaccggacatatgcccgggaattcggccattacggccgggagacatggccggcgaaggaaatcagcaggacgctgcgcacaacatgggcaaccacctgccgctcctgcctgcagagagtgaggaagaagatgaaatggaagttgaagaccaggatagtaaagaagccaaaaaaccaaacatcataaattttgacaccagtctgccgacatcacatacatacctaggtgctgatatggaagaatttcatggcaggactttgcacgatgacgacagctgtcaggtgattccagttcttccacaagtgatgatgatcctgattcccggacagacattacctcttcagctttttcaccctcaagaagtcagtatggtgcggaatttaattcagaaagatagaacctttgctgttcttgcatacagcaatgtacaggaaagggaagcacagtttggaacaacagcagagatatatgcctatcgagaagaacaggattttggaattgagatagtgaaagtgaaagcaatgggaagacaaaggttcaaagtccttgagctaagaacacagtcagatggaatccagcaagctaaagtgcaaattcttcccgaatgtgtgttgccttcaaccagtgtctgcagttcaattagaaatcccctcaaaaagtgccagaaattttcgcttccaaacctgtctcacagagaagaccaatgttcatataaatggtggcagaaataccagaaaagaaagtttcattgtgcaaatctaacttcatggcctcgctggctggactccctatatgatgctggagacctttatggacagaatcaagaaaccgcctacctgaatgggatgaaaatctaaaagaggatcttcttccttcaaatccaataaatttttcttacaaaaaaacctggctggccttcccaatggatgaggaattgaaaaattcccctccctaaaaattgggaagggctatcccgccaacttcgccggggaattaaaccttatggaaacaaggcacttccctttggttgaaaaaatggtccggaaaaggaaaataccccccacaagggaaaattcccgtttatccttaatttggccgaatggcaactttattgtaaacccccttggaatttgggcatcgaacaccttactgggggaataag

SEQ ID NO: 74385 - DNA, 976 bp, Homo Sapiens
  misc_feature (51)..(51): n is a, c, g, or t
  misc_feature (228)..(228): n is a, c, g, or t
  misc_feature (236)..(236): n is a, c, g, or t
tgagtagcttttactcctctgagctttgtaacatgccttcctttagcattntaagatagttatagctgatagtgccccagagtacatcatgggatcccacgttgacatattggaaaagtttgcagatgaatcaagacctgaaatgagtcacctgtagtaggtggccctaaatcatgactagctctagaaaagaggggaatagacacacagagctgaagccatgggagnatggagcnagagattagagcaatgcatctatgagccaaagaaccctaagaattggaggaagtcactagaagctaggaaaacaggcatgtcacagattctccctcagagtctcgagaaggaaccaaccctaccaatatcttgatttcagacatctggcctccaggattgtgagggaataaatttctgttgttttaagccatgcagtttgtggtattttggtacagcagccttaagaatctgatacatgtatctcgtaaaacacctctgatacttacctgcgcttgtggctgtgttttctgatactatgagagccgtagtatctggataccggagagtctgcgaacttgagagaagggccgtgtctgattttccttcagtgtcccaaggaaggatcttgcacagtacccagatttggagaggtgccaagtgaatgcttcggtggactgaatgaatacaaatcaaaaataatgatgcagcgggaatggatgcagtaagattgctgtggcctatgcagttcacacagttcacactctgcatgttgaggagtaagtggacagatctcttaagcccaggggctagcaaaccggtctgtgggccaatttactcaccgtctgtttttgtacagcttgtgagctaaaaatggtttttaaaaaggttgaatacaatcaaaagaataatattttgtggcatgagaaaagcatatgaaattcaaattttagtgttcataaataaaattttattggaccct

SEQ ID NO: 74386 - DNA, 1439 bp, Homo Sapiens
cctataggggatcgaggcctggtgtcaaatcggcacgagggtgaggactgtgtcgcgctggaggagcccacagattctcccggacccacgtggaagcggcactcaagatgctgcgccgcgaggcccgcctgcgccgcgagtacctgtaccgcaaggcccgggaggaggcgcagcgctcagcccaggagaggaaggagcggctgcggcgcgcgctggaagaaaaccgcctgattcccactgagttacgccgagaggctctggccttacaggggtccctggagtttgatgatgctggaggtgaaggtgtgaccagccacgtggatgatgaataccgatgggcaggagtcgaggatcccaaggttatgatcactacctcccgagaccccagttcccgcctcaagatgtttgcaaaggagctgaagctggtgttcccgggcgcccagcgaatgaaccgaggtcgacatgaagtgggggcactggtgcgagcctgcaaagccaacggcgtcaccgatctgctggtcgttcacgagcatcggggcacacctgtggggctcatcgtcagccacctgccctttggtcctactgcctacttcacgctgtgcaatgtggtcatgcggcatgacatcccagacctgggcaccatgtcggaggccaagccccacctcatcacacacggcttctcctcccgcctgggcaagcgggtctctgacatcctccgatacctatttcccgtgcccaaagatgacagccaccgggtcatcaccttcgcaaaccaggacgactacatatcattccggcaccatgtgtataagaagacagaccaccgcaacgtggagctcactgaggtcgggccccgctttgagctgaagctgtacatgatccgtctgggcacgctggagcaggaggccacagcagacgtggagtggcgctggcacccttacaccaataccgcacgcaagagagtcttcctgagcaccgagtgagcacactcaccactcagtcaggacatggacttggaactcaggatggggctgtcatagacagacccaccagtaggaactgtcacagaatggcctgctgaactgggatgtggaactgtggcgggtggagaggtctgaataaaccgtctgtgtcatggccccgcctgcctttgagtggtcaggccaagtttgcagggcaaagcccatgggatccctttgggtggggacctgatggctgtgggacgtgcttgggcctggagtcagtgttggggtttaccaaaggaagagatttgatgctaacgtcccctcaagagtgagggtcatatgagctcttcagcaggcaaatgtgggtagcagggccagcctgtgtcaggggcagcccaccaagttaactcactgagtggaagccgccagtgtgccaacgcggaggggacaggccacacccagtgctcagcagct

SEQ ID NO: 74387 - DNA, 1032 bp, Homo Sapiens
tacaccgaaacatcatagcgctaggtacgaggcctgggtgtgaattcggcacgagggcggcactcaagatgctgcgccgcgaggccctgcctgcgccgcgagtacctgtacctgcaaggcccgggaggaggcgcagcgctcagcccaggagaggaaggagcggctgcggcgcgcgctggaagaaaaccgcctgattcccactgagttacgccgagaggctctggccttacaggggtccctggagtttgatgatgctggaggtgaaggtgtgaccagccacgtggatgatgaataccgatgggcaggagtcgaggatcccaaggttatgatcactacctcccgagaccccagttcccgcctcaagatgtttgcaaaggagctgaagctggtgttcccgggcgcccagcgaatgaaccgaggtcgacatgaagtgggggcactgtgtgcgagcctgcaaagccaacggcgtcaccgatctgctggtcgttcacgagcatcggggcacacctgtggggctcatcgtcagccacctgcccattaggtcctactgcctacttcacgctgtgcaatgtggtcatgcggcatgacatcccaagacctgggccaccatgtccggaggccaagccccacctcatcacaccacggctactcctcccgactgggcaagcgggtctcagacatcctccgatacctatatcccgtgcccaaagatgacagccaccgggtcatcaccttcgcaaagcagggacgactacgtatcattccggcaccatgtgaattacgaagacagaccaccggaacgtggaggccacctgacgggccgggcccggtatgactgaagctgtacatgaaccggccatgggacccacatggagccggaaggccacagccaacacttgccagatgcgcatggaccccgattaaccaataccgacgcgcacagagagatttctagagcacccaggctgacagcacttcacgcccgcgcgagcaagtccgcctgacctcaaagtggacgctagtcatacacga

SEQ ID NO: 74388 - DNA, 788 bp, Homo Sapiens
  misc_feature (21)..(21): n is a, c, g, or t
aaaatgatgcaacatagcgtngcaaacaaaatcagcactatatttcttaatgatctaaagattaatttgagagaacacagttttcttaaatattataatgtctagagtttttttaggacagtcttagcaagtatgattgttctagtcttacttgctctaatgtttaaaggtgcaattttatgccattattgaaattgatttttaaaatctatataccatatgattaacatgcattttcaatatgaggcagtgtttatgcagtatttaacagagcaatctgctgccaatagagtttggaggtggatatttagtttacagtgtataaacttaaaatatgcatccctttaacaacgctttgtgttagcatgctgcaaatcaaaatggcacttaatattaaaagctggtttagggaaattttatgaaaatcctgttcataaatgtaatgcatatgatatgtacttttaagttttagttgcttcatgtttacattcagctgttcaacataattaaaatgtaattttacttcatgctatattgtggctttgtgtttcaaataatgttcacctttctgtttttgcaccagataagaatcagttccttgagaataaattttttatctttcttaacttcagaatattaaatttggaatatctactaaaattgtgtgttatgtggctgtaaatgatgtacacgctgtaaaataagatcgctactgttatgtgggattattatttctaaatgttactcattgaaatgagcatacaataaaaagcatttattgcaaaaaa

SEQ ID NO: 74389 - DNA, 758 bp, Homo Sapiens
  misc_feature (74)..(74): n is a, c, g, or t
ctcaagctctgtggcatggagaagaggaaaaagagatcccttctccagtgaagaggaagaagaagatgtgcctntggactcagatgtggaacaggccctgcagacctgtgccaagacctcaggcaccatgaataactacccaacatggcgtcggactctgctgcgccgtgcgaaggaggaggagatgaagaggttctgcaaggcccagaccatccaacggcgactaaatgagattgaggctgccttgagggagctagaggccgagggcgtgaagctggagctggccttgaggcgccagagcagttccccagaacagcaaaagaaactatgggtaggacagctgctacagctcgttgacaagaaaaacagcctggtggctgaggaggccgagctcatgatcacggtgcaggaattgaatctggaggagaaacagtggcagctggaccaggagctacgaggctacatgaaccgggaagaaaacctaaagacagctgctgatcggcaggctgaggaccaggtcctgaggaagctggtggatttggtcaaccagagagatgccctcatccgcttccaggaggagcgcaggctcagcgagctggccttggggacaggggcccagggctagacgagggtgggccgtctgctttcgttcccacaaagaaagcacctcaccccagcacagtgccacccctgttcatctgggctgcctggcagagagccttgctgtttacaattaaaatgtttctgccacaaaaaaa

SEQ ID NO: 74390 - DNA, 1536 bp, Homo Sapiens
  misc_feature (970)..(994): n is a, c, g, or t
aaattcggctaggtacgaggctggggttgaactcggcacgaggcacacacgctgctgtatctccctgtggcagatttgtagcctcgtgtggcttcaccccagatgtgaaggtttgggaagtctgctttggaaagaagggggagttccaggaggtggtgcgagccttcgaactaaagggccactccgcggctgtgcactcgtttgctttctccaacgactcacggaggatggcttctgtctccaaggatggtacatggaaactgtgggacacagatgtggaatacaagaagaagcaggacccctacttgctgaagacaggccgctttgaagaggcggccgggtgccgcgccgtgccgcctggccctctcccccaacgcccaggtcttggccttggccagtggcagtagtattcatctctacaatacccggcggggcgagaaggaggagtgctttgagcgggtccatggcgagtgtatcgccaacttgtcctttgacatcactggccgctttctggcctcctgtggggaccgggcggtgcggctgtttcacaacactcctggccaccgagccatggtggaggagatgcagggccacctgaagcgggctccaacgagagcacccgccagaggctgcagcagcagctgacccaggcccaagagaccctgaaagagcctgggtgccctgaagaagtgactctgggagggcccggcgcagaggattgaggaggagggatctggcctcctccatggcactgctgccatctttcctcccaggtggaagccttccagaaggagtctcctggttttcttactggtggccctgcttcttcccatttgaaaccactcttgtctacttaggtctctctcttcttgctggctgtgactcctccctgactagtggccaaggtcttttcttcctcccaggcccagtgggtggaatctgtccccacctggcactgaggagaatggtnnnnnnnnnnnnnnnnnnnnnnnnnatgtgatttttggccttgtggcagcacatcctcacacccaaagaagtttgtaaatgttccagaacaacctagagaacacctgagtactaagcagcagttttgcaaggatgggagactgggatagcttcccatcacagaactgtgttccatcaaaaagacactaagggatttccttctgggcctcagttctatttgtaagatggagaataatcctctctgtgaactccttgcaaagatgatatgaggctaagagaatatcaagtccccaggtctggaagaaaagtagaaaagagtagtactattgtccaatgtcatgaaagtggtaaaagtgggaaccagtgtgctttgaaaccaaattagaaacacattccttgggaaggcaaagttttctgggacttgatcatacattttatatggttgggacttctctcttcgggagatgatatcttgtttaaggagacctcttttcagttcatcaagttcatcagatatttgagtgcccactctgtgcccaaataaatatgagctggggattaaatacg

SEQ ID NO: 74391 - DNA, 834 bp, Homo Sapiens
ggcagtggttccaccaacatggagctctcgcagatgtcggagctcatggggctgtcggtgttgcttgggctgctggccctgatggcgacggcggcggtagcgcgggggtggctgcgcgcgggggaggagaggagcggccggcccgcctgccaaaaagcaaatggatttccacctgacaaatcttcgggatccaagaagcagaaacaatatcagcggattcggaaggagaagcctcaacaacacaacttcacccaccgcctcctggctgcagctctgaagagccacagcgggaacatatcttgcatggactttagcagcaatggcaaatacctggctacctgtgcagatgatcgcaccatccgcatctggagcaccaaggacttcctgcagcgagagcaccgcagcatgagagccaacgtggagctggaccacgccaccctggtgcgcttcagccctgactgcagagccttcatcgtctggctggccaacggggacaccctccgtgtcttcaagatgaccaagcgggaggatgggggctacaccttcacagccaccccagaggacttccctaaaaagcacaaggcgcctgtcatcgacattggcattgctaacacagggaagtttatcatgactgcctccagtgacaccactgtcctcatctggagcctgaagggtcaagtgctgtctaccatcaacaccaaccagatgaacaacacacacgctgctgtatctccctgtggcagatttgtagcctcgtgtggcttcaccccagatgtgaaaggtttgggaagtctgcctttggaaaggaagggggagttccagggagggtggggc

SEQ ID NO: 74392 - DNA, 1458 bp, Homo Sapiens
  misc_feature (707)..(709): n is a, c, g, or t
  misc_feature (711)..(816): n is a, c, g, or t
  misc_feature (827)..(827): n is a, c, g, or t
  misc_feature (834)..(834): n is a, c, g, or t
  misc_feature (844)..(846): n is a, c, g, or t
  misc_feature (861)..(935): n is a, c, g, or t
  misc_feature (1075)..(1085): n is a, c, g, or t
  misc_feature (1257)..(1269): n is a, c, g, or t
tttaaaggactacagattatttttaatgactaaattggagtgatacttcttacactaaaaattatttcttaggcattctgaatctgggatgagaaacaggattgtttcacaatagtaagcacataatttttaaggccaaggcacatttgactcctgagatgaattttttgtggtcataatcaaatacttagttgtttttgatgccccaaaataaagtgagaatggtaatttgccaggaattcttcataacagtatcttacaaaaaacgtgttgctctcttcacagtattatgtgtaaagtcattgtttaaagcacgaatgttccctctggggtacttgttaaagctaaatttattttgcttccctccacttagaagtgctgcacactttacagcagcttcctttctttccatggcactgcctagttaacagaagtcttataaaaatttaaaaagacacatttcttacaaaaaagagttgaatgaggtaaaatggcattagatggctctatattttttaaagctatgtaattgttcagcgtcacttttctaagtacttatacatatctaaacatgtcttcatggtttatattttcacttatatatgctgggctggattaagctttgttgtgattgtgaccaacattcaggccacgtgagcactgtcttatcacatcgccaattagttgtaataaacgttcaacgtacnnnannnnnnnnnnnnnnnnnnnnnnnnnnnnnnnnnnnnnnnnnnnnnnnnnnnnnnnnnnnnnnnnnnnnnnnnnnnnnnnnnnnnnnnnnnnnnnnnnnnnnnnnnngggggccacgnggagganaaaggagaannnaggccagggagcaannnnnnnnnnnnnnnnnnnnnnnnnnnnnnnnnnnnnnnnnnnnnnnnnnnnnnnnnnnnnnnnnnnnnnnnnnnaaaaaacagtaatcccaaaaatcggggtcgggggcggccggcgcgcctgaaaggagggggacgcggcgggtttacccgccttctccccaaaaaacacacacggccccccaaacaagcggggggttcctctctccccgacnnnnnnnnnnnccgggcccgccggggccccacacggcttgtaaaacaaaaacaacccacagcgggggtgtttgttgagcctatttttttccgctctttacaccacgggggcacaccccccgcagtggctctacaaaaaacaataacccccgcccccgcccgccgtcttatctttacctaggcnnnnnnnnnnnnnaaaaccctccacaaaaaaccgccgccgccgccggaggggaggcgcccgcacccaaaacccgggggggccctcgcatttagccgcacactgcgagggagcaagaccccaccccctcttattctcttactctccgcgccgagataataaataatattctcccgcccctcagtgacaaaacaacgggcgccg

SEQ ID NO: 74393 - DNA, 655 bp, Homo Sapiens
  misc_feature (44)..(57): n is a, c, g, or t
ctcaggaaaacagagctgttgtatcataaagcttttcagggggnnnnnnnnnnnnnntgttcatcacaaatctattgtgcttgttataatctaacaaagtccactaaatgtagtaacgaaatgtctccccaataaaaaattaagattccctttggagcttaggcatgtggccttataaagagcttaactggactgctacctgttggtatgttcagggcttcattaggttcatgcttaagtataatgcctgtgcctcacagaacaatttaaatttagcttaacaccccacccatacttaaagagcaaataaattatatttcgaaaagattttaaaataatctcaatataaaaaccaacagtgggaactgagtctggaataaatgtgtgcagaatcctaattcttttctgagctccactcagtgaggatatgcaccctctactgtccagcctgtggtttgcagtaagctcactcttctgttcagaatgaccacaggagggcctttacctaggaatagcaggaaaagctaagtaagtactcaaacttccctcccagtaagcatgaattgcttcagatgtaaagcttacatgtgatgagtaatactataatatcatacattaatatatcctaataaactttaattttcaaacaaaaaaa

SEQ ID NO: 74394 - DNA, 765 bp, Homo Sapiens
  misc_feature (645)..(645): n is a, c, g, or t
gcttgcggccgcagggcagcccaccccgcccacgtcgccggagccgccgcgcagcagccccaggcagacccccgcgcccggccccgcccgggagaagagcgccggcaagaggggcccggaccgcggcagccccgagtaccggcagcggcgcgagcgcaacaacatcgccgtgcgcaagagccgcgacaaggccaagcggcgcaaccaggagatgcagcagaagttggtggagctgtcggctgagaacgagaagctgcaccagcgcgtggagcagctcacgcgggacctggccggcctccggcagttcttcaagcagctgcccagcccgcccttcctgccggccgccgggacagcagactgccggtaacgcgcggccggggcgggagagactcagcaacgacccatacctcagacccgacggcccggagcggagcgcgccctgccctggcgcagccagagccgccgggtgcccgctgcagtttcttgggacataggagcgcaaagaagctacagcctggacttaccaccactaaactgcgagagaagctaaacgtgtttattttcccttaaattatttttgtaatggtagctttttctacatcttactcctgttgatgcagctaaggtacatttgtaaaaagaaangaaaccagacttttcagacaaaccctttgtattgtagataagaggaaaagactgagcatgctcacttttttatattaatttttacagtatttgtaagaataaagcagcatttgaaatcgc

SEQ ID NO: 74395 - DNA, 862 bp, Homo Sapiens
  misc_feature (42)..(81): n is a, c, g, or t
  misc_feature (85)..(119): n is a, c, g, or t
agactgtatcgactcactatagggcgctaggcggttgtagtnnnnnnnnnnnnnnnnnnnnnnnnnnnnnnnnnnnnnnnnccgnnnnnnnnnnnnnnnnnnnnnnnnnnnnnnnnnnncagtcgacggtaccggacatatgcccgggaattcggccattacggccgggggtgacagcctcgcttggacgcagagcccggcccgacgccgccatgagcgccgcgctcttcagcctggacggcccggcgcgcggcgcgccctggcctgcggagcctgcgcccttctacgaaccgggccgggcgggcaagccgggccgcggggccgagccagggccctaggcgagccaggcgccgccgcccccgccatgtacgacgacgagagcgccatcgacttcagcgcctacatcgactccatggccgccgtgcccaccctggagctgtgccacgacgagctcttcgccgacctcttcaacagcaatcacaaggcgggcggcgcggggcccctggagcttcttcccggcggccccgcgcgccccttgggcccgggccctgccgctccccgcctgctcaagcgcgagcccgactggggcgacggcgacgcgcccggctcgctgttgcccgcgcaggtggccgcgtgcgcacagaaccgtgggtgagcttggcgggccgcagggcaaggccacaacccggacgcacgtcgcggggagcacagtccgcgcaagaaggcacccaaggcaagaccacacgggagcccgggcccacgccacgggagaaagagcgccgggcaagagggggcccgggaccggggaatgccgcgagtacgggaaggggagagagaggaaaaacagtggacgtgcgcaaga

SEQ ID NO: 74396 - DNA, 1326 bp, Homo Sapiens
  misc_feature (687)..(696): n is a, c, g, or t
  misc_feature (763)..(796): n is a, c, g, or t
  misc_feature (1103)..(1150): n is a, c, g, or t
cagtcgacggtaccggacatatgcccgggaattcggccattacggccgggggagtccggcccggaagagtccggcccggaggaactgggcgccgaggaggagatggaggccgggcggccgcggcccgtgctgcgctcggtgaactcgcgcgagccctcccaggtcatcttctgcaatcgcagtccgcgcgtcgtgctgcccgtatggctcaacttcgacggcgagccgcagccctacccaacgctgccgcctggcacgggccgccgcatccacagctaccgagtcctcatgactccagtgggccagttctgcgtagtccctgccctcgtggagaacacattcctcctggggagactgacagatgcaaagacaggaacaagccagggtcatgttggcgccggaagagccgaccgtgtgtggcgtgggaaattgacttacctgcctgctgggagatggaggggttgcggttgtgtgggccaccgtgcctggctgattcagcatttttaatcaggcaggaccaggtggcacttccacctccagcctctggtcctaccaatggattcatggagtagcctggactgtttcatagttttctaaatgtacaaattcttataggctagacttagattcattaactcaaaattcaattgcttctatcagaactcaagtattttgtaactaatagannnnnnnnnnccactttggttctactccttccctaatagctttttaaaaaaatctccccagtagagaaacatttggnnnnnnnnnnnnnnnnnnnnnnnnnnnnnnnnnntccctattagatacacttcttaaatacaatcacattaacatttggagctatttccttccagcctttttagggcagatttgggtggtttttacatagttgagattgtactgttcatacagttttataccctttttcatttaactttataacttaaatattgctctatgttagtataagcttttcacaaacattagtatagtctcccttttataattaatgttggtgggtatttctgggcatgcatctttaattccttatcctagcctttgggcacaattcctgtgctcaaaaatgagagtgacggctnnnnnnnnnnnnnnnnnnnnnnnnnnnnnnnnnnnnnnnnnnnnnnnntaagaggatggcttgagcccagaacttcaagatgagcctgggctcatagtgaagaacccatctatacaaaaaatttctaaaaattagcatgggggacacatctgtaatcctagtactggcaggctgaggggaaagatcctgggggttaggaaatgggggtgcgggagccctgattc

SEQ ID NO: 74397 - DNA, 742 bp, Homo Sapiens
gggcccgcgtccgacccgcggatcccgcggcgtccggcccgggtggtctggatcgcggagggaatgccccggagggcggagaactgggacgaggccgaggtaggcgcggaggaggcaggcgtcgaagagtacggccctgaagaagacggcggggaggagtcgggcgccgaggagtccggcccggaagagtccggcccggaggaactgggcgccgaggaggagatggaggccgggcggccgcggcccgtgctgcgctcggtgaactcgcgcgagccctcccaggtcatcttctgcaatcgcagtccgcgcgtcgtgctgcccgtatggctcaacttcgacggcgagccgcagccctacccaacgctgccgcctggcacgggccgccgcatctacagctaccgagtgtatactctgaaagagcgatgcctcccagttgtccggagcctaatcaagcctgagaattacaggagactggacatcgtcaggtcgctctacgaagatctggaaagaccacccaaaatgtgcagaaaagaccttggagcgggctgacacaggagcgcattgcacattcaaccggatggggaagattgaagatttcctgttgaaaatttacactgttttcctctccactttttgatggtaccggatgagtccttgtgatctaaaaacagaactggttcccttcccttaagttccaaaagggtctccattcctcagaataaaaataggcccccattgcttt

SEQ ID NO: 74398 - DNA, 1706 bp, Homo Sapiens
cagtcgacggtaccggacatatgcccgggaattcggccattacggccggggtagacctaaataaaaagttctcaatagattcctcttttgagtaaatataagacctcttgtagctacaatgttttagagcatgtttcatcttcatttttaatatcctgaactgaatgatagtgtttttttagatgaagaactgatgtcagcctgccaggtactgtaatttattctatcatattattatattatatatcaagtaggacagtgaaaaatgtttccttgcaaacttgtagtccagtatcagttacttcctatttttatccttaaaagaccattgcaaatcagtgtaacgggtttttccagtaattactcacagcactttgttaaagtttgcaatttcttcagccatttaataatatctttctgtgaagaaactttgctgagttaaccataaatgttcattcattgcactgggtcgggatgtgaatggcaatgttcagaaatgttgtgtgaattgaagttctgtattcattcatagatgtagcccttatttaaaacaagtgaattccatactaaaactaggaactgaaagtgagagatttctaaacttttgcgacaagtgggtcatctctcgtttgactataatagcaggaagaattatagcaatctgtcattttacctgaaacagacaagcctatgtattatgaatactttcaagcttccctttggaatatacaagacatgcgtttggagttacctttgtttttctatcgtaaatttagattctggaattggggtttggtggtgcaatgtgttgctcacaagtggccagaactcctattcctaaaaggattttgagatggaggaacacatatttaattcccctttatgccttggttcttgctcctctttccacgttggataacaattttttggttgttttgtttaagttggtgctctgaagcttaatctcagtaccctttactctgaattgtcaaattttgataaaacgtgccattttctttggtaagagaaagcaggtcttaatgtctgccagaacacaatttatatgccttattggcttcattaaacttttagaaaactttagcatttgttacttttttccattgcatttactttcaaatgcacctaatgaatttgtcacccagtcgcaacttttcccttctctgtcccattgctttctcctttccccgacgcacagaataaacatgaagctcagcagtagaagcgtaatgatttccctcaggaaaaacttctgacagctaggtttttcaagggtttccctgtgctagctgagatgcaaaacaaatcatggaagattgcatacctgtgtggtattttaaaaacaagttgactttttcagtttcttgaacggttaagggtggatttaaaaactagacagtttagttttggggaacagaagctctcttcgtcttaagccagattctctgattcttttagacgtcatagctccttagttctgctcctgtcgccctaacttggcatgggcaagttgaagttcatccttagactgcagcgttctgagcatggctgaagtattaaaatgtttcatattttttagagcaaaattgatggaaagcatttggctgaatctaaagacctgcagtcagattcttcaatgtggtttacccaactggagtagtgataaacaccttaatcataaaatgaat

SEQ ID NO: 74399 - DNA, 1621 bp, Homo Sapiens
ggtagattaactagcaggcctattttaaaaaggtaattcagctaaagggcaatttacttttttgtacttcagactatcttgattgtcaaagtgtacgaactgtaattttaaaatttatactgccacatgattgtaaattttagttgtcttaagttaggaattggtgaaaagctatttatgctggatttgggtcaaaatgacttatttgcaaaaaaataaataatgggaagaaagggctgtataatgaaatactgcaagactcacatattggttggaaatttccctcaaatcacctaccgattacccttgatttccctttgttttcagtttctcaaaacgaatgaaatgaaatatagcagaatgttaacccatataaaaataaagtgtacccaaatattgtaatgtatattgctgctcttcttcaaattaaataagggtttaaaaccacttaattggtaatcaacatctcaattgatacaaataaggtgtgcttggtatacattaatattttcttccaaagatatatctttggttagaaacacaaaaaaataaaactagtaatattgtatgtttatctatctctacatatttccagcatatgtagcgttaatagatctgtcctggtaactgtgtctttgggatttcattttggttccatcaaattaggaaaagaaatggcttagttgtatatgattagctagagattttggagccagacacctgctgtttagtagataacttagtacagaccctaaacttgtcatttgtttttctcacagaatagccatttcctgctgtcttcccaatgatcactgccctttcaataacactcttgcctctagaatcatatgttcaaagtatgaatacacacctagcacatagtaggtgctcaaatattaatttcctccttgccttccttatctaccctgtgtcctccatttccccgtatgattccaacccaatatagcaaatgacatttacatgttatgaaaacatctattgggtaaaatcagatcttggataaagaaattctgacttttatataagcttttggtagacagaaaaaacagaaaggtattcgttggtagaacatttttaagttcaggaaagaaagctggaataatactacgtaactttgtccaggttactttgactgaaacacgtttttggtggatttcttttcctcaaagaactctctaaatgcaactccttgctggattcctcacccatcatcctgttggaaacccttactagacctatgtatttagggagttttgtcagaaaacatttttaacttgcagtatttaaaagaatatttactgttcctaaaatgtcattcaaatgcatgtactgtctattgtttggggatgggaactagttttgcaaaaaacacctaatgttgtataataatgccccaatgatcttgctggttaaaaatacagtatttttggccataattttgtactatagtattcttcattgttgagttttgcttccattaaagttgcccgagcccctctcagaatgttttgtattagtaggagtactgaaatacatctttccttccttaacacaccttgtgcatattgcattttccaaaataaacaagtttaatggtttc

SEQ ID NO: 74400 - DNA, 531 bp, Homo Sapiens
gggcggccgcgctgctgcaggaacggcggtacctgcgtgctgggcagcttctgcgtgtgcccggcccacttcaccggccgctactgcgagcatgaccagaggcgcagtgaatgcggcgccctggagcacggagcctggaccctccgcgcctgccacctctgcaggtgcatcttcggggccctgcactgcctccccctccagacgcctgaccgctgtgacccgaaagacttcctggcctcccacgctcacgggccgagcgccgggggcgcgcccagcctgctactcttgctgccctgcgcactcctgcaccgcctcctgcgcccggatgcgcccgcgcaccctcggtccctggtcccttccgtcctccagcgggagcggcgcccctgcggaaggccgggacttgggcatcgcctttaattttctatgttgtaaataatagatgtgtttagtttaccgtaagctgaagcactgggtgaatatttttattgggtaataaatattttcatgaaagcgcctttggctccagatcct

SEQ ID NO: 74401 - DNA, 687 bp, Homo Sapiens
acggaagcgagctgatttatatactatagcactgttttaaatcgggtctatgtgccccatcgctcaatgacctggagcgggactccctgaaaggtcacgggccaaatgaaaaagacggaagggctgttcttcgttccccctttaaacacagtactgtaattctccttcagctctccgagttctacaaacatttagaggcttccctctgtgcagccggccgggactggcctccgcacacctcaccctgcagcgcgtcccagggacagagcctagtgagggcgcaggagaaaagggcctgcagaaggcagggagcaggcgtttctattgcactctctcaaaccgagccggaacactttatttcatacatctccggtttctctgtttttccagacccgaaagacttcctggcctcccacgctcacgggccgagcgccgggggcgcgcccagcctgctactcttgctgccctgcgcactcctgcaccgcctcctgcgcccggatgcgcccgcgcaccctcggtccctggtcccttccgtcctccagcgggagcggcgcccctgcggaaggccgggacttgggcatcgcctttaattttctatgttgtaaataatagatgtgtttagtttaccgtaagctgaagcactgggtgaatatttttattgggtaataaatattttcatgaaagcgc

SEQ ID NO: 74402 - DNA, 745 bp, Homo Sapiens
cagtcgacggtaccggacatatgcccgggaattcggccattacggccgggggcttccgtttctggttttgctctagtgtttgggtttcttcgcggctgctcaagatgaaccgactcttcgggaaagcgaaacccaaggctccgccgcccagcctgactgactgcattggcacggtggacagtagagcagaatccattgacaagaagatttctcgattggatgctgagctagtgaagtataaggatcagatcaagaagatgagagagggtcctgcaaagaatatggtcaagcagaaagccttgcgagttttaaagcaaaagaggatgtatgagcagcagcgggacaatcttgcccaacagtcattcaacatggaacaagccaattataccatccagtctttgaaggacaccaagaccacggttgatgctatgaaactgggagtaaaggaaatgaagaaggcatacaagcaagtgaagatcgaccagattgaggatttacaagaccagctagaggatatgatggaagatgcaaatgaaatccaagaagcactgagtcgcagttatggcaccccagaactggatgaagatgatttagaagcagagttggatgcactaggtgatgagcttctggctgatgaagacagttcttattccggatgaggcagcatctgcacctgcaattccagaaggtgttcccactgatacaaaaaacaggatggagttctggtggatgaatttggattgcg

SEQ ID NO: 74403 - DNA, 2364 bp, Homo Sapiens
  misc_feature (43)..(81): n is a, c, g, or t
  misc_feature (84)..(118): n is a, c, g, or t
  misc_feature (1563)..(1573): n is a, c, g, or t
  misc_feature (1728)..(1737): n is a, c, g, or t
aaagatgtatagaattactatagggcgctagctcggtcgaggnnnnnnnnnnnnnnnnnnnnnnnnnnnnnnnnnnnnnnncgnnnnnnnnnnnnnnnnnnnnnnnnnnnnnnnnnnncagtcgacggtaccggacatatgcccgggaattcggccattacggccggggagtgtttgggtttcttcgcggctgctcaagatgaaccgactcttcgggaaagcgaaacccaaggctccgccgcccagcctgactgactgcattggcacggtggacagtagagcagaatccattgacaagaagatttctcgattggatgctgagctagtgaagtataaggatcagatcaagaagatgagagagggtcctgcaaagaatatggtcaagcagaaagccttgcgagttttaaagcaaaagaggatgtatgagcagcagcgggacaatcttgcccaacagtcattcaacatggaacaagccaattataccatccagtctttgaaggacaccaagaccacggttgatgctatgaaactgggagtaaaggaaatgaagaaggcatacaagcaagtgaagatcgaccagattgaggatttacaagaccagctagaggatatgatggaagatgcaaatgaaatccaagaagcactgagtcgcagttatggcaccccagaactggatgaagatgatttagaagcagagttggatgcactaggtgatgagcttctggctgatgaagacagttcttatttggatgaggcagcatctgcacctgcaattccagaaggtgttcccactgatacaaaaaacaaggatggagttctggtggatgaatttggattgccacagatccctgcttcatagatttgcatcattcaagcatatcttgtaaaacaaacacatattatgggactaggaaatatttatctttccaaatttgccataacagatttaggtttctttcctttctttgaaggaaagtttaattacattgctcttttattttttccattaagagactcattgcttgggaaatgctttcttcgtactaaaatttgattcctttttttcttatgaaaaacgaactcagtttaaaagtatttttagctcgtatgacttgttttcattcattaataataatttgaaataaaactaaggaaatggaatcttaaaagtctatgacagtgtaactctacagtctcaaaatgacctgataaattgataagacaaagatgagattattggggctgttcatattatgattcagaatcattttctattgtggtattataggttggttaaagtgatggcctttttgatgggttttgttgtgtcttgtgaacaagtcgttactgtgtccattattggaatggaattatcactactgtatcatgagtgggtattttgattctatggttccctcagtattacatcttgacttgtaatcaattatgaatatttcttgatatttaatgtataggacatttatttatactcaataaatatttttcaaaaggaaacatctacatccccccaatcccacaatatatctccagaaaattccccgnnnnnnnnnnngataacaccaaaacctttgtcggccgccttcggcctcaaaaaactttttaaaaccttcccttgggcgggcggccccattggtaaaggaaattgggcattatcttgttctcataggaacacccggattcagcacaagcggctgtgattccccaccnnnnnnnnnncccctccgtggtcgaaccccacgcgttctagaacaaccccaagaagggacttttttgaaggcccttttttggggaccttattcaccggggagtccaaacccggatgtcccaatatcccatattaacgtcctggcatcttggcccctctattttccaccgcaccggggggggaatttttcttaacaacatttctctcggccctacaattgggtagagcctccctcccccaaaccgcgggtatttggaaggaacaccctcggtacttctcccccaaatgggtttttcttccggaaccctccctttgtccccctctgtgggagaataaaaaattatcgcccccaccacgggggggaaacaaaccggcgtggcgcccacaatgaattttcgctcccctctatttcggcccccccgattctcttatatcccaacaatgtgtggtgcgaccactcttctcaccttatgggcactttgcgcctttaaaaccctaaacacacatattctttcttcctatccacaacccctctccccggggaatacccccgccgccccccgcttctttccccggtggaacccaccccaccgtctgtgggaggaaaaaagaaagcggggtatcgcacacccgccgcc

SEQ ID NO: 74404 - DNA, 1116 bp, Homo Sapiens
tttttctctcctatcccttgttactttagcatacttgaactcacataaatgcttctttggattacatgggctatctgattccattttggatctgattgtccatcttgaattcaatatggtattcatctggactattcaaaaattatgccatttctagtctgtgaaataagatgtaaaaaatctttatttttgccctttggtaaaaacctatgtgacaacttttaaaatgtgaagcaacatctaatatagttgactggtatactaataggaaagtgaaagtatttcatgggtactttgtcacagaatgtgaaaagaaacttggcatagtggcctttataatgaggcatccacttactcctctgaagtgaagtctgtagcttagcttgtgtatagtttttgaaagaaatctcatgatcttcgttcattctcttgccttctcttttatctcatatggcacaagtagagggggaagccaggaggaaattcatcaccttgctatgcttttatttgatttttaattcctgagtgcctaaatgtggtgaccggcacctcacataactttttgagattcttgatgtcatttttatccttcctgtcaaccagcaatgtatttttatgttactaaaaccagtaacgtcataattgttgagggcaagcttcattgttgatagtgcaaagtgtcgctgttgtgatgtgtgtttattttattcaagtttgaatattgacaagtgtaacttaagctggtgactgacacctattgatctgctgtgtgcaaatgatagtactattttttagaaaactcttaagtaaattttaaaaatatttgaatacaaaatatctgagcaattttgaactcaaaagtttttcattgttttaaggattgccacaggactctttaatggtttttaatggacatacatgcctaatatttattggtgtgtttaaaatattttttgatagagtgttatgtcttaagcgcattagaaaacaattgtttgtaatggaatcaaagtgtttccctggacagtttgatgtgcttatggttgagatttataatctgcttgtactttgctttttaacttattaactgtaaataaattttagagaatacataaa

SEQ ID NO: 74405 - DNA, 1131 bp, Homo Sapiens
  misc_feature (193)..(513): n is a, c, g, or t
  misc_feature (531)..(601): n is a, c, g, or t
cagggaaacctggttcttttgccttcggtttccccctctgattgaggtgatttttggtctctcaggggcgagctatggaaaacgccccaaccgccttttacgttcttgcctttgtggccttgtgtcacatgtcttcctgcgtatcccctgatctgtggatacctataaccgctctgagttagtgtaccggtcnnnnnnnnnnnnnnnnnnnnnnnnnnnnnnnnnnnnnnnnnnnnnnnnnnnnnnnnnnnnnnnnnnnnnnnnnnnnnnnnnnnnnnnnnnnnnnnnnnnnnnnnnnnnnnnnnnnnnnnnnnnnnnnnnnnnnnnnnnnnnnnnnnnnnnnnnnnnnnnnnnnnnnnnnnnnnnnnnnnnnnnnnnnnnnnnnnnnnnnnnnnnnnnnnnnnnnnnnnnnnnnnnnnnnnnnnnnnnnnnnnnnnnnnnnnnnnnnnnnnnnnnnnnnnnnnnnnnnnnnnnnnnnnnnnnnnnnnnnnnnnnnnnnnnnnnnnnnnnnnnaagaattcggcacgaggnnnnnnnnnnnnnnnnnnnnnnnnnnnnnnnnnnnnnnnnnnnnnnnnnnnnnnnnnnnnnnnnnnnnnnnctggtagacagtacacttgggaattatactgcaccaggcataaagagtaagttttctaccacagggacattttgtattcagaattcaatataaatatttctagtcagacatttccatggctacagatatttggttccttgatttatatgcatagaaagaaacagttgtcataactgtaaaaagcagtacttaataagtacttttaaatgattggaacagttttcctttaatattacaatactacttatttattggtttggaaactaggtcaccctacatgatgttttgatttttctcaaaggcatcatgagtactctgcttattctttcattcttgtatttttagccttctagttgagttagggaccattttatcagaaatcattttagcactgtaataagaaaagctctgttaagggtagattatataccataatgattttcagacttctttttataaaaaaggtatctggagactctgaacaggcacatgcatactcagggggaagggaacaaaacatggcctcgtgc

SEQ ID NO: 74406 - DNA, 1672 bp, Homo Sapiens
tttgctaggtgctagagatacaaaaaataaaaactgttcttgctgataaaaaattcagaaattagaacaaagttttaagagtatgttttaaatattccagaaaagtcacatatttggtgtttaaataggaattcataccagggacaaagcagaaaatggattttcatgtgttgcttaaatgtactattttcctttccatttgaaataatagaccttgaagctgatgatgttaagggcagtgtaccactgtcttcaagccctcctgctacacatttcccagatgaaactgaaattacaaacccagttcctaaaaagaatgtgacagtgaagaagacagcagcaaaaagtcagtcttccacctccactaccggtgccaaaaaaagggctgccccaaaaggaactaaaagggatccagctttgaattctggtgtctctcaaaagcctgatcctgccaaaaccaagaatcgccgcaaaaggaagccatccacttctgatgattctgactctaattttgagaaaattgtttcgaaagcagtcacaagcaagaaatccaagggggagagtgatgacttccatatggactttgactcagctgtggctcctcgggcaaaatctgtacgggcaaagaaacctataaagtacctggaagagtcagatgaagatgatctgttttaaaatgtgaggcgattattttaagtaattatcttaccaagcccaagactggttttaaagttacctgaagctcttaacttcctcccctctgaatttagtttgggggaaggtgtttttagtacaagacatcaaagtgaagtaaagcccaagtgttctttagctttttataatactgtctaaatagtgaccatctcatgggcattgttttcttctctgctttgtctgtgttttgagtctgctttcttttgtctttaaaacctgatttttaagttcttctgaactgtagaaatagctatctgatcacttcagcgtaaagcagtgtgtttattaaccatccactaagctaaaactagagcagtttgatttaaaagtgtcactcttcctccttttctactttcagtagatatgagatagagcataattatctgttttatcttagttttatacataatttaccatcagatagaactttatggttctagtacagatactctactacactcagcctcttatgtgccaagtttttctttaagcaatgagaaattgctcatgttcttcatcttctcaaatcatcagaggccgaagaaaaacactttggctgtgtctataacttgacacagtcaatagaatgaagaaaattagagtagttatgtgattatttcagctcttgacctgtcccctctggctgcctctgagtctgaatctcccaaagagagaaaccaatttctaagaggactggattgcagaagactcggggacaacatttgatccaagatcttaaatgttatattgataaccatgctcagcaatgagctattagattcattttgggaaatctccataatttcaatttgtaaactttgttaagacctgtctacattgttatatgtgtgtgacttgagtaatgttatcaacgtttttgtaaatatttactatgtttttctattagctaaattccaacaattttgtactttaataaaatgttctaaacattggcaga

SEQ ID NO: 74407 - DNA, 1041 bp, Homo Sapiens
  misc_feature (72)..(72): n is a, c, g, or t
  misc_feature (188)..(188): n is a, c, g, or t
  misc_feature (273)..(273): n is a, c, g, or t
  misc_feature (284)..(284): n is a, c, g, or t
  misc_feature (725)..(735): n is a, c, g, or t
aagataaaagatgtgtgagtgacttggctgttagtctgccccaaccgacgtgagatgccgccattgctcgtntggaggctatggtttggaccccaaccatagctgatcatcctgtgtccttaaggacatgttccccccccccccaccttcccagtccctgaataaattcctgtccagtgatgcagtgnccaaggacatgtggggaaacccagtgccatcttcccaccctccctgatctccagacccttcgactgacccccctgtcttatgctngatgttgagtntgggattgtacctggttgaagtgggggcagatgcctgtcaccaaggtgttgactgtgtgagaaaagcagtttgggtgacaaatcctgtgtggcacaagttggatcgcttcctagaaataagcaacacctctcccaaaaagcagcccacaaggcaggggcccagcagcccagccatcactcatctttgaggaaatgagttggtagcctctgtgcactgtttggtggccacatcacaggtgatgtcctgttcacatacctgcttgtatttaaagccctcagtctgtcctgttgtgtggggcgaagtgatggactctgccaggtggacatgctgtgggtggatgttcccggcgtgtgccgggcctgaatggacaggggccacttcacagcatgtcagggaaaatcactgtcacacaattccaatggattttgtgctctttttgnnnnnnnnnnnttctttagcgtaaacatgaattttttttcaatgtagcccctggggaatgaatgaaattttgagcttcttcaatacgtaaaattaaatttataccactgagggagagaccctttctgaaagaagtatggccaaaagcactttaatgctgctgacattgttgtttttatgttcatttgctggagcgcaagacgtgctgacacagtgagttttctctgatgtatttaaggtgatgtatttgcttgagttactcctgtatcattgctcataatattggaaactaaaataaaacctagttggaaatccaaa

SEQ ID NO: 74408 - DNA, 2194 bp, Homo Sapiens
ctaacccaggtcacagcttaaggctttgcaaatttttcagaagtctccccccatggaaaattaatttactattgaagaagctccaaatttcatcattccccagggctacattgaaaaaaattcaatgtttacgcaaagaatttttggtgtttcaaaagagcacaaaatccaattggaattgtgtgacaagtgattttccctgacatgcctgtgaagtggcccctgtccattcaggcccggcacacgccgggaaacatccacccacagcatgtccacctggcagagtccatcacttcgccccacacaacaggacagactgagggctttaaatacaagcaggtatgtgaacaggacatcacctgtgatgtggccaccaaacagtgcacagaggctaccaactcatttcctcaaagatgagtgatggctgggctgctgggcccctgccttgtgggctgctttttgggagaggtgttgcttatttctaggaagcgatccaacttgtgccacacaggatttgtcacccaaactgcttttctcacacagtcaacaccttggtgacaggcatctgcccccacttcaaccagtaacaatcccaaaactcaacatcagcataaagacaagggggtcagtcgaaggttctggagatcagggagggtggaaagatggacactgggttttccacattgtcccttggccaactgcagtcactggcacaggaaatttagtccagggcacttgggacaaggttgggggtggggtggaaacatgtctcttaaagggcacaacagggatgcaatcaagcctagtgggtgggggctctcagacccatgagcccctcgcagaacgaggccaagtggacggcccattctccagctgtcctgtgtggggcccatgcaccgcagccagccaccaacgtccccaccttccaccatccatccttctactacatccttcaaccacctagaccatgccatcttccaaaacagatctacacaaacaggcctgcacaagtccaggactgacactaaagcaaaggacacaataatgagaagagaggcaagtccctccttgtcccagtgactgccacctgctctgccagctccccatacatccaacagccctcccctctgagctactcccactcctccagctgcctcagcagcatcctttctaccacccccagcacagggcccgcctcagcctaagcccaggggtaactgagcctcaccaccaagacgtgtctgaggctctgcaaatgggatgaagcactgagccaacaggcgagatggacacacacaagccacagtccttctgggacagactctctgggaagaaactccaatcgtcccttacacctgcaggtgtgctgggctgcaaggagggcaggtgcgcacaggctggaggaaggtgggggtgtctgtgtgataccctcaaaggcttccatgaggcattgtgcaatgctgagatcctgaggccttatcaagcaatcaaatggaaccagagaaagctggaaaaagcctcaacttaactccttggtaccatgctgtccatagctgtcgctgaaagtgtcctttgggggtatgagccagctcttccagcaacagcaggcaaaggtgggggaaaataagtagtgctggagggctcaaaatggtacgagactgggtgcttcattctcttggcagtggccagggggacaggagccacacgtgcccctgggggagcccacacggccacttagggctggcagcaccgcccctctccacgcagactccgcctcaggtgcccactatctgctgggctgcagggttactggtgtgtgaacatgtggagctcactgtccaaccaaccggctttattcctgagcagctttgctttgctctgaagtgagtcaagaacctcaattttcttgttcatggcggcaatttcctgctccaggttctcccgggtgacgtcaacttgctgacacagatgagcaaaggtcccagacagttcctgctggacttggtggctgcagttggagccagtgtagctgatgacaagctgcagcttctcgctggcatgctccacaaactggcgcttgaaggccctctccttggccttggtggtccaggtcagacgctcatagacgtagaggaggccatagagcccaaaggagagggcaatgagccgccagcccactgccttccacaccacc

SEQ ID NO: 74409 - DNA, 2968 bp, Homo Sapiens
  misc_feature (72)..(106): n is a, c, g, or t
  misc_feature (1477)..(1564): n is a, c, g, or t
  misc_feature (2628)..(2691): n is a, c, g, or t
gataatcactatagggcgctactcttgcagcgaacgacgagcgcagcgaagtagtgagcgaggaagcggcgnnnnnnnnnnnnnnnnnnnnnnnnnnnnnnnnnnncagtcgacggtaccggacatatgcccgggaattcggccattacggccgggaagaaacctctgtttttgcttgtaaggctttgaacagattggagggggcccagccactcattattgagggtaacctcccttaaagttaacggattgtagatattaatcacacctacaaaataccttcaccacaccatctgggctagtgtttgaccaaacaactgggcaccatagtctagccaagttgtcataaaattatcacagttactttaaatgatcatattcacatattttcagaaaaatgggactaatgatggagactatgtttttctaactggagaagacagttaccttaactttacaaaaattgtggaatggaatgggaaaacgtcacttgactggtggataacagacaagtgcaatatgattaatggaacagatggagattcttttcacccactaataaccaaagatgaggtcctttatgtcttcccatctgacttttgcaggtcagtgtatattactttcagtgactatgagagtgtacagggactgcctgcctttcggtataaagttcctgcagaaatattagccaatacgtcagacaatgccggcttctgtatacctgagggaaactgcctgggctcaggagttctgaatgtcagcatctgcaagaatgtgcacccatcattatgtctttcccacacttttaccaagcagatgagaggtttgtttctgccatagaaggcatgcacccaaatcaggaagaccatgagacatttgtggacattaatcctttgactggaataatcctaaaagcagccaagaggttccaaatcaacatttatgtcaaaaaattagatgactttgttgaaacgggagacattagaaccatggttttcccagtgatgtacctcaatgagagtgttcacattgataaagagacggcgagtcgactgaagtctatgattaacactactttgatcatcaccaacataccctacatcatcatggcgctgggtgtgttctttggtttggtttttacctggcttgcatgcaaaggacagggatccatggatgagggaacagcggatgaaagagcacccctcattcgaacctaaacattgcctttgcttggtgaagaaactgtgtgagctgtcctgacctggacgatgacgtggggaaaccctccacctccttgcaggcttgttgcctgttgaaagaaggaaaaagacacggcgctggcaagtgataggaacattctggccagaggttaaagagcaggctgacatggctggccattaagctttataaaatcatgtgggctctgaaattgttcttttatgtgtctagcaagtatttaataaacccttgtatagtnnnnnnnnnnnnnnnnnnnnnnnnnnnnnnnnnnnnnnnnnnnnnnnnnnnnnnnnnnnnnnnnnnnnnnnnnnnnnnnnnnnnnnnncaccacaaagagatgagaacacacaatcaacagatcaaaacctaagagcggcgcgtagcgaccaagctacagcgcacacagagagctggccgcaccaaaaagcgagaacacacgacaactacatccaagaattcagacaactacggaacgaacatacaccccaaagcaagagaacacagagtacatactcaacaacaacgacgagaagcacacatcagaggcaggagtagacatatgaaacagaaagcagcgatacaggagagagaaatagataaggacagcaacacaacacacagagagcaaaaaatgataaaccagagaagaacacaaacaagacactgaaaggggcgacacgagacgacaagccaatggaccccgcacgacgagcaagtcaaagcaaaacacacacaactacaccaaacggaaaccatcaacaccagcgcaagcgaacaaggcgaaaggatcacaacgaccacaaccacaagaaaggaggcaaggccacacgcgcgcagagcaaccgacaccaacggggatggaaacgcagccaaaacggcacaaacacaagcaccaagggaaatgcagaccacgagcacaacatagaaacaaagacgacgaacgcagacaatcagcggcacgacgtcaagcgagacaaacgacgactgggcacaaggcagaacagaagacagagcaacacagaagtggacaacaccaaacgagcgagcgcactagcgcaccaccaagagcacacacgcagcagtatcgaagccgggataaccacacaagcgacagtggagcgatcaggaccaaccaatgggtgacacataacaaggccagcaacaaaatgagcgtacacacagggaacgagaccatcgaagacaatcagccaccaaacacacaaagagagaagcacagaaacataacaagaagacggacaaactcacagcacggagccgaaacggacgaaacaacgacacgacagagaaacgaaaagcacgcccaacacacaaaagcgaacatcaatcgagaggatgagcaagatcacccgagcaagcacaacgaggaannnnnnnnnnnnnnnnnnnnnnnnnnnnnnnnnnnnnnnnnnnnnnnnnnnnnnnnnnnnnnnnaacacgatcatcaagcacacacacaacaagacaacatgggaaacacgacgacagcagcacacgacagaatgagccatccgaggaacacagcacgagcagaagcagagaagcaacgagacagaacaggagaagagacaacggagcaagacacacgaacgagaggaacaacacaggtgaacagagacagccagaaaaacaacacacacaaacgaataacgcaccaagaggagcgaccaacagcagacaggaaaaagcaccaaggaagcgagacacgaaa

SEQ ID NO: 74410 - DNA, 1448 bp, Homo Sapiens
gggagcccagagtaactgcacgcctttgtgcagctctggagctccaccaactctcggcctgccagttctcaagcgagctaatcttgtcattaatcgatagaagctaacttccgaagttaggacctagttactttgctctcaacatttaaaataatgcagttgctctagtgaatggggcgttaggggcctgtctctgcacctgtctgtccatctgcatgcagtattctcacccatgttgaatgcctgctgcttgtttaccctttggaaaccctggggtgaccaaggtttggaaagccacctgagaccacttcatagcaagggaaggctttaagcagttactagaaagagatggggatttggcccctggctcctccagcctgaatgagctatttaatccactgtccatgttcctcatcagtcaaatccaaagtcaaaggatttgaacctgcatctggaaacgtaaccactcacagcacctggcccgccaaggttgggaggattgtacactactttcatttaaaggggaaagtttgataatacggaattaattaatatgaatgagatgcattaataagaacctgagcatgctgagagttgcaattgttggttttctggtttgattgatttccttttttcttagacacatcaaagtcaagaaagatggttttacctttactgacccagctgtacatatgtatctagactgtttttaaatgtctttcttcatgaatgcttcatggggctccaggaagcctgtatcacctgtgtaagttggtatttgggcactttatatttttctaaaaacgtgttttggatcctgtactctaataaatcataagtttctttttaaaaattttccaaaacttttctccattttaaaaagccctgttataaacgttgaactttcacaatgttaaaatgttaaatatttggatatagcaacttcttttctcttcaaatgaatgccaagatttttttgtacaatgattaataaatggaacttatccagagaaaccacgcaaatggcctgcccaatttcgtttgaggacagaaagcccagccatgacttgagtagaatgtctctcacctctcttcggatctaaatatgaaaagtatgttctgctgaatttttctgagcattggtgagcggacagcctacctgtaaaccatgacctccttgccaaacgttaattttatcagctcactagtaacctttgagaattatctggttgtcatgcaaagattgcactttctgaattatgttaaaacacatgttgtaaaatgagaactgctcatgctttgaaagaaaaccaggttcttcgtgcgttctgttgccgttgatttgaatggctgtgctgtatacgatgtgtccagaatgtcttcagagcactgtttccgtgtgatgttactacctactatgtgggaggaaaaaaggttataggttaaac

SEQ ID NO: 74411 - DNA, 1752 bp, Homo Sapiens
  misc_feature (61)..(86): n is a, c, g, or t
gtgctaagctaaaattaaccctcactacaagggaataagcttgcggccgcatacgcggtannnnnnnnnnnnnnnnnnnnnnnnnnagagtaaagtcgtttatcatcaaagccatgttgcttaccacacggagttgggggttggggagtgagcttggaggggtgagggggtgagcgtgggctcccagcatgggcaggggacggaggcaaactcattcctcagaaaaggggtatcttccccaagaaaagcctggagggcacttgtggggggaggtggcaggcggggggagaggggtgggtcattgccgctccagcaccgacaggaacttgcggatgtcctgggcgagcagctccggctcctcaaaggccgcaaagtggcccccacgaaccatgtaggaataggagatgagctttgggtacttgaacctcacccacttttcaggcgtgtgcaatagctcaaaagggaaggcagagaagccagtgggcacatagaccttcatccgctcatgcttctgggtcatccagccctgtcccaggttctccttgtagaagcgctgggaggagatgatggtgcctgttgtccagtagagcatgacgttggtcagcaggtcgtccagggagaacttcctttccaggcctccatcctccaggtatcggaattccgtattggtccaggtggaaaacttctctagaatataggcagccagacccacaggagagtcattcagagcagagcctacggtgtcaggcttggtgcactggatgtgcatgtagccgctctccctcatcaggctgtagaataccttctccttgacggggtacagcagctccacatccctctcagtgaggccaagaaacctcccgaaacgctgtcccaggaggagggtcagggtagagaagttgcttaaaaccaaagccatgttcaagtgcaggcctttcacgtggctgggcaccagctgggccatattagtgcagatcagggacccccagtcccctccttgaatgtagaattcctggaagcccagccgcagcatcagcttgtaaaagatcctggcggtggccaccgagttgaaccccttcttggaggatgcctctgagaagccatagccagggatggaagggcagatgacttcaaaaacgtgctcatcgctcaggccatggttcttggggtcagtcaggagtgggatgatcttataaaactcgtagaaagagccgggccagccgtgcaccatcagcaagggcttcggggtatggcctgcgggcagctgggggggcttcacgtggatgaagtggatgtccagcccttcaatcttagtcttgaagtgagggtatctgttgagaatctccacctgcttcttccagtcaaattcattccgccagtaggagatgactttcttcaggtagttggagttgaagccatagtggaagcagctgtcctccaaaggtggggtgaaacggaacttatcgatcctctggtgtaagtcgtggatctcctcatctgacgtttccaccttgaaagggcggatgctgtcgtcctccctggctgcggacctcgtgcctggcccccaccacccatcttcaagtggcaaagtttcctctttgtcccgggagatgaaccagtagatggcaaagcccagcactgaagtgaggaggatttctagccacatggctcggtctcggctcgcaggctccggcccacgcgtccgcggacgcgtgggtcgacgatatcccgggaattccggaccggtaccac

SEQ ID NO: 74412 - DNA, 953 bp, Homo Sapiens
ggaccggtccggattctcgggatatcgtcgaccacgcgtccggtggctagaaatcctcctcacttcagtgctgggctttgccatctactggttcatctcccgggacaaagaggaaactttgccacttgaagatgggtggtgggggccaggcacgaggtccgcagccagggaggacgacagcatccgccctttcaaggtggaaacgtcagatgaggagatccacgacttacaccagaggatcgataagttccgtttcaccccacctttggaggacagctgcttccactatggcttcaactccaactacctgaagaaagtcatctcctactggcggaatgaatttgactggaagaagcaggtggagattctcaacagataccctcacttcaagactaaaattgaagggctggacatccacttcatccacgtgaagcccccccagctgcccgcaggccataccccgaagcccttgctgatggtgcacggctggcccggctctttctacgagttttataagatcatcccactcctgactgaccccaagaaccatggcctgagcgatgagcacgtttttgaagtcatctgcccttccatccctggctatggcttctcagaggcatcctccaagaaggggttcaactcggtggccaccgccaggatcttttacaagctgatgctgcggctgggcttccaggaattctacattcaaggagggggactgggggtccctgatctgcactaatatggcccagctggtgcccagccacgtgaaaggcctgcacttgaacatgggcttgggttttaagcaacttctctaccctgaccctcctcctgggacacgcgttccgggaggtttcttggcctcacttgaaagggatgtggaactgctgtacccccgtcaagggaaaaagtattctacaccctgaatgagggaaaacggttaaatgcacatt

SEQ ID NO: 74413 - DNA, 919 bp, Homo Sapiens
ccatgtgacatatagacagtggtgtacaaaaagcaggctggtaccggtccggatttcccgggatatcgtcgacccacgcgtcggtggctagaaatcctcctcacttcagtgctgggctttgccatctactggttcatctcccgggacaaagaggaaactttgccacttgaagatgggtggtgggggccaggcacgaggtccgcagccagggaggacgacagcatccgccctttcaagggtggaaacgtcagatgaggagatccacgacttacaccagaggatcgataagttccgtttcaccccacctttggaggacagctgcttccactatggcttcaactccaactacctgaagaaagtcatctcctactggcggaatgaatttgactggaagaagcaggtggagattctcaacagacaccctcacttcaagactaagattgaagggctggacatccacttcatccacgtgaagcccccccagctgcccgcaggccataccccgaagcccttgctgatggtgcacggctggcccggctctttctacgagttttataagatcatcccactcctgactgaccccaagaaccatggcctgagcgatgagcacgtttttgaagtcatctgcccttccatccctggctatggcttctcagaggcatcctccaagaaggggttcaactcggtggccaccgccaggatcttttacaagctgatgctagcggctgggcttccaggaattctacattcaacgaggggaactgggggtccctgatctgcactaatatggcccagctcgttgcccagcacgtgaaaggctgcactgaacatggtttggtttaaaggatttctaactgacctcttctgggcaggttcggaggtctgggccctgaaggtgggctgtggccgtcaggagtcc

SEQ ID NO: 74414 - DNA, 960 bp, Homo Sapiens
ggtccaaggtagcgaggcctgggtggcgaattcggcacgagggagagatcgcgcgcctgccgccgccggagcctgcgagccgagaccgagccatgtggctagaaatcctcctcacttcagtgctgggctttgccatctactggttcatctcccgggacaaagaggaaactttgccacttgaagatgggtggtgggggccaggcacgaggtccgcagccagggaggacgacagcatccgccctttcaaggtggaaacgtcagatgaggagatccacgacttacaccagaggatcgataagttccgtttcaccccacctttggaggacagctgcttccactatggcttcaactccaactacctgaagaaagtcatctcctactggcggaatgaatttgactggaagaagcaggtggagattctcaacagataccctcacttcaagactaagattgaagggctggacatccacttcatccacgtgaagcccccccagctgcccgcaggccataccccgaagcccttgctgatggtgcacggctggcccggctctttctacgagttttataagatcatcccactcctgactgaccccaagaaccatggcctgagcgatgagcacgtttttgaagtcatctgcccttccatccctggctatggcttctcagaggcatcctccaagaaaggggttcaactcgggggccaccgccaggatcttttacaagctgatgctgcggcttgggcttccaggaattctacattccaggaggggactggggggtcccctgatcctgcactaatatggccccagctggtgcccagccaccgtgaaggccctgccttgaacctgggcttttgggtttaaggcaactttctctaaccctggacccttcctccctgggaacaggcgtttctcgggagcgtttccttgggcctcccctggaaaagggaaggcgggaaaa

SEQ ID NO: 74415 - DNA, 594 bp, Homo Sapiens
  misc_feature (123)..(136): n is a, c, g, or t
ggggaggctcaaggatagatgagctctgagtttctcagtactccctcaagactggacatcttggtctttttctcaggcctgagggggaaccatttttggtgtgataaataccctaaactgccnnnnnnnnnnnnnngaggtggggggagggaggaggtatattggaactcttctaacctccttgggctatattttctctcctcgagttgctcctcatggctgggctcatttcggtccctttctccttggtcccagaccttgggggaaaggaaggaagtgcatgtttgggaactggcattactggaactaatggttttaacctccttaaccaccagcatccctcctctccccaaggtgaagtggagggtgctgtggtgagctggccactccagagctgcagtgccactggaggagtcagactaccatgacatcgtagggaaggaggggagatttttttgtagtttttaattggggtgtgggaggggcggggaggttttctataaactgtatcattttctgctgagggtggagtgtcccatccttttaatcaaggtgattgtgattttgactaataaaaaaaattatgtacaaaaa

SEQ ID NO: 74416 - DNA, 566 bp, Homo Sapiens
aaaataatttttattatgtcatggaatcctctttttaaacaaaaacacaacagatactcggtcaactggaaaacaatttatagaattctatttacatgtaacttctccagagcgaatatcttatacaaagcaaggatgtgggttatttcaatcaaataacatgaagtcgcaattaaatgaccaagctaactctccttgaagtctctaaccatctgctaatttatttaatacaaaatgcttatttggtcttttaaatgacaggcaactttgaaagtgtatttcacctattcttgagaattctactaggctttagctacaagaatatagcaccaaaatccattttaatagtattaatatttgccactaatattgagtttttaatacatacaatttcatgtaggaatactggaaaaattcagacaaatatgagtataacattttataaaatgggtaataaaaagcttttttaaaaatagcaatttaaaaacacaaagaatattcttttaaataaccacataagctggttagactacaaaacctaaggtctcagaaaacctttggcttaa

SEQ ID NO: 74417 - DNA, 671 bp, Homo Sapiens
  misc_feature (45)..(45): n is a, c, g, or t
  misc_feature (183)..(387): n is a, c, g, or t
gcagatctctgcagaatgcacatttcccccatgagagacagcttngcaagggccatttcaacatatgtcaaggaaatatattttgaggtaaaatactttgattccttcggggctactgtgtgtcatgtgatgctataccggagtcccgttgaattgggtatcttattgctacagagagtctgnnnnnnnnnnnnnnnnnnnnnnnnnnnnnnnnnnnnnnnnnnnnnnnnnnnnnnnnnnnnnnnnnnnnnnnnnnnnnnnnnnnnnnnnnnnnnnnnnnnnnnnnnnnnnnnnnnnnnnnnnnnnnnnnnnnnnnnnnnnnnnnnnnnnnnnnnnnnnnnnnnnnnnnnnnnnnnnnnnnnnnnnnnnnnnnnnnnnnnnnnnnnngcaggatttgatgggcatgcatatttatcaatgtgaaagtgttgtctgtgggcggcggagggcttgggccgtgtccaggccacgcactgcaagggtgcagcccccacacacggtccctgctcctaaagctgttgcccccactgcaagagtggagtaggttgaggtgtagccatgacattctggaaactacattttttgtaatagtcattttgaaaataaaacatttgaaaatactgtgcagcaaaaacttgaataattggaataaaaatgttcagtttaatgtc

SEQ ID NO: 74418 - DNA, 676 bp, Homo Sapiens
  misc_feature (580)..(589): n is a, c, g, or t
ctcagcaccgctatctcagccactttcagccttatgcacgtagaatgaccacagccactcgcacccgtatagcactttaaagtttctgcagtcctttgacacataggatctcatggagcctcacgtctactcccttctgcagatgaggaaaccgagagaagtggcccaaggtcacgcaactctgagatgccacatttcatttgatcttgtacacattttcttttattccttcttttttcctcctttcatttcccactacgcacaaagagtttataaacactgttctcagaagagtcacagtttggggtgagatctggaaatcaagaaatgggtgtccactcttttctttcattagctaggatctactagatgcattatactccatacctgcttttcccatggccgccctacggaaaatcccatccacagaggccagggctacccaagcccctccaggtgagctgggcctttcctttatgaacctccatcctcccagccagctacagtagggcctcctcaccccgtaccccacagctagacagtgtcagcactcatctcctcctcccacatttctggagcnnnnnnnnnnccttccccattgacctttgtggtcttctgtgattatttatgctgcctcccaaaggatagaattgaaataaaatgttttcaacttatc

SEQ ID NO: 74419 - DNA, 795 bp, Homo Sapiens
  misc_feature (29)..(29): n is a, c, g, or t
  misc_feature (108)..(108): n is a, c, g, or t
caggaaggagagtgcgttatgagttgtcngtaaactgtcagataagttcctcaggtcagcatgtatgactttcttctgctgtggagagatctagccagtccctgactntgcaacagacctactgactactggatcttaagacccatgtctaggaccaggagtcagcataaggacgctgacctctcctggctgtgcctgtgactccagagtcctatcttactgtgacttaaagtttgatggagagaaagctgtaggatccataaattctaccaggaaaccagggtcttcctgttcctagcactgagaatgggcacccagtggtccaagaacactttctgggctaacatagtcctcacacagggctgagaaagaaagtgtctcctttcctggaaagcacatgtaaaagttaagggcctgaatctcttctaaaccaataattgacctctaggcacccaccataatactgctaccttcagggcagaagacactgctctttgtaacccagccaccaccaaaaagcaaacagaaagaaggaaggatggttaagccattggataatactgaatctgtttccctaagtgacttaaccttagagcaagcacaacatccaggttaattttttgtaagatttctccttttattattgccctcatcatagttcctgattgtctcttaaagtaagtggtttatagacattactatttctgataataatttacaaactactataaacaaatttataaacattactaatttctgatgaaaataaagttgtttctccctccaaaaaagaaa

SEQ ID NO: 74420 - DNA, 1075 bp, Homo Sapiens
  misc_feature (66)..(66): n is a, c, g, or t
  misc_feature (76)..(76): n is a, c, g, or t
  misc_feature (78)..(79): n is a, c, g, or t
  misc_feature (88)..(89): n is a, c, g, or t
  misc_feature (91)..(91): n is a, c, g, or t
  misc_feature (161)..(161): n is a, c, g, or t
  misc_feature (182)..(182): n is a, c, g, or t
  misc_feature (184)..(184): n is a, c, g, or t
  misc_feature (240)..(240): n is a, c, g, or t
  misc_feature (244)..(244): n is a, c, g, or t
  misc_feature (250)..(250): n is a, c, g, or t
  misc_feature (255)..(255): n is a, c, g, or t
  misc_feature (278)..(278): n is a, c, g, or t
  misc_feature (280)..(280): n is a, c, g, or t
  misc_feature (1013)..(1032): n is a, c, g, or t
  misc_feature (1054)..(1054): n is a, c, g, or t
ccgactttgtaataatatgtcctaggagtgatgtgacacacatcgatatgaatcacatgagagatngtgagacatntnnaagatgtanntnaaggatcaggataatctccacagcatctgtgagataaaccaaagacagtgcttctttaagagctccattngccattgagatttatcaaccntnaatgttctcaaaacagtcactcaagctgatacctgggctcaggcattgattctctntgtntggacntgagnacagaagaaggaaaaaccttgtntntggagtatcaggctgttccagtaatattaagtcatctaagaatatccagtaaaggactcctgtctaatgttattgatagttgctccagatgacggtggaatctaaatccttgcagcctttcctggaagcctgtagcaactctttattttttcgtacttgctctgtgctgcttcgagcccctaagcttgatcttcaaatactagaaaaactcagtattattttacagaaactttccaaaatcaagagtaataagaagctctttgaactttttacgattcatctgatgcttcaagaaatacaaaggacaacaaacccagagcatgcatttctctgtattaatctaaattcaactctgttcaatctgggtttaacaaaatgtaactccctggtctccagtgcaagcccttagactggctaattttttaatatagtatatgtggtgcttatttataaacatgtagaaattaccaaagtaactacaattctaccaagtaaagttatcagtagcatcatttatcatgaaaaataaataatttttttgaactgtaaaaatgaaatctgtagaaggtattggaacttttggaatgtttcagttcaggtaaggtagtactaatatacaagatggcgtttctagaatgtatgacactgaagtgactttttgtaaaaatatattaggaaaattatttcttaaaattatgtgaatatttggaataaaattggtgcttatgtgagnnnnnnnnnnnnnnnnnnnncctgagcaggcggccgcaagcntattcccttgtcagtgaaggg

SEQ ID NO: 74421 - DNA, 1208 bp, Homo Sapiens
  misc_feature (755)..(926): n is a, c, g, or t
  misc_feature (938)..(997): n is a, c, g, or t
  misc_feature (1013)..(1031): n is a, c, g, or t
caaaaccaagaattttattacaatttcaaatctcattttaagcaataatataaatgttctaaaacatttgctcacctcttgccagttacctttgcattgtctgtcttaaagcaaaaatataaaatttaagggtggtagttttaatatattctgtgggtcctaagggatgctttgaatttgaagtatatatacttttaataaaattcagtatgacagttgtcttctgcttaacccataaaactttatttaaaaaatttaactagatggtacaaaacattcattggtatgcacataattctgtatagttttgttattaaatgctaaatgacagtgataacaatggcttaagctttacagtattcttgtagttccctagtaccacttagtatttaaatattgtcatattagcttcagattatcatgtaaatgacggtagaggaataagagaaaaggctttcattggttatcagttttaaattctgaacaaaagagaccatacactgctcactacaagaatgcaattttctaagaaaatgtagtttaaaatgttattctgaatatctgccaaagaattatattgttattactagctagaaccaagatgttgaagaaagcagtttctacattctggatgtagtaaacaagcctgcctgtgtaatccaattatctcttcactaatgagtagataaggtgcctgttatagatgttctggtatataaagaaaaaatgtaggccaagtgtggtggctcacgcannnnnnnnnnnnnnnnnnnnnnnnnnnnnnnnnnnnnnnnnnnnnnnnnnnnnnnnnnnnnnnnnnnnnnnnnnnnnnnnnnnnnnnnnnnnnnnnnnnnnnnnnnnnnnnnnnnnnnnnnnnnnnnnnnnnnnnnnnnnnnnnnnnnnnnnnnnnnnnnnnnnnnnnnnnntgcttgaaaacnnnnnnnnnnnnnnnnnnnnnnnnnnnnnnnnnnnnnnnnnnnnnnnnnnnnnnnnnnnncagtgagactccgtcnnnnnnnnnnnnnnnnnnngcacttcattaccagaggcctcttggcctgttgaaaaatgaaaccaaatattgaaaattaaatcagagtttaaagcagctattttggaagagctgccattaggtagaaagtatcaaaatgtacaaaagaaagttgtatgggagttgagtggaaggtaggatttaagagcagcactgc

SEQ ID NO: 74422 - DNA, 1026 bp, Homo Sapiens
  misc_feature (74)..(74): n is a, c, g, or t
  misc_feature (108)..(108): n is a, c, g, or t
  misc_feature (497)..(530): n is a, c, g, or t
acgttactgtacgattatcgatcattagatgccctcggccagatcgcagaggagtgacttctcattacatgatntagagtctccccccgccctgcgaggatgaactantacacattattccttcatatatgaagaattgatacaggctattgtctcgtaaacttgtctgcagaaagtcaaacttacaaaaaactgttgtgacaaatgttatgtacatatattgatatgtaactgcattagtggccattttgaatcacagtggtgatcgtgtgaatatatttaacactgtgttaaattaatttacgttgctattttatcttaatcataaacaactaccatgtttcttaatgttttgtgtaaatttaaggtaattatactatccttttaaacttcaagaaaacaaagttgttagcgtatttacatgaaggcgcattatgttgtcgtgtgtttcagtttcacattaaactgaaccttttactaattgtgagctaaagagnnnnnnnnnnnnnnnnnnnnnnnnnnnnnnnnnnctacatgtctttctgtagcctctgcatactactggctgtcatcacaccagcgtacagtagctaaatttttggtgcaattatagcaaatgataatgttcccttttgaacttttacattttggcatgacatttcagagtattgtgggaccatgagacaaaattaagtacgatcacattctttatttctcattttaaagaaatgatgttggtttaccttttcctagttgaagatagtaattaggtttctaagctgtatactgtgtttattggtggcagtgacaccaaagatagaggcaatggatagaaatttttaaactggaaagaaaacctgaattacactacattttcgaagtctcttgtaattatttgggatatcaacaaaatttgattcgtctgtctaatcccttgctagtattttaaatatgtctttaacacattgtatcctttaattcttcattaaaatggaaataagtagatgtttcaaagtaatctaaaaa

SEQ ID NO: 74423 - DNA, 1673 bp, Homo Sapiens
gcggccgcctaggagggagcccgccgttgcggggcggggccgggtgcccatgaacagcggggtcccggccacgctggccgtgcggagagtgaaattcttcggccagcacggcggggaggtcaactcttctgccttctcccctgatggccagatgctgctcacaggctcagaagatggctgcgtgtatggctgggagacccggagtgggcagctgctgtggaggctgggtggccacacaggccccgtgaagttctgccgcttctcccctgatggccacctcttcgccagcgcctcctgtgactgcactgtccgcctgtgggatgtggcaagagcgaagtgtctgcgggtcctgaagggtgagtgagctgggagccaagcagccaggccagcgttccctttcagatggtgctgtgtcctgtgtcacgtcacctttccaccttccccgaccccgggctggtgcctgcaggtcaccaacggagtgtggagacggtcagcttcagccctgactcgagacagctggcatcaggtggctgggacaagcgggtgatgctctgggatgtgcaggtacggccagaggctgcggccacctagtctgggaaccaaggaccacatccagagcagcgacttctcaccaaccgtgaactcccagcccaaaccctccactgggactccatggcccatacccatcagcaaccaaccaaggctgaccccaccaggctcacaccagccgctacagggacacactggcacacagcagcccccagtgctattcagcaccaggtccccctggcatccggcacctgggacaagaccagccacagccggaagcccacaaccaccttctgcagctcagggctctctctagtccggcagatgctgcgcctcttagttgggcaccgtgactccatccagagcagcgacttctcacccaacggtgaactgcctggccaccggctcctgagactccaccgtacagcatctgggacctgcggatgtgaccccagcagtctcccaccaggcgctagagggacacagtggcaacatcagctgcctgtgctattcagcatccggcctcctggcatccggctcctgggacaagaccatccacatctggaagcccacaaccagcagcctgcttatccaactgaagggccatgtcacctgggtgaagagcatagccttctctcccgacgagctgtggctggccagcgccggctattcccgcatggtcaaagtctgggactgcaacacaggaaagtgccttgagaccctgaagcagggagtcctggatgtggcccacacctgtgccttcaccccagatgggaaaatcttagtgtctggagctgccgatcagactagacgtcaaatatcccgcacgtccaaatcacccagggaccctcaaacctaacaccaaccacctcagatggtgccgacctcacccgctcccctcagtggcgcacaggcatgccgcttctccccacagacgcaaagtgactgtgctggcatccagcagatccccatggccaggactctccaggccccaccagagcagacaactgtggtgggcaggacgcttgctggaacccatcagacacctggtccccaaaaccagacccacccacctccacccaatcagtggaagtgccaggaaacaaagcagtctcagccaaaaa

SEQ ID NO: 74424 - DNA, 2707 bp, Homo Sapiens
  misc_feature (111)..(119): n is a, c, g, or t
ttagtgactatgaacacgtttgttaccacaaaagcaggctggtaccggtccggaattcccgggatatcgtcgacccacgcgtccgaaagtttcttctagccagtaatagannnnnnnnngaatgctctgccttgtgccgagagatgttcttttaagatgaatcttttgatgtctgataccaccaaatataggtggtagggagagttggaggctggccctttgagcaggccattagcttacttgctgggcatttccgatagcttattgcctacctttttgctggaaacaaactgatttgaaaaacaaaatctatgaagactgcagctaaggattttatcggtagacttaagagcttttgtccttgtggatattttagtggaaccacatcagtctcaatactgtcattttacactgactcagagcagctgacttcattccttgccatgatatatatttaaggcaggcattgtaacagacataaagacaacttatctgtttcagcaggaaggattcagtttatgaactctcagaccagatcatgttgaacaaggagactttgatgtgtgtcatgagaaaactcattctttacttcccagtcaatttaaaggccagctatcctgagctactcgaatgaatgcactggttaaacattggaaatagttgtttatatccttgtctctctctaggccaattgtgattacatgactcgactctacatctcgtcaaacaaggcctaggtctggttgctgtagactgctcgccctcaacaaataaaatctggttgactagcctccttgtatatacaactattatttgttaagaagaaattatcgtcaattttctactaccttccaattgtcagctctttttttcctctctggtttttcctatactttacagaaaaagacattgatctatactgccattccctctaatcctgccatactcagtcaaaaggaatgacttaagatgaagatgatcatctgctcgagtctaaaatatacattgtatataagaattggtgattagaaaagcaaaaaacctaaaacttaaatctaggagtctgtatactgtctccatgtctccatgcctcagatctcatctaaatctttgaacagcaccattcaaccaatctgaggccttgacttgcttgtaagatgattctcagagatcggctgagttaaaaaagatgacgacttgattaccaaagaaagtagggccaactttgacaaatctggctctgctgaccctgtcactcccagatgtagcatagactcctaaacagaacctcaagtctgattgaggataaggccttctcctgagctgaaagttctttggcagatgagcaagaaactgaaagctgatgtacctgactggctctgtaagatcagaaaactgtatccagaataagccctatggattaacccctgagtacccagagtaaaaactaatttacagaacttccttattgatctgctggttcttccagatcatattctggctattggtatggctggcctttctgaaggtaccctgcttgtctattttcctgactcagctcttgcctgcctttttcacatgttgctgcaattagactcaccgtgaggactacagtcaatttcagtctatcttgtgcccaatacaacaaggatttttaatagtaacaacccacacctcacccactaggactcaatgttcacaacaggaaggaccattgctgcatactccttgaccagcaacttttttgaagatatttttaagtgcagagtaggcctctattcctgtatgtaattgttcattttcagcacctggaacctcatctatcgggtctggaaggaatacagcagttcgaaagccgcgtccatttctctccttcagtagtgcagaaatgagtccgattcaccagtacacacagaactgtaccagttcaacctagcaaaagaagaaaagtttccactgtacttaaaatttacagctgactcaaattgcctcacagaattatttgatgtagaaggctagttgtcttacttcagatcagcaggacagttgggctctcagactcatgaccactgagtttgcttgtgttgaaactgtggtttcatccaacatatgctattggacatgattattattccattcaaatggattacagacttcttgaggacaggacaaacttatctctcatggtgtttttttagaatacttttataaccaaggaagaaaccatgccagctgttaccattcaacttcttaagcagagattaagctttttcatatctgttcttatcctggacatcagtagtttttaattgcccagcatccgttccatcttgtaacaactccctgatgtttcttaaaaccacctcttcctattttcagtctgtggtttggacagtctgacccaaccttgagctttgtgggtgaacatgtaattcagacctcatcaatcagcaaatccatctgaactgtggaggagaagctctctttactgagggtgctttagctttgtaggatgaaaacctcaaactaacagggcctaccatgtagagaatgaagccagtgcaggggaaagcagagccaaaatatggagagacttgaatcctgatgacagcgtttgtgcccctggatccaaccgtgcctgaagctagaatatcccctggacttttcagttatgtgaaccaataaatacccttttttgcttaagtta

SEQ ID NO: 74425 - DNA, 665 bp, Homo Sapiens
tgtagcctaggaactgcctcagtgtctttgccagaaaaaggcaaagaggcggacagtgcagggctcctccctcctacctcaggcctgatccatcgtgcccttgactttgccgtctcaaagtttcttagctgactttggctttcacatttgttctttccagagctaactgataagagtggaggaggaatgccttctcctaagagtcagttgaaagaaagacaagagagtcacatcttagcttttgcacaaggcattcgtggtcaggaataggttagggaatggtcacttctgattttccaacagttgctccttctctgaagagatcttgattcctttgggaagacaagaatttttcttaataacaaaggtccctttatgagttattccttctttcagttcatctcactggagcacagccaagatggacatgtttatggacagtgctctagatgtgaaaacagatagaactggtttgtgggacaggggcagcttgctcaggagagggaataacgcaggtcccttttcttggaaggcttgtactatggccatgacagtgacattgccctcaccatgatccctctccaaagtggttgtctttctttaccttgtgtcttctcttgtaaaaatgaaactcaaaaataaaataaatgtgtcaaatttatgaa

SEQ ID NO: 74426 - DNA, 1626 bp, Homo Sapiens
  misc_feature (51)..(51): n is a, c, g, or t
  misc_feature (1020)..(1046): n is a, c, g, or t
  misc_feature (1535)..(1553): n is a, c, g, or t
gttatcccccatatccccccttatttcctatatgcctaggtacgagcctgngtggcgttcctagacgagggtgggtagtaaagaattgcagtgggagttagtggggagggatgacaaagcttcagctttggtttttgtatttttttagtcttcataacagctacatttctgttgctcttattggccagataaatgtgttatattaaaccaggtaagtattttaaacagagaacattttatttgcatatatccctacaaattggcccattttattgggtggggggataaaaaagggattccctaactttaaataatcagaatatcctgcaattgaaaggagaaaaaaatccaattttgtcagtattttcttagtctgaaaaaaacagcagtagtaatctggtgaatgttattattaggagtgttctgcctctacagtggcatattccatgacattaatagaaaacccttctttcccacccctccccatcttgacattttcttttttaggatgttggttcctgcaaacaagaactgaccctatcacctctgcctcacagtgggggtaaatatatcatacatctcttgaaaggggaaaatatccatgtcagtttctttcacagtagaagaatggctgcttttgaatggggaggaaagaagacatttgtcttaatatcctttttgtcccatctctaaaatgtataacatattttgatttggttttactttaatttctcattcataatttcgcaactgtccttatgggttgccctccaacacattacttccatttcagaaaccatatctgatttaatataaactgctaacttaagaagaggtgaatttgcatttacacttagacactttctaaaaacagggtgaacttaattgaaatttttcagtgttgttaagctattgttatagtagctgccctatagttacaaaaataaaaactataaaaacccatcccctatctacttaatccagatagcctggatttaacaaaaccaatagtataaaaannnnnnnnnnnnnnnnnnnnnnnnnnnagagagagagtacttgattcattaaaaagtcctggaaacagctgttctaggatcttgtcatttttactgaaagtctcgtgcacatgtgaagtgccctctgagtttaaggtttggttaatactggtatatttttataagattgaaattgtgtccccatctttaacttaaacattttcattatcagggtcaatgtgctagaactgaattgtaacatttttaggcacagatggaaaaaaatgttattggctccttgaaaatgtgtgtgtgtggcgaggggaatagatccacaaaagcatgtatgtacttacaaaccaagctgtagagatcaagaaaagaacttaagtgttgatctcaagatttctaaattgtcaagatttacatggcattgtggtggaactagttaacacttagagcttttggtatgtaataactatttgctatggactgattaaatgtttcaaaagattgtgttcttcaattttggtgggnnnnnnnnnnnnnnnnnnnaactgcctctcagattatatttacttagtttaaatttcttcgctttattcattaaagtataaaaacttcaaaa

SEQ ID NO: 74427 - DNA, 1985 bp, Homo Sapiens
  misc_feature (1121)..(1132): n is a, c, g, or t
aaggaagcgaggcctgggtggcgatccaagacgaggacacccggacggaagtgcctctccgacagcagatccaggctcggagctccagacgctgggacaggccgcccgcagaccacccccgccgcgcgcgggacacgacgtccccccgcatggacacgcccatcagcccggaaacccctgagctgcttctcccggaggccgatgcccaaccgggagcccccaaagactcgcggctcccgggggtcacctgcatactcacccgcctgggcctgggcccccgctgcagggactggcgccccgaggcctcaaaaccagcgccccccgccctccgtgccagccccagccgggaccccacaaggcaaagaccaagaagattgtgtttgaggatgagttgctctcccaggccctcctgggcgccaagaagcctattggagccatccctaaggggcataagcctaggccccacccagtgcccgactatgagcttaagtacccgccagtgagcagtgagagggaacggagccgctatgtcgcagtgttccaggaccagtacggagagttcttggagctccagcacgaggtggggtgtgcacaggcaaagctcaggcagctggaggccctgctgagctccctgcccccaccccaaagccagaaggaggcccaagttgcagcccgggtttggagggagtttgagatgaagcgaatggatcctggcttcctggacaagcaggctcgctgccactacctgaagggtaaactgaggcatctcaagactcagatccagaaattcgatgaccaaggagacagcgagggctccgtgtacttctaagtgcccctgcagatgggcagagggatgcatggggatgcaggtcccttgcatttcttggtatctctcagcttttcctcttgcagctccccctaccaggggtcgctttctcctggattgcaaatgcctcttcagtttggactcagctctgacagcccctcctccaggaaggccttccaggacttcctcctctgggtcctctagctctgaccctacagggactccagatctcaacctgttccctggaagtagggcctgctctccatcccagtgaaataaacatgtattagacccnnnnnnnnnnnntaaacccgactcactaccaccaataagtactggcgcgccgcgcactaccccccacatccactacccttcccctctgcccaaaacccccctcctcgacagcaccacctttcccggccgcgcggcctcggatcggccggcgccgcccccgcccggggcgcttatcccttcccgacgcctcccgctcccttccgtctcccccccttcgtttctctcgccatagccatcgcttccgcgcgcgctgtgccgccgccgccgtgcccgacgcccctactcatcgcgcgctgcgggcctcgaggccgggccttgcgggcgggcctaacgtgtccgggcgtcgtataaggctcccctccgcctctcacgccataggcgcgcacgggcggccgcgcgcaccctggtgctacgcgccgtcggcacacccgccgcaacccattggacggccgcgcatgacccacgcgccctcagtacatggagtgttccccatcttcctccgccgtggtctggtcgccgccccctacaccctctgtatgccgtcctggtcggatcgcgcccgtcgggcggcggcggtgcccgcttcctcttcattccagcccctcgcttacacttatcgctctcgtctcgctcagctcgccagtgtgtcccggacaccgcctctgcctatgcctctgtcacctatcctctctgtgttcctgtccccgccccccggcggcgccggtgatattcggttcttcgctccaccgctctcgccgaccggcgtgtggtcgctacaaccgctatggccccatcatggtggatctcctgccgctcatcgccccgccgtcactatgttccccattgccgtgcctctcaacccaca

SEQ ID NO: 74428 - DNA, 1109 bp, Homo Sapiens
ggtttgagtatgatgtttaatgtaagatccagtggcttggcagagttggtgcaaaactgtaaagtaccagattaagttctagtcagtgagttagcagcctaggcacttgggcaaaaaaattggccctgctgtcccaagtcctccaaagccctctccgtatcaccagctaggagctccaagactgatatgccactacttggaggcttgagtagaatccacgcgtcctcagtttccaaagtgacaagagactggccccagccatcaaagcagtagaattttcaggacagggttgaggacagtggggacagaactggacatgggggcctgagctgctgaacatttgctacatgcagtagtctaagaggctcacagctggagaggttagcctgtccaccttcccacccatgtgtggtagggaagaaggtgaccatctagttaaagaaaaaaagatccttccaaagctgtatttggcataagctaataccactgctagtgctgccactggccaggcacagatacagaaggccctgaggagttgggaggaagggagaacaatgtgcaggcaaagcaggaaacagccagctcaggtccccgccccaggggcccagaaggataaaggccgtgcagtaaagggaacatacggttcttctctttggtcaggcaaaggcccgaatatgggcctgttaggtgaaagggctgaagggcacaggctctgcccttggaccctagctttaggctcatcacattgaggcggtgatggagcgagacgaaggcaggaagacagagcagtcaggctgggactcgccagctcctaggagctgcccttgtccttgttgtccatcaggtcataccaccgggctacaccctgggaaaggtctgtctcagctaggtccagctgcaccttccccagcagctcacgctctcttgacatgaaggaggaattagacttgacagagacatccagctttcgtctctgggcctcatccagggggagttcccactcaaaccgttcattaaattcaggactcagggtcctcttcttctgtgaggtcctcctcttggcctcgtgccgaattctcacacccaggcctcgctacctagcgtagatt

SEQ ID NO: 74429 - DNA, 1590 bp, Homo Sapiens
  misc_feature (1266)..(1266): n is a, c, g, or t
cccaaatcagaagaaagtatctcgaacacccattatcataattcctgcagctaccacctctttaataaccatgcttaatgcaaaagaccttctacaggacctgaaatttgtcccatcagatgaaaagaagaaacaaggttgtcaacgagaaaatgaaactctaatacaaagaagaaaagaccagatgcaaccagggggcactgcaattagtgttacagtaccttatagagtagtagaccagccccttaaacttatgcctcaagactgggaccgcgttgtagccgtttttgtgcagggtcctgcatggcagttcaaaggttggccatggcttttgcctgatggatcaccagttgatatatttgctaaaattaaagccttccatctgaagtatgatgaagttcgtctggatccaaatgttcagaaatgggatgtaacagtattagaactcagctatcacaaacgtcatttggatagaccagtgttcttacggttttgggaaacattggacaggtacatggtaaagcataaatcgcacttgagattctgaattatttggctcctccatttctggaaattgagactcaagctttatgaatttatcaagaacttaaaaatgaagaaggtcacagattgatcttttataagaccttatttgatgctttgtgcttcaaggagatgatacctgtcatccatataagcaaactttttggcttacaactatttttttaatattagccttctagtctgtaatggaaattgtatattttgatagaagttttttctccattggttaaattagcattacttaaaatttgtttctttagaaaataaatgcaggttataaatgtgtgtatatttagagattataaggctctctgagccatcttctgatttttcattgctctataattctttttactgaaaatactatgttatgaatggtattaaattttagtctctggaacatccaaaaccaagcaaagggatgtgactattttgaatgaatcagaatgtcaacttgtatgtacactatatctacacttactcattatttaacaaagaataatgaaaaatctagatcaattcttcaatttgattgaactgttcagccttttcaagatttctttatttacaaatgattacatttaaatgaatgtacattcttctcactgactttggtgattttgaaacctagaatgatgtgtttctatctgtaatatctttccatttgaaaaaaatctcaaaacacagattaaaaccacaatnaggctgtagtattttttattttgggagccagagtatgatttgggggaagaatatgtatcagccctattgcagtataactttaagctccttttctctttagtccacttttgattgtaatttttatggtataggattttgaatcttctattttaggcttgtcagtcttggagttcttatcttccattatccctaaatattgataaactcccaggcaccaaagaaaacatttgcttaattgtctgaaaagaaacaagagaaaaacactggtatttttatgtctgtattcaatatggtataaaatataacaactatattttaacttaa

SEQ ID NO: 74430 - DNA, 1163 bp, Homo Sapiens
  misc_feature (762)..(762): n is a, c, g, or t
agtaaagttttgcacttccccaatccagaagacaagaaattggaagaaatcattcaccagattactaatgtggaagctctcattgccagagctcggtcactaaaagccaagtttggaactgagaaatgtgaacaggaggaggaaaaggaagatcttgaaaggtttgtgagttgcctgctggagcagcctgaagtgttagtcaccggtgcaggaagaggacatgctggcaggatcattcacaagctgtttgtgaatgcccagaggtctgcagctatgactccaccagaggaggaattgaagagaatgggctccccagaggaaagaaggcagaactccgtgtcagacttcccaccccctgctggccgggaattcattttgcgcaccactgtgccgcgccctgctccctactccaaagctctgcctcagcggatgtacagtgttctcaccaaagaggactttagacttgcaggtgccttttcatcagatacttccttcttctgattcttctagcattactcgttggtggcttcagagacagtgctgcctcctcctgagggagggaaggtaccagggagaacctgggaggtcctggagagggccctgtccagttgggtgatcaggaatcaaaccagcatcggaaagacttcccagcaccaagcttgagctgtgtcgtttcgtggagggggcagcgaggatgggcttgagctgttgagagatttctgccctagagatggcctttgtatatgggggggtggtgggggnacacaaacacatcagacactccgtcctcacactggcaggacggtgttcatcgcattctcttctgtgaccagcctctaggctagcggctgcattcgtggtctgtgcaaacacttcgtggttctatatatcagcagcaagtgtgcaaaataaaggacctgttaactcagatttctggatattttggtggtagcttctagtcccagaatctgtgtttttaaaatactacatgacattctgtctattcaatcacctggtggtcatctttcttgtactaattaactgttgatgagcattttggatattctaggagaaagcctataatttcacatagtttctctttttcatgtaactgtaacctaaatgtattacttctgataaaactatatatcaaatgtcactgc

SEQ ID NO: 74431 - DNA, 759 bp, Homo Sapiens
  misc_feature (661)..(683): n is a, c, g, or t
tacggcgccgtaaagcagctcggccgagcagactgctgcggttcctgggtggcggcggcatggaggcgcgcttcacgcgcgggaagtcggcgctgctggagcgcgcgctggcgcggccgcgcaccgaggtgagcctgagcgccttcgcactgctgttctccgagctggtacagcactgccagagccgcgtcttctccgtggccgagctgcagtcgcgcctggccgcgctgggccgccaggtgggcgcgcgcgtgctggatgcgctggtggcgcgcgaaaagggtgcccggcgtgagaccaaggtgctaggcgcgttgctcttcgtcaagggcgccgtgtggaaggcgctcttcggcaaggaggcggacaagctggagcaggccaacgatgacgcgcgcaccttctacatcatcgagcgcgagccgctcatcaacacctacatctccgtgcccaaggagaacagcacgctcaactgcgccagcttcacggcgggcatcgtggaggcggtgctcacacacagcggcttccctgccaaggtcacggcgcactggcacaagggcaccacgctcatgatcaagttcgaggaggcagtcatcgctcgagaccgggccctggagggccgctgaccctgccggagataaaggatacagagagcccctcnnnnnnnnnnnnnnnnnnnnnnngcctacagccgcggccgcaagcttacaccctttacagagggttaattttagcttggcacaggccgtcgttaaaacc

SEQ ID NO: 74432 - DNA, 1691 bp, Homo Sapiens
  misc_feature (15)..(15): n is a, c, g, or t
  misc_feature (875)..(935): n is a, c, g, or t
  misc_feature (977)..(995): n is a, c, g, or t
  misc_feature (1006)..(1021): n is a, c, g, or t
  misc_feature (1158)..(1194): n is a, c, g, or t
caaattaaaagattntaacatgtcagagagaagagagttaaaatttaaaaatcatcttgggagagaaattgtctatgtttctagtgcctttcttgtcttgattgtatggtcagtaggcaatcttaaatgtttttatttaaaataaagtattccttgaaaatataaatatatgtatacactactaaattttgcatttatagctaaattgaatcagaagactgcttatggttttaaaattgcaatgacttaaataatgaggttgttaattagagtcagagcctgttcacatattgtgatcaggtagcaatgacatgtaccacttaaattattttatcgtcgatttggtagttcaattttaactactcaatgaaaacagccatgaatatcttttcttaaagagagttttgaaaatgatcacttacctaaaacttgaaagctatgaattagttatccatactctcatgacaattttgttggtgaacaacaaaaaagagatctatttctttaaaagatatttgtgcagaaactgcatgtaactctaagttttactcctaacatacatatgtttggggaagtattctattctatacttgccaatgtggagaacaaaatagttttttaagaatgaagaagtatatatatccattctgtattttacgtgcagcagaattatcttccgtaggatttttttgtgtattcacaaggtgatatttgtattgtaaaacaataatggtgaaggaaataaaaaggcttttaaaattttgtttgttttaaatctttgtaaagttattattccagagagtatactggtatcttacagcttacctagatcataaattaatcaaaatgcactttttaataaaaactgatacttnnnnnnnnnnnnnnnnnnnnnnnnnnnnnnnnnnnnnnnnnnnnnnnnnnnnnnnnnnnnncacacctaacacacataaaaccacacaatccttccaattttnnnnnnnnnnnnnnnnnnnccttgtggggnnnnnnnnnnnnnnnnaaaaaattttcctaaaaccttccttttggggggcggggcgccccacagtgtattggaaccttgggctcaatactggtttcccaaagaaaaaaccctgggcacataaaccaaggggttggggatattttaacaaattnnnnnnnnnnnnnnnnnnnnnnnnnnnnnnnnnnnnntaaacacattttcccaaatggggagttcttgcggaggccattcaccgggggtctctccacacacaagggcgcggcccccccagtggggactcctctatacttcccaaattatagccccccccgccgtcgtgcccccctctttttttaaaacatcgtgttctattacacccccctattaagactttttcttccgcccgcaattgggcgcatatccctctcacacaaaacgcggggatttgtataacaaccctcgaaacctcctccccaatggtgcaacatcacacacacctttctggctcgctcctgttgcgcaaaatataactattttctcccacccccgtgggaacgacacaaccgcgggggcggcacacaaaaaatattttgctcccccatcacttctgccgccccaccgctacttataatcacacaaaaaaccgggcgcggaataaacctaccccctccgcgtggcacatctggttggtttctaatacaacaaa

SEQ ID NO: 74433 - DNA, 597 bp, Homo Sapiens
  misc_feature (66)..(66): n is a, c, g, or t
gatggtgctgtccactgagaacgtgggcagtgtccaaattcctgtactgtaaagactaaaagggtntgctctgagactgacaaggcggaaacttccattgtctcctgccaggctctgtccccctacgccatcccgacacgtccccgttcccccgaaacctggctcagtgcaatactcccattgccatggggtccttcaccatggtactgtctccacagccctcagtccccaccccaggagaggcgcctgccacctcctcctcatctccggtggttcaatcgctccgcctgtccccaacccagtcccatttttatggccaaactgattctgaaacaaaatgaaactgcaaacctcgtgtgtcttaactccccccagggatgccactccattcctccgccccgtggtctggtgcgtgacaatccaaagcgccgagacgagggtgctgtgtccctcaaacccagagtggtgggcgcctctgaaaccatacagccactcctggccccaaacactggtttgcatcccaggttcctcgcccacctacccccgccacaccccgtctttttagagatctctctaataaatcgggtaataagcaaa

SEQ ID NO: 74434 - DNA, 670 bp, Homo Sapiens
  misc_feature (28)..(28): n is a, c, g, or t
tgaaagcagcacagaaggctgcagcctntgaagagcaggagaatgagacagtggtggtgaaagagaagatggttggcggcattgcccagatcatcgcagcacaggaagaaatgcttcggaaggaacgagagctggaagaggcgcggaagaaactggcccagatccggcagcagcagtacaagtttctgccttcagagcttcgagatgagcactaaagaagcctcttctatttaatgcagacccggcccagagactgtgcgtgccactaccaaagccttctgggctgtcggggcccaacctgcccaaccccagcactccccaaagtgcctgccaaaccccagggcctggccccgcccagtcccgcagtacatcccctgtcccctccccaaccccaagtgccttcatgccctagggccccccaagtgcctgcccctccccagagtattaacgctccaagagtattattaacgctgctgtacctcgatctgaatctgccggggccccagcccactccaccctgccagcagcttccagccagtccccacagcctcatcagctctcttcaccgttttttgatactatcttcccccacccccagctacccataggggctgcagagttataagccccaaacaggtcatgctccaataaaaatgattctacctacaaa

SEQ ID NO: 74435 - DNA, 2630 bp, Homo Sapiens
agctagctaggtacgaggctgggtgtggaatcggcacgaggcatgctgccgggtctgaagcctcccagctgggacacaaggtgtcccagatggcgcagtactttgagccgctcaccctggctgcagtgggtgctgcctccaagaccctgagccacccgcagcagatggcactcctggaccagactaaaacattggcagagtctgccctgcagttgctatacactgccaaggaggctggtggtaacccaaagcaagcagctcacacccaggaagccctggaggaggctgtgcagatgatgaccgaggccgtagaggacctgacaacaaccctcaacgaggcagccagtgctgccggggtcgtgggtggcatggtggactccatcacccaggccatcaaccagctagatgaaggaccaatgggtgaaccagaaggttccttcgtggattaccaaacaactatggtgcggacagccaaggccattgcagtgaccgttcaggagatggttaccaagtcaaacaccagcccagaggagctgggccctcttgctaaccagctgaccagtgactatggccgtctggcctcggaggccaagcctgcagcggtggctgctgaaaatgaagagataggttcccatatcaaacaccgggtacaggagctgggccatggctgtgccgctctggtcaccaaggcaggcgccctgcagtgcagccccagtgatgcctacaccaagaaggagctcatagagtgtgcccggagagtctctgagaaggtctcccacgtcctggctgcgctccaggctgggaatcgtggcacccaggcctgcatcacagcagccagcgctgtgtctggtatcattgctgacctcgacaccaccatcatgttcgccactgctggcacgctcaatcgtgagggtactgaaactttcgctgaccaccgggagggcatcctgaagactgcgaaggtgctggtggaggacaccaaggtcctggtgcaaaacgcagctgggagccaggagaagttggcgcaggctgcccagtcctccgtggcgaccatcacccgcctcgctgatgtggtcaagctgggtgcagccagcctgggagctgaggaccctgagacccaggtggtactaatcaacgcagtgaaagatgtagccaaagccctgggagacctcatcagtgcaacgaaggctgcagctggcaaagttggagatgaccctgctgtgtggcagctaaagaactctgccaaggtgatggtgaccaatgtgacatcattgcttaagacagtaaaagccgtggaagatgaggccaccaaaggcactcgggccctggaggcaaccacagaacacatacggcaggagctggcggttttctgttccccagagccacctgccaagacctctaccccagaagacttcatccgaatgaccaagggtatcaccatggcaaccgccaaggccgttgctgctggcaattcctgtcgccaggaagatgtcattgccacagccaatctgagccgccgtgctattgcagatatgcttcgggcttgcaaggaagcagcttaccacccagaagtggcccctgatgtgcggcttcgagccctgcactatggccgggagtgtgccaatggctacctggaactgctggaccatgtactgctgaccctgcagaagccaagcccagaactgaagcagcagttgacaggacattcaaagcgtgtggctggttccgtcactgagctcatccaggctgctgaagccatgaagggaacagaatgggtagacccagaggaccccacagtcattgctgagaatgagctcctgggagctgcagccgccattgaggctgcagccaaaaagctagagcagctgaagccccgggccaaacccaaggaggcagatgagtccttgaactttgaggagcagatactagaagctgccaagtccattgcagcagccaccagtgcactggtaaaggctgcgtcggctgcccagagagaactagtggcccaagggaaggtgggtgccattccagccattgcactggacgatgggcagtggtcccagggcctcatttctgctgcccgggatgggtggctgcggccaccaacaatctgtgtgaggcagccaatgcagctgtacaaggccatgccagccaggagaagctcatctcatcagccaagcaggtagctgcctccacagccccagctcctttgtggcctgcaaaggtcaaggctgaccaggactcggaggcaatgaaacgacttcaggctgctggcaacgcagtgaagcgagcctcagataatctggtgaaagcagcacagaaggctgcagcctttgaagagcaggagaatgagacagtggtggtgaaagagaagatggttggcggcattgcccagatcatcgcagcacaggaagaaatgcttcggaaggaacgagagctggaagaggcgcggaagaaactggccccagcccactccaccctgccagcagcttccagccagtccccacagcctcatcagctctcttcaccgttttttgatactatcttcccccacccccagctacccataggggctgcagagttataagccccaaacaggtcatgctccaataaaaatgattctacctaca

SEQ ID NO: 74436 - DNA, 1016 bp, Homo Sapiens
  misc_feature (957)..(957): n is a, c, g, or t
cagtcgacggtaccggacatatgcccgggaattcggccattacggccggggcgtgtgaggtggcggcctggtgcccggtggaggatgacacacacgtgccacaacctgcttttttaaaggctgcagaaaacttcactcttttggttaagaacaacatctggtatcccaaatttaatttcagcaagaggaatatccttcccaacatcaccactacttacctcaagtcgtgcatttatgatgctaaaacagatcccttctgccccatatttccgtctttgggcaaattaaggtgggaagaaacggcgggacacggtttccaggacttggccggtgaagggaggctatcagtgggctatccaggtcaatgtggagacggtgcaacgtggacagagccgctctccctctgcttgcccaggtactccttccgccgcctcgatacacgggacgttgagcacaacgtatctcctggctacaatttcaggtttgccaagtactacagagacctggctggcaacgagcagcgcacgctcatcaaggcctatggcatccgcttcgacatcattgtgttgggaaggcagggaaatttgacatcatccccactatgatcaacatcggctctggcctggcactgctaggcatggcgaccgtgctgtgtgacatcatagtcctctactgcatgaagaaaagactctactatcgggagaagaaatataaatatgtggaagattacgagcaggtaggcccctcctggcccccagcaggcacaggcctctcatctcttgggtgtgggagccctgggcgtgggcctgtctggggaggcccttctgcagaggctggcaccagtgtggcgtggtgtccccgttaacccgggcagtcctgccactctcagcagctgctccatccctaggcccctgtactagattgactctttaaacccagcctcgtttcaatgagcgnacatctcaaggtggtgaagataatgcatgctctgagaatgcctgtgggcacacactact

SEQ ID NO: 74437 - DNA, 985 bp, Homo Sapiens
acggctggaccggtccggaatcccgggaatcgtcgacccacgcgtccgctgggagcgggcggcgcggccatggcgggctgctgcgccgcgctggcggccttcctgttcgagtacgacacgccgcgcatcgtgctcatccgcagccgcaaagtggggctcatgaaccgcgccgtgcaactgctcatcctggcctacgtcatcgggtgggtgtttgtgtgggaaaagggctaccaggaaactgactccgtggtcagctccgttacgaccaaggtcaagggcgtggctgtgaccaacacttctaaacttggattccggatctgggatgtggcggattatgtgataccagctcaggaggaaaactccctcttcgtcatgaccaacgtgatcctcaccatgaaccagacacagggcctgtgccccgagattccagatgcgaccactgtgtgtaaatcagatgccagctgtactgccggctctgccggcacccacagcaacggagtctcaacaggcaggtgcgtagctttcaacgggtctgtcaagacgtgtgaggtggcggcctggtgcccggtggaggatgacacacacgtgccacaacctgcttttttaaaggctgcagaaaacttcactcttttggttaagaacaacatctggtatcccaaatttaatttcagcaagaggaatatccttcccaacatcaccactacttacctcaagtcgtgcatttatgatgctaaaacagatcccttctgccccatattccgtcttggcaaaatagtggagaacgcaggacacagtttccaggacatggccgtggagggaggcatcatggggcatccaggtcaactggggactgcaaccctggacagagccggctccctctggcttgcccacggtaactcctttccgccggcttcggattcccggacgttgaagcccaagttatctcctggcttcaatttcaggttggccagtacttccgagacct

SEQ ID NO: 74438 - DNA, 531 bp, Homo Sapiens
  misc_feature (446)..(446): n is a, c, g, or t
atgacccactgtgcctggcctcttgtcccattctttagcttggcatcaccctggctgagatgtggctggcacacaggtaactgtcttcctccgattctaactcctggacagtgacactgtctaaatcccagatttgcacagctcaagactggctgcatgggaggctggatggggctctcactccctactccaaaaaggtagaaaataggagacccctgtggacatgggacccccctgccaccattgtgcttgtaggagtctcaacaggcaggtgcgtagcgttcaacggtgccagtcaagacgtgtgaggtggcgccctggtgcccgggggaggatgacacacacgtgccacaacctgcttttttaaaggctgcagaaaacttcactcttttggttaagaacaacatctgggatccccaatttaaatttcagcaagagggatatcncttcccaacatcacccactactttacctccaggtcgtggcatttatggagctaaaaacagattcctttctggcccccatattccg

SEQ ID NO: 74439 - DNA, 1646 bp, Homo Sapiens
ggggcgagagagtatgaagtcgacggcgcgccgaattcggcacgaggcccaatagccaagctggacagcaagggctagtggagcccacacagtttgcccgtgcaaaccaggcaattcagatggcctgccagagtttgggagagcctggctgtacccaggcccaggtgctctctgcagccaccattgtggctaaacacacctctgcactgtgtaacagctgtcgcctggcttctgcccgtaccaccaatcctactgccaagcgccagtttgtacagtcagccaaggaggtggccaacagcacagctaatcttgtcaagaccatcaaggcgctagatggggccttcacagaggaaaaccgtgcccagtgccgagcagcaacagcccctctgctggaggctgtggacaatctgagtgcctttgcgtccaaccctgagttctccagcattcctgcccagatcagccctgagggtcgggctgccatggagcccattgtgatctctgccaagacaatgttagagagtgccgggggactcatccagacagcccgggccctcgcagtcaatccccgggaccccccgaactggtcggtgctggccggccactcccgtactgtctcagactccatcaagaagctaattacaagcatgaaggacaaagctccaaggcagctggagtgtgaaacggccattgcagctctgaacagttgtctacgggacctagaccaggcttccctcgctgcagtcagccagcagcttgctccccgtgagggaatctctcaagaggccttgcacactcagatgctcactgcagtccaagagatctcccatctcattgagccgctggccaatgctgcccgggctgaagcctcccagctgggacacaaggtgtcccagatggcgcagtactttgagccgctcaccctggctgcagtgggtgctgcctccaagaccctgagccacccgcagcagatggcactcctggaccagactaaaacattggcagagtctgccctgcagttgctatacactgccaaggaggctggtggtaacccaaagcaagcagctcacacccaggaagccctggaggaggctgtgcagatgatgaccgaggccgtagaggacctgacaacaaccctcaacgaggcagccagtgctgctggggtcgtgggtggcatggtggactccatcacccaggccatcaaccagctagatgaaggaccaatgggtgaaccagaaggttccttcgtggattaccaaacaactatggtgcggacagccaaggccattgcagtgaccgttcaggagatggttaccaagtcaaacacccagcccagaggagctgggccctcttgctaaccagctgaccagtgactatggccgtctggcctcggaggccaagcctgcagcggtggctgctgaaaatgaagagataggtttcccatatcaaacaccgggtacaggacctgggccatggctggtgccgctctggtcacccaggcaggcgccctggcatgcaccccccgtggatgcctacccaagaaggagcctcctaaagtgtgccccggaaagttttctgaaaaggtcttccccgttcctggctgcgctccaggcttgggaaaccgtgggaacccggccctgtcatccaag

SEQ ID NO: 74440 - DNA, 474 bp, Homo Sapiens
atggctgcccggagtgcatggctggaatggcacccaccttcccttggccactagttctctctgggcagccgacgcagcctttaccagtgcactggtggctgctgcaatggacttggcagcttctagtatctgctcctcaaagttcaaggactcatctgcctccttgggtttggcccggggcttcagctgctctagctttttggctgcagcctcaatggcggctgcagctcccaggagctcattctcagcaatgactgtggggtcctctgggtctacccattctgttcccttcatggcttcagcagcctggatgagctcagtgacggaaccagccacacgctttgaatgtcctgtcaactgctgcttcagttctgggcttggcttctgcagggtcagcagtacatggtccagcagttccaggtagccattgcactccggccagccattgcactccggccagccattgcactccgg

SEQ ID NO: 74441 - DNA, 1562 bp, Homo Sapiens
  misc_feature (50)..(50): n is a, c, g, or t
ccgctcacccgctccctgtacgtgaacatgactagcggcccgggtgggcngcggcggccgcgggcggcaggaaggagaaccaccagtggtatgtgtgcaacagagagaaattatgcgaatcactccaggctgtctttgttcagagttaccttgatcaaggaacacagatcttcttaaacaacagcattgagaaatcgggctggctatttatccaattatatcattcttttgtgtcatctgtttttagcctgtttatgtctagaacatctatcaatgggttgctaggaagaggctcaatgtttgtgttttcaccagatcagtttcagagactgcttaaaattaatccagactggaaaacccacagacttcttgatttaggtgctggagatggagaagtcacaaaaatcatgagccctcattttgaagaaatctatgccactgagctttctgaaactatgatatggcagcttcagaaaaagaaatacagagtccttggtataaatgaatggcagaatacggggttccagtatgatgtcatcagctgcctgaacttgctggaccgctgtgatcagcccctgactttgttaaaagatatcagaagtgtcttggagccaactagaggcagggtcatccttgcccttgtcctcccctttcatccctatgtggaaaacgtaggtggcaagtgggagaaaccatcagaaattttggaaatcaaaggacagaactgggaagaacaagtgaatagtctgcctgaagttttcagaaaagctggttttgttatcgaagctttcaccagactaccatacctgtgtgaaggcgacatgtataatgactactacgttctggatgacgctgtctttgttctcaaaccagtataaacacgtggaggtcgaagtcttcagagtccgcaccctccgggatgtgcccttggaagagggtctgtgttcacaattacgtgaagggaggacccttggggaccgccattctaaatatcatgtaggaatttaaaaagccaaaatactaattatttctttgtagtgtgtaaaggaatgtttttaaaagacaaaaacccaactctttgtggatttttatcaactctttactcagagccactctccaatgcaggtcacactccaattatgatggaagatattttttatacttaattgcagtagggactcattcccagacaaagcaatagtcacgacttcatggaaccaatcaatggattgttttttgaagactggcaataaagctgtccattcaattccaaatactggttttaaggtatagccactgatattctttcatgtttagaaattctttctgttattattcaagaaaatgtttttaatcatgctaataaacttttttggagatgactttggcatcatgtttgaattcatataaagctcccctagcattttttattggtttggcttcaggagtacccaaatagtagcattatgagaatgacgcagacaatttgaataggggggaaggaaggcttcagacttgggggaaggggagattattgcaaattgcagtgaacactgagtcag

SEQ ID NO: 74442 - DNA, 1301 bp, Homo Sapiens
  misc_feature (1220)..(1220): n is a, c, g, or t
cattagacgatgtatatgcgaagacacttgatagctggtattgtcatgattctgattatttcactactgctactttccctgtggcctaggctttgcctatttccagtgggcgagctagctagatcctcctcccttaaataagccagtgtttttaagacagaatactacttgcatagtggacaataatatcttaaagaactgagcaggatgaaaagaatttgatagaaagcaggtttgaggagcacattggaggttggcaggtttcgaggctgcttgagaggacttgggccgatctgggctgggcttggacgtgaccctggcacccaggcaggtggatcccagctggggcttccattcacgactttctggtccctggcaggacagagcgggatgccaccagcttgtccaaagggaagttccaggagctcctggtgggcatcgttgtggagaatgacgctggccgcggcgagatcaacgagttgaagcaggtggaaggggaggcttcgtgcagcagccgcaaaggaaagctgattttcttctatgagtggaacatcaaactgggctggaaaggcatcgttaaagaatctggagtgaagcacaagggattgattgaaatacccaatctttctgaggaaaatgaagtagatgacactgagaatttacaacgggaatgattttaccaacgaaagctatggcaacccaggaattgactgtcaaaagaaaactgagtgggaataccctgcaggttcaggcctcatctccagtggcactgggtgtaaggattcccactgtggctcttcacatgatggaactgtttgacacaactgtagagcagctgtatagcatcttcactgtaaaggaggaagagagagcttgtgttttattttctttaacaaataagaagatcatcatgaaatggagatgtgggaactggccacaagggcaaacagaattacaattgaaggagttcctatctatctgtaaagaagagaacatgaaattctgttgggagaagcagcattttgaagaaataaaaggttcactgcagctgacccccctaaatgggtgaattaaaatttattataagggcattacttttttgtaaggcggaaaaagcgtccacattcacctcctcccctatccttttggttaaaaggaccggcctttatttttataattggcatgacaatcctatgcaggcgtcatatacccactggccnggcccgcttccagcgcttgccacgcctccaaccaggtaaacattgtctggggccgccccttcgcggcaccctctgaagaac

SEQ ID NO: 74443 - DNA, 900 bp, Homo Sapiens
taggggcaaacatgcccattaattctttggcatcttggactaaaaagacagttgcaagccagcttgcttttggacaagcttaacttggggaacatcaactatttgcactcaggacttacctatttccagaggaatatcgatggaaggtcaggttaatacttaatttcaggttgcttgctacttttaaatcaatgcagtgtctagttataataaagagtcaaacaatgctttacattgtatatatgttcatagatttcatccaatataaaataaagacagtccttttaaacaaaagatagggaagaggtaaatgtgacactttttccgcttacaaaaagtaatgccttataataaattttaattcaaccatttaggggggtcagctgcagtgaaccttttatttcttcaaaatgctgcttctgccaacagaatttcatgttctcttctttacagatagataggaactccttcaattgtaattctgtttgccctagagtaggcacaaaattcagtgcaaccatggcatagtgttcttctggccagttcccacatctccatttcatgatgatcttcttatttgttaactcctttacagtgaagatgctatacagctgctctacagttgtgtcaaacagttccatcatgtgaagagccacagtgggaatccttacacccagtgccactggagatgaggcctgaacctgcagggtattcccactcagttttcttttgacagtcaattcctgggttgccatagctttcgttggtaaaatcattcccgttgtaaattctcagtgtcatctacttcattttcctcagaaagattgggtatttcaatcaatccctttgtgcttcactccagattctttaacgatgcctttccagcccagtttgatgttc

SEQ ID NO: 74444 - DNA, 3431 bp, Homo Sapiens
  misc_feature (59)..(59): n is a, c, g, or t
  misc_feature (2016)..(2016): n is a, c, g, or t
  misc_feature (2018)..(2018): n is a, c, g, or t
gctttctggttttatcattctaagaatcccagagaaaccagggtattcttaggaaagantggattcctgggaaaataaacatctgcaattaactgtaaacaactgcatcaaagtgttggctttagaatttgaaatgttcctatctgggtttttgtaggacctgagggcactcgctttgctcctgtcagtacacactcccaaacagttgaacccagctctaattccaactctgcaagagcttttaagcaaatgcaggacttgtctgcaacagagaaactcactccaagagcaaaaagccaaagaaagaaaaactaaagatgatgaaggagcaactcccattaaaaggcggcgtgttagcagtgatgaggagcacactgtagacagctgcatcagtgacatgaaaacagaaaccagggaggtcctgaccccaacgagcacttctgacaatgagaccagagactcctcaattattgatccaggaactgagcaagatcttccttcccctgaaaatagttctgttaaagaataccgaatggaagttccatcttcgttttcagaagacatgtcaaatatcaggtcacagcatgcagaagaacagtccaacaatggtagatatgacgattgtaaagaatttaaagacctccactgttccaaggattctaccctagctgaggaagaatctgagttcccttctacttctatctctgcagttctgtctgacttagctgacttgagaagctgtgatggccaagctttgccctcccaggaccctgaggttgctttatctctcagttgtggccattccagaggactctttagtcatatgcagcaacatgacattttagataccctgtgtaggaccattgaatctacaatccatgtcgtcacaaggatatctggcaaaggaaaccaagctgcttcttgacattaggtgtagcatgtctacttttaagtccctcacccccaacccccatgctgtttgtataagttttgcttatttgtttttgtgcttcagtttgtccagtgctctctgcttgaatggcaagatagatttataggcttaattcttggtcaggcagaactccagatgaaaaaaacttgcatcttcagtatacttcctaaagggcaatcagataatggatatgttttatgtaattaagagttcactttagtggctttcatttaatatggctgtctgggaagaacagggttgcctagccctgtacaatgtaatttaaacttacagcatttttactgtgtatgatatggtgtcctctgtgccagttttgtaccttatagaggcagattgcctccgatcgctgtggttcttattatcaaaattaagtttacttgtatacggaacaaccacaagaaatttgattctgtaaagaatcctctttagctgtggcctggcagtatataaatggtgctttatttaacagaatacctgtggaggaaataaagcacacttgatgtaaaaataattgttttatttttattgacatgactgattgattgctattctgtgcacttaattaaactgattgtgatgacttttcatttgtttacatacgttgcttcagtcttctcaggtgaaagtagtgagaaaaccgtgaaagaggggggaaacatttatccattatatgctgtttcactggaagtgttaccagcagtccacagaactaatgtgtccccacagacttctcaatcctctccacaccgaagtgcaaaaccacagcagggagatgtgcagggagatgtggagcaaaacacagccaatttgccctcacctcaacatgcttttgaatgcaatataccactgttttacgacctaagatctacacaccttaaaaaccctaaagtaaaataaaggaatagtgtcaacatgccatttattttttgtcatcttgaactaaaagtacagctgcaagcaagcttgctataggacaagcttcagcttgggaaacatcaactatctgcactcaggacttacctatttccagaggaatatcgatngnaagggccaggttaatacttaatttcaggttgtttgctacttttaaatcaatgcagtgtctagttataataaagagtcaaacaatgctttacattgtatatatgttcatagatttcatccaatataaaataaagacagtccttttaaacaaaagatagggaagaggtaaatgtgacactttttccgcttacaaaaagtaatgccttataataaattttaattcaaccatttaggggggtcagctgcagtgaaccttttatttcttcaaaatgctgcttctgccaacagaatttcatgttctcttctttacagatagataggaactccttcaattgtaattctgtttgccctagagtaggcacaaaattcagtgcaaccatggcatagtgttcttctggccagttcccacatctccatttcatgatgatcttcttatttgttaactgaaaagagaggggaaattccactgaaaatcttttaagacttcccacaatacaacacagaaaaatcctttcattgaaactcctagaagaatcaatgaacaacatacggtccttcttccagtttatacatcagcaccactgataattgtctttattgccaaaatgtctcagaacagcagtaacatcaaggacagcaggaatatataataatgttttaagtacagtaatagtaaccagaacagagggctgctgttaaggttgaggcaacacagaccctcgtgatttcggtgctaaaaacagcatatacaaaaagtaatattaagagttaatcccaccttacttcttcaaccttgagtctacttaccaatcctagatattcaccagtgatgttcccatcaaacatctggaatttccctcccttttcagtttctaatacagcagtagatttagaaaacttttgcaccaactaaccaaataaaacatgttattccagtacacactaacacataatataattatgaaatacaaaatataacaattaatatggtttaaaaatcctaaacatgtagcttttacttacagaaaataaaacacaaactctctcttcctagagggagaaaactcaatgtaatgcggacatagtcccaaagaatgcccatctcccctccaattattcagaaactatgctcagacttctgtcaccaccatcccacatcccttcaatcaaaaacacagccacaaggaaaaccaaaaaccagctcctgttctttgtaatgtattttctcccaatgtcagcacttaacatgctagcttagggagttacttacctcctttacagtgaagatgctatacagctgctctacagttgtgtcaaacagttccatcatgtgaagagccacagtgggaatccttacacccagtgccactggagatgaggcctgaacctgcagggtattcccactcagttttct

SEQ ID NO: 74445 - DNA, 1392 bp, Homo Sapiens
  misc_feature (75)..(109): n is a, c, g, or t
  misc_feature (1285)..(1327): n is a, c, g, or t
tatagatcactatagggcgctagctcgtcagagcgaacgacgagcgcagcagagtagtgagcgaggaagcggcgnnnnnnnnnnnnnnnnnnnnnnnnnnnnnnnnnnncagtcgacggtaccggacatatgcccgggaattcggccattacggccgggattccagatctgcagtcacttcgtgggatctgcccctccctgcttcaatacccaaatcctctccagctataacagtagggatgagtacccaaaagctcagccagccccatcaggactcttgtgaaaagagaggatatgttcacacctagcgtcagtattttccctgctaggggttttaggtctcttcccctctcagagctacttgggccatagctcctgctccacagccatcccagccttggcatctagagcttgatgccagtaggctcaactagggagtgagtgcaaaaagctgagtatggtgagagaagcctgtgccctgatccaagtttactcaaccctctcaggtgaccaaaatccccttctcatcactcccctccaaagaggtgactgggccctgcctctgtttgacaaacctctaacccaggtcttgacaccagctgttctgtcccttggagctgtaaaccagagagctgctggggattctggcctagtcccttccacacccccaccccttgctctcaacccaggagcatccacctccttctctgtctcatgtgtgctcttcttctttctacagtattatgtactctactgatatctaaatattgatttctgccttccttgctaatgcaccattagaagatattagtcttggggcaggatgattttggcctcattactttaccacccccacacctggaaagcatatactatattacaaaatgacattttgccaaaattattaatataagaagctttcagtattagtgatgtcatctgtcactataggtcatacaatccattcttaaagtacttgttatttgtttttattattactgtttgtcttctccccagggttcagtcctcaaggggccatcctgtcccaccatgcagtgcccctagcttagagcctccctcaattccccctggccaccaccccccactctgtgcctgaccttgaggagtcttgtgtgcattgctgtgaattagctcacttggtgatatgtcctatattggctaaattgaaacctggaattgtggggcaatctattaatagctgccttaaagtcagtaacttacccttagggaggctgggggaaaaggttagattttgtattcaggnnnnnnnnnnnnnnnnnnnnnnnnnnnnnnnnnnnnnnnnnnnaggggtttatgctcaatccatgttctatttcagtgccaataaaatttaggaagacttaaaaaaaa

SEQ ID NO: 74446 - DNA, 881 bp, Homo Sapiens
gcggctcctcctccgaggtgccctgcagcctcccgcaacgcctggctggccgtgacctcaaacgcctagctgccaatgacctgcagggctgcgctgtggccaccggcccttaccatcccatctggaccggcagggccaccgatgaggagccgctggggcttcccaagtgctgccagccagatgccgctgacaaggcctcagtactggagcctggaagaccagcttcggcaggcaatgcgctgaagggacgcgtgccgcccggtgacagcccgccgggcaacggctctggcccacggcacatcaatgactcaccctttgggactctgcctggctctgctgagcccccgctcactgcagtgcggcccgagggctccgagccaccagggttccccacctcgggccctcgccggaggccaggctgttcacgcaagaaccgcacccgcagccactgccgtctgggccaggcaggcagcgggggtggcgggactggtgactcagaaggctcaggtgccctacccagcctcacctgcagcctcacccccctgggcctggcgctggtgctgtggacagtgcttgggccctgctgacccccagcggacacaagagcgtgctcagcagccaggtgtgtgtacatacggggtctctctccacgccgccaagccagccgggcggccgacccgtggggcaggccaggccaggtcctccctgatggacgcctgccgcccgccacccccatctccaccccatcatgtttacagggttcggcggcagcgtttgttccagaacgccgcctcccacccagatcgcggtatatagagatatgcattttattttacttgtgtaaaaatatcggacgacgtggaataaagagctcttttttt

SEQ ID NO: 74447 - DNA, 965 bp, Homo Sapiens
  misc_feature (953)..(953): n is a, c, g, or t
ttttttggagaactccaaactcactttaatatgagataagccaagcaaatgaagagaaataatggttgtaaccagtccctggtaatacaagcagtggcaaaccttgttgatcaattccaacatataaacaagaaaacataaatgtcaggagctacaaactttagtattcagaggcggacctatgtataatggagccaataagaccaaattgacctttcaggtgtttccttgctatctcccacccccgctcctcatttacctcaagacacaatggtttttgcaaacgattattaaattgcctagtaagtcataaaattattcagtttttcagagacttactagcctcactcaaggaattacatctgcttctcaagggtaggctgtggcagatttttcatattaacacctgacatgtagttgaagccaaaaaagaaatacttgttgatgaaatgacacaatgctactttaaatgtagactgaactgaaatgaactcctgtgcaatgctgcactaaagcagctcctctgtgagtccaggtggtacttccagatcttagcagttctacttagaacactgaactagccttgttaatcacttaaaagtctcacatatgaacgaacatctaaactcccattaaagcaaaaatatcatcaatgtcatctgtctccttaatggttcctgatgtactgtttttatttattttgcatcaccgtccacgaatcagtttcattttcatggatgcctctaagattttcatgaatcattttctccttagtttgtatgacaggcattgaaactccactattcaagagctgcttactgttagggtagagatcagttctatgcacagtacagtgtgagagtctccacttagcactggtatctgtagcactcttccgagtcccttgagagaactgctgaatttcccttaaaagagtcgactgcaactttctnctgtggtttcct

SEQ ID NO: 74448 - DNA, 643 bp, Homo Sapiens
gcaggtgtggcaacacgtttaattctgtggccaggctagcctgtctccaaggcctggtggacagcacgtcaccagaggctgccgcaggagcaggcagggccagccctgcaagaggagtgcaggcaaaggcgggggctctgaagtggctgctggaggcagcaggccccgggctgggagtgctcagtagccgtcgttagcccaggtgacctcgtagtcggggtacttggctttgattttctcagttgaaatggcgtgctgggcaggaccataggccttgatggtggatcctggggcctgaggcgcccagagggacgcacgtgggtctcatcatggaatagccgtacacgtgaatcttcttgtcctgactctggtgggagatgcgcccgccgcccagacactcacagtcgcagccttgcttctgcatgtcgcccgacactttgtcgtagatgtccgcatggtactcagcccacttgtagccgcgcacgatctccttgctctctgcagccggagccccggagcggggagccgagtggactcggatcagcacatacttgaagacgccgtcggagtcgatgtccacatcaggaatgagagcgaggtccgccaccgccatgttcccctcgtccgaattcgccactcaggc

SEQ ID NO: 74449 - DNA, 488 bp, Homo Sapiens
  misc_feature (65)..(65): n is a, c, g, or t
  misc_feature (441)..(441): n is a, c, g, or t
caagcgaggcccaagccttgcaaagaggaagtgcaaggcaaaaggcggggggcttctgaaagtgnctgcttggaggcaagcaaggccccggggcttgggagtgcttcaagtaacccgtcggttagcccaaggtgacctcgtagtcgggggtacttggctttgattttctcagttgaaatggcgtgcttgggcaggaccataggccatggaatagccgtacacgtgaatcttcttgtcctgactctggtgggagatgcgcccgccgcccagacactcacagtcgcagccttgcttctgcatgtcgcccgacactttgtcgtagatgtccgcatggtactcagcccacttgtagccgcgcacgatctccttgctctctgcaagccggaagcgcggagcggggaaccgagtggactcggatcagcacatacttgaagacgccantcggagtcgatgtccacatcaggaatgagagcgaggtccgccaccgc

SEQ ID NO: 74450 - DNA, 1313 bp, Homo Sapiens
  misc_feature (1118)..(1127): n is a, c, g, or t
  misc_feature (1129)..(1146): n is a, c, g, or t
  misc_feature (1238)..(1238): n is a, c, g, or t
cagtcgacggtaccggacatatgcccgggaattcggccattacggccgggggactccgggaggaggaacatggcggtggcggacctcgctctcattcctgatgtggacatcgactccgacggcgtcttcaagtatgtgctgatccgagtccactcggctccccgctccggggctccggctgcagagagcaaggagatcgtgcgcggctacaagtgggctgagtaccatgcgggacatctacgacaaagtgtcgggcgacatgcagaagcaaggctgcgactgtgagtgtctgggcggcgggcgcatctccccaccagagtcaggacaagaagattcacgtgtacggctattccatggcctatgagcctgccagcacgccatcccaactggccggaggccccagtaccagcttcgaggcccacctgagcctgctgccctgacccgtggccccagctgagcacgcaggcttcctggggttctcccagggtcggcggcagagccctccctccagggcccattgtgttcctgcattcccccatgggggactccgggaggaggaacatggcggtggcggacctcgctctcattcctgatgtggacatcgactccgacggcgtcttcaagtatgtgctgatccgagtccactcggctccccgctccggggctccggctgcagagagcaaggagatcgtgcgcggctacaagtgggctgagtaccatgcggacatctacgacaaagtgtcgggcgacatgcagaagcaaggctgcgactgtgagtgtctgggcggcgggcgcatctcccaccagagtcaggacaagaagattcacgtgtacggctattccatggcctatggtcctgcccagcacgccatttcaactgagaaaatcaaagccaagtaccccgactacgaggtcacctgggctaacgacggctactgagcactcccagcccggggcctgctgcctccagcagccacttcagagcccccgcctttgcctgcactcctcttgcagggctggccctgcctgctcctgcggcagcctctggtgacgtgctgtccaccaggccttggagacaggctagcctggccacagaattaaacgtgttgccacaccgnnnnnnnnnncnnnnnnnnnnnnnnnnnnccatgtcggccgccctcgggcctcgagaaagttttctagaacctttcgttttggcggcgccgggcccaagtagggtaagggaaacatgggtncaatagcttggtttccttagggaagaatccgtgggcccatggaccaaagggcctttgggaattccccaccacaat

SEQ ID NO: 74451 - DNA, 773 bp, Homo Sapiens
aaacaattcaatttacaatagtatcaaaagaataaagtagttaggaagtaacgaagaagtaaaatgccaattactcttgtgtagatattaaaaaatcaatttttaagtttatggggaatctcaaagatctttaaattgcaaaaataattctgaaaaaaataccaaagttagagcagtcacacttaatgatttcaagacttaatacaaaattccaaaatagcatgctacaaagagactaatggagtaatatagaaggcccatataaataaaccctcatatataaggtcaaatgatttttatgggaaatgaactgcctttacaacaattagtgctggggaaattgggtgcccacatgtaaaagagtgaagctgggcccttaacttctactataagaaaaaattaactaactggatcaaagacctaaatgtaagagctaaaactacaaaattcttagtataaaatgtaggtaaaacacgtcataaggctggatttggcagtgatttcttttaacaggacaccaaaaacgcaagaaacaaaagaaaaatagataaagaggactctatccagaatatacaaagaacaattcagcaataataaactacttgtttaaaatatgggcaaaatacttaaacagatatttctctaaaaattatgtgaagtggcttataagcccatgaaaaggtactcaacaaaaccttttcattttcattagtaaaatgaaaatctaaccccgaaatgacatatcacttaatgcacatcagcataactagtac

SEQ ID NO: 74452 - DNA, 830 bp, Homo Sapiens
gttaaaaacccactgtaggtaaattagaagggcagctcttgaatctgggccagtctatatcccttctgtgaagtgctaacagccaggctatctgtagcctgggtgggagcccagataatgtgagctggtaaagggtattggaaaagtgccaagaaatgccaagcttttggttcgtaaccactataaaaagtttatgaacatgtcagaggaatggatgagtgatttgtgaggtcttaactagataccccggtttcttccttgttttggcttcttttcagaatgccgggagagtacatgcagggattccatctaatcaccctcagcactctttctctggtcctgctggatagatttagatttcctttctttttttagggcctcagtctgctatctcctttggtggctaccaccactcactcccttgatatcttctactcccttgccttcaccttgcttaagactgagaagggagttagattttgtcactagctcttctttttcctcactgtgtaccccaccaaacaagattagttcaagttaaaaagaacctactggaggtaaactgggagagcaagtgttggatctgggctggtccctttcccataaaattaggtccctggttgtatgttcccatagcaccccatacttcctctctcagaataatcatttcccttgtaatgctcagcatccgcatcctgcttgactgcaaacttgctgaaggtagggactgtttgtcttggacttcgctgccagtccttagaacagtgtctgggacacagtgtgttctcaaatatttgttgctggaataaatgaatgaactaaatcagaaa

SEQ ID NO: 74453 - DNA, 356 bp, Homo Sapiens
cgcatccaacaagacaccaggaaactcaacacgagaaagtcagtggtcccaaaggttgggtcagtttaagtaatggtttccttcacctctctcatcatacctgtgtgcctcaggaccacaatgtgacaagtagtggcatcatcagaacccaagaatggagatggagcctgtttaaaaaagaaataaaataaaatatccaatagccttttgggataacgcccaattcactgcttcctaacctaccatcctttggggaggtcactgcaagctctctttgctgaacatacagaaggccctggggtcccacttgttgaacagactgacctctgagaagtctggctctttcctgtttaatt

SEQ ID NO: 74454 - DNA, 490 bp, Homo Sapiens
aaatgctaatcattggtcctcctgctaaagttcgcgcagcacgaagctgctcccccggaccccgattcttgaaaggatgctctgtaaatctctgcagtcttaatgttgacagcaatgccatatattactggaaagtggttttcgttttcttcccggtcatttaattctgtcacacataatgtcactaagtgaatgtcatcttcttgcctgtcaaattcactaagaagttgatgagtgagtttttgtgacaactgcctgtcgtcactgaagcctccaacaaggtgtacttccagccttccacattgagcgtggtcagaaaaggattttatggagttcatgatcaaggggacctcagctttggtgtcggttccgtcacaatgtgtcaagcaggtggccccattacctccaaaggcgggtgggctcggacgaggtccccggctgactgcggcagccgcactcgccgcccctagacgaacagcggcatcgcgga

SEQ ID NO: 74455 - DNA, 1543 bp, Homo Sapiens
  misc_feature (1119)..(1144): n is a, c, g, or t
gcggccgcctccgcgatgccgctgctcgtcgaggggcggcgagtgcggctgccgcagtcagccggggacctcgtccgagcccacccgcctttggaggaaagagccagacttctcagaggtcagtctgttcaacaagtgggaccccagggccttctgtatgttcagcaaagagagcttgcagtgacctccccaaaggatggctccatctccattctgggttctgatgatgccactacttgtcacattgtggtcctgaggcacacaggtaatggggccacctgcttgacacattgtgacggaaccgacaccaaagctgaggtccccttgatcatgaactccataaaatccttttctgaccacgctcaatgtggaaggctggaagtacaccttgttggaggcttcagtgacgacaggcagttgtcacaaaaactcactcatcaacttcttagtgaatttgacaggcaagaagatgacattcacttagtgacattatgtgtgacagaattaaatgaccgggaagaaaacgaaaaccactttccagtaatatatggcattgctgtcaacattaagactgcagagatttacagagcatcctttcaagatcggggtccggaggagcagcttcgtgctgcgcgaactttagcaggaggaccaatgattagcatttatgatgcagagacagaacaacttcgtataggaccgtactcctggacaccatttccacatgtggatttctggttgcaccaagatgacaagcaaatactagagaatctttccacttcgcctctggctgagccaccccactttgttgaacatattagatctaccttgatgtttttaaaaaaacacccatctccagctcacacactgttttctggaaataaagccctactctacaaaaaaaatgaagatggcttgtgggaaaagatctcttctccaggaagttaaaaaacatgaattaccaaagaaagcaccttcttggcctgacagaccattggtggggctggcacgaatccagatctggatcctacatctgttgggtcttaggcctccttccctcctcagtgtctttcaaatgactttcatcaaatgactttcaaaataaaaccttattttggnnnnnnnnnnnnnnnnnnnnnnnnnnacacaacatgtcggccgccctcggcccttccgagaagcttttccagaccacttccctttgggcgcagcgcggccccggatagggaaagtgcaccctcggtacctagctttgttcttccccagcgcaaataccgggcaccggaaccagagggcttgggaaatcctcccccaacatacacccgacccccccggccggacaaccggagcgggttcttcgaaaaaaatacccacggatgggagctttatcgaggctccttttattgggagaccatcctacagcgcggagaggcccacaagagaaaattcccgacgtataaacttgagccccgctgtgaccccggaacacctccatctcaaaacccaccccgcggggggaaactcctccttaagaaaccaattt

SEQ ID NO: 74456 - DNA, 507 bp, Homo Sapiens
gcggccgcctccgcgatgccgctgctcgtcgaggggcggcgagtgcggctgccgcagtcagccggggacctcgtccgagcccacccgcctttggaggctccatctccattctgggttctgatgatgccactacttgtcacattgtggtcctgaggcacacaggtaatggggccacctgcttgacacattgtgacggaaccgacaccaaagctgaggtccccttgatcatgaactccataaaatccttttctgaccacgctcaatgtggaaggctggaagtacaccttgttggaggcttcagtgacgacaggcagttgtcacaaaaactcactcatcaacttcttagtgaatttgacaggcaagaagatgacattcacttagtgacattatgtgtgacagaattaaatgaccgggaagaaaacgaaaaccactttccagtaatatatggcattgctgtcaacattaagactgcagagatttacagagcatcctttcaagatcggggtc

SEQ ID NO: 74457 - DNA, 562 bp, Homo Sapiens
ggggcacagcgcgggcgcaggcgccgagaggcgcacgggagacctcaggcccagactccactccccagctgtgaaaggactgctggccagacccccaagctagcccgccaggcctccatagagctgcccagcatggctgcgtccagtaccaagagttggtgggagacgggtgaagtacaggctcagtctgcggccaagactccatcctgcaagactctttggcagttgcactgggtactggctgagttctggaaaacaggaatgtgagcagagtgctgcagatctccttgtcaggagcacctaagaactggcatgactctacaccctctctccttctgcaatgacctcgtgtcaagatggcagacctgcagagatgaatgtgcctggatacctgagtcaccaggtggaggaaactcccattgacatgcatcacactccacatatgaaacccttctttttctgcactgtcactggggttagggattattactcactgcaacttagcctagcattaagttgccccactaatacaagtttcaataaatgacgcttcatttcaaaa

SEQ ID NO: 74458 - DNA, 1598 bp, Homo Sapiens
gaaagcacagcacgtacacccactccagggatctgccagcaccctgtggggcccagactacaggctgatggcggaggcttcgagtgacccgggtgccgaggagcgggaagagttgctggggcccactgctcagtggagcgtggaggacgaggaggaggccgtccacgagcaatgccagcatgagagagacaggcagcttcaggcccaggacgaggagggaggcggccatgtccccgagcggccgaagcaggagatgctcctcagcctgaagccctcggaggcccctgaactggatgaggacgagggctttggcgactggtcccagaggccagagcagcggcagcagcacgagggggcgcagggcaccttggacagcggagagcccccccagtgcaggagtcctgagggggagcaagaggacaggcccggcctgcatgcctacgaaaaggaggacagtgatgaagtccacctggaggagttgagtctgagcaaggaggggccaggcccagaggacactgtccaggacaacctgggggccgcaggggctgaggaggaacaggaggagcaccagaaatgtcagcagcccaggacacccagccccttggtcttggaggggaccatcgaacagagctcgcctcccctgagccctaccaccaaactcatcgacaggaccgagtccctaaaccgctccatagagaagagtaacagtgtgaagaaatcccagccagacttgcccatctccaagattgatcagtggctggaacaatacacccaggccatcgagaccgctggccggacccccaagctagcccgccaggcctccatagagctgcccagcatggctgtggccagtaccaagagtcggtggggagacgggtgaggtacaggctcagtctgcggccaagactccgtcctgcaaggatattgtggctggagacatgagcaagaaaagcctctgggagcagaagggaggctccaagacctcatcaacaattaagagcaccccatctgggaagaggtataagtttgtggccaccgggcatgggaagtatgagaaggtgcttgtggaagggggcccggctccctaggcgtcccatctcgcttcctgggtctgcaggtccagccggctggcaccctccatgtacccaggggagattccagccagacacccgccccccggccctggctaagaagttgcttcctgttgccagcatgacctaccctcgcctctttgatgccatccgctgccacctccttttgctcctggaccctttagcctctctgcccttccactctttgaccaccgcccccgccctccccacccagctccgcttcttgttacttgggggaggaaagaaactcctgatcattggccaaagggacttacccctggagaggccaagtgccttctaggaagttaggaggttgaggcacagcctgtgcagagagggtgggtcacccccccagatccaaggggaaactgcaggtcaagggctgataacggccatgcaggatgcttgatgctgcgtcccccgctgcttgccgccccccaccccgccattttgtataataaagctccctgtgtattctcttgaaac

SEQ ID NO: 74459 - DNA, 845 bp, Homo Sapiens
ggcgccatgggctggatcacagaagatcttattagacggaatgctgaacacaacgactgtgtcattttttccctggaggaactctcgttgcatcagcaagaaatagaaagactagaacacattgataaatggtgccgggatttaaaaattctctatcttcaaaataatcttattgggaaaattgaaaatgttagcaaactcaagaaacttgaatatttgaatttagctttaaacaacattgaaaaaatagaaaacttggaaggatgtgaagagctggcaaaacttgacctgactgtgaatttcattggagagctgagcagcattaaaaacttgcagcacaatatccatctgaaggagctctttctcatggggaacccatgtgcttcctttgaccactatagggagttcgtggtagcaactcttccacaattaaagtggttggatggtaaagaaatagagccttcagaaaggattaaggcattgcaggactattcagtaattgaaccacaaatcagagagcaggaaaaagatcactgtcttaaacgagccaaactcaaggaagaggctcagaggaaacaccaagaagaggataaaaatgaagacaagagaagtaacgcaggctttgatggacgttggtacacagacatcaatgctactctttcctctttaaagagcaaagaccacctacaggcaccagacataagaggaacacaacacaaagaaattagacaacagtgaagatgacttggaattctggaataagccctgtttgtttactcctgaatcaagattggaaactcttagacacatggaaaaacaacggaagaaacaggaaaaattaagtg

SEQ ID NO: 74460 - DNA, 1285 bp, Homo Sapiens
  misc_feature (1129)..(1129): n is a, c, g, or t
  misc_feature (1135)..(1135): n is a, c, g, or t
  misc_feature (1144)..(1145): n is a, c, g, or t
  misc_feature (1147)..(1149): n is a, c, g, or t
ggaagagagtgaggatattgagaacatgggcaaggtggtccagatcctacggcttatgaggattttccgaattctaaagcttgcccggcactcggtaggacttcggtctctaggtgccacactgagacacagctaccatgaagttgggcttctgcttctcttcctctctgtgggcatttccattttctctgtgcttatctactccgtggagaaagatgaccacacatccagcctcaccagcatccccatctgctggtggtgggccaccatcagcatgacaactgtgggctatggagacacccacccggtcaccttggcgggaaagctcatcgccagcacatgcatcatctgtggcatcttggtggtggcccttcccatcaccatcatcttcaacaagttttccaagtactaccagaagcaaaaggacattgatgtggaccagtgcagtgaggatgcaccagagaagtgtcatgagctaccttactttaacattagggatatatatgcacagcggatgcacgccttcattaccagtctctcttctgtaggcattgtggtgagcgatcctgactccacagatgcttcaagcattgaagacaatgaggacatttgtaacaccacctccttggagaattgcacagcaaaatgagcgggggtgtttgtgcctgtttctcttatcctttcccaacattaggttaacacagctttataaacctcagtgggttcgttaaaatcatttaattctcagggtgtacctttcagccatagttggacattcattgctgaattctgaaatgatagaattgtctttatttttctctgtgaggtcaattaaatgccttgttctgaaatttattttttacaagagagagttgtgatatagtttggaatataagataaatggtattgggtggggtttgtggctacagcttatgcatcattctgtgtttgtcatttactcacattgagctaactttaaattactgacaagtagaatcaaaggtgcagctgactgagacgacatgcatgtaagatccacaaaatgagacaatgcatgtaaatccatgctcatgttctaaacatggaaactaggagcctaataaacttcctaattcagtatggaaaaaanaagaanccgcccganntnnnaaattgtcggcccgccttgggcccttcaaaaagcttttctagaacctttcgttttggcgccgggggccccagaaggtaaaggggaaattggggccataactggtttccctaggaagatccctgggccatgaaatag

SEQ ID NO: 74461 - DNA, 2067 bp, Homo Sapiens
  misc_feature (1854)..(1854): n is a, c, g, or t
aatcaaaaagcggggcgggccaccccgaataactcaaacgccgcggcggcaggcgcggggccgcgccgcgaggcctgatccctgcagcccgggcaggcggcgtcgcagagcggagctagctggatgcgtccggactcctgcaggtgagagtgattttccagtgattgctttggcctgtacaaccagagaacaggattcttcccttctttttggccaccaaatgcctatgtgcaccacacattccagtgtgctgagaagggcagagcttcttggatgatgatggacgtcccaccgggcaggatgaaggcagagcgtgtggcatctccacctcaagggtgcagcctgatcttcctcttctcccttgccagccagcactctgccttctgtatccaccatggtgtttggtgagtttttccatcgccctggacaagacgaggaacttgtcaacctgaatgtggggggctttaagcagtctgttgaccaaagcaccctcctgcggtttcctcacaccagactggggaagctgcttacttgccattctgaagaggccattctggagctgtgtgatgattacagtgtggccgataaggaatactactttgatcggaatccctccttgttcagatatgttttgaatttttattacacggggaagctgcatgtcatggaggagctgtgcgtattctcattctgccaggagatcgagtactggggcatcaacgagctcttcattgattcttgctgcagcaatcgctaccaggaacgcaaggaggaaaaccacgagaaggactgggaccagaaaagccatgatgtgagtaccgactcctcgtttgaagagtcgtctctgtttgagaaagagctggagaagtttgacacactgcgatttggtcagctccggaagaaaatctggattagaatggagaatccagcgtactgcctgtccgctaagcttatcgctatctcctccttgagcgtggtgctggcctccatcgtggccatgtgcgttcacagcatgtcggagttccagaatgaggatggagaagtggatgatccggtgctggaaggagtggagatcgcgtgcattgcctggttcaccggggagcttgccgtccggctggctgccgctccttgtcaaaagaaattctggaaaaaccctctgaacatcattgactttgtctctattattcccttctatgccacgttggctgtagacaccaaggaggaagagagtgaggatattgagaacatgggcaaggtggtccagatcctacggcttatgaggattttccgaattctaaagcttgcccggcactcggtaggacttcggtctctaggtgccacactgagacacagctaccatgaagttgggcttctgcttctcttcctctctgtgggcatttccattttctctgtgcttatctactccgtggagaaagatgaccacacatccagcctcaccagcatccccatctgctggtggtgggccaccatcagcatgacaactgtgggctatgggagacacccacccggtcaccttggcgggaaagctcatcgccagcacatgcatcatctgtggcatcttggtgggtggccctttcccatcaccatcattcttcaacaagtttttccaaatactacccacaagcaaaaaggacattggatggtgggacccagtgccagtgaagggatgcacccaagaagaaggtgtccatggagccttaccctttaccttttaaaccactttaaggcgcataattaatattgccaccagcccgggaatggccacgccccttttccatttaaccccaagtatgctccctcctttctggtaaagggccattggatgtgtggaanccgtatttcactggaacgtccaacgggattgccttttccaagcccatttggaaaaaccaatccgagggaacatttttgataaaacagcaaccatacatcttggggagaacattggcaccagcaaaaattggcagcctggtgcggctgggtttcggttgcccccgtgaatattatatataaccttttaacaagaaatattttgggattaaaaca

SEQ ID NO: 74462 - DNA, 1924 bp, Homo Sapiens
  misc_feature (380)..(390): n is a, c, g, or t
  misc_feature (893)..(955): n is a, c, g, or t
  misc_feature (1577)..(1577): n is a, c, g, or t
tttcagtattttctacttttattttctagagtaaatcaggtgcaacttgatgtgcttttgagtaaatttatgcagcagaaactatacaatgaaggaagaattctatggaaattacaaatccaaaactctatgatgatgtcttcctagggagtagagaaaggcagtagaaatggcagttagaccaacagaggcttgaaggattcaagtacaagtaatattttgtataaaacatagcagtttaggtccccataatcctcaaaaatagtcacaaatataacaaagttcattgttttagggtttttaaaaaacgtgttgtacctaaggccatacttactcttctatgctatcactgcaaaggggtgatatgtatgtattatatnnnnnnnnnnncccttaatgcactgttatctcctaaatatttagtaaattaatactatttaatttttttaaagatttgtctgtgtagacactaaaagtattacacaaaatctggactgaaggtgtcctttttaacaacaatttaaagtactttttatatatgttatgtagtatatcctttctaaactgcctagtttgtatattcctataattcctatttgtgaagtgtacctgttcttgtctcttttttcagtcattttctgcacgcatccccctttatatggttatagagatgactgtagcttttcgtgctccactgcgaggtttgtgctcagagccgctgcaccccagcgaggcctgctccatggagtgcaggacgagctactgctttggagcgagggtttcctgcttttgagttgacctgacttccttcttgaaatgactgttaaaactaaaataaattacattgcatttattttatattcttggttgaaataaaatttaattgactttgnnnnnnnnnnnnnnnnnnnnnnnnnnnnnnnnnnnnnnnnnnnnnnnnnnnnnnnnnnnnnnnccttgtcaagccccctagcccctcaaaaaagttccctaaaccacttcttttgccccgccggtcccacccagcgaaaacgaactgggcacttcctctgtgttcctgggccgccctctggcatagaaactagggctctgcaatcgtcgcgcccacaacaaaaccccccgggagcgaaaacccagaggtgtttcgtaacacaacattttccgagtgggaattttcctggaggggggtcttccccggagggtctttctcaagcgaggacccttctctaggaggagagcctccccaaaggcccatattttccgggcaccctaacttttgtgggccaactttcttctcggcgatcaaaccttctgtttccaaaaaccacactgttgtccagggcccattttctcttgctccccgcccgccctttgttatatagcccccaccaccgatatgaatatacgggtgacaatatctgtgtatggaaacatccacatctgttataattttccgcgccccaaacgactgcgcggtagactcttaataacccgttccgttttattaatacgacgccaccctttgtggttcggtataaacaagaccacgatcgtggccggccgcgtatatgtgggtngtttagtaacacacacctgcggtgtatgtgccgcataatacacacctctgtgccagttgctcccaaataataatcgggcgcgccccacacactatctttcgatagtcaccaccaccgaccgggcgtgcgccgacataaaaaacccctctcccccgcaccagaaaatatattgcctccctccgcaagacactatcaccgtctattttaaccactgtcgtccgacagaacgaaataacaccgcccgttcgcgcgcgggtacacatttcgtcggcgcccggagaatattctcattccctactcatatactccgcgcgcaacacattcccctccgccgcgtgaaccatata

SEQ ID NO: 74463 - DNA, 1283 bp, Homo Sapiens
  misc_feature (659)..(786): n is a, c, g, or t
  misc_feature (794)..(810): n is a, c, g, or t
  misc_feature (933)..(957): n is a, c, g, or t
  misc_feature (998)..(1032): n is a, c, g, or t
accacaccgactcacaccataccgctaggtacgaggccgggtggtgaatcggcacgagggctgttcgaaggtgatccagacgcaagatggctgtcctctctaaggaatatggttttgtgcttctaactggtgctgccagctttataatggtggcccacctagccatcaatgtttccaaggcccgcaagaagtacaaagtggagtatcctatcatgtacagcacggaccctgaaaatgggcacatcttcaactgcattcagcgagcccaccagaacacgttggaagtgtatcctcccttcttattttttctagctgttggaggtgtttaccacccgcgtatagcttctggcctgggcttggcctggattgttggacgagttctttatgcttatggctattacacgggagaacccagcaagcgtagtcgaggagccctggggtccatcgccctcctgggcttggtgggcacaactgtgtgctctgctttccagcatcttggttgggttaaaagtggcttgggcagtggacccaaatgctgccattaaagaattataggggtttaaaaactctcattcattttaaatgacttacctttatttccagttacattttttttctaaatataataaaaacttacctggcatcagcctcatacctannnnnnnnnnnnnnnnnnnnnnnnnnnnnnnnnnnnnnnnnnnnnnnnnnnnnnnnnnnnnnnnnnnnnnnnnnnnnnnnnnnnnnnnnnnnnnnnnnnnnnnnnnnnnnnnnnnnnnnnnnnnnnnntgtggggnnnnnnnnnnnnnnnnnaaaaattttttctaaaaccatttctttttgggcggcggggccccccaaaagggaaaggaaacagggggccaaaacgggttttccaaagaaaacccggggcaaagaaaaagaggtgttggattnnnnnnnnnnnnnnnnnnnnnnnnnggggggaacaccggaagggttttgtgaaacaaaatcccaannnnnnnnnnnnnnnnnnnnnnnnnnnnnnnnnnntctcttatcacacgggaggggtccccgggggggaggccccaaaaatataaaaattaagccccccgcgccgctggccatttttttgggagaagattggggggaaaattttttaaaaacattcttcgcgccccaagggggaaccctctcccaaacggcgggggggagaactctgaatccccccgggggattaaaaccccttggggccccttgtggaaataaatattttccccccgtggaaaaaaacggggggg

SEQ ID NO: 74464 - DNA, 1205 bp, Homo Sapiens
  misc_feature (652)..(819): n is a, c, g, or t
  misc_feature (835)..(1047): n is a, c, g, or t
  misc_feature (1064)..(1076): n is a, c, g, or t
  misc_feature (1119)..(1141): n is a, c, g, or t
  misc_feature (1144)..(1154): n is a, c, g, or t
gggaggcgagggcgccgcacccacaccgcgctgcgcagttttgttctgctccagctgttcgaaggtgatccagacgcaagatggctgtcctctctaaggaatatggttttgtgcttctaactggtgctgccagctttataatggtggcccacctagccatcaatgtttccaaggcccgcaagaagtacaaagtggagtatcctatcatgtacagcacggaccctgaaaatgggcacatcttcaactgcattcagcgagcccaccagaacacgttggaagtgtatcctcccttcttattttttctagctgttggaggtgtttaccacccgcgtatagcttctggcctgggcttggcctggattgttggacgagttctttatgcttatggctattacacgggagaacccagcaagcgtagtcgaggagccctggggtccatcgccctcctgggcttggtgggcacaactgtgtgctctgctttccagcatcttggttgggttaaaagtggcttgggcagtggacccaaatgctgccattaaagaattataggggtttaaaaactctcattcattttaaatgacttacctttatttccatttacattttttttctaaatataataaaaacttacctggcatcagcctcatacctnnnnnnnnnnnnnnnnnnnnnnnnnnnnnnnnnnnnnnnnnnnnnnnnnnnnnnnnnnnnnnnnnnnnnnnnnnnnnnnnnnnnnnnnnnnnnnnnnnnnnnnnnnnnnnnnnnnnnnnnnnnnnnnnnnnnnnnnnnnnnnnnnnnnnnnnnnnnnnnnnnnnnnnnctttgggccccccccnnnnnnnnnnnnnnnnnnnnnnnnnnnnnnnnnnnnnnnnnnnnnnnnnnnnnnnnnnnnnnnnnnnnnnnnnnnnnnnnnnnnnnnnnnnnnnnnnnnnnnnnnnnnnnnnnnnnnnnnnnnnnnnnnnnnnnnnnnnnnnnnnnnnnnnnnnnnnnnnnnnnnnnnnnnnnnnnnnnnnnnnnnnnnnnnnnnnnnnnnnnnnnnnnnnnnctgctcaattaaaaatnnnnnnnnnnnnnggccactttttagaaagaggggggaaatttctaaaaaactttnnnnnnnnnnnnnnnnnnnnnnnacnnnnnnnnnnnaaaacccgtatccccccggggggtataaaccccccggcggcgcttttggcc

SEQ ID NO: 74465 - DNA, 977 bp, Homo Sapiens
  misc_feature (42)..(42): n is a, c, g, or t
  misc_feature (62)..(62): n is a, c, g, or t
  misc_feature (205)..(205): n is a, c, g, or t
ttgccctcggcccagattcgcacgggatcacccacgacagtnacctgccttgatattgcatntgatacatgaggccagaagtccttagtggatatccttgagtcccctgcaggaagaaagtgcccatgtaggagtagtggtcaggaaaagcacaatagtgagctattattcgcttctatgaccctcaaaagggtagcatttatcnttgctggtcaaaatatacaagatgtgagcctggaaagccttcggagggcagtgggagtggtacctcaggatgctgtcctcttccataatactatttattacaacctcttatatggaaacatcagtgcttcacctgaggaagtgtatgcagtggcaaaattagctggacttcatgatgcaattcttcgaatgccacatggatatgacacccaagtaggggaacgaggactcaagctttcaggaggagaaaagcaaagagtagcaattgcaagagccattttgaaggaccccccagtcatactctatgatgaagctacttcatcgttagattcgattactgaagagactattcttggtgccatgaaggatgtggtcaaacacagaacttctattttcattgcacacagattgtcaacagtggttgatgcagatgaaatcattgtcttggatcagggtaaggtagccgaacgtggtacccaccatggtttgcttgctaaccctcatagtatctattcagaaatgtggcatacacagagcagccgtgtgcagaaccatgataaccccaaatgggaagcaaagaaagaaaatatatccaaagaggaggaaagaaagaaactacaagaagaaattgtcaatagtgtgaaaggctgtggaaactgttcgtgctaagtcacataagacattttctttttttgttgttttggactacatatttgcactgaagcagaattgttttattaaaaaaatcatacatttcccattttctataaaaa

SEQ ID NO: 74466 - DNA, 1326 bp, Homo Sapiens
  misc_feature (55)..(55): n is a, c, g, or t
  misc_feature (74)..(108): n is a, c, g, or t
  misc_feature (805)..(814): n is a, c, g, or t
  misc_feature (963)..(977): n is a, c, g, or t
  misc_feature (1051)..(1071): n is a, c, g, or t
ataatcactatagggcgctagctcgtttagccgaacgacgagcgcagcgagtagntgagcgaggaagcggccgnnnnnnnnnnnnnnnnnnnnnnnnnnnnnnnnnnncagtcgacggtaccggacatatgcccgggaattcggccattacggccgggggtcgtgccctgcgcgtgagcagctgcagcggcagaggcagcatccagcggcggcgccagcagttccagtccgttgctttactttttgcttcaccgacatagtcattatgccgaagagaaagtctccagagaatacagagggcaaagatggatccaaagtaactaaacaggagcccacaagacggtctgccagattgtcagcgaaacctgctccaccaaaacctgaacccaaaccaagaaaaacatctgctaagaaagaacctggagcaaagattagcagaggtgctaaagggaagaaggaggaaaagcaggaagctggaaaggaaggtactgcaccatctgaaaatggtgaaactaaagctgaagaggtactttccataaatacctcccactgattgaatcagtgtctttaaagaaatttctcaatccttcagccggtgatagcacgttcttaatgtctctttttattgcctgtaatgttattgcagatccacatctctcgctcaactgttaatgtctcaacctccagaggcaccccacccagcacactgtcagtaaaggggcagattgaaacagtgagagttaagggtacagtagaaaattctgcatgtttgcagtgactagaatcagatagtagtgtggtgggnnnnnnnnnnaatcattatgaagagtgggagcttgcaggtaaggcttctgtggtggtttgaaaagcagaaagcaataaatgaaacaaagtgtttgtgtaatatattcctgccttgtcttcttcactcagagttgaaataggttttgcagtaaagctggnnnnnnnnnnnnnnncaaatgttcaaaactgtgtgtgttggtgggtggaatttcctttgcttatagtagtttcagtagtaactatatgnnnnnnnnnnnnnnnnnnnnncacaggcacagaaaactgaatctgtagataacgagggagaatgaattgtcatgaaaaattggggttgattttatgtatctcttgggacaacttttaaaagctatttttaccaagtattttgtaaatgctaattttttaggactctactagttggcatacgaaaatatataaggatggacattttatcgtctcatagtcatgctttttggaaatttacatcatcctcaagtaaaataaatatcagttaaatattgg

SEQ ID NO: 74467 - DNA, 893 bp, Homo Sapiens
ggggagggagccgcggaggtgcaggtcgaagaggccgggctacgtcgtgccctgcgcgtgagcagctgcagcggcagaggcagcatccagcggcggcgccagcagttccagtccgttgctttactttttgcttcaccgacatagtcattatgccgaagagaaagtctccagagaatacagagggcaaagatggatccaaagtaactaaacaggagcccacaagacggtctgccagattgtcagcgaaacctgctccaccaaaacctgaacccaaaccaagaaaaacatctgctaagaaagaacctggagcaaagattagcagaggtgctaaagggaagaaggaggaaaagcaggaagctggaaaggaaggtactgcaccatctgaaaatggtgaaactaaagctgaagaggcacagaaaactgaatctgtagataacgagggagaatgaattgtcatgaaaaattggggttgattttatgtatctcttgggacaacttttaaaagctatttttaccaagtattttgtaaatgctaattttttaggactctactagttggcatacgaaaatatataaggatggacattttatcgtctcatagtcatgctttttggaaatttacatcatcctcaagtaaaataaatatcagttaaatattggaagctgtgtgtaagattgattcagcattccatgcacttgctttaaaatttagtcctgtgcatactgtggtgtttttactgtgcatatttgaatttttcatgcagtttttctagagcaataatcagtggtgcttttgtacctaggttttatgtgattttaatgaaacatggatagttgtggccacctgctgactatttgtggtttaaaataaaaggtttacttgtctgcagaaa

SEQ ID NO: 74468 - DNA, 881 bp, Homo Sapiens
  misc_feature (827)..(827): n is a, c, g, or t
ttaaggctaggtacgaggcctgggtggcgaattcggcacgaggggtgcaggtcgaagaggccgggctacgtcgtgccctgcgcgtgagcagctgcagcggcagaggcagcatccagcggcggcgccagcagttccagtccgttgctttactttttgcttcaccgacatagtcattatgccgaagagaaagtctccagagaatacagagggcaaagatggatccaaagtaactaaacaggagcccacaagacggtctgccagattgtcagcgaaacctgctccaccaaaacctgaacccaaaccaagaaaaacatctgctaagaaagaacctggagcaaagattagcagaggtgctaaagggaagaaggaggaaaagcaggaagctggaaaggaaggcacagaaaactgaatctgtagataacgagggagaatgaattgtcatgaaaaattggggttgattttatgtatctcttgggacaacttttaaaagctatttttaccaagtattttgtaaatgctaattttttaggactctactagttggcatacgaaaatatataaggatggacattttatcgtctcatagtcatgctttttggaaatttacatcatcctcaagtaaaataaatatcagttaaatattggaagctgtgtgtaagattgattcagcattccatgcacttgctttaaaatttagtcctgtgcatactgtggtgtttttactgtgcatatttgaatttttcatgcagtttttctagagcaataatcagtggtgcttttgtacctaggttttatgtgattttaatgaaacatggatagttgtgggncacctgctggactatttgtggtttaaaataaaaaggtttacttgtctgcccaaa

SEQ ID NO: 74469 - DNA, 744 bp, Homo Sapiens
  misc_feature (44)..(44): n is a, c, g, or t
  misc_feature (694)..(702): n is a, c, g, or t
caaatgtgggcatgtttgaccccagcttcagagtccctggcacncaggcagccagcaccagccaccagcctccgacccggattcagggagccccttcaagccactggctccctcagcagccccacttcccactgctgccagccctccccagtctccagcagaacctgcccatgccagctcagagatcttctgcagaaaccaacgagctgagggaagcccttctgaagatcttccctgactcagagcaaagactgaaaatagaccagatcttggtggcccacccatacatgaaagatctaaatgcgctttctgccatggtgttggattgaagattgtgctgagcgctgagcttgcgctcagggctggctgatcaaactcaagctcacacctgtacctgatgggaatgaacataatgtgaagaaacttatttcccagtgtaaacgcagttgtacagaaaaaaaatgttttgggtataaatctgggttttcaaaaccagcttttttctatatataaattatgctgctattacagatttaacattttctgttaaaggaaagtctacattttctgcctgttcagaactgtttaatagcagttactcttgagtgtatttacctttttatgttttttaaactattttccttaaagccgaaaatattgacaaatggatatggttagcctttataaataaatnnnnnnnnngtgttgctttcttaaggaaagcaagacgtcttaaagtataaa

SEQ ID NO: 74470 - DNA, 877 bp, Homo Sapiens
  misc_feature (42)..(80): n is a, c, g, or t
  misc_feature (84)..(118): n is a, c, g, or t
  misc_feature (696)..(725): n is a, c, g, or t
aagaacgtatagatcatatagggcgctaagtcggtctcagannnnnnnnnnnnnnnnnnnnnnnnnnnnnnnnnnnnnnnccgnnnnnnnnnnnnnnnnnnnnnnnnnnnnnnnnnnncagtcgacggtaccggacatatgcccgggaattcggccattacggccgggggctcaataccccaagcaatacctgcaactgaggattcttcccggggagaccgcagcccatcggcatggctcaagagtttgtgaactgcaaaatccagcctgggaaggtggttgtgttcatcaagcccacctgcccgtactgcaggagggcccaagagatcctcagtcaattgcccatcaaacaagggcttctggaatttgtcgatatcacagccaccaaccacactaacgagattcaagattatttgcaacagctcacgggagcaagaacggtgcctcgagtctttattggtaaagattgtataggcggatgcagtgatctagtctctttgcaacagagtggggaactgctgacgcggctaaagcagattggagctctgcagtaaccacagatctcataggaaatgttcaacaattctgtgaaaggtcacaggacccaattggagaaatcatatgaaaagcatagttggtcttggtgtcatatggatcagaggcacaagtgcagaggctgtggtcatgtggaacacnnnnnnnnnnnnnnnnnnnnnnnnnnnnnncctgaacactgtgtatttattttatttagactacccgcaaagattaaagcatgaaaatgtaaaacatctgataaaacttacaggccccctacaccaaagaagtgtatcctgtgaaaaagagctccctacaccttttgaaaaacttaaagaat

SEQ ID NO: 74471 - DNA, 837 bp, Homo Sapiens
gggtccggaattttccgagatatcgtcgacccacgcgtccgatgcaatacctgcaactgaggattcttcccggggagaccgcagcccatcggcatggctcaagagtttgtgaactgcaaaatccagcctgggaaggtggttgtgttcatcaagcccacctgcccgtactgcaggagggcccaagagatcctcagtcaattgcccatcaaacaagggcttctggaatttgtcgatatcacagccaccaaccacactaacgagattcaagattatttgcaacagctcacgggagcaagaacggtgcctcgagtctttattggtaaagattgtataggcggatgcagtgatctagtctctttgcaacagagtggggaactgctgacgcggctaaagcagattggagctctgcagtaaccacagatctcataggaaatgttcaacaattctgtgaaaggtcacaggacccaattggagaaatcatatgaaaagcatagttggtcttggtgtcatatggatcagaggcacaagtgcagaggctgtggtcatgcggaacactctgcttatttaagatggctatccagataatcctgaacactgtgtatttattttatttagactaccagcaaagattaaagcatgaaatgtaaaacatctgataaaacttacagccccctacaccaagagtgtatctgtgaaagagctcctacactttgaaaacttaagaatcccttatcatgaagtttgcctgttctagaattgtaagattgttaatttccttcaatctctagtgacaacacttaatttcttttctaataaaaaaaacctatagatgaaaaa

SEQ ID NO: 74472 - DNA, 1961 bp, Homo Sapiens
  misc_feature (1867)..(1902): n is a, c, g, or t
tcgcggttgtgttgtcgtcgcgctctttctcctcgtcgttcgtcttttgcgtttctctgcctccctgctctgtgctgtgtctacgcgcacctttgtttcccccttcgggcggcgttgcatgttacgagggggcggaccgtgtccctggctttcacaccgttgtgcgcccgcgcataggccgcggtttgtttgtgttgtgaccgacacttcgcggttacttgggtttggccccctacgggtcagcccattgtccctgggtaggtcccatgttctcctcagctctcctggcacttcaagaggctgcccctgcaggtcccctccccacgtccccgtgttcccggcacacacgtctcttgcccccctcccggctccccgagtctcctcattctttcaccagcatgtagatgtggtgctgagccccgtgctcactggctgacacctgcaaagacataaggcaatgcacagcaaggttctcctgtgtgtctctgttggtgaccacctgcaggatggtgaagttctccagcacgctgttcatcatgtacttctcagggaggtgcttgagcttgtggatgaagttgatcatgtactcacagagcggggaccggtggatgcggtaagagtagtgtccattctcatagcgagcatactctgtctcaactttctccaccacctgcttgccgaaagagcagaccttcgtggagcaggtgatgatcatgttctcggggctctcatactggctggagaccccatagaaggagctgccttcatcctcgatgttggtgttgaggtctgcccagaacttcacaagaaaaaaggcattggagggtccccgttcgaagagatccttgagtccaccctttttctccgggaatttgtcatagatttggcggatgtccacggcttcgaggtaggggtcgctgtagcttgggctggactggccaatgtgcacgaacaggtgcttgttgtacgtgtccgggtcctgctgctgctccaggaaggcagagaactccaacatccagagcttggagctggccacgctgcggccctgccatgggggtgccgggggcgcagagggcgatggggcgggccctgcaggagactcaaaccctggcagaggcagcggaggctggacagcataggtttgctgagagaaaggcttcacatcatgggacgttccggcttggcctggcaaagctccttgccaaaaccctgagactgctgggcggccgggccccgggcgaggaccatgctactgtggaaggccgtggcggagatgatctgtgcagacgacatggcagccatgctctgcagggccttgtccttagctgcctggtcctttagcttggcctggatctcgcgagctttgcgacgagccagcacctggatgtggctggagacctgcttcctggtgcgggtcttccctgtccggagcttgatgtagcgggcaatcagctcgttccgaccatacatcttgccctcgtccgacaggatgattttgcgcctgccacagggcgggtagatggcgagggcctcctggaaactctgctcaatatccgggctccacacgccctctgcgtcattgtcgatgggcttgtccagtgcctgactgcccccagaggcggtgctcccctcaggggaggtgggagagctccactcgttggaggtaatggtgccggccgtgccctccaaggctccgcttggaggagcgctcgttggaccggtcccagggtgcgggaaggtgggatgggtgcgctaagccagttccaaggagtccgccccgagcgccaactcttccggccgcggcgatcgttctgcccccgaccgtaatggccgaattcccgggcatatgtccggtaccgtcgactgnnnnnnnnnnnnnnnnnnnnnnnnnnnnnnnnnnnnccgcttcctcgctcactacctcctgcgctcgtcgttcgctcatcaagctagcccctata

SEQ ID NO: 74473 - DNA, 663 bp, Homo Sapiens
agaattcggcacgagggtgagtagcccagtttgtccaagttgggatggcaggccagctgcaccattgggggtggcccacaaagcagtaccagcacatcatcccctggagcgggcaggtgttcccggatcatgtcggcagtcacaaagcccttgctgtaggcccaatcttttgggggatgatccagagtgaaccagagcttaaagcgattgggatagcgggcctgcagttcctctaagtcctcccgcaagatgatatccttttctgtctgaaatgcaaaggggaaggaaagtctttaggagtcttctcaggcccacataaaaagttttctgctatacaactttccaactaagaaaaagaatgttaagggaaagcaaaagttctaggaaataagcaagacttgcagtgcttttagggagttaggatgaggagaagaggggaacagcctttatctacacattatgaaggaacaaagatgaatatttaaccaagaagatctaagtttctgtgctccagactagataccttaaaagttttcttctttccttggggaccagggaaggaatttgattcagtgctctgtccttttcctccttattgaaagaggaccctgtgccttacagaggggaccttgggcagaggctaaaaccagggcactgggccgc

SEQ ID NO: 74474 - DNA, 1680 bp, Homo Sapiens
atagaaccagtgttaaaaaaagcaggctggtacggtcggatttcccgggatatcgtcgacccacgcgtcggtcggcttgtcaggtggtggaggaaaaggcgctccgtcatggggatccagacgagccccgtcctgctggcctccctgggggtggggctggtcactctgctcggcctggctgtgggctcctacttggttcggaggtcccgccggcctcaggtcactctcctggaccccaatgaaaagtacctgctacgactgctagacaagacgactgtgagccacaacaccaagaggttccgctttgccctgcccaccgcccaccacactctggggctgcctgtgggcaaacatatctacctctccacccgaattgatggcagcctggtcatcaggccatacactcctgtcaccagtgatgaggatcaaggctatgtggatcttgtcatcaaggtctacctgaagggtgtgcaccccaaatttcctgagggagggaagatgtctcagtacctggatagcctgaaggttggggatgtggtggagtttcgggggccaagcgggttgctcacttacactggaaaagggcattttaacattcagcccaacaagaaatctccaccagaaccccgagtggcgaagaaactgggaatgattgccggcgggacaggaatcaccccaatgctacagctgatccgggccatcctgaaagtccctgaagatccaacccagtgctttctgctttttgccaaccagacagaaaaggatatcatcttgcgggaggacttagaggaactgcaggcccgctatcccaatcgctttaagctctggttcactctggatcatcccccaaaagattgggcctacagcaagggctttgtgactgccgacatgatccgggaacacctgcccgctccaggggatgatgtgctggtactgctttgtgggccacccccaatggtgcagctggcctgccatcccaacttggacaaactgggctactcacaaaagatgcgattcacctactgagcatcctccagcttccctggtgctgttcgctgcagttgttccccatcagtactcaagcactataagccttagattcctttcctcagagtttcaggttttttcagttacatctagagctgaaatctggatagtacctgcaggaacaatattcctgtagccatggaagagggccaaggctcagtcactccttggatggcctcctaaatctccccgtggcaacaggtccaggagaggcccatggagcagtctcttccatggagtaagaaggaagggagcatgtacgcttggtccaagattggctagttccttgatagcatcttactctcaccttctttgtgtctgtgatgaaaggaacagtctgtgcaatgggttttacttaaacttcactgttcaacctatgagcaaatctgtatgtgtgagtataagttgagcatagcatacttccagaggtggtcttatggagatggcaagaaaggaggaaatgatttcttcagatctcaaaggagtctgaaatatcatatttctgtgtgtgtctctctcagcccctgcccaggctagagggaaacagctactgataatcgaaaactgctgtttgtggcaggaacccctggctgtgcaaataaatggggctgaggcccctgtgtgatattgaaa

SEQ ID NO: 74475 - DNA, 738 bp, Homo Sapiens
gcttcatataccccaggaactggaaaatttagaattccgtatcttggagtatatgttttcaagtacaccatcgagtcatttagtgctcatatttctggatttttagtggttgatggaatagacaagcttgcatttgagtctgaaaatattaacagtgaaatacactgtgatagggttttaactggggatgccttattagaattaaattatgggcaggaagtctggttacgacttgcaaaaggaacaattccagccaagtttccccctgttactacatttagtggctatttattatatcgtacataagttagtatgaaaaacagactatcacctttattgagaaacagccagtgttttcatttatctttgcttgcacatctgctctgttttggtttttctacaggaaatgaaaatcaacttgtttttttaatatgagtaaacttgtatgtctattttataaaattatttgaatattgtttaatgtctgaatatgaaagagttcttgatcctaaagaaatttagtggcacagaaaacaaagtgaatttgttagcataattattcctattcttatttcttcattttaagtcattgcaatggaaagtaatattataaaacggtaattacaacatattatcagtcacagttttctttccaattaaacacttaacttttgttattccctgtatataaatatataacacacattttctagattcacaaatttaaataaattactc

SEQ ID NO: 74476 - DNA, 1015 bp, Homo Sapiens
  misc_feature (46)..(46): n is a, c, g, or t
gagcctgagaacttcttctgggtgggcattggggcacagaagcacntatgatgacgatgccgagtacatgaaacacacacgtctcttccggtgaggccagggccctgaccctccccccagtcctggcactgctgcttatgacctctggcctcaccttgacccttgattcccaggtgctccaacgagaagggctactttgcagtgactgagaaatgctccgacttttgccaagatgacctggcagatgatgacatcatgttgctagacaatggccaagaggtgtgatgttgccactagccctgcccatccaaggaggcgcccatagacttacttacaaatgggaattctcgggccaggagcaaggggctgttcccaggcacccatgcaaccgtatctcccctgctgcccccacaggtctacatgtgggtggggacccagactagccaggtggagatcaagctgagcctgaaggcctgccaggtaatctgggtggagggagggccgaggtgggcctgtgggcagggcagggtcatcacccaaggctcgctgtccccttgccaggtatatatccagcacatgcggtccaaggaacatgagcggccgcgccggctgcgcctggtccgcaagggcaatgagcagcacgcctttacccgctgcttccacgcctggagcgccttctgcaaggccctggcctaagacaggctggcacagccccaggcttggtgaggaagaggaaggggcctcatccactgtctgctagcaaagaatgtactcaggtgacaccacctgctccagccacgtccagtgccacagtccccagtagcctcaagcagcaccaatggggatgaccctgacaggtgccctcaggggtctgggaaatccaactctctccacagtgtgagtgcacgtgtgaagccccctcactcttccgctagggataaagcagatgtggatgccctttaagagatattaaatgcttttattttcaatattaaaaatcagtatttttaatatt

SEQ ID NO: 74477 - DNA, 2599 bp, Homo Sapiens
  misc_feature (2178)..(2196): n is a, c, g, or t
  misc_feature (2198)..(2202): n is a, c, g, or t
  misc_feature (2204)..(2205): n is a, c, g, or t
  misc_feature (2207)..(2207): n is a, c, g, or t
  misc_feature (2209)..(2323): n is a, c, g, or t
  misc_feature (2331)..(2373): n is a, c, g, or t
  misc_feature (2397)..(2493): n is a, c, g, or t
aaggtagcgaggcctgggtggcgaattcggcacgagggtatggcggggggcccaggccacacttgagcagcaccaccaaggccaggctctttgcagagaaaattaacaagaatgagcggaaagggaaggctgagatcacactgctggtgcagggccaggagctcccagagttctgggaggcactgggtggggagccctctgagatcaagaagcacgtgcctgaagacttctggccgccgcagcccaagctgtacaaggtgggcctgggcttgggctacctggagctgccacagatcaactacaagctctccgtggaacataagcagcgtcccaaggtggagctgatgccaagaatgcggctgctgcagagtctgctggacacgcgctgcgtgtacattctggactgttggtccgacgtgttcatctggctcggccgcaagtccccgcgcctggtgcgcgctgccgccctcaagctgggtcaggagctgtgcgggatgctgcaccggccacgccatgccacggtcagccgcagcctcgagggcaccgaggcgcaggtgttcaaggccaagttcaagaattgggacgatgtgttgacggtggactacacacgcaatgcggaggccgtgctgcagagcccgggtctctccgggaaggtgaaacgcgacgccgagaagaaagaccagatgaaggctgacctcactgcgcttttcctgccgcggcagccgcccatgtcgctggccgaggcggagcagctgatggaggagtggaacgaagacctagacggcatggagggtttcgtgctggagggcaagaagtttgcacggctgccggaagaggagtttggccacttctacacgcaggactgctacgtcttcctctgcaggtactgggtgcctgtggagtacgacgaggaggacaaagaaggaagacaaggaggagaaggccgagggcaaagaaggcgaggaagcaaccgcctgacgcagaggagaagcagccagaggaggacttccagtgcatcgtgtacttctggcagggccgtgaagcctccaatatggggctggctcaccttcaccttcagcctgcaaaagaagttcgagagcctcttccctgggaagctggaggtggtacgcatgacgcagcagcaggagaaccccaagttcctgtcccatttcaagaggaagttcatcatccaccggggcaagaggaaggcggtccagggcgcccaacagcccagcctctaccagatccgcaccaacggcagcgccctctgcacccggtgcatccagatcaacaccgactccagcctcctcaactccgagttctgcttcatcctcaaggttccctttgagagtgaggacaaccagggcatcgtgtatgcctgggtgggccgggcatcagaccctgacgaagccaagttggcagaagacatcctgaacaccatgtttgacacctcctacagcaagcaggttatcaacgaaggtgaggagcctgagaacttcttctgggtgggcattggggcacagaagccctatgatgacgatgccgagtacatgaaacacacacgtctcttccggtgctccaacgagaagggctactttgcagtgactgagaaatgctccgacttttgccaagatgacctggcagatgatgacatcatgttgctagacaatggccaagaggtctacatgtgggtggggacccagactagccaggtggagatcaagctgagcctgaaggcctgccaggtatatatccagcacatgcggtccaaggaacatgagcggccgcgccggctgcgcctggtccgcaagggcaatgagcagcacgcctttacccgctgcttccacgcctggagcgccttctgcaaggccctggcctaagacaggctggcacagccccaggcttggtgaggaagaggaaggggcctcatccactgtctgctagcaaagaatgtactcaggtgacaccacctgctccagccacgtccagtgccacagtccccagtagcctcaagcagcaccaatggggatgaccctgacaggtgccctcaggggtctgggaaatccaactctctccacagtgtgagtgcacgtgtgaagccccctcactcttccgctagggataaagcagatgtggatgccctttaagagatattaaatgcttttatttttcaaaatnnnnnnnnnnnnnnnnnnnannnnnannanannnnnnnnnnnnnnnnnnnnnnnnnnnnnnnnnnnnnnnnnnnnnnnnnnnnnnnnnnnnnnnnnnnnnnnnnnnnnnnnnnnnnnnnnnnnnnnnnnnnnnnnnnnnnnnnnnntttgtcgnnnnnnnnnnnnnnnnnnnnnnnnnnnnnnnnnnnnnnnnnnnggggccgcggcgccccaaaagggnnnnnnnnnnnnnnnnnnnnnnnnnnnnnnnnnnnnnnnnnnnnnnnnnnnnnnnnnnnnnnnnnnnnnnnnnnnnnnnnnnnnnnnnnnnnnnnnngcggggggaaacacacagggggtttttttaaaaaaaatcccagaaggggggatttttgtggagagggctctttattggggggtttacattcaccacagggagaggt

SEQ ID NO: 74478 - DNA, 2004 bp, Homo Sapiens
  misc_feature (1229)..(1229): n is a, c, g, or t
acctgacacgggtgcccgagtgtctgtacaccctccccagcctgcgccgcctcaacctcagcagcaaccagatcacggagctgtccctgtgcatagaccagtgggtgcacgtggaaactctgaacctgtcccgaaatcagctcacctcactgcccgtgcgtctgaggccctcagtagggggatgggaggaaggccgtgagcctggccctgacctcccacccctgcccgttccccctccagtcagccatttgcaagctgagcaagctgaagaagctgtacctgaattccaacaagctggactttgacgggctgccctcaggcattggcaagctcaccaacctggaagagttcatggctgccaacaacaacctggagctggtccctgaaagtctctgcaggtgcccaaagctgaggaaacttgtcctgaacaagaaccacctggtgaccctcccagaagccatccatttcctgacggagatcgaggtcctggatgtgcgggagaaccccaacctggtcatgccgcccaagcccgcagaccgtgccggcctgagtggtacaacatcgacttctcgctgcagaaccagctgcggctagcgggtgcctctcctgctaccgtggctgcagctgcagctgcagggagtgggcccaagggaccctatggctcgcaagatgcgactgcggaggcgcaaggattcagcccaggatgaccaggccaagcaggtgctgaagggcattgtcagatgttgcccaggaggaagaacaaaaagcaggaggagagcgcaagatgcccgggcccccagcgggaaggtgcggcgttgggaccagggcctggagaagccccgccttgactactccgagttcttcacggaggacgtgggccagctgcccggactgaccatctggcagatagagaacttcgtgcctgtgctggtggaggaagccttccacggcaagttctacgaggctgactgctacattgtgctcaagacctttctggatgacagcggctccctcaactgggagatctactactggattggcggggaggccacactcgacacagaaagcttgctctgccatccacgctgtcaacttgcgcaactacctgggtgctgaggtgccgcactgtccgggaggagatgggcgatgagagcgaggagttcctgcaggtgtttgacaacgacatctcctacattgagggtggaacagccagtggcttctacactgtnggaagacacacactatgtcaccaggatgtatcgtgtgtatgggaaaaagaacatcaagttggagcctgtgcccctcaaggggacctctctggacccaaggtttgttttcctgctggaccgagggctagacatctacgtatggcggggggcccaggccacactgagcagcaccaccaaggccaggctctttgcagagaaaattaacaagaatgagcggaaagggaaggctgagatcacactgctggtgcagggccaggagctcccagagttctgggaggcactgggtggggagccctctgagatcaagaagcacgtgcctgaagacttctggccgccgcagcccaagctgtacaaggtgggcctgggcttgggctacctggagctgccacagatcaactacaagctctccgtggaacataagcagcgtcccaaggtggagctgatgccaagaatgcggctgctgcagagtctgctggacacgcgctgcgtgtacattctggactgttggtccgacgtgttcatctggctcggccgcaagtccccgcgcctggtgcgcgctgccgccctcaagctgggtcaggagctgtgcgggatgctgcaccggccacgccatgccacggtcagccgcagcctcgaaggcaccgaaggcgcaggtgttcaaggccaagttcaagaattgtggacgaatgtgtttgacggtggggactacaccacgccaatgccggaaaggccgttgctttcagaaaaccccggggtcctcctccccggggaaagc

SEQ ID NO: 74479 - DNA, 656 bp, Homo Sapiens
  misc_feature (611)..(611): n is a, c, g, or t
tgcggccgctcatgttccttggaccgcatgtgctggatatatacctggcaggccttcaggctcagcttgatctccacctggctagtctgggtccccacccacatgtagacctcttggccattgtctagcaacatgatgtcatcatctgccaggtcatcttggcaaaagtcggagcatttctcagtcactgcaaagtagcccttctcgttggagcacctgggaatcaagggtcaaggtgaggccagaggtcataagcagcagtgccaggactgaggggagggtcagggccctggcctcaccggaagagacgtgtgtgtttcatgtactcggcatcgtcatcatagggcttctgtgccccaatgcccacccagaagaagttctcaggctcctcaccttcgttgataacctgcgggaaaggccagtccagcccagggcccctgcctgccctggctcctctgtgtgtgcccgcctgcccgcccgcctcctgacctgcttgctgtaggaggtgtcaaacatggtgttcaggatgtcttctgccaacttggcttcgtcagggtctgatgcccggcccaccctagcatacacgatgccctggttgtcctcactctcanagggaaccttgaggatgaagcagaaactcgagttgaggaggctgg

SEQ ID NO: 74480 - DNA, 1271 bp, Homo Sapiens
gggagtctcgtggagagattgaagatggcggcttctcaggcggtggaggaaatgcggagccgcgtggttctgggggagtttggggttcgcaatgtccatactactgactttcccggtaactattccggttatgatgatgcctgggaccaggaccgcttcgagaagaatttccgtgtggatgtagtacacatggatgaaaactcactggagtttgacatggtgggaattgacgcagccattgccaatgcttttcgacgaattctgctagctgaggtgccaactatggctgtggagaaggtcctggtgtacaataatacatccattgttcaggatgagattcttgctcaccgtctggggctcattcccattcatgctgatccccgtctttttgagtatcggaaccaaggagatgaagaaggcacagagatagatactctacagtttcgtctccaggtcagatgcactcggaacccccatgctgctaaagattcctctgaccccaacgaactgtacgtgaaccacaaagtgtataccaggcatatgacatggatccccctggggaaccaggctgatctctttccagagggcactatccgaccagtgcatgatgatatcctcatcgctcagctgcggcctggccaagaaattgacctgctcatgcactgtgtcaagggcattggcaaagatcatgccaagttttcaccagtggcaacagccagttacaggctcctgccagacatcaccctgcttgagcccgtggaaggggaggcagctgaggagttgagcaggtgcttctcacctggtgttattgaggtgcaggaagtccaaggtaaaaaggtggccagagttgccaacccccggctggataccttcagcagagaaatcttccggaatgagaagctaaagaaggttgtgaggcttgcccgggttcgagatcattatatcttctctgttgagtcaacgggggtgttgccaccagatgtgctggtgagtgaagccatcaaagtactgatggggaagtgccggcgcttcttggatgaactagatgcggttcagatggactgagcttggatgcttctgaggcaagctgaagctttgggttctgactgacccaccctacaggactgctgaacagagagcccagtgtgactagggatcctgagttttctgggacaattccagctttaatcaatacattttgttaaatgtgccataaaatgagactttttacgcctttataaggccttagatgtaaataaactcacccaaac

SEQ ID NO: 74481 - DNA, 586 bp, Homo Sapiens
gacctgtcagcatcctttagtctaaggtgatgagaaatccatgttaccgatatagaagccaaactctaagccaagatcacataaagagaagaaaaagtacaacttctgataattcctctttgagaggcatgacagcagagctcagggatcttcttgcatttctacagaagatgcactggctgccctgggtttgtatctttcacaacaaagagtcttttccaagcacagaccagaggtcaggagaggactgtcaatccagtttgcactgaaataggcattagctgcctctaaattataaattatctcagccatcccttgtccttaggattagtaattaatgaaatgctaagagaactgatgaaaagatacaactgtttcttaaaaagattcagacaaatttattatgggtttacttttcctaattaataaagacttttacatcatagaaagcattaccttccttaggtttcacaattggtttttccttaggtggaataaatgctttgtttctttcctcttgtctcttactgatggcttctgcttgtttagcctacattaataaataaaaaatatatcagttaaatgt

SEQ ID NO: 74482 - DNA, 1316 bp, Homo Sapiens
  misc_feature (49)..(87): n is a, c, g, or t
  misc_feature (91)..(125): n is a, c, g, or t
acaccaaccagaaaactaactaccacatatggcgcatcgctgctcagtnnnnnnnnnnnnnnnnnnnnnnnnnnnnnnnnnnnnnnnccgnnnnnnnnnnnnnnnnnnnnnnnnnnnnnnnnnnncagtcgacggtaccggacatatgcccgggaattcggccattacggccggggggaagcagcttgcaaatggcgtctccctcgctggagcggccagaaaaaggcgctggaaaaagtgaatttcgtaaccagaagccgaagccggagaaccaagatgaatcagaactccttacggttcctgatggttggaaggaaccagctttttccaaagaggacaatcccagaggacttttggaggagagcagtttcgcaactttgttcccaaaatacagggaagcttacttgaaagagtgttggccattggtgcagaaagccttaaatgaacatcatgttaatgcaaccctggacctgatcgaaggcagcatgactgtttgtactacaaagaagacttttgatccatatatcatcattagggccagagatctgataaaactgttagcaaggagtgtttcatttgaacaggcagtacgaattcttcaggatgatgttgcatgtgacatcattaaaataggttctttagtaaggaataaagagagatttgtaaaacgaagacaacggcttattggtcccaaaggatctacattgaaggcattggaactcttaactaattgttacattatggttcagggaaacacagtttcagccattggaccttttagtggcttaaaagaggttagaaaagtagtccttgatactatgaagaatattcatccaatttataacattaaaagcttaatgattaagagagagttggcaaaagattctgaattacgatcacaaagttgggagagatttttgccacagttcaaacacaaaaatgtgaataaacgcaaggaaccaaagaaaaaaactgttaagaaagaatatacgccattcccaccaccacaaccagaaagtcagatcgataaagaattggctagtggtgaatactttttgaaggcaaatcagaagaagcggcagaaaatggaagcaataaaggctaaacaagcagaagccatcagtaagagacaagaggaaagaaacaaagcatttattccacctaaggaaaaaccaattgtgaaacctaaggaagcttctactgaaactaaaattgatgtggccagcatcaaggaaaaggttaagaaagcaaagaataagaaactgggagctcttacagctgaagaaattgcacttaagatggaggcagatgaaaag

SEQ ID NO: 74483 - DNA, 752 bp, Homo Sapiens
  misc_feature (27)..(27): n is a, c, g, or t
  misc_feature (122)..(122): n is a, c, g, or t
ggattgtaaatcaagctgaaacttttntgatgttcatgtactcatatgtcttgtaggtggtaggtgtcacttgtgtgtatgtgtaagtgaagtatgatgcatgctcattcacttggtccctntgaaataagggaaaggatcacagtgctgctgggccatgatggtatgtagaagggtctgtcagcacacatggaaagcccccatttgcacagatgtagaactttaataatccagatgcaatcattggaagtatttaatatgcaattggtagcaccttagctaattaatctgcatatgaaccatttcctgatatatttaataagaggtatagaagctcttcaagcattaaaatagagttgaggttccatcccattggttttatccatccaaaaaatgcactctcacagtggagttgaagtctaatacatgatacatgtgggcctgttagtcttcgaagcttccagatggtttgtgttttgaggtacaaaaaaatgctgcagatctagaaatgcatatatttagcgggtatttgaaagatagaagcattatttataactgaagagtataacacttatcttcttaagtaaatgctctcataacttgtatacatttttgcaggtacaaattcaaaagtatgtaagcattgtataatgtgacaattgtataatttatgtaatctgatgcatgaatcagaatttttatataatatatgattattgacttatagttgattaaagtgtttaaacttaaaa

SEQ ID NO: 74484 - DNA, 1340 bp, Homo Sapiens
  misc_feature (35)..(35): n is a, c, g, or t
  misc_feature (58)..(58): n is a, c, g, or t
  misc_feature (142)..(142): n is a, c, g, or t
  misc_feature (196)..(241): n is a, c, g, or t
cccgagagtagctcagatcttgtgatggactgatntgtgaagcacctgaacattcagnagtgctccagccagataagtaccgtcagcacagaggaggtccagtatctgatccctccagagtcacaggttgagaagccagtgnccgaggacgagccagcagccggggacaagccagcagcagcagacccgtaaattnnnnnnnnnnnnnnnnnnnnnnnnnnnnnnnnnnnnnnnnnnnnnngccgagcagctgtctcgggtccagagcgagcagcgtggagctcagtgacagcagcagggagaatccactgaaggaaaaaacccaaatttccactccacaaagaaaacagctgcaagcccccagggacgtacctggggctggcatgtgtgactgtctcggatgaagtgactgacccagtgcacactggatcaaaatgctgctttcctctgtgtctcacagcttggctgagctctgtctctgcaggttagaagtctgctaaagatcaaatgtgaaagtacttggagaaactgaggcctcttatgtgtaatgtgtaagttaagtgagccatatattttcttgcctcttccggacattcatgcttgtgtcccaagcattcccttggtgaattgtcacgtgagtggggccagtaagagtgaagtctgctccttgaatccaagccccatctggggcttctctaacaaatctgtagtaagtatacggactccagggagagaggctgggcttctttctctcatttgttccttgtggaacaaatgggcaaaagaagtgtgaaaatgtgggtgtttatgtctgtgtatatgtattttttacttcatgcatggcttctcctccaacttcctcctgcacttaaaaagggccaggttccaaattagacttgtaaatatggtgttagtgtttgacactactcctggatagttccaaacatcttccttgtggcaggtttcctggctgagcccgagcttccctccctgtttattgtgttcatgatcagtatgtgtttccatataaaacttttctcaacggaatagcagtgtctgtggtgctgttgactcgattgctcctggaaggatgttcccaggcagcaggaggtaaagacaaatgcatgcaaaggcatgggatctggccactttgccagcctcctgttattagcatgtgccctcagacagtccagactttggtgttctgaggccttagctccatgggccttcttcctgggtaatagtttacaaatccctaaagatcagtagggtggctgtaaaaatcttccgatcgagagaggagctaaaagaaaaaatagaataaataaatcttctgaaaa

SEQ ID NO: 74485 - DNA, 783 bp, Homo Sapiens
ggggcagctgttacggtaagtgaggaggggctggggtgcccagcgttttggatctcccactctggcccggccccggaataccacatagaggccttgggacctgattcatcccgtccagacagccctagagacctgagcgactgaggcctgggatctggacgccggaatttcctgcgtggttctggacgccctgccctgggctcagattccaaatgaaaatgtttgagagcgctgactctacagccacaagatctggccaggatctctgggctgaaatttgttcctgtctgccaaatcctgaacaagaagatggtgccaacaatgcattctcagactcctttgtggattcttgccctgaaggtgaaggccagagggaggtggctgactttgctgtccagccagctgtaaagccttgggctcccttgcaggattcagaagtgtatttagcatctctagagaagaagctaagaagaatcaaagggttaaatcaggaaggggacttccaaggcactagtgcttcgaactctggcccaagccaagaaggaatgctgggatcggttcctccaggagaagttagcttcagagttctttgtggatggacttgattctgatgagagcaccttggaacatttcaagaggtggctccagccagataaagtagccgtcagcacagaggaggtccagtatctgattcctccagagtcacagggttgagaagcccagtgcgccgaggacgagccagcagccggggacaagccaagcaggcagcagaaacagtaaatt

SEQ ID NO: 74486 - DNA, 827 bp, Homo Sapiens
  misc_feature (649)..(691): n is a, c, g, or t
ctccgcccctcccgatttcctccgggctacaggcgacagagctgagccaagcgtttactgggcagctgttacgctcagattccaaatgaaaatgtttgagagcgctgactctacagccacaagatctggccaggatctctgggctgaaatttgttcctgtctgccaaatcctgaacaagaagatggtgccaacaatgcattctcagactcctttgtggattcttgccctgaaggtgaaggccagagggaggtggctgactttgctgtccagccagctgtaaagccttgggctcccttgcaggattcagaagtgtatttagcatctctagagaagaagctaagaagaatcaaaggtttaaatcaggaagtgacttccaaggacatgcttcgaactctggcccaagccaagaaggaatgctgggatcggttcctccaggagaagttagcttcagagttctttgtggatggacttgattctgatgagagcaccttggaacatttcaagaggtggctccagccagataaagtagccgtcagcacagaggaggtccagtatctgattcctccagagtcacaggttgagaagccagtggccgaggacgagccagcagccggggacaagccagcagcagcagaacagtaaattacnnnnnnnnnnnnnnnnnnnnnnnnnnnnnnnnnnnnnnnnnnngacaaacgaacagcagagaacctgtcgcggggcacagagcgcaccgcgtgaacacgagagacagcgagaggggagaacccccgtgcaggaaaaacccaagatcaccacctccaaaaagcaagcagcggaagcccgg

SEQ ID NO: 74487 - DNA, 1869 bp, Homo Sapiens
  misc_feature (100)..(100): n is a, c, g, or t
  misc_feature (119)..(120): n is a, c, g, or t
  misc_feature (127)..(127): n is a, c, g, or t
  misc_feature (134)..(134): n is a, c, g, or t
  misc_feature (136)..(136): n is a, c, g, or t
  misc_feature (155)..(155): n is a, c, g, or t
  misc_feature (167)..(167): n is a, c, g, or t
  misc_feature (177)..(177): n is a, c, g, or t
  misc_feature (485)..(494): n is a, c, g, or t
  misc_feature (635)..(665): n is a, c, g, or t
tcaaatcctcttatccacagaccgatgtctgacccaggagtattttcacaacatcaagcaatggagcgagatagtacaggaattgtaactccttctggtnaaaaccccaaaattttttnnccccaanttccaangncaattggtttttccccccnccttgggggggncaaggctaancatggactttcctaaagttgggggtatgcctttttctgtgtatgggaatgcaatgattcctccagtagcacctatccctgatggtgctggaggacccatatttaatggccctcatgctgcagacccttcttggaactcactgataaagatggtttccagctccacagaaaataatggccctcaaacggtgtggactggaccctgggcacctcacatgaacagtgtgcatatgaaccagcttggctgatgaggatcagcttgttagcctgcagattccttttcatttggaggaaatcacaagtggccgnnnnnnnnnnttatgctcccaaatcattctactgatgtgcttgactgaagtgtgtaggctttttgcagaagatcttactaactgacctattttctgtgaacatttgtgactgcccattccccatcatcatccgttttaccttagttagcannnnnnnnnnnnnnnnnnnnnnnnnnnnnnnctcttcccctttggacataactttctgttgaagctgttctttggctggttggttttagtactgtaaactgcttctgagcaaacacggaaatttagcaaaattatgtaaacttgatcctgaagttttagaatggcaaataaatgtacaattgtttacataacagaaaaggctaagcagaaagtaaatttcaatatgtcagtatagaggctctactttatgtagacttaaattaatgtgagatatgtaccttcatattcagaaatctggatgtttccttcatacattaaactattaataagcataacttttctactggtgtaatttaagtataaagtaaaataatgggcattatcattggatgtttccccacattggcttttaaaatacccatcttgctttctttttggtttatttgtagcaaggcacatatagaagaagaaatttctggcttttccatgttgttttattaccttttctcacttttaaaactaatacagacttatctcctcactcctttttctctccttacctttaccactaataccagtaaaattatctttctgatagtgaaaaggttctgtcaagattttcactgtaatggctgctacagagatggaccatcttcatcatcaccagtggtttcttctaattataaaatgtttaaactttctgagaatttaaaaagccaccactgttcccagtcagcatatacaagctcttaatattctgtttattaaataattcaatgtactattttatattggatgatattgattcttaacattggcttttcagtcatcaacagtcaacataaaaatttcaattttcagtaatttagtggaaaatatcttatttcttttttcaattttaaaggcttcctgcttttttacccttgtatattatcagtgaaaaggatcaacagttaatttgagccaagtaataaaagaaattctgcatttgtcacgaagacaatttatggtagacagataaatacacagattacagtgtaaagtctccatttaacctgtttataaaagatacaaggccacactaaactactcagtgggatttatatattccatccacttgaaacaataaacagtaatgtatccaagaagattatgtgtcctaccctgtctcatggaaaaattaattatatggttgaaatgtaaaagaaagtaagcataaaaatcgagtaatgtat

SEQ ID NO: 74488 - DNA, 837 bp, Homo Sapiens
taaggctaggtacgaggctgggtggcgaattcggcacgaggcggcggcggtgtcggcagctgctgtagcgaagagagtttggcgcgatgtctcacaccattttgctggtacagcctaccaagaggccagaaggcagaacttatgctgactacgaatctgtgaatgaatgcatggaaggtgtttgtaaaatgtatgaagaacatctgaaaagaatgaatcccaacagtccctctatcacatatgacatcagtcagttgtttgatttcatcgatgatctggcagacctcagctgcctggtttaccgagctgatacccagacataccagccttataacaaagactggattaaagagaagatctacgtgctccttcgtcggcaggcccaacaggctgggaaataattgtgttggaagcactgggggggttggggtgggcttggaacacaggtgtgtacagcgtgctgtagtggaagttttgtatcatagtaatcctgtttccactttgttatactctagccaagattgactgtattagatgaaatgtgaggatcttgttcaatcggaaacccccgttacctcctctttttctttctctttctttacactatatttatcacttaaacattttcatgatgattcagatggaagctggaacttacgacacttaagtgttggtatccagtccttcaacggtccatatctacttgataacattcacatactaacccttcttcaagatggggtgacgcgggtgcgaaactgcaagtaaagccatggtcctcaagaatacagtcagggcaaacaatcaactaaatgtccctagagcccacaaagagaa

SEQ ID NO: 74489 - DNA, 840 bp, Homo Sapiens
  misc_feature (609)..(636): n is a, c, g, or t
  misc_feature (758)..(758): n is a, c, g, or t
gggacgacttccggcggctcctctcgcgaggattggctgttagcggcgttgtagttaagctcgtgtaacggcggcggtgtcggcagctgctgtagcgaagagagtttggcgcgatgtctcacaccattttgctggtacagcctaccaagaggccagaaggcagaacttatgctgactacgaatctgtgaatgaatgcatggaaggtgtttgtaaaatgtatgaagaacatctgaaaagaatgaatcccaacagtccctctatcacatatgacatcagtcagttgtttgatttcatcgatgatctggcagacctcagctgcctggtttaccgagctgatacccagacataccagccttataacaaagactggattaaagagaagatctacgtgctccttcgtcggcaggcccaacaggctgggaaataattgtgttggaagcactgggggggttggggtgggcttggaacacaggtgtgtacagcgtgctgtagtggaagttttgtatcatagtaatcctgtttccactttgttatactctagccaagattgactgtattagatgaaatgtgaggatcttgttcaatcggaaaaccccgttacctcctcnnnnnnnnnnnnnnnnnnnnnnnnnnnnacttaaacatttttatgatgatttagatggaagttgttcttcgtcacttaatgttggttcccgtccttcaactgttcatatctactttatagcattcacatactaacccttcttccagaagngggtgggggggttggaaaatgcaattttagccctggccctcaggataaaggcttgggaaaaaataaaataaatggcccttta

SEQ ID NO: 74490 - DNA, 866 bp, Homo Sapiens
  misc_feature (231)..(231): n is a, c, g, or t
  misc_feature (564)..(592): n is a, c, g, or t
  misc_feature (714)..(729): n is a, c, g, or t
  misc_feature (814)..(814): n is a, c, g, or t
ggggtagttaagctcgtgtaacggcggcggtgtcggcagctgctgtagcgaagagagtttggcgcgatgtctcacaccattttgctggtacagcctaccaagaggccagaaggcagaacttatgctgactacgaatctgtgaatgaatgcatggaaggtgtttgtataatgtatgaagaacatctgaaaagaatgaatcccaacagtccctctatcacatatgacatcaantcagttgtttgatttcatcgatgatctggcagacctcagctgcctggtttaccgagctgatacccagacataccagccttataacaaagactggattaaagagaagatctacgtgctccttcgtcggcaggcccaacaggctcgggaaataattgtgttggaagcactgggggggttggggtgggcttggaacacaggtgtgtacagcgtgctgtagtggaagttttgtatcatagtaatcctgtttccactttgttatactctagccaagattgactgtattagatgaaatgtgaggatcttgttcaatcggaaacccccgttacctcctcnnnnnnnnnnnnnnnnnnnnnnnnnnnnnacttaaacatttttatgatgatttcagatggaagttgttcttcgtcacttaatgttggttccagtccttccactgttcatatctactttataacattcacatactaacccttcttcaagaannnnnnnnnnnnnnnncggaaacggcagtcttacccatggccctccagaaaaaagtcttgggtaaaaaataaataaaatggccctcttacctaaaccaggnacatacagcccgccatgtgccccccgttgggcggcccgccctctgttccccc

SEQ ID NO: 74491 - DNA, 1454 bp, Homo Sapiens
  misc_feature (555)..(583): n is a, c, g, or t
  misc_feature (815)..(942): n is a, c, g, or t
  misc_feature (1210)..(1210): n is a, c, g, or t
gggaagctcgtgtaacggcggcggtgtcggcagctgctgtagcgaagagagtttgcgcgatgtctcacaccattttgctggtacagcctaccaagaggccagaaggcagaacttatgctgactacgaatctgtgaatgaatgcatggaaggtgtttgtaaaatgtatgaagaacatctgaaaagaatgaatcccaacagtccctctatcacatatgacatcagtcagttgtttgatttcatcgatgatctggcagacctcagctgcctggtttaccgagctgatacccagacataccagccttataacaaagactggattaaagagaagatctacgtgctccttcgtcggcaggcccaacaggctgggaaataattgtgttggaagcactgggggggttggggtgggcttggaacacaggtgtgtacagcgtgctgtagtggaagttttgtatcatagtaatcctgtttccactttgttatactctagccaagattgactgtattagatgaaatgtgaggatcttgttcaatcggaaacccccgttacctcctcnnnnnnnnnnnnnnnnnnnnnnnnnnnnnacttaaacatttttatgatgatttagatggaagttgttcttcgtcacttaatgttggttccagtccttcaactgttcatatctactttataacattcacatactaacccttcttcaagatggggtggggggtggaaatgcagtttagccatgtcctcaagataaagtcttggtaaaaataaataaatgtcctttagtttaccccatttcctctccttcgcttctttaattannnnnnnnnnnnnnnnnnnnnnnnnnnnnnnnnnnnnnnnnnnnnnnnnnnnnnnnnnnnnnnnnnnnnnnnnnnnnnnnnnnnnnnnnnnnnnnnnnnnnnnnnnnnnnnnnnnnnnnnnnnnnnnnccccttctttactccggcccttttccttctcctatcttatttttatagatcccctccaccgtttttccttctcttccataccttcttctaattccattcttccatttctcttgttgtcgctcattcttttacatctatatgctctggagctgtttcgtctcttcttttaccctctcacgtttcccccatactatttctctgtcctttttgttccctatcctctttgcccctatttgtttgattctgtccttccttctttaatttgccngtcttctgcttgtacttgcagtttactttatcttcttcttgctctcttattctttcgatcctacctcctactgctctcatgtactgtttcttccctccattatatagagtctccttctactcactcaccactatttatttcgcttcctatacttcaatacaactgcctcttttctcttccctcttgtcttatcgcccatgacttttactcttcttcgccttgctagcccatatccctactactg

SEQ ID NO: 74492 - DNA, 761 bp, Homo Sapiens
  misc_feature (643)..(643): n is a, c, g, or t
gataaaattgtattttttttacagtcatgtgtacaatttgttacaaaaccatagaagactacaacttgttttaaatcatttttggtctgcaaatatgtaaaatctgtgtgcaattatcatgtatttacagggtcttgtgttagtcattttcaatgattattccaacaatgtcacactctcaacataagacatggcttaagataaatatattagtaaataaatattctgagaacatatttccataaatgaaatgtgctgctatacatatacagaatatacataagttgtcttctagcttttaaaacattttttaaaaatggtaatgttggaaaaagagcccttagaccattttattacaaaatctttacagcaaggtctttacaaaatctcttttaagtgctatgggaaaaattaaaaaattttaaaatagtgccttgttagaccaacacaatagaaagagtttacataaagagtagaaaaaggcagttctgtttaaagaataatagtctcgactagtaattattttttagacctcattttaaaagcattagtcctgcacgaacttcgagtagagactagcagcacataagtatgtgagcagtgggacagaaggggctttattttataaaagggcttggattangaggagacagggaaggagctgagagttaaagccagcttactggggctgcatccataaagaggtacttgttggtaacacccaacttcatttttagctggtctagactctcactgtatat

SEQ ID NO: 74493 - DNA, 993 bp, Homo Sapiens
gacgccacggacacgtcgcctttcgtgctgtactcgatgcagacggctacgacgccctgcgctgagctggtgcacgagtcggccgagcggatctacatggtgacaacggtggtgacggtgaacgacgactctgcctagaatgtctggctgtcgtaccagctgctcaaggccacgtagcctggcctgttcggtgtgtgggcgcacgatgacgaggtgcgcacgtccaggatgctgagcgagcgcgtcgcagccaagcagaggctggtggtgctggtcaaggacaatggcgagccttcgcgctcggccacgccacagctgcacgtggttctggtgacgggctactccaagcctttctccgcttcctatagctggcccccggccagacccaggccaactcgctcaccgtctacctggtggtggcgttggcctcggtgtcgtcgctcttcctcttctcggtgctcctgttcgtggcggtgcggctgtgcaggaggagcagggcggcctcggtgggtcgctgctcggtgcctgagggcccctttccaggacatctggtggacgtgagcggcaccgggaccctatcccagagctaccagtatgaggtgtgtctgacaggaggctccgggacaaatgagttcaagttcctgaaaccaattatccccaacctgctaccccagagcacaggcagggaagtggaagaaaatcgcccatttcagaataatttgggtttctgataaagaatgtaaactaaatccgcgtctgtgaatacgtttctgattaggaacttattgcgaggttcccttaagggagtgtctttacatcatttcaaatatgtactcttgaagtcaagcaataaatttctatacataaaataggatcctgatttagtatcaagaacccttcacaaagcatgaaatgtatatgtgtaatgttttatgtcaaacaattatgcttaatatacagtctattaaatgtaagtcttgtttgagatatttt

SEQ ID NO: 74494 - DNA, 910 bp, Homo Sapiens
  misc_feature (747)..(785): n is a, c, g, or t
cgcgctcggccaccgccacgctgcaagtgctcctggtggacggcttctctcagccctacctgccgctcccagaggcggccccggcccaagcccaggccgactcgcttaccgtctacctggtggtggcattggcctcggtgtcttcgctcttcctcttctcggtgttcctgttcgtggcagtgcggctgtgcaggaggagcagggcggcctcagtgggtcgctgctcggtgcccgagggcccctttccagggcatctggtggacgtgagcggcaccgggaccctttcccagagctaccagtacgaggtgtgtctgacgggaggctctgaaagtaatgatttcaagttcttgaagcctatattcccaaatattgtaagccaggactctaggaggaaatcagaatttctagaataatgtaggtatctgtagctttccgaccgtctgttaattttgtcttcctcacttttcaccttagttttttttaaccctttagtaatcttgaattctacttttttttaaatttctactgttgtctttagtaatgttactcatttcctttgtctgattgttagttttcaaattattgtattattataaatattttatatcaggaaagttcatatttctgaataaattaatagtattcattcctgaagggtgatatgaaagttaaccccacctaataaacgataactctaattctgaaattacctttcacactatatgacactacataagaatgtatgannnnnnnnnnnnnnnnnnnnnnnnnnnnnnnnnnnnnnncttattcacacaggcttgacttttttgacaaaaagtttgggggtgtaaatcattttcataatttatcccatgttgtaattttccttccaaagccttcaaaattttggggagttttttggttttta

SEQ ID NO: 74495 - DNA, 1100 bp, Homo Sapiens
  misc_feature (36)..(36): n is a, c, g, or t
  misc_feature (75)..(92): n is a, c, g, or t
  misc_feature (993)..(993): n is a, c, g, or t
  misc_feature (1021)..(1021): n is a, c, g, or t
aggtggtaacgacggcactgtcatctcgaattatcntcactaaagggcatacgcttgcggtcgcggctgtaggcnnnnnnnnnnnnnnnnnngtggcaggacccagggctctcaattaacatccatgaactcagagcgtgatggacactacacaacatttgcctgcaacaaggacagcggccagtggcactactttgatgacaacagcgtctcccctgtcaatgagaatcagatcgagtccaaggcagcctatgtcctcttctaccaacgccaggacgtggcgcgacgcctgctgtccccggccggctcatctggcgccccagcctcccctgcctgcagctccccacccagctctgagttcatggatgttaattgagagccctgggtcctgccacagattaaaaaaataaacagtcccctcctgccgaattcatggtcccgaaggccaaattccctaacttaagtcctattcaattcgttaacatttcatcactgttccctgtgagatcttgttattctctcataattccacacaacatacgagcccgtttccataagtgtcaattcttggtgtgcctaattacttttcttactcacattaatttgcatgcacctccgccccccttccattcttgaaatctgtttttaccatctgcattaatgtcatctgacaccgtgtaggttaaaagcggtttggactattggagggtcattcggattcctcgctcacggactccctatcctcgttccttcccccgcgtgcaagaggtacaccttcatcagtggctgctcaaccgtatccacactatctggcgactatcacatatgacatctttcaatatgtcataaatggcaccacacgtcaaagcctcgacctgggttttccattttccgctcccttctctaccttaattctctctaattaatgttgtaactgtccgctctatattcattctttcccgtaaaccctcgatgcctcatgtcatctttctnattcaacctgcgcctctcctcttatctncattctcatttcccgaacaccacttagttatatctcatcgggtggctcaactcctacctacgctctctcggatcggctg

SEQ ID NO: 74496 - DNA, 3219 bp, Homo Sapiens
  misc_feature (2833)..(2848): n is a, c, g, or t
taggctagtacgaggctgggtgtgtgaatcggcacgagaacggacggcgatggcgacggtcgcagcaaatccagctgctgctgcggcggctgtggcggcggcagcggcggtgactgaggatagagagccacagcacgaggagctgccaggcctggacagccagtggcgccagatagaaaacggcgagagtgggcgagaacgtccactgcgggccggcgaaagctggttccttgtggagaagcactggtataagcagtgggaggcatacgtgcagggaggggaccaggactccagcaccttccctggctgcatcaacaatgccacactctttcaagatgagataaactggcgcctcaaggagggactggtggaaggcgaggattatgtgctgctcccagcagctgcttggcattacctggtcagctggtatggtctagagcatggccagccacccattgaacgcaaggtcatagagctgcccaacatccagaaggtcgaagtgtacccagtagaactgctgcttgtccggcacaatgatttgggcaaatctcacactgttcagttcagccataccgattctattggcctagtattgcgcacagctcgggagcggtttctggtggagccccaggaagacactcggctttgggccaagaactcagaaggctctttggataggttgtatgacacacacatcacggttctcgatgcggcccttgagactgggcagttgatcatcatggagacccgcaagaaagatggcacttggcccagcgcacagctgcatgtcatgaacaacaacatgtcggaagaggatgaggacttcaagggtcagccaggcatctgtggcctcaccaatctgggcaacacgtgcttcatgaactcggccctgcagtgcctcagcaatgtgccacagctcaccgagtacttcctcaacaactgctacctggaggagctcaacttccgcaacccactgggcatgaagggtgagatcgcagaggcctatgcagacctggtgaagcaggcgtggtctggccaccaccgctccattgtgccacatgtgttcaagaacaaggttggccattttgcatcccaatttctgggctaccagcagcatgactctcaggagctgctgtcattcctcctggacgggctgcatgaggaccttaatcgggtgaagaagaaggagtatgtggagctgtgcgatgctgctgggcgaccggatcaggaggtggcacaggaggcatggcaaaaccacaaacggcggaacgattctgtgatcgtggacactttccacggcctcttcaagtccacgctggtgtgccccgattgtggcaatgtatctgtgaacttcgaccccttctgctacctcagtgttccactgcctatcagccacaagagggtcttggaggtcttctttatccccatggaaccgcgccgcaagccagagcagcaccggctcgtggtccccaagaaaggcaagatctcggatctatgtgtggctctgtccaaacacacgggcatctcgccagagaggatgatggtggctgatgtcttcagtcaccgcttctataagctctatcagctagaggagcctctgagcagcatcttggaccgtgatgatatcttcgtctatgaggtgtcaggtcgcattgaggccattgagggctcaagagaggacatcgtggttcctgtctacctgcgggagcgcacccctgcccgtgactacaacaactcctactacggcctgatgctttttggacaccccctcctggtatcagtgccccgggaccgcttcacctgggagggcctgtataacgtcctgatgtaccggctctcacgctacgtgaccaaacccaactcagatgatgaggacgatggggatgagaaagaagatgacgaggaggataaagatgacgtccctgggccctcaactgggggcagcctccgagaccctgagccagagcaggctgggcccagctctggagtcacgaacaggtgcccgttcctcctggacaattgccttggcacatctcagtggcccccaaggcgacgacgcaagcagctgttcaccctgcagacggtgaactccaatgggaccagcgaccgcacaactcccctgaagaagtccatgcccagccgtacattgctatcgactgggagccagagatgaagaagcgttactatgacgaggtagaggctgagggctacgtgaagcatgactgcgtcgggtacgtgatgaagaaggctcccgtgcggctgcaggagtgcattgagctcttcaccactgtggagaccctggagaaggaaaacccctggtactgcccttcctgcaagcagcaccagctggcaaccaagaagctggacctgtggatgctgccggagattctcatcatccacctgaaacgcttttcctacaccaagttctcccgagagaagctggacaccctcgtggagtttcctatccgggacctggacttctctgagtttgtcatccagccacagaatgagtcgaatccggagctgtacaaatatgacctcatcgcggtttccaaccattatgggggcatgcgtgatggacactacacaacatttgcctgcaacaaggacagcggccagtggcactactttgatgacaacagcgtctcccctgtcaatgagaatcagatcgagtccaaggcagcctatgtcctcttctaccaacgccaggacgtggcgcgacgcctgctgtccccggccggctcatctggcgccccagcctcccctgcctgcagctccccacccagctctgagttcatggatgttaattgagagccctgggtcctgccacagnnnnnnnnnnnnnnnngccctctctgcaatctcgcttctcgtgtccgccccgcttctcttattcgtgttaggtgcccccgccaggcattgcaggcttagtcgtggctactgttctcctgtgccgctgcatcgctctctcccgggaaagaacaggtcgtgtctcctcctagcagtgcgcgccccgcctgtgtttgcccttccagcagtgaccctcccttctagtctttatttatggtcgtgcccttccctctcctcagcccagagtgttctgcgtgggtggtgatgggggttcacctgaacacagagtgtattttcttattgaggccctgtaccttctgctgtgtgtgtgtatatataaagcaccagtctgctccccaaaaaacacac

SEQ ID NO: 74497 - DNA, 1313 bp, Homo Sapiens
tgtggagagagtatgaagtcgaggcgcgccgaattcggcacgagggagaacggacggcgatggcgacggtcgcagcaaatccagctgctgctgcggcggctgtggcggcggcagcggcggtgactgaggatagagagccacagcacgaggagctgccaggcctggacagccagtggcgccagatagaaaacggcgagagtgggcgagaacgtccactgcgggccggcgaaagctggttccttgtggagaagcactggtataagcagtgggaggcatacgtgcagggaggggaccaggactccagcaccttccctggctgcatcaacaatgccacactctttcaagatgagataaactggcgcctcaaggagggactggtggaaggcgaggattatgtgctgctcccagcagctgcttggcattacctggtcagctggtatggtctagagcatggccagccacccattgaacgcaaggtcatagagctgcccaacatccagaaggtcgaagtgtacccagtagaactgctgcttgtccggcacaatgatttgggcaaaatctcacactgttcagttcagccataccgattctattggcctagtattgcgcaccagctcgggagcggtttctggtggagccccagggaagacactcggctttgggccaagaactcagaagcgccacccacacctccataggtgtatgacacacacaatcacggttctcgatgcggccttgagactgggcagttgatcatcatggagacccgcaaagaaagatggcacttggcccagcgcaaaagctgcatgtcatggaacaacaacatgtcggaagaggatgaggacttcaagggtcagcccagggcattttgtggccttcaccaatctggggcaaacacggtgcttcattgaaactcggccttgcatgcctccagcattgggccacagttcaccgaagtactctccagacaatgctaccttggcggacgtcaaatttccggcacacccatgggccattcacgcggggcgaactcgaaaggcctattgacagacctggtgaagacaggcgttggcattggagccacacacacgttccattgtgccaactttttcttcagaacaacgggcggccatttaggctcccgaattctgggggctacacaggaggagcaacactatcggagacgagagtgacaaccacaggaacagggtgatagcggcgacacaatcgggtgacacaaagcgggactcttcgcgacaggcaggcatagtttcgcaccaggatcaacgaagagtcacaaggctagggcacaa

SEQ ID NO: 74498 - DNA, 545 bp, Homo Sapiens
  misc_feature (461)..(461): n is a, c, g, or t
  misc_feature (463)..(463): n is a, c, g, or t
  misc_feature (506)..(506): n is a, c, g, or t
tttctgtggcaggacccagggctctcaattaacatccatgaactcagagctgggtggggagctgcaggcaggggaggctggggcgccagatgagccggccggggacagcaggcgtcgcgccacgtcctggcgttggtagaagaggacataggctgccttggactcgatctgattctcattgacaggggagacgctgttgccatcaaagtagtgccactggccgctgtccttgttgcaggcaaatgttgtgtctgaaagggaaggagagttatcctcgcctacccttcctgcctctcagaagtgtccagattcactcttgtcactcctcccaccacgataacctcaccactggctcacatccctagtcactcactgggaaggtcctgatcgcccccctgcccagaacccccagggcaggccccacccacagcctggcacatacagtgtccatcacgcatgcncncataatggttggaaaccgcgatgaggtcatatttgtacagctncggattcgactcattctgtggctggatgacaaactcagc

SEQ ID NO: 74499 - DNA, 974 bp, Homo Sapiens
gggcaaaaaagctttttattttcccccacattccagctcttcactttttctaaaaccttttccaactcagagccaaggcccaagaagttgattcacacctggggagaaagaaaataaaacaacaaaacaggtcgaagagctgctagaggaagctctgagatgtgtgcagaaattgaggaaggagcagagggagtgacagctagagaccaatacgggcatttaatcccaactaaggtagcctcaggaccccagggtctgtcaggggccaggaagccctcctttcccagtccaaggttgagagggtcctgtcatttcctgtcccaagtaggtggttggggcatttaggcccagccatcagcaaaataagcacagttgatcttgagcttccacttcctctggcctgatcagttccctgggcctcaactatttccacttttcccatagtaacttcctagggcactgcagccagctgaagctgagaccagttcaagagctggatgcataacacatggctctcaaatttcatgcacccccctctgacaagtgaagattttttgcagaaatattttttcctttagtgagctgatgtgtgaactggttaaccaacatgacccccacccactgctacgtttgtgaagctgattccctccaaagatcttgttaacggaatcagctttttctaaaggtaacgatgactaaatggaagacagaaggtgcatgtcaagttcttgggcacatactatgtccccagtaaatgagtatcatcagttagactcttctgagcggttcaaggttgaattttacaaaaattccatccataaaacggggatattgggaatttcggaacaaaaggcaagaccaacatcgatcaatattccgggacccattcatcaagttcgtgagccctccttaaggtcgccacgatgttgacccaaatgctgggaattgcaaccaggttaagaaacctaaaatcc

SEQ ID NO: 74500 - DNA, 1885 bp, Homo Sapiens
gggtccggaattcccgggatgagcgagcggctggcggatccgacgcgcgagaccgggaggggacgagggcgttgcaatcgttcggggcgggggctttccggggagggggtgctcaggtgcaccagcggcggcggaccctcagactctgccctcccctccctttaacccccttccagccggacgggaggcggggcagggctgagcatttgtgacacctacatttccgtggctcccttcttttcccccgacccctgtttatctcttcgccttccagaagttcttttccatcaggccgtcgcaccttgcgtgggaaggagcaccccacttggaagcaggaggcggggttcagatcttggccctacccctcctgtgttaaagtccgcgagcctcagtttccctcacagtattttttgcctcgccttacccggttttgaggatctgtacgagaaagagaaaggaagtggacatttgttgaattcctgcatggccaaataccacgcagactgcttcatccgccacgtttaatccttattacttggtgttctcagaactcccatttcatggattcttaagctcacagagtcagtgaataacagaaagggattcagatctagccgtttagctgcacagtggagttcttctccagagtcttcccttgtctgggctctggctggaactattcctcagccaaatcctcgccccagaacagtgcttcctgtttctccagctaagaagtctccctttcagtttccttcttccagcacggagtacactgctctgcctccacttagattacttcagaaatgaaatgcagcaaatatttatccagcagtgcagggagttgaacttttggagtcgggaaccttggattcttgttctggctctgccacttactgtgtggccttgggaagtcctttgtcttctctgagctttcttttctctttgcgtaaaagcggtgctcttgtcccattctccctccctgtcttccagcaggctctccccggaggctcagccccctctgctccccatgggcaactgccaggcagggcacaacctgcacctgtgtctggcccaccacccacctctggtctgtgccactttgatcctgctgctccttggcctctctggcctgggccttggcagcttcctcctcacccacaggactggcctgcgcagccctgacatcccccaggactgggtctcttttttgagatcttttggccagctgaccctgtgtcccaggaatgggacagtcacagggaagtggcgagggtctcacgtcgtgggcttgctgaccaccttgaacttcggagacggtccagacaggaacaagacccggacattccaggccacagtcctgggaagtcagatgggattgaaaggatcttctgcaggacaactggtccttatcacagccagggtgaccacagaaaggactgcaggaacctgcctatattttagtgctgttccaggaatcctaccctccagccagccacccatatcctgctcagaggagggggctggaaatgccaccctgagccctagaatgggtgaggaatgtgttagtgtctggagccatgaaggccttgtgctgaccaagctgctcacctcggaggagctggctctgtgtggctccaggctgctggtcttgggctccttcctgcttctcttctgtggccttctctgctgtgtcactgctatgtgcttccacccgcgccgggagtcccactggtctagaacccggctctgagggcactggcctagttcccgacttgtttctcaggtgtgaatcaacttcttgggccttggctctgagttggaaaaggttttagaaaaagtgaagagctggaatgtgggggaaaataaaaagcttttttgcccaaaa

SEQ ID NO: 74501 - DNA, 1213 bp, Homo Sapiens
  misc_feature (513)..(521): n is a, c, g, or t
  misc_feature (863)..(863): n is a, c, g, or t
  misc_feature (1153)..(1162): n is a, c, g, or t
aaggtagcgaggcctgggtggcgattcggacgaggctgggagggaagggatccctgaggcacccgaatggtccctcagggtgcagggaggcagaagcctggccacagaggagcctcctaaggcagcagctgcagcaagcgcaccctctccccactctccccacgccagagcggcttccagagcagatgctgtttccatcctcctcgtcaaaaccattctcgctgctgagcttgacaatctgggcaaggcttgtggggcgcttgacaaacagaatctgccctgtgccgcctggttccgtggcctccagcatgagcctgcaggcagggcgctgcgggaacccagttgtgctgccccagcccatgcctccgggtctgctgtgcatgaatgagtgctcacttgtcccgggtttaggacgtggtcaagtgaacagcagggtctaactgtgcttacttagcccagttcaaacagaacaaaggaaaaatatagaaagcaacatctgttgatcatttaggnnnnnnnnnaaaccaccatgtcactttgagtccttcatgggtttttgaacagcatttatcaagaagaaaatgtgggctttttcccctctcccgtgttttgtttgtcctgtagatagagggaggaaagccgtgcagtggcaggcgggaccccctctggtggcgggaccccctcttgcggggggtcttgcggggccagccgggacctgtcactttagtatttaaggagtgggtggtggaaagtcgctggcttattaacagtattgtgtgtgggttgggtttttagtttgttccttctttttgaagtcccttcatttcaatcccttgactctctctccccttccccttgcccanctctgttgaatgctgctgtgcgcgtgtgagggccgctctgcacacagggcccttggggttgtgtgaactgaaattcctccctgtatttgtgagacctcgcagggagtcccccatctggaagcacaggccaatgcccagtgcccatgcttgcagccctcaaaaaccagggccctcttcgctccaggcaagcaggccaaaaaccggtgttcttgtggttccgggtggcttgtccaccagcctccggggctgcccttgggatccttggggcttttgaaacttggaaataaaannnnnnnnnntcctcttttcccccctttccccttggaattttccaaaaaacgggaacccct

SEQ ID NO: 74502 - DNA, 1212 bp, Homo Sapiens
  misc_feature (76)..(110): n is a, c, g, or t
  misc_feature (765)..(779): n is a, c, g, or t
gctgaccagacctatggcgctacgcgctatttccgaacgacgagcgcagcgaagtcagtgagcgaggaagcggcgnnnnnnnnnnnnnnnnnnnnnnnnnnnnnnnnnnncagtcgacggtaccggacatatgcccgggaattcggccattacggccgggaagatttggaaaacgagactgggactatggcttattcagtgatgactggcttgagatgataagagaattctcgaactgcatgtattgtgccaatctgtcctgagtgttcatgctttgtaccaaatttaatgaacgcgtgttctgtaatcaaactgcaaatattgtcataaccaacatccaaaatgacggctgctatatataagtgtttgtcatatggaatttaatcgtaagccatgatcataatgttaactaaataactttatgtggcactgcctagtaagggaactatggaaaggtttggatttctccaaatctgggagaattttcaaaataagaaaataacctttatatgatatactatgactaggctgtgtatttcttttcagggatttttctaccttcagggttggatgtagtttagttactattaccatagccaacctgtagttttacatatacattttcttgtggagcaatagagttctccattttacagaagcattttaaatgtagtttgaatattttccacaagatgctgcaatgtgagttatcacttcatttatcttaaagaaagactaaactggttgtcagttacatctgacagnnnnnnnnnnnnnnntcactgtgtaaccaggttaagtggtaaaataatccaggcgtcagtcaaaggcattttgctgactttaatattgattatatttttaacaggaatttaagaaaatattactggaattaaaaatatatatatattaaacaagaattttctttgctctgtctagcttaaactactactcaagctgcttaagttcttaagtattgtttgtaatcaccaataaataagtgcatttgtaattcatcagtcattattagcttttattaaaagaagattacgttttacaatgtaactataatctcttgaatttggtatcttattaatgagttttaaagatgtaaaacctaaccttttttaaagctccattgtcttatgtttttagaggcttttccgtaaacatatatcttacatataataaacttttcaaatcttgaaaaaa

SEQ ID NO: 74503 - DNA, 1222 bp, Homo Sapiens
cgaaggcttgtactatagaccagttgtcaaaaaagcaggctggtacggtccggatatcccgggatatcgtcgacccacgcgtcgcccacgcgtcggaactcatggatgcagactcggacttctgagcctgcagagcaggacctgggacaggaaagagaggaaccaataccttcaaggctcttcttcctcaccgagcatgcttccctaggatcccgtcttccagagaacctgtgggctgactgccctccgaagagagttctggatgtctggctcaaagcagcaggactgtgggaaagagcctaacatctccatggggaggcctcaccccagggacagggccctggagctcagggtccttgtttctgccctgccagctgcagcctggttggcagcatctgctccatcggggcagggggtatgcagagcttgtggtggggcaggaacggtggaggcagaggtgacagttcccagagtgggctttggtggccagggaggcagcctagcctatgtctggcagatgagggctggctgccgttttctgggctgatgggtgccctttcctggcagtctcagtccaaaagtgttgactgtgtcattagtcctttgtctaagtagggccagggcaccgtattcctctcccaggtgtttgtggggctggaaggacctgctcccacaggggccatgtcctctcttaataggtggcactaccccaaacccatcttttgttctcctatatcctccttctcctgttccatttcagttcagtttcagcggtgccaacctctttgcgtttcctttttgttgatgaggacccagagctgctgcacacactcacctctaaccccctcccctcgctgctgggccccatctccacaggagagactggttcggctctagggcctcagtctggagtgggataggagcagtgagtgacaaagcctctgaaagatgcatcatctcttcctcacacccatttagtgggggatgggtcctctagacttgaggggctaccctgggaagctgccgtagcttcagccaggcaagaaagcttccttcaacctgcatagccggtgggtgaggagattcccaccttccatagcctccaaacatgttcccaaggccccactttcaagaatcagacagcaggaagccatagatgctggctgggttccaggttatggggagaagaaatacagtcaataaaaggtttttgtataaaccc

SEQ ID NO: 74504 - DNA, 717 bp, Homo Sapiens
  misc_feature (37)..(37): n is a, c, g, or t
gtatataattgcctaattagcaatcatttttattttntgctcactccctggtctgaatctatctgtctattcagatattttttggtaggtttggaaaatggagaagtgagcctaattggtgcctaattgtctggtgtatcattcactttattcagtttgttctatcaatatgatttacccctcaaggttaacctagcaggttgctcagttattatctctcaaggtcacagtactagaaatacttggcttgcatctttcagatgccattcatgttatcaagctcaaattatagttggtcacaggattctaaagtctttatttgacttctcctttttgaactggctcaaatggaaaagtgtagttgcttttaaatgttaaaaataagtttaaactttatatttcccattggtttcccctattttgtcctttctttgtgtgcttgaaatattttatttttcagtttgtcctcatagggaatcaagtattttagctaggtgatgtcttgcaagtacgttccactttgttacaatctactatctgtatatactatttgtatcttaattcttttatgagatgttctgtaacatttttctcactttgacaaatgtttttagactgtacagtcaagatctggcgcttgggggtaagtggaatgatttgctaatattgagaatctgttgtatcaaacataataaactttttttgagatgtgaaaaa

SEQ ID NO: 74505 - DNA, 794 bp, Homo Sapiens
  misc_feature (81)..(81): n is a, c, g, or t
gcctcagcctttgtgctggtggggggtgctgtgctgcattgcccctcggggggtcccaggccccagccatacatggcccgntactcaacatctgcccctgccatctctcggggccctctgagtaccctaccaagaattacgtctgacgtggaggggaatgggggctccgctggcgctagagccatccagaagtggcagtgcccaacagctttgggatgggttcgtaccttttgtttctgcctcctgctattttccttttgactgaggatatttaaaattcatttgaaaactgagccaaggtgttgactcagactctcacttaggctctgctgtttctcacccttggatgatggagccaaagaggggatgctttgagattctggatcttgacatgcccatcttagaagccagtcaagctatggaactaatgcggaggctgcttgctgtgctggctttgcaacaagacaagactgtccccaagagttcctgctgctgctgggggctgggcttccctagatgtcactggacagcttgccccccatcctactcaggtctttggagctcctttcttcacccctggaaaaacaaatgatctgttaacaaaggactgcccacctccggaacttttgacctctgtttcctccgtcctgataagacgtccaccccccagggccaggtcccagctatgtagacccccgcccccacctccaacactgcacccttttgccctgcccccctcgtctcaccccctttacactcacatttttatcaaataaagcatgttttgttagggc

SEQ ID NO: 74506 - DNA, 855 bp, Homo Sapiens
tggtggtgtttcagggctgtccattccccaactttattcacaaatctggtgtctgtagaaagctgggggtcagcaggctgggggcggctgtccagactcccctggccccatgccctcagggagggagcggcagatcacggagatgcgccggccccggggaatccggcgttccccaaagaaggactcttcatcccgaaggatctcatgggagaagtcataacgggctgagcccctaaggatgtagagggagcccggctccagcaagagttccagccactcccccggctcctgggtgtgcaccagccgcataacgctgggagacaggagagacaggccggcgatggtggccccgcagaacttgatgctgtccacgtggggcttgatgtagccgcgggcttccaggtccagcacgtgcacggaggagagcagggtctggccggggccaaaggcggccgcctgcacgcgctgcaggatggcccggctggcttctgaccagcgcgacttctctgtctctcggaagccgtggatggccgcgtcccagtgatcgtattcgtagcggcggcggcgcagctcgggctccagttctcggctcagcgtctcctcctctgccgtgctcaggaagccaggccgcaccacggccgcgtcctgcaggcggctcagcacggaagggcccgagcctcgcacccagctgggccctggcagcgtccgcagcgccagcagcccagtcccggccataatcccggagcggggtcatgagagagggcagggttggggaacgcccccgccaaaagccattggcggtacctgcggcagcgattgacttccctcagagtcccgcctctcgctccaacatca

SEQ ID NO: 74507 - DNA, 1969 bp, Homo Sapiens
taggctagtacgaggcctggtggttgaatcggcacgagggacgtacctcacggaagccggctttggccctgcggctgctaccgtcgccgcggagaaattgttggatctggcagtctaggaatgaatctcctctcagcctttaagctcacctggtcagaatccttggatgagcctgtgggaccgttcctcctagcccggtggtttggaaccagtggctttgggactgtaagaggatggacaaagattctcaggggctgctagattcatccctgatggcatcaggcactgccagccgctcagaggatgaggagtcactggcagggcagaagcgagcctcctcccaggccttgggcaccatccctaaacggagaagctcctccaggttcatcaagaggaagaagttcgatgatgagctggtggagagcagcctggcaaaatcttctacccgggcaaagggggccagtggggtggaaccagggcgctgttcggggagtgaaccctcctccagtgagaagaagaaggtatccaaagcccccagcactcctgtgccacccagcccagccccagcccctggactcaccaagcgtgtgaagaagagtaaacagccacttcaggtgaccaaggatctgggccgctggaagcctgcagatgacctcctgctcataaatgctgtgttgcagaccaacgacctgacctccgtccacctgggcgtgaaattcagctgccgcttcacccttcgggaggtccaggagcgttggtacgccctgctctacgatcctgtcatctccaagttggcctgtcaggccatgaggcagctgcacccagaggctattgcagccatccagagcaaggccctgtttagcaaggctgaggagcagctgctgagcaaagtgggatcgaccagccagcccaccttggagaccttccaggacctgctgcacagacaccctgatgccttctacctggcccgtaccgcgaaggccctgcaggcccactggcagctcatgaagcagtattacctgctggaggaccagacagtgcagccgctgcccaaaggggaccaagtgctgaacttctctgatgcagaggacctgattgatgacagtaagctcaaggacatgcgagatgaggtcctggaacatgagctgatggtggctgaccggcgccagaagcgagagattcggcagctggaacaggaactgcataagtggcaggtgctagtggacagcatcacaggcatgagctctccggacttcgacaaccagacactggcagtgctgcggggccgcatggtgcggtacctgatgcgctcgcgtgagatcaccctgggcagagcaaccaaggataaccagattgatgtggacctgtctctggagggtccggcctggaagatatcccggaaacaaggtgtcatcaagctgaagaacaacggtgatttcttcattgccaatgagggtcgacggcccatctacatcgatggacggccggtgctctgtggctccaaatggcgcctcagcaacaactctgtggtggagatcgccagcctgcgattcgtcttccttatcaaccaggacctcattgccctcatcagggctgaggctgccaagatcacaccacagtgaggagtggtggcaggactcgtgggccctctccggcctgtttcccctgccactccagcccccttgagctgggaactcaggctcctggaaaaacctgggcagtgggaggctcagctgcgggccattgatttgagcctttgagggaggatagggctggcctttgtgaagccagcagaggctgagaacctcaggcttccctagatccagagcccctccccatcttcctctctctaaaaacaaccctaccccccattgccaccttcactcctgtgtctccagctgattagcctcagactcttcttttattgtttttcttttgtaaataaaaagcaccaggttccaaagtaaaa

SEQ ID NO: 74508 - DNA, 1594 bp, Homo Sapiens
  misc_feature (488)..(496): n is a, c, g, or t
  misc_feature (682)..(743): n is a, c, g, or t
  misc_feature (764)..(777): n is a, c, g, or t
  misc_feature (943)..(953): n is a, c, g, or t
tacatatgtcaacactgagggtagagctcagcagactaaggtagcagtgacacctcctggcttggcaagagaagactggaaaattataagagcactctctgagattgctggaatgactcttccatatgatactctggatcaagtaaggaacagattggaagaagtctctcctaatcttgttcgatatgatgatattgaaggggctaattacttccagcaagcaaatgagctctcaaagctagtgaaccagcagcttcttgctgacccacttgttccacctcagctaactataaaagacttctacatgacagattcaattagcagagcctcacagacaatggccaaatgtgtcaaagctgtcacagagggtgcccaggcagtagaggaaccatccatatgctgaagcttctactaggatcccagttttgccgcagataattaatggacaactgtagtgcagtgatcctttacaggtttatttctttgtnnnnnnnnntaataataatttgaatcatgtaatatttaaggttatactatgcctatttgaaaatgatattagttatcaactttgcagtttgaaaaacatgtattgtgtgtaaaggttaaataacaaaactatgcagatgctcttaaaagcattgataacctttgtgacgaacataaagagatccttaaattatgnnnnnnnnnnnnnnnnnnnnnnnnnnnnnnnnnnnnnnnnnnnnnnnnnnnnnnnnnnnnnncataacccggcgcacgccagnnnnnnnnnnnnnngaaagagagaggtctgtggcgggccgccctccgcccctcaaaaaaacttttcaaaaacctttttttggggcgccgggcccctaagagggaaagcgacacgcggccctcacttgtttccataagaaaacactgggatcatgaataacggccttgaatttccccaccnnnnnnnnnnncccgcccgcgggccacgccgcgccctgtttcgtcaaaaacgctccgaagggcggttggtctgggggagcgtattgcgcgggggttccttcaacgaacggcgggagtgcaccagacgaggagccccctaaatatagaaaattatcgctcgccccctgggccatttggcaatatctttgttggcggaaggggagccgggtggtgtggaaaatattgacttatggagcccctctttcttgcggccgcgagatgtgggaggacaactgctctgagctcgaaaacggggggcctagcaggcgaaaaaaccctgctcagtctcccctcgaggggggagaagttcacagccacctgtcttggccccccacgaaagcgcgaaacaaataagaatcctccaaccccctcgcagcgcagaacacctccggcggaggagataaaaacactatgtgttcccacttatgggggcgcgcgcgctctttccaatatcgtacgaagggaggcggggagggaacatctgcgtgcccgcagggagctgtagggctccgcagcacacacgcacaaccgtcctttttgtctcccacgacacaccccgcgagtgaggggggacgacggtgcggggatgggtcctttgccccaatacacacgg

SEQ ID NO: 74509 - DNA, 884 bp, Homo Sapiens
ttaggctaggtagaggctggggtgtgaaatcggcacgaggaaacccaaccgcagttgactagcacctgctaccgcgcctttgcttcctggcgcacgcggagcctcctggagcctgccaccatcctgcctactacgtgctgccctgcgcccgcagccatgtgccgcaccctggccgccttccccaccacctgcctggagagagccaaagagttcaagacacgtctggggatctttcttcacaaatcagagctgggctgcgatactgggagtactggcaagttcgagtggggcagtaaacacagcaaagagaatagaaacttctcagaagatgtgctggggtggagagagtcgttcgacctgctgctgagcagtaaaaatggagtggctgccttccacgctttcctgaagacagagttcagtgaggagaacctggagttctggctggcctgtgaggagttcaagaagatccgatcagctaccaagctggcctccagggcacaccagatctttgaggagttcatttgcagtgaggcccctaaagaggtcaacattgaccatgagacccgcgagctgacgaggatgaacctgcagactgccacagccacatgctttgatgcggctcaggggaagacacgtaccctgatggagaaggactcctacccacgcttcctgaagtcgcctgcttaccgggacctggctgcccaagcctcagccgcctctgccactctgtccagctgcagcctggacgagccctcacacacctgagtctccacggcagtgaggaagccagccgggaagagaggttgagtcacccatccccgaggtggctgcccctgtgtgggaggcaggttctgcaaagcaagtgcaagaggacaaaaaaacaa

SEQ ID NO: 74510 - DNA, 551 bp, Homo Sapiens
  misc_feature (414)..(414): n is a, c, g, or t
ttttacaagtgttctaagagctttactgactgaagaccacagggagtgatgaaaatctcagggaagggatgccatgtggacactggtgaccacaaagaacactctcccattatcttagcatcatggcaactcagctaatcctagttcaaatgtccctcttcccagacgcccctcatgacccctcctcactgggagggatgcaccccagctccgtctcccacttcagagccttctgtactctgctgactctgtccagaatcccagctatttgggttcaagcatcccagtgacctggctctatacgtcttaatgtggtatttctgatgtaggaacagtattttctaaaatgggaacagacacctagctcacacctcctcactgcttctcactactcacttggccacaccattctcntgctcagtgccccatggaagagacgtgattgcagaaagcagataacaaaggcatgttttcctggcttttgggtttcaaaagcctaggtcctgaagggaacagaaaaggcttaaggcatagataaaagattcaggaga

SEQ ID NO: 74511 - DNA, 994 bp, Homo Sapiens
  misc_feature (845)..(845): n is a, c, g, or t
aactttacggctaggtacgaggctggcgttgaaattcggcacgaggcctccagcttagctttcacccggtggtgttcccgggaggagagggcggagggcggagggaacttgcaccgaggcatcactcgagaccccaaacctccaggcctgaggcccagccagcgcccaatggatgacaaaaagaagaaacggagtcccaagccctgcctggcccagccagcccaggccccaggcacactacggagggtccctgtgcctaccagccacagcggctccttggccctaggacttcctcatctgccatcccccaagcagcgggccaagttcaagagagtaggcaaagagaagtgccgcccagtcctggctggaggtggaagcggctctgcaggcacgcccctgcagcactccttcctgaccgaggtgactgatgtctatgagatggaggggggactcctgaacctgctcaatgatttccactctggccggctgcaggccttcgggaaggaatgctcctttgagcagctggagcacgttcgggagatgcaggagaagctagcccggctgcacttcagcctggatgtgtgtggggaggaggaggacgatgaagaggaagaggatggggtcactgaggggctgccagaggagcagaagaagacaatggctgaccgtaacctggaccagctgcttagcaatctggaagacctcagtaattctaatgtatcctttccaaggaacccgtctatgttgtgtgtgttcctgagaggtcagtttcctcctctccagccctccaggaggtattcacacacgaaccaaatttcccaacttcttgcagtccttgtcagatntagccacagactggccaaacgcggttccggacttttgaaatttccccaaattgaagacaagtggtgtcagggaagttttactactggatcacaatcctgtgggaaactttattggattatcttacaagctgttcgcaggcccccatctc

SEQ ID NO: 74512 - DNA, 1217 bp, Homo Sapiens
  misc_feature (800)..(903): n is a, c, g, or t
  misc_feature (905)..(916): n is a, c, g, or t
  misc_feature (918)..(964): n is a, c, g, or t
  misc_feature (970)..(973): n is a, c, g, or t
  misc_feature (979)..(979): n is a, c, g, or t
  misc_feature (988)..(988): n is a, c, g, or t
  misc_feature (1002)..(1120): n is a, c, g, or t
tgcaccgaagcatcactcgagaccccaaacctccaggcctgaggcccagccagcgcccaagggatgacaaaaagaagaaacggagtcccaagccctgcctggcccagccagcccaggccccaggcacactacggagggtccctgtgcctaccagccacagcggctccttggccctaggacttcctcatctgccatcccccaagcagcgggccaagttcaagagagtaggcaaagagaagtgccgcccagtcctggctggaggtggaagcggctctgcaggcacgcccctgcagcactccttcctgaccgaggtgactgatgtctatgagatggaggggggactcctgaacctgctcaatgatttccactctggccggctgcaggccttcgggaaggaatgctcctttgagcagctggagcacgttcgggagatgcaggagaagctagcccggctgcacttcagcctggatgtgtgtggggaggaggaggacgatgaagaggaagaggatggggtcactgaggggctgccagaggagcagaagaagacaatggctgaccgtaacctggaccagctgcttagcaatctggaagacctcagtaattctatccagaagctgcacctggccgagaacgccgagcctgaggagcagtccgctgcgtaggcgtcccacgcaggcccacactgcccctctcattctcttcaaactgtgactttttacagactcgggcgggtgttctgcggccccccaggtgctatgggggaggggggcgttgaatggaattaaaccagaaagaaagcnnnnnnnnnnnnnnnnnnnnnnnnnnnnnnnnnnnnnnnnnnnnnnnnnnnnnnnnnnnnnnnnnnnnnnnnnnnnnnnnnnnnnnnnnnnnnnnnnnnnnnnnannnnnnnnnnnnannnnnnnnnnnnnnnnnnnnnnnnnnnnnnnnnnnnnnnnnnnnnnncacccnnnnaaaaanaaaccaccnaaaaaacccataannnnnnnnnnnnnnnnnnnnnnnnnnnnnnnnnnnnnnnnnnnnnnnnnnnnnnnnnnnnnnnnnnnnnnnnnnnnnnnnnnnnnnnnnnnnnnnnnnnnnnnnnnnnnnnnnnnnnnnacaacaaaaacatacccccaaattctaccataacacttttcacacccatccccaaacatgtggcaccgcgggcattcttggttctctaacacgcgga

SEQ ID NO: 74513 - DNA, 1960 bp, Homo Sapiens
  misc_feature (1460)..(1511): n is a, c, g, or t
ctaggtagaggccgggtttgaatcggcacgagggcaatgcaaggagacgccgccgccttcatgctgccggcgggctgctcgcgccggctggtggccgagctgcagggcgccctggacgcctgcgcacagcgacaattgcaattggagcagagcctgcgcgtttgccgtcggctgctgcatgcctgggaaccaactgggacccgggctttgaagccacctccagggccagaaactaatggagaggacccccttccagcatgcacacccagtccacaagacctcaaagagttggagtttctgacccaggcactggagaaggctgtacgagttcgaagaggcatcactaaggccggagagagagacaaggcccccagcctgaaatctaggtccattgtcacctcttctggcacgacagcctccgccccaccgcattccccaggccaagctggtggccatgcttcagacacgagacccaccaagggcctccgccagaccacggtgcctgccaagggccaccctgagcgccggctgctgtcagtgggggatgggacccgtgttgggatgggagcccgaacccccaggcctggggcgggcctcagggaccagcaaatggccccatccgctgctcctcaggccccagaagccttcacactcaaggagaaggggcacctgctgcggctgcctgcggcattcaggaaagcagcttcccagaactcgagcctgtgggcccagctcagttccacacagaccagtgattccacggatgccgccgctgccaaaacccagttcctccagaacatgcagacagcttcaggcgggccccagcccaggctcagtgctgtggaggtggaggcggaggcggggcgcctgcggaaggcctgctcgctgctgagactgcgcatgagggaggagctctcggcagcccccatggactggatgcaggagtaccgctgcctgctcacgctggaggggctgcaggccatggtgggccagtgtctgcacaggctgcaggagctgcgtgcagcggtggcggaacagccaccaagaccatgtcctgtggggaggccccccggagcctcgccgtcctgtgggggtagagcggagcctgcatggagcccccagctgcttggctactccaggcacccagtgagctgcagacccttggcggccctcaagctgcgagtggctgtgctggaccagcagatccacttggaaaaggtgcttctggaagaggaggtgggggtgcaacagaggtccgcagccttgaggacccgagggtaggggcttgactgctccaccccccaggacccaggaggatgggggcaagcctggggtctgtgtgtgtgggttgggaagtgcatgggtcagaaggggcctgggacggcaagaagggagcctggagcctcagaaggagggaggagggctgaagcatgggggcctcgaagcctgtcccaggattnnnnnnnnnnnnnnnnnnnnnnnnnnnnnnnnnnnnnnnnnnnnnnnnnnnnggtcctgatggctgaactcctcccccctggtaagcgctgcacagccgcaggggccgccctggctggccctgtgccgggctgtgcacagcctgctctgcgagggaggagcacgtgtccttaccatcctgcgggatgaacctgcagtctgagcctttcccatgctgccctcggcctgttcagatggggattgggggtgtcttccctggcactgtgctcggggacccagagatgcctgtgcttccctgggaaacctggtgaactggaccaggtggcctcactggctcttctcaggacaactaagcctgctggtcagggctggctttcagccttcctaaggctcctggactccagaggccagcggggagcctttcctggctccctctgttttctctcactgtagaccaaagagccgcttgtgtgatattaaagccactttagaaagcaaaaaa

SEQ ID NO: 74514 - DNA, 1225 bp, Homo Sapiens
aaactcaataaaagaaaaactacatttcatgtgtgaacacaaaaattggaattaaattggcaatagcattgggattgtgctcagagtcacagtttacatctgaccacaatttctatatgaattttttaagataaaacagtaagaattttaaagaaggtttctgaaatttaaaaattataataacataattaactttgatattttaattccatgtaatttaaaacatttaatagatatataatgttccactattaatttaactagaagtataaaaataaaacatatataataaaaatattctacttatttttaaattatctatattatactgagtaaaagaaaatttaggaatataaataaatgagcatttttgaacatgtaaaaatattttcttgctgtttttaggagacttttagcaggacaggagcttacctctcatctacctctgcttggacaaaccagtgatgtgatttgcaaataggctgtaacttcaccgaaaacacatcacagtaaagaaaggtagtgactttcagagaatttgacctaacttagaatttgtaaaagagaaaagcattgtccttatgcctaaagtacatgactgtttctttttaagttacatgtatatttacctgaccaatttgttttactctgtattttaagttatcaggtgaaatggttttagaataaattaatgagttgtttcttctgaataaatgtgcatgttacaaatgcaaacacgtgtatgtattatacaactatgcagcttcaagagctgacttatttctatcagctttttattcacttaaaaaaatcaggctactgaagcatattagaatttaattacaccaattagtactgccacatcagacatatgatgtgccttcaattaagaagtacctaatgggtattagtacaatttagcttcataattaaagttctaagaacagcacaaattaaacattatgattacaaaacattaaaaatctactggtgaaattaaagctgaatatttaacttctccttttgagctgattttaaaaaagaaaatcaggattatataaaatgcaatgttattattgaagcattctgaatttaaaaacagaaattaagctcacatgcccataaatatgtgcatatacaatgattaaatatttagtaaaatacccaacctaacacttgtgccatctaataagcattaaaggttatcattttggagtttcacttg

SEQ ID NO: 74515 - DNA, 515 bp, Homo Sapiens
taaaatataaaaatatattgcaaagggggtgatgggagggcagcatgggcacagtgcagccccagctcgctgactgccggtggaggtgcaacccactggggctcagcacaggctcatggattgcccggggatgggggccctcttggcacagggacctccaggtacggcacagggtccgagaaggggcctggtcgggcccagtagtccagggctcgaactcggtaggagccagagacagcacctgtgtctgggctgaacacaaagaggttgaaggtcgatggcttcctgctgaccggggtgtacgccttaccgtcctgagagaactggatctcgtatgtccacaggcacttggagcccacgtgttcatccgaccagaccagaaccagctgcccttgggtcaggggcagggcgcggagccgcgtgacctgcccgggcggcttctcggggcgcgcacacacgtgcaccagcaaaagcgacggcagccgcagcgcggggcgcagggtcaggcggccgca

SEQ ID NO: 74516 - DNA, 609 bp, Homo Sapiens
aggctttctcttgcccttttcctgctgtgttctcaggcctcccaagggctgtttgactcaacagtctacatccttcgttgtgttttggagaatgtgggggtgggggtcagagttcaaggtgtctgttcccttttcctgtgaactctttctagtccctatttggggagggtggctggaaacagatttttgctgaatttctggctcagatcttctagccaggaaaggcaagagcccccaagagcccttttttttgacatacactaatcattggccggggtcttggtgacaacttttaaaatcccaaatagttttatttggattatgtaaaagtaagtgtgaaacatgggaacaacggacttccactgagcgatgtgaaaacgttacaggttcagtacttccaaaggaagaaacctccaaacccaaaaaagaataaatatgaatttgtatttttgaagaatgtgaaataatggtgtttgcttaattgctcattttgtataaacttaatattgtactttaaaatatctgctaaaaagtgaaaatttaactttttggaattgaaaaagcaatattaaatactaatgaaatcctaattaaatgcttatttaaaaa

SEQ ID NO: 74517 - DNA, 501 bp, Homo Sapiens
acaagtaatcatgtgtatattgggtcacaatgtaaaatggtttgaaaaaccactaagattccaagtcccttattttactgatgagaaaacagccagagagtgaaagctgatgattacaaatcacagccatgagagctgggctctgcactcagccctgctgggctgggtggccgctgctcacggtgacccttcaaggcaggcctcattctgtccagtagaggtgtggttactaagtcatagagctacagaggtgagggaccaggtgccctcactttggttccaagacccatctgcaccccacaaatgccaccagccacacctagaacaaaatggttttaatcaattgcgtcaccctcactctcctgggagcggagcaacaaaaaggctcggctcctgcccccagaggacagtaaggcttatgtgtctctccacactgcagggcccaggctgggcaggcagggggtgggaagcaggacagggggcaaggagggagggtgggag

SEQ ID NO: 74518 - DNA, 627 bp, Homo Sapiens
  misc_feature (56)..(57): n is a, c, g, or t
cccagcactgtgcagatgctcttggcaggacagcatcgcagggaggtgctgggatnntgggcctcactgtctgggtcttgttccctctgaaagagatggatcttgtgcagaccagggttgttgagtgaggggagcgtgggatggggaccgtgggaaagaggacagctcagggagaagtgacctggaaaggtcctgtttgcatctgacccatctcaactggcccagcatcccaacttctctgcagcgaaagggtggcgccccgcagcctcgggaggcctgcccaggctcccgtggagcttccaacagctgcttggccccgcagctgcccccacttcctttgagacctgcactctcatgcttgccgcatcatgcctccctgtgggggctttgggcatggaggaggcagaagagggggtgccaggcctcctgtatttggggtcttcccccagtggatgtctcatggactctggccccacacactcacaatgactctggctggccccacgcagcgggcccagccgccccccaggtggcctcacattctgctctgctaagtttggagaaaacagaacaataaaccagatgcaggtggtgcccgcccggcctctcacctgcctccttggtgtg

SEQ ID NO: 74519 - DNA, 2142 bp, Homo Sapiens
aacgatagtctaggtacgaggccccgtggtaatcggcacgaggggcccaacggagggagtggaatggccgcgggcggctcgacgcagcagaggcgacgcgagatggcggcagcttcagcggcggcgatctcaggagctggtcgctgtcggctaagcaagattggagctactcgtcgtccacctccagctcgcgtaagggtggctgtgcgactgcggccatttgtggatggaacagcgggagcaagtgatcccccctgtgtgcggggcatggacagctgctctctagagattgctaactggaggaaccaccaggagactctcaaataccagtttgatgccttctatggggagaggagtactcagcaggacatctatgcaggttcagtgcagcccatcctaaggcacttgctggaagggcagaatgccagtgtgcttgcctatggacccacaggagctgggaagacgcacacaatgctgggcagcccagagcaacctggggtgatcccgcgggctctcatggacctcctgcagctcacaagggaggagggtgccgagggccggccatgggccctttctgtcaccatgtcttacctagagatctaccaggagaaggtattagacctcctggaccctgcttcgggagacctggtaatccgagaagactgccgggggaatatcctgattccgggtctctcccagaagcccatcagtagctttgctgattttgagcggcacttcctgccagccagtcgaaatcggactgtaggagccacccggctcaaccagcgctcctcccgcagtcatgctgtgctcctggtcaaggtggaccagcgggaacgtttggccccatttcgccagcgagagggaaaactctacctgattgacttggctgggtcagaggacaaccggcgcacaggcaacaagggccttcggctaaaagagagtggagccatcaacacctccctgtttgtcctgggcaaagtggtagatgcgctgaatcagggcctccctcgtgtaccttatcgggacagcaagctcactcgcctattgcaggactctctgggtggctcagcccacagtatccttattgccaacattgcccctgagagacgcttctacctagacacagtctccgcactcaactttgctgccaggtccaaggaggtgatcaatcggccttttaccaatgagagcctgcagcctcatgccttgggacctgttaagctgtctcagaaagaattgcttggtccaccagaggcaaagagagcccgaggccctgaggaagaggagattgggagccctgagcccatggcagctccagcctctgcctcccagaaactcagccccctacagaagctaagcagcatggacccggccatgctggagcgcctcctcagcttggaccgtctgcttgcctcccaggggagccagggggcccctctgttgagtaccccaaagcgagagcggatggtgctaatgaagacagtagaagagaaggacctagagattgagaggcttaagacgaagcaaaaagaactggaggccaagatgttggcccagaaggctgaggaaaaggagaaccattgtcccacaatgctccggcccctttcacatcgcacagtcacaggggcaaagcccctgaaaaaggctgtggtgatgcccctacagctaattcaggagcaggcagcatccccaaatgccgagatccacatcctgaagaataaaggccggaagagaaagctggagtccctggatgccctagagcctgaggagaaggctgaggactgctgggagctacagatcagcccggagctactggctcatgggcgccaaaaaatactggatctgctgaacgaaggctcagcccgagatctccgcagtcttcagcgcattggcccgaagaaggcccagctaatcgtgggctggcgggagctccacggccccttcagccaggtggaggacctggaacgcgtggagggcataacggggaaacagatggagtccttcctgaaggcaaacatcctgggtctcgccgccggccagcgctgtggcgcctcctgaccgtcgtctcctcactccgccttttcaaatttttgtataaccccgtgttgtgtaaatacagtttttgctccggtgaaaaaa

SEQ ID NO: 74520 - DNA, 887 bp, Homo Sapiens
gaaagcccgaagagggcagtggcccgagtgggacctgtctctgtggccattgatgcaagcctgacctccttccagttttacagcaaaggtgtgtattatgatgaaagctgcaatagcgataatctgaaccatgcggttttggcagtgggatatggaatccagaagggaaacaagcactggataattaaaaacagctggggagaaaactggggaaacaaaggatatatcctcatggctcgaaataagaacaacgcctgtggcattgccaacctggccagcttccccaagatgtgactccagccagccaaatccatcctgctcttccatttcttccacgatggtgcagtgtaacgatgcactttggaagggagttggtgtgctatttttgaagcagatgtggtgatactgagattgtctgttcagtttccccatttgtttgtgcttcaaatgatccttcctactttgcttctctccacccatgacctttttcactgtggccatcaggactttccctgacagctgtgtactcttaggctaagagatgtgactacagcctgcccctgactgtgttgtcccagggctgatgctgtacaggtacaggctggagattttcacataggttagattctcattcacgggactagttagctttaagcaccctagaggactagggtaatctgacttctcacttcctaagttcccttctatatcctcaaggtagaaatgtctatgttttctactccaattcataaatctattcataagtctttggtacaagtttacatgataaaaagaaatgtgatttgtcttcccttctttgcacttttgaaataaagtatttatctcctgtctacagtttaataaatagcatctagtacacataaaaa

SEQ ID NO: 74521 - DNA, 1263 bp, Homo Sapiens
gctaggtacgaggcctgggtggcgaattcggcacgagggtggatggctgcgagctcgagcaaccccgagcgccgagcgagagtcagctgtgccgggcagatgcatggaagtgcagccaggatgtatctcggtggggccggcggccgtcgcggagccagatcacctgagggaagcgggcatcacggccgtgctaacagtggactcggaggagcccagcttcaaggcggggcctggggtcgaggatctatggcgcctcttcgtgccagcgctggacaaacccgagacggacctactcagccatctggaccggtgcgtggccttcatcggtcaggcccgcgctgagggccgtgcggtgttggtgcactgtcatgcaggagtcagtcgaagtgtggccataataactgcttttctcatgaagactgaccaacttccctttgaaaaagcctatgaaaagctccagattctcaaaccagaggctaagatgaatgaggggtttgagtggcaactgaaattataccaggcaatgggatacgaagtggatacctctagtgcaatttataagcaatatcgtttacaaaaggttacagagaagtatccagaattgcagaatttacctcaagaactctttgctgttgacccaactaccgtttcacaaggattgaaagatgaggttctctacaagtgtagaaagtgcaggcgatcattatttcgaagttctagtattctggatcaccgtgaaggaagtggacctatagcctttgcccacaagagaatgacaccatcttccatgcttaccacagggaggcaagctcaatgtacatcttatttcattgaacctgtacagtggatggaatctgctttgttgggagtgatggatggacagcttctttgcccaaaatgcagtgccaagttgggttccttcaactggtatggtgaacagtgctcttgtggtaggtggataacacctgcttttcaaatacataagaatagagtggatgaaatgaaaatattgcctgttttgggatcacaaacaggaaaaatatgaacatgatattttatagcttgggaagaaacttgcagatgatatgtgctgcctttgcttcttatcattcatggcagattgtttgtgctttcaacatttcatttgaaatgggagaagataaaatcacttgatgtaacctggaaactatgctttacatggcaatcaaagccttttgatcatgtacattttatttgatattaaaatcttttataaccaaaaaa

SEQ ID NO: 74522 - DNA, 657 bp, Homo Sapiens
acaacagattaagattcttaaacatgttcctgaaggtgctgagacagagcaaggccttaaacgggagcttcaagttcttagattagctaatcatcagctggataaagagaaagcagaattaatccatcagatagaagctaacaaggaccaaagtggagctgaaagcaccatacctgatgctgatcaactaaaggaaaaaataaaagatctagagacacagctcaaaatgtcagatctagaaaagcagcatttgaaggaggaaataaagaagctgaaaaaagaactggaaaattttgatccttcattttttgaagaaattgaagatcttaagtataattacaaggaagaagtgaagaagaatattctcttagaagagaaggtaaaaaaactttcagaacaattgggagttgaattaactagccctgttgctgcttctgaagagtttgaagatgaagaagaaagtcctgttaatttccccatttactaaaggtcacctataaactttgtttcatttaactatttattaactttataagttaaatatacttggaaataagcagttctccgaactgtagtatttccttctcactaccttgtacctttatacttagattggaattcttaataaataaaattatatgaaattttcaacttatt

SEQ ID NO: 74523 - DNA, 727 bp, Homo Sapiens
cccacaatggtatcctgtgaccccaggaattatgtctcacgtgcccctgtatccaaacagccagccgcaagtccacctagttcctgggaacccacctagtttggtgtcgaatgtgaatgggcagcctgtgcagaaagctctgaaagaaggcaaaaccttgggggccatccagatcatcattggcctggctcacatcggcctcggctccatcatggcgacggttctcgtaggggaatacctgtctatttcattctacggaggctttcccttctggggaggcttgtggtttatcatttcaggatctctctccgtggcagcagaaaatcagccatattcttattgcctgctgtctggcagtttgggcttgaacatcgtcagtgcaatctgctctgcagttggagtcatactcttcatcacagatttaagtattccccacccatatgcctaccccgactattatccttacgcctggggtgtgttctgccaatgattgatcttggaatgagaactcgccccatgcccaccacccattccaccttcaagcctcagtcatcccatctgaacatggagggtcggactgcatctgagctttgcaaataatgacccaaggaatggagatactccggggtttccacatcaggaattatttttcatcaaataaaaaaaatctcagctgcttgagggaccccttttccatgaaatattttatgtgtaaaaaaattttatt

SEQ ID NO: 74524 - DNA, 893 bp, Homo Sapiens
  misc_feature (42)..(84): n is a, c, g, or t
  misc_feature (87)..(121): n is a, c, g, or t
taaatgtatacgactcactatagggcgctagcgtccgttgtnnnnnnnnnnnnnnnnnnnnnnnnnnnnnnnnnnnnnnnnnnncgnnnnnnnnnnnnnnnnnnnnnnnnnnnnnnnnnnncagtcgacggtaccggacatatgcccgggaattcggccattacggccggggacattcattctctcaggaaaaaaaacaaggtccccagcagcaaagaaaaggaataggatcaagagatacgtggctgctggcagagcaagcatgaattcgatgacttcagcagttccggtggccaattctgtgttggtggtggcaccccacaatggttatcctgtgaccccaggaattatgtctcacgtgcccctgtatccaaacagccagccgcaagtccacctagttcctgggaagcccacctagtttggtgtcgaatgtgaatgggcagcctgtgcagaaagctctgaaagaaggcaaaaccttgggggccatccagatcatcattggcctggctcacatcggcctcggctccatcatggcgacggttctcgtaggggaatacctgtctatttcattctacggaggctttcccttctggggaggcttgtggattatcatttcaggatctctctccgtggcagcagaaaatcagccatattcttattgcctgctgtctggcagtttgggcttgaacattcgtcagtgcaatctgctctgcagttggagtcatactcttcatcacagatctaagtattccccaggccatatgcctaccccgactattatccttacgcctggggtgtgaaccctggaatggcgatttctggcgtgctgctggtattctgcctcctggaggtctggcatcgcatgcgcattcttccacttgggttgcagatgg

SEQ ID NO: 74525 - DNA, 1219 bp, Homo Sapiens
  misc_feature (1152)..(1152): n is a, c, g, or t
cggcagtaactataacggtcctaaggtagcgaggcctgggtggcgaattcggcacgaggggaaaaaaaacaaggtccccacagcaaagaaaaggaataggatcaagagatacgtggctgctggcagagcaagcatgaattcgatgacttcagcagttccggtggccaattctgtgttggtggtggcaccccacaatggttatcctgtgaccccaggaattatgtctcacgtgcccctgtatccaaacagccagccgcaagtccacctagttcctgggaacccacctagtttggtgtcgaatgtgaatgggcagcctgtgcagaaagctctgaaagaaggcaaaaccttgggggccatccagatcatcattggcctggctcacatcggcctcggctccatcatggcgacggttctcgtaggggaatacctgtctatttcattctacggaggctttcccttctggggaggcttgtggtttatcatttcaggatctctctccgtggcagcagaaaatcagccatattcttattgcctgctgtctggcagtttgggcttgaacatcgtcagtgcaatctgctctgcagttggagtcatactcttcatcacagatctaagtattccccacccatatgcctaccccgactattatccttacgcctggggtgtgaaccctggaatggcgatttctggcgtgctgcatggtccttctgcctcctggagttggcatcgcatgcgcatcttcccactttggtgccagttggtctgctgtcaatcaagcatgtgagtgtcatcttatccagagcatctaatgcagcaaaagccagtgatcacgcccagaaccgggtgagctcaccaacaaagttcataccaggggaggatccaacgcaaatagtaaagcgctacagattctggaaagcactttttcactggaacccaaaaggaaaattcatcaatcaatttgtgggacacttccaatagacccagtgtcggttcgcgtgatgacgtaacaggcgcagaaaaggtgtcttccaagtgttgcacatctaagcatgcaatgattgcagtgacgtgtatatgaagacagtgctgttactgtctataagcgagaggacgcggaagctttgacagccgaagctgttcgaccaatagagntgacttgctgtggcacaatgacatcgcacaattgttggtctctcccggcttgttggcctgtcacaca

SEQ ID NO: 74526 - DNA, 1337 bp, Homo Sapiens
atgaaactgagctctaagcagcatgtaacctggcctgcatccaggaaatagaggacttcggatccttctaaccctaccacccaactggccccagtacattcattctctcaggaaaaaaaacaaggtccccacagcaaagaaaaggaataggatcaagagatacgtggctgctggcagagcaagcatgaattcgatgacttcagcagttccggtggccaattctgtgttggtggtggcaccccacaatggttatcctgtgaccccaggaattatgtctcacgtgcccctgtatccaaacagccagccgcaagtccacctagttcctgggaacccacctagtttggtgtcgaatgtgaatgggcagcctgtgcagaaagctctgaaagaaggcaaaaccttgggggccatccagatcatcattggcctggctcacatcggcctcggctccatcatggcgacggttctcgtaggggaatacctgtctatttcattctacggaggctttcccttctggggaggcttgtggtttatcatttcaggatctctctccgtggcagcagaaaatcagccatattcttattgcctgctgtctggcagtttgggcttgaacatcgtcagtgcaatctgctctgcagttggagtcatactcttcatcacagatctaagtattccccacccatatgcctaccccgactattatccttacgcctggggtgtgaaccctggaatggcgatttctggcgtgctgctggtcttctgcctcctggagtttggcatcgcatgcgcatcttcccactttggctgccagttggtctgctgtcaatcaagcaatgtgagtgtcatctatccaaacatctatgcagcaaacccagtgatcaccccagaaccggtgacctcaccaccaagttattccagtgagatccaagcaaataagtaaggctacagattctggaagcatctttcactgggaccaaaagaagtcctcctccctttctgggcttccataacccaggtcgttcctgttctgacagctgaggaaacgtctctcccactgtttgtactctcaccttcattcttcaattcagtctaggaaaccatgctgtttctctatcaagaagaagacagagattttaaacagatgttaaccaagagggactccctagggcacatgcatcagcacatatgtgggcatccagcctctggggccttggcacacacacattcgtgtgctctgctgcatgtgagcttgtgggttagaggaacaaatatctagacattcaatcttcactctttcaattgtgcattcatttaataaatagatactgagcattcaaaaa

SEQ ID NO: 74527 - DNA, 673 bp, Homo Sapiens
ccgtgatgggaaagcggccggagaaagggattctggcagttctccgagaccccaacaccccactgttgcaaggtattgctgactacagacccaaggatggagaaaccattgagctgaggctggttagctggtagcccctgagctccctcatcccagcagcctcgcacactccctaggcttctaccctccctcctgatgtccctggaacaggaactcgcctgaccctgctgccacctcctgtgcactttgagcaatgccccctgggatcaccccagccacaagcccttcgagggccctataccatggcccaccttggagcagagagccaagcatcttccctgggaagtctttctggccaagtctggccagcctggccctgcaggtctcccatgaaggccaccccatggtctgatgggcatgaagcatctcagactccttggcaaaaaacggagtccgcaggccgcaggtgttgtgaagaccactcgttctgtggttggggtcctgcaagaaggcctcctcagcccgggggctatggccctgaccccagctctccactctgctgttagagtggcagctccgagctggttgtggcacagtagctggggagacctcagcagggctgctcagtgcctgcctctgacaaaattaaagcattgatggcctgtggacctgc

SEQ ID NO: 74528 - DNA, 684 bp, Homo Sapiens
aattcagagggtaagggaaactggtaacaacttgttttaaatcaacatactataagctcctgcttgcttgactcaagttgtttgaaaatctgaattaaacaggatctcattgtcaggaaacatcttctaagcttgacatctaccgtttaagaagggaacgtggaagagaaggtgagacatgaaactaaaacagctgggagggtaggatcagaccgcacctgatttttggaccaaagtttcatataggaataaataaaaaggaggaccacttgtgagccaacctaggaaggacttgccagaaagtagcagctcctgctgcaaaatacagtgccttcaaaatgattctctgtgtgaattgcatgcaatttcatgtaaccataaagtgtaacctgtatgtgcatgacatgtgtctagaatgtgtaaagttaggattcagcaggaaggggcctggccctgtcactgtggtggatcagtggacctgctgaagtcactggactcatgtgacttaggtttgcagcatcagacccctgtgtttgcattaagtggccacatcgttgaaatcggatcaatctctccctcagctttctttcctactttgcagctttgctggttttaactgcttcattcttctgcttcttggtatccttttttcttttgaaataaaaacatgaaatacttaattca

SEQ ID NO: 74529 - DNA, 2037 bp, Homo Sapiens
  misc_feature (17)..(17): n is a, c, g, or t
  misc_feature (61)..(61): n is a, c, g, or t
  misc_feature (69)..(69): n is a, c, g, or t
  misc_feature (85)..(85): n is a, c, g, or t
  misc_feature (92)..(92): n is a, c, g, or t
cccaggagctgctatcnataaaatgatcaaggagactcttccttaatgtcggggtggccancgatgtcngagagctggtggtganctgcgcnactgaattcattcacgttatatcttctgaagccaatgagatttgtaacaaatcggaaaagaagacaatctcacaagagcatgtcatacaagcactagaaagtttgggatttggctcttacatcagtgaagtaaaagaagtcttgcaagagtgtaaaacagtagcattaaaaagaagaaaggccagttctcgtttggaaaaccttggcattcctgaagaagagttattgagacagcaacaagaattatttgcaaaagctagacagcaacaagcagaattggcccaacaggaatggcttcaaatgcagcaagctgcccaacaagcccagcttgctgctgcctcagccagtgcatctaatcaggcgggatcttctcaggatgaagaagatgatgatgatatctgaaattcaccagctgagtttctatttcttctataaatgtttttccctgcacaacaaaaacagtgaaagaaatgcttatctgtaattttgtatgcatcttggtggacttgtcattggtattctagggatgtctgctattaagtttcatctattgtgtgctatacatgtaaaaactgtctctttgaactattgaaaatttaaggttcagtataatatcaattttgaatttttaatggtgtttatgaaattttagatagcagcgagtccttcgtttgatcaataaacagtgttacagataacttcaagtttataaaaatacagtgaaatttctacaaagctctaaatctgcatttgcattccctctgcccttttaactaaactaaaacttgtgaattttaaataattaaggggggggtgctgtgtgaatcagtagacattggattgggttggtgaaagagttcagttctgtagtatctgaatttgtcttttaaaatgagtacatatataggcaataaatatatatgctcagatcaatatacttgtttagaaaaacttcaagacattcaaaaactaggaaggagtatgtttaatagtatttgtataaatttggtggttatgtttttttattttgtttctgttttgtgtagaggtaaaaactatagttttattacagcataattcattttgagctccactatgacatttcaaagactgcccagtttggaagtctgtcatgatttttactctttcactccaattcagtaattgttgatagtattacttacctagtccatccatactcatattattcaaatatataggtggtacttttgaaacaattacattggttctcttggtttaactgaggtttatgaatattcaaacctttgctgggggaaagaaatgaaagttaatgagcatgcttgctatgagagagggatttttaatttaacttgtagttatagtttacttattgtttttagaattacttttacattttcccaactagatggcctagagtccaacattaccttttcagatgacattattgtctccataattgagtgatagctttaaaaaaaagattagttttgcttaagaagttatgttacaactgatcagccctatatgaattaactgatcagccctatatgaaacataagttgtgttataacttatcagccgtatatggaacataaatagtttctacctgcttgttagagaagctttaatttggttctaataaatacagtatggtagtgattataggaatccaggatgttgaagaaatggcataatgtctatattttggaaacagaaagggaaagtcacttaagatagtattaagtaattaaattcctatgtcagttgccaaatctttttaaacttatgtattcaacaaggcccaaaaatagaatgtgggctcccaaggaatcccaatttttaatttggaagagcctaagtaaagtaaaagttttaatacctggttagggtttccttaatgatccataattttgccagtttttagtaaaaggggaaaattttg

SEQ ID NO: 74530 - DNA, 663 bp, Homo Sapiens
  misc_feature (29)..(29): n is a, c, g, or t
ccaggaaggagggccctgtctgcctccanctctgggtgcaccccctgcctaccaccctcccttctagagagcacatcgcctgaccggggagaagtgggcccgtggttcgagggagggctggccaggggtgggacccttatgagactcagtctgtgagtaaaactgcgggctcaaatgcccaggatgaggggatcagtgactgtctaggaggatcccttgccttgtaggtgccccaagaccgcagggtagaaatcagccgggatgcctgcatcccacccccggccccagggcccaccacataaaatctgggagcccagagctgctgaggtgtggtcagctcccctaaaatgggcacggcccagcctgtcccatgaggaataaaggcccctggcccccttgagagagggcttgttggtgagggctgactcctgggggcccccaaggctcccctcctgtggggaggccaccttttaaggcaccactagcagtcaggatatggtggcatcagccctggggcctcctgggtggcaggggggcagcagctctcctccccactcacaggccctgcagtgctcatttggaattcctcccaagacccctggccacccagaccccccattcttcctaacactggcaataaaccctcaactgtgacccacaaaa

SEQ ID NO: 74531 - DNA, 610 bp, Homo Sapiens
cttacaggaactcttgcaagaagaaaggactatgagttcaactttagagggagccatggggactaaacaaaattctgaggccccctcaaccatctaaatggacttccttctgggccaggacactcgaaaattaaacctgaaagactggttcaggccatgatgggaagtgggagtcgaacatgcctcatcataccctccagcattaacatcaacacagaccttaaggctgataagaagcatttacaatctattctctctgaagtcttctacctggaggcttcatctgcatgataaaactttggtctccacaacctcttacaacccaggcattcctttctatcgataattactctttcaaccaattgccaatcagaaaattgttatatctacctataatctagaagcccccacatcaagttgttttgcctttctggacaggaccaatgtatatcttaaatgtatttgattgatctctcatgtctccctaaaatgtataaaaccacgctgttccccgaccacctggagcacatgttctcagggtctcctgagggctgtgtcacaggccatgttcacttacatttggctcagaataaatctcttcaaatatttt

SEQ ID NO: 74532 - DNA, 784 bp, Homo Sapiens
  misc_feature (614)..(660): n is a, c, g, or t
acacctggagtcaccccatggaaaaccacattacctggagtggtcaatggggccaacaatccagccatccgggtgttcgaatatgaccgagccacactgagcctgaaggacatggtgacctacttcatgaacctgagccaggcgaatgctcaggggacgccgcgctgggagctcgagtaccagctgaccgaggcctatggggtgccggacgccagcgcccactccatgcacacagtgctggaccgcatcgctggcgaccagagcacactgcagcgctactacgtctataactcagtcagctactctgctggggtctgcgacgaggcctgcagcatgcagcacgtgtgtgccatgcgccaggtggacattgacgcttacaccacctgtctgtatgcctctggcaccacgcccgtgccccagctcccgctgctgctgatggccctgctgggcctgtgcacgctcgtgctgtgacctgccaggctcaccttcttcctggtaacgggtaacgggggcagcgcccaggatcacccagagctgggccttccaccatttcctccgcgcctgaggagtgaactgaaataggacaaccgaatcaggaagcgaagccccaggannnnnnnnnnnnnnnnnnnnnnnnnnnnnnnnnnnnnnnnnnnnnnnaagccagactctctccaaaaacaaaccagaaacagaaaagaaatgacgacccaagacccctctacaagcatacttcttttgcgtattatgttttactcacaaaacaaagctcatcatgcgtttg

SEQ ID NO: 74533 - DNA, 492 bp, Homo Sapiens
gggccgccgagcgcatactggacggcggcccacagttcactcctcaggcgcggaggaaatggtggaaggcccagctctgggtgatcctgggcgctgcccccgttacccgttaccaggaagaaggactcctgaccttcaggctcagtgtggctcggtcatattcgaacacccggatggctggattgttggccccattgaccactccagagcatccgaaagctgtcggtgtggtggtgcccgaagaactgccctgctatgacgcgatgatgcttccggaccaccttcagatgaggaaactgagcgagtgagcggcagaccggggatgccgagcacgtcagaatggaaatgatcacagtgcactatattctgccaccacctaccagcatggccttggagatatattcaggttttccttgacttacaatgggggctcgtcccccaaaattgaaaatatcataagtcaaaaatgcattcaacacacccaacctacca

SEQ ID NO: 74534 - DNA, 1300 bp, Homo Sapiens
  misc_feature (276)..(290): n is a, c, g, or t
  misc_feature (537)..(537): n is a, c, g, or t
acatggagagcaaagggatgcaaaagtgttttactaccaggagttcacaaatctgtggacagcacaccagtgaggattccacggtgttggggaggcaggcagggtggtactcatgacccagaggcagagacaggagcaagagcccttgggcacactcgcacccacagcttcacattcgtgaaggaggccgggagaaggggaacaggcaggggtgggaagcagcccaaccttgggttttggaaaaagattgcatagctcgttaaaaccctgacctcnnnnnnnnnnnnnnnccgctctgtcctgggtgaccagggtgtctgccagcacttggacacgtcagaccccaccacctcctgttgggttatctgcttttccctcttgggggggtggggagcatttctggagtaggaaaggactggggcatggggcggggtgcggagggcctggagagaggccatgggtcccggggctggaccacagcggggctgtgggaagggtcctaaccttcacaggcccccttcctggttaaggtttttnttttgctgaaagggccacaggatatatttgtggtgtaaaccccagaggctgccactgctttcctggggagcttggaggccacacccatgtgactgcagggcaggatggtggacttctaggcccctacagcctcggcagtgtcctcagatccggatgtggaaagtgctgaggaagtcaggggccttggcaatcatgtcctcgaagtcagcaaagcccagcttgccgtcaccatccaagtcagcctcctcaatgaccttgtcgcacacaagcaccacctcctcctcatccagctctgacttagtgagccgggccagcgtcagctccaggtcctccttgcagatgaagttgtcagtgttgaagtcatagatcttgaaggcatagtttgccttgagctctcggggagccgactcgcagagcacggaaaacatgtccacaaagtcgttgaaagtgaggttcccctcaccatcctcggaaaacgccgccacgatcctttctttgaagggattctcccggagctctggcatctggatgatgaggctcatgggcacgtggacgatggggctcttcctgtagtccattgggacgaggttgggggccagctcatagaatcgcgaatgcagcttgaggatgtccttcttattgaagaaggtgcagtcctggtagttgtctagctgctcttcggtgaagatggtctgcttgttccccatggtggccgccgcgccgccgctcgcccgcccgggctccgactcccatcagcggccgc

SEQ ID NO: 74535 - DNA, 676 bp, Homo Sapiens
  misc_feature (406)..(406): n is a, c, g, or t
gcaaaagtgttttactaccaggagttcacaaatctgtggacagcacaccagtgaggattccacggtgttggggaggcaggcagggtggtactcatgacccagaggcagagacaggagcaagagccctcgaagtcagcaaagcccagcttgccgtcaccatccaagtcagcctcctcaatgaccttgtcgcacacaagcaccacctcctcctcatccagctctgacttagtgagccgggccagcgtcagctccaaggtcctccttgcagatgaagttgtcagtgttgaagtcatagatcttgaaggcatagtttgccttgaagctctcggggagccgacttcgcagagcacggaaaacatgtccacaaagtccgttgaaagtgaaggttcccctcaacatcctcggnaaaacgccgccacgatcctttctttgaagggattctcctaagaaaaacacacacagcaatcactgtgggtgcaggataagcaggagggccccggagccagactgtggacagcctgtgtgaccctggaggagtgaccaaatccctctgagcctcggtttccccatttgaggatgtccttcttattgaagaaggtgcagtcctggtagttgtctagctgctcttcggtgaagatggtctgcttgttccccatggtggccgccgcgccgccgc

SEQ ID NO: 74536 - DNA, 444 bp, Homo Sapiens
gcggccgctgatgggagtcggagcccgggcgggcgagcggcggcgcggcggccaccatggggaacaagcagaccatcttcaccgaagagcagctagacaactaccaggactgcaccttcttcaataagaaggacatcctcaagtagatccgattgctccccaggacacagctcctgcattcccacattgaggccgagtgggcagcccaccctattcagtcaccttgctttttataggctgcattcgcgattctatgagctggcccccaacctcgtcccaatggactacaggaagagccccatcgtccacgtgcccatgagcctcatcatccagatgccagagctccgggagaatcccttcaaagaaaggatcgtggcggcgttttccgaggatggtgaaggggaacctcactttcaacgactttgtggacatgttttccgtgct

SEQ ID NO: 74537 - DNA, 691 bp, Homo Sapiens
cagtggtgcatgggctgaccacactgcccctctcctcctcggcctcagtgccagttggttgccatggcatcaggagaatggcccggctgggccagtaccaagcttccttggcaggagtccaatgcacagggtcactctgcaggaggttctcactctccttcccaatagcatggctctgctgctgcagaaagagccatggaaggaacagacccagaagttcattgactggctattcagcatcatggaaagccctaaagaagccctctcagcacagtccagggatcttttgaaagccaccctgctgtccttgagagttctcccagagtttaagaagaaagctgtatggaccagagcatatggttggtgaacagttttgcagtaaccagcagcattctcagctggatgaggaaaaccatataagtggaagaagtttttcagaattcatgcctggtattgctgagacatgatgcagagagttaagggtcatgaaaagatggccacatcactgacagcttgacacatgcctcctaagagaggagtgcattgctttagtacccgggccagttgagactgaaacaggaacttggattttctttatttggcttgagttcaatgtggagattttctttgtgaaagcttgaagatattatcttctccctgctaaattccagtaaaataatgttgtcaattt

SEQ ID NO: 74538 - DNA, 534 bp, Homo Sapiens
aggtctcaacctatcatggttatctttgcagctgagctgcgttggttttgaggctcacatatggtaaaagtggttggaaatctggaaatattgctgtgtatctgcaaagcagcttgatatagtggaaaaggtattaggtcattaatcatgagatttggattctagccccttagctgctgcctgccaggcctggagacctttgttctcttctttaaactgctgctttctcatcagaaaatgaagttcctctccataccacctctctgaagggctgtgaagctcgaagtggcagcttaaaaaactgcccatctcaggaggtgtcttaagaaggaggacataccgctggctcctgcctttctcacttagccaggtctgatacctgtgttgttttcactgtggccattttaggatttttcaaaggctttcagaaagcaacatgctaccgtaccccttatacaccaaaactggttttcattttggaatataaaagtgagatttctccaccagtacaataaagttgttacaagtggtaaa

SEQ ID NO: 74539 - DNA, 1295 bp, Homo Sapiens
gggtccggaattcccgggataaggcggactggcagggggcagggaagctcaaagatctggggtgctgccaggaaaaagcaaattctggaagttaatggttttgagtgatttttaaatccttgctggcggagaggcccgcctctccccggtatcagcgcttcctcattctttgaatccgcggctccgcagtcttcggcgtcagaccagccggaggaagcctgtttgcaatttaagcgggctgtgaacgcccagggccggcgggggcagggccgaggcgggccattttgaataaagaggcgtgccttccaggcaggctctataagtgaccgccgcggcgagcgtgcgcgcgttgcaggtcactgtagcgggacttcttttggttttctttctctttggggcacctctggactcactccccagcatgaaggcgctgagcccggtgcgcggctgctacgaggcggtgtgctgcctgtcggaacgcagtctggccatcgcccggggccgagggaagggcccggcagctgaggagccgctgagcttgctggacgacatgaaccactgctactcccgcctgcgggaactggtacccggagtcccgagaggcactcagcttagccaggtggaaatcctacagcgcgtcatcgactacattctcgacctgcaggtagtcctggccgagccagcccctggaccccctgatggcccccaccttcccatccagacagccgagctcgctccggaacttgtcatctccaacgacaaaaggagcttttgccactgactcggccgtgtcctgacacctccagaacgcaggtgctggcgcccgttctgcctgggaccccgggaacctctcctgccggaagccggacggcagggatgggccccaacttcgccctgcccacttgacttcaccaaatcccttcctggagactaaacctggtgctcaggagcgaaggactgtgaacttgtggcctgaagagccagagctagctctggccaccagctgggcgacgtcaccctgctcccaccccacccccaagttctaaggtcttttcagagcgtggaggtgtggaaggagtggctgctctccaaactatgccaaggcggcggcagagctggtcttctggtctccttggagaaaggttctgttgccctgatttatgaactctataatagagtatataggttttgtaccttttttacaggaaggtgactttctgtaacaatgcgatgtatattaaactttttataaaagttaacattttgcataataaacgatttttaaacacttgtgt

SEQ ID NO: 74540 - DNA, 1081 bp, Homo Sapiens
agaagccccagggagccagccggttcccccccggaggttcccgaggggggggtcctcccgcagactgcccggccccagggaggaaacttggttctttccttccagctgataacttccgcgcccccacggttgcccccaccccagttggcggccaaagaccccaggcggagcttgcgctaccccttcctacttggaatggacactaacttggaggggcgctgccgaagacagcttccctatacaacatggaacagaaagacttgtatttagtcggacccatgtctactttgccagaccctcggccactgcgggagggcagggccccaggcgcatttaaggcttaaatgcacatcacatggaaactgactctgccattcatttgatgcaaccatgggcaagtcacttgtccctctctggcctcagtttccctaaaccgagtgagtggcaatttttcaaaacgtctgccaactccaggacttgccgtttaaacctccctctccaagagaggagatactcacctggaggtgtcaggacacggccgagtcagtggcaaaagctccttttgtcgttggagatgacaagttccggagcgagctcggctgtctgattagaggaaaagagggaagagttacgcgaggcaatcgggagctccgagggtcccgcagcatccttgcctgggtgttcagccctgtcccgacttcgaggcttacctggatgggaaggtgggggccatcagggggtccaggggctggctcggccaggactacctgcaggtcgagaatgtagtcgatgacgcgctgtaggatttccacctggctaagctgagtgcctctcgggactccgggtaccagttcccgcaggcgggagtagcagtggttcatgtcgtccagcaagctcagcggctcctcagctgccgggcccttccctcggccccgggcgatggccagactgcgttccgacaggcagcacaccgcctcgtagcagccgcgcaccgggctcagcgccttcatgctggggagtgagtccagaggtgccccaaagagaaagaaaaccaaaagaagtcccgcatcccgggaattcc

SEQ ID NO: 74541 - DNA, 786 bp, Homo Sapiens
  misc_feature (707)..(725): n is a, c, g, or t
ctgaccacctgatgacccccaccttcccatacaggtaaacatcgaagtcgggacaggctgaacacccaggcaaggatgctgcgggaccctcggagctcccgagtgcctcgcgtaactcttccctcttttcctgtaatcagacagccgagctcgctccggaacttgtcatctccaacgacaaaaggagcttgtgccactgactcggccgtgtcctgacacctccagaacgcaggtgctggcgcccgttctgcctgggaccccgggaacctctcctgccggaagccggacggcagggatgggccccaacttcgccctgcccacttgacttcaccaaatcccttcctggagactaaacctggtgctcaggagcgaaggactgtgaacttgtggcctgaagagccagagctagctctggccaccagctgggcgacgtcaccctgctcccaccccacccccaagttctaaggtcttttcagagcgtggaggtgtggaaggagtggctgctctccaaactatgccaaggcggcggcagagctggtcttctggtctccttggagaaaggttctgttgccctgatttatgaactctataatagagtatataggttttgtaccttttttacaggaaggtgactttctgtaacaatgcgatgtatattaaactttttataaaagttaacattttgcataataaacgatttttaaacnnnnnnnnnnnnnnnnnnngaccgcgtatgcggccgcaagcttattccctttagttgagggttaattttcaggtaggcac

SEQ ID NO: 74542 - DNA, 1409 bp, Homo Sapiens
tccttccctctgaagttgatgtattggagtccatctatctagatgaactacaggtgattaaaggaaatggcagaacttcaccatgggagatctacatcactttgcatcctgccactgcagaggaccaggattcacagtatgtctgcttcactctggtgcttcaggtcccagcagagtatccccatgaggtgccacagatctctatccgaaatccccgaggactttcagatgaacagatccacacgaatcttacaggtgctgggccacgtggccaaggctgggctgggcactgccatgctgtatgaactcattgagaaagggaaggaaattctcacagataacaacatccctcatggccagtgtgtcatctgcctctatggtttccaggagaaggaggcctttaccaaaacaccctgttaccactacttccactgccactgccttgctcggtacatccagcacatggagcaagagctgaaggcacaaggacaggagcaggaacaggaacggcagcatgctacaaccaaacagaaggcagtcggtgtgcagtgtccagtgtgcagagagcccctcgtgtatgatcttgcctcactgaaagcagcccctgaaccccaacagcccatggagctgtaccagcccagtgcagagagcttgcgccagcaagaagaacgcaagcggctctaccagaggcagcaggagcgggggggaatcattgaccttgagggctgagcgaaaccgatacttcatcagccttcagcagcctcctgcccctgcggaacctgagtcagctgtagatgtctccaaaggatcccaaccacccagcacccttgcagcagaaactatccacctcaccagccgtccaatccactttgccacctcctctgcctgtggcgacccagcacatatgtgagaagattccagggaccaggtcaaatcagcaaaggttgggcgaaacccagaaagctatgctagatccccccaagcccagtcgaggtccctggcgacagcccgaacggaggcacccaaagggaggggagtgccacgcccctaaaggtacccgtgacacccaggaactgccacctcctgaggggcccctcaaggagcccatggacctaaagccagaaccccatagccaaggagttgaaggtcctccacaagagaaggggcctggcagctggcaggggcccccaccccgcaggactcgggactgtgttcgctgggagcgctctaaaggccggacacccggttcttcctaccctcgcctgcctcggggccagggagcataccggcctggtactcggagggagtccctgggcctggaatctaaggatggttcctagcaggacttggtggggggaacagggaattggggatgggagggaggcaataaagatatttggccttaaaaa

SEQ ID NO: 74543 - DNA, 1143 bp, Homo Sapiens
gggtcttcgaggccgtcctgaactgggccgaggcggagtgcaagaggcaggggctgccaatcaccccacgaaacaagaggcatgttctggggcgagccctctatctggtccgaattccaaccatgaccctagaggagtttgccaacggcgctgcccagtcagacatcctgactctggaggagacccacagcatcttcctgtggtacacggccaccaacaagccccgcctggactttcccctgaccaagaggaagggcctcgccccgcagaggtgccaccgattccagtcttctgcctaccgcagcaaccagtggcggtaccgcgggcgctgcgacagcatccagtttgcagtggacagaagggtatttattgcagggctgggcctgtatggctccagctctgggaaggctgagtacagcgtgaagattgagctcaagcggctcggggtggttctggctcagaacttgaccaagttcatgtcagacggatccagtaacaccttcccggtctggtttgaacacccggtccaggttgaacaagacaccttctacacggccagtgccgtcctggacggcagcgaactcagctactttgggcaggaggggatgacggaagtgcagtgtggaaaggtggccttccagttccagtgctcctcggacagcaccaacgggactggggtccagggtgggcagatccctgagctcattttctatgcctgaggtgcccggggaggctgcagcaggtcagcgagtgagtggaggggaagtcaagatgctaactgcttcttgacaccatgaaaggctgctcttaactttgtctctctttgacatgtagtcagctgaagcttgactgtgtagagacattttccacacagccagaacccagggattggagtcttaggcatctctggtacagtggggtgcacgtctcaggtggaggaagatttacggctcaagacaggccccagatcccctcccagtggcacccatgccacctgctttgaggggttggatcttcctgctaccctcttggattctaagtggttccaagcttaacttgagaccttcccttcaaatctaaaattggcaaaaagtcacttaaaatagtggacttctgtaataaaggttgcctaaaataacaaaa

SEQ ID NO: 74544 - DNA, 1627 bp, Homo Sapiens
ggattagaagagggtataagggcactgtttaacactaagttctaatacttccagaaactgtgcattccagatgtacatactgaatgctcttatcattttgaaatgggctcttgattaatagacccatattttttagtggcttctatgttgtatatttgtctaaaatgaaagctcttttgcgttctaaaactacaatatatgtcatcttattttccctgagtatccaagtatagtgcagattctatgtaaaactactaaatgacactggaatatgtttagtagattagggggaaaaactataaaggtttatacaattgtttgtagttacatttaggatggacttatccctttggagaagagtgaagtttgttttttcgccatgtgatgaagaccactgtgattttttaaaaaagtagataatacttaaaatggcgtaataatgctgcacttgaatttgtactgttaacagcacatttggaagaatttaaaactttttattgtcttataaatagcattcacttattattttcggatatttaagggttccattaagttaacactgtatttggacaaagtgtgaccaaattagccagtctgttttcttccatgtttaattagaagtgagaggtagaagtacttcaaattcaacaggccagcaagcaatcggcttaaaattccctttcttaaatgttgtgctcttatgttctcggctttttaatgactttatttttacagtacttgttcagtcacttgagatgaaatgcttggggtagcttttccatcctcaaacttaatgtttttactagttcatagtgtttggaacagtatatgccaatcactgagactgcatcagagtttgcaattttgtatgtttcattgccaaagaaggcttagtggttgttgactgtagtataagtcagctttctgtagcataagatttgattttcccatacttacttcacttgttatacatcactgattatttgggttaaactggactcatttcaagcagtttgcttttgttcaaatcgtgatgagaaacctaatactgtaatttgatttgagccataaaacacattttaatattagcttgtattatagttattaagcttgtttttgtggaaaaaaacttactaaaacctaggtaactctagattaggccagttcaggtgtattttgtatcttagtaatggatcatatcgtaaaaatagagataagttgggaagatatattgattatgctgttctgttgagggaaaggtcatgtatttagaaatttaaacttttggttattgtgttcacatcatagtattcaagcatcatttatagtttggttttgagaacttttctggtattacgtttatggcaaatgtataaaagaaacaagttttggttatatttttatatttgtaaagtaagtttggttaaagtgatcactgttctttttttattttattgtcatttcaataaaaaatatttgatagacacccccccttgcaatttattcaaagaactggtggaaattcattaaaccatttcgccccccttgaaaacccctccaaaaacggtattgatgcacctttaatcccccggcgaaattccacccccctggaaacttttggcgataa

SEQ ID NO: 74545 - DNA, 778 bp, Homo Sapiens
  misc_feature (459)..(528): n is a, c, g, or t
ccgcacagtagcggcctgtctttatcagaggtccctctgccagggggagggccccagagaaaaccagaaagagggtgagagactgaggaagataaagcgtcccagggcctcctacaccagcgcctgagcaggaagggggaggggccatgactacgaggccctgggaggtcactttagggagggctgtcctgaaacctggagcctggagcagaaagtgaaaccctggtgctccagacaaagatcttagtcgggactagccggccaaggatgaagcctcacttcagaaacacagtggagcgaatgtatcgagacacattctcctacaacttttataatagacccatcctttctcgtcggaataccgtctggctgtgctacgaagtgaaaacaaagggtccctcaaggccccgtttggacgcaaagatctttcgaggccaggtgcccaggtctttcatcagnnnnnnnnnnnnnnnnnnnnnnnnnnnnnnnnnnnnnnnnnnnnnnnnnnnnnnnnnnnnnnnnnnnnnntggcctccccagctgaccgcaggcagggaacaaggcagaccctagagggccaggccacagcaggggctgaggatgcctggtgaatggatgcctgggagaatggatgccagaattcacgcatgaggctctgaacagggctgggaaaacttccaaacgaagggaagctcatgtcttggtgcactttgtgatgatgcttcaacagcaggactgagatggggacatttacaataaacagaaatgtatgggctcg

SEQ ID NO: 74546 - DNA, 937 bp, Homo Sapiens
ggccagaagcttggagcagaaagtgaaaccctggtgctccagacaaagatcttagtcgggactagccggccaaggatgaagcctcacttcagaaacacagtggagcgaatgtatcgagacacattctcctacaacttttataatagacccatcctttctcgtcggaataccgtctggctgtgctacgaagtgaaaacaaagggtccctcaaggccccctttggacgcaaagatctttcgaggccaggtgtattccgaacttaagtaccacccagagatgagattcttccactggttcagcaagtggaggaagctgcatcgtgaccaggagtatgaggtcacctggtacatatcctggagcccctgcacaaagtgtacaagggatatggccacgttcctggccgaggacccgaaggttaccctgaccatctttgttgcccgcctctactacttctgggacccagattaccaggaggcgcttcgcagcctgtgtcagaaaagagacggtccgcgtgccaccatgaagatcatgaattatgacgaatttcagcactgttggagcaagttcgtgtacagccaaagagagctatttgagccttggaataatctgcctaaatattatatattactgcacatcatgctgggggagattctcagacactcgatggatccaccaacattcactttcaactttaacaatgaaccttgggttcaaaggacggcatgagacttacctgtgtcatgaggtggagcgcatgcacaagtgacacctggagtcctgctagaaccagcgcagggctatctatgcaacccaggctccaaattaaaacaacggatccttgaaggccgccatgcaaaagctgtgcttcctggacgtgtggaagctggaacctggaacaggaactaaaggggtaactgctttaaccttcctggagccc

SEQ ID NO: 74547 - DNA, 444 bp, Homo Sapiens
gtgactgtgcagctcgcaggccctggaaagttgctggtgcattgacagtggacttccaagaggccagaactcgagcccatacatttctgtttattgtaaatgtccccatctcagtcctgctgttgaagcatcatcacaaagtgcaccaagacatgagcttcccttcgtttggaagttttcccagccctgttcagagcctcatgcgtgaattctggcatccattctcccaggcatccattcaccaggcatcctcagcccctgctgtggcctggccctctagggtctgccttgttccctgcctgcggtcagctggggaggccactggacctgcgctgtcccatgtggtgggacgcactggccaaaggggctactgagcacttgaaatggggctctgatgaaagacctgggcacctgaaaaatacaccatacaccgctcatttatcc

SEQ ID NO: 74548 - DNA, 676 bp, Homo Sapiens
caccgcagctgggggatgagaactgtcaggagggaaggtcagaagtcccaggatgcacttgaaaacctctagctccaccagtgaccagctcctggctggactcctggtctggactcagcatcagggaggtctggcctctcgccctcagggctgggggttcttcacatggtcatcaaagacttggccagttccgcctctcccgcggccgtccttgtctcacccagcatcacgacgcatcagttcaccaacaaacacgattcagtgctgctagtgctgggtcctgttctgggggctggtgatgaggccaagagggaaagagggagctctgtgttccatcgagggggcgacaagcctggaccagatgaaagtgactcatgttgttaattagcggcttaaggccaaaggtggcccctggaccagtggcctcagcatcacctgggaaaaggttagaaatgaacattcccaggccccacctcagcctcctgaatcagagcatccctttggcaaaccatactgagaaacaaccacgtgcatcaccaagcgctgtgaagaaggcaagctttgagaccttgaaggaatcatcaaactctgggcctcggtgtgctcacccagggcgagacaaagacgccatgctcctccaagtggcctccaagattaaatgagcaatgacttttaa

SEQ ID NO: 74549 - DNA, 901 bp, Homo Sapiens
  misc_feature (718)..(733): n is a, c, g, or t
  misc_feature (802)..(816): n is a, c, g, or t
gtcagcaggccattctctcttcccaagctcataaatttacagatacaacaaacagatgtctaaatccagaccacatcttgtgccactgtaaaagagaaggatccacacagcactgtcagcccacagactctaacaattggaacagactattgttggacatatgtgaatttgttggcatagtatagtttccccgatgtatgtgtgacttttgaaaacaatctgtttttctcaggatatcttgaattgatcacttcattgccacggtatatattctataggtgtgataggatttactgtaaagtttatttgtaaaagatgtacacagtagaaataaaacgtgatggaagaacttgagtacttcagaagtggaaacaaatttgatatttatttttataatgatataaagcttctagtaatttatgcaagttgtattgcaatggaatctaaactttttgtaaataaattctgcctggtttttatttgaacattgctggttatacaatctttgttggttgtttaacacgaattctttactaatttatatcttaaattgtaaataaaaacagactagtctacaataatatgatgtttggggcttatttttcctagaagaatgatttggggtagagctctagtgaataacctccaggtgatctgacctcacctttttaatgaaaacctgtgtgaaataaactctcctttctctcctgagcattgnnnnnnnnnnnnnnnnggcagatggaagagaagtatataatcgggagaaacatgtgctgtagatgatttctatacaggtattgcnnnnnnnnnnnnnnncataagatttttgtgccctgagtgtgctaattacttgttagtgtaaatttttaaaacttggcaaaataaaatgatctgacaccct

SEQ ID NO: 74550 - DNA, 506 bp, Homo Sapiens
ttcggaacaggtttttcaaagcaattgtgacacctacctgtggaccaaggaaaaaaccaaatcatccccaatctttcagttccacaacaacaccattataaaaacgagttgatctgaagtggttccaaatctttcttatcttcaagatctatgattagtaattctgactcgttgcaaagcaacatattttttgagatactgttgtgagccccgggagaatgtcagagtcctgtccacttggacatgggtggaggggaggttggacagggctgataaaagactagtacgcctcgtgtctcttcagtcttattttgcaaacatcatctataaaggtttttgctactccaagttttggtagcccaagctcatcaaagcatgtgtctattatgtgtctagcatagtaaaaatggctctaaattgcatataaatgcccagattttaataatctattgtttcaaaagaaaacaacagtagtgtgtaatatatatatacacatgtactatata

SEQ ID NO: 74551 - DNA, 1001 bp, Homo Sapiens
cagaacaaaaacaaaagcaaaatacaatgatacaggtaaaatatttcaaagccaactttagttactaagtgaaaaatgtgatgttaagcccagtacattaaagatgaaggaagatgttaatcaccaccaccacccctcctccccacataccttctctgaactggatcttttgaacgatatatatagggaactaaattagcaagaaaaaatgtaaagaaattaaagggtaattcgtgacttgacaagataaaagtagaaatgtttcagaaaaattttagggcatagggaatacagttgcattaaaattaccatttgaggtttcaaaactgttatttgcctaagctgtacatctgagctttctgattcagtgtgcgtggaaggggcccaggcatatatatttggacaaaactcacaggtatgtatacctctgaagaagaaccatggttgtacaatgaaatgtgttatcttgaggctattaagtttctttctcatcaatcatttgatctttgtgtctctgtaggtttttcaataaaatgggcttgacattaactctctgcctacataagttggagttgtgggctctttcctccatctctcttcgtattacttatatactcctcttctgatttcaggctaaatttattgtgaagaaatcagaagatgaagaagacgccgctaaagatacttatattattgaatgccaaggaattgggatgacaaatccaaatctatagagtatttgcctcttaaatgatacctcattgatatattgcactatttcataaatactataaaataatgactaggaagtaacttattaaaggctatgacttaaatttgaagatgaagtacagtgttctaggtttgctgagaaggcttcattaaattaatctcactttgaatatctcctgagagatggacaatgaaatatcagttggtggatatgtgtgatagctgatttcaatattgaagtattgaaataaaatattctttacacctga

SEQ ID NO: 74552 - DNA, 1536 bp, Homo Sapiens
ttccgggatcgagaggcgccgcttcttccgctttctcgtcaggctcctgcaaccccaggcatgaaccaaggtttctgaactactgggcgggagccaacgtctcttctttctcccgctctggcggaggctttgtcgctgcgggctgggccccagggtgtcccccatggcggggccgcgggtggaggtcgatggcagcatcatggaagggggcggccagatcctgagagtctctacggccttgagctgtctcctaggcctccccttgcgggtgcagaagatccgagccggccggagcacgccaggcctgaggcctcaacatttatctggactggaaatgattcgagatttgtgtgatgggcaactggagggggcagaaattggctcaacagaaataacctttacaccagagaagatcaaaggtggaatccacacagcagataccaagacagcagggagtgtgtgcctcttgatgcaggtctcaatgccgtgtgttctctttgctgcttctccatcagaacttcatttgaaaggtggaactaatgctgaaatggcaccacagatcgattatacagtgatggtcttcaagccaattgttgaaaaatttggtttcatatttaattgtgacattaaaacaaggggatattacccaaaagggggtggtgaagtgattgttcgaatgtcaccagttaaacaattgaaccctataaatttaactgagcgtggctgtgtgactaagatatatggaagagctttcgttgctggtgttttgccatttaaagtagcaaaagatatggcagcggcagcagttagatgcatcagaaaggagatccgggatttgtatgttaacatccagcctgttcaagaacctaaagaccaagcatttggcaatggaaatggaataataattattgctgagacctccactggctgtttggttgctggatcatcgcttgggaaaaccaggtgtaaatgcagaaaaagttgggaattgaagctgccgaaatgctattagcaaatcttagacatggtggtactgtggatgagtatctgcaagaccagctgattgttttcatggcattagccaatggagtttccagaataaaaacaggaccagttacactccatacgcaaaccgcgatacattttgctgaacaaatagcaaaggctaaatttattgtgaagaaatcagaagatgaagaagacgccgctaaagatacttatattattgaatgccaaggaattgggatgacaaatccaaatctatagagtatttgcctcttaaatgatacctcattgatatattgcactatttcataaatactataaaataatgactaggaagtaacttattaaaggctatgacttaaatttgaagatgaagtacagtgttctaggtttgctgagaaggcttcattaaattaatctcactttgaatatctcctgagagatggacaatgaaatatcagttggtggatatgtgtgatagctgatttcaatattgaagtattgaaataaaatattctttacacctgaagt

SEQ ID NO: 74553 - DNA, 1280 bp, Homo Sapiens
  misc_feature (1213)..(1213): n is a, c, g, or t
ccccgtatcaaacgctttaacaccaacccctaacgtagcgaggcctgggtggcgaatttccgacgaggccgccctgctccgccacttaggccgccccagacgcttccctcggtgctgccaccgggtcgggcgcggctgccgcggctcgcgggccttccccgcaccggcgcggcccaaccgccaccgaaccttctggaagcggcggctgcctgggcccccacgccgccagaatcatacgcccgcgcgagctctctgcagccttggcggcctgggaggcggggctcggggtggcccccttgcccccaattcaataagatgtccgacacgtatactgctctctttgcctcctgcccgccgtgaaccgcagcccagacgcatgtggtctgccatcccctacgccctggaaaggggagaagacggcacgcgcccacccaagaccccgggtccccggattcagaaccgcagccccgttacatattcttccccatcccccccgtgcccttaatgccggaatccccctctaccccatataacccgccacgacaccatttatgccccccctattattatcccctttgtccgtgtaaccccctgaaagccgccgatttgccccgttgtcccacccacccccccttattagtgtatgaacccggcttcaccccctccacaaccagaataattacccggacaaccaccccccgcaggggagagaggagtgggcgtgtctccgagcttgcgaccgatcgcccggaagaggccagtacccccgtgacgccgtcgcagaagaaagtccccgccggccttgttcacggcctgtacgccaccgtaggccgacgcgatatccggcgcgatggcggcaactgcccggagcgcctactatccacacgcacctaccaccccgcatccaccccgccggcgctcctcgcccacccactattaaccgcgccgccgtgaatccgcccgataccgcccgccgtagtgcgccgcggccacgcgcgcacccccgtgtagtgttccccgccatatttttcttaacatcccaccccctcgcccccacgcacgctcctccggaataatagctgcagctcgtcgcgtgcgaggccgcaccgcgtacatcccgcgcgcggctctcgcggccgcgtatatcagaggcccacgcccctttccatccctgaccataccccctcatcctcactcacactcgaacacaacntaatcgagaactaccgcacctcgcaccctccctcattatcggcgcacgccctcgcttccacccggac

SEQ ID NO: 74554 - DNA, 1990 bp, Homo Sapiens
  misc_feature (225)..(269): n is a, c, g, or t
  misc_feature (1785)..(1890): n is a, c, g, or t
  misc_feature (1893)..(1897): n is a, c, g, or t
  misc_feature (1900)..(1923): n is a, c, g, or t
  misc_feature (1926)..(1927): n is a, c, g, or t
  misc_feature (1930)..(1944): n is a, c, g, or t
gtgagggcccaagtccgccctgctccgccacttagtgccgcccagacgcttccctcggggctgccaccgtggtcgggcgcggctgccgcggctagcgggccttccccgcaccggcgcggcccaaccgccaccgaaccttctggaagcggcggctgcctgggcccccacgccgccagaatcgtacgcccgcgcgagctctctgcagccttggctggcctgggaggnnnnnnnnnnnnnnnnnnnnnnnnnnnnnnnnnnnnnnnnnnnnnaggccgcgttcgattcgcccccggcgcgcaggccccgcctcaccagccccatcgctccacctctgccctccccctttatggcgcggccgggctcattcattccgcgccgggcctgccagacacctgcgcccttctgcagccgcccgccgcgatccgccgccgcagaccccagcatgtcgggcccagacgtcgagacgccgtccgccatccagatctgccggatcatgcggccagatgatgccaacgtggccggcaatgtccacggggggaccatcctgaagatgatcgaggaggcaggcgccatcatcagcacccggcattgcaacagccagaacggggagcgctgtgtggccgccctggctcgtgtcgagcgcaccgacttcctgtctcccatgtgcatcggtgaggtggcgcatgtcagcgcggagatcacctacacctccaagcactctgtggaggtgcaggtcaacgtgatgtccgaaaacatcctcacaggtgccaaaaagctgaccaataaggccaccctgtggtatgtgcccctgtcgctgaagaatgtggacaaggtcctcgaggtgcctcctgttgtgtattcccggcaggagcaggaggaggagggccggaagcggtatgaagcccagaagctggagcgcatggagaccaagtggaggaacggggacatcgtccagccagtcctcaacccagagccgaacactgtcagctacagccagtccagcttgatccacctggtggggccttcagactgcaccctgcacggctttgtgcacggaggtgtgaccatgaagctcatggatgaggtcgccgggatcgtggctgcacgccactgcaagaccaacatcgtcacagcttccgtggacgccattaattttcatgacaagatcagaaaaggctgcgtcatcaccatctcgggacgcatgaccttcacgagcaataagtccatggagatcgaggtgttggtggacgccgaccctgttgtggacagctctcagaagcgctaccgggccgccagtgccttcttcacctacgtgtcgctgagccaggaaggcaggtcgctgcctgtgccccagctggtgcccgagaccgaggacgagaagaagcgctttgaggaaggcaaagggcggtacctgcagatgaaggcgaagcgacagggccacgcggagcctcagccctagactccctcctcctgccactggtgcctcgagtagccatggcaacgggcccagtgtccagtcacttagaagttccccccttggccaaaaacccaattcacattgagagctggtgttgtctgaagttttcgtatcacagtgttaacctgtactctctcctgcaaacctacacaccaaagctttatttatatcattccagtatcaatgctacacagtgttgtcccgagcgccgggaggcgttgggcagaaaccctcgggaatgcttccgagcacgctgtagggtatgggaagaacccagcaccactaataaagctgctgcttggctggannnnnnnnnnnnnnnnnnnnnnnnnnnnnnnnnnnnnnnnnnnnnnnnnnnnnnnnnnnnnnnnnnnnnnnnnnnnnnnnnnnnnnnnnnnnnnnnnnnnnnnnnnccnnnnnaannnnnnnnnnnnnnnnnnnnnnnntanncgnnnnnnnnnnnnnnnacaaaaatttcttaaaccttttttgtggggggcgccgccccgaaag

SEQ ID NO: 74555 - DNA, 946 bp, Homo Sapiens
ctccagtgtgtgtagactggcagagcatgtgagggagagggctgggaagagacggccctgggcccgtgaggtgcagaactctccctgcaggtagtctgtctgctctgtgatgtgctgataggaaagagcccccactggccctctggttcacttctattatgaataaatttgcaccaatagccccattagtttttaaagaaatgagctgggtgggaaaagtggaaatgtaatttctggtaagcttgagctactttaatttttattctatgaaactgatatcccttgatgtgggaaacaggcaggaaaggctgtggggtgggggtgggggactggtgtggcaccgtgcaaacaaaatgacaaatttcaactcacaatctttgtaagaaaattgttccagtttgaatcttgatattaaagtttatgtttacaaaactgccagttagatgaactaagtgtgtaaaacaaatagaaaagacattcgcagacatttcttctatgttattgaatgtgttgtttctggtgtacgtgtcaaaagtttcagttttttagatcagaaataaacgacaaatagtgtgagatgtgttgtgaacaggcatggtgaccgtggtcagcgccactcttgtttcctgaaatgtgcttctaagacagaaaatgtattttctcatcaagggtgtctggagacacagaccgtgaccttggcgcagcggtgtgcatcagaggcgtgtgctgagaagggtggtgttaagctgtggaaaatgactcaagagcaataaatcagtgccaaagcttccctgcgcatctgaatagacacaagtgaagcccgtgtgcgcacagtgcagaggccgagcctgtatttccaggtagacgtggactttattgactgtgaattcatttacatgtaacttctgacatttcactctgtgcaaataaagaacatgaggataaa

SEQ ID NO: 74556 - DNA, 1056 bp, Homo Sapiens
  misc_feature (989)..(989): n is a, c, g, or t
  misc_feature (994)..(994): n is a, c, g, or t
tcatcaataacattgctttggctcaaataaagaataataacatagatgccgcaatagaaaacattgaaaatatgcttacttcagagaataaagtcattgaaccccaatacttcggcttggcatacttattcagaaaagtaatagaggagcagttggaaccagcagttgaaaagataagcatcatggcggagagattggccaatcagtttgcaatttataaacctgtcactgattttttccttcaacttgtggatgcaggcaaggtggatgatgccagagctctcctacagagatgtggtgcaattgctgaacaaaccccgattttgttgttgttcctccttaggaattctaggaaacaaggaaaggcatcaactgtgaaatctgtgttagaattgattcctgaattaaatgaaaaggaagaagcatacaattccctcatgaaaagctatgtctcagagaaagatgtcacatctgctaaagcactgtatgaacatttgactgcaaagaatacaaaattggatgatctgtttctaaagcgttacgcatctttgctgaagtatgctggagagcctgtccctttcattgaaccccctgaaagctttgaattttatgcacagcagctaagaaaattgagggaaaactcttcttgaaataaccaggcgatactttgttttgtatatatttgtgattctgtgtctacatgttattttgaagtatatctgagggaaaaataaatgaaaattttctttatgtacttatgtatgtgtgatgcatgttcaaagtcttattgaccataactctgtgcacttggttattggacatttttggagtttttttctctgggaaaaatcgatagtgttttcttcaatgctgctgctgtgtgaagccatactttttcaggattcttcccctaattggctctttggtttccctgctctgtttcatttatttcattaaaatgttattccttttatttaagattccaaccntcctnattcataccatactattaatatcctcacccaagacccccccataatccatcccacccaatca

SEQ ID NO: 74557 - DNA, 694 bp, Homo Sapiens
  misc_feature (70)..(70): n is a, c, g, or t
cccagccactgactcacaggtctctggatgcccagacacctctcttcagggaagatgagtctgactggtntgccccagggaagagcgtatccttaccattattttaagtagcatttgcattttaaaagaggaatgcggagaggacagtacttagtccaaaggtgctaacgggggaactgggggcattgtgacacccaagtctgatgtgtcctgggttggggggccttcctggagtgtcagggtctctgggcaacgtccattcagggtgcggcatggctgtcacaaagctttatttgagcaaattattttttcactttaggagacttctacaagtttgtttcctgtttcaaatgtgtgtgtgatgtgctgtttatttatcagcttgaggtccatgggggcagccttgtgactggaagggtggatatgggagacacattctctacctgctccgagcctggtcctctcgcaggaatgctgctgctgcctccgccgccactgctgctgccacctcttatatgtttcagacactctctgcccagactcatttttaactggaaatcatcacagcagtgggatatcagagccccagacagcactgcctcttcctccccaccccactgcccccaccttaatgtgaatttgactgatgaatgaagagcgtttctaataaagtttgtcattcagtccttcaaaa

SEQ ID NO: 74558 - DNA, 2360 bp, Homo Sapiens
  misc_feature (2262)..(2284): n is a, c, g, or t
gcagtaactccccacggttttaaggtagcgaggcctgggtggctgaattcggcacgaggcccgcccgctaatgttttggccgcttcaagatggcggtgcaggagtcggcggctcagttgtccatgaccctgaaggtccaggagtacccgaccctcaaggtgccctacgagacgctgaacaaacgctttcgcgccgctcagaagaacattgaccgggagaccagccacgtcaccatggtggtggccgagctggagaagacgttgagcggctgccccgccgtggactccgtggtcagcctgctggacggcgtggtggagaagctcagcgtcctcaagaggaaggcggtggaatccatccaggccgaggacgagagcgccaagctgtgcaagcgccggatcgagcacctcaaagagcatagcagcgaccagcccgcggcggccagcgtgtggaagaggaagcgcatggatcgcatgatggtggagcacctgctgcgttgcggctactacaacacggctgtcaagctggcgcgccagagcggcatcgaggacctagtgaatattgagatgttcctgacggccaaagaggtggaggagtccctggagaggcgtgagacggccacctgcctggcctggtgccatgacaacaagtcccggctccggaagatgaagagctgcctggagttcagcctcagaatccaggagttcattgaactcatccggcagaataagagactggacgctgtgagacatgcaagaaagcacttcagccaagcagaagggagccagctggacgaggtgcgccaggccatgggcatgctggccttcccgcccgacacgcacatctccccgtacaaggaccttctggaccctgcacggtggcggatgctgatccagcagttccggtacgacaactaccgactacaccagctgggaaacaattctgtgttcaccctcaccctgcaggccggcctctcagccatcaagacaccacagtgctacaaggaggacggcagctccaagagccctgactgccctgtgtgcagccgctccctgaacaagctggcgcagcccctgcccatggcccactgtgccaactcccgcctggtctgcaagatttctggcgacgtgatgaacgagaacaatccgcccatgatgctgcccaacggctacgtctacggctacaattctctgctttctatccgtcaagatgataaagtcgtgtgcccgagaaccaaagaagtcttccacttctcacaagccgagaaggtgtacatcatgtaggccccacgtcgtgaagcgcacgcctcggggacgggctgcagtgggcggggaggccacgccttcctcctgtcccacgctccagcctgccgcggcgtttctgtttcttgcgaccaaagatccgtgagcaacgataaatactcttaggaagagcagaacaataaggtttcataagttttgtacttggaaaacatttggatgggtaggatttgtaacacgtcaaccatttgatgcttctgaaaagtactttcaacttgcgaaggaaactcttctttaaagactgacctaaacaccgagggaaacttaagaacgtttaaaatataggagtccgtgatttccctgtgttttcagtttctttccttctgtgaacgatgagacttggagaacgggctggtccttcaccacttcctgttggccctggcctggccggggaaggtggcagcggcaccggactgacctgcagtgacccgcgatgccgcgccacgagggacacttatggcttcattcgagagctgctgccaaaacgcctggcgccgccaccgtcgggggctggcttcgaggacgcccgcctgcctcgcgggtcgtgtccgcgggactgtgttcgtacgtgcatagtttcgatatcacatcgcggggctgtgttcgtagctgcgtcgtttcgatatcacaccctctgtgtgccgccttacttcctgcttcgagaatgtataacgtggaaatccacgggaccaaatttctgcagaggccttgccggatggttccataactgtagagtctaattgctatccattacagaaattaatcgttcagttgaaagaagtactgatgacttttcaaaacaaatgaaccaccgtagctgacagagaaccgtatcgtagaggtttgtagttagtgcttatttttgcatgttgatgttgactagctaataaactgtaaatgtaaaccatgcgaataaaatggttttctatttctcatttccgtgtgnnnnnnnnnnnnnnnnnnnnnnncctgagcaggcggccgcaagctttttccctttagtgagggttaatttcggctatggcacgtggccgtcgttgtacc

SEQ ID NO: 74559 - DNA, 758 bp, Homo Sapiens
agcagcaggtgaaccagctggcgatccgcccgcatctgtgaaagtctgaggtggtgccattgggacaatgaagaacccacactcccacctcgtctgggaggttcctacagcgtccgggaccggctgggctgccccaaagctttctgtgtgatccacgggtaggcacccaccctctttggcccaggcctgctgagtggccctggcacaaagaagaggctgtgtcctcagttaccctggaaggatgtgtgtgttgcagccacacggttggacaggttcccagccctaggtttgggccgcagggcccctggggccaaggaagaagacagccccaagtgggtgtccggggcagagcctggcctgccaccagcttatgtgatcttgggcaagtccctgccctccctggaacgaagggccagggggctggactttcccacacaacttgctgggcaaagcacgatctgcagctttgaagactcaacagaccctggaccatacggagagcaggtggcccaggcctcagggcggcagtcccggctttgaggctcacgcgagggcctggtatgcagggaccactgctcagctgggcctcggaccttggggatattggacgcaacatggcaaatgaagctgggcgcccaagtctctgggtactccctggaggacactgtctcacttgtctcgggttggctcccagccttggaagtcccagatggggactgttctgacaaagctggcatcaccaaggggtaaaggccctg

SEQ ID NO: 74560 - DNA, 452 bp, Homo Sapiens
accatttctccaatgctgccattttaattcaggccatcaacctacctaaattatagcaacagcctccttattagtctccctgttttttatttttattcctttctacactacaaccaaattgctccaaaagacttactgatcatgtcactgcattgctttcaccattgctcttagggtacaatacaaatttatcttcatctttaaggtctcagtatgccacttcatttaggaaaccttcattgatgccctctagattaggtgcccttactatccattccctatacaccctgttctttcccagacatacacttggcacactttattgttactgcttattgatcactgctagactgtaagctttgtaagggcagggaccatataagccttgttcactgttatatctctagtgcttagcacaatgcctggcatttcaataaatgtttggacaaacg

SEQ ID NO: 74561 - DNA, 676 bp, Homo Sapiens
ttttttttcaggagtctcaccagtagaactttatagtattgcgtttcgattacatgtgtgtgaattttaaaaactgattaccctccagtaaaaatgtggaaccaatttgcatttggattaaaacattaggtttggggacaaaagtggaccccatgctgcctgagatgaagagagagagcaggatggcagaggaatcaccagctcaagaaaccccaagacttggacagtcttccagcagaagaggccagggtctctcagtgtactactccaaacaggcctctcctagagatgtagtctgggaaggtccaaaacccaccagacaggcacatccagtggggaaaagacttcccattccagtgtggcctgcatccctcacctctgcttcccagtcttctgctgacctcagaggagcagggtggccattgctgatctgggttagggagatgccagaaacacacccaggtttgaaccacaggttagtggtacaaagtcacagtccttgtgccttcagaaaacccagaggccccaaatacgagtgggaagagagttgggaaaaactgaaccagactcttccaatggccattaaagagaaaattcagcaacgcttgcctttgtctttgaccctgagaagttaagggacacagattgtggcgccgtgatggaacatgcctcgtgc

SEQ ID NO: 74562 - DNA, 859 bp, Homo Sapiens
  misc_feature (41)..(83): n is a, c, g, or t
  misc_feature (87)..(121): n is a, c, g, or t
aggaatctatcgactcactatagggcgctacgcggttattnnnnnnnnnnnnnnnnnnnnnnnnnnnnnnnnnnnnnnnnnnnccgnnnnnnnnnnnnnnnnnnnnnnnnnnnnnnnnnnncagtcgacggtaccggacatatgcccgggaattcggccattacggccgggggctcttcctccggggccgctggcactgcggccgctccgcaggcagagaagccgggagcgggcgaggcggcggcggcagcagcgatggcaggaatagagttggagcggtgccagcagcaggcgaacgaggtgacggaaattatgcgtaacaacttcggcaaggtcctggagcgtggtgtgaagctggccgaactgcagcagcgttcagaccaactcctggatatgagctcaaccttcaacaagactacacagaacctggcccagaagaagtgctgggagaacatccgttaccggatctgcgtggggctggtggtggttggtgtcctgctcatcatcctgattgtgctgctggtcgtctttctccctcagagcagtgacagcagtagtgccccacggacccaggatgcaggcattgcctcagggcctgggaactgacccagctggtcctgaaggagaagccaaatggctgcactggccgattctggtctccagaggaccttggtgtttgctctcccttgacccaccccagtgagtgccaaagggcagccccaacatgtgcacccctgcatttcctgtcatgccacagactggcccttgagggcagcctgctgtactggccatgctgggccagccccacctggagctcagtaaaaactgctgtttgattaaaagctggtatctgtgtgtg

SEQ ID NO: 74563 - DNA, 560 bp, Homo Sapiens
  misc_feature (360)..(360): n is a, c, g, or t
  misc_feature (374)..(374): n is a, c, g, or t
  misc_feature (408)..(408): n is a, c, g, or t
taatcagctttcactgagcttcaggtggggctggcccggcatggccagtatggcagggtgccctcgagggccagtctgtggcatgacaaaaaataaaagagtgcacgtgttggggctgccctttggcactcactggggtggggcaggggagagaaaaaaccaaagttctctggagaccggaaccagccagtgcagccatttggcttctccctcaggaccagctgtcagtccccaggccctgaggtggtgcctgcatcctaagtctgtggggcattactggtgtcactctgagggagaaagatggccagctgctcaatcaggatgatgagcaggctaccacccaccactagccccaagtangatctggcaatggngatgttctcccagcacttcttctgggccaggggntctttgttgtcttgctgaaagctgagctcatatcaaggaatttggtctgaacgctgctccagttcggtcagctttccatcatgctccaggaccttgtcaaagttgttaagcgtgatttccgtcaccttgttcgcttgccgctggcactgctc

SEQ ID NO: 74564 - DNA, 813 bp, Homo Sapiens
gagctaggtagcgaggcctgggtgtttaattcggcacgagggcggccgcttctagtagtttccaggcgctgccgggcggctggcactaagcggtcctgaggctgtggctacggctgctccggagctggtggcgccgcgataggagagccgatggccaagtggggtgagggagacccacgctggatcgtggaggagcgggcggacgccaccaacgtcaacaactggcactggacggagagagatgcttcaaattggtccacggataagctgaaaacactgttcctggcagtgcaggttcaaaatgaagaaggcaagtgtgaggtgacggaagtgagtaagcttgatggagaggcatccattaacaatcgcaaagggaaacttatcttcttttatgaatggagcgtcaaactaaactggacaggtacttctaagtcaggagtacaatacaaaggacatgtggagatccccaatttgtctgatgaaaacagcgtggatgaagtggagattagtgtgagccttgccaaagatgagcctgacacaaatctcgtggccttaactgaaggaagaaggggtgaaacttctaagagaagcaatggggaatttacattcagcaccctcaaaacagagttcacccagggcatgatcttacctacaatgaatggcagagtcagtagaccagtggggcaagcagcactgaaactgatgagcgcaggttaaggctgtccttcataaaccaggcaactgttggggctaaatcccattggacgatcatttaaggaaactctgagtccgagggcaaaagggtgccccaaa

SEQ ID NO: 74565 - DNA, 831 bp, Homo Sapiens
aaacttacgcgctaggtagcgaggccgggtggtgtaatcggcacgaggagggggtggagggaaaagcaagccaggaggtgcttgcggccgcttctagtagtttccaggcgctgccgggcggctggcactaagcggtcctgaggctgtggctacggctgctccggagctggtggcgccgcgataggagagccgatggccaagtggggtgagggagacccacgctggatcgtggaggagcgggcggacgccaccaacgtcaacaactggcactggacggagagagatgcttcaaattggtccacggataagctgaaaacactgttcttggcagtgcaggttcaaaatgaagaaggcaagtgtgaggtgacggaagtgagtaagcttgatggagaggcatccattaacaatcgcaaagggaaacttatcttcttttatgaatggagcgtcaaactaaactggacaggtacttctaagtcaggagtacaatacaaaggacatgtggagatccccaatttgtctgatgaaaacagcgtggatgaagtggagattagtgtgagccttgccaaagatgagcctgacacaaatctcgtggccttaatgaaggaacgaaggggtgaaactctctaagagaagcaatgggaatttacatcagcaccctcaaaaacagagttcaccccagggcatgatcttacctacattgaatgggagagtcagtagacccagtggggcagccagactgaaaactgaggagcgcaggttagcctggtcctcaaaaaccaggccaactgttgggtcaatccccctggtagtcccttaggaacttcgagtccg

SEQ ID NO: 74566 - DNA, 999 bp, Homo Sapiens
ggctaggtagcgaggctgggtgttgaatcggcacgaggctggaggggagggggtggagggaaaagcaagccaggaggtgcttgcggcgcttctagtagtttccaggcgctgcgggcggctggcactaagcggtcctgaggctgtggctacggctgctccggagctggtggcgccgcgataggagagccgatggccaagtggggtgagggagacccacgctggatcgtggaggagcgggcggacgccaccaacgtcaacaactggcactggacggagagagatgcttcaaattggtccacggataagctgaaaacactgttcttggcagtgcaggttcaaaatgaagaaggcaagtgtgaggtgacggaagtgagtaagcttgatggagaggcatccattaacaatcgcaaagggaaacttatcttcttttatgaatggagcgtcaaactaaactggacaggtacttctaagtcaggagtacagtacaaaggacatgtggagatccccaatttgtctgatgaaaacagcgtggatgaagtggagattagtgtgagccttgccaaagatgagcctgacacaaatctcgtggccttaatgaaggaagaaggggtgaaacttctaagagaagcaatgggaatttacatcaagcaccctcaaaaacagagttcacccaggcatgatcttaccctacaatgaatggagagtccagtagaccagtggggcagccagcactgaaaactgaggagcgcaggctaagcctgtccttcaaaaacccaggcaagactgttggagtcaaaattccccacttgttagaaatcactcttaaggacaccttcctgacgtcaccagagggagtctatggagtgttacacccaagactggtgtgcggccttaccattgtctgcagctttgagccgacgagtgggacagtccccctggtgcggagaggctcgggaattaggacgggccgggacaattgggaaggggggatctggcacg

SEQ ID NO: 74567 - DNA, 2438 bp, Homo Sapiens
  misc_feature (1403)..(1437): n is a, c, g, or t
  misc_feature (1648)..(1659): n is a, c, g, or t
  misc_feature (1883)..(1951): n is a, c, g, or t
aaacttaggctaggtacgaggctgggtgttgaattcggcacgaggtgcttgcggccgcttctagtagtttccaggcgctgccgggcggctggcactaagcggtcctgaggctgtggctacggctgctccggagctggtggcgccgcgataggagagccgatggccaagtggggtgagggagacccacgctggatcgtggaggagcgggcggacgccaccaacgtcaacaactggcactggacggagagagatgcttcaaattggtccacggataagctgaaaacactgttcctggcagtgcaggttcaaaatgaagaaggcaagtgtgaggtgacggaagtgagtaagcttgatggagaggcatccattaacaatcgcaaagggaaacttatcttcttttatgaatggagcgtcaaactaaactggacaggtacttctaagtcaggagtacaatacaaaggacatgtggagatccccaatttgtctgatgaaaacagcgtggatgaagtggagattagtgtgagccttgccaaagatgagcctgacacaaatctcgtggccttaatgaaggaagaaggggtgaaacttctaagagaagcaatgggaatttacatcagcaccctcaaaacagagttcacccagggcatgatcttacctacaatgaatggagagtcagtagacccagtggggcagccagcactgaaaactgaggagcgcaaggctaagcctgctccttcaaaaacccaggccagacctgttggagtcaaaatccccacttgtaagatcactcttaaggaaaccttcctgacgtcaccagaggagctctatagagtgtttaccacccaagagctggtgcaggcctttacccatgctcctgcaacattagaagcagacagaggtggaaagttccacatggtagatggcaacgtctctggggaatttactgatctggtccctgagaaacatattgtgatgaagtggaggtttaaatcttggccagagggacactttgccaccatcaccttgaccttcatcgacaagaacggagagactgagctgtgcatggaaggtcgaggcatccctgctcctgaggaagagcggacacgacagggctggcagcggtactactttgagggcattaaacagacctttggctatggcgcacgcttattttagggccagcggcaggggactccagcctgctggacacttcagtccagctctctcctgactggggcttgcgactcacaggattgcatcgtcccagctgctaacttggggccggggcccctcccttccacatataccttgggtttgtgcatgttttctgctgggtgggttcagagggcaatttctcttttatgtgtacatatgctaaataaacataatttaaaaaaccgcannnnnnnnnnnnnnnnnnnnnnnnnnnnnnnnnnntcaggacggcgtttgccgggggggccggccagccgccctcgcgtgccaaaccaattaaatgtactcgaccacaagccgaccacgtgccccggcggatggcccggacccccgctggagtggaccggatgcgcaaggacaacagccgcccctctttccttccgtgccgcgcgggggccgaaagccgtggtggacgacaccacggtctgcgggnnnnnnnnnnnngggactcccgaagcgcactgggggcgaccagtcgccccccccgcgtcggaggatggtagctgcccccactcatccccccgcgcgtgcctactgcggtactcgcgggcaaagcactcccccgcggggctcggccccccgctcgctcgtcctctcccgccccgggcgagggcggatgcttcaacccccccggcggatcacgtaggataagaaaaccccaacgattnnnnnnnnnnnnnnnnnnnnnnnnnnnnnnnnnnnnnnnnnnnnnnnnnnnnnnnnnnnnnnnnnnnnnacaactgaccgcccacattcttccggccgacccctgtacgtgcgcccaggtccactttccgcccggcccgacattatccctcgtctaccgtccggccagccccacctactccctctgaggcgaagcctgtactccctccatacgaatcacaccacctgccacgacccccgtcgcgagagctctggagtgacgctctcgcgtgccgggtgggtatcgccacaggaatctcgtgcatgtgtaagcgctgaggcaatcctcgcacgcgggcgatccgacccacgccgccaccccctttttcccctaactccagtaccgcacccccgcactctgaccaccctcgcccgcccaaatatcgtgccactacccaataacataggaacggggcgggagttaggggtgttcgaccacggcccgtgcgacaacgcgttgcggagcgagagggcggacccgcgcgcgtccgcgcctcagctggggtcccccgtcgctc

SEQ ID NO: 74568 - DNA, 751 bp, Homo Sapiens
  misc_feature (480)..(480): n is a, c, g, or t
  misc_feature (504)..(504): n is a, c, g, or t
cggcagtactcatacggtttaaggtagcgaggcctgggtggcgaattcggcacgagggaggctgtggctacggctgctccggagctggtggcgccgcgataggagagccgatggccaagtggggtgagggagacccacgctggatcgtggaggagcgggcggacgccaccaacgtcaacaactggcactggacggagagagatgcttcaaattggtccacggataagctgaaaacactgttcttggcagtgcaggttcaaaatgaagaaggcaagtgtgaggtgacggaagtgagtaagcttgcatggagaggcatccattaacaatcgcaaagggaaacttatcttcttttatgaatggagcgtcaaactaaactggacaggtacttctaagtcaggagtacagtacaaaggacatgtggagatccccaatttgtctgatgaaaacagcgtggatgaagtggagattagtgtgagcctntgccaaagatgagcctgacacaanatctcgccggccttaatgaaggaagaaggggtgaaaccttctaagagaagcacatgggaatttacatcaagctcccctcaaaaccagagttcacccaggacatgatcttacctaccactgcactggacgagtcagtagacccagtggggcagccagcactgaacaactgaggagcgcaaggctaaggcctgctccttcaacaaaacccagggcagacctgtcggagtcaaaaatccccattgtaaga

SEQ ID NO: 74569 - DNA, 1636 bp, Homo Sapiens
  misc_feature (188)..(213): n is a, c, g, or t
  misc_feature (1448)..(1448): n is a, c, g, or t
  misc_feature (1471)..(1471): n is a, c, g, or t
ggtaactataacggtcctaaggtagcgaggcctgggtggcgaattcggcacgaggctctcgtcgggagtcccagccatgtccgacgagagagaggtagccgaggcagcgaccggggaagacgcctcttcgccgcctccgaaaaccgaggcagcgagcgacccccagcatcccgcggcctccgaagggnnnnnnnnnnnnnnnnnnnnnnnnnnactgctgcgctgcctagtgctcaccggctttggaggctacgacaaggtgaagctgcagagccggccggcagcgcccccggcccctgggcccggccagctgacgctgcgtctgcgggcctgcgggctcaacttcgcagacctcatggctaggcaggggctgtacgaccgtctcccgcctctgcctgtcactccgggcatggagggcgcgggtgttgtgatcgcagtgggcgagggagtcagcgaccgcaaggcaggagaccgggtgatggtgttgaaccggtcagggatgtggcaggaagaggtgactgtgccctcggtccagaccttcctgattcctgaggccatgacctttgaggaagctgctgccttgctcgtcaattacattacagcctacatggtcctctttgacttcggcaacctacagcctggccacagcgtcttggtacacatggctgcagggggtgtgggtatggctgccgtgcagctgtgccgtacagtggagaatgtgacagtgttcggaacggcctcggccagcaagcacgaggcactgaaggagaatggggtcacacatcccatcgactatcacacgactgactacgtggatgagatcaagaagatttcccctaaaggagtggacattgtcatggaccctctgggtgggtcagatactgccaagggctacaacctcctgaaacccatgggcaaagtcgtcacctatggaatggccaacctgctgacgggccccaaacggaacctgatggccctggcccggacatggtggaatcagttcagcgtgacagctctgcagctgctgcaggccaaccgggctgtgtgtggcttccacctgggctacctggatggtgaggtggagctggtcagtggtgtggtggcccgcctcctggctctgtacaaccagggccacatcaagccccacattgactcagtctggcccttcgagaaggtggctgatgccatgaaacagatgcaggagaagaagaatgtgggcaaggtcctcctggttccagggccagagaaggagaactagggcaagtggctgtgagaccctagagacagcgaagggagaacgtgggaagctacgttctgttggccaccagacttgcatttcagcctctgtcataatgccctgccaaggcgacagggagggtcagagggaggccggctgcttcctgcccccaccctttccccgggcctgctgtgctgcttttgtgccaggnttagccagtcccccctgttgtgntccatggtgctttcacctctggctcatctttcctccccgtcctgccccgccacctccccaaaagaatgaaacgtcagctcaggatatgggggccaatctctgtgagttcagcatgtacctggtctctccctagggtcccttcagcctggggctgaccattgccgt

SEQ ID NO: 74570 - DNA, 864 bp, Homo Sapiens
gtatgaagtcacggcgcgccgaattcggcacgaggcgccttccccagctgtgcactctccatccagctgtgcgctctcgtcgggagtcccagccatgtccgacgagagagaggtagccgaggcagcgaccggggaagacgcctcttcgccgcctccgaaaaccgaggcagcgagcgacccccagcatcccgcggcctccgaaggggccgccccgccgccgcctcgccgcccactgctgcgctgcctagtgctcaccggctttggaggctacgacaaggtgaagctgcagagccggccggcagcgcccccggcccctgggcccggccagctgacgctgcgtctgcgggcctgcgggctcaacttcgcagacctcatggctaggcaggggctgtacgaccgtctcccgccgctgcctgtcactccgggcatggagggcgcgggtgttgtgatcgcagtgggcgagggagtcagcgaccgcaaggcaggagaccgggtgatggtgttgaaccggtcagggatgtggcaggaagaggtgactgtgccctcggtccagaccttcctgattcctgaggccatgacctttgaggaagctgctgccttgctcgtcaattacattacagcctacatggtcctctttgacttcggcaacctacagcctggccacagcgtcttggtacacatggctgcagggggtgtgggtatggctgccgtgcagctgtgccgtacagtggagaatgtgacagtgttcggaacggcctcggccagcaagcacgaggcactgaagcgagaatggggtcacacatcccatcgactatcacacgactgactacgtggatgagatcaagagatttccctaaaggagtg

SEQ ID NO: 74571 - DNA, 2002 bp, Homo Sapiens
tagaggaagggaccactggagaagataagctggactcctcagtttacagctgaaaaaataagtcctgagaggcaatgagcccatggagcaccaagtgaggtcatggaccctctgggtgggtcagatactgccaagggctacaacctcctgaaacccatgggcaaagtcgtcacctatggaatggccaacctgctgacgggccccaaacggaacctgatggccctggcccggacatggtggaatcagttcagcgtgacagctctgcagctgctgcaggccaaccgggctgtgtgtggcttccacctgggctacctggatggtgaggtggagctggtcagtggtgtggtggcccgcctcctggctctgtacaaccagggccacatcaagccccacattgactcagtctggcccttcgagaaggtggctgatgccatgaaacagatgcaggagaagaagaatgtgggcaaggtcctcctggttccagggccagagaaggagaactagggcaagtggctgtgagaccctagagaccagcgaagggagaagttgggaagctacgttctgttggccaccagacttgcatttcagcctctgtcataatgctctgccctccctcccccgaaggtctctgtggtgatgaccgctctcccctgcccctccccgcttcctgacctctgaagaggttgggaagtgaccatttggatgtctgggccctgccaaggcgacagggagggtcagagggaggccggctgcttcctgcccccaccctttccccgggcctgctgtgctgcttttgtgccaaggttagccagtcccccctgttgtgttccatgtgctttcacctctgcctcatctttcctcccgtccctgccccgccacctccccaaagaattgaaacgtcagctcaggatatggggccaatctctgtgagtccagcatgtacctgtctctccctagtgtcccttcagcctgggctgaccagtgcccgcctctgggcttgaccagttcccaatctcgtcctctgtccccaacttcttaagcacaattgggcttcttccatctccaggttttctgccattcttaaccaaggctgcctcttccaacagggcgggaatcagacctactcccctaggtcacaactctgggaaggatacagagcccccacccttcactgagttctctggatttgttctcagtgccttagcaacgaaaacctgtgcttgtgtgtgtgtggcggcggggagggaggatcctgtttcccacctccttctcctcccctgtactccccagtgccttccttgttctggtggagctggggtttctctcctccccagtcccacaacactgccaaaaatctgtgtatgtgccattgggtggggcagccccaagcctcctggggaggcagggcaaaaacaggtgccctcatcgtggtctgtgccatgtcccgtctctatggtggttgaggagaaaggcggggaagcttcctcagccttgcagatatgtgtggcatttactagccagagctctgaaaggcagtgctgtctgtttcttgtactgggaccaaagtaaaaatccaagcacattccccttgcagttaggggaggccctactgccttctcaaagcagagaggcagcttatcaaactcagcccaaaactctgtttacatgggtggggagatggagcagggaagtacagagtgggatggtcaggacctgggccattgcaaccaaaatggggacttcctgggtagggaggtcactccctctactcactgagctaggattagggagggttattgccccaaccattgcaatgggaggtggagggacaggctcagcctcctcattgtctaaatgaggcctaaatgtgtgaagtgcgatttctgcttttgtgtaccccaccaccccattaccacagctgcctttgtgtgtttgtgtcaataaaaagccaaaccctgaaaaaaaacctcgtgccggattcgccacccaggcctcgctacct

SEQ ID NO: 74572 - DNA, 835 bp, Homo Sapiens
cagctgtgcactctccatccagctgtgcgctctcgttcgggagtccagccatgtacgacgagagagaggtagccgaggcatgcgaccggggaagacgcctcttcgccgcctccgaaaaccgaggcagcgagcgacccccagcatcccgcggcctccgtaaggggcctgccgccggccgacgcctcgccgccactgctgcgctgcctagtgctcaccggctttggaggctacgacaaggtgaagctgcagagccggccggcagcgcccccggcccctgggcccggccagctgacgctgcgtctgcgggcctgcgggctcaacttcgcagacctcatggctaggcaggggctgtacgaccgtctcccgccgctgcctgtcactccgggcatggagggcgcgggtgtggtgatcgcagtgggcgagggagtcagcgaccgcaaggcaggagaccgggtgatggtgttgaaccggtcagggatgtggcaggaagaggtgactgtgccctcggtccagaccttcctgattcctgaggccatgacctttgaggaagctgctgccttgctcgtcaattacattacagcctacatggtcctctattgacttcggcaacctacagcctggccacagcgtcttgggggtgtgggtatggctgccgtgcagcttgtgccgtacagtggacgaatgtgacagtgttcggaacggcctcggccagcaaggcacgaggcactgaaggagaatgggggtcacacattcccatcgactatcacacgaatgactacgtggatgagactcccgaaggattccccttaaggagtggactttgtcatggaacctc

SEQ ID NO: 74573 - DNA, 666 bp, Homo Sapiens
ctcgtgcaagtggttgattgatggagtgctcttaggagaaggggagtgagggaagcagcgtaggacagaggaaaaaaactgagtaagaatgtgctctcagaagaagactgacttcagcttgattccatgaggagctctgggaaaggaagttccttgatgtaagaggtcagtcttttgtacctccatacaagaggtagcaattcttttctagagatggtctcaaaattagaatacatcaaaatcacttggagggtttggtaaatcagaatgctgtgccaacccccagagattctgattcagtaggtctgaggtggggcctgaggatttgtatttccagcaagttcacaggtaatgctgatgatgcactttgaaaacctccactctagagaagaggacagctctgaggtgttagcacccacagcatctcgcaaaggggatcaggaaagcacctactacatgaaggcacatgccagggacagatggattggaccccaagctggggctatgtagactacatctttgggtcagaacatctagattcacagtatcttgtatgttcctgttgtcatctcacatctcttgccaacgcattgttgaaacatcttacttggtcttgttattggacttcaagagaagggtctgggagatacatgaggctttgaaaag

SEQ ID NO: 74574 - DNA, 501 bp, Homo Sapiens
tcagcccacttcttttgggtggcaatggtttggatatcgtttgtcctcactaaaattcatgttgagattcgagccccagtgtggcaggtgttgggatgtggggcctcataggagctgtgtggtcttggaggtggagtcctcatggatagattaatgcctgccttaaggggtgagtgagtgctcacccttgggaatttgggaatttggttttctctcccttgcttccttcagcaccatgtgatctctgtgcacacagctgcatccttctgccctcccccagaagcagcagcagcctcagggatgagggaggtcctcagtgagtgcacctgcccagtcttgaaccttccagccatcagaatctgagccaaatcaacctcttcctttataaagacccagcctcaggtcttctgtcagagcaacacaaaatggactcagcacggatcaaattgtgtctcccccacccccacaaaaaaactttatattaaaatcctaacccccagc

SEQ ID NO: 74575 - DNA, 1157 bp, Homo Sapiens
ggggccggaagagtcaggttctgtgtatgtctccgcgtcttccgcggagcgggtgtgcagggcctgcagcattgaactagatgtcgtccccgcaggccccagaagatgggcagggctgtggcgaccgcggcgatccccctggggacctccgtagcgtcttggtcacgaccgtgctcaacctcgagccgctggacgaggatctcttcagaggaaggcattactgggtaccggccaagaggctgtttggtggtcagatcgtgggccaggccctggtggctgcagccaagtctgtgagtgaagacgtccacgtgcactccctgcactgctactttgttcgggcaggggacccggaagctgccagtactgtaccaagtggagcggacacgaacagggtcgagcttctcggtgcgctctgtgaaggccgtgcaacatgggaagcccatcttcatctgccaggcctccttccagcaggcccagcccagccccatgcagcaccagttctccatgcccactgtgccaccaccagaagagctgcttgactgtgagaccctcattgaccagtatttaagggaccctaacctccaaaagaggtacccattggcgctcaaccgaattgctgctcaggaggtccccattgagatcaagccagtaaacccatcccccctgagccagctgcagagaatggagcccaaacagatgttctgggtgcgagcccggggctatattggcgagggcgacatgaagatgcactgctgcgtggccgcctatatctccgactatgccttcttgggcactgcactgctgcctcaccagtggcagcacaaggtgcacttcatggtctcactggaccattccatgtggttccacgcccccttccgagctgaccactggatgctctatgaatgcgagagcccctgggccggtggctctcgggggctggtccatgggcggctgtggcgtcaggatggagtcctagctgtgacctgtgcccaggagggcgtgatccgagtgaagccccaggtctcagagagcaagctgtagccagaggtaccagcttcgcctggggcttcaagaacctcccatctatccccattcctgagacaggagttacagtcccttttggccctcacatccaataaagagactgataccactgg

SEQ ID NO: 74576 - DNA, 824 bp, Homo Sapiens
gtcaggttctgtgtatgtctccgcgtcttccgcggagcgggtgtgcaggccctgcagcattgaactagatgtcgtccccgcaggccccagaagatgggcagggctgtggcgaccgcggcgatccccctggggacctccgtagcgtcttggtcacgaccgtgctcaacctcgagccgctggacgaggatctcttcaggtagccggctagctcctgcccagcatcccctcctttagggcagaaacttgatcttgactgccgccgcccggggcccctggctccgggactagtatggctctgcgtgggatgcaccctctgccacgattaggagagaactcgcccccaacagagctgtcctctctgctctggcttcctcccttcctctccgcgctgcgaggtctgcacagctgagcaaatatagtggtgacctgagagaccctgctcggcagcctgccctaagccttcacgggggagctagcccagagagggcagtgatttgcccaagggcacacagctgatggatcagccttaaaaccgacgccgcagctccttgtgtcttcagtatccttttcttctcacaatatcccgcccccagtaccatttggggacccgaagctgccagtactgtaccaagttggagcggacaccgaacagggtcgagcttctcggtgcgctctgtgaaggccgtgcaacatgggaagccccatctttcatctgccaggcctccttccagcaggccagccagcccccatgcagcaccagttctccatgcccactgtgccagccaccagaagagctgctttgactgtgagaccctcattgacag

SEQ ID NO: 74577 - DNA, 691 bp, Homo Sapiens
  misc_feature (323)..(375): n is a, c, g, or t
cagggcctgtccctgccccagtggcggctgcgctgggttcaggcccagggggccctgcagaagctgtgcagctgaagagagggttcaaacggaagccgagaacttgacactgttcaccccaacacctcacctcccccaggacatttggaagaaagcagcgccaggattcctcggcagtcgtccccacccgcacctgcagtcccctcatgtgctgttctgctgccccactcagctcctggaccctgtcctttcatcccgctaaagcaccccctaaaaccccttcatcactttcattctcagcaaaaagtaattgagcacctccnnnnnnnnnnnnnnnnnnnnnnnnnnnnnnnnnnnnnnnnnnnnnnnnnnnnncagcagttgagttctagggcagggagacagagtttacaagataaggaaaatatatatgtagtatgctgcaagttaactgctgtgtgggaaatccagcagggggtgggatgtgtgatttgaattgagggccacactgcccaggtcgtgctccgtcaaggggtgagcaggagcaacaggggtggctgagtaagggcttgcagctggaggcaacagcacatgcaaaggccctgagccaggatgtgctgcaataagggccactgagggggacagtgtaggttgggggtgaggaatgtattaaaagatgagattgccttct

SEQ ID NO: 74578 - DNA, 817 bp, Homo Sapiens
ggcgcctcgagagcgtgtatcccaagcacttaaagagtaatagcaggagcgaagagaggtgccacacttgaaacagccagatctcatgagaatgtcactcactagtgtcaaggacagcatcaaagagatggtgctaaaccattcatgatgaactcacccccagtgatccaatcacctcccaccaggctccacctcgaatactggggattaccattcagcatgagatttgggcaggaacacagacccaaaccataccacacacattatcatcgttaaactttgtaaagtatttaaggtacatggaacacacgggaagtctggtagctcagcccatttctttattgcatctgttattcaccatgtaattcaggtaccacgtattccagggagcctttcttggccctcagtttgcagtatacacactttccaagtactcttgtagcatcctgtttgtatcatagcactggtcacattgccttacctaaatctgtttgacagtctgctcaacacgactgcaagctccatgagggcagggacatcatctcttccatctttgggtccttagtgcaatacctggcagctagccagtgctcagctaaatatttgttgactgaataaatgaatgcacaaccaaattattgataccaaatgtttttttgtgtacatttctacttctctagctataagtcttaattatacaacaaaatactatttttatatttatgtttggtaaattcaataactttcctcatcatttggaaagtcaaattgtttattgctgcccgacaggggtttcccagtctagaagcgttctgga

SEQ ID NO: 74579 - DNA, 817 bp, Homo Sapiens
  misc_feature (411)..(419): n is a, c, g, or t
  misc_feature (665)..(734): n is a, c, g, or t
atcagcatctcactttcttctccattcagccccaaccccctccctgccatgctttccaccccaaggacccaccagcagggagcagacggcagctaattttggtaccacttaagggtccccccattctggcccccatcctctccctcaccccaattctttctcgctggagctgttatttcccaagaagccgcatcgcccaaggttggcacctctcctaacctgccacacgacagctctcacctctctaggaattgggggctgtcaggtcacaggtgggatctggcatttttttatgacagtccatttctagatggtttgcctattaaagaagtgggggggaaatactgttttctccttaacctcaagctaccagtctctcctcttccgcgtagaggaagaggggggcagacnnnnnnnnngctgaagtataaaaaccctcctcctcccgttattatttaagctactgccatcaaccccacccccataaagctgtgaagccctttgcctcgcttttgacagcgtgggggggccccgtgggcagggacttcggatttgcatttctgggttgtttttccttccactctggggtctcgttcaggcattggggtctcctcaccccagccacatgtttctttaagaatcctttggtcaaccaggaccttgannnnnnnnnnnnnnnnnnnnnnnnnnnnnnnnnnnnnnnnnnnnnnnnnnnnnnnnnnnnnnnnnnnnnncatcgtggttctggaagcttctagcgtgtggcatctgaccaattttgaattggtcctttctataaaatcaaaatttataaaaa

SEQ ID NO: 74580 - DNA, 1007 bp, Homo Sapiens
  misc_feature (43)..(43): n is a, c, g, or t
  misc_feature (104)..(104): n is a, c, g, or t
  misc_feature (149)..(150): n is a, c, g, or t
  misc_feature (154)..(154): n is a, c, g, or t
  misc_feature (208)..(209): n is a, c, g, or t
  misc_feature (245)..(245): n is a, c, g, or t
  misc_feature (280)..(280): n is a, c, g, or t
  misc_feature (287)..(287): n is a, c, g, or t
cttgtgatgacgtacatcccagacgttgctgtcgatatcgccnttagatgcctgagccagatcgacgagtctgcattgtctaactagtgatccaacccagcatntccacactgttggggctgttccttgtgtgttgtacctaccttgcnntgcntgcctctcctgtgactcactgagcctcccaggcccagttcctgacagtttgttnntgcacatccactggaaagtgtcataatgacccagtntagatgcaagagtcagttattctagccctcatgcntgaagcnccagtcctggctccaccactcctccagccagagggtttggaccatccagtgcctgtcctcgccacaggccctccagggagcattcgggtcaaatccatggacaccctgggcaacaaaccaaggctgctgttcatcccacatcgtgtggggcagtgtccatcccctgcagctacttggtgacttaacaactccaggagccctgtcagctgccctcctccacctaaaccccttcgactcttctgctttgacaaagaaaatgacattggggaggggaggtgctccgcctcccagcttttctcaaaatagtcctatagatactggtaatctggaaatgaagaagtaattctgtctctgcacctacttttgcagaatgttcaaggaagtattctgtgttagtattaatgccaaaaagttgtttttaaaggttttgtactcagcacatcatacaaaccacattacttctgtcacttcagggcatcgggactggctggcgcccttgttatgtgctattttaatcagtgtaacattggtcaagttgttacccatgtatgctgtgtttatcatgtgtatatcgtccagaaagtattaaggctttaggtagatgcaactggcgaaccttggagagggaatgctgattgtcttgaccaaacccacagcctgtctcttctcttgtttagttacttacggcaataaatcatctatgagttagtgcacaaaaaa

SEQ ID NO: 74581 - DNA, 2586 bp, Homo Sapiens
  misc_feature (76)..(128): n is a, c, g, or t
tagggcggaagagtatgaagtcacggcgcgccgaattctgacgagggcggcagaggcggaggcggcagaggctgcnnnnnnnnnnnnnnnnnnnnnnnnnnnnnnnnnnnnnnnnnnnnnnnnnnnnncgagcgcggagccatgggccgggctggcaccgggaccgggggcgaggcggtggccgcggtggtggcggggccgctgctgctgctgctgcttgcccggcccccgcctgcctccgccggctacagcgggaagagcgaggtggggctggagtccgagcacttctcacatggccccgcacaggctgtccttcgacagctggtacggcagtgccaggctcttccgcttccgcgtgcccccagatgctgtgcttctacactggctcctgcaggtctcccgggagagcggcgctgcctgcaccgacgcggagatcaccgtgcacttccgttccggcgcccctccggtcatcaacccgctgggcaccagcttcccggacgacaccgcggtgcagccctccttccaggtcggggtgccgctgagcaccgcaccgagaagcaatgcctccgtcaacgtttcccacccggcccccggggactggttcgtggccgcccacctgcccccctcatcccagaagatcgagttgaagggcttggctcccacctgtgcctacgtcttccagcctgaactgctggtcacgcgggtggtcgagatttccatcatggagccggacgtgccccttcctcagaccctcctctcccatcccagctacctcaaggtctttgtccccgattacacgcgggagcttctgctggagctgcgggactgcgtgtccaatgggagcctgggctgccccgtgcgtctcaccgtgggcccggtcaccctgcctagcaacttccagaaggtgctcacctgcaccggtgccccctggccctgccgcctgctgctgccctcaccgccctgggaccggtggctgcaagtgacagctgagagcctggtggggcccctcgggacagtggctttcagtgctgtagctgccctcacagcttgcaggccacggagcgtgaccgtccagccccttctgcagagcagccaaaaccagagcttcaatgcctcctctggtctgctgtccccgagccccgaccaccaggacctgggcaggagtggcagggtggaccgcagccccttctgcctcacaaactacccagtcacgcgggaggacatggacgtggtgtcggtgcacttccagcccctggacagggtctcggtgagggtgtgttcggacacgccctccgtgatgcggctgcgcctgaacaccggcatggacagcgggggttccctcaccatctccctgcgggccaacaagacagagatgcggaacgagaccgtcgtagtggcctgcgtgaatgctgcctcgcccttccttggcttcaatacttcgctcaactgcaccacagccttcttccagggctaccctttgtctctgagcgcctggtctcgcagggccaacctcatcatcccctacccagagacagacaactggtacctctccctgcagctcatgtgccctgagaatgctgaggactgtgagcaggctgtggtccacgtggagaccaccttgtacctggtgccctgtttgaacgattgtggaccctatggccagtgcctcctgctccgcagacacagctacctgtatgccagctgcagctgcaaggcaggctggcgtgggtggagctgcacggacaacagcacagcccagacggtggcccagcagagggcggccacactgctgctcacgctcagcaacctcatgttcctggcccccatcgccgtctcagtgcggcgattcttcctggtggaggcctccgtctacgcctacaccatgttcttctccacgttctaccacgcctgcgaccagcccggggaggcggtgctgtgcatcctcagctacgacacgctgcagtactgcgacttcttgggctccggggcggccatctgggtcaccatcctgtgcatggcacggctcaagacagtcctgaaatacgtgctgtttcttctgggtacactggtcatcgccatgtccttgcagctggaccgcaggggcatgtggaacatgctggggccctgcctctttgccttcgtgatcatggcctccatgtgggcttaccgctgcgggcaccggcgccagtgctaccccacctcgtggcagcgctgggccttctacctcctgcccggcgtctctatggcctctgtgggcatcgccatctacacctccatgatgactagcgacaactactactacacccacagcatctggcacatcctgctggccgggagcgcagccttgctgctgccgccacctgaccagcccgccgagccctgggcctgctcgcagaaattcccctgccactatcagatctgcaagaacgatcgggaggaactgtacgcagtgacgtgacactggcctggggacagctgctgctctgatgacctcttcagccaggagctgtatcgagggggaggcgcctggtccagccctggacagattgatttccagctgaataaattggcctagatacccaaaaa

SEQ ID NO: 74582 - DNA, 821 bp, Homo Sapiens
  misc_feature (33)..(33): n is a, c, g, or t
  misc_feature (58)..(58): n is a, c, g, or t
  misc_feature (136)..(136): n is a, c, g, or t
cacacagtgacacaccagaatcagcagcattcntatgcacaggagatagcagtgattntgtctggaatcaagacgtgatcagagttccagcgtggcagaagaacaaattggcccatattgcccagagaagagcttntcagagaaaggtacagacaagaagctagaaagagtggaaggagcagcagtcttgcaaggaagcagggcagagacacagcccatggcccctcactgccctgctggaagggctgatggagctccccgcagcatggttcctgcctgggtgacagaggctcctgtggccactttagaagtgcggtttactcctcatgccgagatggaccttgggcagctcagttcacaagatgttggtcaggcgtcatttaaatattttcagtcagcagaggaagcaaagcgtgccattgaggctgtgctgtcagcggatcctcggtctgtgtaccgccggaagctttgccaggaccgccttttctactttactgtagacatagcgcatgtcacttgctggtttggtgatggctttgcagaggtgctgaggatcaagccggcttctgagcctgttcatatgactggccctgtggggtccttggtgtctctagggtcttaaggagcctccctcatgtctttaaggtagcatcattgatctttggatgtggcttttggattttctgaacaagctaatgttgtgtcaagaagcaacactttgtgatctcatggctttgattgatttgggctgttcaaaatgtttatttgaaaaacgtatacattaataaacttaacaaagagatataaaatacagagaaatc

SEQ ID NO: 74583 - DNA, 1385 bp, Homo Sapiens
aacataggctaagtacgaggcctgggtgtcgaatcggcacgaggggagagcggaagcggaaggttgaatgcgtcgggtgggcacctcagcaaccagtagccatgcgcggcttggaggagccggggcctcggcctacagcgaccccgtgcggctgcgtgaagccggctctggagacagggaatcttttaactgagccagtcggctacttggaatcttgtttctcggccaagaatggtactccaagacagccatccatttgtagctattctcgagcctgtttgaggattagaaagaggatctttaataatcctgaacattccttgatgggcctagaacagttttctcatgtttggattttgtttgtttttcacaaaaacggtcatttgagctgtaaggcaaaagtgcagcctcctaggctgaatggtgcaaagactggagttttttccacaaggagccctcatcgtcccaatgcaataggactgaccctggccaagctggaaaaggtagaaggtggagctatatacctttctggaattgacatgatacatggcacacccgtactagacatcaagccctacatagctgagtatgactcaccgcaaaatgtgatggagcctttagcagactttaatttacagaataaccaacatacaccaaacactgtgtcccagtctgacagcaagactgacagctgtgaccagcgacagctctcagggtgtgatgagccacaaccccaccatagcactaagaggaaacctaaatgtcctgaagacagaacttcagaagaaaactacctgacacacagtgacacagccagaattcagcaagcatttcctatgcacagggagatagcagtggattttggtttggaatcaagacgtgatcagagttccagcgtggcagaagaacaaattggcccatattgcccagagaagagcttttcagagaaaggtacagacaagaagctagaaagagtggaaggagcagcagtcttgcaaggaagcagggcagagacacagcccatggcccctcactgccctgctggaagggctgatggagctccccgcagcatggttcctgcctgggtgacagaggctcctgtggccactttagaagtgcggtttactcctcatgccgagatggaccttgggcagctcagttcacaaggtatcttcagtttcttcattctgaatgagagatgaacttttactttgagatttagccaagtttggtatttgtgaaggcaggtatgtggagtgtttgtcagtatgactggtttttaggaaacaggtatgaaataatatttttgcagtaccatcatgtgatgacttttgttggacaactgtgtggtcagcacagttagttccaggctgtcagtaaagcat

SEQ ID NO: 74584 - DNA, 575 bp, Homo Sapiens
aaagaatagaatgaaataactatttcacttgcccaaaattttaaatattttttcatctaaacttgtattgtttcccatagcagaatgtcaatattcacagtacatttctgtaaagagcaaaccaatataatgttttgagtgttgaaaaaaattccagatttttgaagaattagacaactcttcatctaccttatttctagttcacacagttatctcaaattccactgaaactaatgggatactgtcttgtgtagatgccagttgagtttataatgtgacctagtaaagctgtcttttttgttgtgttgtatgagtgtcggatcatgcttttaggaatacttttattaaaatggtgtgcattcatgcaaaaggccaactggcttttgtgaacaatagatcttttctcccctttattttgttctcttgacacttttgtgaaaattacctagcctgataaaaacattttgtaaaaatttgtataatactgttataaaatatttataatcccagaaaatgttgtgttaaatcttgtgcaaaaacagtatattcagaataaaagtttatcatttaaagtc

SEQ ID NO: 74585 - DNA, 680 bp, Homo Sapiens
  misc_feature (155)..(217): n is a, c, g, or t
  misc_feature (586)..(596): n is a, c, g, or t
attggaaagcacactcagaagcttcatcaccaagattttgggagagtaaagctaagtatagttgatgtaacattgtagaagcagcataggaacaataagaacaataggtaaagctataattatggcttatatttagaaatgactgcatttgatannnnnnnnnnnnnnnnnnnnnnnnnnnnnnnnnnnnnnnnnnnnnnnnnnnnnnnnnnnnnnngatagatttgctctctagaaggaaacgtctttatttaggagggcaaaaattttggtcatagcattcacttttgctattccaatctacaactggaagatacataaaagtgctttgcattgaatttgggataacttcaaaaatcccatggttgttgttagggatagtactaagcatttcagttccaggagaataaaagaaattcctatttgaaatgaattcctcatttggaggaaaaaaagcatgcattctagcacaacaagatgaaattatggaatacaaaagtggctccttcccatgtgcagtccctgtccccccccgccagtcctccacacccaaactgtttctgattggcttttagctttttgttgnnnnnnnnnnnccttctaacacttgtatttggaggctcttctgtgattttgagaagtatactcttgagtgtttaataaagtttttttccaaaagt

SEQ ID NO: 74586 - DNA, 1523 bp, Homo Sapiens
  misc_feature (1188)..(1188): n is a, c, g, or t
  misc_feature (1205)..(1205): n is a, c, g, or t
  misc_feature (1229)..(1229): n is a, c, g, or t
  misc_feature (1330)..(1386): n is a, c, g, or t
cagtcacgtcttttggaaaacgagaaagtaaagtgcctgctgatctcttaaagcgggccttcgtgaggatgagtacaagccctgaggctttcctggcgctccgctcccacttcgccagctctcacgctctgatatgcatcagccactggatcctcgggattggagacagacatctgaacaactttatggtggccatggagactggcggcgtgatcgggatcgactttgggcatgcgtttggatccgctacacagtttctgccagtccctgagttgatgccttttcggctaactcgccagtttatcaatctgatgttaccaatgaaagaaacgggccttatgtacagcatcatggtacacgcactccgggccttccgctcagaccctggcctgctcaccaacaccatggatgtgtttgtcaaggagccctcctttgattggaaaaattttgaacagaaaatgctgaaaaaaggagggtcatggattcaagaaataaatgttgctgaaaaaaattggtacccccgacagaaaatatgttacgctaagagaaagttagcaggtgccaatccagcagtcattacttgtgatgagctactcctgggtcatgagaaggcccctgccttcagagactatgtggctgtggcacgaggaagcaaagatcacaacattcgtgcccaagaaccagagagtgggctttcagaagagactcaagtgaagtgcctgatggaccaggcaacagaccccaacatccttggcagaacctgggaaggatgggagccctggatgtgaggtctgtgggagtctgcagatagaaagcattacattgtttaaagaatctactatactttggttggcagcattccatgagctgattttcctgaaacactaaagagaaatgtcttttgtgctacagtttcgtagcatgagtttaaatcaagattatgatgagtaaatgtgtatgggttaaatcaaagataaggttatagtaacatcaaagattaggtgaggtttatagaaagatagatatccaggcttaccaaagtattaagtcaagaatataatatgtgatcagctttcaaagcatttacaagtgctgcaagttagtgaaacagctgtctccgtaaatggaggaaatgtggggaagccttggaatgcccttctggttctggcacattggaaaacacactcnagaaggcttcatcaccnaagatttttgggaagagtaaaacntaagtataagttgatgtaacattgtagaagcagcataggaacaataagaacaataggtaaagctataattatggcttatatttagaaatgactgcatttgnnnnnnnnnnnnnnnnnnnnnnnnnnnnnnnnnnnnnnnnnnnnnnnnnnnnnnnnngacattttatgatagatttgctctctaaaaagaaacgtctttatttaggagggccaaaattttcggtcataggcatccacttttggctattccaatcttacaactgggaagatacataaaaagtgcctttgcattta

SEQ ID NO: 74587 - DNA, 1087 bp, Homo Sapiens
  misc_feature (86)..(130): n is a, c, g, or t
  misc_feature (235)..(272): n is a, c, g, or t
ctaggacctatgaacagtgtgtacaaaaagcaggctggtacggtcggaattcccgggatatcgtcgaccacgcgtcgtagagattnnnnnnnnnnnnnnnnnnnnnnnnnnnnnnnnnnnnnnnnnnnnngtcaccctgctgattgccttcatctgtgtgcggagctccctgtggaccaactacagcgcctacagctactttgaagtggtcaccatttgcgacttgataatgatnnnnnnnnnnnnnnnnnnnnnnnnnnnnnnnnnnnnnnggtgctcacctgtatcagctcgcccctgtcggaacttctgcactatttaatcggtaccctgctcctcctcatcgcctccattgtggcagcttccaagagttacaaccagagcggactggtagccggagcgatctttggtttcatggccaccttcctctgcatggcaagcatatggctgtcctataagatctcgtgtgtaacccagtccacagatgcagccgtctgatgaggccacaacccctaggcccctcaggagctttgcagagaggaggacgtgtactccaggcgaggcctctggacctgtgttcctgtgccaaagtcctgtcaggctggtgggcaccaggaaaggcctgcaccctcttcctgctctcccaggaagccagctccctgagctcctgagccagccggaaactcttcctccagccttccggggagaacatccctcccattctgggaaaggaaagcagcctccagggaaatgttttctgccttcctgcttctagaaccacctcaggtactgatgaaccccacttagcacagctgaaggggtttgtgaatactcccgcctaaatcccttctacttcactcctcaggggagtgaagtgccttaagaaacaaagccctgtcctaatttatctagcttgtcagtccggtcttagagataccctctttcctgaagtgaggcgtgcctgtagaaacactatgtggtcagcctgtccccaaggagatcttgtgtctcctctccatctctgcctttgttaccagtgtgcatgtgtttgtgtgttttttaataaaatattgactcggaaaaaaaa

SEQ ID NO: 74588 - DNA, 1236 bp, Homo Sapiens
  misc_feature (691)..(751): n is a, c, g, or t
ggtggctgtggcacgaggaagcaaagatcacaacattcgtgcccaagaaccagagagtgggctttcagaagagactcaagtgaagtgcctgatggaccaggcaacagaccccaacatccttggcagaacctgggaaggatgggagccctggatgtgaggtctgtgggagtctgcagatagaaagcattacattgtttaaagaatctactatactttggttggcagcattccatgagctgattttcctgaaacactaaagagaaatgtcttttgtgctacagtttcgtagcatgagtttaaatcaagattatgatgagtaaatgtgtatgggttaaatcaaagataaggttatagtaacatcaaagattaggtgaggtttatagaaagatagatatccaggcttaccaaagtattaagtcaagaatataatatgtgatcagctttcaaagcattttaccaagtgctgcaaggttactgaaacagctgtctccgtaaatggaggaaatgtggggaagccttggaatgcccttctggttctggcacattggaaagcacactcagaaggcttcatcaccaagattttgggagagtaaagctaagtatagttgatgtaacattgtagaagcagcataggaacaataagaacaataggtaaagctataattatggcttatatttagaaatgactgcnnnnnnnnnnnnnnnnnnnnnnnnnnnnnnnnnnnnnnnnnnnnnnnnnnnnnnnnnnnnngacattttatgatagatttgctctctagaaggaaacgtctttatttaggagggcaaaaatttggtcatagcattcacttttgctattccaatctacaactggaagatacataaaagtgctttgcattgaatttgggataacttcaaaaatcccatggttgttgttagggatagtactaagcatttcagttccaggagaataacaagaaattcctatttgaaatgaatttcctcattttggaggaaaaaaagcatgcatttctagcacaaccaagatgaacttatgcgatacaaaagtggtccttcccatgtgcagtccctgtcccccccggcagttctcaaaaccaaatggttctgatgggtttagcttttgtggtttttttcccttctaaaacttgtattggggggccctctggattggaaagtaacctggggccaaaaagttttccaaaaacaaaaggcggggccaaaaatcctggggccaaa

SEQ ID NO: 74589 - DNA, 711 bp, Homo Sapiens
  misc_feature (79)..(89): n is a, c, g, or t
ggaaaaaaactttattaaacactcaagagtatacttctcaaaatcacagaagagcctccaaatacaagtgttagaaggnnnnnnnnnnncaacaaaaagctaaaagccaatcagaaacagtttgggtgtggaggactggcggggggggacagggactgcacatgggaaggagccacttttgtattccataatttcatcttgttgtgctagaatgcatgctttttttcctccaaatgaggaattcatttcaaataggaatttcttttattctcctggaactgaaatgcttagtactatccctaacaacaaccatgggatttttgaagttatcccaaattcaatgcaaagcacttttatgtatcttccagttgtagattggaatagcaaaagtgaatgctatgaccaaaatttttgccctcctaaataaagacgtttccttctagagagcaaatctatcataaaatgtcaaaactagaagagaataaaatgaaaggaaaaaacctagaaaaatatcctaaaatatcaaatgcagtcatttctaaatataagccataattatagctttacctattgttcttattgttcctatgctgcttctacaatgttacatcaactatacttagctttactctcccaaaatcttggtgatgaagccttctgagtgtgctttccaatgtgccagaaccacaaatatcggggtgccgagcgacg

SEQ ID NO: 74590 - DNA, 532 bp, Homo Sapiens
  misc_feature (343)..(404): n is a, c, g, or t
cgcccccgaattagtggtctggcggggggggacagggactgcacatgggaaggagccacttttgtattccataatttcatcttgttgtgctagaatgcatgctttttttcctccaaatgaggaattcatttcaaataggaatttcttttattctcctggaactgaaatgcttagtactatccctaacaacaaccatgggatttttgaagttatcccaaattcaatgcaaagcacttttatgtatcttccagttgtagattggaatagcaaaagtgaatgctatgaccaaaatttttgccctcctaaataaagacgtttccttctagagagcaaatctatcatnnnnnnnnnnnnnnnnnnnnnnnnnnnnnnnnnnnnnnnnnnnnnnnnnnnnnnnnnnnnnnatcaaatgcagtcatttctaaatataagccataattatagctttacctattgttcttattgttcctatgctgcttctacaatgtcgcatcaactatacttagctttactctcccaaatcttggttatg

SEQ ID NO: 74591 - DNA, 901 bp, Homo Sapiens
gtgagaggcaccaacagaggagaagaggccacgtggacctgcactgttctctactccaaatatgatgcccagaggttagctgccgtggttggtgtggagcgggcggcacagatgctacagtccaacaagaatgtccacctcttcattactggagaaaaatgaaattttgttgggcaggaagtggtatttggcatgatacataatgtttgattctatgccatttggacccaattctgattacttacagaagaaggactgatacaaagaaagtgcatgaggcaatgtcagtattatctgacatctttcttttcaggtcatgtgtccctgaaaagttaaatgtaaaccagattttggtaaatcccatctttcagaagtgaagagggggctagaaggactctgagaagttggtagaagaaaactcccacttgtgaatatttttgtgagacataaattcttttattacgatttacctctaatttattacacttagtaaattcttccagatttttctatttgtttgacacttccttaaagtaaggaatacacattgcttgcgagaactggttatgagacattggaatacttcttgctgctacatgtcatcttaattttggatggcatgggttttgtaaaacttattctgccccagccaaacttttttgaaaccttaaatagtctaccttaattcagcctagaagagtacattgatttactgatcttttttcatattcataatactaaatgttttagttttgttcaaatatatgcttaaaatcacgttatttaaaaaacacatcagctctgtctcaagaagtaattttgttgaaactccatgttaaaatatccatcttcaacagtagtgtcttcataataactagtcattttttcagtcataaacccc

SEQ ID NO: 74592 - DNA, 670 bp, Homo Sapiens
tgtacttcccttatgtatcagtgtcctttccagagcaaccagaaggaggtataccaggatttattttgagctcagccccaactctttatcaagcaacattcttgttaactatatgtgaaacattttttcttctgaagattcttaaaaattgaatgtggctgaagttgaacatgggagcttattgctaatttagagataggaaactgaagcataaagaattaatgacttactttaattactggaattcttctgcaacatttgacaaaactaaccttgaataaggcccactgtaatacgtagctctcttaaatataacacttaggactagaagattagaaactaccaatcccaactacgtaataggaaaatgtaggatcaaaaggcccatgtatataagtactgaccactgggccataatgttgcttctcaggctatatgcagtcctttagtcagaagtcaataggcctatttattaatattttacagaccatattacctggattaccagggactatctttgctgcagagatcaagggttaagatctatgggaagatacttatttttctgaggtccttatgtcctgtcatataattaaagactcaagagaatttatgtgaaatgctttctgtatgcccaaatctttagattaaaattatatagctgctcctg

SEQ ID NO: 74593 - DNA, 393 bp, Homo Sapiens
caaattctagatctctgctaactttagtaaatgaacactaaagtggtgagctttgataatgcattttgtggatacaaaatcatcgcctcatcactttctagaatgaaaggctgggggcattgctcaccttttgcgtgaagaaaagacctgtcccttagagccagtttttgcttaaggggaggacagaccgtcgtcacccagtggaccacgtgaatgaatggatgcagtgcatgctttagaagcaccgcatacctccttttacaggtacagagtaagtggtctggctactgagggaaagagtcatgatttgaatccgagtcttctgtaagacaatgacttcatgaaggtgaaaaatcagttttatggttattaaagtaaaaatttaccttgggt

SEQ ID NO: 74594 - DNA, 2953 bp, Homo Sapiens
  misc_feature (209)..(210): n is a, c, g, or t
  misc_feature (216)..(795): n is a, c, g, or t
  misc_feature (826)..(845): n is a, c, g, or t
  misc_feature (988)..(1003): n is a, c, g, or t
cgtgtgcacatcagattgtaccgcaacactcgttgtactgtacatgtgtgcatgcgtagtgtttaccggtgatcagcgtagtaccgtagccagcgtcgttgacggggtgtcacacacccagttgagcgacgcctacccgactgagtactacagctgagtatgagaagcccacgctccgaggggagaaagcggacagtatccgtagcgcnnaggtcnnnnnnnnnnnnnnnnnnnnnnnnnnnnnnnnnnnnnnnnnnnnnnnnnnnnnnnnnnnnnnnnnnnnnnnnnnnnnnnnnnnnnnnnnnnnnnnnnnnnnnnnnnnnnnnnnnnnnnnnnnnnnnnnnnnnnnnnnnnnnnnnnnnnnnnnnnnnnnnnnnnnnnnnnnnnnnnnnnnnnnnnnnnnnnnnnnnnnnnnnnnnnnnnnnnnnnnnnnnnnnnnnnnnnnnnnnnnnnnnnnnnnnnnnnnnnnnnnnnnnnnnnnnnnnnnnnnnnnnnnnnnnnnnnnnnnnnnnnnnnnnnnnnnnnnnnnnnnnnnnnnnnnnnnnnnnnnnnnnnnnnnnnnnnnnnnnnnnnnnnnnnnnnnnnnnnnnnnnnnnnnnnnnnnnnnnnnnnnnnnnnnnnnnnnnnnnnnnnnnnnnnnnnnnnnnnnnnnnnnnnnnnnnnnnnnnnnnnnnnnnnnnnnnnnnnnnnnnnnnnnnnnnnnnnnnnnnnnnnnnnnnnnnnnnnnnnnnnnnnnnnnnnnnnnnnnnnnnnnnnnnnnnnnnnnnnnnnnnnnnnnnnnnnnnnnnnnnnnnnaagaattcggcacgaggcgcggctgtaggcnnnnnnnnnnnnnnnnnnnnaacttttaacaaacttttattaacaaacctcgcgtagagccaactctaacccgactaacagcaaaaacagcattgctaacaagatcaaggatggaggtgcagacccaataaagaccgtctcttaaaaaaaggactgggaaaannnnnnnnnnnnnnnnctgcatgagtacttcttaaaaaactaaaactttccagtgttgcaggaaaaaatatcccaaagtgatttcagtcggttaaaaaaaacagtacttggcagtctgtgctgccttaaaaaccccaactggacataaccctaggagaaaatcaccccaccccataaagacaaaattcccttttctcctcttccttgttcaaattccactgcttattccaccaacacccaaggaataacaagacccagcttacttctctcggtctcttatctgataaagctcacagcaatcttaacctctactacaatcaggaaattgagccctaatttctgggccagattctggaaagttgcaaaacatccttatgctgcgaggggcctgaggactccttcaaagatcaagggggcagtggaactggcagagactggcatgcctgccctgcaaggctgagacaaggggacctttctaagcaaaaaacaccccaaacatctgtcactgaaagtctaaccaggcaaaaccaaggagcagcaggcgccaaactagggctgtgcctgaaaggtgcacatctccccctgtttcaccataaagggcaagggagataaagagagccaactgagtatttgacctcatctgtcttctgcatattttaggccgaagccatgttgcagagaaagacatttggtcaaagggtagcctttgttgtttgtggttggatacagctgccattcctggacagcctggttcatggctgctttctggaagcttttcccccttatgcagagtacttaagaattaataggaaaattttcagtggaacttcgtaactggcaaatacgttaacagcagcttctcaaaggccacccctcagctgatgatcacagctccttccagtcaatgggcttcttgccagacttctgcagcagctcattggtctttgaaaagtgtctacatccaaagaaccctctatacactgacaaaggggagggatgagccgtctgtagtacatggtgccgcttcctatcaatggcactgcccttcttctgagcataagagccccagagcaagaaaacaaggccattcgagttctgatttagccaggacacaactgcatcagtgaactgctcccagcctcgctccttatgagagttggcttgatgggcacgaaccgtgaggacagcgttgagaaggagaacaccttgcttggcccacccagataaatctccatggccaggatgaacaaaatcctctatgtctgtagacaactctttataaatgttctccaaactgggcggaggcggaacaggcctttgaacactaaagcagagcccgtgagcttgattaggtccatgatatggatcctgtcccaggatgacaaccttcacatcttttatgtcacacatctgggtccaggtgaagacttggtgtgggggtggataaacagtgtaatgctttctttcttctgcaacaaatcccattagcttgataaaatacggtttcccgaactccccgctgaggtgcttcttccagctctctccaaagcccacgggcacgttgcgggccgcgagtctgagcaggccgcggccttgttcctctggatccggtccaactgctcggcactcagcggcgaggagggcggcgtcccaggctcctcctgcccagccggggccttcttggctgggatggcctgccaagtggtccccgcagaggcggctcaagagctgcagcggccccttcccaggcgtccgcagcttccggcccaacccccacggcccaaggcagaagacgcccatttgtggaacaggtcccagcaaaagcggacagtaagagcccagggctgggcccggtccgggaattgggaattaggttctaaactggagcggggagacgggctgggaggcgcactatggcgtcccgcctcgtgccgaatttaacaccccaggcctcgtacctagctta

SEQ ID NO: 74595 - DNA, 795 bp, Homo Sapiens
gctaggtagctgaggcctgggtgttgaatctggcacgaggctcgccggttcccgtgtgtggctgcgcgttcgctgcctcctcagctccatggatgatctggccagaagacgctctactcctttttctcccccagccccgccatggaatgcgacacgcccccatgccccgatgccggcctgtccagggtgacctggctgtggctggtgtgtgcctgagtgaaagctggagatgctgtgctggtgccatcccagccaaggaatgtgccccgggctgggcatggagtgagcctggtgactgcctgccctcctcgcctgctgagtgcctgagcagttggaccggatccagatggaacaatggcctgcgggcctgctcagactcgcggcccgcaacgtgcccgtgggctttggaagatgagcctggaaggaagcaacctcatgcgtgggagttcgggaaaccgtattttatcaagctaattgggatttgttgcagaagaaagaaagcattacactgtttatccacccccacaccaagtcttcacctggacccagatgtgtgacataaaagatgtgaaggttgtcatcctgggacaggatccatatcatggacctaatcaagctcacgggctctgctttagtgtacaaaggcctgttccgcctccagccagtttggaggaacatttataaagagttgtctacagacatagagggattttgtcatccttggccatggagattatctggggtggccagcaaggtgttctctttctcaagctgtctccacgttcggggccataa

SEQ ID NO: 74596 - DNA, 1218 bp, Homo Sapiens
  misc_feature (520)..(529): n is a, c, g, or t
ctggtatcggtccggatttcccgggatatcgtcgacccacgcgtccgcccacgcgtccgcaatgaggagttctgcagtttgcttttaataagtaaagtgagacttgggtggtgggaagaaggaaggtgggaagaaggaattagacactctgcctgccactctgcgtgtgtgtgctctcgcgcacgtgctgtctatatggaagccactcccttttctttcctttgaaactggtaaggttaaaataggggagaaatcctacatgttggaatgatagctttttggaaaatttaagaaactctccaggctctccatcttgatttatgcttgagttgttatgtgccatatttgctttgaactctgattatcagaagttttactaaaactttgaaataattcactttcatctgctttctagattttgtacatctcagtccataaagcaaagcttgttgatagtgtagttttctaaacgctgcaaatttgcagcctttaccactacaaagaagtttggatgagggannnnnnnnnnctttgtcaaaatagttcctgtttctgtagaaatttcatttttagattaaactgtgatggatgagctatcataattcaagtatacatttcttttttctatcagatattcattgtcatgcagtagtagtaaaaacatcaaagatgcagcaagcttattaagtattattttctaaaagaaataggaggcattttcatctttattattgtacttttggttatgcaaacactttgataatataaacagttatgtcccctataaatctggtcagcaacctcttttgattttgttgggtaagttaaatagtctgtagtaggtagagtactgggtacaagtggtccaaactaagataagagactaaaataaaatgctaaatcttaaaagaaactgggtttatgcactaaacgttttgtgccttggtctaatattaacatgatgtatgtgtaaactgacaaaaacaacagcgaatacagtgaaacatcccccccgtgtgttggaacttcgagggaccatttattttccccaattcacttccccgatagtggcttaaccgtgtcttcccacaacaacagtccggacgcagctcttatactttaccttgggccaatacattcacgcacgggtgggagtccatctcatacgagattccggactttaataggggaacccaagcaggttattcccttatacag

SEQ ID NO: 74597 - DNA, 713 bp, Homo Sapiens
accaggtcactgacgagagactccagtgaatcgctttccctctgcattcctctccttgtacagactagagggtcacattgtgtaaagcctaacatagccctgcaaagagatctggccccagcagtgaacacaaactcagtaattctctttagagtgaggtggtaatcagtgcctcttggtttcaaccgtggtcctagtggctacttatggaagaataggaatagtttcacaacatcctgtaacattggcttacctgtatattatatgccacccgtaaccataaaaacaccaggatttaggttccttgaaggtaatgactatgggtccctctctgtggaagaatactgaatagaagagagaaatcactcaatatgtggaatgactgatatggtttggctgtgttcccactcaaatctcatcttgaattgtagttccaataatccccacatgtcatgggaggaacccagtgggaggtacttgaatcattgcggtggtttcccctgtgctattctcatgatagtgagtaaattctcacataatctgatagttttataaaggagcttcccccttcactcagctctcattcttctccttcctgccactatgtaagaaagatgtgtttgtttcccctttggtcatgattgtaagtatcctgagaccttcccagccatgcaaaactgtagatcaataaaacctctttcctttataaatta

SEQ ID NO: 74598 - DNA, 1039 bp, Homo Sapiens
  misc_feature (77)..(77): n is a, c, g, or t
  misc_feature (215)..(215): n is a, c, g, or t
  misc_feature (217)..(217): n is a, c, g, or t
  misc_feature (245)..(246): n is a, c, g, or t
  misc_feature (250)..(250): n is a, c, g, or t
  misc_feature (253)..(253): n is a, c, g, or t
  misc_feature (259)..(259): n is a, c, g, or t
  misc_feature (277)..(277): n is a, c, g, or t
  misc_feature (288)..(288): n is a, c, g, or t
  misc_feature (296)..(296): n is a, c, g, or t
ggtacaggttgtgtcaccaacacctggatgttggattttgcaaccttaacatgcagttacttggaacaaaatgactntatctgaatagtctgttgtaaatcgtttgaccgatattttcagacagcacagaggaggacactttttcccccgagttgccctcttgatagaaaaaacttgactgtgtagattcctagtatcactgggtttctgtcaantnagattaatatgtaaatgctttcagtgtnnggtntgncctgantgtgcaaatacaattccnaccttctgganaggtagtntgctgtggaggaaataatgtactagatcatggtcacagaaaaaaccaactatgatttatggttgtgttttcagaattcaaccattaaagattaatgtttatttaaacgaacacattcctgcattcaggatgtgaggccatttaataaaaagggcacaaagcctgtcagagttttcaacggtgcttatagctgccagctggattccaaacaggtaccccattgtctctgagctaatgtttatatttttccattcaggcaccgaaatagttaatatttaaaataagtcttcaaaagaaaacataagagattattgagttcttgggactggatcctttatttcataagttcagatcatcttaaatgaaaatgccatgattatctgcagttaagtagatgacagctattctacatcagacttgatttttgtcagctaattacataattggtaagctataattgaaaccttatggcttaaaattccttaactcctttttgattcatgtttgtagtcatgttgtcaacagaggcaaagttaagcttgatgatggttaaaatcggtttgatagcaccatgggacatttttctaacaaaaataaatgcatgaagagacatagccttttagttttgctaattgtgaaatggaaatgctttacaggaagtaaatgcaaattacttttaagtgtgctttaaagaaaaatattttccccacaagagaaatttaaataaagaattttatttgttta

SEQ ID NO: 74599 - DNA, 483 bp, Homo Sapiens
  misc_feature (77)..(160): n is a, c, g, or t
  misc_feature (179)..(225): n is a, c, g, or t
gatccagactaaaaccaaactttcctgagttcctagactttcaaacactaagagcctcccatgtcacctttaaagannnnnnnnnnnnnnnnnnnnnnnnnnnnnnnnnnnnnnnnnnnnnnnnnnnnnnnnnnnnnnnnnnnnnnnnnnnnnnnnnnnnctgtatgtgaccacagatnnnnnnnnnnnnnnnnnnnnnnnnnnnnnnnnnnnnnnnnnnnnnnnggaacaaaaaaggctttacctggctcctctccctagttcacattctcccaaccttccaggctgtgctaaaatccacttcccctggaccatccccggaagagcccaaatgcaggtgatagctcctctcaggatttacattgcattttttgttgttactccctgattgtaaaagtgctatgtgcattgtggaaaatgtaggagatacacaaaagcacaaagaagaaaaattaaataaagatctgtaatttcaccaccaag

SEQ ID NO: 74600 - DNA, 756 bp, Homo Sapiens
gggaggcggcgaggagagcggtgccttgcagggatgctgcgggcgggagcaccaaccggggacttaccccgggcgggagaagtccacaccgggaccaccatcatggcagtggagtttgacgggggcgttgtgatgggttctgattcccgagtgtctgcaggcgaggcggtggtgaaccgagtgtttgacaagctgtccccgctgcacgagcgcatctactgtgcactctctggttcagctgctgatgcccaagccgtggccgacatggccgcctaccagctggagctccatgggatagaactggaggaacctccacttgttttggctgctgcaaatgtggtgagaaatatcagctataaatatcgagaggacttgtctgcacatctcatggtagctggctgggaccaacgtgaaggaggtcaggtatatggaaccctgggaggaatgctgactcgacagccttttgccattggtggctccggcagcacctttatctatggttatgtggatgcagcatataagccaggcatgtctcccgaggagtgcaggcgcttcaccacagacgctattgctctggccatgagccgggatggctcaagcgggggtgtcatctacctggtcactattacagctgccggtgtggaccatcgagtcatcttgggcaatgaactgccaaaattctatgatgagtgaaccttccccagacttctctttcttattttgtaataaactctctagggccaaaaaaacgaaacc

SEQ ID NO: 74601 - DNA, 633 bp, Homo Sapiens
  misc_feature (366)..(398): n is a, c, g, or t
gaaacttgaaatggctttgctttggctgtcgtcttctgccgtgtgccagatgagcttgtgatctgggaagccggggcacccccgttttgtttctctgggcggttgtggcagctgaaggcggacgttgtttcctaaccataggtggaacgaggagacgggagcgagtgggctctccaccagcacatcactatgcatctgttccaggaaagaagaaaagcgagcgaggaagacggaaaagactgcctgccttggaggggtcacatgagggagacctgtgcctgatttcattaggaaatccattctgttattttttggtgctgttggctactttatcaaaaaacccttcaatagcatccttaagatttnnnnnnnnnnnnnnnnnnnnnnnnnnnnnnnnngtgatggaagccgtaagtgcttctttgtcatcgacgtgcaatctttctaacattccatctccatctcaccgcttcttgtttgacaccttcacaagtcagcattaatctttcttttaaaacttgtttcatttatgatcatgtagagagccactaggaggcctgcagttatttttgaatgtgaaaatgcatttgcgttcatcttgtctattttttctcttcatgccgtaacaaaaag

SEQ ID NO: 74602 - DNA, 1025 bp, Homo Sapiens
  misc_feature (329)..(351): n is a, c, g, or t
  misc_feature (413)..(430): n is a, c, g, or t
aaccgctatggtgacactatagaaccagtttgtacaacaaaagcaggctggtaccggtccggaattcccgggatatcgtcgacccacgcgtccgaaaaagtgatggaagccgtaagtgcttctttgtcatcgacgtgcaatctttctaacattccatctccatctcaccgcttcttgtttgacaccttcacaagtcagcattaatctttcttttaaaacttgtttcatttatgatcatgtagagagccactaggaggcctgcagttatttttgaatgtgaaaatgcatttgcgttcatcttgtctattttttctcttcatgttgtaacnnnnnnnnnnnnnnnnnnnnnnntcccatcccttttgtacatatgcctgtaaattgttttaaatacttgagcctttttctcggtnnnnnnnnnnnnnnnnnntgagaagacaagatgaagaaaagccttacatttcagtttcttcatcggttggattggatgcttacagggtttttcttgtaacatttataagtgctgcttacatcactgaacaacaacaaaaaaataataatggagtagctgttgcccttctccggttgtgtgtacagtatgtgtggaataaaaaagggaaactgttttcacaagctgttctttgtttcataattggattcatcaatcccgtagctacccatattgcactgagcttgccagtggtgactgccaggaacgtcctatgatccactttgttggttgttgttgcagaagactgaactgttttggaatatttaacaattacagaaacagtcaagtgttttccaatgtggttgtccggtttctatggccttgctgtgtactttccctctttttgacagtaaacttctgcctatggcttacagtttgacatttaatttattagcgctgctctgcacccctcccttgggagggagacttcatgtggtttattgcgagttttttgtttacttttcaggtttgtactacaaggtttaataataaaaacaaagttttttggaaaaaa

SEQ ID NO: 74603 - DNA, 886 bp, Homo Sapiens
  misc_feature (638)..(660): n is a, c, g, or t
ccttcctactggggatggaatttatcgagtggccaaactgatcatccagcagtgtcagcagcttcattgtctccgagtcctctcatttttcaagactttgaatgatgacagcgtggtggaaattgccaaagtagcaatcagtggaggtttccagaaacttgagaacctaaagctttcaatcaatcacaagattacagaggaaggatacagaaatttctttcaagcactggacaacatgccaaacttgcaggagttggacatctccaggcatttcacagagtgtatcaaagctcaggccacaacagtcaagtctttgagtcaatgtgtgttacgactaccaaggctcattagactgaacatgttaagttggctcttggatgcagatgatattgcattgcttaatgtcatgaaagaaagacatcctcaatctaagtacttaactattctccagaaatggatactgccgttctctccaatcattcagaaataaaagattcagctaaaaactgctgaatcaataatttgtcttggggcatattgaggatgtaaaaaaagttgttgattaatgctaaaaaccaaattatccaaaattattttattaaatattgcatacaaaagaaaatgtgtaaggcttgctnnnnnnnnnnnnnnnnnnnnnnncagtcctgcatactcaccaccaagctcaagaaataaatcatcaccaatacctttgaggtccctgagtaatccaccccagctaaaggcaaacccttcaatcaagtttatacagcaaaccctccattgtccatggtcaacagggaaggggttggggacaggtctgccaatctatctaaaagccacaatatggaagaagtattcaatttatataataaatggctaactt

SEQ ID NO: 74604 - DNA, 1362 bp, Homo Sapiens
tcccgggatgccgcgaactgcccctccccgccccgcctcccggcgcgggtggccgaggcgtagcgctgcgacccccgcacccctgcgaacatggcgctgcgagtggtgcggagcgtgcgggccctgctctgcaccctgcgcgcggtcccgttacccgccgcgccctgcccgccgaggccctggcagctgggggtgggcgccgtccgtacgctgcgcactggacccgctctgctctcggtgcgtaaattcacagagaaacacgaatgggtaacaacagaaaatggcattggaacagtgggaatcagcaattttgcacaggaagcgttgggagatgttgtttattgtagtctccctgaagttgggacaaaattgaacaaacaagatgagtttggtgctttggaaagtgtgaaagctgctagtgaactctattctcctttatcaggagaagtaactgaaattaatgaagctcttgcagaaaatccaggacttgtaaacaaatcttgttatgaagatggttggctgatcaagatgacactgagtaacccttcagaactagatgaacttatgagtgaagaagcatatgagaaatacataaaatctattgaggagtgaaaatggaactcctaaataaactagtatgaaataacgcaagccagcagagttgtcttaaattagtggtggatagaagacttagaatagaaacttttagtattaccgatggggaaaaacaaactactgttaacactgctaatgaaagaaaatgccctttaactttctaatgattatagataaatataatatgcgtctttttcacaatatcctatgatttttagactaggctctagtgttcagaattcatgaaattatccatggtaaaaactagttataaaaattacataattcaaagataacattgttattcttaagccttatataatattgtaacttgcatgtatccatacctggatttgggatgaaatacttaatgatctttccattggaaataactggaagtgaagaggttttgttgcttgtacagtgtcagatgaggaacaccactatcttaattttgcgatacactgcatttgctggtgctatttttatacagtgaagcaacagctttgcagcaaaataataaaatacttcttcgttaatcatgtttgttttgatgttaatatttcatttagtaactctgctagtatttgtgaaagtgctaactttaacttacggaaagttactttttaaaaggaaatttaagccagaacaatgcaaagctccaagaaaatgttttctttagtcacaaatctggtttttcttaagccaagatctgtcacctttaacataataaaaaataaatcacca

SEQ ID NO: 74605 - DNA, 500 bp, Homo Sapiens
caaacagacataacttatcgaagacatggccagcatccggttgatatgctctagagaaaaatggcagttcccatagagttcaggagagacacatcgacccagtgacaaaaatgtgcgtttcctaccttcagggagtatacgaatgcactagaaagtgatgtggagcaaacatctttcaaatggaaggaagggatagggaaaggaagactgttagaggctcttttgaatgttagaggcaacataaaacatatttggatgtgtattctaaataaaatgcaaatgtcaagaaggatgtcagctgtgagtgggactcagagaaagagaaacgttttggactacagaggcctgcagtacaagtggatctacaattttgtttagggaatccaatgcctcaggtatctatgtgaggcagaattttcctatggagccagcggcaaggctccagaggagaaatacagtacaagccactttattttggagtaaaagcctgttgtacaaaa

SEQ ID NO: 74606 - DNA, 381 bp, Homo Sapiens
  misc_feature (285)..(293): n is a, c, g, or t
caaagaaattagcttttatttgagactacttttccccacatgtatcttttaagaattctatgctatgtgataacctgcttatccactgtcccaataccaaaatttctaacagcgaattatacaactgctctaggtaataaataagggttgtccttcactgattaagggaataaacttcaataaacttaacaacaacaaaaaaaatcacactttagtttttaagttttaacagatgtatttcaaatacagcatgttttacaggagttcacaagcttttcatctctnnnnnnnnnctttcaactacctgactgttccattccaccccagacaaacctgacatgactgaactacttcatgtgttactttcccaaaaataaagtt

SEQ ID NO: 74607 - DNA, 727 bp, Homo Sapiens
gcgatcaaggagacggcccatcaccatcaaggacgacaaggcaacctcaaccgctgcatcgcagacgtgtctcgctcttcatcacggtcatggacaagctgcgcctggagatccgcgccatggatgaggtgcgggtattgggctggcagggggcctaggcaggaggggatggagccggcgtcggggtcccagccgctgtgtgtgtttcagatccagcccgacctgcgagagctgatggagaccatgcaccgcatgagccacctcccacccgactttgagggccgccagacggtcagccagtggtgggtgtccctcccagccaggcagagccccgcagtgcccgagaccctcccagccaggcggagccccgcagtgcccctgaggccctcagcccccacatgccctgtgctgcactcccaggctgcagaccctgagcggcatgtcggcgtcagatgagctggacgactcacaggtgcgtcagatgctgttcgacctggagtcagcctacaacgccttcaaccgcttcctgcatgcctgagcccggggcactagcccttgcacagaagggcagagtctgaggcgatggctcctggtcccctgtccgccacacaggccgtggtcatccacacaactcactgtctgcagctgcctgtctggtgtctgtctttggtgtcagaactttgggggccgggcccctcccccacaataaagatgctctccgaccttc

SEQ ID NO: 74608 - DNA, 946 bp, Homo Sapiens
taggctaggtacgaggcctgggtgttgaattcggcacgaggcctcgtgccgggtctcagtgctgtgccccccccagagcctagaggatgtttcatgggatcccagccacgccgggcataggagcccctgggaacaagccggagctgtatgaggaagtgaagttgtacaagaacgcccgggagagggagaagtacgacaacatggcagagctgtttgcggtggtgaagacaatgcaagccctggagaaggcctacatcaaggactgtgtctcccccagcgagtacactgcagcctgctcccggctcctggtccaatacaaagctgccttcaggcaggtccagggctcagaaatcagctctattgacgaattctgccgcaagttccgcctggactgcccgctggccatggagcggatcaaggaggaccggcccatcaccatcaaggacgacaagggcaacctcaaccgctgcatcgcagacgtggtctcgctcttcatcacggtcatggacaagctgcgcctggagatccgcgccatggatgagatccagcccgacctgcgagagctgatggagaccatgcaccgcatgagccacctcccacccgactttgagggccgccagacggtcagccagtggctgcagaccctgagcggcatgtcggcgtcagatgagctggacgactcacaggtgcgtcagatgctgttcgacctggagtcagcctacaacgccttcaaccgcttcctgcatgcctgagcccggggcactagcccttgcacagaagggcagagtctgaggcgatggctcctggtcccctgtccgccacacaggccgtggtcatccacacaactcactgtctgcagctgcctgtctggtgtctgtctttggtgtcagaactttgggggccgggcccctccccacaataaagatgctctccgaccttcaaaaaa

SEQ ID NO: 74609 - DNA, 845 bp, Homo Sapiens
cgcccccggcgccatcttcccgaccgcgagccgtccaggtctcagtgctgtgccccccccagagcctagaggatgtttcatgggatcccagccacgccgggcataggagcccctgggaacaagccggagctgtatgaggaagtgaagttgtacaagaacgcccgggagagggagaagtacgacaacatggcagagctgtttgcggtggtgaagacaatgcaagccctggagaaggcctacatcaaggactgtgtctcccccagcgagtaagagcccacgtcctgggaggtctgttcctgccctggggggcttgggtgctccataggcagcaagagcaggcgtctgtcaggctgggaggcacccacttgtgtggggcccacccagcgtgaggagggtgcccctgggtctcagccagggaagtcctgggggctggtgagggaggcgggcagaggcgcagctcctggggtgtcatccggcccactcccccaccctcatcccccagcacaggcaaccttaaaaaacggtcgagaggcttggggatgtcccaggatcttttgggggggcttcgttcaatgaagtgacaagaccgtcacaggccaccgcacaggaccatgagctgtggatgcgcgcatcacaacagagggctggtcgctgtggttcagagggtgggcaggggttgggggccgggggtctccacctgggagccggagctagcaagccccactacgtgctcaggggcctcacaccccaaaaagctactagcaagcccctccttccttgcatcgagacctgcctttgcctgtcgcctggtacatctctgggaaagctgctctgcctctggacca

SEQ ID NO: 74610 - DNA, 782 bp, Homo Sapiens
  misc_feature (17)..(17): n is a, c, g, or t
  misc_feature (25)..(25): n is a, c, g, or t
  misc_feature (688)..(708): n is a, c, g, or t
aggttgggggtagggtntggaatgnccaagtgcccttggaacctcccacagctatggccgtcctgacctcatcccaggaactctacggtgaccaggaaccacccctctgacgaggtctgtagcggcccttctcagagtggaacagcccacagtgctagttgtgcctggtcttacctgtactccacggacctcggtgaagcaaaagcttcagggcagagggaatgaggcaacccagtggcagccccgctgggccccgtggctcctgctctcctattggacgtagaggcaggggagagacttctctatacaaatattctcatcacagaagggatgatccttgctgctctgccgtagggtttttgatgctgagctatgctgcacatgacgttaacctaaagaacttggactgagcttttaaaaaaggacagcaaacaattttataatccttaaagtgtaatagacggttacactagtgcagggtattggggaggctctttgggtgtggaggctgtcacttgtatttattgtgactctaaatctttgatagtaaaacaaatgtaaaaagaaatgtttgccaccagatgggaatagaagttccaataagcaggctggaatgggtggctatacgttgtatcacgaggaagttttagactctgaaggataataaatggatgatgtgtcaactggnnnnnnnnnnnnnnnnnnnnngcctacagccgcggccgcaagctattccctttagtgaggttaattcgagcatggcactggccgtcgttaaaacc

SEQ ID NO: 74611 - DNA, 743 bp, Homo Sapiens
  misc_feature (116)..(116): n is a, c, g, or t
gtggtcatcagtccatgacccctggagagaaggccctgacccctgtgggtcatcaatctgtgaccactggacagaagaccctgacctctgtgggttatcagtctgtgacccctggngaaaagaccctgacccctgtgggtcatcagtctgtgacccctgtgagtcatcagtctgtgagccctggaggaacgactatgacccctgtccattttcagactgagacccttagacagaatacagtggcccctagaaggaaggctgtggcccgtgaaaaggtgactgtcccctccagaaacatatcagtcacccctgaagggcagactatgcctttaagaggggagaatttgacttctgaggtgggcactcaccccaggatgggtaacttgggtcttcagatggaagctgaaaacaggatgatgctgtcctccagccccgtcatccagctcccggaacaaactcctctagcttttgacaaccgctttgttcccatctatggaaaccattcctctgtcaactcagtaacccctcaaacaagtcctctttctctaaaaaaagaaatcccagaaaactctgctgtggatgaagaagcctaagcccctctggtgtcagaaaccagggaaaacccttgtcttttcttctaagtgacatgttggaagccttctcatcccggggcaaagcaggcatcaaaaccagaataggccaatctcttttccattaaataaactgtaaacacaagaacccac

SEQ ID NO: 74612 - DNA, 776 bp, Homo Sapiens
  misc_feature (55)..(55): n is a, c, g, or t
  misc_feature (163)..(163): n is a, c, g, or t
cacaaacactgtggggcacttgatatttattagtggtgtatatggtccactggtntcaggccaaatctagaatttagtgattctggctcagaagaatttaagttctattcagctttcctgggtgttagaacctagattcaaaatggcttgtctttgctacttntgttccacattctctctctttacctttgccctaccttctgtttgtaaggatgattttaatattaattccaggaacacatgtttttatttcctctgctggaataggagaaagcttaatatattcccaagctgaatgttcttgaattatatctgcatttaccactgtatatgcatatagtgacagtataacctgtctatactacagtagttccagtcctaactttctgaattatttttaaagatcttctctaacaagctatgggaatttggcttcatactctttctttgcaacagcagtgttctgggtgataattttgaattgatacctgttcctttttctgggttttgttggctttttgaaaaattgtctttccttatcattggtgggaggcttggtagcaaagtaacattttttggaaaagaggacagaaaaattgaactacagcttgagaacgtattctttttttcctactttgttattgcaaattgaggaatcacttttaactgttttaggtgtgtgtgtccagagtgagcaaggattatgtttttggattgtcaaagaggatgcttagtcttaaaataaaaataaatttaaaaatcatcttataattaaa

SEQ ID NO: 74613 - DNA, 746 bp, Homo Sapiens
  misc_feature (17)..(17): n is a, c, g, or t
ggtacaaggcagccagnaaaggagaaagcagagcctctaacgcaggagctgcctgtatgggaacagccagcaccagggcaggcagatgggggcggcggcacaccccccaatgatcctgccccttcccctgcgaaagcccaccacacttaggcagtgcgaagtgctcatccgcgggctgtggaataccaacctcctgcagacccaagagctgcagcacctcaagtccctcctggaagggagccagaggccccaggcagtcccggaggaagctagctttcccagggaccaagaagccacgcatttccccaaggtctccaccaagagcctctccaagaaatgcctgcttctgagcccacctgtggcggagcatgccatcctgcccgcactgaagcagaccccgaagaacaactttgccgagaggcagaagaggctgcaggcaatgcagaaacggcgcctgcatcgctcggtgctttgagctacccgcatctggtcagtgccaggcccaccaacctgcagctggagattggctctctatagcatttcctgatacttccgctacttttaggcctggctaaattccaagatagataacactcaagatagataaagtacttgatctccaaactgacaaactgtttattttctagctgttattttgctatttggcatttacataaaagcacacgatgaagcaggtatcgccttacctgttgaaactgaaaataaagcttgtttatttccaaaaa

SEQ ID NO: 74614 - DNA, 1338 bp, Homo Sapiens
tcggctaggtacgaggccgggttgcgaattcggcacgaggctggcgatggcgatatgagcggtgcgggggtggcggctgggacgcggccccccagctcgccgaccccgggctctcggcgccggcgccagcgcccctctgtgggcgtccagtccttgaggccgcagagcccgcagctcaggcagagcgacccgcagaaacggaacctggacctggagaaaagcctgcagttcctgcagcagcagcactcggagatgctggccaagctccatgaggagatcgagcatctgaagcgggaaaacaaggatctccattacaagctcataatgaatcagacatcacagaagaaagatggcccctcaggaaaccacctttccagggcctctgctcccttgggcgctcgctgggtctgcatcaacggagtgtgggtagagccgggaggacccagccctgccaggctgaaggagggctcctcacggacacacaggccaggaggcaagcgtgggcgtcttgcgggcggtagcgccgacactgtgcgctctcctgcagacagcctctccatgtcaagcttccagtctgtcaagtccatctctaattcaggcaaggccaggccccagcccggctccttcaacaagcaagattcaaaagctgacgtctcccagaaggcggacctggaagaggagcccctacttcacaacagcaagctggacaaagttcctggggtacaagggcaggccagcccaccacacttaggcagtgcgaatgctcatccgcgagctgtggaataccaacctcctgcagacccaagagctgcggcacctcaagtccctcctggaagggagccagaggccccaggcagccccggaggaagctagctttcccagggaccaagaagccacgcatttccccaaggtctccaccaagagcctctccaagaaatgcctgagcccacctgtggcggagcgtgccatcctgcccgcactgaagcagaccccgaagaacaactttgccgagaggcagaagaggctgcaggcaatgcagaaacggcgcctgcatcgctcagtgctttgagccaccccaatctggtcagtgccaggcccaccaacctgcagctggagactggctctctatagcatttcctgatacttccgctacttttaggcctggctaaattccaagacagataacactcaagatagataaagtacttgatctccaaactgacaaactgtttattttctagctgttattttgctatttggcatttacataaaagcacacgatgaagcaggtatcgccttacctgttgaaactgaaaataaagcttgtttatttccaaa

SEQ ID NO: 74615 - DNA, 1027 bp, Homo Sapiens
  misc_feature (123)..(131): n is a, c, g, or t
  misc_feature (940)..(940): n is a, c, g, or t
gacttgattgtgcaccccgtctgtgtgagagtccgatcccgcggctccccaggatgccctggtgccaaggtgtccccccgcgagcctccccaaggggggcttcaaggaggcaaacatgggggnnnnnnnnnaatgcgcctgtcggtttccccaacagcaactctgcatagggcctcgcttttcttctggcggccctgtaccccagactttgtccactgctgttgtgaatagggctcctcttccagtccgcttctggagacgtcagctttgaatcttgcttgttgaagaccggctgggcctggcctgcctgaattagagatggacttgacagactggaagcttgacatggagaggctgtctgcaggagagcgcacagtgtcggcgctaccgcccgcaagacgcccacgcttgcctcctggcctgtgtgtccgtgaggagccctccttcagcctggcagggctgggtcctcccggctctacccacaactccgttgatgcaagacccagcgagcgcccaagggagcagaggcctggaaaggtggtttcctgaggggccatctttcttctgtgatgtctgattcattatgagcttgtaatggagatcgtcctgtgttccccctgagcccaggcgtgtgctggagttgatggctgtgtttctgtgctgcgggagcaggcagtgttgagtgtgcctggggaggcagggccggcctagggccccgcgccggctcacccttgttttcccgcttcagatgctcgatctcctcatggagcttggccagcatctccgagtgctgctgctgcaggaactgcaggcttttctccaggtccaggttccgtttctgcgggtcgctctgcctgagctgcgggctctgcggcctcaaggactgacgcccacagaggggcgctggcgccggcgccgagagcccggggtcggcgagctngggggccgcgtcccagccgccacccacgcaccgctcatatcgccatcgccaggtactctcccgctgccactgcaccccggctcagtg

SEQ ID NO: 74616 - DNA, 782 bp, Homo Sapiens
gtgcagaatcttgtgttgggattgtatcttgacattcctgttgtgttatttttcttaactggagtgtgtgctgcctttcaagtacaatttttgtgtaataaaagccagtgcattaagtttatatagactactttctatgcaagactgagatatggaatagataggaagagatatgtactgctgggtacatggacagtaagtgtgttttcagatggagtaccagcaccgaaaatgggttgagggaggatgggttgtatgtatgtttctgcccactaattttgagcagccatattatgaattaaatcgtcacagccaagtaataacccaagaatggtatgagtttcatgtgtaatagctcaaatggaataagcatgaatgctggagtggaccattatcctcaaatattctatgtcacttctcatttaaagactcttgttatgaactattagaaactttaggcaaaatcaaaagtatttgcggcaaaataaaggcctattctactcttatttaaagtgaaacactgtatacttgtttctctccaaagcgaaattaagtatttataatttcaattgcctcgataagtttccaagtcactgaaatctgctgaaggttttactgtattgttgcacaactttaagataatttttgtctcaatgtcaacttttttcactgaataaaaatttaactgggtcaagaaaacacctctttgaaaatccactgtctctgtgtgtctcgagctgttctttagagcgcaataaagatggctgacgcagtctccaaaa

SEQ ID NO: 74617 - DNA, 714 bp, Homo Sapiens
gaaagatggcggagcaagagcaaagaaaaatccctttggttccagaaaatctcctgaaaaagaggaaggcttatcaagccctcaaagccacccaggcaaagcaggcacttttggcaaagaaggagcagaagaaaggaaaagggctcaggtttaagcgactggaatcattcctacatgattcctggcggcagaaacgtgacaaggtgcgtctcagacgactagaagggaaacctcatgccttggaattgccagataaacattccttggcctttgttgtacgcatcgaaaggattgacggcgtgagtttactggtgcagagaaccattgcaagacttcgcctaaagaaaatttttagtggtgtctttgtaaaagtcaccccccagaatctaaaaatgctgcgtatagtggaaccttatgtgacctggggatttccaaatctgaagtctgtccgagaactcattttgaaacgtggacaagccaaggtcaagaataagaccatccctctgacagacaatacagtgattgaggagcacctgggtgagtgctacagcttaggggtcagctggggcagaaagccagggtctttgaagcttcgatgtgagattcaggttgtattcctcttggggccccaagagtctgccagagtggccagcttagtatatgctggatacatgttaaataaaggaatctgtgcttttgtgtttcttagagaaa

SEQ ID NO: 74618 - DNA, 1244 bp, Homo Sapiens
  misc_feature (901)..(920): n is a, c, g, or t
ggggatcagtagctgcaccactagaaagatggcggagcaagagcaaagaaaaatccctttggttccagaaaatctcctgaaaaagaggaaggcttatcaagccctcaaagccacccaggcaaagcaggcacttttggcaaagaaggagcagaagaaaggaaaagggctcaggtttaagcgactggaatcattcctacatgattcctggcggcagaaacgtgacaaggtgcgtctcagacgactagaagtgaaacctcatgccttggaattgccagataaacattccttggcctttgttgtacgcatcgaaaggattgacggcgtgagtttactggtgcagagaaccattgcaagacttcgcctaaagaaaatttttagtggtgtctttgtaaaagtcaccccccagaatctaaaaatgctgcgtatagtggaaccttatgtgacctggggatttccaaatctgaagtctgtccgagaactcattttgaaacgtggacaagccaaggtcaagaataagaccatccctctgacagacaatacagtgattgaggagcacctggggaagtttggcgtcatttgcttggaagacctcattcatgaaattgccttcccagggaagcatttccaggagatctcatggttcttgtgccctttccacctctcagtggcccgtcatgctaccaaaaatagagtgggcttcctcaaggagatggggcacacctgggctatcggggtgaacgcatcaatcagctcatccgtcagctgaattagacccaggtgccaaactgcggtaaattttttattagtgaagtggaagcatgtgttttgttttggaaatttttatcaagtatcttcagagaagattatttcctgctttatcttcagaaactggaaagggtcnnnnnnnnnnnnnnnnnnnngacagttgcatatgttcatgtcaagcacctctcatcacagtcgagttccaaggaaaaaattcccagcgttttctacagtcggtgctgcgtcatctgaaatcggcacattccatggaggaaggagtcctgctttgttgcatgtatcctagggtttaatgttggtaaatgagtcactctagcatttgtagaaggctccctgagactcctgcagcagtcgaccaagcccaaggacataagtgaatctggagagtcctgggaccttgtcttgaaaaagacttgaaatacacataggaagaaaggcataaaaataaatgttcacttgtc

SEQ ID NO: 74619 - DNA, 906 bp, Homo Sapiens
ggtaccggtccggaattcccgggatatcgtcgaccccgcgtccggaaagatggcggagcaagacagaagaaaggaaaagggctcaggtttaagcgactggaatcattcctacatgattcctggcggcagaaacgtgacaaggtgcgtctcagacgactagaagtgaaacctcatgccttggaattgccagataaacattccttggcctttgttgtacgcatcgaaaggattgacggcgtgagtttactggtgcagagaaccattgcaagacttcgcctaaagaaaatttttagtggtgtctttgtaaaagtcaccccccagaatctaaaaatgctgcgtatagtggaaccttatgtgacctggggatttcgaaatctgaagtctgtccgagaactcattttgaaacgtggacaagccaaggtcaagaataagaccatccctctgacagacaatacagtgattgaggagcacctggggaagtttggcgtcatttgcttggaagacctcattcatgaaattgccttcccagggaagcatttccaggagatctcatggttcttgtgccctttccacctctcagtggcccgtcatgctaccaaaaatagagtgggcttcctcaaggagatgggcacacctggctatcggggtgaacgcatcaatcagctcatccgtcagctgaactagacccaggtgaggcagggctgaaaactgcccttgggctgacttttgataggccatgccttgccactttacaagttctttttgcatttactagtatttaagagtaaccttgagattgggaggaatagaggaggctggtacaaatagatggagacctgctgggatcagtgaatgcctgattaggacatggggctatgcatagcctaagagttatagggcttaaag

SEQ ID NO: 74620 - DNA, 1259 bp, Homo Sapiens
ctggcacaggacatgcaagataaatagggcaggcacgtgtttgggtgtcctctcttttctgataaaatccatcccgtgtttgccacacgccctccagtcctcagttcccactgcctaacgtctgcccccgtgtagatactgagaggtggtggcagtaattgtggccttatcagccgctcagttccaggcttttgcccaggtcactgttgccccatgttcggagaacctggcccacctgtcttggctttctcatccttcccaacccagtgccgtttatttcagaagcttcctggccactgggcttggatgcttcgggcttctgactgctccataggttttgactggtgaaacaggggcccagatgacaacctctccttcgctccacaggtacgcgggagcctcaggttctctcaggggcagcaaagtggcccaagctgcccctgacagcacagggcctgggggtggctaacgagagaggccttacagtgccggcatgcctcctcttccactgtcgtccttcctcagagggcctcacgccaaacaaacggccttttcgtgtgaaacatcttcagggcgggaaaggggccacttctggctttgttagcaataactgaccttcagtttacccttctgaaggagcagggactcagcacagaattcactttagacggggctgaaggagtgtccctcctctatgtgaaaagaaaattgttttattcttcattctgactttttaactgtttggctcacttccagttagtttgaatgaaaataataattttctacttggagttgaagagggcagaatccgcagctctcatcattgtgatgtgtagcatgtctgccctctgactggacatcattgccattaactttcttctgggcatcacggcaatgtcacgatgcccagacttggagcaaggcaaccttggagtcagtccactcataaaatatggtaacacccattttaaaatttaagttttgtccttaaagacaacttcagtggttaattataaaagttgtgttacttcgtcctaaattaaattgatagaaagatttaaaaatgtgttttgtttctactattcagaaactgcgaactagggaaaggttggtatgaaaaaatgtctttccttttttcaatgtacatagttcaactctttctttgttacatttaaactatatccatggatatcagtctgctttggactcctctgctagtgttacagatggaaataaaaccattaatttgaaccaaaaaa

SEQ ID NO: 74621 - DNA, 972 bp, Homo Sapiens
  misc_feature (911)..(911): n is a, c, g, or t
cctgggtggcgatttcggcacgaggtttgctacggagtgcatcggacgtcgaagcctagagtctctgcgtctttccctcttccgctgcctcattcctttccttcctagccttggtcgtcgccgccaccatgaacaagaagaagaaaccgttcctagggatgcccgcgcccctcggctacgtgccggggctgggccggggcgccactggcttcaccacgcggtcagacattgggcccgcccgtgatgcaaatgaccctgtggatgatcgccatgcacccccaggcaagagaaccgttggggaccagatgaagaaaaatcaggctgctgacgatgacgacgaggatctaaatgacaccaattacgatgagtttaatggctatgctgggagcctcttctcaagtggaccctacgagaaagatgatgaggaagcagatgctatctatgcagccctggataaaaggatggatgaaagaagaaaagaaagacgggagcaaagggagaaagaacgaaatagagaaatatcgtatggaacgccccaaaatccaacagcagttctcagacctcaagaggaagttggcagaagtcacagaagaagagtggctgagcatccccgaggttggcgatgccagaaataaacgtcagcggaacccacgctatgagaagctgacccctgttcctgacagtttctttgccaaacatttacagaccggagagaaccatacctcagtggatccccgacaaactcaatttggaggtcttaacacaccctatccaggttggactaaacactccatacccagggtggaatgacgcccaggactgatgacacctggcaacaggtgagctggacatgaggaaggattggcccaagcgagggaaccctcctgagggacatgaagcctgagccaagntgtctgactcccgtgagtgggacagaccgtccgtttaacccccaaaggcgtacctgaagga

SEQ ID NO: 74622 - DNA, 2547 bp, Homo Sapiens
  misc_feature (2296)..(2298): n is a, c, g, or t
  misc_feature (2300)..(2301): n is a, c, g, or t
  misc_feature (2305)..(2305): n is a, c, g, or t
  misc_feature (2307)..(2307): n is a, c, g, or t
  misc_feature (2321)..(2321): n is a, c, g, or t
ggagagagtatgaagtcgacggcgcgccgaattcggcacgagggccaggactgatgacacctggcacaggtgagctggacatgaggaagattggccaagcgaggaacactctgatggacatgaggctgagccaggtgtctgactccgtgagtggacagaccgtcgttgaccccaaaggctacctgacggatttaaattccatgatcccgacacacggaggagacatcaatgatatcaagaaggcgcgactgctcctcaagtctgttcgggagacgaaccctcatcacccgccagcctggattgcatcagcccgcctggaagaagtcactgggaagctacaagtagctcggaaccttatcatgaaggggacggagatgtgccccaagagtgaagatgtctggctggaagcagccaggttgcagcctggggacacagccaaggccgtggtagcccaagctgtccgtcatctcccacagtctgtcaggatttacatcagagccgcagagctggaaacggacattcgtgcaaagaagcgggttcttcggaaagccctcgagcatgttccaaactcggttcgcttgtggaaagcagccgttgagctggaagaacctgaagatgctagaatcatgctgagccgagctgtggagtgctgccccaccagcgtggagctctggcttgctctggcaaggctggagacctatgaaaatgcccgcaaggtcttgaacaaggcgcgggagaacattcctacagaccgacatatctggatcacggctgctaagctggaggaagccaatgggaacacgcagatggtggagaagatcatcgaccgagccatcacctcgctgcgggccaacggtgtggagatcaaccgtgagcagtggatccaggatgccgaggaatgtgacagggctgggagtgtggccacctgccaggccgtcatgcgtgccgtgattgggattgggattgaggaggaagatcggaagcatacctggatggaggatgctgacagttgtgtagcccacaatgcccctggagtgtgcacgagccatctacgcctacgccctgcaggtgttccccagcaagaagagtgtgtggctgcgcgccgcgtacttcgagaagaaccatggcactcgggagtccctggaagcactcctgcagagggctgtggcccactgccccaaagcagaggtgctgtggctcatgggcgccaagtccaagtggctggcaggggatgtgcctgcagcaaggagcatcctggccctggccttccaggccaaccccaacagtgaggagatctggctggcagccgtgaagctggagtccgagaatgatgagtacgagcgggcccggaggctgctggccaaggcgcggagcagtgcccccaccgcccgggtgttcatgaagtctgtgaagctggagtgggtgcaagacaacatcagggcagcccaagatctgtgcgaggaggccctgcggcactatgaggacttccccaagctgtggatgatgaaggggcagatcgaggagcagaaggagatgatggagaaggcgcgggaagcctataaccaggggttgaagaagtgtccccactccacacccctgtggcttttgctctctcggctggaggagaagattgggcagcttactcgagcacgggccattttggaaaagtctcgtctgaagaacccaaagaaccctgggctgtggttggagtccgtgcggctggagtaccgtgcggggctgaagaacatcgcaaatacactcatggccaaggcgctgcaggagtgccccaactccggtatcctgtggtctgaggccatcttcctcgaggcaaggccccagaggaggaccaagagcgtggatgccctgaagaagtgtgagcatgacccccatgtgctcctggccgtggccaagctgttttggagtcagcggaagatcaccaaggccagggagtggttccaccgcactgtgaagattgactcggacctgggggatgcctgggccttcttctacaagtttgagctgcagcatggcactgaggagcagcaggaggaggtgaggaagcgctgtgagagtgcagagcctcggcatggggagctgtggtgcgccgtgtccaaggacatcgccaactggcagaagaagatcggggacatccttaggctggtggccggccgcatcaagaacaccttctgattgagcggttgccatggccggtctccgtggggcagggttgggccgcatgtggaagggctctgagctgtgtcctccttcattaaaagtttttatgtctcgtgtctcnnnanncaancnccgccacccaaatnctcttgtccgccgcccccgcccctcgaaaacgtttctaaaccctttcgtttggcccgccgggccccgtaaggtcaaggcacctgggccttaacctggtttcctaggaagatcccgggttattggacgaacgcggccgggacttctcccaacacgaaaaaccggcccggcgtgtaacacgccaaccgtctccgctaccaaaccccctaagggagggcgtctcgaaga

SEQ ID NO: 74623 - DNA, 1316 bp, Homo Sapiens
  misc_feature (1216)..(1216): n is a, c, g, or t
agagtatgaaagtcgacggcgcgccgaattcggcacgaggcgccaccatgaacaagaagaagaaaccgttcctagggatgcccgcgcccctcggctacgtgccggggctgggccggggcgccactggcttcaccacgcggtcagacattgggcccgcccgtgatgcaaatgaccctgtggatgatcgccatgcacccccaggcaagagaaccgttggggaccagatgaagaaaaatcaggctgctgacgatgacgacgaggatctaaatgacaccaattacgatgagtttaatggctatgctgggagcctcttctcaagtggaccctacgagaaagatgatgaggaagcagatgctatctatgcagccctggataaaaggatggatgaaagaagaaaagaaagacgggagcaaagggagaaagaagaaatagagaaatatcgtatggaacgccccaaaatccaacagcagttctcagacctcaagaggaagttggcagaagtcacagaagaagagtggctgagcatccccgaggttggcgatgccagaaataaacgtcagcggaacccacgctatgagaagctgacccctgttcctgacagtttctttgccaaacatttacagaccggagagaaccatacctcagtggatccccgacaaactcaatttggaggtcttaacacaccctatccaggtggactaaacactccatacccaggtggaatgacgccaggactgatgacacctggcacaggtgagctggacatgaggaagattggccaagcgaggaacactctgatggacatgaggctgagccaggtgtctgactccgtgagtggacagaccgtcgttgaccccaaaggctacctgacggatttaaattccatgatcccgacacacggaggagacatcaatgatatcaagaaggcgcgactgctcctcaagtctgttcgggagacgaaccctcatcacccgccagcctggattgcatcagcccgcctggaagaagtcactgggaagctacaagtagctcggaaccttatcatgaaggggacggaagatgtgccccaagagtgaagatgtctggctggaagcagccaggttgcagcctggggacacagccaggccgtggtagccaagctgtccgtcatctccacagtctgtcagattacatcagagcgcaaactggaacgacatcgtgcaagagcgggttctcngaagcctcaacatgtcaactcgtcgctgtggaagcacgtgactgagactgagagtaatctgctacgactggatgtgcacactgactcgtgtctgagtgac

SEQ ID NO: 74624 - DNA, 666 bp, Homo Sapiens
ggttggctgctgctgaagtcacctgaaagctcaattaggctaaagagtctaaacgggtcacttacatggctggcagtgcatattggctgctgagtgtgatgcctatctgacctctccatgttacctggagtgctcacaacgtggtagtttgtcccaagacacacaggcaaatactacaaagctttttaggacctagccttggaggtcctagaatacgacttttgctgcatcctattggaaaagcaagtcattgtgaccagcacagattcaagaaatgggagattcgactcttacctgtcaatgtaaacagccagcatgtgcatgcagggaggaaagaaattgagggcatcatcttgaagactatcatatcacaccattattccaactagtgaacattatgttttagatgggtagtactagctactcatctgtcccccagaaacccaagctaagcatggacatattgaagagaatgtcagcaccattaaaaaaactctagaaaaatcacatgtgatgactgaggttaattcagtctgtcaattacatcagtataattgccttcttgtaaccctaagtatggtgaagcagaattgaattctacaaaagtctttcatctgttttcctatggaataattaacaaacccaataaatgtataaatagcatga

SEQ ID NO: 74625 - DNA, 1506 bp, Homo Sapiens
  misc_feature (1184)..(1184): n is a, c, g, or t
  misc_feature (1195)..(1195): n is a, c, g, or t
  misc_feature (1222)..(1226): n is a, c, g, or t
  misc_feature (1228)..(1257): n is a, c, g, or t
  misc_feature (1271)..(1271): n is a, c, g, or t
  misc_feature (1361)..(1361): n is a, c, g, or t
  misc_feature (1458)..(1458): n is a, c, g, or t
  misc_feature (1466)..(1466): n is a, c, g, or t
gaaatgcagagagatgccaatagacaaattagcgaatacaaatttaagctttcaaaagcagaacaggatataactaccttggagcaaagtattagccggcttgagggacaggttctgagatataaaactgctgctgagaatgctgagaaagttgaagatgaattgaaagcagaaaaacggaagctacaacgagagttacgaacagcactggacaagattgaggagatggagatgaccaacagccacctggccaagcggctggagaagatgaaggccaataggacagcacttctggcccagcagtaggaaaaccacccttcaacctgggtgatgctccttggggccctacctagagggactgacttttgtccattgacacaaaccccttttagtactgttttgagttttgtcattaaaacagccacctttgtattttataatttatgacagaatgaagtcattttgaatctacatgaatgaacactttggattttgttgtagtttgattctagggtagaaccagtccatgctgtttttattttttatctccgtaattgtagaatcatgtttactcaacgtttttccccagctgcctcagtaactgggcactcggaggccttggcacgggttctggaggacagacagcaattctatgagtgctcactgagatacttgctggagacctcagaaaacacaagtgccttctccacggtgcaattcagacttcagtgatctccagtggtcaaaagacatttacccttaatatcagacaacatttatattttagtgaagaaacaagttctcgggtggggaatctatgtttcactcagatttatatgtttggaggaaaaaagcctttttttgtaaaatatttaaatttatataagaaaatgttagaaaaaaatatggggagtgtatataaaacttgctttattgcatggggcaggggaagtccaggcctaatactcctaaagtaagagttgggtcctttttttcttcaatacaactgtgctgtaccttgtaaagtattttatctgctgcttatttgtggaatgaaacctcaaacaaacccaaagggggagggtagggcagggcaggcagattggaaatctgcctgcagattctattaaatacacccttttgcccaacacaattggctactgacatgttcatttttgttatangagactttaanacaaatcatggcaaccacatccctccnnnnntnnnnnnnnnnnnnnnnnnnnnnnnnnnnnngcttttgcccctanacccaggtgggttttataaaaatgattattgtatctttaaagtgcttacacagaaatatattgggggaaatctagtgactaaggcacatnagatataaactagactttaaaaggtactcaaagtgataaatcctatatttgtcctttaaaaaactcgtgcgattcttggctcgaggcaatcctaaangatcgatnattcgaccagtcaactgttctggtgaatgtatcgtcacac

SEQ ID NO: 74626 - DNA, 705 bp, Homo Sapiens
ctttatttttaatcacttttttctatgatggatatgaaaaattcaaggcagtatgcacagaatggacgagtgcagcccagccctcatgcccaggatcagcatgcgcatctccatgtctgcatactctggagttcactttcccagagctggggcaggccgggcagtctgcgggcaagctccggggtctctgggtggagagctgacccaggaagggctgcagctgagctgggggttgaatttctccaggcactccctggagagaggacccagtgacttgtccaagtttacacacgacactaatctcccctggggaggaagcgggaagccagccaggttgaactgtagcgaggcccccaggccgccaggaatggaccatgcagatcactgtcagtggagggaagctgctgactgtgattaggtgctggggtcttagcgtccagcgcagcccgggggcatcctggaggctctgctccttagggcatggtagtcaccgcgaagccgggcaccgtcccacagcatctcctagaagcagccggcacaggagggaaggtggccaggctcgaagcagtctctgtttccagcactgcaccctcaggaagtcgcccgccccaggacacgcagggaccaccctaagggctgggtggctgtctcaaggacacattgaatacgttgtgaccatccagaaaataaatgctgaggggacac

SEQ ID NO: 74627 - DNA, 1237 bp, Homo Sapiens
  misc_feature (45)..(45): n is a, c, g, or t
  misc_feature (83)..(117): n is a, c, g, or t
  misc_feature (1180)..(1190): n is a, c, g, or t
aagaactatatacctcatatgggccctcgcgttcagtcgaacgancgagcgcagccgaagctattatagcgaggaagcggcgnnnnnnnnnnnnnnnnnnnnnnnnnnnnnnnnnnncagtcgacggtaccggacatatgcccgggaattcggccattacggccggggatagaccaccaggctgagtatcctgacctgagtcatccccagggatcaggagcctccagcagggaaccttccattatattcttcaagcaacttacagctgcaccgacagttgcgatgaaagttctaatctcttccctcctcctgttgctgccactaatgctgatgtccatggtctctagcagcctgaatccaggggtcgccagaggccacagggaccgaggccaggcttctaggagatggctccaggaaggcggccaagaatgtgagtgcaaagattggttcctgagagccccgagaagaaaattcatgacagtgtctgggctgccaaagaagcagtgcccctgtgatcatttcaagggcaatgtgaagaaaacaagacaccaaaggcaccacagaaagccaaacaagcattccagagcctgccagcaatttctcaaacaatgtcagctaagaagctttgctctgcctttgtaggagctctgagcgcccactcttccaattaaacattctcagccaagaagacagtgagcacacctaccagacactcttcttctcccacctcactctcccactgtacccacccctaaatcattccagtgctctcaaaaagcatgtttttcaagatcattttgtttgttgctctctctagtgtcttcttctctcgtcagtcttagcctgtgccctccccttacccaggcttaggcttaattacctgaaagattccaggaaactgtagcttcctagctagtgtcatttaaccttaaatgcaatcaggaaagtagcaaacagaagtcaataaatatttttaaatgtcacagatcaaaattgtttccttcaaatggggtctgccaattcacaaccagatgacccattttaccctattcactgcagactgaatccagattctacacatacttatccccaccaagaccctcactctgtctccattggcctacttgttcatctttcactcattcgacaaatctttctgaggtaagagcgaggtgggacnnnnnnnnnnngcataccaatgaaccagacacggtcttattaaagataatataggttt

SEQ ID NO: 74628 - DNA, 997 bp, Homo Sapiens
  misc_feature (38)..(38): n is a, c, g, or t
  misc_feature (136)..(136): n is a, c, g, or t
  misc_feature (168)..(168): n is a, c, g, or t
  misc_feature (219)..(219): n is a, c, g, or t
  misc_feature (277)..(277): n is a, c, g, or t
gtgcgagctcagtacagattgttgccgcagcggctgcncctgacgtgacgggttggcacttcagtcacattgagttgccctcactgcgcgccccggtgccggtattgatttgcgctctctgtgcagatgcaccatntggcatgtgccgctgcatgcgccgctccgatntctgtgctgggctcgggagcgcttggggcgccgagggcgctgcggcactgntgaccaactgagatccggctgagtccaggagtggtgtgggcgaggggcccgggctgtngggaacccgagcggaggaggaagggactttgtgaacagtgggcgggagacgcagaggcagaggccctggcacgcagcgccaacgccctggttcgggcccagcaggggcgcggcacaggaggagggccgggtgggccggagggtggggatgctgagggccccatcacagccctcaccttcctgtacttgcctcggccgccagccgatcccgcccgatacccccgctacctggcgctactggagactctaacccgagacctgggccccacgctgctggttcatggggtcactccagtcacctgcactgatctgtgatgcccctgcctccagggctaggtagagagggcccaggcaggcggcctatcctgatccttggaggaggaggaagaggaggccactgtggcccgtggccctgcccttgggacgtggagcccaggggaggtttgaaggggatcctgggcttgggcatcacgcccacctcctttggcagagggaccccagcacactaactctgggtggctgtccccaccgtgcaggggagggagtccgcagcctcccttcactggtgccttgatgctaggggccaggcctcctctgtgactctgggctacctcagtttccccattttggccagactcaccggcccactggggtggtgatgttttcgttctgttttatttttctaactctgctgaccatgaataaaagaccaaaacactaa

SEQ ID NO: 74629 - DNA, 2774 bp, Homo Sapiens
  misc_feature (250)..(289): n is a, c, g, or t
aaagaagcgaggcctgggtggcgaattcggcacgagggggacagttgcctccccctcatctcccctccatcggccggggctaggacacccccaaatcccgtcgcccccttggcaccgacaccccgacagagacagagacacagccatccgccaccaccgctgccgcagcctggctggggagggggccagccccccaggccccctacccctctgaggtggccagaatggatttgtggccaggggcatggannnnnnnnnnnnnnnnnnnnnnnnnnnnnnnnnnnnnnnngcccaccctgtggttctgcagccccagtgccaagtacttcttcaagatggccttctacaatggctggatcctcttcctggctgtgctcgccatccctgtgtgtgccgtgcgaggacgcaacgtcgagaacatgaagatcttgcgtctaatgctgctccacatcaaatacctgtacgggatccgagtggaggtgcgaggggctcaccacttccctccctcgcagccctatgttgttgtctccaaccaccagagctctctcgatctgcttgggatgatggaggtactgccaggccgctgtgtgcccattgccaagcgcgagctactgtgggctggctctgccgggctggcctgctggctggcaggagtcatcttcatcgaccggaagcgcacgggggatgccatcagtgtcatgtctgaggtcgcccagaccctgctcacccaggacgtgagggtctgggtgtttcctgagggaacgagaaaccacaatggctccatgctgcccttcaaacgtggcgccttccatcttgcagtgcaggcccaggttcccattgtccccatagtcatgtcctcctaccaagacttctactgcaagaaggagcgtcgcttcacctcgggacaatgtcaggtgcgggtgctgcccccagtgcccacggaagggctgacaccagatgacgtcccagctctggctgacagagtccggcactccatgctcactgttttccgggaaatctccactgatggccggggtggtggtgactatctgaagaagcctgggggcggtgggtgaaccctggctctgagctctcctcccatctgtccccatcttcctccccacacctacccacccagtgggccctgaagcagggccaaaccctcttccttgtctcccctctccccacttattctcctctttggaatcttcaacttctgaagtgaatgtggatacagcgccactcctgccccctcttggccccatccatggactcttgcctcggtgcagtctccactcttgacccccacctcctactgtcttgtctgtgggacagttgcctccccctcatctccagtgactcagcctacacaagggaggggaacattccatccccagtggagtctcttcctatgtggtcttctctacccctctaccccacattggccagtggactcatccattctttggaacaaatcccccccactccaaagtccatggattcaatggactcatccatttgtgaggaggacttctcgccctctggctggaagctgatacctgaagcactcccaggctcatcatgggagctttcctcagcaccttcaccttccctcccagtgtagcctcctgtcagtgggggctggacccttctaattcagaggtctcatgcctgcccttgcccagatgcccagggtcgtgcactctctgggataccagttcagtctccacatttctggttttctgtccccatagtacagttcttcagtggacatgaccccacccagccccctgcagccctgctgcaccatctcaccagacacaaggggaagaagcagacatcaggtgctgcactcacttctgccccctggggagttggggaaaggaacgaaccctggctggaggggataggagggcttttaatttatttctttttctgttgaggcttccccctctctgagccagttttcatttcttcctggtggcattagccactccctgcctctcactccagacctgttcccacaactggggaggtaggctgggagcaaaaggagagggtgggacccagttttgcgtggttggtttttattaattatctggataacagcaaaaaaactgaaaataaagagagagagagatctgggtgttggtggttgcatttgttaaggaattgaagaagcagttcttgcccaggcaacctgcccccagccagaagactcaggggcaggccaagaacacaggcctccccctttcttcagctctctgaagtttccattgttcattgctctttggtggctgatagccttatctgcagctcacagtcggccaatcccagaggattagtgggtccggtttctgtataaattagggggcaggggtgctgtagaggcttcttatcgatgattgacgccgaggcccaggctgttgtcctcacaggagcaggcacctagcctctcctccagcagcagcacctggtcgctgagagaatcgatccggtcaccccagacacacagctcagccacctgttctggctgcagctcttcaggcggcacgggcagcaccgctctgacccaggccccagcctgaccggcccactagaaaggaagagatgcctcagggtattgacagtgacgtctggcctcgccccacccagcaggcttggctcacctgctccagccgctccaagcgccctcgcagctcgtgaatctcctgcttcagagcgcgctcatctttttccgcctcccgaacgggcacgctgagtatgctggcact

SEQ ID NO: 74630 - DNA, 776 bp, Homo Sapiens
  misc_feature (281)..(322): n is a, c, g, or t
gcagaaagggagggagggagggtgctggggggacagccccccaccattcctaccgctatgggcccaacctcccactcccacctcccctccatcggccggggctaggacacccccaaatcccgtcgcccccttggcaccgacacccctgacagagacaagagacacagccaatccgctcacgcaccgctgcctgcagccatggctggggagggggccagccccgccaggccccctacccctctgagaagtggccagaatggatttgtggccagggcatggannnnnnnnnnnnnnnnnnnnnnnnnnnnnnnnnnnnnnnnnnccaccctgtggttctgcagccccagtgccaagtacttcttcaagatggccttctacaatggctggatcctcttcctggctgtgctcgccatccctgtgtgtgccagtgcgaggacgcaacgtcgagaacatgaagatcttgcgtctaatgctgctccacatcaaatacctgtacgggatccgagtggaggtgcgaggggctcaccacttccctccctcgcagccctatgtcgttgtctccaagcagcagagctctctcgatctggcttgggatgctggaggtactgccaggccgcatgtgtgccccattgccaaagcggcgaagctactgttgggctggctcttgccgggatggcctgcatggactggcaggagtcaatcttcatcgaccggaagcgccacgggaggatgccatcaagtgtcaagtctagaggtcgccaaacaccggatcacca

SEQ ID NO: 74631 - DNA, 778 bp, Homo Sapiens
  misc_feature (300)..(341): n is a, c, g, or t
agcagccccagccctcagagagacagcagaaagggagggagggagggtgctggggggacagccccccaccattcctaccgctatgggcccaacctcccactcccacctcccctccatcggccggggctaggacacccccaaatcccgtcgcccccttggcaccgacaccccgacagagacagagacacagccatccgccaccaccgcatgccgcagcctggctggggagggaggccagaccctccaggacccctacccctctgaggtggccagaatggattagtggccaggggcatggannnnnnnnnnnnnnnnnnnnnnnnnnnnnnnnnnnnnnnnnnccaccctgtggttctgcagccccagtgccaagtacttcttcaagatggccttctacaatggctggatcctcttcctggctgtgctcgccatccctgtgtgtgccgtgcgaggacgcaacgtcgagaacatgaagatcttgcgtctaatgctgcaccacatcaaatacctgtacgggatccgagtggaggtgcgaggggctcaccacttccctccctcgcagacctatgttgttgtctccaaccaccagagctctctcgatctgcttgggatgatggaggtactgccaggccgctgtgtgcccattgccaagcgcgagctactgtgggctggctctgccgggctggcctgctggctggcaggagtcatcttcatcgaccggaagcgcacgggggatgccatcagtgtcatgtctgaggtcgcccagacctgctcacca

SEQ ID NO: 74632 - DNA, 682 bp, Homo Sapiens
  misc_feature (56)..(56): n is a, c, g, or t
  misc_feature (68)..(68): n is a, c, g, or t
tagccagtttattactagtgaccttgacttcagtatcatgagcattcttttatatntttctttataantcctgagtatgtaactaaacaattttgtcttcaaatttttatccaatatccattgcaccacaccaaatcaagcttcttgattttcaaaaataaaaagggggaaatacttacaacttgtacatatatattcacagtttttatttataaaaaaaatttacagtacttatggagagccagcagaagacatcagagcactcacttcttcccatctttgttaaggttagcgaattacccatggacactgttaggtgaggctcattcggcagccctgaaaacaaacctggtcacactgtctttaccctctcccttcagataaagcacttcgattatctattgatctgcccagttttcaagtcatgcgaatactaaaaaggttacatcatctggatctgtaccttggctatataagcatgttttccccctattctatgtttctttttttggtgaacattgaaaaacaggaggtgacttattactgttaattaaaactaaatgaaaaatgtcaagtctttaaaacagtgagcttgtaactctttcatgtaattttattctctatgaatttggctatcctactgaatcttaaaataaaggaaataaagcctacagccgcggcc

SEQ ID NO: 74633 - DNA, 627 bp, Homo Sapiens
aaaagtttattttaaaaacaagagggccgagggtgggagaaaatgaattgctttatcctcagagagggaagagataggaattggtcactacggggagggaagggtgggagactagggggcggaagagaggaggggctggaacaccgtggggggggccaggaagccccctcccaaacctgcgctggcttcaggcttggaaggaccgtgctttgttaactgtcttagccaggtgctcgcgggacttcgcttgaagtcacgctgctccctgatggagaaggagggacagagcaggaagagaggagaggggccgcggagggcggaggcgctagggtcgtaggggagctgccctgtctccggagggcggtggctcccggcgcagcacaacgacatgaacaatccagagatcatggtgtccccacaacacccctgtgaggtaggttggaaggtggcaacgatcttcacgcccacttcacagacaagcccgggacacaggcaagcgcgagcgcatgggaggctgagcccggcggggcaggggcctgggccgctccccgcgtccccaccagtccctgccagagccgggccgcctgcaacacagtcacttggacacaggaaaaaagatcatgggtt

SEQ ID NO: 74634 - DNA, 848 bp, Homo Sapiens
  misc_feature (138)..(138): n is a, c, g, or t
  misc_feature (278)..(286): n is a, c, g, or t
  misc_feature (424)..(433): n is a, c, g, or t
  misc_feature (658)..(688): n is a, c, g, or t
  misc_feature (718)..(732): n is a, c, g, or t
acctacctcacaggggtgttgtggggacaccatgatctctggattgttcatgtcgttgtgctgcgccgggagccaccgccctccggagacagggcagctcccctacgaccctagcgcctccgccctccgcggcccctntcctctcttcctgctctgtccctccttctccatcagggagcagcgtgacttcagcgagtcccgcgagcacctggctagacagttaacaagcacgtccttccagcctgagccagcgcaggtttgggagggggcttcctggnnnnnnnnnacggtgttccagcccctcctctcttccgccccctagtctcccacccttccctccccgtagtgaccaattcctatctcttccctctccgcaggctcaatgaatcgaatgaatgtgaacttcttcatctgtgaaaaatcnnnnnnnnnnccattttgttctgtttgggggcttctgttttgtttggcgagagagcgatggctgccgtggggagtactggggagccctcgcggcaagcagggtgggggggacttgggggcatgccgggccctcactctctcgcctgttctgtgtctcacatgctttttctttcaaaattgggatccttccatgttgagccagccagagaagatagcgagatctaaatctctgccnnnnnnnnnnnnnnnnnnnnnnnnnnnnnnncacaaagagcaaagcagaacttataaaatnnnnnnnnnnnnnnntaaaaagtctctattcttcaccccccagccttcctgaacctgcctctctgaggataaagcaattcattttctcccaccctcggccctcttgtttttaaaataaacttttaaaaagg

SEQ ID NO: 74635 - DNA, 883 bp, Homo Sapiens
  misc_feature (227)..(236): n is a, c, g, or t
  misc_feature (461)..(491): n is a, c, g, or t
  misc_feature (521)..(535): n is a, c, g, or t
  misc_feature (645)..(743): n is a, c, g, or t
  misc_feature (759)..(771): n is a, c, g, or t
ggtctctggattgttcatgtcgttgtgctgcgccgggagccaccgccctccggagacagggcagctcccctacgaccctagcgcctccgccctccgcggcccctctcctctcttccgccccctagtctcccacccttccctccccgtagtgaccaattcctatctcttccctctccgcaggctcaatgaatcgaatgaatgtgaacttcttcatctgtgaaaaatcnnnnnnnnnnccattttgttctgtttgggggcttctgttttgtttggcgagagagcgatggctgccgtggggagtactggggagccctcgcggcaagcagggtgggggggacttgggggcatgccgggccctcactctctcgcctgttctgtgtctcacatgctttttctttcaaaattgggatccttccatgttgagccagccagagaagatagcgagatctaaatctctgccnnnnnnnnnnnnnnnnnnnnnnnnnnnnnnncacaaagagcaaagcagaacttataaaatnnnnnnnnnnnnnnntaaaaagtctctattcttcaccccccagccttcctgaacctgcctctctgaggataaagcaattcattttctcccaccctcggccctcttgtttttaaaataaacttttnnnnnnnnnnnnnnnnnnnnnnnnnnnnnnnnnnnnnnnnnnnnnnnnnnnnnnnnnnnnnnnnnnnnnnnnnnnnnnnnnnnnnnnnnnnnnnnnnnntctttgtgggggccgnnnnnnnnnnnnnaaaaaaatttttttaaaaacctttccttttgggggccgcggggcccccccaaagggaagagggaaactgtgggccataaagtgtgttttcccaaaggaaaaaacccggggac

SEQ ID NO: 74636 - DNA, 765 bp, Homo Sapiens
ggcaggagaggcgtttctggggctccagagaagtgccacgggaggcagaagtccagaactgcccatatagatgcccttctacatcctggagcccaaatcagtcatgtgggtgggaagttcccagggcagtggtcacatcgtgaaaattagcaggaaaggcggggcctttcttgtcatagctatttctgaggatgaaatgggagacatatgcccagcacctgatgtaagtttatataatgtaatattatgtacctaccactaagaaatacatgaaccgtgccatgaggacagtaagtgttcataaagcaacatgaagcaagaaacagtgcagggtgcccagtgcacacactagagagaaattgtgaacattaaggacaaggagaattggtgtctttctaaaacatacttatttaaaaacacatacccacttactaatgtggaattacacagtttgtaacaagaaaacagtctctcccattctctagtactgctcccctacccagcagtcacttccagttcattcagctatttttaaaatgtgcttatatgactcttgcttgatatatcaatcttagacattacctgttgactccctgttgtcatacatgaggctttagctctcttttgtcagcaaccctcccccatccctagttattaggttaaaaaatactcagattactatttctattactatgtgaaagttaactgcggagccaagagttggactataattaaattaccttccttgtactttctttttaatgg

SEQ ID NO: 74637 - DNA, 527 bp, Homo Sapiens
  misc_feature (103)..(103): n is a, c, g, or t
  misc_feature (517)..(517): n is a, c, g, or t
aaggaaggtaatttaattatagtccaactcttggctccgcagttaactttcacatagtaatagaaatagtaatctgagtattttttaacctaataactagggntgggggagggttgctgacaaaagagagctaaagcctcatgtatgacaacagggagtcaacaggtaatgtctaagattgatatatcaagcaagagtcatataagcacattttaaaaatagctgaatgaactggaagtgactgctgggtaggggagcagtactagagaatgggagagactgttttcttgttacaaactgtgtaattccacattagtaagtgggtatgtgtttttaaataagtatgttttagaaagacaccaattctccttgtccttaatgttcacaattctctctagtgtgtcactgggcacctgcactgttcttgcttcatgttgctttatgaacacttactgtcctcatggcacggtccatgtattcttagtggtaggtcataatattcattatataacttcancagtgctggg

SEQ ID NO: 74638 - DNA, 329 bp, Homo Sapiens
tttaaaggaagcagctaaacctcaatcctaagcattttcaatgtgagaaatctaaatatttgattttctagtgaaacatacttaaactaaactatgtaagttcaaatttgtgcttttatacttttgtattgttcacttagtgcttttgtagtaaggggatgagttaccaagaactcacagactgcccaaaatatgacgactgtgcattcatataaaaaaagttcagtgagtctgaaatgagccatgggtgtatcttgataataaagtgctatttggcaaagtagaagtatggcaggcctataaaaaaattcccattttcctaatggtat

SEQ ID NO: 74639 - DNA, 1154 bp, Homo Sapiens
tccggctaggtacgaggctgggtgttaaatcggcacgagggacaaggcgggcggctacccgcgcgcggccgaggacgactcggacctcgccccccggtgccgccagcgacgccgagccgggcgacgaggagcggccggggctgcaggtggactgcgtggtgtgcggggacaagtcgagcggcaagcattacggtgtcttcacctgcgagggctgcaagagctttttcaagcgaagcatccgccgcaacctcagctacacctgccggtccaaccgtgactgccagatcgaccagcaccaccggaaccagtgccagtactgccgtctcaagaagtgcttccgggtgggcatgaggaaggaggcggtgcagcgcggccgcatcccgcactcgctgcctggtgccgtggccgcctcctcgggcagccccccgggctcggcgctggcggcagtggcgagcggcggagacctcttcccggggcagccggtgtccgaactgatcgcgcagctgctgcgcgctgagccctaccctgcggcggccggacgcttcggcgcagggggcggcgcggcgggcgcggtgctgggcatcgacaacgtgtgcgagctggcggcgcggctgctcttcagcaccgtggagtgggcgcgccacgcgcccttcttccccgagctgccggtggccgaccaggtggcgctgctgcgcctgagctggagcgagctcttcgtgctgaacgcggcgcaggcggcgctgcccctgcacacggcgccgctactggccgccgccggcctccacgccgcgcctatggccgccgagcgcgccgtggctttcatggaccaggtgcgcgccttccaggagcaggtggacaagctgggccggcctgcaggtcgactcggccgagtatggctgcctcaaggccatcgcgctcttcacgcccgacgcctgtggcctctcagacccggcccacgttgagagcctgcaggagaaggcgcaggtgggccctcaccgagtatgtgcgggcgcaatacccggcccagcccaacccttcgggcgcctggtgctgcggctccccgccttgcgcggggccctgcttcttaatttccaaattgttttaatgccctggggggaagccccccatggacacatgacagagacatctgctgc

SEQ ID NO: 74640 - DNA, 1653 bp, Homo Sapiens
  misc_feature (659)..(715): n is a, c, g, or t
  misc_feature (1570)..(1579): n is a, c, g, or t
ctcccctctttccctcccgcccaccgcccgcaaacgtcctaggtagcgaggcctgggtggcgatcaaaaacgagggtcgagcggcaagcattaccgcgtcttcacctgcgagggctgcaagagctttttcaagcgaagcatccgccgcaacctcagctacacctgccggtccaaccgtgactgccagatcgaccagcaccaccggaaccagtgccagtactgccgtctcaagaagtgcttccgggtgggcatgaggaaggaggcggtgcagcgcggccgcatcccgcactcgctgcctggtgccgtggccgcctcctcgggcagccccccgggctcggcgctggcggcagtggcgagcggcggagacctcttcccggggcagccggtgtccgaactgatcgcgcagctgctgcgcgctgagccctaccctgcggcggccggacgcttcggcgcagggggcggcgcggcgggcgcggtgctgggcatcgacaacgtgtgcgagctggcggcgcggctgctcttcagcaccgtggagtgggcgcgccacgcgcccttcttccccgagctgccggtggccgaccaggtggcgctgctgcgcctgagctggagcgagctcttcgtgctgaacgcggcgcaggcggcgctgcccctgcacacgnnnnnnnnnnnnnnnnnnnnnnnnnnnnnnnnnnnnnnnnnnnnnnnnnnnnnnnnngtggctttcatggaccaggtgcgcgccttccaggagcaggtggacaagctgggccgcctgcaggtcgactcggccgagtatggctgcctcaaggccatcgcgctcttcacgcccgacgcctgtggcctctcagacccggcccacgttgagagcctgcaggagaaggcgcaggtggccctcaccgagtatgtgcgggcgcagtacccgtcccagccccagcgcttcgggcgcctgctgctgcggctccccgccctgcgcgcggtccctgcctccctcatctcccagctgttcttcatgcgcctggtggggaagacgcccattgagacactgatcagagacatgctgctgtcggggagtaccttcaactggccctacggctcgggccagtgaccatgacggggccacgtgtgctgtggccaggcctgcagacagacctcaagggacagggaatgctgaggcctcgaggggcctcccggggcccaggactctggcttctctcctcagacttctattttttaaagactgtgaaatgtttgtcttttctgttttttaaatgatcatgaaaccaaaaagagactgatcatccaggcctcagcctcatcctccccaggacccctgtccaggatggagggtccaatcctaggacagccttgttcctcagcacccctagcatgaacttgtgggatggtggggttggcttccctggcatgatggacaaaggcctggcgtcggccagaggggctgctccagtgggcaggggtagctagcgtgtgccaggcagatcctctggacacgtaacctatgtcagacactacatgatgactcaaggccaataataaagacatttcctacctnnnnnnnnnncctcgtcttgaatcgccacccaggcctcgctacttaggacctatacggacataacagaacatgcttatatctta

SEQ ID NO: 74641 - DNA, 1335 bp, Homo Sapiens
  misc_feature (61)..(89): n is a, c, g, or t
gtgccaagctaaaattaaccctcaactaaagggaataagcttgcggccgcatacgcggtcnnnnnnnnnnnnnnnnnnnnnnnnnnnnnaatatcaacagcaaaagcctagtgcattgggagatgtgcaacctccctgaaaatcttttctgtttctggagtacttcaggggtggcctctggccccagagcctttgccacagtgctcccaccagcccccacctcatccgtctgtttgcagagcctcatctacaggtccccacgctgccttctttactcactctgcgcttggccgttttgttatttggcttagtctacattgggcggaagtctgtgtgcacagagtgggtgttccttcgagccccttccactcagagggccacacccagcgatgccagtgaaggtggcacagcctctcttcagtttctcctgactgtgatctcactggggtagaattcccctgagagaattccctcactcacggctccctttgccagagtcagttcaatcaggtctgatgtgagcaatttacacacttgtctcagaaagtccctcagggtttgtagaggactgcaggggggcatccgctgcagactcagcctttctctgcagccatcctgcagtgggggtgagcgggcacaggctgagaactgctcttgggtggtggaagcaggtgtcacggtgcaagtctccccctgcacccctcccccagcttgagccgtgtcacccccctctccctccagcatgggcctgtgtctcaggctctctggaaggtggccctgccccggaccctcttgcaggtgtcctggtttgacttggaactagatggccatctttccaggctttggtggcccaagagcagtctgggtggatggaagtggctgtcccctcctctccagcccctgcccacccactggtggaggtgctaactagcagggacgtggcataggatgggagctgggcgtgaggtgcttggggtccattctttgtccctcagcttctcagagtccggccagcccttgtgttcccgtgccccacactttcctcctccccactgcagtgagtcaatagtccagggtggggcctggcctccctgccctgattggggactcaggaggtgaggcctggggggcttcctgccccctccttgcccacctgcctgcccccgggcagcacgggagggagagcagggtgagcacgcttgttggtttcagatgcactttctgcttgcattgccgtatctgtgcgttccttcatcctggtcctggctttatggaacaccatgtttttagcatgtttttaaataaaaacggataaagtgtcaaaagcacaaaaaa

SEQ ID NO: 74642 - DNA, 1621 bp, Homo Sapiens
gggaaaggtagttgttggcctgcctctcgcctgcacgtcactgctggactagctgtcgcatgtggctgggagctgcaaggccagtgcttgaggggccccagcagttccacaggtggtgaagcctgagttggcagaggaggagccagaagagaactgccctttctgcactggtggaaactagttatttatgccatgtggagagccagtgagatagatagatagtctgtttgttttgaggacttggaaagttgttcctatgaagcctggagcttggatggttttgagaggttaatggtgcctccacactcactcttccctagttccaggattactgtcctagcagctaacggttctactctcttccccagagtgtagacaggcagcaggtctccccacagctctgaaaggaccctggtgacagctacaccctcagcaccaggagctggccttcctgatgagggaagcttccaggaaacacagaatccacatgaccttaagattatttacaactcagtcatggtgctgctgtcctccaggcttactggcccctcctgactggcatcaggggcttcctcaggtggtggagagagtttactttcaacaactagtttattcaagaaaagaacttactgattcctctgttcctaaagcaagagtggcaggtgatcagggctggtgtagcatccggttcctttagtgcagctaactgcatttgtcactgatgaccaaggaggaaatcactaagacatttgagaagcagtggtatgaacgttcttggacaagccacagttctgagccttaaccctgtagtttgcacacaagaacgagctccacctccccttcttcaggaggaatctgtgcggatagattggctggacttttcaatggttctgggttgcaggtgggcactgtatggctgggtatggagcggacagcccccaggagtcagagcctcagcccggctgccctggtggaaggtacaggtgttcagcaccttcagaaaagggcataaagtggtgggggacaattctcagtccaggaaaatgcattgaccattgctggctatttgcttacctagtaagaattggattcatttttgaccagattattcttctatgcttttttgcaataaatcaaatcccacatatctacaagtggtatgaagtcctgcaccccccaggaggcctgtccaggcatgtcttcagaggcagggtgggttacactcatttacctcccctctccccaccaaattatgacacaaacgagtatgtttcctctctagaaccctgtaatgcctcctcccccatccccagagctccttactgtaggtcttaccctggacaaggattttttcaagttggaggcacagaacatgagcaatctgacattcccacagcccctcaaacatgcaaggctactaaggcaggaggagtataaatgatggatattgaccaagacctgcttggacggagaccgccatattatctgttctcttcgttcacaaaacagccttcacttgtctcagaatttgatggacacatactgtgatgagcaggagcttcagatgcactctttacacattttgttgaaataaacctctacatttgtagaagaaaaaaaa

SEQ ID NO: 74643 - DNA, 927 bp, Homo Sapiens
  misc_feature (708)..(716): n is a, c, g, or t
aaatatttacttaatctggaaaacaatgtaactatttttaaagtggttacatctattcttgctgaagaacaataaacagaattttttgactaagcataaccaaatttcagaacagtctaatcaatgccaagtatccaagggcaaactctaatacccatccattgtgcaaaaccacaagcacgcaagtattaaataagagcaagctgtcctgagcccatacctaatgaatttgtgtcttaaatattgtacattgtgtttgaggcttgtcaaaactgggattatggcaagaaaggttgcctaactcatacctttctgcctcaaattccaggtgctaaaggctaatggcattttaaacatcttacatttttaaaaatttatattgcctctgccaaacaggcctaatagttaaaagcaagttgagacaaaccaggcagattcagtgtgtggaacaggaaggatgtgctttaaaaaaaggtggaatccctcaaaaaattctatagggagacagcagccttaatctacataattcttcatctcgccaattcagccgcagcctttaaagagttagtgttaatggctttctggtttgaaaacaaaaatgcatctatgtggttgaaagtttgggaggagattcaccaatatctgaggagaagatggagtgaagggaattcttactttttgctttatacctttctataatatttagannnnnnnnnactgtaagtatggatcaaattgcaaaataaagaaaaatgccaaccttagaaaagacaataaatgcacaaaagatataaacaggaacagcaaatatttatattttttccattttgctctttttaaatctatgtttagaactttatatcttgggacttatgtatatatataccttttaaataaaataaattttctaaataaaaagttgaaaaa

SEQ ID NO: 74644 - DNA, 664 bp, Homo Sapiens
gatgcctgtgggcagccttcctcaccctggatgcctgtgacttggtttccatgggggcttcctaagctcagggaccccaagcctccatcaaatctaatgacccgccctgtctctgaacacacctgtgttgtccccgagcccctcaccaaccccctctgcaacccggcccacgcatttcccatcctgaagggtccagctcataggccggcccatgtgttccctttacccctgctttgtccctacctggtggggagctgtcccttctgggccctagtgtggcacttcacacacaaatgtgtcctgtgggtggtatctgggcctccccctgcagtgaggggatgaccaatgtgcagagctcactgggcctggatatgggctcgggtggcacagaacagagagaaagtgctccgtaaaagtgagctgcgatgcggaggtgggcaagctcttccctggagggggaagagctctcaacccagagggatctgaccaggaaggttcaccccccctccacccaggaagcccctgcagacagtatgtgttttaggctttgctggccaaatggtctctgccgcgactactcagctctgccattgtggctgcagagtgaccatagaccttctgaaagtgaatgagtatgactgtgttccaataaaactttattgac

SEQ ID NO: 74645 - DNA, 433 bp, Homo Sapiens
tcccatttacggcagtggtaccatgttttggatgtgtgatgtttatatgggagaacaaaaagctgatgtatagccctgtatacagtgtagatactatttttgtaaaaacacaaggctaaattaatgaacaagaatactgaatatttcatcattaaaaatttcttgtatttcttgtgcattaatctgacgataatttccctgtatattatgttcatttagctgtttgtaatttttgttaattagatcaggttgtctgcatttgttggtgtaagtgaacatcatcacagttatcctgagttgagtttaagccaaatacatgcatagaaaagggtcttcctattaatggaagaaggtaatttttaggatgtgtattatttcagttttgtatgtttaacttttattaaataaagtgtttttaaaatctcaaaaaaaa

SEQ ID NO: 74646 - DNA, 1567 bp, Homo Sapiens
ggggctaggtacgaggcctgggtggtgaattcggcacgaggagcccattgggaggccgaggggcgcgcccgtggggtggggagtcccggcaccccaggtccgcgccatgggccgcaggagggcagcgcgcgggccgggggcggaaggcggccgccctcggcacctcccgacgcgctccctggaggccttcgccgaggaggtcggcgccgcgctgcaggcttccgtggagccaggggcggctgacggcgagggcggcccgggcccggcggcgctgccctgcacgctggccatgtgggagttgggccactgcgacccccggcgctgcacgggccgcaagctggcccgcctggggctggtgcgctgcctgcgcctgggccacagattcggcggtctggtgctgagccccgtgggcaagcagtacgcgtcccccgcagacagacagctggtggcgcagtctggggtcgccgtcatcgactgctcctgggccaggctggacgagacaccgtttgggaagatgcgagggagccacttgcgcctgttgccctacctggtggccgccaaccccgtgaactatggccggccctacagactttcctgcgtggaagcgtttgctgccaccttctgcatcgtaggctttccagaccttgctgtcattttgctgcggaagtttaaatggggcaagggcttcttggacctgaaccgccagctcctggacaagtacgcggcctgcggcagcccggaggaggtgctgcaggcggagcaggagttcttggccaatgccaaggagagcccccaggaggaggagatcgatcccttcgatgtggattcagggagagagtttggaaaccccaacaggcctgtggccagcacccggctgccctcggacactgatgacagtgatgcgtctgaggacccagggcctggcgccgagcgcggaggagccagcagcagctgctgtgaagaggagcagacgcagggacggggggctgaggccagggccccggctgaggtttggaaaggaatcaagaaacggcagagagactgagggttgcagacacatatatttttgaggctgggtgacgagaaaatctagagacatgagggacataaatgggcctggcagcctcggctctttgcggctgctggcaggactgagctgtccgggttctccccacacttccagcacagctgtgctctgtgtcctgcctcggcgctctcgcaaatgaagctgcaggccaagaagccccttgtgagtctgtttttcacactgggcctggggaagggttggggcgaactcttggctctgcctggaagggtcgtggagcaggtctcaggtggccacggatatgtgcgtgaaggacagctgaccagttggcacggagcccttcacactgaccaccagccttgggtgacgtccctggcctcagagtgacctcaggggaacctttccccggcctgggagccccgtggggactggagacctatgcggttcttgactcacctgccctttgcatcccctctgtgggtgaggctctggaccatccacccagtggtgccagtggcaccc

SEQ ID NO: 74647 - DNA, 748 bp, Homo Sapiens
cctgacccctggacctggaaatggaggcttcatgtgcccgccttggcggcttaagcctgctgctttggcagtgccatgggtgagccgagcagctgtgaggtgggtggagcagggctgtagcccacgccgggtgctattccaggctctaggggctggtgctcatccccacccccagcgacttccgtcctacctggcatgctgcagccctctgccggctgtggtgtcctctgaatttggacccaggttgcctgctcttgttgtgggggtgggattggggctgtctgtgtttcccaggtggagctcatgtttgtgatcctctatctggacagctctccagaatcctgtgttgcccctgttctgcctttctgggatgggagagaaggtgagggagccggcgagccggttctaccctctctgctaagggcctagcacgctttgatgaggttcctggacgtgagaccctcacaaagaccaaccattcctctaatagccatttaacggtactgcagttcatgggaaaatgtcctcattcttaggagatagatgctggattatataggtgaatgccttcaagaaatgtgtaatttaattccaaatagttccccccaaaatacacaaagcaaataaggccaaaatgttcattgttgaatctgcagtggctggtatttcagtgaacagtgtacttgttctttcaacttttctgtatgtttggaatttttcttaataaaagattgtgggaaatggtcaa

SEQ ID NO: 74648 - DNA, 536 bp, Homo Sapiens
acgtggagccctcacttttcaccaactggttcagcgggcacctcaacttccagatcgagcaccacctcttccccaggatgccgagacacaactacagccgggtggccccgctggtcaagtcgctgtgtgccaagcacggcctcagctacgaagtgaagcccttcctcaccgcgctggtggacatcgtcaggtccctgaagaagtctggtgacatctggctggacgcctacctccatcagtgaaggcaacacccaggcgggcagagaagggctcagggcaccagcaaccaagccagcccccggcgggatcgatacccccacccctccactggccagcctgggggtgccctgcctgccctcctggtactgttgtcttcccctcggccccctcacatgtgtattcagcagccctatggccttggctctgggcctgatgggacaggggtagagggaaggtgagcatagcacattttcctagagcgagaattgggggaaagctgttatttttatattaaaatacattcagatgtattatgg

SEQ ID NO: 74649 - DNA, 678 bp, Homo Sapiens
  misc_feature (447)..(447): n is a, c, g, or t
  misc_feature (449)..(519): n is a, c, g, or t
  misc_feature (592)..(592): n is a, c, g, or t
acttccctttcttcttccttatataacatgaagaacattgtattaatctgatttttaaagatctttttgtatgttacgtgttaagggcttgtttggtatcccactgaaatgttctgtgttgcagaccagagtctgtttatgtcagggggatggggccattgcatccttagccattgtcacaaaatatgtggagtagtaacttaatatgtaaagttgtaacatacatacatttaaaatggaaatgcagaaagctgtgaaatgtcttgtgtcttatgttctctgtatttatgcagctgatttgtctgtctgtaactgaagtgtgggtccaaggactcctaactactttgcatctgtaatccacaaagattctgggcagctgccacctcagtctcttctctgtattatcatagtctggtttaaataaactatatagtaacaatgaaaaanannnnnnnnnnnnnnnnnnnnnnnnnnnnnnnnnnnnnnnnnnnnnnnnnnnnnnnnnnnnnnnnnnnnnnntggtcggcccgcctcgggccctccaagaagcttttctaaacctttccgtttgggcccgccggccccaattagngaaaggggaactggggccctaaccttgtttcccaaaggaaaatcccggggccaatgaaaaagggctttggaaattcccccccaaat

SEQ ID NO: 74650 - DNA, 727 bp, Homo Sapiens
gtggattggaggggagcttgaggaatataaggagcggggtggagactcaggctatggacaaggacagccccaaggttgggaagacctggccttagtcgtcctcagcctaggggcagggcagtgaagaaagctctccccgctcctgctgtaatgacccagagtagcctccccaggccggcatcttatgtgtgtcttccaccatcctcatggtggcacttttctaggcctgtctcccagcattgtgcaaggctcggaagagaaccagggaagtgaaactgggtgaaaacagaaagctcaatggatgggctaggttcccagatcattagggcagagtttgcacgtcctctggtcactggaatccacccagcccacgaatcatctccctcttgaaggattttatttctactgggttttggaacaaactcctgctgagaccccacagccagaaactgaaagcagcagctccccaaagcctggaaaatccctaagagaaggcctggggcaggaagtggagtgacaggggacaggtagagagaagggggcccaatggccagggagtgaaggaggtggcgttgctgagagcagtctgcacatgcttctgtctgagtgcaggaaggtgttccagggtcgaaattacacttctcgtacctggagacgctgtttgtgggagcactgggctcatgcctggcacacaataggtctgcaataaaccatggttaaatcctga

SEQ ID NO: 74651 - DNA, 682 bp, Homo Sapiens
gagattgagcatttggaatcagatcatcaattccagaactgtgactctgtgaggatagacttcaaatgcaggcccagccctaaaggaaagcatcccatttgcagtaattggcagcaacactgtagtagaggccagagggcggcgagttcggggtcgactctacccctggggcatcgtggaagtggaaaacccagggcactgcgactttgtgaagctgaggacaatgctggtacgtacccacatgcaggacctgaaggatgtgacacgggagacacattatgagaactaccgggcacagtgcatccagagcatgacccgcctggtggtgaaggaacggaatcgcaacaaactgactcgggaaagtggtaccgacttccccatccctgctgtcccaccagggacagatccagaaactgagaagcttatccgagagaaagatgaggagctgcggcggatgcaggagatgctacacaaaatacaaaaacagatgaaggagaactattaactggctttcagccctggatatttaaatctcctcctcttcttcctgtccatgccggcccctcccagcaccagctctgctcaggccccttcagctactgccacttcgccttacatccctgctgactgcccagagactcagaggaaataaagtttaataaatctgtaggtggcaaaaaaa

SEQ ID NO: 74652 - DNA, 621 bp, Homo Sapiens
  misc_feature (334)..(446): n is a, c, g, or t
cacacagaggcatttgcaccagctccctgcacacacgtgcctggcgtgctcagaggaacaccaataatgctcaggaagacagggcttgctcaataatgtccggctgtcatttctccacataagagccttccatggctccctactgcctacagcattgaatcccaacaagtcatactctttggactttgaaggttctccaccctgtgccccaccctccccacagagctcttcactctgtctctgttccctgctttggccagtggctatcctcaaagtgatcccccaacgtcagcctttggggtagttagggctacaggcacatgccccccccaannnnnnnnnnnnnnnnnnnnnnnnnnnnnnnnnnnnnnnnnnnnnnnnnnnnnnnnnnnnnnnnnnnnnnnnnnnnnnnnnnnnnnnnnnnnnnnnnnnnnnnnnnnnnnnnngttggagttgatgcctggatacaggagctctgtgggtgggagtgagacaaaacacagggtcctgagctctggggaccaagcaatgtcctctggtgaaaaaaatcctggacttgctggcagaagatttgcctcttactcgccatgtgctctgaatacatttacctgccctctgggg

SEQ ID NO: 74653 - DNA, 363 bp, Homo Sapiens; identical to SEQ ID NO: 15284

SEQ ID NO: 74654 - DNA, 483 bp, Homo Sapiens
  misc_feature (49)..(49): n is a, c, g, or t
  misc_feature (59)..(59): n is a, c, g, or t
gggttcactgtcaacctgccttgttgggttaaccagcccaatggggccngcaaaaaagncggggcctggcggaccagcgggcgagggccctgggagatggtgctcgtcgtgcacggcttcccgtcctccgtggccgcccttcgggatgaagaggggcccttgtgttgcccccaccctggctgcctgctaagggcccatgtgatctgcctggcagaggagtttcttcaggaagaaccagggcagcttctgcccctagagggccaatgcccttgctgtgagaagtcactgctttggggagacctgattctgctgtgccagatggacactgagaaagaagtagaagactcagaattagaagaggcacactggacagacctgctggagacctgatcctcagtgtccttaccccctcctacctcttttctgtgccacctgctgtgggtccagcaggtttttacttgagtacaataaaaagtctgagtc

SEQ ID NO: 74655 - DNA, 928 bp, Homo Sapiens
tactgcctgaacccctggaccctaggtcacggatcaaccccctgctgtggttcccgaaccccaaggcccgatgggtcccgcgggggtcgcggctacgtggggttcactgtcaacactgctcgtcgggtccagcagcacaatgggggccgcaaaaaaggcggggcctggcggaccaacgggcgagggccctgggagatggtgctcgtcgtgcacggcttcccgtcctccgtggccgcccttcggtttgagtgggcttggcagcacccgcacgcctcgcgccgcctggcgcacgtggggcctcgcctgcgaggagagacagccttcgctttccacctgcgcgtgctggcgcacatgctgcgcgcaccgccctgggctcgcctcccgctcacgctgcgctgggtgcgcccagacctccgccaggacctttgcctcccgccgccgccgcacgtgcctttggccttcgggcctccaccgccccaggccccggccccaaggcgccgcgcaggtccctttgatgacgcggagcctgagccagaccagggggatccaggggcctgctgctccctgtgcgcccagaccatccaggatgaagaggggcccttgtgttgcccccaccctggctgcctgctaagggcccatgtgatctgcctggcagaggagtttcttcaggaagaaccagggcagcttctgcccctagagggccaatgcccttgctgtgagaagtcactgctttggggagacctgatctggctgtgccagatggacactgagaaagaagtagaagactcagaattagaagaggcacactggacagacctgctggagacctgatcctcagtgtccttaccccctcctacctcttttctgtgccacctgctgtgggtccagcaggtttttacttgagtacaataaaaagtctgagtcaaaa

SEQ ID NO: 74656 - DNA, 957 bp, Homo Sapiens
cgacggcagtaactataacggtctctaaggtagcgaggcctgggtggcgaattcggcacgaggagacaggagaggggcacgtaccggcgctacggcttcctgcaggctgcctccggatagtccccgagagcttgttccgaagcaagcaccctgcagccctagcgatccagccctcccctggaccctaggtcacggcaatcaaccccctgctgtggttcccgaaccccaaggcccgatgggtcccgcgggggtcgcggcgaggccagggcgctttttcggcgtctacctgctctactgcctgaacccccggtaccggggccgcgtctacgtggggttcactgtcaacactgctcgtcgggtccagcagcacaatgggggccgcaaaaaaggcggggcctggcggaccagcgggcgagggccctgggagatggtgctcgtcgtgcacggcttcccgtcctccgtggccgcccttcggtttgagtgggcttggcagcacccgcacgcctcgcgccgcctggcgcacgtggggcctcgcctgcgaggagagacagccttcgctttccacctgcgcgtgctggcgcacatgctgcgcgcaccgccctgggctcgcctcccgctcacgctgcgctgggtgcgcccagacctccgccaggacctctgcctcccgccgccgccgcacgtgcctctggccttcgggcctccaccgccccaggccccggccccaaggcgccgcgcaggtccctttgatgacgcggagccttgagcccagaccagggggatccaggggcctgctgctccctgtgcgccagaccatccaggatgaagaggggccttgtgttggccccacctggtgctgctaaggccatgtgatctgctggcagaggagttcttcggaagaaccggcagtttggcctaatgggaaggcctgtggaaaaacacgcttggggaatgatgggg

SEQ ID NO: 74657 - DNA, 1034 bp, Homo Sapiens
  misc_feature (637)..(649): n is a, c, g, or t
  misc_feature (722)..(748): n is a, c, g, or t
tcccgggatcgctcgccgactggacagcagtctggcttccgcggtcggacttctacacccgcctccagacaggagaggggcacgtaccggcgctacggcttcctgcaggctgcctccggatagtccccgagagcttgttccgaagcaagcaccctgcagccctagcgatccagccctcccctggaccctaggtcacggcaatcaaccccctgctgtggttcccgaaccccaaggcccgatgggtcccgcgggggtcgcggcgaggccagggcgctttttcggcgtctacctgctctactgcctgaacccccggtaccggggccgcgtctacgtggggttcactgtcaacactgctcgtcgggtccagcagcacaatgggggccgcaaaaaaggcggggcctggcggaccagcgggcgagggccctggtgagagggggaggccttctgtgccgggaggaaggcgtcccagaggaggcggaccccgcggggcacaggcctgttgagaaggaccggccaggactggtgacagaggcggggcgtctgtggtggggacggggcctgtcgcacggggaggagcgtgacggggaggcggtgcccggggcatctccgcggcggaactcagggaaagagctagctnnnnnnnnnnnnnatgatccaggctgggttccaacataagggctcctggtgggcacgctgggggcggcgtggaatggcaagaaaannnnnnnnnnnnnnnnnnnnnnnnnnnccgggtattgaaagccaaggcccttaatatgtaggtacaggcgaaaagggaacaccacttcctctccgacatgaaactcagaaaacagaggtaaccccgtcctcctcgggtgaggcattggagaagggaaaagcctctcctatgtaacaaccggtccggtggacgcgaacaacataatctcacaccaccgttattaaaatacatcccccgcaacatctgtttgtaatcgcacctatccggttttagggaacggatctgccccccgcgccggacacgcacgccctac

SEQ ID NO: 74658 - DNA, 778 bp, Homo Sapiens
  misc_feature (361)..(373): n is a, c, g, or t
ctttcagctgggaacatggcaggtgagcagagcttggtgcctctgccgtggcccctgctggggcagcccgtgttgccggagcctctaagccaaagagcccgttggccgtggttggtgggggtggacgtgggggtgtcccacatggaccagactggcgtgggtgagctccacaccctgcctggcaatggtatgagagtcggacctggacagggccagctgctgggggagcggcactggggactggaggctggaagcgggtggtgtgtgtcccctgtttacttttagctgagctggggttgggtgtacgggttctgttcctctgagccctgcggcccacctgatgtttacgtgtgtgtgtgannnnnnnnnnnnntggcaggtgtccccccctggtccccgccccaagagcctgctgtctgtatggaggaggtgctagcccggtccaccgggctgctgcccacccctgcatgccccagttgcccaccccgcctgcccctggacatgaagtggtcacgcttcatccacggctccttcccacccctcggcagtggctgtgcaatgttttaagttcacaagttcctgctcctccccacactgagctcctttgttcctccccctccagcctttgcctgggaactggtccttgtttgccgggcttctcggagggttcactgtacattcgttctcaggtggtcttgtggctgtctttcggaaaatggttattttatatgatttgtcatggaatttgttctaataaatcattcttctatcacatggc

SEQ ID NO: 74659 - DNA, 1001 bp, Homo Sapiens
tttttttcattttgataacaactgtttaatttactattcagatggaaagcctggtaggatatttgggtaatggtctgtaattaggtagcataactttgtacacatgaatcaactgggacccgatacaatctaaaacagaaattcaaatatattttccctcaatgaaaagggctgaggaagtcctccaaaatgtggagacatttcaagtctacatcaacacacatctggacctgtgcagcattcatttaattctaaaagaagaggcatactgctcagaaaaggggcagagatttcccagtcatcttgcttattaaaacggtttagataaaccacacttttagctagatgtacactagacagcaatgttttaacaagtctaaaacactatacaggttttaaaatactatgataacaactcagtcatcattgcaaaaaggcattcaacatgaataaaatgtttgaggaaactgatgtttacctcttttaataccaaagctttttaaaaagttttaatcaatttaagataaaacttttaaaatatgtactacatatctgtgtatgcaatttcacctttacttaattacctagaggcataataaagaataatcatcagatgatgtagtatagtgatgtcctctaggctgggtagcggtccttacactaatggccttggacagtgtatgctctcagagtgtttttcagtctccttcctttcaagccatcccttctaaacagctaatatgctatagtctggacaagcaaataattaaatttattaaaatctctcataaaaacaaatgcataagctctaacacacagactttgtgacttatatgggttgctcagaggcatttttaaaaaaaacgattccaagtttctgagttgtgttcggttttcacaagactgccagattacctctagatgaatgaggcattactgtacatagatacttaaacaagttcatttgaatattaacaaaaagatataactaaactgattat

SEQ ID NO: 74660 - DNA, 1003 bp, Homo Sapiens
  misc_feature (122)..(131): n is a, c, g, or t
  misc_feature (459)..(468): n is a, c, g, or t
ctcgggtttttaaaaaaaagggttaagggactttgcgcttttgttaagtaaacccagttgcccacaaaaagtgtagagggaggccattccccaaaatgggctcggttgaggagcccatgggnnnnnnnnnngggaagttgaatttggaaaccttaaaggggttccagaaatctcccaaaagaagggagtgggttttgggatagaaagcatttggaggacaggtttgctccaaaaacctttatgggttatgaggaaaacttaaccccgggggaagaagactttttcagtagccctgttctgtcttggtgatttttattttaagtgaaccctttggatctatctttaactctctttatgtgtgagtctaaattccaattctgcagcagatcagtaaactcacagtatttttcctgtggaaatctattcaataaggaaaccaagacaggataataaaatttnnnnnnnnnncaactttgaattcccctgcctaggtcttccagttgttttccagcgcatacctcaggtatgactttgctagccggggacaaaattagcaccttccgattctctagtccaaatgaactttgtgctaaataaaaaattattatactacataataaagttacagacagcaggaaatgcaagagctaggagattcctagattatatctgccaagcaaataccttaaacatccacctgaaatcctactaccccctcttctgagataatttgcccagcccttctcttccccacactcactcaatgtcacccccttctaatccccaaaactgtttttgtggtctttgtagcctatagtagttttctcacatctttccccctagacttttctgttttccagtttcagacaaaaaaactcttcagctttttccagtgtgtctccttaacagtaactttaccacttgaaatcttatttcatagaaaaactaaattggtgtggaaaggctgcacacaataaagttatattattttccatgaaaaaaa

SEQ ID NO: 74661 - DNA, 2097 bp, Homo Sapiens
cgtgtaacttttctgaagaccatggactacaccgtaagggaattcaggaaatgaaaccggactcaagatgggcaccagcggctgtcggtgacgagcctgctcgtctgccacggattgctgatggtcggcaccagcctgggagtcctcgtggccctgccggtcccacgtctgcaagggattcccaaagtgaccggaagaggcatggtctcctaccatgcacacaacagtcctgtcaaattcatcgtcctggccacggctctgcacgagaaagacaaggacaaatccagggacagcctggctcctggccccgagcctcaggacgaagaccagaaggacgcacttccgagtggaggagctggttcatctctgagccagggtgaccctgacgcagccatctggttgggagattcactgggatcgatgactcagaaaagcgacctgtcctcctcatctgggtccctgagcttgtctcacggctccagctctctagagcacagatcagaggacagcaccatctatgatctcctgaaggatcctgtctcgctgagaagcaaagcacgccgggccaagaaagccaaggccagctcggcgctggtggtctgtggagggcagggccaccgccgggtgcacaggaaggcccggcagccccaccaggaagagctggcgccgaccgtcatggtctggcagatccctctgctgaatatataagcaggacggccgccttctgctgtcagaatttgcaatcaagggtgacttctcagctaatcctacagcctgagtgggtaagctgtgttctacactgggttggggaataaattaaaaacagtatttgggggagaaacgtgcaatagcgtaatggtggtgtccctgccaattccttccttctcttctgtacagcagaagtaattacaagcacttctcacgaaggcagaagactgatgcaattttcgagtaattgagtgcagttctgggaaaataccacattctttttgactgctgtagtccatatatgaatactaaatgttaaacttcatcagcgtcagacctattgtatcatattagagaatttgcagactaagaatttatgagaaaatatatgtattcagtagtgcaggcatttattaacaattcttaaaagttttacctgattcagattcacgacttttatttatattctatatttttgaatttcagagtaaaatttgttaacaattttaaaagccaggtaacacctaccagtccagttagcatgatttgctttcagaagtgagctgggttttccaaagtggtataatgtgtgtactgtatattttaacaaagtaatatttttgtattgcatttttctattaaaaaattaacagttaatgtttcagtcaatgtattatctgtagcatttcacaaataatgtttgctttgaaccaaaatgctcagtgcctatcaacatttggactcaagcatcaacaccaaattattcctcccttctcgtataaatagagtgactatccacaggagaaaaggtgtgtgcttaagtattagaggaagataggcagagaagtcttgcttagttccttcgtgcagcttcttgcccctgttgacgtggaatgctgtgtctgctttagcacgcacgctccgaatgactcctggtgctaggccatgctggctgctgtcactgagcgggactcaggccaagaggcgtgacctcgggccagcctgtctgttgtgcagacgcctcctctgcagaacgcatcagtttctattctgcagttgcagagccagccccgcgtgagaacgtgcataatgagtgcacaccatcatgtcaaggtgcatacttagtgagcgccatcctgctgaacgtgtatttcagtgtttcacttactggacggataacaagaaaaaaatcctaacacaggcagtcaccagaaataaatgtctcagcactttacagatgactaaaaatgttaattttatgacttagccaaatatgttctaggttgcatatatcccccatgtgaaagtgatttcttcccaagcttctcaaactgttagctgctgtctgacttcatcaataaagtatttttattttaaaatgcaaaaaaa

SEQ ID NO: 74662 - DNA, 713 bp, Homo Sapiens
cctgtccactcactgccaggcacccactcgtcatcatacccttcattggcttcctgtcttccttgtgtcactgtccccatggttcctgggatcacctctcaagtaaatgatgtggaccaaagtcctgtctcagggtaaccatctctgcttattcctctgccacgtctttcccttctcctctctgctctcataaagaagaatgggagatgaaagtggaggggcagctgaggtggggcggcatcaggctgatacaacaccccagggaaccctgcttccatgtaaccctgaccttaaatccctatcctataataaagagttgggcacaacagaagggaaaaggaagtattctgcaaattgttttccataacagtgcagaggacacactttgcaatgtgtaatttgtgcagtatgacatgcatttgggtgtgtctggtcaggtacatcatgtggtgtccctgttatgcattttgcagactgacactctgcttaaccagtccttccgtgctgtgctgttttgtaagctcttaaccagaatgcaaaaatgttaaataactgtctggttttattttccagccctctgggatgagtctgatgacagtaactcagaaattgaggctgctttacgccccagaaaccataacaccgatgattctgatgatttttatgactaacgtgctgtgacattggtttcaaataaagtctttaaacaaact

SEQ ID NO: 74663 - DNA, 891 bp, Homo Sapiens
cagtcgacggtaccggacatatgcccgggaattcggccattacggccgggggccttaaaattaatccatgctgagcaagaaagagtgccctatccactgaaaaaaatgtatttgcaaaccctaagctctcctgattcagaaaaggaatcctccactaacgcaccaacaagagaacctggacaaacaccagactcagacgtaccgagggcacaggtgggtcagcatgttgccaccttgaaagaacatgataattctgtcaaagaagaggcaacagcattattgagaaaagcccttacagaagagtgtggccgtaggtcagctattcacagtagtgaatcatcttgcagcttgccatctattctgaatgacaatagtggaataaaggaagccaaacctgctgtatggctcaacagtgttcctacaagggaacaagaagtttcaagtggctgtggagacaagagcaagaaagaaaatgtggctgcagatatcccaatcacagaaacagaagcctatcagttgctgaagaaggccacccttcaggataatacaaatcaaactgaaaacaggtttcaaaagacagatgcttctgtgtcacacttgtcaggtttgaatattggcagcggtgcattcgagacaaagacagctaacaaaattgcttcggaagctagtttttcatctagtgaaggaagtcctttgtcaaggcatgaaaacaaaaagaaacccgtgatcaatttaaaatctaatgccctctgggatgagtctgatgacagtaactcagaaattgaggctgctttacgccccagaaaccataacaccgatgattctgatgatttttatgactaacgtgctgtgacattggtttcaaataaagtctttaaacaaactaaaaaa

SEQ ID NO: 74664 - DNA, 516 bp, Homo Sapiens
tttgtttgtttaaagactttatttgaaaccaatgtgacagcacgttagtcataaaaatcatcagaatcatcggtgttatggtttctggggcgtaaagcagcctcaatttctgagttactgtcatcagactcatcccagagggcattagattttaaattgatcacgggtttctttttgttttcatgccttgacaaaggacttccttcactagatgaaaaactagcttccgaagcaattttgttagctgtctttgtctcgaatgcaccgctgccaatattcaaacctgacaagtgtgacacagaagcatctgtcttttgaaacctgttttcagtttgatttgtattatcctgaagggtggccttcttcagcaactgataggcttctgtttatttttaaacaattcctttgctgaaagtcttttccaagtcttcactatgcttctatgcattatgcatactgcagagagagagaggatcacacagggctgggcaacaaaatatgtattaattgatgtat

SEQ ID NO: 74665 - DNA, 547 bp, Homo Sapiens
cggcacgagggcctgcccggttatgagcaatgggtgcttctgaggatgaggagagaggcaagaaacatttcattggtaaaatacagggtgctgataattaattagacatggaggccaggatcccctgcaaattcatacttgcaaattacaatgctctgcccctgtggtccatggcacccgtgtggtcctgtctgtgaagaactgagcctccagaagccctcaggttccacccaagggacagctgcaatggcagtccctgtgagcatgcccgcgtcaggactcacatgagggtgcaaacaacaaatgcatgtcacagagttttttggttaaaacagaaaaagaaaatctagtgtccgattatctctctcaccattagattttaaattgatcacgggtttctttttgttttcatgcctgcaaaataaagaaacagtctaagttctgaaaaagaaaagacaatgagactaatattttcataatgaacgcattagagaagaagcactttgattcactggaggccagaactttacacttacttcccagagtt

SEQ ID NO: 74666 - DNA, 1211 bp, Homo Sapiens
  misc_feature (50)..(50): n is a, c, g, or t
  misc_feature (80)..(81): n is a, c, g, or t
  misc_feature (194)..(195): n is a, c, g, or t
  misc_feature (201)..(202): n is a, c, g, or t
  misc_feature (205)..(205): n is a, c, g, or t
  misc_feature (259)..(259): n is a, c, g, or t
  misc_feature (987)..(1077): n is a, c, g, or t
ccaaaaatattcatccctccgtcactgaaatatctattcagccaccttcntatctcgtgtaggaggcacgttatggactnntaattccatgtccatatgtccactaccggcagtagccaaagctagctgttcagtcccacagaagagacagtctctgccatgatgacaggcactgctaggcttgttttcttgtnntccctnntgncagtgtgacttcagaaactagatgtatatgcacaagggattgagttaccactanaactaggaaatggagttttcaatctatgttcttgcctcttcatacttttatttattttttgtcatcctgccttatactgggctaacaatgagataaaataaaaatacctttgaatactcttttccctttcatgcatttaaagccatggaggaactagaccattagctgttgccgtcacatgcttagacaccagtttacttagcgtgttatgaccttcctcacccatactaccaaatttaaatgggtcccgacttcaccctctggaaggaagtaaactcttctctccccatggtttcagagcagtttttacctgcaagcaccatctctgtatgtgctcttactagattatacagttcttgagagggattgcatcttggtgtttttgtatttccacctcacccccagcacatagcccagtctcttgcacaaattaagtacttaatgtgtgttgagctaaattgaataaaggattattagcattagcatattttgtgccttggttgtataagctggttgtttgttttgttacctttgcaaatatttatgattatcacccccccacatactaaattgtttttaaaagttttgcctttccttcagatactaccccaggcaatttgctgtagataatgtgattgcttccaatgacataattatcccaaactctctgccccggatatactttgccaaacgaaatttgaattctctgaataaattggtcatgtctnnnnnnnnnnnnnnnnnnnnnnnnnnnnnnnnnnnnnnnnnnnnnnnnnnnnnnnnnnnnnnnnnnnnnnnnnnnnnnnnnnnnnnnnnnncccttgggggcccccccggcccccaaaaactttttaaaaactttctttgggggccggggccccttggggaagggaactgggccataggggttcccaaagaaacccgggccaagaaaaggggtgggatccccccc

SEQ ID NO: 74667 - DNA, 1102 bp, Homo Sapiens
tacggctaggtacgaggcctgggttttgaattcggcacgaggcgagtgtcggagatggcggggcttcagcacctcggccgtcctgggccgccggacacccccgctggggccgatgcccaacagtgacatcgacttgagcaacctggagcggctggagaagtaccggagcttcgaccgctaccggcgccgggcagagcaggaggcgcaggccccgcactggtggcggacctaccgagagtatttcggggagaagacagatcccaaagagaagattgatattgggctgcctccacccaaagtctcccggacccaacagctactggaacggaaacaggccatccaggagcttcgggccaatgtggaagaggagcgggctgcccgcctccgcacagccagtgtcccgctggatgccgtgcgggccgagtgggagaggacctgtggcccctaccacaagcagcgtctggctgagtattacggcctctaccgagacctgttccacggtgccacctttgtgccccgagtccccctgcacgtggcctacgctgtgggtgaggatgacctgatgcctgtgtactgtggcaatgaggtgactccaaccgaggctgcccaagcgccagaggtgacctatgaggcagaagagggctccttgtggacgttgctactcactagcttggatgggcacctgctggagccagatgctgagtacctccactggctgctaaccaacatcccgggtaaccgggtggctgaaggacaggtgacgtgtccctacctcccccccttccctgcccgaggctccggatcaacgtcttgcttcctgtcttcaagcaggaccagcgattgattctctgaggacgcacgccctcaccctgtatcagtggccagcggacttcgactttggattctacagaaaaccagaaacagatccagcggttgtcttctccattgccggggatgactcggtactacatctccacagattcggaagcgggagcgaggtgagtcgtgggagccattaacacagaaagactccaagggaccgccaacgaacgtagggacaagaccacggataaaaagcaaggggaacacgctcacgcacaaa

SEQ ID NO: 74668 - DNA, 1026 bp, Homo Sapiens
acgcccaaccacggggaattgggcttcccccgctgaaaagacaaccggcggatcatgtttctgggtgttcttagaaccaaaccgaaggtcccttggacaacttattaccaggttaagggctgcttcctccagagaagtcaatcgcttgtcctggcttgaagacaggaagcaagacgtggatgccggacctccgggcagggaaggggggggaggttaagggacacgtcacctgtccttcagccacccgttacccggatgttggttagcagccagtggaggtactcagcatctggctccagcaggtgcccatccaagctaagtgagtagcaacgtccacaaggagccctcttctgcctcataggtcacctctggcgcttgggcagcctcggttggagtcacctcattgccacagtacacaggcatcaggtcatcctcacccacagcgtaggccacgtgcagggggactcggggcacaaaggtggcaccgtggaacaggtctcggtagaggccgtaatactcagccagacgctgcttgtggtaggggccacaggtcctctcccactcggcccgcacggcatccagcgggacactggctgtgcggaggcgggcagcccgctcctcttccacattggcccgaagctcctggatggcctgtttccgttccagtagctgttgggtccgggagactttgggtggaggcagcccaatatcaatcttctctttgggatctgtcttctccccgaaatactctcggtaggtccgccaccagtgcggggcctgcgcctcctgctctgcccggcgccggtagcggtcgaagctccggtacttctccagccgctccaggttgctcaagtcgatgtcactgttgggcatcggccccagcgggggtgtccggcggcccaggacgccgaggtgctgaagccccgccatctccgacactcgcacagcgcggctcgccaccaggcgccgccctcgtgccgaattcaaccacccaggcctcgctaccttaggaccgttatagtactg

SEQ ID NO: 74669 - DNA, 1143 bp, Homo Sapiens
caggccggagggaatgatggcggcgccctggtggcgatgccgcgctgtgcgagttgtcggagatggcggggtcttcagcatcctcggccgtcctgggccgccggactagcccccgctggggccgatgcccaacagtgacatcgacttgagcaacctggagcggcttggagaagtaccgtgagcttctgaccagcgtaccggctgccgagcagagcgaggaggctgcaggccccgcactggtggcggacctaccgagagtatatcggggagaatgacagatcccaaagagaagattgatattgggctgactccacccaaagtctcccggacccaacagctactggaacggaaacaggccatccaggagcttcgggccaatgtggaagaggagcgggctgcccgcctccgcacagccagtgtcccgctggatgccgtgcgggccgagtgggagaggacctgtggcccctaccacaagcagcgtctggctgagtattacggcctctaccgagacctgttccacggtgccacctttgtgccccgagtccccctgcacgtggcctacgctgtgggtgaggatgacctgatgcctgtgtactgtggcaatgaggtgactccaaccgaggtaaccactcacttgtgcccctcctccctgccctgtgcaaacacagacacatcccatctcagtgtcacagacactcctgggttggaatttgttgttctctgtctctttgatttcctggaagacgacaccatgacaatttcaaagaaaatagaacaaaatgaaggaaaaagaggctctgtcttagcacattcctgtgaccagcctgctgtctgtggtgtgccctcctggccggacttggcacatgttcggttgaggttgttgcctggacaggcaactctgcagggctgcttctctacgcatccctttgcctgcctgcctgtgccagggtgtcaaggctttgggtcagagtgggcacccttctccagtcctgaaaggtggctgtcctgtggggtgaagttcttttcactggcaggtgccagcgccgagtgctttgggcaaaggtcttggagtgtcctacttgggggttgggccaggcttgcgtcccttgccgccggggggcggaccggccaggggggcgcgcc

SEQ ID NO: 74670 - DNA, 1001 bp, Homo Sapiens
  misc_feature (967)..(967): n is a, c, g, or t
gcctgggtggcgaattcggcacgaggctgtgcccgggtcctagtggcggccgcagtgtcgcaggccggagggaagatggcggcgccctggtggcgagccgcgctgtgcgagtgtcggagatggcggggcttcagcacctcggccgtcctgggccgccggacacccccgctggggccgatgcccaacagtgacatcgacttgagcaacctggagcggctggagaagtaccggagcttcgaccgctaccggcgccgagcagagcaggaggcgcaggccccgcactggtggcggacctaccgagagtatttcggggagaagacagatcccaaagagaagattgatattgggctgcctccacccaaagtctcccggacccaacagctactggaacggaaacaggccatccaggagcttcgggccaatgtggaagaggagcgggctgcccgcctccgcacagccagtgtcccgctggatgccgtgcgggccgagtgggagaggacctgtggcccctaccacaagcagcgtctggctgagtattacggcctctaccgagacctgttccacggtgccacctttgtgccccgagtccccctgcacgtggcctacgctgtgggtgaggatgacctgatgcctgtgtactgtggcaatgaggtgactccaaccgaggctgcccaagcgccagaggtgacctatgaggcagaagagggctccttgtggacgttgctactcactagcttggatgggcacctgctggagccagatgctgagtacctccactggctgctaaccaacatcccggggtaaccggggtggctgaaaggacaggtggacgtgtcccctacctccccccccttccctggcccgaggctcgcgcatccacccgtcttggccttcctgcttctttcagcaggacccagccgatttgacttctctgaggaaggcacgccccctcacccgtgatatcaanctggcccagcggaacccttcccgcattttttgat

SEQ ID NO: 74671 - DNA, 1407 bp, Homo Sapiens
  misc_feature (28)..(28): n is a, c, g, or t
ttttttcttagaaccccgcgacaacacntcctaagtagcgaggcctgggtggcgaattcggcacgaggtggtggcgagccgcgctgtgcgagtgtcggagatggcggggcttcagcacctcggccgtcctgggccgccggacacccccgctggggccgatgcccaacagtgacatcgacttgagcaacctggagcggctggagaagtaccggagcttcgaccgctaccggcgccgggcagagcaggaggcgcaggccccgcactggtggcggacctaccgagagtatttcggggagaagacagatcccaaagagaagattgatattgggctgcctccacccaaagtctcccggacccaacagctactggaacggaaacaggccatccaggagcttcgggccaatgtggaagaggagcgggctgcccgcctccgcacagccagtgtcccgctggatgccgtgcgggccgagtgggagaggacctgtggcccctaccacaagcagcgtctggctgagtattacggcctctaccgagacctgttccacggtgccacctttgtgccccgagtccccctgcacgtggcctacgctgtgggtgaggatgacctgatgcctgtgtactgtggcaatgaggtgactccaaccgaggctgcccaagcgccagaggtgacctatgaggcagaagagggctccttgtggacgttgctactcactagcttggatgggcacctgctggagccagatgctgagtacctccactggctgctaaccaacatcccgggtaaccgggtggctgaaggacaggtgacgtgtccctacctcccccccttccctgcccgaggctccggcatccaccgtcttgccttcctgctcttcaagcaggaccagccgattgacttctctgaggacgcacgcccctcaccctgctatcagctggcccagcggaccttccgcacttttgatttctacaagaaacaccaagaaaccatgactccagccggcttgtccttcttccagtgccgctgggatgactccgtcacctacatcttccaccagcttctggacatgcgggagccggtgtttgagttcgtgcggccgcccccttaccaccccaagcagaagcgcttcccccaccggcagcccctgcgctacctggaccggtacagggacagtcatgagcccacctatggcatctactaaggagccagagtgtgcgcatttcagagcatgggattgatcggcagcaagagtaaagacacagctccagaggcccacactgtggggtctgggccctgccttaggcagcccccctctttggccccctcccgtcaggcccagggcttggagtgaaagtgactctcaggtggtggggtggggaatgtgaataaacatgatttcttgccggaaa

SEQ ID NO: 74672 - DNA, 662 bp, Homo Sapiens
  misc_feature (392)..(400): n is a, c, g, or t
ccatgaaaatgccctgggaccctctgacgacactgctgggatggctgaggcacctgttccctttggtcccaccggtggcctaaagtgtggtatcagagtgcttgtcttctgctgctcactgggtggggcttgtgagcatctgttctctcttcctaggatcacagaagaactgcagcttcctggggagcagtttcacctccacaggcatcgcttcatactcctcactgtcaatgctaaaagagccccctgctccctggggagaagagaatattcagaacagctcaaacacatcagtggcctactggagttggaggtctcacagcagcaccagaagaagttcattatggaaaacaacatcctctcttgaggagctatcctaatgttcttttacnnnnnnnnnttcagtgcctactacgatgggcacagtgctggttctggaaacatcctaattctaccatccatgaaaaaggatttattttctttttttggcccctatctcctcccagagtattttgggatttgaacaacatggttataattttcaaatatgtattaaaaggcaagggtcctgccatgtcttaaggaactcatatacatagtctttctatattatgctaatccttctcaaataaaaataaagacagctaattctcttatgaaaa

SEQ ID NO: 74673 - DNA, 550 bp, Homo Sapiens
  misc_feature (87)..(146): n is a, c, g, or t
cttcctaaatggtttgcatgagagccacctggggtacatgttgaaaacttatttgggtctaccccaaacctaataacccaaatttgnnnnnnnnnnnnnnnnnnnnnnnnnnnnnnnnnnnnnnnnnnnnnnnnnnnnnnnnnnnntaagttgtccctcaactgtacttggagaaatcgtgttttaaagcagtagtccacaaagtattctgctcatgtgcccccaaaagtattttgaaaaatcatgtataccctcacccatctaagttgatatctaaaattttatctaagttggtatctaaaatttttcatgggaagttaaatagttgacaaagtatgtatttgctggtgtcgtgtaaatattggtattttaaaataaaaactgttacatcactattttaaacatatccagtacaatttaaatatcacaacaatttgacacccttcattcatttataaaaataaatgagctagttctttagtagttaaacatttcaaattggcttttctccttctgtatttccataccacttttcagcccaagaatccca

SEQ ID NO: 74674 - DNA, 2226 bp, Homo Sapiens
  misc_feature (1870)..(1887): n is a, c, g, or t
  misc_feature (1982)..(2041): n is a, c, g, or t
gggccgcgagctggaccagccgtgcaaatctctagaagatgacggtgttctttaaaacgcttcgaaatcactggaagaaaactacagctgggctctgcctgctgacctggggaggccattggctctatggaaaacactgtgataacctcctaaggagagcagcctgtcaagaagctcaggtgtttggcaatcaactcattcctcccaatgcacaagtgaagaaggccactgtttttctcaatcctgcagcttgcaaaggaaaagccaggactctatttgaaaaaaatgctgccccgattttacatttatctggcatggatgtgactattgttaagacagattatgagggacaagccaagaaactcctggaactgatggaaaacacggatgtgatcattgttgcaggaggagatgggacactgcaggaggttgttactggtgttcttcgacgaacagatgaggctaccttcagtaagattcccattggatttatcccactgggagagaccagtagtttgagtcataccctctttgccgaaagtggaaacaaagtccaacatattactgatgccacacttgccattgtgaaaggagagacagttccacttgatgtcttgcagatcaagggtgaaaaggaacagcctgtatttgcaatgaccggccttcgatggggatctttcagagatgctggcgtcaaagttagcaagtactggtatcttgggcctctaaaaatcaaagcagcccactttttcagcactcttaaggagtggcctcagactcatcaagcctctatctcatacacgggacctacagagagacctcccaatgaaccagaggagacccctgtacaaaggccttctttgtacaggagaatattacgaaggcttgcgtcctactgggcacaaccacaggatgccctttcccaagaggtgagcccggaggtctggaaagatgtgcagctgtccaccattgaactgtccatcacaacacggaataatcagcttgacccgacaagcaaagaagactttctgaatatcttgcattgaacctgacaccatcagcaaaggagactttataactataggaagtcgaaaggtgagaaaccccaagctgcacgtggagggcacggaggtgtctccaagccagccagtgcactttgcttatcccggagggagcagggggctcttttagcattgacagtgaggagtatgaagcgatgcctgtggaggtgaaactgctccccaggaagctgcagttcttctgtgatcctaggaagagagaacagatgctcacaagccccacccagtgagcagcagaagacaagcactctgagaccacactttaggccaccggtgggaccaaaagggaacaggtgcctcagccatcccaacagtgtcgtcagagggtccccagggcattttcatggcaagtacccctctgcccccactccagcagtgcttcccaaagtgtgctctgtcacctgctttgcaatcggcttccattagcgcatgttttattttggtgtgacggttggccctcctaaacacggactttcctcaggctggttcaagacggaaaaggactttcttctggtttcttccaaagtgcaaccacagtggagagcccacggtgggcttagcctgcctaggcccttccatttctcttcttttgaccgtgctaggaattccaggaaagttgcattcctcgccctggtgacctttttcctatgtctaggctcctccacaggtgctgctattttgtgagctccggctcctgtttagcttttatttcagttctaacctccagtccagaaacatatgtgaggttgtctccctcttcagccacggctacaataccggaaaatgctagnnnnnnnnnnnnnnnnnnagtagtgcttcctaaatggtttgcatgagagccacctggggtacatgttgaaaacttatttggggtctaccccaaacctaataacccaaatttgnnnnnnnnnnnnnnnnnnnnnnnnnnnnnnnnnnnnnnnnnnnnnnnnnnnnnnnnnnnntaagttgtccctcaactgtacttggagaaatcgtgttttaaagcagtagtccacaaagtattctgctcatgtgcccccaaaagtattttgaaaaatcatgtataccctcacccatctaagttgatatctaaaattttatttaagttggtatctaaaatttttcatgggaagttaaatagttgaaa

SEQ ID NO: 74675 - DNA, 696 bp, Homo Sapiens
tttcacttttcgttatttttattgtttgacaagcatttacaacgttccattcatagacctaaaaacataaaaatagaccttctttcagcttataaaagaaatatataagaacttttgacatagacacgtcatgaccttatgtacaagagacaatggcaccctctccaagcaccagacttccgagtgttttcagatggatgtgttgcactggagccagtaaatgcgacgattagaagcctctgcttccgttttccatctggacgcgatcgaaccggagatgatatggaaaaatgcagtgatacaaagggtatagaaaccattctaaagctttttcagaaaaccagaagatatagcaaaaatttaatagaataaaactttcaaaagatcaagctcgaagccctggaaacccgaaaggcggggggaatacagggtgggaacgcaggaaaagcaggcagaggcacaagagcatgatgtactgaactctctattgtctggaaatataaagtcataactgatttttataaaatataactcctaaagctactataaaattcaggtctttaaagtacctactgatgtgtcaaacaccaaatagatattttccccaaaaagaaagttttcatagtattttaaacccttcttaggaagtggacattgtgacatgggaaaagaaaaagctataaacctttttttaaa

SEQ ID NO: 74676 - DNA, 739 bp, Homo Sapiens
  misc_feature (49)..(49): n is a, c, g, or t
ccctacgttcccaccatcagccaccccatggacacctcgaatttcgacnccgtagatgaagaaagcccttggaacgatgccagcgaaggtagcaccaaggcctgggacacactcacctcgcccaataacaagcatcctgagcacgcattttacgaattcaccttccgaaggttctttgatgacaatggctacccctttcgatgcccaaagccttcaggagcagaagcttcacaggctgagagctcagatttagaaagctctgatctggtggatcagactgaaggctgccagcctgtgtacgtgtagatgggggccaggcacccccaccactcgctgcctcccaggtcagggtcccggagccggtgccctcacaggccaatagggaagccgagggctgttttgttttaaattagtccgtcgattacttcacttgaaattctgctcttcaccaagaaaacccaaacaggacacttttgaaaacaggactcagcatcgctttcaataggcttttcaggaccttcactgcattaaaacaatatttttgaaaatttagtacagtttagaaagagcacttattttgtttatatccattttttcttactaaattatagggattaactttgacaaatcatgctgctgttattttctacatttgtattttatccatagcacttattcacatttaggaaaagacataaaaactgaagaacattgatgagaaatctctgtgcaataatgt

SEQ ID NO: 74677 - DNA, 776 bp, Homo Sapiens
  misc_feature (582)..(594): n is a, c, g, or t
aaccttttctctggagttgtggtgaaactaatcacgtctgtgagagatcagaaagaaagagacttagggaagtggaagagaaagggaattttggaatttatttctttaaaaataatgcaatggaaatatatcaaaacatgtaaacgcccaccttaaaccaaatgttatttggtcatgaggcaccttgctggagtctcagattccaaaagtctcttcttcagactgggtagggaatatgatattttagggacaaagctgaggactggttttaaataggctttaaaataaaagatcaatattatcataatgctatcattctgctaaaccggccccaaaacagtagaatttctgctcatgtcctagcaggttcagaagactgcagccaagttcagatgtaaaaacaagaagtagcacttttccaaaggaaaacaacaaaacaaatgggaaaaagataatggaccgcatttcacctattttaatactattttaacaattttttcatctaccaatatatccccaataaataaatataaaagggggggagggtcaatctggggaatcttagttttttatgttttaagnnnnnnnnnnnnnctgcattatttttgtaaagtatttattgagtcacggattattgtgcatcaagcaattgttaatatgacctggtcctatggggtagaacttaggaaaaataaagttggttcttattcaatattttactttgcaaaattctagtaaaagagagtatataataaaatcataataaaaggtgaaaa

SEQ ID NO: 74678 - DNA, 387 bp, Homo Sapiens
tgagagcaaagactaaaatatgtcaaaattgtggagaagtgggcttcagatttaaggctgacaggaagactgatgttcatgggtaaaataatactgattttactacagggagacagaaacaacctcaaggtgccaaaaagttaaatgttgagtatgaatctggctattttctgctttaaatggtgtgtctttaagtgtgttttgtaacaatgggatagattaattattaagatgtttctgctttcattattacaaccttaatggatcttccttttctttttaaagaatgtctgactgctaattacaagtacaaacttgcaaagcttgaagaataagattgcattttaaaaatcatgtcacttaataaagtgacaggttatttaaaaa

SEQ ID NO: 74679 - DNA, 1298 bp, Homo Sapiens
ttaaaaaatcatttaattacaagaaaattagccagaaaattacatagtttcaaacaaatattgtctataaaaacaagtgttcatttaccatctttttaaatttatcttttaaataatgtctcatctactgaacctagcctttcctggcaaacattagaatatacaagttttcttcatgtttaatatttcataaaacagaactggcttttgttcctgaagttagaatgatgcctatcattttgcttcagagaaactttaaaattgactatttcaattaaccactccccaaatccaatgcaaaaacaacaaaaaacactgctattttactaaaagattcctgtcttccatttcattttaccagagcaagtacaaattcggagaaaagcttcttaagtcctgcagtttcaaattccttttgtaattcatccaacgctgaatactctttgacttcaaatgccagaaaccttttgtgttctgtctgtacttttgttcaaaacagtacacttaatcattttctctttgcatttctttccacttgagtccacatctactttgggaggttttctgaagaatcaagtactccttgaggttgtttctgtctccctgtagtaaaatcagtattattttacccatgaacatcagtcttcctgtcagccttaaatctgaagcccacttctccacaaatttgacatatttagtctttgctctcatgtgatctaaatgcaaaagagttatccacaatccatcatccatggtcgtgcttgttgaaaaagtacacttttcactgccactgccagtttctggttggctgaggatatgcctgagattctgctgaatccagagaaccagctcatgaaccataggctccgacaaaaggctctctgcttgctcaagtaacttctctttcacagtcacacactgggccctggtcaactgttcagagttaatcgagataccaggtagacatgaaggataattgactggcaaatggaacaccaattccagaggtatatccgcatccataaatccttcagcttttgtgtgaattctgaacacggtcccatctgtctcgggtcctctctggtgcagggaaccacaggaaagaaacatgttggtagtccagggggaaagtcttgaaaagctactgagccagccatgtcagtccttaccaattttcatttttctctgtgttattttctggtcctgagcggctcagcacctcccactcgtggggcctgcagaaaatcgcggccaggaccgagagctcctcctgcacaggctccgccatggctgtgggc

SEQ ID NO: 74680 - DNA, 769 bp, Homo Sapiens
  misc_feature (159)..(270): n is a, c, g, or t
gaaagtgacgccaaggctgcggtgtccaccaactgccgagcagcgcttctccatggagaaactagaaaaactgcttctggaattatctctacagtgaagaaaccttggccatcagaaggagatgaagattgtcttccagcttccaagaaagccaagtgnnnnnnnnnnnnnnnnnnnnnnnnnnnnnnnnnnnnnnnnnnnnnnnnnnnnnnnnnnnnnnnnnnnnnnnnnnnnnnnnnnnnnnnnnnnnnnnnnnnnnnnnnnnnnnnncaacaaagacaacttttgatctctcatcagagagatcatactcccaagaacaggctttgacccttctttaaaagaggattgtcctgggctgatgagagtcactttacctgaagatacctgggaagttttgtctcctctgaggttggcccatggccagtgactgatgcaggacattacagcctggcccactggcctcggtggtacaatttatgctcctgagcaccccatgggattacgctgtgtgtggatttctcctgaaaccacatatttgcctcttctgccctgttctgttttttctcattcccttatagaggactctcagtaagtcacttacacaagaatcctaatttgaaatgctgcttccaggagacctgacttagaaaattggacaaataaagttgatttttttaaatgtccagtaacatgaagatgctgaactttcctagtcatttagggggaaatcaccacaaatatatctggctgatcaggttgaaagtta

SEQ ID NO: 74681 - DNA, 395 bp, Homo Sapiens
atagcagttcattatggcttatcatttgctattgctgtaagccaaagtaatatgttaaaccacctcattttaaattatgtcttaacttcaagcacagtggtttccctgtttgttttacagaaactagaaaaactgcttttggaattatctctacagtgaagaaacctcggccatcagaaggagatgaagattgtcttccagcttccaagaaagccaagtgtgagggctgaaaagaatgccccagtctctgtcagcactcccttcttcccttttatagttcatcagccacaacaaaaataaaacctttgtgtgatttactgttttcatttggagctagaaatcaatagtctataaaaacagttttacttgcaatccattaaaacaacaaacgaaaa

SEQ ID NO: 74682 - DNA, 917 bp, Homo Sapiens
cagtcgacggtaccggacatatgcccgggaattcggccattacggccggggatgggacttcagcatggcggtgtttgcagatttggacctgcgagcgggttctgacctgaaggctctgcgcggacttgtggagacagccgctcaccttggctattcagttgttgctatcaactcatatcgttgactttaaggaaaagaaacaggaacattgaaaaaccagtagctgtttctgaactcttcacaactttgccaattgtacagggaaaatcaagaccaattaaaattttaactagattaacaattattgtctcggatccatctcactgcaactgttttgagagcaacttcttcaagggcccggctctatgactgttcgttgcagtttttccaacagacagaaaagctttttcactattgcttgcacacatttagatgtggatttcagtctgcataactgtaacagagaaactaccattttacttcaaacagacctcctattaatgtggcgattgaccgaggcctggcttttgaacttgtctatagccctgctatcaaagactccacaactgagaacggtatacaactttccagtgccctcaatttgatgcaaatctgcaaaggaaaggtatggttctataattctcaggatgttcctccgcatctggcagctctatcattagtagtacactggaattgtcaaactgactcctttttccttaaagcagcaatgtcctcatagcataggaacaaattctgccatttcagtgagctctgcaaattttaagggaaagaaaaataccaagggaagaataatgtaagggagaacaagatgtgttgggaagccatatcttttgatacaaatttgccatttacatactgtgaacagacaacgtctcgaattaccaatggtcctcaat

SEQ ID NO: 74683 - DNA, 927 bp, Homo Sapiens
gggcggacggtcatgggacttcagcatggcggtgtttgcagatttggacctgcgagcgggttctgacctgaaggctctgcgcggacttgtggagacagccgctcaccttggctattcagttgttgctatcaatcatatcgttgactttaaggaaaagaaacaggaaattgaaaaaccagtagctgtttctgaactcttcacaactttgccaattgtacagggaaaatcaagaccaattaaaattttaactagattaacaattattgtctcggatccatctcactgcaatgttttgagagcaacttcttcaagggcccggctctatgatgttgttgcagtttttccaaagacagaaaagctttttcatattgcttgcacacatttagatgtggatttagtctgcataactgtaacagagaaactaccattttacttcaaaagacctcctattaatgtggcgattgaccgaggcctggcttttgaacttgtctatagccctgctatcaaagactccacaatgagaaggtatacaatttccagtgccctcaatttgatgcaaatctgcaaaggaaagaatgtaattatatctagtgctgcagaaaggcctttagaaataagagggccatatgacgtggcaaatctaggcttgctgtttgggctctctgaaagtgacgccaaggctgcggtgtccaccaactgccgagcagcgcttctccatggagaaactagaaaaactgcttttggaattatctctacagtgaagaaacctcggccatcagaaggagatgaagattgtcttccagcttccaagaaagccaagtgtgagggctgaaaagaatgccccagtctctgtcagcactcccttcttcccttttatagttcatcagccacaacaaaaataaaacctttgtgtgatttactgttttc

SEQ ID NO: 74684 - DNA, 1061 bp, Homo Sapiens
  misc_feature (40)..(41): n is a, c, g, or t
  misc_feature (145)..(573): n is a, c, g, or t
  misc_feature (992)..(1018): n is a, c, g, or t
gtccgtaagcgcagtccgaacaggagacgcacgaggagtnncaggggaacgcttgtacttatagtctgtcggttcgccacctctgactgaggtcgatttgtgatctcgtcagggggcgagctatggaaaacgccagcacgcgccnnnnnnnnnnnnnnnnnnnnnnnnnnnnnnnnnnnnnnnnnnnnnnnnnnnnnnnnnnnnnnnnnnnnnnnnnnnnnnnnnnnnnnnnnnnnnnnnnnnnnnnnnnnnnnnnnnnnnnnnnnnnnnnnnnnnnnnnnnnnnnnnnnnnnnnnnnnnnnnnnnnnnnnnnnnnnnnnnnnnnnnnnnnnnnnnnnnnnnnnnnnnnnnnnnnnnnnnnnnnnnnnnnnnnnnnnnnnnnnnnnnnnnnnnnnnnnnnnnnnnnnnnnnnnnnnnnnnnnnnnnnnnnnnnnnnnnnnnnnnnnnnnnnnnnnnnnnnnnnnnnnnnnnnnnnnnnnnnnnnnnnnnnnnnnnnnnnnnnnnnnnnnnnnnnnnnnnnnnnnnnnnnnnnnnnnnnnnnnnnnnnnnnnnnnnnnnnnnnnnnnnnnnnnnaagaattcggcacgaggggaaactgaggcccgaggcagatacctgggtttggggagggctgggtttagcccggttctctgaactacatacccccagctgtgaagccttcctcttgaggggttgaggtgggcagtatacaggagccaagcagcccagggtgggtcgcagcccaggccccttccagggtgccactcctttcccccttgtgttgcaaggagccctcctgcctgggagcttgttctttggaaggtgctgagcctgaatttgccacagtcaagtcaacgttcccaccccactggcttggttacagggctctcacatggggtaggggagccatactcccacccccttgcgtattcccctgggtttgttgatattttgcactcttaacacctgccaataaagacggtctacactgnnnnnnnnnnnnnnnnnnnnnnnnnnncctgagaggcggccgcaagcttattccctttagtgagggtaat

SEQ ID NO: 74685 - DNA, 682 bp, Homo Sapiens
cgttgacaggccgccggccgtcgactggcatgttgtgaccattcctggtgctggtcttggtactgttctttcctaccataacttattggaagagggtggcattcctgccttgcagccttttctccagtgaggagtgaacagtgggcacctgagatcctggcccacgctactatgctttcaggctacaaccactagcacggctgacgatggccctttctgcggagaccgagtcacacatctaccgagctctgcgtactgcttctggcgctgccgcccaccttgtggccctgggctttaccatctttgtggctgtgcttgccaggcctggctccagcctgttctcctggcacccggtgcttatgtctttggctttctccttcctgatgaccgaggcactactggtgttttctcctgagagttcgctgctgcactccctctcacggaaaggccgagcacgctgccactgggtgctgcagctgctggccctgctgtgtgcactgctgggcctcggccttgtcatcctccacaaagagcagcttggcaaagcccacctggttacgcggcatgggcaggcaggtctgctggcctgtgctgtgggcaggctgcagtgctcaggtggggtgggggctgctctaccccaagctgtgcccgattgtgccctggcgaagctcaagctatacat

SEQ ID NO: 74686 - DNA, 2657 bp, Homo Sapiens
ctctcctaaaatttctgaacatacagtacaagtatgagctgccttgcaggagaggcagtcttgcagccccagcttcatccagacacatgatgcctatgttcctctgggatgacagagaaaggggaaggaaatgggaggcactccagcatgaggagcaggaattcacacacgggcctccaaatgcccaactgtcccagtgcctgaggtgtcccctgactcagctgagagagttcaacaggtccctaggcccagctcctacatggaggggcaaatccaggcttcccctaggctgggaagagctcatggttggatcctcttgcggtataggtaggcattgctcacctggttcataatgaccaagctggtgaggacagggcataatacagccaggtaccaggctgcaccagtgacagaggcagtgaaccagagtgagcacatgcccagcaagaggctggcactacccagcaggtagcccaccagcccagaagtagcatggtatagcttgagcttcgccaggggccatcggggcagcagcttggggtagagcagccccaccccaacctgagcactgcagccctgcccacagcacagccagcagccctgcctgcccatgccgcgtaaccaggtgggctttgccaagctgctctttgtggaggatgacaaggccgaggcccagcagtgcacacagcagggccagcagctgcagcacccagtggcagcgtgctcggcctttccgtgagagggagtgcagcagcgaactctcaggagaaaacaccagtagtgcctcggtcatcaggaaggagaaagccaaagacataagcaccgggtgccaggagaacaggctggagccaggcctggcaagcacagccacaaagatggtaaagcccagggccacaaggtgggcggcagcgccagaagcagtacgcagagctcggtagatgtgtgactcggtctccgcagaaagggccatcgtcagccgtgctagtggttgtagcctgaaagcatagtagcgtgggccaggatctcaggtgcccactgttcactcctcactggagaaaaggctgcctctgccgcagcgcagatctgatgcggtggtttcctccaaagaaagcgggatactccgggccctgccgcgcgcaccgccgctccgtcacggagccgctttacttccgggtgcgacgtctacccacccaggacttcctgggacgagccgtcccccgccccagccacgcctctgagtcgcgctgcgcaggcgccattgggcagagggattggcaagcttgcgtgccccagcgacacaggcctcgaggctgtctctgacaagtgttcacaggaggtggggacgcctctgcgcgaggaacgaggagctacgggcctgggcccggttattgccatgggcagcggctgccgcatcgaatgcatattcttcagcgagttccaccccacgctgggacccaagatcacctatcaggtccctgaagacttcatctcccgagagctgtttgacacagtccaagtgtacatcatcaccaagccagagctgcagaacaagcttatcactgtcacagctatggaaaagaagctgatcggctgtcctgtgtgcatcgaacacaagaagtacagccgcaatgctctcctcttcaacctgggcttcgtgtgtgatgcccaggccaagacctgcgccctcgagcccattgttaaaaagctggctggctatctgaccacactagagctagagagcagcttcgtgtccatggaggagagcaagcagaagttggtgcccatcatgaccatcttgctggaggagctaaatgcctcaggccggtgcactctgcccattgatgagtccaacaccatccacttgaaggtgattgagcagcggccagaccctccggtggcccaggagtatgatgtacctgtctttaccaaagacaaggaggatttcttcaactcacagtgggacctcactacacaacaaatcctgccctacattgatgggttccgccacatccagaagatttcagcagaggcagatgtggagctcaacctggtgcgcattgctatccagaacctgctgtactacggcgttgtgacactggtgtccatcctccagtactccaatgtatactgcccaacgcccaaggtccaggacctggtagatgacaagtccctgcaagaggcatgtctatcctacgtgaccaagcaagggcacaagagggccagtctccgggatgtgttccagctatactgcagcctgagccctggcactaccgtgcgagacctcattggccgccacccccagcagctgcagcatgttgatgaacggaagctgatccagttcgggcttatgaagaacctcatcaggcgactacagaagtatcctgtgcgggtgactcgggaagagcagagccaccctgcccggctttatacaggctgccacagctatgacgagatctgctgcaagacaggcatgagctaccatgagctggatgagcggcttgaaaatgaccccaacatcatcatctgctggaagtgaggctggtagtgactggatggacacattgctgtgggtagtccctcctactaggaggcttgtcatactgtctagaggttgactcttagttctgtaaataaagacatccatttcggaacagcaa

SEQ ID NO: 74687 - DNA, 1002 bp, Homo Sapiens
  misc_feature (429)..(429): n is a, c, g, or t
tcccccccggggggcgctcccaaaatggccccaacttgttccccagtgcctggaaggtggtccccctgacttcaagctgaggaggaggttcaaaaaggtcccctagggcccagctccttacagggagggggcaaatcccaggcttccccttaggctgggaaagaggctcatggttggatcctcttgcggtataggtaggcattgctcacctggttcataatgaccaagctggtgaggacagggcataatacagccaggtaccaggctgcaccagtgacagaggcagtgaaccagagtgagcacatgcccagcaagaggctggcactacccagcaggtagcccaccagcccagaagtagcatggtatagcttgagcttcgccaggggccatcggggcagcagcttggggtagagcagccccaccccaccntgagcactgcagccctgcccacagcacagccagcagccctgcctgcccatgccgcgtaaccaggtgggctttgccaagctgctctttgtggaggatgacaaggccgaggcccagcagtgcacacagcagggccagcagctgcagcacccagtggcagcgtgctcggcctttccgtgagagggagtgcagcagcgaactctcaggagaaaacaccagtagtgcctcggtcatcaggaaggagaaagccaaagacataagcaccgggtgccaggagaacaggctggagccaggcctggcaagcacagccacaaagatggtaaagcccagggccacaaggtgggcggcagcgccagaagcagtacgcagagctcggtagatgtgtgactcggtctccgcagaaagggccatcgtcagccgtgctagtggttgtagcctgcctctgccgcagcgcagatctgatgcggtggtttcctccaaagaaagcgggatactccgggccctgccgcgcgcaccgccgctccgtcacggagccgctttacttccggatcccgggaatccggaccggtccagcct

SEQ ID NO: 74688 - DNA, 1430 bp, Homo Sapiens
cttaccctgactgggctgcgcgttatctgccttccgttcccccaagcaaggcgacaggtagtctggggactggtgcgccggaactgactgagtgggccgcaactgactgagtgggccgcgggctcccgcctgaggaggctaggaaggactgacacagcagccgacttcccaggctctaaaaatcgtgcctctgagttagagctacctcaaaagcaagaccaagcatgagaaatggagtcttttggccagtattggggtgttcggaattcaagcgtatgagagagtggacggtagcgttgagaattttcatttgaagatctcgtcttaaccaccccaagtgtagtcagaggcggcgttttccctgcgagagtgccctggaacaaagcaaggatagcgtgggttagacatacctgaaatgaaagcgtcttactttatctaggtacatatttgcgtcagtaaggcgcaacgccatttctctcttggaattcagaagtgaaatatggtgactgggacgcctgtacattgctttgacttaaaaattgaagtccattattctgaccgaaagttaatctgatgattaattggttaaacatactatcgttgctaattagcataattattatttacaataaagtgagctaaatagctacaactaaaatatatttaaattactgtgatatttgtgatgctaaagatgtgttgaaattaatatcttgaatttctcaaccctgcctaaatgcctctgagagtaattagtataattaaaagtcactagagaaagtgaatgactctaataacaggataacaaattcttttcaagtcagatggtttccagttctttgctttcaacaaaattaatggtggcccatgaattgtcagctgatgaaggaacactatttggtttttggcatgcaactcggaaagaaaccaaacgattgattgacatgcttacaacaaaactactagcattctcacctatttatgtaaaaccatttctcagcacttgtatctgtgaaaacaacagaattgaaaatgaaccctgttaatctaccagtaggaactattcatccagataaatgaattaattggtgggtcagccccatctatctcactaagagatgtgttcccaatagaatttcaccttttataactgtgtgttatcaatatttgcaatcgtgtcattttgatccattatatactaaagatgattgtgatgattactcacttcagaagaattccagcgtagagccataaagttacacgaaattttttaaggtttactacatatgtcatatttttattgcgaagaagtgatcaagaaaaggttgttcaaacatcaaagtactatatttgaataacattttttgttagagtacaatctaaatatgttagagataataaaagaacaatgttgaagagctcaaaaaaaa

SEQ ID NO: 74689 - DNA, 635 bp, Homo Sapiens
ccaacagttgggttgtgtaacatcacacttcaaccggtagatggctctaatctcacacatttacttagtaaagattgaggattcggaatatttagaataaattagttttctgctttctaattttgcagatctttacatttttattgcttttcttaaaataagggatagctttgcaaccactattgttttaatggaaagcaaaaaacccccccaaaattatcagaatcctcgttctttttcagactactgaaaaatgacatttactctgttaaatgtttaataagtgaataagtaaatgtatcaagttgtttatataataaattataaaactcttgaggcacttggtatgttaaaaattttaaactttagtaacattaggttacaggtatgatttaaaaatttgtaaatagttcaaaagggcaatgttttctttatatttcttatagtcttaattttgttatccatgtgcataatttacctcatgatttcttttggtcaatcaggatctttaatacaatatagaaattgtgtaatagttattataaatgttaatacacaactttcaggtaattttaactgattatttcttttgctcttttaacttaagttattaaagtttaaaagttcgtaagtac

SEQ ID NO: 74690 - DNA, 589 bp, Homo Sapiens
  misc_feature (497)..(508): n is a, c, g, or t
gcgaatggaaaacatgtgcacacaggcacttgtacatgaatatttgtggaagcgttattcgcaatagccaaaaagtggaagcagtccaaatggccatcaagatgaatgaataaataaaatgtagtgtgtgcatgcagtggaatattatttgcccataaaaagaaatgaagcactgatgcaggctgcaacatggatgaacttgaaagctttatgctccgtgaaagaagcccgtcataaaaggtcacctactgttattcctttcataggaaatatccagataggcaagtccatagagacagagaggagaggagtggttgccaggggctgggcaaggagaatgagagtgaccgctaatgggtgtggcatttctttgtgaggtaatgaaaatgttctgtattagatagtggtgatcattgcacaactctgtgaatgtactaaaaatcattgaattgtacactttgaaagaattatatagtatgtaattatatctcagtttnnnnnnnnnnnncaggataacagtaaccaaaatcttctatgtaagcttaaaattttctctgttaattatgccaaataaaactgaattcacagc

SEQ ID NO: 74691 - DNA, 799 bp, Homo Sapiens
  misc_feature (113)..(113): n is a, c, g, or t
tgctgggctaccctatgcatcgatcaatgaggtcatatttacccagtgcttggcctagaggcccaagacagggtcagcagtgcttgctttggctctagtttgggcgttggttntgcagcctcagcatcagcacaggcaggccctcttctccagcagtgctctggctgatatttcttctttttcccacagccaatcccactaatcctgatgaggctgacaaagttggggctgagaacacaatcacctattcacttctcatgcacccggatgctctggaagagcctgatgaccagaaccgtatttagtctccattgtcttgcattgggatttgagaagaaaatcagagagggaagatctggtatttcctggcctaaattccccttggggaggacagggagatgctgcagttccaaaagagaaggtttcttccagagtcatctacctgagtcctgaagctccctgtcctgaaagccacagacaatatggtcccaaatgaccgactgcaccttctgtgcttcagctcttcttgacatcaaggctcttccgttccacatccacacagccaatccaattaatcaaaccactgttattaacagataatagcaacttgggaaatgcttatgttacaggttacgtgagaacaatcatgtaaatctatatgatttcagaaatgttaaaatagactaacctctaccagcacattaaaagtgattgtttctgggtgataaaattattgatgatttttattttctttatttttctataaagatcatatattacttttataataaaacattat

SEQ ID NO: 74692 - DNA, 924 bp, Homo Sapiens
caatgtccagcctctttaacatcttctttcctatgccctctctgtggatccctactgctggtttctgccttctccatgctgagaacaaatcacctattcactgcttatgcagtcggaagctccagaagaacaaagagcccaattaccagaaccacattaagtctccattgttttgccttgggatttgagaagagaattagagaggtgaggatctggtatttcctggactaaattccccttggggaagacgaagggatgctgcagttccaaaagagaaggactcttccagagtcatctacctgagtcccaaagctccctgtcctgaaagccacagacaatatggtcccaaatgactgactgcaccttctgtgcctcagccgttcttgacatcaagaatcttctgttccacatccacacagccaatacaattagtcaaaccactgttattaacagatgtagcaacatgagaaacgcttatgttacaggttacatgagagcaatcatgtaagtctatatgacttcagaaatgttaaaatagactaacctctaacaacaaattaaaagtgattgtttcaaggtgatgcaattattgatgacctattttatttttctataatgatcatatattacctttgtaataaaacattataaccaaaacattctgtttaccttttcagggctgtattgattggggtgtagactgaactatccggggtctgtttcttttcggtgatgaaagtcttgagaaggtagtaatggataagatgtgagggagaggagagagggagatttggagtgtagggtgagtgcccctcttcttagaactgaatactcttcttctaatgaacttgtattcttgtttccatgtcttcttccctttccttctatagcaaataaagcattcactttgttttggaaaaaaaa

SEQ ID NO: 74693 - DNA, 766 bp, Homo Sapiens
atctctgtgctctgtgtatcgcgacgagcaggtgagaataagtgcgtgcccaacagcaacgagagatactacggctacactgggctttccggtgcctggctgagaatgctggagacgttgcatttgtgaaagatgtcactgtcttgcagaacactgatggaaataacaatgacgcatgggctaaggatttgaagctggcagactttgcgctgctgtgcctcgatggcaaacggaagcctgtgactgaggctagaagctgccatcttgccatggccccgaatcatgccgtggtgtctcggatggataaggtggaacgcctgaaacaggtgttgctccaccaacaggctaaatttgggagaaatggatctgactgcccggacaagttttgcttattccagtctgaaaccaaaaaccttctgttcaatgacaacactgagtgtctggccagactccatggcaaaacaacatatgaaaaatatttgggaccacagtatgtcgcaggcattactaatctgaaaaagtgctcaacctcccccctcctggaagcctgtgaattcctcaggaagtaaaaccgaagaagatggcccagctccccaagaaagcctcagccattcactgcccccagctcttctccccaggtgtgttggggccttggcctcccctgctgaaggtggggattgcccatccatctgcttacaattccctgctgtcgtcttagcaagaagtaaaatgagaaattttgttgatattctctccttaaaaaaaa

SEQ ID NO: 74694 - DNA, 1000 bp, Homo Sapiens
  misc_feature (43)..(69): n is a, c, g, or t
  misc_feature (434)..(445): n is a, c, g, or t
  misc_feature (753)..(761): n is a, c, g, or t
ccctcaactaaagggaataagcttgcggccgcggctgtaggcnnnnnnnnnnnnnnnnnnnnnnnnnnngctgcaccaaatttaagaacgccctttcaggcaagcagtggtctctagctgttaaaacatttccttagtggatcacaatagcttctaaaactgcctttctagtaaaggccatcagagaggtaatactaaactgtgcatttgccaaataagaatatgaattgtataaaagctcatattccaatcctagatcaaatggcaaaagttctacaaagttggtttccatgtttgtataaaagctccgactgattttatgtattttgctatgaaattacctttgggtcttataatcagtatacctctactcaggaatgtgcaaatgattttatacagcacgacgctagtaccgctctgtatgacagtaaggnnnnnnnnnnnncttcttttctaaatggaaagaaaatatccctagtcagaaataaactgacaaatttacattctcctctcttaaaaaagtaaataaaataacattattcaaaacgtgaattagctatagacatacaatacaattacatagatacatatcaatacagcacattcaatctgccaaaaaattaatgattacaaagccagtatggatgctgcaatatcaagagagatgtatgtacaatgattagagcatttgtaattgcactatacctacaggcagtctgtttgttaaattacaggtactttctgagcaagggnnnnnnnnngtaagctgtgttgtttgaggctgggagaatcaaggatgagaacatctcattactgttgggcggctttggtactcatttaacaggccgtgatttttctccctccccctttgttgttccaaaagagtgatttatatggaagtttacactagtgccaaataccactgtagttaaaatgagaccagtatcatggcctaattctaacgtcccagcagctttgaacaatcatgatttattttccc

SEQ ID NO: 74695 - DNA, 1610 bp, Homo Sapiens
aggctagtacgaggcctggtgtgtaatcggcacgagggaatgcccaagcggctcggaagtcccaggagtggaggcccccgccgtggagccgtgtggtgtatgtgtggtaacaccatgtctgtgcccctgctcaccgatgctgccaccgtgtctggagctgagcgggaaacggccgcggttatttttttacatggacttggagacacagggcacagctgggctgacgccctctccaccatccggctccctcacgtcaagtacatctgtccccatgcgcctaggatccctgtgaccctcaacatgaagatggtgatgccctcctggtttgacctgatggggctgagtccagatgccccagaggacgaggctggcatcaagaaggcagcagagaacatcaaggccttgattgagcatgaaatgaagaacgggatccctgccaatcgaatcgtcctgggaggcttttcacagggcggggccctgtccctctacacggccctcacctgcccccaccctctggctggcatcgtggcgttgagctgctggctgcctctgcaccgggccttcccccaggcagctaatggcagtgccaaggacctggccatactccagtgccatggggagctggaccccatggtgcccgtacggtttggggccctgacggctgagaagctccggtctgttgtcacacctgccagggtccagttcaagacatacccgggtgtcatgcacagctcctgtcctcaggagatggcagctgtgaaggaatttcttgagaagctgctgcctcctgtctaactagtcgctggcccagtgcagtaccccagctcatgggggactcagcaagcaagcgtggcaccatcttggatctgagccggtcgagcccctgtccccacccttcctgacctgtccttttcccacaggctctcggggggcaggtggcaaggcctggccgggccttccttcctggccttagccacctggctctgtctgcagcaggggcaggctgctttcttatccatttccctggaggcgggcccccctggcagcagtattggaggggctacaggcagctggagaaaggggcccagccgctgacccactcactcaggacctcactcactagccccgctttgggccccctcctgtgacctcagggtttggcccatggggccctcccaggcccctgccccaactgattctgcccagataatcgtgtctcctgcctccactcagctgcttctcagtcatgaatgtggccatggccccggggtccccttgctgctgtgggctccctgtccctgggcaggagtgctggtgaggaggtggagccttttgaggggggccttccctcagctgtttccccacactggggggctgggccctgcctccccgttaccctccttccctgcaggcctggagcctgtagggctggactgaggttcaggtctccccccagctgtctcacccccactttgtccccactctagagcagggaggcagtgggggaggagttgtgtctcgtcttctgtctccatgtggtttttgggtgtttttcttgttgtgtcctggattccgataaaattaaagaaattgcttcctcaacgctcaaa

SEQ ID NO: 74696 - DNA, 909 bp, Homo Sapiens
gggcggcgagggggaagagtgtgtctgcgggagaaagaggagaatcgcccaagcggcctcggaagtcccagggagtggaggcccccgccgtggagccgtgtggtgtatgtgtggtaacaccatgtctgtgcccctgctcaccgatgctgccaccgtgtctggagctgagcgggaaacggccgcggttatttttttacatggacttggagacacagggcacagctgggctgacgccctctccaccatccggctccctcacgtcaagtacatctgtccccatgcgcctaggatccctgtgaccctcaacatgaagatggtgatgccctcctggtttgacctgatggggctgagtccagatgccccagaggacgaggctggcatcaagaaggcagcagagaacatcaaggccttgattgagcatgaaatgaagaacgggatccctgccaatcgaatcgtcctgggaggcttttcacagggcggggccctgtccctctacacggccctcacctgcccccaccctctggctggcatcgtggcgttgagctgctggctgcctctgcaccgggccttcccccaggcagctaatggcagtgccaaggacctggccatactccagtgccatggggagctggaccccatggtgcccgtacggtttggggccctgacggctgagaagctccggtctgttgtcacacctgccagggtccagttcaagacatacccgggtgtcatgcacagctcctgtcctcaggagatggcagctgtgaaggaatttcttgagaagctgctgcctcctgtctaactagtcgctggccccagtgcagtaccccagcctcatggggggactcaagcaagcaagcgtgggcaccatcttgggatctgaacccggtcgaagcccctgtccccacc

SEQ ID NO: 74697 - DNA, 1258 bp, Homo Sapiens
  misc_feature (226)..(226): n is a, c, g, or t
  misc_feature (745)..(745): n is a, c, g, or t
ctatagtgaagtgaagggtccctgaagtggagtgggtttcaagcgggttggggcccctttttcttcccaagtttgcctgttagcccccttccaattattgctgcccaggggggggcccccccttcccagggaaaattggataaagaaaagcagccctgcccctggttgcaggccagagcccaggtgggctaagggccaggaaaggaaggcccgggccaggccttgnccacctgcccccccagagcctgtgggaaaaggacaggtcaggaagggtggggacaggggctcgaccggctcagatccaagatggtgccacgcttgcttgctgagtcccccatgagctggggtactgcactggggccagcgactagttagacaggaggcagcagcttctcaagaaattccttcacagctgccatctcctgaggacaggagctgtgcatgacacccgggtatgtcttgaactggaccctggcaggtgtgacaacagaccggagcttctcagccgtcagggccccaaaccgtacgggcaccatggggtccagctccccatggcactggagttatggccaggtccttgggcactgccattaaatgcctgggaggccggacaggactcaggggcaaagctagtgctgcagcagtccccaaggccacgaggatgcagacacaaagggcggggggggtcagtggggacatccacctgggggaaggccccgtgcagaggcagccagcagctcaacgnccacgatgccagccagagggtgggggcaggtgagggccgtgtagagggacagggccccgccctgtgaaaagcctcccaggacgattcgattggcagggatcccgttcttcatttcatgctcaatcaaggccttgatgttctctgctgccttcttgatgccagcctcgtcctctggggcatctggactcagccccatcaggtcaaaccaggagggcatcaccatcttcatgttgagggtcacagggatcctaggcgcatggggacagatgtacttgacgtgagggagccggatggtggagagggcgtcagcccagctgtgccctgtgtctccaagtccatgtaaaaaaataaccgcggccgtttcccgctcagctccagacacggtggcagcatcggtgagcaggggcacagacatggtgttaccacacatacaccacacggctccacggcgggggcctccactccctgggacttccgaggccgcttgggcgattctcctctttctcccgcaga

SEQ ID NO: 74698 - DNA, 934 bp, Homo Sapiens
cggaacaaggccctggactggctccggggcagagggggtgctgtgggtggggagaaggacccaccaccaccagggacccaaggagtcgtctactttgctgacgatgacaacacctacagccgggagctgtttgaggagatgcgctggacccgtggtgtctcagtgtggcctgtggggctggtgggcggcctgcgattcgagggccctcaggtacaggacggccgggtagtggcttccacacagcatgggagcccagcaggcccttccctgtggatatggctggatttgccgtggccctgcccttgctgttagataagcccaatgcccaatttgattccaccgctccccggggccacctggagagcagtcttctgagccaccttgtggatcccaaggacctggagccacgggctgccaactgcactcgggtactggtgtggcatactcggacagagaagcccaagatgaagcaggaggagcagctgcagcggcagggccggggctcagacccagcaattgaggtgtgatggcggccccaccccaactaccacctcttttcaggcacagaccttgtgggactgggccccaggcctgcccaggatgtggttttccaagtcctgacccttggagccagaagtggcccctctgcccctccaggcccagggcatggtcctgctgcttcacccctcccctagcctgccgtgtggcactgcccacaggctggggacaagcagcccttgtgttgagtcaggttggccctgtctagggtggaacagaaggacagatggacccaggagggagggcagctgagtaactgggtaacttattggggctgggcatgcactggggggctggaggagctgggctggacccttcccacctgagcatgctgacccccttcctacctccagaataaagaatctcaacctggaaa

SEQ ID NO: 74699 - DNA, 1135 bp, Homo Sapiens
tcggcgctgccagccccagctgggagctggtaggggagtgcgaggaaggcgggacgcagggcggagccgctgcaggggcggggcctgcggacaggagccggggtttggggcgggaacccctcgtcccctgcagaccccgcctgctcgggcgcgggcggcggcgcggccatgaagctgaagctgaagaacgtgtttctcgcctacttcctggtgtcgatcgccggcctcctctacgcgctggtacagctcggccagccatgtgactgccttcctcccctgcgggcagcagccgagcagctacggcagaaggatctgaggatttcccagctgcaagcggaactccgacggccaccccctgcccctgcccagccccctgaacccgaggccctgcctactatctatgttgttacccccacctatgccaggctggtacagaaggcagagctggtacgactgtcccagacactgagcctggtgccccggctgcattggctgctggtggaggatgctgagggtcccaccccgctggtctcagggctgctggctgcctctggcctcctcttcacacacctggtggtcctcacgcccaaagcccagcggcttcgggagggcgagcctggctgggttcatccccgtggtgtcgagcagcggaacaaggccctggactggctccggggcagagggggtgctgtgggtggggagaaggacccaccaccaccagggacccaaggagtcgtctactttgctgacgatgacaacacctacagccgggagctgtttgaggagatgcgctggacccgtggtgtctcagtgtggcctgtggggctggtgggcggcctgcgattcgagggccctcaggtacaggacggccgggtagtgggcttccacacagcatggggagcccagcaggccccttccctgtggatcatggctgggatttgcccgtggcccctgccccttggctgtttagaataagccccaatggcccaaattttgaattccacccggtttcccccgggggcccaccttgggaaaaaacaaatccttttcttgaaagcccacccctttttgggaatcccccaagggacccgggaaacccccggggcttgcgcaaaattgaacctttggggaaacc

SEQ ID NO: 74700 - DNA, 726 bp, Homo Sapiens
  misc_feature (27)..(27): n is a, c, g, or t
tgcaacacaaacgagttctacatgtcntatcacctgttcattgtggcctgtgcaggagctggtgccaccgtcattgccctgctgatctacatgatggctactacatataactatgcggttttgaagtttaagagtcgggaagattgctgcactaaattctaaattgcataaggagttttagagagctatgctctgtagcatgaaatatcactgacactccagactaaagcagagtctaggtttctgcaattttgttacagtaatttgtaaatagctttagtaaactcaccttgcatggtagattaataagatgacttactgtacatgaattacacaataatgagatctggtggctatttccacattttgaaaaggattcagttatttactgacagtggtgagcatcctttttaaaataatgttctcatacttaaacattagagagcagtatctttaaatgaattattaacactttggaatacttacattttctgttatttttgattgcctgataaccagtttcaatgatgaaaatgaaaacaagtgctgaagatgaaatggaagagaaccgttttaatctggattttgttttgtcacacctggaaaatactttgcaaatatgttctaaattgaaaacaatttttttatgatcacatggttcactaccaaatgaccctcaaataagccagatgaaaatttgaagaaaaaggtcacccagttctttgg

SEQ ID NO: 74701 - DNA, 1177 bp, Homo Sapiens
tcgtgcgctcctgcagcaatagcaggcaactgtgagaaacagggttgagaaccaagaggttagatgacctttgtctctgggcactctgtgggttccgaatggaatgacaggcctcagaaggccctggagtccttgctccccaggctgtggggggcgggtcaccagctttggcattgcccaggagcccctgattccacatcacattttaacttgaatccctgggcgattcatcgaaggctggaaggccttcccaccgcgtgcagaagctctcctacccggttcctacctggttcctagaagagaatccatgcacctcacacccgcgacctctgcagtgggagtgctgggttggcgagcagcccatcctgatgccggatggtggatggcggggctggcgaggcacctccttcctgccccacgggcatctcacttccactgcctgcctcagaagcagcacttccaccacccctctgcctctgtggcacctctgccatttggctgggtgaggagaggtagaaagagggccccctgtgctttgctttggttttttggctttgcctggaaatgcggagaatcctgcagagcgcagactgagaggctgtgaaatctcagtccctacacttgggatgggactttgctgttttcctaaaggaactggcccaaataaggaaggaggaaaaagagaagaaaagacgccgcctcgagaacatcaggtttctgaaagggatgggctactccacgcacgcggcccagcaggtactccacgcagccagcgggaacttggatgaggccctgaaggtagcagctccctcggcgcctctggccttgtccctgagcagtgggtcctgcccagagctccctccatggctctccagcatcctcccgggctcactcctatgggctgccccgtcatccggatctgaagggcaggtttctcctgggctccagcccagacacaggctgcgtgaggccacgtgaggccccatgctcagtgcttcgcccaggcctggctccaaaacgtggtgcctgtccacaccagcacagtccacaggccaggactttgtgtagggtttctgtgtgcagcagagtttagtgaaacaggcagtttccacggcagaaaaaagagaatgggaattcaacttgtagtataattgtttggcattaaaattttaaatgt

SEQ ID NO: 74702 - DNA, 1316 bp, Homo Sapiens
  misc_feature (1066)..(1066): n is a, c, g, or t
  misc_feature (1145)..(1145): n is a, c, g, or t
  misc_feature (1191)..(1191): n is a, c, g, or t
  misc_feature (1261)..(1262): n is a, c, g, or t
cccgctcaatcatacagaacgagacccatcgcaaccctttcccccttccggtcataagactgcccccgttccgactgaacggcgtggccaagaatatgtattcctcaccttagcccccagctaaccttatgctccgctctatatgtggaatgtgacggatacaattccacaaagaaacagctggacatgatacgaatttaatccgactcactatagggactttgccctcgagccaagaattcggcacgaggtgatccatcaaaaagtgccaaattgttccagatgggtttcactccccaggaagcccggcttggcatgaagggcgtgtgataggaacgtgaatcatgcgcccactcatattaccaaccgcagagaggaactggcccaaataaggaaggaggaaaaagagaagaaaagacgccgcctcgagaacatcaggtttctgaaagggatgggctactccacgcacgcggcccagcagattctgctcagcaatcctcagatgtggtggttaaatgattccaatcctgaaaccgacaaccgtcaagaaagtccttcccaggaaaacattgaccgattggtgtacatgggttttgatgcactcgtggccgaagctgcgctgagagtgttcagaggcaacgtccagctggccgcccagacccttgctcacaacggaggaagcctgcctcccgagctgccgctgtcgccagaagactctttgtccccgccagccacgtccccttctgactccgcaggaacctctagtgcctcaacagacgaagacatggagacagaggccgtcaatgagatactggaagacattccagagcatgaggaagactatcttgactcaactctggaagatgaagaaattattattgcagagtacctatcctatgtagaaaataggaagtcagcaacaaagaaaaactaaataatgaacagaaatagcgctaattttctgcttataaatgctatcattatgaaaagggtaatgcagctctttctgttcttacttttttatctgaattacaagtcctctttgggtgtacgaaggggtgggcangggacaagtccaggaagggtcccaggggccttcatgcatggtctcggggaagaagcttcctctggcctggcgcaggacntttcatctggcctcccaggtctgcgtcccttaaccccttccccagnttgggggtttaccccggaaacgggaaggaccgggggtccctgtagaaaacgggggccttggggaaggggnncagggggaaccggcccttggaaggggggccccgactggtttctcctccaggtgg

SEQ ID NO: 74703 - DNA, 1178 bp, Homo Sapiens
  misc_feature (560)..(613): n is a, c, g, or t
gccccggaacccgcccagtgaggacctcccagggcctggtggcagtgtggacatagtggccatggatgaaggctcagaagcatcctcctgctcatctgctttggcctcgaagcccagcccagagggagcctctgctgccagctttgagtacactatcctggaccccagctcccagctcttgcgtccatggacactgtgccctgagctgccccctaccccaccccacctaaagtacctgtaccttgtggtatctgactctggcatctcaactgactacagctcaggggactcccagggagcccaagggggcttatccgatggcccctactccaacccttatgagaacacccttatcccagccgctgagcctctgccccccagctatgtggcttgctcttaggacaccaggctgcagatgatcagggatccaatatgactcagagaaccagtgcagactcaagacttatggaacagggatggcgaggcctctctcaggagcaggggcattgctgattttgtctgcccaatccatcctgctcaggaaaccacaaccttgcagnnnnnnnnnnnnnnnnnnnnnnnnnnnnnnnnnnnnnnnnnnnnnnnnnnnnnngtatgtaagtttttctaccatgatttctacaaacaccctttaagtcccatcttcccctgggcataggccatagggatagaagttaaagttcttgagcttattcagaagctggatctgcaatctgaatgctactcataacataacaaaatagtatgttaaacagctcttaaatcttactggcttaccacattaaatgatttctctctcctaactcagctcaaatgggcagccatccatgggatgagtcagaggttcagactcttccagtctgtagctctaccttctcttagggtacttagatggatcccctgttctacaaactgccagtcagcaagggaagaaaaagggcagcaatgaccctcaatgggccatttgagggatctggcctggaaatgggcttcctctcttcttctcacacctcactggctggaaacagtcacatgaccccagtcacatgaaaggccaggaaacttagtttagctgtacacccaggaagggcaaagctgtttaagggccactagctagtctctgccactaataataataaaagtaattctgaatcaaa

SEQ ID NO: 74704 - DNA, 909 bp, Homo Sapiens
gcaggttaatctgtttattttttcaaaacaaaactaaaaatcgccactcaatgtatctgagcagactgcctgatcacagttaaaagctttctgtaatgcccagcaggaacgtcatagcctggtggtcaaaaatgagtgcttctggcgctgctggactgtggcccgcagcctgagcaccccttcttctcctccctctgctcatattgtccttgtgctgccatccagtcagcagcggacagccagcccaatgctgctcaggtctgtggcatccagagataaaaggcgtctccgctccccgcaggtttctgctttgcccacctggtggggtacgcgcctggcacgccacccccactggaggtcctgaatggtccacagagaaggcgtggggcaaggcctcaagtgctgatgctctgagaataaaaattaaaaggcagctctgccctgaagcgtcaccccacagggctcattccttggctgtgccctcctgggtcccggggtggacacatggatttggtgtcatcatcgctcgtgcttgatgttggcttcacttcgctccaaggccaccccgctgccgttccgaggggcgtccttcttgctccagtccttttcagtgtagaactcggctagcactgggcagtgttcagaagccaccccgccccaagaccagttatccggaatccaagggttcgtgaggccttctctcaccacagcccagtgacctgtgaaaaccttctttaagcttttactgatccagatgttgtccagagacttcgagccttgagggttcttggtgctgatgttggtgaaggtgtgcgcggggatcaggtggtggaacttttctttcctcaggatatcatagtcattgctgtctggcccttggccaaaatcccctaagataatgacatcccc

SEQ ID NO: 74705 - DNA, 2126 bp, Homo Sapiens
  misc_feature (1349)..(1359): n is a, c, g, or t
gctggtaccggtccggaattcccgggatcagcagcaagggggagactgcggtatgagccccggcccctccccacctttcccaccccagccctcttgcaagaggagaggcacggtagggaaaagaactgctgggtgggggcctgtttctgtaactttctccccctctactgagaagtgacctggaagtgagaagttctttgcagatttggggcgaggggtgatttggaaaagaagacctgggtggaaagcggtttggatgaaaagatttcaggcaaagacttgcaggaagatgatgataacggcgatgtgaatcgtcaaaggtacgggccagcttgtgcctaatagaaggttgagaccagcagagactgctgtgagtttctcccggctccgaggctgaacggggactgtgagcgatccccctgctgcagggcgagtggcctgtccagacccctgtgaggccccgggaaaggtacagccctgtctgcggtggctgctttgttggaaagagggagggcctcctgcggtgtgcttgtcaagcagtggtcaaaccataatctcttttcactggggccaaactggagcccagatgggttaatttccagggtcagacattacggtctctcctcccctgccccctcccgcctgtttttcctcccgtactgctttcaggtcttgtaaaataagcatttggaagtcttgggaggcctgcctgctagaatcctaatgtgaggatgcaaaagaaatgatgataacattttgagataaggccaaggagacgtggagtaggtatttttgctactttttcattttctggggaaggcaggaggcagaaagacgggtgttttatttggtctaataccctgcaaaagaaatgatgacttgttgcttttcaaaacaggaaatgcatttttccccttgtctttgttgtaagagacaaaagaggaaacaaaagtgtctccctgtggaaaggcataactgtgacgaaagcaacttttataggcaaagcagcgcaaatctgaggtttcccgttggttgttaatttggttgagataaacattcctttttaaggaaaagtgaagagcagtgtgctgtcacacaccgttaagccagaggttctgacttcgctaaaggaaatgtaagaggttttgttgtctgttttaaataaatttaattcggaacacatgatccaacagactatgttaaaatattcagggaaatctctcccttcatttactttttcttgctataagcctatatttaggtttcttttctatttttttctcccatttggatcctttgaggtaaaaaaacataatgtcttcagcctcataataaaggaaagttaattnnnnnnnnnnngcaaagagccattttgtcctgttttcttggttccatcaatctgtttattaaacatcatccatatgctgaccctgtctctgtgtggttgggttgggaggcgatcagcagataccatagtgaacgaagaggaaggtttgaaccatgggccccatctttaaagaaagtcattaaaagaaggtaaacttcaaagtgattctggagttctttgaaatgtgctggaagacttaaatttattaatcttaaatcatgtactttttttctgtaatagaactcggattcttttgcatgatggggtaaagcttagcagagaatcatgggagctaacctttatcccacctttgacactaccctccaatcttgcaacactatcctgtttctcagaacagtttttaaatgccaatcatagagggtactgtaaagtgtacaagttactttatatatgtaatgttcacttgagtggaactgctttttacattaaaatcgatcttgtgtttcttcaaccttcaaaactatctcatctgtcagatttttaaaactccaacacaggttttggcatcttttgtgctgtatcttttaagtgcatgtgaaatttgtaaaatagagataagtacagtatgtatattttgtaaatctcccatttttgtaagaaaatatatattgtatttatacatttttactttggatttttgttttgttggctttaaaggtctaccccactttatcacatgtacagatcacaaataaatttttttaaatacaaaatgaaa

SEQ ID NO: 74706 - DNA, 611 bp, Homo Sapiens
accaaccacaattagaagcaccaattccccaattttttaatatgctgagccagagacatccccttagtggaactgtcttcctatcccccaccactcacctaacaaagtatcaactccaagagctatgaaaatcagtgccctgactcctacaaagcctgagtcatgagatgggggaaagggcgtgaagccgaaagtacagatgttcacaggaaatcccaacccttcaagcctgatgtctcatcttttgcaagcagctaaggagcttttcacataccatcattaaaacaagacccatgggaggaagctggctgcaggatgaagaggaaaaaacagaagactagtacactcaagacataccagagaagatccatttcaaaaatatttattgtgtgcctgaggtgccaagcactaggctaggtatgctgtggccaaggccaggggacctctggtaagccagagcggggcaaaagcaaacagagcggaactccactccactgtgataacttgcaaaagattagttctgctgttcgccaccgtgctggatgcagcaccagagacaggacgacacgaggacccagagggcgccgccatgctcatttcaaaaggtgcag

SEQ ID NO: 74707 - DNA, 908 bp, Homo Sapiens
aaaaaaagacagcaataattaatgccaagaacaaaaaagaatgttgacgtgttgcccggcccgccaagcgggcccctgcccaggcccccaagctctgccaccactggggtgccgtcccctcccgcagcggggcacagtcagctttgaaggtgacagcgggccaaggccaggactctgggtggaggaggccccttctctgccggccccacctctgctgggagcagccacagcctgtggctggggtgctgggatttcttcctggtcatcaaagatgaaacgtacaaacctcaaggacccaaacacacagtgtggtggccagggcagaccccacagcaaaccccatggctcgcctgagctctggaaactgccccactgctccttccatccttgccccaatcccccaatgcttgttttgattgttttcttaaaaaatataattttgtaaatgttccaaaaaaatactattattcctagtcaaacacagatattgcaatctgcaagagtaactgctctgtctatgctctataaaccgtgcaaaagcattatcacactggcatcatatacgaaccgtatcccagggttcctaagtatcgcaaaagccagtaccaattgcgcacggtggacacgcggggccggggcagggtcgggctgggcagggcagcagcctgggttcctcccggctcgcactgcggagcgcgactcgcgcgtcggtcgcttcttcccacgatggggtatcctggctttgacagagacggcggcagctccgggtcccagcgtccagccctgcccgagataggccgcctgctcggcccagaaggccccgcaggatctctggcgacgccggttggaccaggcggccctgctctggcggcctcggcggtctccccggtatgcggcccgggaggctc

SEQ ID NO: 74708 - DNA, 1067 bp, Homo Sapiens
  misc_feature (44)..(44): n is a, c, g, or t
  misc_feature (108)..(108): n is a, c, g, or t
  misc_feature (160)..(160): n is a, c, g, or t
  misc_feature (995)..(1014): n is a, c, g, or t
gattgcgatacatcaccagacagttactgtacgattatcgatcnttagatttgcctcgagcaagatcgcacgagatgtgacccttatcttctggaatatagtgatgtnccaactcatcagaccacagttatttgatcatcaccacatcaccatgctgaantccacctctgccaacacattgtcttagcacatttattttatgtatcgccatttcctgggcagctttgtactcagcctccttaccataatggtcttacttatccgagcccagacattgtataagaagtttgtgaagtcaactggctttctggggagtgaacagtgggcagtgattcacattgtggaccaacgggtgcgcttctacccagtggccttcttttgctgctggggcccagctgtcattctaatgatcataaagctgactaagccacaggacaccaagcttcacatggccctttatgttctccaggctctaacggcaacatctcagggtctactcaactgtggagtatatggctggacgcagcacaaattccaccaactaaagcaggaggctcggcgtgatgcagatacccagacaccattattatgctcacagaagagattctatagcaggggcttaaattcactggaatccaccctgacttttcctgccagtacttctaccattttttgaaactacaatactggaacatccaggaactggagttattctacgctaatggattggaaagaatgttgggaaaggacatcttaaatcttttctaactatgccctaaactgcagaactcaaaggaaatatagtgccattgttagtagtcattctagatgaattgggagtatctctccagttattcccagattcactagtgatccttaaagtctctattcagggagaggaagacactttccatctcagagatagactcgtgttaccttgatggatattggatttgtctaagtctcttctagaaaaaataaattctagattattnnnnnnnnnnnnnnnnnnnncctgagcaggcggccgcaagcttattccctttagttgagggttaattttagct

SEQ ID NO: 74709 - DNA, 617 bp, Homo Sapiens
  misc_feature (61)..(61): n is a, c, g, or t
gatacctctgctattgatgacacctgtattctgtctgggaaatactagtgaatgtttccanaacttcagtcagagccacaagtgtatcttgatgcactcaccaccatcagccatggctgaacttccaccttctgccaacacatctgtctgtagcacactttatttttatggtatcgccattttcctgggcagctttgtactcagcctccttaccattatggtatggtaccaccctaccttcctttgtggagagatgaggaaatgaaggggatgggcccagtattcccaggacctgggaaagatggggcagagaggcacttcttgtggtcctagaactaagaaagtagctaggagatcttgacaatataattactgcctcagacttttgcacttccccaaatcaaatgataagagagagaaaagagcttgtatttattaggtgaaaattatgctcactctacaactagtataggcttcatcaatcccctatggccagaaaactcatatgtgccaaatatatcctttacatagttaggatgacactctgaaacatagaacatatgctttgatttaattttccaaataataaaataattttcttttttaaattataaaaa

SEQ ID NO: 74710 - DNA, 807 bp, Homo Sapiens
  misc_feature (49)..(49): n is a, c, g, or t
aaagaggatttggaagttgtatggatttttttgttatcttcactttacntgcataggaaacaatctacctcatcatttaaaatgacatgggtgtcggttttgtagatctttggtttttttgtcaggtttaatttcagttaacaaaatgtaaaacatgacattccctgcagatattgttgtataccagtatggtttcttctctttctttaaatgtttttggccatcaagtagcagtcgtcagtaggagtttataataccaagaatgtgctgcgtatcttgtctcaataagttttaagtaacatttaaaaatattaaagcatgttatttgacctaattttttagcatttgagttgttccattaaatggagcatcttgtaaatttcaagtattttatacttgcaattgttaagagttaacaggtagttggatttgtcgcagacaatgagttaaggaatcctttcacgtttttcccaactttaaaattaaggattctcaggtccctgtgtagagcagtgaaaataagatgtgcgtatgtgtgtgtatgcctggagaattggtgtttcacttcagtgagaggattggctgtgagcttcagaccaggaaatgtgtcatcttgccaggcacctggctgagtgtgctggagtgaggatcttgaacagaaacttccttttctgttattattcactacgaagctaaaatggccaaatatataccgtgaaaattggtttcatttaacaaaagatcagatccctccttcagctgtacacatttttaaataaaatcatattgaactaaacatctctaccg

SEQ ID NO: 74711 - DNA, 649 bp, Homo Sapiens
aatggaataaggccctgtcagcatggctccctttatcccagttttccgtctgggaacagtacctctgcccctgattcccaatgtgccatagttttattaactccattaaagaagcctgtatgtgttttggttagttacagttattttacaataatggtgggtaatggccccacctctgttatgagataatgttctaatcaatgtctctgcctttgtatcttttctgagggctttgtctgttctcttcattctaatgaaaggtgtattctagtgctgggtgcatatcatccaggataatattctgcccaactccatcctctgttactagatcccttaccagtcacatttgtggactggtggccagtcgtataccatccctggaaggattctgggacaatattccagggattcattgacttcttggctccttttctccatttcctttgggggaagggggaattgaccatgcttaagtgcatcctatcaaggggcagctccgtccccatggccattggatcatgagacactctgaagtcagaaggctggggcagatcacttcaagcaagcccccatgatggttctcagtcctgcttctctgtgggtacgtgcccctctgtttaaaaataaactgaatatggatgtttaaaaa

SEQ ID NO: 74712 - DNA, 681 bp, Homo Sapiens
  misc_feature (212)..(384): n is a, c, g, or t
  misc_feature (392)..(451): n is a, c, g, or t
aaattttaagttaaaagtcagtcttacagcttggatgtttggatgtggatgtttggctgaatttatatatagtgtgtactcatcaataccacattctttgttgtattcaagaaccgttaagagtgtgctaattccctgtaggtacataatgaggaaaatttgctccactacaaccattaaaaaataattttggccagatacggtagctcgtnnnnnnnnnnnnnnnnnnnnnnnnnnnnnnnnnnnnnnnnnnnnnnnnnnnnnnnnnnnnnnnnnnnnnnnnnnnnnnnnnnnnnnnnnnnnnnnnnnnnnnnnnnnnnnnnnnnnnnnnnnnnnnnnnnnnnnnnnnnnnnnnnnnnnnnnnnnnnnnnnnnnnnnnnnnnncttgagcnnnnnnnnnnnnnnnnnnnnnnnnnnnnnnnnnnnnnnnnnnnnnnnnnnnnnnnnnnnngaatgagaccctgtctctaaaaaattttttttaaataaataatttaactcttctaataatgttttgttgcaggaaatgtatttcagataaaatatggatttgaaaaacagaaaatatactttatgttctgaaatttgtatttaagtataaaatgtgaatcatcttgtctaaatagcttacagcatagttggcttaaatgaaaataaaatgatatgcttatacatgttaaa

SEQ ID NO: 74713 - DNA, 1181 bp, Homo Sapiens
  misc_feature (725)..(897): n is a, c, g, or t
  misc_feature (905)..(964): n is a, c, g, or t
aaataatgataaatacagagatagagaaaaacgagaggtaggtgttcagtcttcagaaagaaatcaagacagaaaggaaagcagcccaaattctagggcaaaggataaatttcttgaccaagaaagatccaacaaaatgagaaacatggcaaaggacaaagaaagaaaccaagagaaaccctctaattctgaatcatcactgggagcaaaacacagactcacagaggaagggcaagagaagggtaaagaacaagagagaccacctgaggcagtgagcaagtttgcaaagcggaacaatgaagaaactgtaatgtcagctagagacaggtacttggccaggcagatggcgcgggttaatgcaaagacctatattgagaaagaagatgattgatggctaccccaagagaaagatttaaggaagcacagaaaactgtaattcctggaacctgctgcgtaaaaccataaaggagtgtgttaccagtagtttggagggcatttttaaatttattttcaaaattttaagttaaaagtcagtcttacagcttggatgtttggatgtggatgtttggctgaatttatatatagtgtgtactcatcaataccacattctttgttgtattcaagaaccgttaagagtgtgctaattccctgtaggtacataatgaggaaaatttgctccactacaaccattaaaaaataattttggccagatacggtagctcgtnnnnnnnnnnnnnnnnnnnnnnnnnnnnnnnnnnnnnnnnnnnnnnnnnnnnnnnnnnnnnnnnnnnnnnnnnnnnnnnnnnnnnnnnnnnnnnnnnnnnnnnnnnnnnnnnnnnnnnnnnnnnnnnnnnnnnnnnnnnnnnnnnnnnnnnnnnnnnnnnnnnnnnnnnnnnncttgagcnnnnnnnnnnnnnnnnnnnnnnnnnnnnnnnnnnnnnnnnnnnnnnnnnnnnnnnnnnnngaatgagaccctgtctctaaaaaattttttttaaataaataatttaactcttctaataatgttttgttgcaggaaatgtatttcagataaaatatggatttgaaaaacagaaaatatactttatgttctgaaatttgtatttaagtataaaatgtgaatcatcttgtctaaatagcttacagcatagttggcttaaatgaaaataaaatgatttgct

SEQ ID NO: 74714 - DNA, 1330 bp, Homo Sapiens
  misc_feature (77)..(111): n is a, c, g, or t
  misc_feature (1254)..(1279): n is a, c, g, or t
catgatagatcactatagggccctcacttgcagagcgaacgacgagcgcagcgagttagtgagcgaggaagcggcgnnnnnnnnnnnnnnnnnnnnnnnnnnnnnnnnnnncagtcgacggtaccggacatatgcccgggaattcggccattacggccgggggaggtcctgccctcactcccattctcatctccatttcccttctagtctgagtcacaacagcatttctcaggaaagtgccctgtacctgctggagacactgccctcctgcccacgtgtccgggaggcctcagtgaagtaaggggatgttggtccccgaaaagcccctttctgctggccaacaggtgcccctggctgatgatgggagaagcaaggcacccacactttgtggccttccatctgggtggcttggagcaacctctgcctttctctgaatctcagggtttcctgggcatgggatcataatttctatcccctgatgcccgggtgccatggggaccatggaggccatggggtgggaaggccaggtattgccatgctcacagaatgagttcgggggtctcctctggttctgaggcctccatcctcccttgtccttgtgggtgcagccccgcttccctctctgtgcccttgtgggtgccataggtgcctaggaagctggcatgtctgggcaccgtgcttccccaggcccttctctctgcaagcctgggctctgagcagagcttccggattcacttctccagagaggaccaggcctgggaaggacactcaaggctaaagtgagtcgcagcttcccggccagagcacgtgtccaggcttggccaccggcttgagcaagtccctgcagctgacggagctcacgtgagtgacccacccagcccgtgaggacagcagaggggtgggggcaccctgccagagccacctcagtgactgacctctgtctccaggctgacccagtgctgcctgggccagaagcagctggccatcctcctgagcttggtggggcgacccgcagggctgttcagcctcaggtacctcctcccccgctgcctccgggaggggccatggcatgaatgggagcaggggtgggcactggagtaagaggcccccaggatcatggccccagtcatttcctgtacccacaaccctgccatctggaccctgagcaaaccctgtccatctgtcccagagactccacaaggcacacagagaaactgtccttccccacactggaggcctgtgctttgggatttnnnnnnnnnnnnnnnnnnnnnnnnnngtttcagaggatactgaactgaggacaaaaataaactgaaacgaagttctt

SEQ ID NO: 74715 - DNA, 905 bp, Homo Sapiens
  misc_feature (94)..(94): n is a, c, g, or t
gaaacactatgggtgtccccagtgtggaaaagacttcagcatcaaggcagaactcaccaaacacagaaggatccacactgaagagaaacgtacnaggtgtgaggagtgtgggaaagcctttcgtcataactgtaagcgcagggctcatgaacgagagcatacaggggagaagccctatcaatgcagggattgtgggaaaaccttccaagataagcactgccttaccatccatcagagaatccacactggagagaaaccttacaaatgtttagagtgtgggaaagctttcagtgggaagtcaaacttgaccaatcatcgaagaattcacactggagagaagcctcacaaatgtgaggtatgtggaatggccttccatcatagttcagtcctgaggcagcacaaaagaatccacactggtgagaagccatacacctgcagtgagtgtggcacgtccttccgtcagggctcagctctgattggacataagcgagttcatactggggagaaaccttatgaatgtgaggaatgtggaaaagctttaagagtgagctcaaatcttactggacataagaaaagaaaacatcaagtatggagtacccatgaactggatgggagtaggaaatccctctctccagtgactgtttctcagacctcagtagtcagtattttgaccagtgcctgagtataacgattctgggggttactttctgtttttcctacctctcagggctggtccttctggctcttatattagttattcctgatttcctgacccttaattgtgagattccccaaagacattgtcctttaccttcttattcactattttttcagtgagcacatttacttccaagagtttatcaatcacttcctaatattaataaacacttattagtgcttaaaaa

SEQ ID NO: 74716 - DNA, 795 bp, Homo Sapiens
tcaggtgtatcgtattgagtggctgccctgcagaagatgtgatgaattatcctgtagtacaagattatcttattcccctgcccaggtgtgagcacgtgctctcgctccctttcaggtttactatgttaaaactaaactgctgcaaaagttctcaatgttcttttccaacacatctatatatatatggacacacagtcacgcaagctagttcccatgactcctggatctatgtgtatgcagaaggctacatatacatagttgcttctttcctttccattgtagctctttgcctctcaattgtcattgatacatgcattgctcttattctgtctggcattacaattgcagttttgcctaatggcaaaaccagccatcccattgccaaaagagtcaacagtatctgtgtttgtactgtgcagttttcaggatgagatgacagatagcacgactacactgaggcaccctcagagaaggcagggcctgatttatctagctgtccagccgctgtggctggaggtaggctagttgggatgggcagctaagcagtcttctcttctgcctttatgagattgggtagaaagatggggcatattcatctacccccaaaagaacactataaaaacagctcctctatatttccacctctttctatttatgcaactcatcttcacagattgttctaaagtaaaatagatggtgtatgctgtatccacaaatcatctgtaacaattatgttttcagtgctgtgtcattccaaataaacctttggtaatcttcaacgattaccctaaaaaa

SEQ ID NO: 74717 - DNA, 973 bp, Homo Sapiens
  misc_feature (769)..(798): n is a, c, g, or t
tgattagcagatgcttactgttcccaaacacggaagcgaggtcccagaaggccagcggtggttccaggagcaacagctcccaaaccctgagcaaggcaaccgatcgccaggaccaggaagcatcacccaggagatttggcgcccacttccacctcttctctcagttttggacaagtgacaaaccattttgcccccttactcttcttttttaactgttaaaccaaaggaaagcacaaatgaaggaaatcctgtgtaaagcattgagaaggaaagaagcctggagcagcctctcctgtccacagccaggggttaggtctgcaggcccgtctgcggtccccatcgagcatcaaggggacgctgtgtgtgctgcaagtgaccccgaaaacaaccacagccgtcacatggtcctcctgaagttggggcaccctcctctcagcaccaaaatggcccccactccttcgtgtcctcccgctatctccaaatcggacgttctttctagctgagatttttatttttccacatctgtagtgccatgaagcgattctgtctttgacttccaatggcaaacctgggtgatcgggaacaagcacgttgtacccttggctggacatggccaagacacaaggcattccacggcggcaagctgaccgcacagcagtctggcttgattttcagccgtcatcattgggttctgttttgacagctctgctgtcccatagggactgcgactgggaccaggtcaaccacgccaggggggtgtcaccagccnnnnnnnnnnnnnnnnnnnnnnnnnnnnnncctccttaagctgctgtcaatccaaaccattggcatcatcgtttcttttgaattaaaaccaacatatcagcaatagtctgctctccccgggaatctctaacatgctctgtttacatcgataaatgcacttaaggaaaacaaacaaattaaagctcatcttaaagtccatcaaaaa

SEQ ID NO: 74718 - DNA, 538 bp, Homo Sapiens
  misc_feature (258)..(293): n is a, c, g, or t
ctttacaaaaactatgccaacacaaatactgtagacctctataattcaaacagcaaatagcttaatatggacaacatccatgtgctacagctaattttagacacaaactgatggtttcaaacatgctattttaaaacaagaacatcccacatctccaaatcttaatttggttaattttgtcaataaattaaaatgtatgtaatgtgcatatgtatatacaactttagaagagtgtatttatgtatatacacttatctnnnnnnnnnnnnnnnnnnnnnnnnnnnnnnnnnnnnccctacacaaatccctgaaaaggattcaaatgttctctctcagacttaaaaggccattccctacttcaaagttacattcaacaccactatgatccccttccgttattagcaactttgctacacttatgctgaatgttatgagaatcatgaattaataaattacacagtaattcctaacttaaagtaaatgaaataatccaatttaacatggcactgaaaattataatagtgcctgtgtggaaggg

SEQ ID NO: 74719 - DNA, 843 bp, Homo Sapiens
  misc_feature (67)..(67): n is a, c, g, or t
  misc_feature (115)..(115): n is a, c, g, or t
atgtgcaatgctttaactactgcccagattgtgaaagtgtgaaattgtatactccagttaatgagtntgaagaaagatctctgtgtcgttcattcgtactatacagatgcgttancgagacaggaaagactctccccagctgctcatggatgctaaacacatctttcctgtcacctttcctttcaacccatcttccctcgcactagaaaccatccagattccagccagcctcggcctgggcttcatttcacgggtctgaaagtgatgtccaggcaaaaattgacaatacatttcttgcccgaaataagaacccattatttccagtgagttacatgaaaatacatttttaaagagaaagtactgattatctcccaaatgagaagtcattaactggaaatctccctagaatactttcatcactttggaaacaaagataggctctttcgtgctgtgttatctttatagcaacactcatccttaaccaactaggtaccgtgagtttacatacaggagaatgatggaaggaagggaggaaggaaaggaggagaaaaatgtgtcttcagctggcagcatttattttaaatccttagcactgagtttgaatggtataaaaagtataacttccatagatgagctgttgttaggaaggcaccaaagaacctcctctgcactaaacaggagaatggaaagaaaagtctccattgagtacatatcatgtcagtttagtaatcaattatgttgatattgttaaactggttcaaagaaataaactggcaatatgtaaagtaattcctcatttgtgtcactatgatatagagatattaaaggaatgttggtttgcta

SEQ ID NO: 74720 - DNA, 717 bp, Homo Sapiens
agtgatgtgcctcccacaatgagacacatgcgcttcgcactgcgcaggatggaggagctgggcctgcatcctgctgaccaccaggtgtactttggacagctgctaggcatgtgtgaccagatcagcttcccgctgggccaggccggctaccccgtgtacaagtacgtgccctatggccccgtgatggaggtgctgccctacttgtcccgccgtgccctggagaacagcagcctcatgaagggcacccatcgggagcggcagttgctgtggctggagctcttgaggcggctccgaactggcaacctcttccatcgccctgcctagcacccgccagcacaccctcagcctccagcaccccccgcccccgcccaggccatcaccacagctgcagccaaccccatcctcacacagattcaccttttttcaccccacacttgcagagctgctggaggtgaggtcaggtgcctcccagccctgcccagagtatgggcactcaggtgtgggccgaacctgatacctgcctgggacagccactggaaacttttgggaactctcctcgaatgtgtgggcccaaggcccccacctctgtgacccccatgtccttggacctagaggattgtccaccttctgccaaggccagcccacacagcccgagccccttggggagcagtggccgggctggggaggcctgcctggtcaataaaccactgttcctgc

SEQ ID NO: 74721 - DNA, 946 bp, Homo Sapiens
  misc_feature (500)..(500): n is a, c, g, or t
ggacgtggagctggctcgccgtgagggctggtgttttggggccaagctggtgcggggcgcatacctggcccaggagcgagcccgtgcggcagagatcggctatgaggaccccatcaaccccacgtacgaggccaccaacgccatgtaccacaggtgcctggactacgtgttggaggagctgaagcacaacgccaaggccaaggtgatggtggcctcccacaatgaggacacagtgcgcttcgcactgcgcaggatggaggagctgggcctgcatcctgctgaccaccaggtgtactttggacagctgctaggcatgtgtgaccagatcagcttcccgctgggccaggccggctaccccgtgtacaagtacgtgccctatggccccgtgatggaggtgctgccctacttgtcccgccgtgccctggagaacagcagcctcatgaagggcacccatcgggagcggcagttgctgtggctggagctcttgagggcggctccgnaactggcaaccctcttccatcgccacagctgcagccaaccccatcctcacacagattcaccttttttcaccccacacttgcagagctgctggaggtgaggtcaggtgcctcccagccctgcccagagtatgggcactcaggtgtgggccgaacctgatacctgcctgggacagccactggaaacttttgggaactctcctcgaatgtgtgggcccaaggcccccacctctgtgacccccatgtccttggacctagaggattgtccaccttctgccaaggccagcccacacagcccgagccccttggggagcagtggccgggctggggaggcctgcctggtcaataaaccactgttcctgcagctgagagccctttgccctcacacagggtcagctctgggcaacaaagagggagtggctcagacagggtcagagaagtctcatccc

SEQ ID NO: 74722 - DNA, 847 bp, Homo Sapiens
  misc_feature (670)..(672): n is a, c, g, or t
tgccccctagtacccagggtcccctcctcagctcccttgggaaggacacagcagtattggacggtttctagcctctgagatgctaatttatgtccccgagtcctcaggtacaacgggctgtgcccggccccaccccctgggcagatgtcccccactgctaaggctgctggcttcagggagggttagcctgcaccgccgccaccctgcccctaagttattacctctccagttcctaccgtactccctgcaccgtctcactgtgtgtctcgtgtcagtaatttatatggtgttaaaatgtgtatatttttgtatgtcactattttcactagggctgaggggcctgcgcccagagctggcctcccccaacacctgctgcgcttggtaggtgtggtggcgttatggcagcccggctgctgcttggatgcgagcttggccttgggccggtgctgggggcacagctgtctgccaggcactctcatcaccccagaggccttgtcatcctcccttgccccaggccaggtagcaagagagcagcgcccaggcctgctggcatcaggtctgggcaagtagcaggactaggcatgtcagaggaccccagggtggttagaggaaaagactcctcctgggggctggctcccagggtggaggaaggtgactgtgtgtgtggggnnncgcgcgcgcacgcgcgagtgtgctgtatggcccaggcagcctcaaggccctcggagctggctgtgcctgcttctgtgtaccacttctgtgggcatggccgcttctagagcctcgacacccccccaacccccgcaccaagcagacaaagtcaataaaagagctgtctgactgcaaa

SEQ ID NO: 74723 - DNA, 1030 bp, Homo Sapiens
cggacagtaactactaacggtcctaaggtagcgaggcctgggtggcgaattcggcacgaggcacgccgcggcggggtgggtgcaagatgccgctgccggttcaggtgtttaacttgcagggggccgtggagcccatgcagatcgacgtggacccccaggaagacccgcagaatgcacctgacgtcaactacgtggtggagaaccccagcctggatctggaacagtacgcggccagctacagcggcctgatgcgcatcgaacggctgcagttcattgctgatcactgccccacgctgcgggtggaggccctgaagatggccctctccttcgtgcagagaacctttaacgtggacatgtacgaggagatccaccgcaagctctcagaggccaccagggagctgcagaacgcacccgacgccatccctgagagcggcgtggagcccccagccctggacacggcctgggtggaggccacgcggaagaaggcgctgctgaagctggagaagctggacacagacctgaagaactacaagggcaactccatcaaagagagcatccggcgcggccacgacgacctgggcgaccactacctggactgtggggacctcagcaacgccctcaagtgctattcccgggcccgggactactgcaccagcgccaaacacgtcatcaacatgtgcctcaatgtcatcaaggtcagcgtctacttgcagaattggtctcatgtgctcagctacgtcagcaaggctgagtccaccccagagattgccgagcagcgaggagagcgtgacagccagacccaggccatcctcaccaagctcaagtgtgccgcaggcttggcagagctggccgccaggaagtacaagcaggctgccaagtgcctcctgctggcttcctttgatcactgtgacttcccctgagctgctgtccccccagcaacgtgggccatctacgggggccttgtgcgcccttggctaccctttggaccggcaggagctggcagcgcaatgtcatctccagcaagttcctt

SEQ ID NO: 74724 - DNA, 1839 bp, Homo Sapiens
cacgccgcggcggggtgggtgcaagatgccgctgccggttcaggtgtttaacttgcagggggccgtggagcccatgcagatcgacgtggacccccaggaagacccgcagaatgcacctgacgtcaactacgtggtggagaaccccagcctggatctggaacagtacgcggccagctacagcggcctgatgcgcatcgaacggctgcagttcattgctgatcactgccccacgctgcgggtggaggccctgaagatggccctctccttcgtgcagagaacctttaacgtggacatgtacgaggagatccaccgcaagctctcagaggccaccagggagctgcagaacgcacccgacgccatccctgagagcggcgtggagcccccagccctggacacggcctgggtggaggccacgcggaagaaggcgctgctgaagctggagaagctggacacagacctgaagaactacaagggcaactccatcaaagagagcatccggcgcggccacgacgacctgggcgaccactacctggactgtggggacctcagcaacgccctcaagtgctattcccgggcccgggactactgcaccagcgccaaacacgtcatcaacatgtgcctcaatgtcatcaaggtcagcgtctacttgcagaattggtctcatgtgctcagctacgtcagcaaggctgagtccaccccagagattgccgagcagcgaggagagcgtgacagccagacccaggccatcctcaccaagctcaagtgtgccgcaggcttggcagagctggccgccaggaagtacaagcaggctgccaagtgcctcctgctggcttcctttgatcactgtgacttccctgagctgctgtcccccagcaacgtggccatctacggtggcctgtgcgccttggctacctttgaccggcaggagctgcagcgcaatgtcatctccagcagctccttcaagttgttcttggagctggagccacaggtccgagacatcatcttcaaattctacgagtccaagtacgcctcatgtctcaagatgctggacgagatgaaggacaacctgctcctggacatgtatctggccccccatgtcaggaccctgtacacccagattcgcaaccgtgccctcatccagtatttcagcccctacgtgtcagccgacatgcataggatggcggcagccttcaataccacggtggccgccctggaggacgagctgacgcagctaatcctggaggggctgatcagtgcccgtgtggactcacacagcaagatcctatacgcccgggacgtggatcagcgcagcaccacctttgagaagtctctgttgatgggcaaggagttccagcgccgcgccaaggccatgatgctgcgggcagctgtgctccgcaaccagatccatgtcaagtccccgcccagagaagggagccagggggagctgactccagccaacagccagtcccggatgagcaccaacatgtgaggggtgaaccttggcctccaggacatctgcaccccctccccacctccacggacctcggacctccaggcggctcagtgctgcctgcggcccagctaaggggcctggccactgggtgccacccagcctgtgtgccctccctggggctgaggaggcaggcggctgctagttgtggcccttcctggaaggagaggcctgcagggctcgaccctgtgggtttctgtccccagggagcagactgtgcggcacccaggcccagtggcaccatttcccagacccctcctgttcccgcctcagtcaggtgcagacaagtgggcggtgtccattaaagagcagactcagcgttaaaaaaa

SEQ ID NO: 74725 - DNA, 799 bp, Homo Sapiens
  misc_feature (52)..(52): n is a, c, g, or t
  misc_feature (673)..(682): n is a, c, g, or t
aaagggaaaacctattaaaaatgaagctcttatttactaatgcatttctatntcaggagcatttggctaaactggggacaaaaaacaaaaacttgttcttaattaacaaaagaactagaaagaagctcatatgaaagcaccaccttgtgttcagtaagcttcaggatagctctgttgacagcagggcatttagagagtcccaagtatagtcatgtatcactggggagggaagaatctttgaggacatctagtttacaatctttattatttttcaggtgtagaaaagagattaaagatcatagaagtcagaataaatttgtaaaagttctcatagtcaaaacagctaagtaatggcattgcccagactccaaaatcctgaccagaatataaatcaccaattgttggtttaaaggggttatttgtgaatcattttccaaaaaaagaagtacactttttgtgttacttaccatttcaaagaaacttattcttcaagaccatttcagatttccttaggaatgtatgtgttacccataattgaccacttcaaacttgtaagaaaaaaaatgttatggtcattttgttatttttagagacaaagtatttctaatctaggtttgcatacaaccttgaggctgtgagatcattagtcaattgctttaattataagccctgnnnnnnnnnnaaatctaaaaactaataaacatctataagaattataacagattattttcttcattaaattactttgtaatcaagttctagattaaatgtttaaacatgcattaaaggattagttctg

SEQ ID NO: 74726 - DNA, 570 bp, Homo Sapiens
gtagggccaagaccagcttcaagtctccatggtaccagaaaacaacaacctcacagcacttgaacctcaagaagaggtatccacaagtgaaaatccacaactttgaagagaaattaccaagactcctcctgccccaaaccttgccagagaagcttttcaaccagaggggtataggtcagagggatataagagccagcatccatccctgggttctcagtaggaatgctggtgctgtctaaagacctggcattaatggaggcggaggagcagccttacgggagggatggagggaggcaggctggggagaagagaacattagactcagggaatatttaattctggttttagcattattagaataagactttatacattaactaaagtggagctttaatcactataaaaagcaaaagtatctatagacacagacacttgcctatacagagacataaccacacacactcagaggatagtgaacaaatctgtctttgacttacgacccattttgcaagacttaaagccggaagaacacattttcagattgttaaataaagtctgattctgactaaa

SEQ ID NO: 74727 - DNA, 1178 bp, Homo Sapiens
  misc_feature (35)..(35): n is a, c, g, or t
  misc_feature (41)..(41): n is a, c, g, or t
  misc_feature (133)..(134): n is a, c, g, or t
  misc_feature (139)..(139): n is a, c, g, or t
  misc_feature (144)..(144): n is a, c, g, or t
  misc_feature (334)..(334): n is a, c, g, or t
  misc_feature (974)..(1064): n is a, c, g, or t
ttgcctagccccctcacagcctgtggcccccttgntgcccntgacaccatgtgtgcacaatgctcgctccaggccccgtggctcatggtgcatgagcccctctggagaccgcagcacccgagagtggctagcnntgggntggcntgaagagaagaggagcagtgtgcgcgcgctggggctggaggagctagcgcgctgtgccgtgggggcaggagtgccccagctggccctgcagtcatggggcccagcctgccgctggccctggccatgccattgcccgagcctgagcccctgcccctcccgttggaggtcgtccgcggcctcctgcccccgntgcgcattcctgaactcctgtccctgcgtcctcggccccggccccctcggccagagccacccccaggcctcatggctcttgaggtcccagagcccctgggtgaagacaagaagaaggggaagccagagaaattgaaacggtgcattcgcacagcggcagggagcagctgggaggaccccagcctgctggagtgggatgcagatgacttccggatcttctgtggggatctgggcaatgaggtgaacgatgacatcttggcacgcgccttcagccgcttcccatccttccttaaggccaaggtgatccgtgacaagcgcacaggcaagaccaagggctacggcttcgtcagcttcaaggaccccagcgactacgtgcgcgccatgcgtgagatgaatgggaagtatgtgggctcgcgccccatcaagcttcgcaagagcatgtggaaggaccggaatctggacgtggtccgcaagaagcagaaggaaaagaagaagctgggcctgagatagggtctgtggccaggcacccgctcccacctggccgggcgctggctcctccctcagttctctttggaaaacccccagctgtccacccatcccctgccccaaaaccagtttcaataaatttacgttcatttccnnnnnnnnnnnnnnnnnnnnnnnnnnnnnnnnnnnnnnnnnnnnnnnnnnnnnnnnnnnnnnnnnnnnnnnnnnnnnnnnnnnnnnnnnnnctttctacaccattccctttgggcccgcgggcccaacccggcaaggccaaaatggggccattaccctgtctaccaagcgaaacccctgcgaaatgccctttggggtggggcact

SEQ ID NO: 74728 - DNA, 446 bp, Homo Sapiens
ggagggggtgtttgggggggctttgactgtctccagacctcaggggagctgggcaggctctaaccagtgatcctccagagagcagcgttgaccacctggacccctgcgccacgtgacaggaggctctggtcctgcaggcctggtcttgcccagctgggccgcctcaggtgtcaggaaggggatgggtgtccctggctcccaggccaggcagctgctgacctccagcaccccgcacttgctcatgaggaccccacccccgcaggccctcccgggtcctgaccagcctctggtgcagcatctgctttggcctccgggccccctcgctccccacccacccgggccccttcctccggtgctcacctggggcctccatcccagaagcgcagggcttatttttctgattaaagaaaataaaaagtgccgtgccactattttttataacagca

SEQ ID NO: 74729 - DNA, 1059 bp, Homo Sapiens
taaaacttacggctaggtacgaggctgggtgtctaaattcggcacgaggagggggagagtagacagcagaaccagcggcggcggctaagcagagactgtagtagcggcgacagcgacgacggcagcgatggctggggcggggccagccccgggactcccgggtgcaggaggacccgtggtcccgggtcctggcgctggcatcccgggcaaaagcggcgaggaacgcttgaaggaaatggaggcggagatggccctgtttgagcaggaagttctgggggctccagtacctggaatcccaactgctgtgcctgcggtgcccactgtccccacggtccccacagtagaagcgatgcaggtcccagcggctcctgtgatccgcccaattatcgcgaccaacacataccagcaggtccagcagactctggaggcccgagcagctgctgcagccacagtagttcctcccatggtgggtggccctccttttgtaggccctgttggctttggccctggtgatcggagtcacctggacagcccagaggctcgagaagccatgttcctgcggcgggcagcaggccgggacccagaacctactggccactaccggcccccctacacacaggccccaccatcaccccacacacccagaccatggcgcacacgcctggaccaacgcgcgcagcgggctagcgagcaagaatgggcgaaggggaatcaaggggcacccccgatatggactccacacagagaacggcacaggaacagcccaagtagatgggcaagaagcaccagccacgtcaaagccccagaaacgaaggcatggggaccgaaggcggcgaggggcggcgccagaggagcaccagggacaccacaacgcacaggggcagaagaagcgacgaaaagcggacgcagaccacacgccacggcgcagggccacgccagcacctgagaacgcaaacggcacacaaagacggcacgaggccaggcgagagcaaagaggcaggggaacggggaaaaggagcgagtagcgcggccccccaacaaccaccagccaccccgatc

SEQ ID NO: 74730 - DNA, 869 bp, Homo Sapiens
cgtcttccttctctttcaggccctaccccaggcctatgtcccagctcttcggggtgcttcttgtctctttccatgatggggccctcagtgcagccattggagcccagcggtgttccctggagcccgagccattggtggcagcatcatgggtggtccaggggtcccagtcagagtggtggcccacgatgggcctggtgaggtgttccgtatgggccatagggcgggggccggcctgctgcccgccgcaggaacatggcttctcgagcctctgggctgtccaggtgactccgatcaccagggccaaagccaacagggcctacaaaaggagggccacccaccatgggaggaactactgtggctgcagcagctgctcgggcctccagagtctgctggacctgctggtatgtgttggtcgcgataattgggcggatcacaggagccgctgggacctgcatcgcttctactgtggggaccgtggggacagtgggcaccgcaggcacagcagttgggattccaggtactggagcccccagaacttcctgctcaaacagggccatctccgcctccatttccttcaagcgttcctcgccgcttttgcccgggatgccagcgccaggacccgggaccacgggtcctcctgcacccgggagtcccggggctggccccgccccagccatcgctgccgtcgtcgctgtcgccgctactacagtctctgcttagccgccgccgctggttctgctgtctactctcccccttcgtccgggaagcctcgtgccgaattcgcacacccaggcctcgctaccttaggaccgttatagtactgccgtcaggctttaataaaaacaccctgcggggggtttttgagcaaa

SEQ ID NO: 74731 - DNA, 1655 bp, Homo Sapiens
  misc_feature (659)..(714): n is a, c, g, or t
cggtccggaattcccgggatcgtcatcctcgggagcccacccggacgaagggggagagtagacagcagaaccagcggcggcggctaagcagagactgtagtagcggcgacagcgacgacggcagcgatggctggggcggggccagccccgggactcccgggtgcaggaggacccgtggtcccgggtcctggcgctggcatcccgggcaaaagcggcgaggaacgcttgaaggaaatggaggcggagatggccctgtttgagcaggaagttctgggggctccagtacctggaatcccaactgctgtgcctgcggtgcccactgtccccacggtccccacagtagaagcgatgcaggtcccagcggctcctgtgatccgcccaattatcgcgaccaacacataccagcaggtccagcagactctggaggcccgagcagctgctgcagccacagtagttcctcccatggtgggtggccctccttttgtaggccctgttggctttggccctggtgatcggagtcacctggacagcccagaggctcgagaagccatgttcctgcggcgggcagctgtggccccccagagggcccctatcctgcgtccagccttcgtcccccacgtgctacagagagcagattccgctctctcctctgcagcagnnnnnnnnnnnnnnnnnnnnnnnnnnnnnnnnnnnnnnnnnnnnnnnnnnnnnnnnctgcctgggccccctggaccacccatgatgctgccaccaatggctcgggctccagggcccccgctgggctccatggctgcactgaggccccctctggaagagccagcagcaccccgagagctgggcctaggcctggggttgggcctgaaagagaaggaagaggcagtggtggcggcggcggctgggctggaggaggctagcgcggctgtggccgtgggggcaggaggtgccccagctggccctgcagtcattgggcccagcctgccgctggccctggccatgccattgcccgagcctgagcccctgcccctcccgttggaggtcgtccgcggcctcctgcccccgctgcgcattcctgaactcctgtccctgcgtcctcggccccggccccctcggccagagccacccccaggcctcatggctcttgaggtcccagagcccctgggtgaagacaagaagaaggggaagccagagaaatcgaaacggtgcattcgcacagcggcagggagcagctgggaggaccccagcctgctggagtgggatgcagatgacttccggatcttctgtggggatctgggcaatgaggtgaacgatgacatcttggcacgcgccttcagccgcttcccatccttccttaaggccaaggtgatccgtgacaagcgcacaggcaagaccaagggcatacggcttcgtcagcttcaaggaccccagcgactacgtgcgcgccatgcgtgagatgaatgggaagtatgtgggctcgcgccccatcaagcttcgcaagagcatgtggaaggaccggaatctggacgtggtccgcaagaagcagaaggcaaagaagaagctgggcctgagatagggtctgtggccaggcacccgctcccacctggccgggcgctggctcctccctcagttctcttttaaccacccggagctggccacca

SEQ ID NO: 74732 - DNA, 2310 bp, Homo Sapiens
  misc_feature (1935)..(1935): n is a, c, g, or t
gggttctcagaggagctccaaggagaacttcataccctgctctgagcctgtgaaagggacaggggcattaagagattgcaagaacgtattagatgtttcttgccgtaagacaggtttaaaattggaaaaagcttttcttgaagtcaacagaccccaaatccataagttagatccaagttggaaggagcgcaaagtgacaccctcgaagtattcttccttgatttacttcgactccagtgcaacatataatcttgatgaggaaaatagatttaggacattaaaatggttaatttctcctgtaaaaatagtttccagaccaacaatacgacagggccatggagagaaccgtcagagggagattgaaatccgatttgatcagcttcatcgggaatattgcctgagtcccaggaaccagcctcgccggatgtgcctcccggactcctgggccatgaacatgtacagagggggtcctgcgagtcctggtggccttcagggcttagaaacccgcaggctgagtttaccttccagcaaagcaaaagcaaaaagtttaagtgaggcttttgaaaacctaggcaaaagatctctggaagcaggtaggtgcctgcccaagagcgattcatcttcatcacttccaaagaccaaccccacacacagcgcaactcgcccgcagcagacatctgaccttcacgttcagggaaatagttctggaatatttagaaagtcagtgtcacccagcaaaactctttcagtcccagataaagaagtgccaggccacggaaggaatcgttacgatgaaattaaagaagaatttgacaagcttcatcaaaagtattgcctcaaatctcctgggcagatgacagtgcctttatgtattggagtgtctacagataaagcaagtatggaagttcgatatcaaacagaaggcttcttaggaaaattaaatccagaccctcacttccagggtttccagaagttgccatcatcacccctggggtgcagaaaaagtctactgggctcaactgcaattgaggctccttcatctacatgtgttgctcgtgccatcacgagggatggcacgagggaccatcagttccctgcaaaaagacccaggctatcagaaccccagggctccggacgccagggcaattccctgggtgcctcagatggggtggacaacaccgtcagaccgggagaccagggcagctcttcacagcccaactcagaagagagaggagagaacacgtcttacaggatggaagagaaaagtgatttcatgctagaaaaattggaaactaaaagtgtgtagctaggttatttcggagtgttatttatcttcccacttgctctctgtttgtatttttgttttgtttttgattcttgagactgtgaggacttggttgacttctctgcccttaaagtaaatattagtgaaattggttccatcagagataacctcgagttcttggtgtagaaattatgtgaataaagttgctcaattagaaaaaaagaaaatccccccagcatcggccaactcgcagcgcgctcagacctgaaaccacccaccccgcctgtctcccccctgttcttgccccccccgctcgcgggatcttagggaggaccgctccacaccccaccccttctgccgccacccgccccgcagtgagcgtagcctcgcccgccgggcccataacccagccctcctaacggcgcatcgccgaggtgtgaggcactgttgctgttgggcgcgtgcgccccccggcgccaattcaagatgaacgaagggctagattcacaatgagaacagcgcgcctggtgacagggagacgccccccttccgcgctcggcgcgttgctgttgcgccctagagtgtttacctagccgacggtgcgccggcgccgactattatgctgtgccgagccttcttacgcctggttnatggcaccagccaatgtgtaaaagggacggagagcggacgccaggacacgctcggccgcgagggtcaacacgtccggataatcaccatcatccctctctatgtccgcaagcacactggcgtcagacatacagagccttcctacgacacttaatatggcgcggcgagccgcacgccccctcgctctgtcaccccgcgccgcttatgtcggccgcgcccgctcccgcccgcgcggcgatactgcaacccgagctcacatctggccagggcactttgtaggcgaccacatcgctcctctccccgcgcgccgtggtggagaccactgatcgcgcgccctcagcaacggaacgagcgccgcgtggcacgtcgtcgccgcc

SEQ ID NO: 74733 - DNA, 1054 bp, Homo Sapiens
tgcggccgcgcctgaggtgatgcggaccccgggcgggcgcagggcgcgggctccggcgccgccgctgcgtcctccccggccgcgggcgagccgctgcagagggagcgtcgcgccggggcggagtgcgggcttgcgcggcaagtgcgcgccgaggtcacgaaatggattggagtgaaccggagaccccgaaaacggaagcgcagggagaaggaagaggtgtttgaaaagcttcttccagaccagctggtcttgcttctggagcatctcttggagcagaagactctgagcccccgaactctgcaaagcctccagaggacataccacctccaggatcaggatgcagaggttcgccatcggtggtgtgaactcattgttaagcacaagttcacgaaagcctacaaaagtgtggagaggttccttcaggaggatcaggaaagaccacagcaagataccttcatacggggagctgatggtgagtgaggacgccagacagcagcagctcgcccgtaggtgcttcgagcggaccaaggagcagatggataggtcctcagcccaggtggtggccgaaatgttattttaacgaggaaagaccacagcaagattctttcattcgtctcctcctagcctgggggaccaggctcgaactgaccctggacatcaaaggagggattatgtggctgctaaagccatcggcccacagccctgttcacgtcttggtgcttctctttcccagaggctggtcccagccaggcacacacaaaaggcagattctcgtaaacgcagcctccctccctggaggctgcctcctgccctggatctggagtggagctgctctgagattttgagttcttctgcagagatgattaaatatatccaagagacattggaaaacctgctgaacattttacattggtctgctcagcacatggctggatgcggatatttctataattccagaaagtcacacagctcctctgtatgagaccagtgggcgccatttaaaagaacaggatgagaatctaagatatattattaataaatgtaatggattttt

SEQ ID NO: 74734 - DNA, 1033 bp, Homo Sapiens
  misc_feature (47)..(47): n is a, c, g, or t
  misc_feature (125)..(125): n is a, c, g, or t
  misc_feature (154)..(154): n is a, c, g, or t
  misc_feature (162)..(162): n is a, c, g, or t
  misc_feature (181)..(181): n is a, c, g, or t
  misc_feature (186)..(186): n is a, c, g, or t
tgatcatctttaccatgtcatagcagacagatgacttgaaaaacctnttttagtccggagtcagaagtggctccatcgcgcaacagcggtccacctggtcaccccgccgcgcagacgtgcatatntcatgtctctgcggctggggttgtgactnggaaaccngtgcagaaagtagagctcncagcntgaagcaggacacagtccagcagggcccgttgcccccatgtgtaagggaggcagggcccagctctcccacggcgaggtgagctgagactttctgagaacagttagagtgggtgcgtgtctgaaatggtactcctagcagctattgtgtacgcaaagcctgagtacagcctgctggtgtcatggccacgtgtgagcaggccagcgtcacacggctcgctgtgacccgtcccggagactgaaatgggcctgggtcttctccttgtcctgtgattaaagtcctctcttgaaagtggagagcaaaggcacacagaggtgcgcgctcacaagaattcctcccggtgactgggtaatcaatgttactgctgtttcctttgcaggaaagaccacagcaagattctttcattcgtctcctcctagcctgggggaccaggctcgaactgaccctggacatcaaaggagggattatgtggctgctaaagccatcggcccacagccctgttcacgtcttggtgcttctctttcccagaggctggtcccagccaggcacacacaaaaggcagattctcgtaaacgcagcctccctccctggaggctgcctcctgccctggatctggagtggagctgctctgagattttgagttcttctgcagagatgattaaatatatccaagagacattggaaaacctgctgaacattttacattggtctgctcagcacatggctggatgcggatatttctataattccagaaagtcacacagctcctctgtatgagaccagtgggcgccatttaaaagaacaggatgagaatctaagatatattattaataaatgtaatggattttt

SEQ ID NO: 74735 - DNA, 779 bp, Homo Sapiens
  misc_feature (48)..(48): n is a, c, g, or t
  misc_feature (101)..(101): n is a, c, g, or t
tccatattctcacttggtatcagtgagaaatattcccatatttctatntgcaacatagaagataatgcatcatgtccttttggggcatggcaagttctaantgaattcctggcagagcaatggattctgtgattgtctatgtggtgtagttgttgctaagaggatgctactgtaatcttttctacctatacttcttcattggctcagaatgaagcaaggcatgtgctgctttcttatatgtcatttatgccataaatcccattgttagaaggtaatgcttctaacggattccattcatgcttttgagataaatggcattgactttcatattgatcacatggaaagctgttacctgattcctttcctgagatcacttccagcctaatgtgcatttggctggaatatggttgtctcagaataacatcatgcactcgggcttttatacttctgcctttaggggactgtggcagcatggcatgggtcaagaagtacttctccttcatcttcctttgatgtcggtaactcatcctttctgcactgcgggagttgttaatgcttttgtgtcctccagttcacatgctgattgctaagaagaaaatgagcatgagtgaacccaaagctgctgaaacattctgcgtttatgcaacttccttgccctctatacaaggaagatggtttcattgtcttgtctagagaataaagtcttttttaaaaataaaatcggtgtatccctgaccagcgtccattaacacttgacattgctcactgcatggtcacag

SEQ ID NO: 74736 - DNA, 814 bp, Homo Sapiens
acaaacattccggtgaaatcacagctcatgcacatcagaagctcacacagagagagtcattatatccgtgattgtgaaaagcttcattcagaaggaaatctcattgtacatcagcgaattcatactggagaaaaaccctatatatgcaatgaatgtggaaaaggcttcatccaaaagggcaacctccttattcatcgacgtactcacactggagagaaaccctatgtatgcaatgaatgtgggaaaggcttcagccagaagacatgtttaatatcccatcagagatttcacacaggaaagacaccctttgtatgtactgagtgtggaaaatcctgctcacacaagtcaggtctcattaaccaccagagaattcacacaggagagaaaccctatacatgcagtgactgtgggaaagctttcagagataaatcatgtctcaacagacatcggagaactcatacaggggagagaccgtatggatgctctgattgtgggaaagctttctcccacttgtcatgccttgtttatcataagggaatgctgcatgcaagagagaaatgtgtaggttcagtcaaattggaaaatccttgctcagagagtcatagcttatcacatacacgtgatctcatacaggataaagactctgttaacatggtgactctgcagatgccttctgtggcagctcagacctcattaactaacagtgcgttccaagcagagagcaaagtagccattgtgagccagcctgttgccagaagttcagtctcagcagatagtagaatttgcacagaataaaaaccatatgaatgcagtg

SEQ ID NO: 74737 - DNA, 936 bp, Homo Sapiens
  misc_feature (551)..(611): n is a, c, g, or t
  misc_feature (615)..(616): n is a, c, g, or t
  misc_feature (618)..(652): n is a, c, g, or t
  misc_feature (703)..(711): n is a, c, g, or t
  misc_feature (870)..(879): n is a, c, g, or t
ggattcccgggatatcgtcgaccacgcgtccgctgcgagtatggcggcgtcaaaggtgaagcaggacatgcctccgccggggggctatgggcccatcgactacaaacggaacttgccgcgtcgaggactgtcgggctacagcatgctggccatagggattggaaccctgatctacgggcactggagcataatgaagtggaaccgtgagcgcaggcgcctacaaatcgaggacttcgaggctcgcatcgcgctgttgccactgttacaggcagaaaccgaccggaggaccttgcagatgcttcgggagaacctggaggaggaggccatcatcatgaaggacgtgcccgactggaaggtgggggagtctgtgttccacacaacccgctgggtgccccccttgatcggggagctgtacgggctgcgcaccacagaggaggctctccatgccagccacggcttcatgtggtacacgtaggccctgtgccctccggccacctggatccctgcccctccccactgggacggaataaatgctctgcagacctggaaannnnnnnnnnnnnnnnnnnnnnnnnnnnnnnnnnnnnnnnnnnnnnnnnnnnnnnnnnnnnggannannnnnnnnnnnnnnnnnnnnnnnnnnnnnnnnnnnccgcttttaaaaatacccctggagggggcccaagttttaccccgaacccannnnnnnnngggcaaagagggggccccctataaagggggccctattttataagactaagggcccctgggccgcctctttttttacacaccgctccttggcctgggggaaaaacctggcctaccctttggggaaattttttggggaaagggaaccctttccctttcgtnnnnnnnnnnaacataatttggggcacacacccctcctccagaggaattttaacgctcctccagggg

SEQ ID NO: 74738 - DNA, 1076 bp, Homo Sapiens
  misc_feature (579)..(662): n is a, c, g, or t
  misc_feature (678)..(686): n is a, c, g, or t
aagcgcatttgtgaatatagaacagtttgtcaaaaaagcaggctggtaccggtcggaatcccgggatatcgtcgacccacgcgtcggtgaagcaggacatgcctccgccggggggctatgggcccatcgactacaaacggaacttgccgcgtcgaggactgtcgggctacagcatgctggccatagggattggaaccctgatctacgggcactggagcataatgaagtggaaccgtgagcgcaggcgcctacaaatcgaggacttcgaggctcgcatcgcgctgttgccactgttacaggcagaaaccgaccggaggaccttgcagatgcttcgggagaacctggaggaggaggccatcatcatgaaggacgtgcccgactggaaggtgggggagtctgtgttccacacaacccgctgggtgccccccttgatcggggagctgtacgggctgcgcaccacagaggaggctctccatgccagccacggcttcatgtggtacacgtaggccctgtgccctccggccacctggatccctgcccctccccactgggacggaataaatgctctgcagacctggnnnnnnnnnnnnnnnnnnnnnnnnnnnnnnnnnnnnnnnnnnnnnnnnnnnnnnnnnnnnnnnnnnnnnnnnnnnnnnnnnnnncaacagaaaccccccnnnnnnnnncacaataccaccaccaccttttcctctacaagaggggcggcccaaggggggcgagcgacctaaaaaaccgagaggcgaagcggccgcgcacaacacaggccgaggagcagggaaaccaacgccacgtgcgggactctgggaaaggcaccccccccggggcgggacacaacggacaaccaccccccagcagaccacgagccggagacaaaacacacgggttcagtgtgccaccccgcccatcctgcgccacaacgtgcccgcgagtagtctgacaataagcagggtagcacagataacgcgcaagccaccagcaaccgagcacgacccgcacgcaccacacccgccacgacaccacccacgcgcacgcgacgcacacgacagcagccaacg

SEQ ID NO: 74739 - DNA, 1443 bp, Homo Sapiens
  misc_feature (1097)..(1124): n is a, c, g, or t
gggggttgtggacctgaaggcgaacgtgatatcaaagagcatgcatttttccggtatattgattgggagaaacttgaacgcaaagagatccagcccccttataagccaaaagcttgtgggcgaaatgctgaaaacttcgaccgatttttcacccgccatccaccagtcctaacacctcccgaccaggaagtcatcaggaatattgaccaatcagaattcgaaggattttcctttgttaactctgaatttttaaaacccgaagtcaagagctaagtagatgtgtagatctccgtccttcatttctgtcattcaagctcaacggctattgtggtgacatttttatgtttttcattgccaagttgcatccatgtttgattttctgatgagactagagtgacagtgtttcagaacccaaatgtcctcaggtagtttggagcatctctatgagatgggattatgcagatggcctatggaaaatgcagctgcataattaacacattatcaaagtcctcttacaatttattttccgcagcatgtcagctaagtagacccaatggggagagaaaatgcctgctttctttccctctttttctgcactgccatattcacccccaaccatccaatctgtggataattggatgttagcggtactcttccacttccgggcctggagcttggcttgtatccaagtgtatggttgctttgcctaagaggaatccctctatttcacctgttctggaggcaccagaccttgaaaagaacatgctcaaaataaaatgttatctgttatttttgtaaactcaaagttaagatgatcaaagttctaaaattccaagaatgtgcttttagacggtctcaatctaaaagcacttcaaggggtcaaagggcaaccagcttgggtgctacctcagtgttgtagtttctgatactttatgtctttgctcaccctcatccccaaactacttgaaaagggcatttggcaccactctctgaaacaacacagtcactctagcaaggcccccaaagggccctggttttacattacatttcaaactttatttgctttggggttttgtttctgttgttgttcaaatgcnnnnnnnnnnnnnnnnnnnnnnnnnnnnggtgactcacattgttacacatgctttaaaatatgtattcaaatgttattaaccacaatgacgacctgctttgatttaaccaagaagacggctgcggagcctagcagactcaggcctgtgggaatgggatttgttacaaatctaggtttgttactggcttcagaaagctaattaagtgctttgaaaaagaccccgtttcttgaaacaaagatggttgtattcctcactttgatgttgttttgcaagatgtttgtggaaatgttcatttgtatctggatctctgttatgtgccatttttcttctagcatcgagatccaat

SEQ ID NO: 74740 - DNA, 846 bp, Homo Sapiens
agaagaggagctaatttcgttactcgaaaaattagccggtcagtagctaagatttaccttggacaactggaatgtttcagtttgggaaatctggatgccaaacgagattggggccatgccaaggactatgtggaggctatgtggttgatgttgcagaatgacgagccggaggacttcgttatagctactggggaggtccatagtgtccgggaatttgtcgagaaatcattcttgcacattggaaaaaccattgtgtgggaaggaaagaatgaaaatgaagtgggcagatgtaaagagaccggcaaagttcacgtgactgtggatctcaagtactaccggccaactgaagtggactttctgcagggcgactgcaccaaagcgaaacagaagctgaactggaagccccgggtcgctttcgatgagctggtgagggagatggtgcacgccgacgtggagctcatgaggacaaaccccaatgcctgagcagcgcctcggagcccggcccgccctccggctacaatccccgcagagtctccggtgcagacgcgctgcggggatggggagcggcgtgccaatctgcgggtcccctgcggcccctgctgccgctgcgctgtcccggccgcaagagcggggccgccccgccgaggtttgtagcagccgggatgtgaccctccagggtttgggtcgctttgcgtttgtcgaagcctcctctgaatggctttgtgaaatcaagatgttttaatcacattcactttacttgaaattatgttgttacacaacaaattgtggggccttcaaattgtttttctcttttcatattaaaaatggtctttctgtgaactagaa

SEQ ID NO: 74741 - DNA, 570 bp, Homo Sapiens
cattgcaagcccacggtgcagacattcagcaggatccagacagcctctgctctagaaggctcagcagagaaggactttctgcagggcgactgcaccaaagcgaaacagaagctgaactggaagccccgggtcgctttcgatgagctggtgagggagatggtgcacgccgacgtggagctcatgaggacaaaccccaatgcctgagcagcgcctcggagcccggcccgccctccggctacaatccccgcagagtctccggtgcagacgcgctgcggggatggggagcggcgtgccaatctgcgggtcccctgcggcccctgctgccgctgcgctgtcccggccgcaagagcggggccgccccgccgaggtttgtagcagccgggatgtgaccctccagggtttgggtcgctttgcgtttgtcgaagcctcctctgaatggctttgtgaaatcaagatgttttaatcacattcactttacttgaaattatgttgttacacaacaaattgtggggccttcaaattgtttttctcttttcatattaaaaatggtctttctgtgaactagcaaaa

SEQ ID NO: 74742 - DNA, 785 bp, Homo Sapiens
  misc_feature (21)..(21): n is a, c, g, or t
aaaacttagacccatgctgtncagagacggcagaaaacagagcctgcctaaccaggcccagccagttggtggggccaggccaggaccacacagtccccagactcagctggaagtctacctgctggacagcctccgccaagatctacaggacaaagggagggagcaagccctactcggatggggcacggactgtccaccttttctgatgtgtgttgtcagcctgtgctgtggcatagacatggatgcgaggaccactttggagactggggtggcctcaagagcacacagagaagggaagaaggggccatcacaggatgccagcccctgcctgggttgggggcactcagccacgaccagccccttcctgggtatttattctctatttattggggataggagaagaggcatcctgcctgggtgggacagccccttcagccccttctcccctccccgcctggccagggcagggccaccccactctacctccttagctttccctgtgccactttgactcagaggctgggagcatagcagaggggccaggcccaggcagagctgacgggaggccccagctctgaggggagggggtccgtggtagaggcctggggccggtagaggctccccagggctcccttatgtccaccacttcaggggatgggtgtggatgtaattagctctggggggcagttgggtagatgggtgggggctcctggtggccttttgctgcccaggccacagccgcctttgggttccatcttgctaataaacactggctctgggactag

SEQ ID NO: 74743 - DNA, 695 bp, Homo Sapiens
  misc_feature (368)..(414): n is a, c, g, or t
  misc_feature (416)..(440): n is a, c, g, or t
aacggggttaaaatcttccctgccctcacacaagcccttctgactgttggagaacctgacgcgcggattctaactagaactggcactctcttcgggtgttagataattaactcaaaggacagcgaaggccttttatgatgtctttcaagctggccttatgacagcttttcttaacgtttctgcggacattttggcggacttgtgtcggcctagctcagtgatcagtttcgttaaagaatttgagtatccgaacattaaaggattggacctaaattctagcaggaggatttttagccacatcaaataatttacgtctcaaagatttagataattagggtaaggatgcttagtaaaacctgaaggttccnnnnnnnnnnnnnnnnnnnnnnnnnnnnnnnnnnnnnnnnnnnnnnncnnnnnnnnnnnnnnnnnnnnnnnnncctgaaggttcctggaggaaagagatgaactattagccgtgtatttcggtgggaccacctcaacataggttcctgtaggttagcaatgtagaaatgtagcgcttcaaagccggagcatcctgtcttcaaagagcatgaaggtatcaacggcattcattgtcgattaataataaccttcctggtactttcttgctaaagtataagccataataatatttcataatcgcaccaatacaataaaggatgaaagacgtt

SEQ ID NO: 74744 - DNA, 1134 bp, Homo Sapiens
cctattaaattgaggctagagctggagatgtaattggtttttgagaaacattagtataaagcttgcccttgttgtgtggaagaagccattttgtactgctttaaagttagactaatattctcagcacgggtgtatggggacctcattacctatttttttcatcatttaccctaggtaagaactttgatcactgcttactaggtaaagaatgtttgtactgttccaaaacccaggcttctttattcctttaccactatccatgtgagcattgacaaatcatggcttagaggtgctcactgactcgctaagacgactttggccctgttgatgactggtgctgtgctccagccttatcagttaggggacccaaggtttgtttgggacctgggtacaggtaaaagccagacttggcagggacccctctttctaggctgaaccttgagtccccctgctttttggcagacctaatggatcactgtcttgcagctagttcttcatgtggggcctcttaggccagtgccggaggaggcatgctcctctttctatgccacagaacaaacactactctagcagagcctttcttgcactttaaagtgagattaatttagctgtaatttggttaaaaacttcctaagagagaaaattaagtctactgatttggtataggtaaatggacattaaacttttttaaagtaaaggagatggtagataccgttagattatagtcttgaggttcatgtgaagccagtggtgttaacttactttgatttccttgttcaggtcagggcctggaacgcctgtgcggggaggtcactcaattcaaaattttctgtatgaaagcatttttcaccaaaatgagcctcatccctttatgcaacacataaccttactgagggagggaaatacggaagccacctttttatttctcttcactgtgtacaagttcacttgttgtcttgaacactgtctcaaatacctgctttttgttttggatagtaccttgtctgtataagaagctggcctttccatagagaggccctggagtctaaaattatgagaacaattaatttatttgtgtcttctattatgatctcgttttgacaataaaaatccttactactttctcaaaaaaaa

SEQ ID NO: 74745 - DNA, 647 bp, Homo Sapiens
  misc_feature (595)..(604): n is a, c, g, or t
taaagatagctgatatcaagacatttgagggacacagttcatgtagaatcaaaatattagtatttcagaataaggatttttttctgaaaagcatacagagaggaaacagcttaaaaataggtcaagacctaaaaacagaatataatcacggaataaactggataacccagacagtccccacagaatttctttcaggtcacagatttcttaaaactcacccccaaaatgtgcctgcttggttgtttgaatcttgcataattaatgtcacaggcgcaagccgctgaacttagttgagatgcagaaaacaaacaaatgcaatgacatatctgagaagcatttatgtaactccggttaagtggtgaggaggggtgtgtgaagacagtgtgcatgcatgagtgtgtattcatatatatgtgtatacatatgaatttcactgttattttccagggtctatggacaatgtggcagtaagagtctatgatgttctgaaacttttcacagtaaatccaaagattacagaccttacaaggtgcttgcattctgttgcttttccatctgtcacttctcaggttatttgactgtgttcaaaccttcnnnnnnnnnncattgagtttcattttttaagcttgttaaatgcttttgtataa

SEQ ID NO: 74746 - DNA, 1623 bp, Homo Sapiens
  misc_feature (53)..(92): n is a, c, g, or t
  misc_feature (96)..(130): n is a, c, g, or t
cccctcacctctattaaggggggccggcctcagccctcctgtctctgcaaggnnnnnnnnnnnnnnnnnnnnnnnnnnnnnnnnnnnnnnnnccgnnnnnnnnnnnnnnnnnnnnnnnnnnnnnnnnnnncagtcgacggtaccggacatatgcccgggaattcggccattacggccgggggctcttccagaggcaagaccaaccaagatgagtgccctgggagctgtcattgccctcctgctctggggacagctttttgcagtggactcaggcaatgatgtcacggatatcgcagatgacggctgcccgaagccccccgagattgcacatggctatgtggagcactcggttcgctaccagtgtaagaactactacaaactgcgcacagaaggagatggagtgtacaccttaaacaatgggaagcagtggataaataaggctgttggagataaacttcctgaatgtgaagcagtatgtgggaagcccaagaatccggcaaacccagtgcagcggatcctgggtggacacctggatgccaaaggcagctttccctggcaggctaagatggtttcccaccataatctcaccacaggtgccacgctgatcaatgaacaatggctgctgaccacggctaaaaatctcttcctgaaccattcagaaaatgcaacagcgaaagacattgcccctactttaacactctatgtggggaaaaagcagcttgtagagattgagaaggttgttctacaccctaactactcccaggtagatattgggctcatcaaactcaaacagaaggtgtctgttaatgagagagtgatgcccatctgcctaccttcaaaggattatgcagaagtagggcgtgtgggttatgtttctggctgggggcgaaatgccaattttaaatttactgaccatctgaagtatgtcatgctgcctgtggctgaccaagaccaatgcataaggcattatgaaggcagcacagtccccgaaaagaagacaccgaagagccctgtaggggtgcagcccatactgaatgaacacaccttctgtgctggcatgtctaagtaccaagaagacacctgctatggcgatgcgggcagtgcctttgccgttcacgacctggaggaggacacctggtatgcgactgggatcttaagctttgataagagctgtgctgtggctgagtatggtgtgtatgtgaaggtgacttccatccaggactgggttcagaagaccatagctgagaactaatgcaaggctggccggaagcccttgcctgaaagcaagatttcagcctggaagagggcaaagtggacgggagtggacaggagtggatgcgataagatgtggtttgaagctgatgggtgccagccctgcattgctgagtcaatcaataaagagctttcttttgacccaaaggaaaaataaaataaatacaaatatgaagtaaactcattggttgtaagcacaagaggccctcgaggacgagttttttaaaatagacgtttgtgtacgcgcatgcgcggagcaccaagaagggtttatagaaccactggtgtgttttgcggggctgccccagaagttatgtgtccagtgtgactgtgtgggtctccgcaggagta

SEQ ID NO: 74747 - DNA, 749 bp, Homo Sapiens
ccatcacagtgcatcctgagagtggaggggctgtagtgtagctgggctcccaagaacgactcgggaatgtcatctccatcttcacccttcagagagcagtcctttctctgtgcagctggagacgctggtgaggagagccgggtccaggttcttaagaatgaggtgcggaggggctctccggtgctgctgggctgggttgagcaagcctacgcagacaagtgtgtgtgtggaccatccgcacctccagcccccaccccaccctctttgtctcagcgtgttatgtgcaatgacctatttaaggtaaacccattccaactacagcagttcagggctgatccaagcactgcctccctcctgctctgtccaggtggtctggaccataaactcaacttgagagggaaggcttggggttgaggacttgtgatcagaaaaactgaagatggaagttttggccggtgctcattagacatgagtcctcactctgtgtcctgagcccgtgtcattcttccaacctccctgcccccacacacttatcccagacacaacaccatgtggtctggaggtcccagcccccaccctaaaaaggttatccctgagaactccaccagacttgggagcccaagtgcagtgcctggtgctgctcccatctgccgccccccttctctcctgcaattggtttgtactcactgggctgtgctctcccctgtttacccgatgtatggaaataaaggcccttttcctcctgaaaa

SEQ ID NO: 74748 - DNA, 1182 bp, Homo Sapiens
  misc_feature (161)..(161): n is a, c, g, or t
  misc_feature (205)..(205): n is a, c, g, or t
gggacccccggggtcttccggggacaccagaggtgaggggattcaatgttttaaaggagccaccggccaaaaaacttcccaattttcaagtttttctgatcacaaagtccttaaaccccaaaggccttccctctcaaagttgagtttatggtccagaccanctgggacagagcaggagggaggcagtgcttgattcagccctganctgctgtagtgggaatgggtttactttaaataggtcattgcacataacacgctgagacaaagagggtggggtgggggctggaggtgcggatggtccacacacacacttgtctgcgtaggcttgctcaacccagcccagcagcaccggagagcccctccgcacctcattcttaagaacctggacccggctctcctcaccagcgtctccagctgcacagagaaaggactgctctctgaagggtgaagatggagatgacattcccgagtcgttcttgggagccccagctaccactacagccccctcccactctcagggatgcagctgtgatggagaggttgggtatttaaattaaaaagtagaaagacagcaggcaccaagaagagagagcccccaccccacacgagagggaaggcactgcttctcctcccccaatcctccccatggacccagcaacctagagtgtcccagtaggcaacctgtccaccgtccctgagcagggagctgagagggaggtcaacgtgctggctccatgcagtgccaggccacctgccactgcccacggtgacacagggtagaagccaagagtctggcattttgagacagaggagcaaaaagttctcttcagaaactcctctttcccccacctcttccacgtggagacatcagacacccatagcctggaaagtgcccctgacagaagaaggtcagggtgtttcccatgcagatcagcagtcgggtgggggagaccggtgccccaccacttcctgggagaggtgcccaggcagccacaggccctggggtgagagggctgccaaccactcccctgggctatgcgttagtctccgtcagcttggcctctgtgtcgctgtcactcagataactgtgggagtatcgcggtctggaggtgttgtcgagagggtcgtgctcatcatctgaccgatcaggggcaagggacttccagtagctggtggggctgg

SEQ ID NO: 74749 - DNA, 1028 bp, Homo Sapiens
  misc_feature (854)..(874): n is a, c, g, or t
taggaggagattcctctctagccatgtttctgttaaagtttcattaattgaagcccaagtttactttttactgtacatacttattttctaattggatttgaaatcagcatgattttgtttgacaaagcaaagtttaagattgaggtcagaaatactttaatggagcaaagacacataccaactttacatgacggtgtgagaaatagtcctataaactggtctcttcatcatttatgctctcactttagatatccaaatattaaaaggcaggctgacctgtatcacacagaattaaggcagtaattttctgcttcagtagatcaagggtagggctaaggcatcctgtggtaattctgattcacagctagatttgggaaacacaaagttagggaatggctatatgtgatttgctagttggagcagtcaaagtcttagctatcaagagttgtgaatttgaatcatggcactaggtcaggggtgctatggattgaaatgaccttagttctcaaggagtgatttgtcctcatttgtcaaatgaggaatgagacacttaccatcatctcaggttgtttcttaaagacctaaatacaaatacaatttgttaaaaacttacagagggcctattttgaatgctttaagatgtaggccaagtaatgtatttttctcttagtgtagaaagttaagagaaaaagagctggtaccataaattttttcaatcttagtgtaaaatctgtatctcattgtaggcttctggtcaatacctatacataacaacttaatgtgatctaaccaactcaactgatagaaagctgaattgttcccagtggacaagtggtatttgatgtttagcaggnnnnnnnnnnnnnnnnnnnnnggtaaactctgtggtaaaatctaaaataatgttaaaaccctaaaagtaactattgaatattctgtaatcttagacatgtatttttcaagctaaccctttgaagaaatgtgttcaaggtaggaaaatataaaattttttggttatttgtaaattt

SEQ ID NO: 74750 - DNA, 773 bp, Homo Sapiens
  misc_feature (486)..(544): n is a, c, g, or t
ggcaaggatgtgctggaggttggcgagctagcaaaacttgcctatttcaatgatattgctgtaggtgcagtatgctgtagggtggatcattcacagaatcagaagagactttacatcatgacactatgatgtctggcaccttaccgaaggctaggaataggaactaaaatgttaaatcatgtcttaaacatctgtgaaaaagatggtacttttgacaacatttatctgcatgtccagatcagcaatgagtcggcaattgacttctacaggaagtttggctttgagattattgagacaaagaagaactactataagaggatagagcccgcagatgctcatgtgctgcagaaaaacctcaaagttccttctggtcagaatgcagatgtgcaaaagacagacaactgaacaaattacaaatgaactttcttgcacttgcttgtcgccaaataaaagagaggcccattgattcctcccccaccccaacannnnnnnnnnnnnnnnnnnnnnnnnnnnnnnnnnnnnnnnnnnnnnnnnnnnnnnnnnnctctgagagttttaatactttcaaggactttaaaaaaataatcatgtttgaattgttttctcttatttttgtgaggtggtttgaaggaaggacaaggtagatctgtttagttttgcagttgaagttagatggtcctaaacatttaattgtcaaataatttcaaatttaatgtcctgctttcacattgaagggcagagcctacaaaacattgtatatttcaaaagacaaa

SEQ ID NO: 74751 - DNA, 1121 bp, Homo Sapiens
  misc_feature (840)..(848): n is a, c, g, or t
gggccgagagacccgagtgcacgtgtggagaagcggcggcacaagcgcggcggcgggagacactcccgcccccaccagactcaagccctcactcgactctcgcggccttcgttgctcgcacagctccctgcccaggctaggaggccggcttgcggggttgagtggcccgagctaagggtgcggagacctaagggcggcgactacgacggcgttgatatcggtggtaacgacggcctcagcaggcggggaagatgaaaggccggatcgagctgggagatgtgacaccacacaatattaaacagttgaaaagattgaatcaggtcatctttccagtcagctacaatgacaagttctacaaggatgtgctggaggttggcgagctagcaaaacttgcctatttcaatgatattgctgtaggtgcagtatgctgtagggtggatcattcacagaatcagaagagactttacatcatgacactaggatgtctggcaccttaccgaaggctaggaataggaactaaaatgttaaatcatgtcttaaacatctgtgaaaaagatggtacttttgacaacatttatctgcatgtccagatcagcaatgagtcggcaattgacttctacaggaagtttggctttgagattattgagacaaagaagaactactataagaggatagagcccgcagatgctcatgtgctgcagaaaaacctcaaagttccttctggtcagaatgcagatgtgcaaaagacagacaactgaacaaattacaaatgaactttcttgcacttgcttgtcgccaaataaaagagaggcccattgattcctcccccaccccaacacnnnnnnnnnaaagcttttctccctccttgttcttgataatctttcctcccttccttttctctgagagttataatacaatcaaggactttaaaaaaataatcatgtttgaattgttttctcttatttttgtcaggtggtttgaaggaaggacaaggtagatctgtttagttttgcagttgaagttagatggtcctaaacatttaattgtcaaataatttcaaatttaatgtcctgctttcacattgaagggcagagcctacaaaacattgtaatttcaaaaga

SEQ ID NO: 74752 - DNA, 526 bp, Homo Sapiens
caaagaaataatgcatgccgagattgtctttctgaagaaattcccctcattctttgggatcccgaggttctcaaaggcatagctggcaacaggccctgaaacagcttcttctggactaccctactagtcttggtagatttcctcgatctttggcattccttcttttcttccatggtcttcatttactgctgtccttcttgcctatcttgaattattctatactattatgaggagaacacaggttcttccatcctggaacttcagttctttgccttgctgagccaatatatacattgagccagattgtgtgcacactggtagttccaaggtgcaacaatcttcaaaacatttgaggagtgtattagtccattctcatgctgctgtaaaggactgcccatgactgggtaatttataaaggaaagaggtttaattaactcacagttccacatagctgggaaggcctcaggaaacttacaatcgtggcagaaggggaaacaaacacgtccttcttcacatgatggcagga

SEQ ID NO: 74753 - DNA, 659 bp, Homo Sapiens
  misc_feature (529)..(537): n is a, c, g, or t
gccatttgttcccgccttcagatggatggacagtttgctggctattgataggagtggcgactgggtggggcttctccctctaccccagggctgggctgatccccctactgcaactaactgttgccccccaaccccgaacccccagttgaggagttgagagagtgcaggctggggtcaggacaggctgcggatgcttgtgcctatggggagttactccaacccacctattctgtctaatctccatggctttgcaccaaatcctccacccctccaattgggaggggactgttcaccaccttgtggtaagggacaacaccctaaggctggtgccagtagttatgagtagcctaccaccccctcccttacagtaacccccaccccttcaggatcagtcaagggaaagcactagaacccctgggtagggaaagaaaggagggaaaaaccataaaaggaatacttataatgtgaaggtttgtaaatagtccatgatgatgtcgtggcagagtctgatttctatatagaggtgacnnnnnnnnnaagtactgtgcaagctctgtgcttctataatgtgggaaatggcttggggaggatggcccctagcttaggaagactgttgtgttatttgttcaatttcaataaaatgatttgtagatcctgca

SEQ ID NO: 74754 - DNA, 1210 bp, Homo Sapiens
  misc_feature (98)..(133): n is a, c, g, or t
agaagttgttgtcgactcacatactatggtgccgctcagtcgttgtaatgattagcgaacgacgagcgcagcgagtcagtcgagcgaggaagcggcgnnnnnnnnnnnnnnnnnnnnnnnnnnnnnnnnnnnncagtcgacggtaccggacatatgcccgggaattcggccattacggtccggggggagcttctttaacattagttcagaggttaatatatttcctggaggtgtttgtcctaggaattgattgcactattgcatggtaataacatttaattgttaaggaaacattatatataggttcaaattatcccttaatgttgatttctccccgttttccatggattttgagtactaaggaaacaaaatgctttgagattttggtaactattttgattttgataaaacatgttaaaatagaaggacatgatatttttctatagtttccatcaggaagagtacatcagaaacttctccataaggaaagaaaactgactctctcttgaactagtgttgataaaatacactaatgtctttcttaatttgtattttattaggagaaaaatcagaatattaacatttgcaaagctttgtgaacagcagtaatagctccttagacactcagtatctttcttccctatctttcaagcacatttaatttctttcccctggtatccgttcgcttagtgttttttcaatatttggttgctaaagaacaataacaacaacaaagctggtccagccctgacacctacttttgctttttctctttctttcttttaattgtgtggaactataggtttctttctgagatgtattttccattcttccaataatgctctctttttcatttcaaaaccattaccactttcaatatgtaattaacatcctcattcatcagaaagctggtaagtccacacagcatttgtgcagtatcccttctgtgtaaaatgttaaggctttcagatgaaagaaaaaagaacttcctgcaaaagatcaaaagcatcatactaaataaaatgatgacaatatgtgccttgatttttctctcaatggaggctcaacattgacatttaagatgtaaaaaaaattactttgatggtttaattaagaataataaggcaaatatcacatgtatgtagttcgtttggatgaccgaataccttaaaatgaactaaataactgaaataaagtgttaaaatgttaa

SEQ ID NO: 74755 - DNA, 708 bp, Homo Sapiens
  misc_feature (33)..(33): n is a, c, g, or t
aaaaaagcagggccagaccgcatcatttcttgnaaagctttcagcccagcccagcccctctaggcctgtggctcctacgccgcctccctgggtctgtatgcctgggatgatggctcccctctcgccttgctgggagggcaccaagggggcatcacccacctctgctttcatcccgatggcaaccgcttcttctcaggagcccgcaaggatgctgagctcctgtgctgggatctccggcagtctggttacccactgtggtccctgggtcgagaggtgaccaccaatcagcgcatctacttcgatctggacccgaccgggcagttcctagtgagtggcagcacgagcggggctgtctctgtgtgggacacggacgggcctggcaatgatgggaagccggagcccgtgttgagttttctgccccagaaggactgcaccaatggcgtgagcctgcaccctagcctgcctctcctggccactgcctccggtcagcgtgtgtttcctgagcccacagagagtggggacgaaggagaggagctgggccttcccttgctctccacgcgccacgtccaccttgaatgtcggcttcagctctggtggtgtgggggggcgccagactccagcatccctgatgatcaccagggcgagaaagggcagggaggaacggagggaggtgtgggtgagctgatataaaaaggtttttatgataaa

SEQ ID NO: 74756 - DNA, 670 bp, Homo Sapiens
cacagtcccaggaaagtggagattctcactgcagagttcaaatgcatcaaagctttctcagtgctctagtaagcactctgattcagaggaatctgattgcaatattaagttacttgacagtcaaagtgaccagacctccaagctatgtttatctcatttctcaaaaaaagacacacctctaaggaacaaggttcctgggctatataagtccagttctgcagactctctttctacaaccaagatcaaacttctaggacctgccagagccagtgggctgagcaagaagccggcaagcatccagaagagaaagcatcataatgccgagaacaagccggggttacagatcaaactcaatgagctctggaaaaactttggatttaaaaaagattctgaaaagcttcctccttgtaagaaacccctgtccccagtcagagataacatccaactaactccagaagcggaagaggatatatttaacaaacctgaatgtggccgtgttcaaagagcaatattccagtaaatgcagactgctgcaaagcttttgcctgcaagagaatctgatcaatttgaagtccctgtttgggaatgaggcacttatcagcatgaagaattttttctcattctgtgccattttaaaaatagaatacattttgtatattgactttataaa

SEQ ID NO: 74757 - DNA, 1039 bp, Homo Sapiens
  misc_feature (82)..(90): n is a, c, g, or t
  misc_feature (838)..(838): n is a, c, g, or t
  misc_feature (902)..(902): n is a, c, g, or t
  misc_feature (928)..(928): n is a, c, g, or t
aagaaaaatgctttaactttataaaaaatgtgataatacagcaagatattgttggggttttctttttttctgtcaagtaagnnnnnnnnncacctgggaataaaaattagaaacataatctaagaaaaattggaaacaagcatttcaaggaaacaatttggaaagataaggaagagaaaacaacaagcagcatgagcagcaaaagcagcagcaacatggggggaaagctggctctgctgtgaggacagaacaatcaaagaccaacgtgcaccttgctttccataccaggctgagctgaggggtggggtaagggtgggcagtaaccatcagagaggcatgaaggtttcccaggtgggatcagctgatggctgctggctcactgtggggagagggtaggcaatggcctcctgcaaacgggcccagatccgccctcttataaggcctgccagccaagtggcagtgacggatttggcttagctggctccctcctctgtccacttgctccaatctgcagctctgcaggtcaccatcccacagtgatgagctcagcaagcagagactcatcagaacgtcagcctaagctagggtagcgaacttgccagggagaaccaagaaaactagatgtacagggctgtatacaaaacactttttggaatgtctgcaccatagccaaggcagagttaggaccactttggagaggcagctgggaatgctcccagcaacattccccagcctttccccctagggaagggacatccaaagaacactgggtgaattcttgactacattctgaggtagtctaactgtgacttggcacaggtagctaagaatgatcacnaaaaacagaagaagggaaggcagaaaagtcgccacagagagaaaaggctaacatctctaacagnagaagctacactacaagtgggctcanagatgaccagaatgcgtcctgggctcggggtggccagtggcagggcccacccctgggcacatacagctctcatagcacacttgatgctgcagcagtgtggcaggagatgag

SEQ ID NO: 74758 - DNA, 733 bp, Homo Sapiens
gaatatttattagactcagctgaagagacaagtgaactaaactataagctggatctaaagaaataccccagtgagcagtgaggagaaacaaggagctagaaaacattggaaagttaagagagttcgagggaagaattataaagactaggagtcctagaaagagaaaatttagagaataaaggagaggcagtacttgaaagataacacaattttacaaatttgttggaaaaacatgaattcataaattcaggaagcacaatatataccaaacatatatttaaataaaatccaggcctagactcaaggtattgtaaatgacaagataccaaatacaagattttaaaagcaaccatggggagaaaaagatcagtgaaagcaagacagtcaaatacttagtaggcttcctaacagcaacaatgtacccaaaagagggtagaattctgagaaaaactattagcttagaatttgcaacaagcgaaactgaaacaaacagatgctcagatgaaaaacagatgttatcctcagcacaacttcagtaaagagactacaaaaggatgatcttcaagaagggaaatgattctaaaaggattatctgaaattgaaaaactagtaagcaaataaatgataaacataagtaaatttaaactgttgtttgtataaaacaattataatgaagtgtttataagaaattgtaaacaaatgtaaaactaaataaacattgttatgcaacatt

SEQ ID NO: 74759 - DNA, 403 bp, Homo Sapiens
aagcatcgaaatgggatgtctgagccttgaggaaaagcagcagggttagcattaaagtcaagagggcagctcaggatggtaccagggagcacatcgtttctggtgcctcatctaaaggtaaaacctcccctacattcaccagccggatgtcccaaatccctttagccagattgctttttgcaaccaaagctgtggacagaaaagcctccttaagtgagctgaggggacaggaaatccaatcagatgacctttgtgttcgtaatcgggcttgagccagaggctggggagctgagtcccagccaaacctcactggcccgtttgcttttcacgcccagggctcagtggcccaggaagtgtgctgggcagcctgttcttactccagctcaacccattgggtgttggc

SEQ ID NO: 74760 - DNA, 661 bp, Homo Sapiens
atggtgttaatggaggttctagaaggggtaaggccagaacccagggatccaggagtcggctctcagctggagcttccataccttctgggctccctttgctgaccaccagcccaagggagctaagaccaggagggggctgggcgctgtcccttctctttcccaggagccctgccaggggctgtgggcctacaaggcttccaggggatgccatccagcctgtaggaaaccaaagatgggaagtggctcctagggggctgactcttccttcctcctcctccccagtaccacatatactttctctccttctatccccagggccccaccaatctgtttacatatttattatcctatgggggcctgagcaggattgagggagccaggggaggggcaggagtcccagcaccatcggttcatagtgtgcttgtgtgtttgttttagatcctcctgggggatggggatggggccaggctcagtgtactaggcctctctgtgctgagccccaggctcccggccccttacccactctctccctgtggctggtctggttctcatgtaaacccactccttgctttgtctccctggatatggatttcagttaagtattttgtaacccgttacactgtgtgtccttgtgtaaataaacttgtttctggcagaaaaa

SEQ ID NO: 74761 - DNA, 1444 bp, Homo Sapiens
  misc_feature (112)..(112): n is a, c, g, or t
  misc_feature (128)..(752): n is a, c, g, or t
  misc_feature (771)..(797): n is a, c, g, or t
tcatgtgtgcatggtagtgtttacggtgatcagcgtatacgtaagccacgtcgctgacggggtgtcaacacccgctggcgacgctacaccgactgagtcctacagctgagtntgagaagcccacctgnnnnnnnnnnnnnnnnnnnnnnnnnnnnnnnnnnnnnnnnnnnnnnnnnnnnnnnnnnnnnnnnnnnnnnnnnnnnnnnnnnnnnnnnnnnnnnnnnnnnnnnnnnnnnnnnnnnnnnnnnnnnnnnnnnnnnnnnnnnnnnnnnnnnnnnnnnnnnnnnnnnnnnnnnnnnnnnnnnnnnnnnnnnnnnnnnnnnnnnnnnnnnnnnnnnnnnnnnnnnnnnnnnnnnnnnnnnnnnnnnnnnnnnnnnnnnnnnnnnnnnnnnnnnnnnnnnnnnnnnnnnnnnnnnnnnnnnnnnnnnnnnnnnnnnnnnnnnnnnnnnnnnnnnnnnnnnnnnnnnnnnnnnnnnnnnnnnnnnnnnnnnnnnnnnnnnnnnnnnnnnnnnnnnnnnnnnnnnnnnnnnnnnnnnnnnnnnnnnnnnnnnnnnnnnnnnnnnnnnnnnnnnnnnnnnnnnnnnnnnnnnnnnnnnnnnnnnnnnnnnnnnnnnnnnnnnnnnnnnnnnnnnnnnnnnnnnnnnnnnnnnnnnnnnnnnnnnnnnnnnnnnnnnnnnnnnnnnnnnnnnnnnnnnnnnnnnnnnnnnnnnnnnnnnnnnnnnnnnnnnnnnnnnnnnnnnnnnnnnnnnnnnaagaattcggcacgagggnnnnnnnnnnnnnnnnnnnnnnnnnnngagaagagctaacatttattcaatcaacaaatgctgagtgtccgccatggccagatactctttgacagtcgtcacagcacacagaacatgtgattagtaaacataatggtgcaggacatcagcctgctaatgttattcccaggtgtcatcaaatgagtgacaatttgtacaatgtttcattaaatgcctatttagaggataaccatagttgatgacacagaaaaaagccaaacccagaatgcaagaatcgtagccagcagagcacgtggaaacaacgtccaagttgcaggtagcagcttgcaggataaccacagttggcgacgctttcaggcagctgggagaattctcagttgtccattttatggttaaatggttttactaaggtctaaaaaattcatttctaactcctagacttatgtttccattactatataaagaatgagccaaacaaataaataacaaaatattcactatggaccccaaaatttcaaggcatgaagagagccccaattctctgtgaactgcaaagagaaccattagtacaggaatagatgaagaattgtttttgagtatatataacataaacaatctcttaacagacgagtgtcaaccatgcttttgttgttgcaaaacatctcaaaagagtg

SEQ ID NO: 74762 - DNA, 621 bp, Homo Sapiens
  misc_feature (27)..(27): n is a, c, g, or t
  misc_feature (231)..(299): n is a, c, g, or t
ccccagtggtatgggccctccacatgncaggtaagtagcaaacccccactccctccaaggaccaggtctcagagaaggccctggtcactgcccccggcccacctggagcccatcggggctgcctctcccagccgagacttctccttttgccttaggcctcgcgacatcctgatctctcctgcaataactaggaatcgagattccacagtagacgtcccttgccgtgctcgnnnnnnnnnnnnnnnnnnnnnnnnnnnnnnnnnnnnnnnnnnnnnnnnnnnnnnnnnnnnnnnnnnnnngttaagatcctgttcgggagtttccccagccgttgtagtatctagtatgttagagttgggaggggaccatagttatgtagcccagccccctcattcccagaggcacccagagggccagcctccagcctgaccccagagcagaaccggaacaccaggttggggccctggtgctgccacctcctctgctggtcgggctgggaccctttgccccttaggagaggtgttggtcacagatgtttacctcagtttatgtcactgtcgaagaaacaaaaaataatagcaaaaaataacactgtagacatgaagactttgaggccaatat

SEQ ID NO: 74763 - DNA, 1237 bp, Homo Sapiens
gttgggggcagccaggcctggctcgaagatgccgaagtcgtgcgcggcccggcagtgctgcaaccgctacagcagccgcaggaagcagctcaccttccaccggtttccgttcagccgcccggagctgctgaaggaatgggtgctgaacatcggccggggcaacttcaagcccaagcagcacacggtcatctgctccgagcacttccggccagagtgcttcagcgcctttggaaaccgcaagaacctaaagcacaatgccgtgcccacggtgttcgcctttcaggaccccacacagcaggtgagggagaacacagaccctgccagtgagagaggaaatgccagctcttctcagaaagaaaaggtcctccctgaggcgggggccggagaggacagtcctgggagaaacatggacactgcacttgaagagcttcagttgcccccaaatgccgaaggccacgtaaaacaggtctcgccacggaggccgcaagcaacagaggctgttggccggccgactggccctgcaggcctgagaaggacccccaacaagcagccatctgatcacagctatgccctttgggacttagattccctgaagaaaaaactcttcctcactctgaaggaaaatgaaaagctccggaagcgcttgcaggcccagaggctggtgatgcgaaggatgtccagccgcctccgtgcttgcaaagggcaccagggactccaggccagacttgggccagagcagcagagctgagccccacaggctccggacgcagaggtggcagtggcaccagggccggcagagctttggagctctggctgtggacatttttgtctgctgtggacactgagaaagttggccatgaggcctgcttggccggggatcgagacagtagccaagctccccggcgagagccccaatgccgtctgggggacgtttagaggcgtggcactaggagtgcacatctgtgagcatgacaagcttatcctcccatggtaacagaagtccaggctgaggctgattctggacgctgtcctttcagcacacgcagagcaaagatcgttggaagccccagtgtgggagatgctcctcagggaggaagccatgtgagggggctggctctgtggcgggtgagtggtcccctcctccatcagcctggacagccgctcggggttctaaggagtgactcctgtcccggcctggtgtgagtgggcagtgtaataaagtgtctttctataaaaa

SEQ ID NO: 74764 - DNA, 932 bp, Homo Sapiens
  misc_feature (814)..(823): n is a, c, g, or t
acgagaaaggggagggggaaggcaagaatcactgaaaaatcttaaatctgtgttttctggaataagatatctagacagcctaaatctgattttagtctttataaaaataatatcttgtgttctcatacttttctgtcactgtaagcctgcccagtaggcagtgttttgcagactttggggagtggtctatgtggccaaatattgtgtgtatagacagaatttgaaatcaagtcctgcttcatttacaagaattttggtgggcatctaatcctacataatgaaaaagaaaaacagaccatttaaaaactcagacaagattatatttaatatattaattactaaaaaggcacaagattacactgaacatattagctactaaaaaggcactgctaagacattcaagcaaatagctattacacactactgcagattttacaggtttctaattctaacatatgtttgaaaaatccgtgagtattccaaaatatatttaataatggaatatctgcattaatataccatccatgtgtttttaccatttgccttaatattgaatatactgtttacctcacactaaaaagaaaaccagaagccttatttgtgattttgggagtggaagcttccatttttgtgtcaaaaatgaatcctgattcttatggaaatctctgttattaagatatttcaagatgagacaacactgaagatcaaattgtgtttagtatcactatcttctctcctcgtttctctcttactcctcatcctcccagaatctaccagtttatggtagaaagatgggaaccttatttgaatgtgnnnnnnnnnnccatgatgtccaattttgttgtgggaaaggatttggataaaatttttgtttaaattttggtagatttttatctatacaaatttaaataaaattatgttttgtaagctgt

SEQ ID NO: 74765 - DNA, 929 bp, Homo Sapiens
gagagtatgaagtcgacggcgcgccgaattcggcacgaggccgggtcggccgatcgtcccccatacctcggccatgcggcccctgctgctactggccctgctgggctggctgctgctggccgaagcgaagggcgacgccaagccggaggacaaccttttagtcctcacggtggccactaaggagaccgagggattccgtcgcttcaagcgctcagctcagttcttcaactacaagatccaggcgcttggcctaggggaggactggaatgtggagaaggggacgtcggcaggtggagggcagaaggtccggctgctgaagaaagctctggagaagcacgcagacaaggaggatctggtcattctcttcgcagacagctatgacgtgctgtttgcatcggggccccgggagctcctgaagaagttccggcaggccaggagccaggtggtcttctctgctgaggagctcatctacccagaccgcaggctggagaccaagtatccggtggtgtccgatggcaagaggttcctgggctctggaggcttcatcggttatgcccccaacctcagcaaactggtggccgagtgggagggccaggacagcgacagcgatcagctgttttacaccaagatcttcttggacccggagaagagggagcagatcaatatcaccctggaccaccgctgccgtatcttccagaacctggatggagccttggtgtctccctggggccagggccaccttcctggggcctgctatgaactcactgcctctgtcctcacatctgagctcagcgtgatgccttcttttcctgctgtggggctgcagttgaactacctgggcaactacatcccgcgcttctgggacttcgaaacaggctgcaccgttgttgtgacgaaagctttgcgcaacctcaaagggcattggggga

SEQ ID NO: 74766 - DNA, 913 bp, Homo Sapiens
agagtatgaagtcgacggcgcgccgaattcggcacgaggcctgcgagcgccgccgggtcggccgatcgtcccccatacctcggccatgcggcccctgctgctactggccctgctgggctggctgctgctggccgaagcgaagggcgacgccaagccggaggacaaccttttagtcctcacggtggccactaaggagaccgagggattccgtcgcttcaagcgctcagctcagttcttcaactacaagatccaggcgcttggcctaggggaggactggaatgtggagaaggggacgtcggcaggtggagggcagaaggtccggctgctgaagaaagctctggagaagcacgcagacaaggaggatctggtcattctcttcgcagacagctatgacgtgctgtttgcatcggggccccgggagctcctgaagaagttccggcaggccaggagccaggtggtcttctctgctgaggagctcatctacccagaccgcaggctggagaccaagtatccggtggtgtccgatggcaagaggttcctgggctctggaggcttcatcggttatgcccccaacctcagcaaactggtggccgagtgggagggccaggacagcgacagcgatcagctgttttacaccaagatcttcttggacccggagaagagggagcagatcaatatcaccctggaccaccgctgccgtatcttccagaacctgatggagccttggatgaggtcgtgctcagtttgaaatgggccatgtgagagcgaggaactggccatgacaccctccggttctgatcatggcacggggcacagctgcagtgactactggcactactccggctctgacttcaaagctgactgggacaagtgccactcagcatggcgtctggtccacccgactggatttcaa

SEQ ID NO: 74767 - DNA, 865 bp, Homo Sapiens
cgggagagtatgaagtcacggcgcgccgaattcggcacgaggcgctcagctcagttcttcactacaagatccaggcgcttggcctaggggaggactggaatgtggagaaggggacgtcggcaggtggagggcagaaggtccggctgctgaagaaagctctggagaagcacgcagacaaggaggatctggtcattctcttcgcagacagctatgacgtgctgtttgcatcggggccccgggagctcctgaagaagttccggcaggccaggagccaggtggtcttctctgctgaggagctcatctacccagaccgcaggctggagaccaagtatccggtggtgtccgatggcaagaggttcctgggctctggaggcttcatcggttatgcccccaacctcagcaaactggtggccgagtgggagggccaggacagcgacagcgatcagctgttttacaccaagatcttcttggacccggagaagagggagcagatcaatatcaccctggaccaccgctgccgtatcttccagaacctggatggagccttggatgaggtcgtgctcaagtttgaaatgggccatgtgagagcgaggaacctggcctatgacaccctcccggtcctgatccatggcaacgggccaaccaagctgcagttgaactacctgggcaactacatcccgcgcttctggacctccaaacaggctgcacctgtgtgacaaagcttgcgcacctcagggcatggggaaaactctcccacgtctggtcgctgtctcgacacccctccttggtcctgttttcacggtctgggtcattccctaaaatggatttttcctccaaaaccaagctgtgaattttgcattgaata

SEQ ID NO: 74768 - DNA, 3171 bp, Homo Sapiens
  misc_feature (148)..(175): n is a, c, g, or t
tgaacggcccagagggtcccttaggcttaataaataccgaccttccccttattaggggcccccctttgttaccaaaggaaagcctggggtacgccgtaaggcttggggccccctccgaggggatacttctagagcgggccgccccttnnnnnnnnnnnnnnnnnnnnnnnnnnnngggtttaaatgacctttaatagaaactctccagtttctgacggtctgtccctctcttcagaggcatccaggacagggtgacccagtgtggtgtgtggacctgtcactcccctccccacaggcaagtagaagatcgagctgtgcacagatgcctcttctgtctcccaagaggttctctggagtcgctgtctccaggggactacggtttgctctcatgaccagccatggaggcagaagtcccagactcagggcagcccttggagtctgatccaggtgtctttaccccaaaacttgaagcagaagtccctggtgcaacacctgtgcctgggagaagctctggccatggcttctcacccagacagtctttctgggcaacttggggaagcccctgttctgctcaagtctcaccccatggaagaggtgggggaagggggccttggtttttcaggaagacaggttggagagcacgagtcactacaaagcagtaaaagtgaatggtgtctccaggggctgggtccagaacaccacggagagccccagccataaaggtgtgttccgcctctggcctgcaggaatctctttgaatctctttgattggtggctccaagagcaatgggaagtcaacagccaggaggctggactgggttccctgggaccccgaggtcccagaggctgctgggcagtggttgtcggcaaagaagaaaggtccaagagggtcaggcctggccaattagggatcgacgaaggagactgcgatgtagcgggtgcccctggtggtggggagcccctcatggtaatgcgtgagtcgtccagggtgcatgagggtccagcccttccttggggctcggatggaacagttgtagcgcaggaaccgacagcccccgccctcgtaatccaccccgactcggttcagggcgatgttgatggtgaaggtggaggcatcatggtgtggcatcagtgagggctgctcatcaggcttgtagcggacgacaaaggccaggtcaaactgggccctggtgtagtagccggggtagagcttctccgtcatgggcgcaatgtactccagcaggaatttgtgccactcccgctcaaagccgatctggttcatgtggatgtcaatagtcggcacgttctcgtagccaccctggatgcggttgtccttgttgttgcccagagaccactggccaaagtgctccatctcctccaccagctcatcacaggccacctccgtgaagatggggaaccaatagacatccgggcagggcgtctccaccagcttccctgccagggctttggtgtagttctggtggatgtacttctccttccagtcctcggggttgctgaacacctcccagaggtcgttgtgcaggtgggtggtgcggtagctgtctagggagagcagatggccaagggtgtgccggttggtcaggaacatgaacacatcctgctgccggatgttggcacagaaggccatgtcggggtccagcttgctgtggtggaagagatctgaggactgcagctcaccccgcagggcactgcccttgatcaagtagatgtttgaaatatagggcacattccagacaccaacacgccgcccctgcacaatgtccacgtagtcctcggaacgggcatagtagccatctgcactgagagccccccagaagttcgaccacagcctcccatgccgggtcatcagcggggcaatgacgttcttgttctgttggatcagcagccgcaggctgttgggctcggtcagggccacgtcagcatccacgctgaagtagtaggtgcagctgcggtcctgccggcacaggtctgcgcccatgttcctggcatctgcattcgccatccgcacctcagggcccaccagcttcacagactggtactcgctgccatgctgtgccaggaactcttccacctgagccttgtggtgctgctcgtggttgtggatgaaaagtcgcatgtgtttctgggggtagtggagccgcaggagccgctggaagaacagggacacaaacggcgtgggctgttcgatgaacacgccgaccaggaccgtgggcagagcttcatccccaatgcccttgaggctgcgcaagccttcgtcacacacggtgcagcctgtttcgaaggtccagaagcgcgggatgtagttgcccaggtagttcaactgcagcttggttggcccgttgccatggatcaggaccgggagggtgtcataggccaggttcctcgctctcacatggcccatttcaaacttgagcacgacctcatccaaggctccatccaggttctggaagatacggcagcggtggtccagggtgatattgatctgctccctcttctccgggtccaagaagatcttggtgtaaaacagctgatcgctgtcgctgtcctggccctcccactcggccaccagtttgctgaggttgggggcataaccgatgaagcctccagagcccaggaacctcttgccatcggacaccaccggatacttggtctccagcctgcggtctgggtagatgagctcctcagcagagaagaccacctggctcctggcctgccggaacttcttcaggagctcccggggccccgatgcaaacagcacgtcatagctgtctgcgaagagaatgaccagatcctccttgtctgcgtgcttctccagagctttcttcagcagccggaccttctgccctccacctgccgacgtccccttctccacattccagtcctcccctaggccaagcgcctggatcttgtagttgaagaactgagctgagcgcttgaagcgacggaatccctcggtctccttagtggccaccgtgaggactaaaaggttgtcctccggcttggcgtcgcccttcgcttcggccagcagcagccagcccagcagggccagtagcagcaggggccgcatggccgaggtatgggggacgatcggccgacccggcggcgctcgcagggctggaaacttcgcgacggggccgcaggtcccgctgc

SEQ ID NO: 74769 - DNA, 1086 bp, Homo Sapiens
  misc_feature (569)..(591): n is a, c, g, or t
acttagcagttggggattaaaccatccttgccttcagttctctccaatataccaggcccaactcagtcttcagtgattttaaacagcattgacatcatctgtaaaaccatcatctgtaaaaccatctatgacatgagttttgagaaacaataatggggaaaatatttgggaccaagctgaagcactaatcccactaagttaaagacttctttccagtccaaggcaggcctgaatcaactgtctttaaataaaattttaagtgatgctgtattatatataggaaaaaatgcttaaaatcctgtcatttagaacagtgaaaagtatcttttgagattaaagtgactctttactgtaggaaaaatattactctgtgtttacagattcattgctgtggtcaggccatttttaagggaagagttatttaatataaatagtctctgattttaagttctgtttaatgttcattctccttccaagaacaaagtggtgatttttggttagggtgatccccctcttaaaattggcagtgctgttccttgtgctgcccctgtcttttcctctgatggcannnnnnnnnnnnnnnnnnnnnnnaacacaggttgaaacatttcatctattatctctgcctcatttctggagggttgtgtatcagttctctaacacttgttcctgagaactaaatgtcttttttattcttatttcctctctcataaacatttggtgaccttttaccaagtggtgagttaggttttttaaaataaaatgttcattgtatttgaagttttcctcagttcatgaaatgacttggggcagggcctggggggttctcaagggaggaaatgttttggttatttacacactgaactacaagatgggatcctagcaggaaactcagcctccttgaatcaaagagcatagataaggctgaaagcaaattttagttgtacagttaacaacataccaaagacacaggaaacatctgcagaaattgatcatatataagtgaatgaaaaatcagtactcctcccagaagttaaatatactcctaaagaattcttgggaaaaaagaaacataccaatactggg

SEQ ID NO: 74770 - DNA, 2231 bp, Homo Sapiens
  misc_feature (1326)..(1326): n is a, c, g, or t
  misc_feature (1370)..(1370): n is a, c, g, or t
cggtccggaattcccgggatcccccccgcctctgacttctctgtccgaagtcgggacaccctcctaccacctgtagagaagcgggagtggatctgaaataaaatccaggaatctgggggttcctagacggagccagacttcggaacgggtgtcctgctactcctgctggggctcctccaggacaagggcacacaactggttccgttaagcccctctctcgctcagacgccatggagctggatctgtctccacctcatcttagcagctctccggaagacctttgcccagcccctgggacccctcctgggactccccggccccctgatacccctctgcctgaggaggtaaagaggtcccagcctctcctcatcccaaccaccggcaggaaacttcgagaggaggagaggcgtgccacctccctcccctctatccccaaccccttccctgagctctgcagtcctccctcacagagcccaattctcgggggcccctccagtgcaagggggctgctcccccgcgatgccagccgcccccatgtagtaaaggtgtacagtgaggatggggcctgcaggtctgtggaggtggcagcaggtgccacagctcgccacgtgtgtgaaatgctggtgcagcgagctcacgccttgagcgacgagacctgggggctggtggagtgccacccccacctagcactggagcggggtttggaggaccacgagtccgtggtggaagtgcaggctgcctggcccgtgggcggagatagccgcttcgtcttccggaaaaacttcgccaagtacgaactgttcaagagctccccacactccctgttcccagaaaaaatggtctccagctgtctcgatgcacacactggtatatcccatgaagacctcatccagaacttcctgaatgctggcagctttcctgagatccagggctttctgcagctgcggggttcaggacggaagctttggaaacgctttttctgcttcttgcgccgatctggcctctattactccaccaagggcacctctaaggatccgaggcacctgcagtacgtggcagatgtgaacgagtccaacgtgtacgtggtgacgcagggccgcaagctctacgggatgcccactgacttcggtttctgtgtcaagccccaacaagcttcgaaatggccacaagggggcttcggatcttctgcagtgaagatgagcagagccgcaacctggctggctggctgccttccgcctcttcaagtacggggtggcagctgtacaagaattaccagcaggcacagtctcgccatctgcatccatcgtgtttggcctccccacccantgagaagtgcctcagataataccctggtggccatggacttctcntgaccatgctggggcgtgtcattgagaacccccggaaggctctgagtggggccctgggagaagaccaaggcctggaaggaaaaagacaaaccaccgccctcagcatgcccatgccagcctccgggcacgagccctcagtgcagccatccaccgcaccccaattctggttcccacgggcgcatttcccgtgaggagagccagcggcttattggacagcagggcttggtagacggcctgttcctggtccgagagagtcagcggaacccccagggctttgtcctctctttgtgccacctgcagaaagtgaagcattatctcatcctgccgagcgaggaggaggaccgcctgtacttcagcatggatgatggccagacccgcttcactgacctgctgcagctcgtggagttccaccagatgaaccgcggcatcctgccgtgcttgctgcgccattgctgcacgcgggtggccctctgaccaggccgtggactggctcatgcctcagcccgccttcaggctgcccgccgcccctccacccatccagtggactctggggcgcggccacaggggacgggatgaggagcgggagggttccgccactccagttttctcctctgcttctttgcctccctcagatagaaaacagcccccactccagtccactcctgacccctctcctcaagggaaggccttgggtggccccctctccttctcctagctctggaggtgctgctctagggcagggaattatgggagaagtgggggcagcccaggcggtttcacgccccacactttgtacagaccgagaggccagttgatctgctctgttttatactagtgacaataaagattattttttgatac

SEQ ID NO: 74771 - DNA, 767 bp, Homo Sapiens
ttaggctagtacgaggctgggtgttaatcggcacgaggggtagtaagggcctggcgtctccctccctgaagacgtggtcccagccgggtgtcctgacgctcggggttcaggacaagggcacacaactggttccgttaagcccctctctcgctcagacgccatggagctggatctgtctccacctcatcttagcagctctccggaagacctttgcccagcccctgggacccctcctgggactccccggccccctgatacccctctgcctgaggaggtaaagaggtcccagcctctcctcatcccaaccaccggcaggaaacttcgagaggaggagaggcgtgccacctccctcccctctatccccaaccccttccctgagctctgcagtcctccctcacagagcccaattctcgggggcccctccagtgcaagggggctgctcccccgcgatgccagccgcccccatgtagtaaaggtgtacagtgaggatggggcctgcaggtctgtggaggtggcagcaggtgccacagctcgccacgtgtgtgaaatgctggtgcagcgagctcacgccttgagcgacgagacctgggggctggtggagtgccacccccacctaacactggagccggggtttggaggaccacgagtccgtggtggaagtgcaggctgcctggcccgtgggcggagatagccgcttcgtcttccggaaaaacttcgccaagtacgaactgttcaagagctcccaactccctgttcccagaaaaaat

SEQ ID NO: 74772 - DNA, 2065 bp, Homo Sapiens
aaaagtagctagtacgaggctggtgttgaatcggcacgaggggctccgcgcggtctctggcggagtcggggaatcggatcaaggcgagaggatccggcagggaaggagcttcggggccgggggttgggccgcacatttacgtgcgcgaagcggagtggaccgggagctggtgacgatggcggggccgcagcccctggcgctgcaactggaacagttgttgaacccgcgaccaagcgaggcggaccctgaagcggaccccgaggaagccactgctgccagggtgattgacaggtttgatgaaggggaagatggggaaggtgatttcctagtagtgggtagcattagaaaactggcatcagcctccctcttggacacggacaaaaggtattgcggcaaaaccacctctagaaaagcatggaatgaagaccattgggagcagactctgccaggatcgtctgatgaggaaatatctgatgaggaagggtctggagatgaagattcagagggactgggtctggaggaatatgatgaggacgacctgggtgctgctgaggaacaggagtgtggtgatcacagggagagcaagaagagcagaagccactctgcaaaaacaccgggcttcagtgtccagagtatcagtgactttgagaaatttaccaagggaatggatgaccttgggagcagtgaggaggaggaagacgaagagagtggcatggaagaaggggatgacgcggaagactcccaagggcgagagtgaggaagacagggctggagatagaaacagtgaggatgatggtgtggtgatgaccttctctagtgtcaaagtttctgaggaagtggagaaaggaagagccgtgaagaaccagatagcactgtgggaccagctcttggaaggaaggatcaaactacaaaaagctctgttgaccaccaaccagcttcctcaaccagatgttttcccattgttcaaggacaaaggtggcccagaattttccagtgccctgaaaaatagtcacaaggcacttaaagcattgttgaggtcattggtaggtcttcaggaagagttgcttttccagtacccagacactagatatctagtagatgggacaaagcccaatgcgggaagtgaggagatttctagtgaagatgatgagctggtagaagagaagaagcagcaacgaagaagggtccctgcaaagaggaagctggagatggaggactatcccagcttcatggcaaagcgctttgccgactttacagtctacaggaaccgcacacttcagaaatggcacgataagaccaaactggcttctggaaaactggggaagggttttggtgcctttgaacgctcaatcttgactcagatcgaccatattctgatggacaaagagagattacttcgaaggacacagaccaagcgctctgtctatcgagttcttggcaaacctgagccagcagctcagcctgtcccagagagtttgccaggggaaccggagatccttcctcaagcccctgctaatgctcatctgaaggacttggatgaagaaatctttgatgatgatgacttttaccaccagctccttcgagaactcatagaacggaagaccagctccttggatcccaacgatcaggtggccatgggaaggcagtggcttgcaatccagaagttacgaagcaaaatccacaaaaaagtagataggaaagccagcaaaggcaggaaacttcggtttcatgtccttagcaagctactgagtttcatggcacctattgaccatactacaatgaatgatgatgccaggacagaactgtaccgctctctttttggccagctccaccctcccgacgaaggccacggggattgacatcgcccacctccgacacccagtgggcgccttggctggtgcggctgctggtccagatggaggaaaccagtgactttatggggctgagctagtagggaagcccctggaaagatgctgcgttccgaacctgtgcctaatacacgcaagggcgctgtcccgcccaaccccgcctttaaacgccacaaataaagagcattgttaccgcc

SEQ ID NO: 74773 - DNA, 692 bp, Homo Sapiens
ccaagcctgaactgaaggaccatggtcctatcccagcttcatcagagcaatccattgtgacctgagaatccattgaacctctcggtctagaacctccttctggaaagtgaggtattaatacttgactcatgttatcgccaccccacattctaagtcatggttgagtagtaatttggacagtaccttgtaaattgtgtgagattaccttaatataaggtataacttaaaatattcatgaatcccaggaggttaaaggttataacttttaggtatggtatcgtaatgtactgtcccccagcaaacatttaaaaagccaattttaaaaaatgtatttctgactaagttacattaaggtctctgcctctgtatcttatgtttcttccaggtgcaccctgaagaccacaaattaaataaatatcatgactggctttgggaaaatcatgaaaaattaagtctatcttaaactctgcagctttcaagctcatctgttatgcatagctttgcacttcaaaaaagcttaattaagtacaaccaaccacctttccagccatagagattttaattagcccaactagaagcctagtgtgtgtgctttcttaatgtgtgtgccaatggtggatctttgctactgaatgtgtttgaacatgttttgagatttttttaaaataaattattatttgacaacaatacaa

SEQ ID NO: 74774 - DNA, 729 bp, Homo Sapiens
  misc_feature (62)..(62): n is a, c, g, or t
gcacgaggatttttccagcaaatataacaaagagctcttagccccccacgacgtaaagcctntaagaaatggacacctcctcggtcaccttttaatctcgttcaagaaacactttttcatgatccatggaagcttctcatcgctactatatttctcaatcggacctcaggcaaaatggcaatacctgtgctttggaagtttctggagaagtatccttcagctgaggtagcaagaaccgcagactggagagatgtgtcagaacttcttaaacctcgtggtctctacgatcttcgggcaaaaaccattgtcaagttctcagatgaatacctgacaaagcagtggaagtatccaattgagcttcatgggattggtaaatatggcaacgactcttaccgaattttttgtgtcaatgagtggaagcaggtgcaccctgaagaccacaaattaaataaatatcatgactggctttgggaaaatcatgaaaaattaagtctatcttaaactctgcagctttcaagctcatctgttatgcatagctttgcacttcaaaaaagcttaattaagtacaaccaaccacctttccagccatagagattttaattagcccaactagaagccgtagtgtgtgtgctttcttaatgtgtgtgccaatggtggatctttgctactgaatgtgtttgaacatgttttgagatttttttaaaataaattattatttgacaacaagcc

SEQ ID NO: 74775 - DNA, 688 bp, Homo Sapiens
cgagggcaagaccagattgggtaagtggagtaagggcagagaagtgcggtcccgacataacaccgtccaataccaaagcctgcacggctgggagaagtcgaagctcacagaggatctttaggagccgagggcggagagaaggaccagtagggtcctacttatatcaacgtctggagcctagattttgtttggggtgggatggaagcaggtgatgttgcctcagaggtggctaaggctcagagggagaaacacagtgggggtttggagggcaagaccagattgggtaagtggacaggcaagtccccaggctgtagcctaagttaacagcagagagagcccgttaggtctcacacacccatcaccgcagctggaggctgctcaggggctgctggtggaagccgtcaccgccgggatcttgggtgacctgggctccgggggcaatgtggacgcatgtgtgatcacaaagactggcgccaagctgctgcggacactgagctcacccacagagcccgtgaagaggtctggccgctaccactttgtgcctggaaccacagctgtcctgacccagacagtgaagccactaaccctggagctagtggaggaaactgtgcaggctatggaggtggagtaagctgaggcttagagcttggaacaagggggaataaacccagaaaatacagttaaacag

SEQ ID NO: 74776 - DNA, 1179 bp, Homo Sapiens
  misc_feature (77)..(111): n is a, c, g, or t
aatgaagatcactaagggcgctgggcgttattccgaacgacgagcgcagcgaagtcagttgagcgaggaagcggcgnnnnnnnnnnnnnnnnnnnnnnnnnnnnnnnnnnncagtcgacggtaccggacatatgcccgggaattcggccattacggccgggggagacgtgaagcctagcagaggactttttagctgctcactggccccgcttgtctggccgactcatccgcccgcgacccctaatcccctctgcctgccccaagatgctgaagccagccctggagccccgagggggcttctccttcgagaactgccaaagaaatgcatcattggaacgcgtcctcccggggctcaaggtccctcacgcacgcaagaccgggaccaccatcgcgggcctggtgttccaagacggggtcattctgggcgccgatacgcgagccactaacgattcggtcgtggcggacaagagctgcgagaagatccacttcatcgcccccaaaatctactgctgtggggctggagtagccgcggacgccgagatgaccacacggatggtggcgtccaagatggagctacacgcgttatctacgggccgcgagccccgcgtggccacggtcactcgcatcctgcgccagacgctcttcaggtaccagggccacgtgggtgcatcgctgatcgtgggcggcgtagacctgactggaccgcagctctacggtgtgcatccccatggctcctacagccgtctgcccttcacagccctgggctctggtcaggacgcggccctggcggtgctagaagaccggttccagccgaacatgacgctggaggctgctcaggggctgctggtggaagccgtcaccgccgggatcttgggtgacctgggctccgggggcaatgtggacgcatgtgtgatcacaaagactggcgccaagctgctgcggacactgagctcacccacagagcccgtgaagaggtctggccgctaccactttgtgcctggaaccacagctgtcctgacccagacagtgaagccactaaccctggagctagtggaggaaactgtgcaggctatggaggtggagtaagctgaggcttagagcttggaacaagggggaataaacccagaaaatacagttaaacaaaaacctcgtgccgaattcgccacccaggcctcgctc

SEQ ID NO: 74777 - DNA, 1024 bp, Homo Sapiens
ccattgttcattttgggttgcctcagattcagtgtatattttaaaatattggttacataataggtactcaatgaaatggtttatagtagaatatctaagctagcactttattttaaaaagtaacttattaatcacacattgatggtacaccttgtatttagcaaatgtgtgcatgttgataaaatctcctatgtcttctttcttaaatccagttgctgattttgtaaaatacagttgtgataaagcagcattacgggggggaaaaagctatattccaactggtgttaaatgtattcaacaaaatcttacatcatacagtatttatttcttaattaatagaacttcagtgatatacttggtagatatctcaagccttttgtcttttacacaatggtgctctatcctattgttttcttttcaaagaagcatctgaacacttgcatttctattttcctatccaaaggcatccacatctaagtgtgtttttaaagttgattaaaattatttttctgttaaagcattctgaaagtgtttgtctttacctagaatgatttgtacacactcgtggtcaactgaacatgaatgtcagtagtagtctaattatgggaagggtaaacgtgttagattaaggctcttaaagctctaaaccatataaactatggacttgtatcatgatttaactgttcttagatctttcttacacagtgattcattcctctatttgtacagtggctttatgaaatgttgtgaattgatactgtaatcaataaagtgcttttaaccagagagaacaccgcacacacaaccaccattacaccaagcaagcaaagacaaaacaacatctttgcgccgctgccccccaaaaaagttctaaacactagttggggcgcggcgcacacagacgatcagcaggtccaacggtccagagaaaacgcgcacaccagatcgggctttcacaaaaacgcgccggcgacgccgttctaacacccgaggctggaccaggctaacagaccgacacaaaaac

SEQ ID NO: 74778 - DNA, 896 bp, Homo Sapiens
  misc_feature (103)..(333): n is a, c, g, or t
gattttccaaattttctgttatgtgcatataatgaaaaaaataggttaggatgttttttaaaatatgtcattgtttatctggcccatctcctgggaggcagcnnnnnnnnnnnnnnnnnnnnnnnnnnnnnnnnnnnnnnnnnnnnnnnnnnnnnnnnnnnnnnnnnnnnnnnnnnnnnnnnnnnnnnnnnnnnnnnnnnnnnnnnnnnnnnnnnnnnnnnnnnnnnnnnnnnnnnnnnnnnnnnnnnnnnnnnnnnnnnnnnnnnnnnnnnnnnnnnnnnnnnnnnnnnnnnnnnnnnnnnnnnnnnnnnnnnnnnnnnnnnnnnnnnnnnnggaagagtgttatgtgtttgttgaatataagccattttattgtgccttacccattgtggagcttcttggaagggactgtgatgcagaagtgagacagacctctgtgtttttcagatggacacaactggtgaaagtgcaaagagatgacttgtgctcaacatgaagactcttttaacctcagagtcaagcaggctggagaggagctccttagcacttcaccactggatggttgtgtcacagactcctcggatacttgacatctcatgaagcatcctcacataaggccactggcagaaatcaagtgaagggaagacgaccaaacctccaccagtatagagaggcccctaacaggccttcctccactgaaataggatgaagtcctctagtggccagggggtgacaatacaactcctcttccaagtccttacacaggatgcccctccgttgctggcgacctctagttgggtttgtttttgtcaagcgtgtcaggagagaatgcagggctccttctatccccttgctgagactgaaagagtcaaaatacatttcctaagaccaaaaaa

SEQ ID NO: 74779 - DNA, 963 bp, Homo Sapiens
gggaaaagaccatgccaactacctttaacagagaagggaataaacagaaaaataaatgtgaaataccttcagaagaatcctctaaagatgttgctgctgctgctgctgacagtcctaataaacatgtcagtgtaccagatcgaatcacaggaagggcgggactaaaggaactacaagctgttagcccttcccgaatttggaattttgttgaaattaatgtttctatggaagaactgcagaaattaagaagaactcgaatatgtcacttaattcggccattggatacagttttggatgatagcattggctgtgcagtctggtttgcttctagaggaattggttggttagtggcccaggaaggagtgaaatcctatcagagcaatgcaaaggtagttctcactggaattggtgcagatgagcaacttgcaggttattctcgtcatcgtgtccgctttcagtcgcatgggctggaaggattgaataaggaaataatgatggaactgggtcgaatttcttctagaaatcttggtcgtgatgacagagttattggtgatcatggaaaagaagcaagatttcctttcctggatgaaaatgttgtctcctttctaaattctctgccgatttgggaaaaagcaaacttgactttaccccgaggaattggtgaaaaattacttttacgccttgcagctgtggaacttggtcttacagcctctgctcttctgcccaaacgggccatgcagtttggatcaagaattgcaaaaatggaaaaaattaatgaaaaggcatctgataaatgtggacggctccaaatcatgtccttagaaaatctttctattgaaaaggagactaaattgtaatgtgattcacaatgtaacaatataaaaataagtttttatataattatataaaagtaagatactctgctgctttactattgtataatatagtagttttaaagttcaa

SEQ ID NO: 74780 - DNA, 634 bp, Homo Sapiens
agatgacaaggtactaccttgttcagttagtagtcagcagctagtatatccaaagatagtacgagtcagaactaggattataaactcagggctacctgaaactcacaacttcaggcatctttgatttcttcttttcacccacagccaattcttcaactaaattgtatccattctgttttcaccgtctcttgtactggtctcctttctattgtaactgtcatcatcctaactcaagatccttctgtagctttccccggttattggaatatccttattacgactgccaccttttctaatccagtctgtttactactgccgggttaatttccccaaactgcatgtctggggaataaccttgtggttatgacagaattcccaaaggaaagcaaacttggcaaggtgcaaagactatgaagacttagaacttaagagttctatggagatcttcagaaatataaattagctactcaacatatctgttattctgccctgattgcactgtaaagcaaaaggagagaggccattatggggaaaaagatccaaaaggactcatctaaaacacaagttgggtagaggagataggtgagtactattatattatgttcatggaaaatgagttcatgggaattcctct

SEQ ID NO: 74781 - DNA, 984 bp, Homo Sapiens
  misc_feature (205)..(218): n is a, c, g, or t
ttccctgggtccacaaattcacttcgcttttcaaaatatttgatgggaggaaataaaaaagtgtaacgttgtggggtggaggaaatgtttggcatggaagagaggagaaaagggtatgaaatgagggaaagtgttatttgccaccggaaaatattggattcagttgattttaaaaaatgaggtataacagtatgccagtaaatgnnnnnnnnnnnnnnttagaaaccaaaatgcacatttccaatggaaaaatctctaaacctcttatagttttattagacatttcatgtacagaagttaatctagaaaaatacattttaaaaatcttcaacagaccatgctccctgtaacaaaaccttccaaaccctgtgttttattatacaaagcaatctacattagtaggtaaaaagaaattctcaaatttagcaatgtcattttccatccaacatccatctaatttacagatgggtttccactattcatactggaattagaattctgtaataaattttttctaatgttttctgtacatattaaataacccaaaaggttcctcttgtagtgcatgtgccatttagcaagtctattcagtatttttccagtaccattctcattacagtgatttgcctgtaaatgtagttaatatctaaaagtgcacacagttaactttcccaaataacggactatttctggaggaaacctaatattcacagaaaagattaccaataacaatgattagaaatgtagggttagaatgtactctgagactatacaacacaattatatacacaagctaaaggacattaagtctttagcctatatttacataaaataatgtgtgtttccacagggtcataccaataactcagtatggtactagatataattaggattgttagctacaattcagtatagcaagacagccctaaaatgccctgaactgacttccgctaactaaaactccagtatatcacagtgttttaa

SEQ ID NO: 74782 - DNA, 1137 bp, Homo Sapiens
cctgggtggcgaattcggcacgagggtcagcctgggttctatcctttggtgcagccccattgccttttcccttcaggctctgttgctccctcctctgcagctgcacgaaggcgccatctggtgtctgcatgggtgttggcagcctgggagtgatcactgcacgcccatcgtgcacacctgcccatcgtgcacacccacccatggtgcacacctgtagtcctccatgaggacatgggaaggtaggagttgccgccctgggggagggtcccgggctgctcacctctccccttctgctgagcttctgcgcacccctccctggaacttagccatactgtgtgacctgcctctgaaaccagggtgccaggggcactgccttctcacagctggccttgccccgtccaccctgtgctgcttcccttcacagcattaaccttccagtctgggtcccactgagcctcaagctggaaggagcccctgcgggaggtgggtggggttgggtgctgctttcccagaggcctgagccagaaccatccccatttcttttgtggatctccccctaccacaaaccaggctggaacccaagccccttcctccacagctgccttcagtgggtagaatggggccagggcccagctttggccttagcttgacggcagggcccctgccattgcaggagggtttggttcccactcagcttctgccggtcggcagcctgggccaggcccttttcctgcatgtgccacctccagtgggaaacaaaactaaagagaccactctgtgccaagtcgactatgccttagacacatcctcctaccgtccccaatgccccctgggcaggaggcagtggagaaccaagccccatggcctcagaatttccccccagttccccaagtgtctctggggacctgaagccctggggcttacgttctctcttgcccagggtgggcctggtcctgagggcaggacagggggtttggagatgtgggcctttgatagacccacttgggccttcatgccatggcctgtggatggagaatgtgcagttatttattatgcgtattcagtttgtaaacgtatcctctgtattcagtaaacaggctgcctctccagggagggctgccattcattccaaaaaaa

SEQ ID NO: 74783 - DNA, 407 bp, Homo Sapiens
ccctgaaattattattaattttctattgtgagttcatcagttcatagtttttttagtaaagaagcaaaattaaaaggcttttaaaaatgtacaacttcagaattataatctgttagtcaaatatttgttattaaacatttctgtaatatgaagttgtaatcctggccgtgagcttggaagcttacttttgattcttaaagcctatgttttctaaaatgagacaaatacggatgtctatttgccttttattgtaacttttaaatgaaataatttcatgtcaatttctattagatatatcacttaaaatatttggttttaaatcacaagaatatgtattctttaataaagataatttatgatcatggtataattaattgaaatttattaaaatctgtttttattaaaaa

SEQ ID NO: 74784 - DNA, 606 bp, Homo Sapiens
  misc_feature (447)..(459): n is a, c, g, or t
cagaacaacgtagcatggcctttggtgaaagcgtcaccgatgggaaataattgagaattgtgcagtgcttgcagcgtcagaatcagcactgttttttgtgttggtgaaaatattccatgtgcgtaaagggagagcatcagggactttgcaaattcttcacaaggacccagaaatagcttaaagattcatgattttcctgttggcttaaatagccttaatctttcattttctactaccattaagtcggggaaatgacattgaactacctcattagcagccttcccttgattaactactgactaaaagtgtgctgaaaatggcctttgtttttgtgaagctcatcctatacactaacatttgcttaaccatggattattttgtctctacaaagctgtgccctgtattcgatttttacttcaatgagtggttattgctagaattcctacnnnnnnnnnnnnnccgttgcagatatttttgtatgtagcttaatagatatttagtttaaggagactgcaacatttgcataaggtgcctaaaaactcaagaaccattgataagtgagatcactcaaaatgagctgatatattaaagaagaccttaaaacag

SEQ ID NO: 74785 - DNA, 1002 bp, Homo Sapiens
  misc_feature (211)..(212): n is a, c, g, or t
  misc_feature (215)..(215): n is a, c, g, or t
tatgtgatactcatcatagcacccccagcttacacttatctcccgctgtatgtgttgatgtgagcgatacaattcacacaggaacagttgacatgatacgatttatagactcctatagggattgcccctcgagccagaaatcgccacgagcttgtgtagtgacccatacctgggaccaaaaggagacccactgtaattgatgcattgtgcnnccntgatcttccctgtctcacactcttttctccccatcccggttgcaatctcactcagacatcacagtaccaccccaggggtggcagtagacaacaacccagaaatttagacagggatctcttacctttggaaaataggggttaggcatgaaggtggttgtgattaagaagatggttttgttattaaatagcattaaactggaattgacaagagtgttgagcatccctgtctaacctgctctttctctttggtgccccttatctcaccccttccttggaatttaataagtctcaggcatttccaattgtagactaaaaccactcttagcatctcctctagtattttccatgtatcaggaaagaggtgtcttatgtagggagggggcaagtatgaagtaaggtaattatatactactctcattcaggattcttgctcccatgctgctgtcccttcaggctcacatgcacaggaatgctacatgatggccagctgcttccctccttggttatcatccactgcagctgctagttagaaaggtttggagggatgacttttagtaaatcatggggattttattgatttattttcacttttgggattttgtggggtgggagtggggagcaggaattgcactcagacatgacatttcaattcatctctgctaatgaaaagggttctttctcttgggggaaatgtgtgtgtcagttctgtcagctgcaagttcttgtataatgaagtcaatgccatcaggccaaggaaataaaataattgcttaccttaaaaatcaaa

SEQ ID NO: 74786 - DNA, 1709 bp, Homo Sapiens
  misc_feature (48)..(48): n is a, c, g, or t
actcccaccccacaaaatcccaaaagtgaaaataaatcaataaaatcnccatgatttactaaaagtcatccctccaaacctttctaactagcagcttgcagtggatgataaccaaggagggaagcagctggccatcatgtagcattcctgtgcatgtgagcctgaagggacagcagcatgggagcaagaatcctgaatgagagtagtatataattaccttacttcatacttgccccctccctacataagacacctctgtcctgatacatggaaaatactagaggagatgctaagagtggttttagtctacaattggaaatgcctgagacttattaaattccaaggaaggggtgagataaggggcaccaaagagaaagagcaggttagacagggatgctcaacactcttgtcaattccagtttaatgctatttaataacaaaaccatcttcttaatcacaaccaccttcatgcctaacccctattttccaaaggtaagagatccctgtctaaatttctgggttgttgtctactgccacccctggggtggtactgtgatgtctgagtgagattgcaaccgggatgggagaaaagaagtgtgagacagggaagatcaggggccacaatgcatcaattacagtgggtctcttttggtccccaggtatggtccactaccacaagtcccctttccctacctgtcttgtgcaaatgtcaaaaatagaatctctgcccaaagagaagggagcacagggagttgctgctggactgccatcatctctggccccaacttgtccacctcctgacccatctatgaaactgcacaacaattaaaccccaggaatactgtaaacttacatcatccccattcctctatcaaagccaatccaacagctctgtcctgacatgctttctccctgggccgaggaagcagcaaaaaatatcaattgagcatgtgaaaatgtgatgacggtgtgtgtggtgtaatgtttctagatgtcttcaccttctgtctccttgcggtgggagccaccctctttccccatgtcgcgcacacacacccctcccctacccccaagtccaggtgctcccatctgctgggcttccaaccactcatttcccatagacactctcatcactgtaggccacatacagaaaatagtcttcctcatgattgtcctcatacagttggcccatggtagcactggtgggagggatggtgttgttgacaaagaagaataaggcgtcctcaggtctcaggtggattctcttccggattaagaagtagaactggccaacagtaaggtcagagggcactaggtacttcctcttgtccagatcaggcaccctggcttttggagccttctctacaatcacggggaccctgtccggatatttcttccggatcttttctccttcctttttccgatactcaaagggatggtcctccttgtactggaacttcatgatgcaccgcagggcttccgagatccccgcgcggggcctgcctccttcgccgctgaccctgtcccgctccctcagccgacgtcaaggtgtgctcagaatagctgcagaaacgtccgctccgggggcaacagcgctgggccgagtgtgcagggggggttcggggcggggatctcgggtgagcctgcctggaggtagaggagagccagatggagaaataccggcggcttttcgctagagctgggagcac

SEQ ID NO: 74787 - DNA, 885 bp, Homo Sapiens
  misc_feature (121)..(137): n is a, c, g, or t
ttttttaaataaggggcaagtttccaaagatcagtgtggagtgctacagaaataattataggagaggaaatcataatcacagaaggtataatgcttgtttgaggctccggaataagaactnnnnnnnnnnnnnnnnncactggtttcatgcttacggggtacacactttggtgcatcccgtgaacacaaattttaataccaaacaatccttgatgcttcacctggggctgccaagcagtttgtaaaacagaggaaaacatttagtgcagtctgtattatccttttccaacttttctgtttgtgcaagtttttgaagattcattggccaaacaatgaacaacaaaggttttctgagagaagacaaggtggacttttcattttgttagtaaataccagtggcactgttgaacgaaacaaatacttttatctcagtctttcaaatcagtattaatgtctgtgtttccttccactgacagctcttcttctagtttcactgaaaaaagggtgttagtatttttatcttggacactctcttccaaatccttcagcagctcctcttctttatattctgccacatcgacctctaaaccggaattgtccttcagtttgccgtggtgcttgagatagtaccgctggttctgaaagaacttgatgatggtgtacttgggaaggtcgagctgggcagacagagtctggatggcctcttcgtcagggtacaggcccacgtcttgtatgaaactctggaggattcccaaggcttccactgaaatttttgttcgtggccgggtcttctgtcggttttcctcatctgactctgctggagaggccaccgtgggttgccgtggggggagccgagggcctgtactgtggctgccctcatgccgc

SEQ ID NO: 74788 - DNA, 1154 bp, Homo Sapiens
  misc_feature (609)..(640): n is a, c, g, or t
  misc_feature (642)..(653): n is a, c, g, or t
  misc_feature (655)..(655): n is a, c, g, or t
  misc_feature (657)..(658): n is a, c, g, or t
  misc_feature (661)..(663): n is a, c, g, or t
  misc_feature (665)..(666): n is a, c, g, or t
  misc_feature (668)..(668): n is a, c, g, or t
  misc_feature (670)..(672): n is a, c, g, or t
  misc_feature (676)..(679): n is a, c, g, or t
  misc_feature (684)..(684): n is a, c, g, or t
  misc_feature (728)..(736): n is a, c, g, or t
  misc_feature (950)..(962): n is a, c, g, or t
  misc_feature (1041)..(1041): n is a, c, g, or t
acgttgcaagctgcccgcaatacgtcatggcgaccaaacgccttttcggggctacccggacgtgggccggctggggggcctgggagctcctaaaccccgccacttccggaagactcctggcccgggattatgccaagaaaccagttatgaagggggccaaatcgggaaaaggtgcagtgaccagcgaggccctcaaggaccccgacgtatgcacagatcctgtccagctcaccacatatgccatgggcgtcaacatctacaaggaagggcaggatgtacccctgaaaccggatgctgagtaccctgaatggctgtttgagatgaacttgggtcccccaaagaccctggaggagctggaccccgagagccgggagtactggcggcggctgcggaaacagaacatctggcgccacaaccggctgagcaagaacaagaggttgtagcatggagggcccggcatcgctgacccccacgccgagggcttgccgttttcccggaggacgtggacttttgtgagacaagaggcggctccccagcctgggtttccatgtgaccccacagtggggctggaccagggccctggaggccaataaagagctttctgggtannnnnnnnnnnnnnnnnnnnnnnnnnnnnnnngnnnnnnnnnnnnanannatnnntnnangnnnccannnntaaanggtccccaggtttccaaggaccacgggggcccctaataaaggtnnnnnnnnncccctctttaaattgccccccgggggtgcccacaaattcgtggggcgcccaaaactttttattttggagaaagggttccccaaaggaagcctcttttttttaaaaaagtggcaagacattggggaccttttttttcctcgggccgttatttaggagaaaacaagcgccacaattttcgtgtcttttttgtgggaggaacaccatattttttcannnnnnnnnnnnnaaatttgtgtggacactcctcacacccctaaataattttcttgcaccgcgggccgggagaaaataaaaattcttttctntcaagggaggtattgggggtaataaaacacagctccgttactagttttggcatcttaccacaaaaaaactctgtcttttttattacagtggacctctttaaaaaaatcctata

SEQ ID NO: 74789 - DNA, 1859 bp, Homo Sapiens
  misc_feature (719)..(729): n is a, c, g, or t
gttccaaaagtggattttcctgaatattaatccagccccctacccttgttagttattcagggagacagtctcaagcactaaaaagtggctaattcaatttatggggtatagtggccaaatagcacatcctcccaacgttaaaagacagtggatcatgaaaagtgctgttttgtcctttgagaaagaaataattgtttgagcgcagagtaaaataaggctccttcatgtggcgtattgggccatagcctataattggttagaacctcctattttaattggaattctggatctttcggactgaggccttctcaaactttactctaagtctccaagaatacagaaaatgcttttccgcggcacgaatcagactcatctacacagcagtatgaatgatgttttagaatgattccctcttgctattggaatgtggtccagacgtcaaccaggaacatgtaacttggagagggacgaagaaagggtctgataaacacagaggttttaaacagtccctaccattggcctgcatcatgacaaagttacaaattcaaggagatataaaatctagatcaattaattcttaataggctttatcgtttattgcttaatccctctctcccccttcttttttgtctcaagattatattataataatgttctctgggtaggtgttgaaaatgagcctgtaatcctcagctgacacataatttgaatggtgcagnnnnnnnnnnngaaaccgtaattttattattagattctccaaatggattttcatcaatttaaaatcattcaatatctgacagttactcttcagtttaaggcttacctgggtcatgcttcagtggtacttccagtgcgtctctttggttcctggcttggacatgaaaagataggtttgagttcaaatttggcattgtgtgagcttctacagattttagacaaggaccgtttttactaagtaaaagggtggagaggttcctggggtggattcctaagcagtgcttgtaaaccatcgcgtgcaatgagccagatggagtaccatgagggttgctattggtggtttttaacaactaatcaagagtgagtgaacaactatttataaactagatctcctatttttcagaatgctcttctacgtataaatatgaaatgataaagatgtcaaatatctcagaggctatagctgggaacccgactgtgaaagtatgtgatatctgaacacatactagaaagctctgcatgtgtgttgtccttcagcataattcggaagggaaaacagtcgatcaagggatgtattggaacatgtcggagtagaaattgttcctgatgtgccagaacttcgaccctttctctgagagagatgatcgtgcctataaatagtaggaccaatgttgtgattaacatcatcaggcttggaatgaattctctctaaaaataaaatgatgtatgatttgttgttggcatcccctttattaattcattaaatttctggatttgggttgtgacccagggtgcattaacttaaaagattcactaaagcagcacatagcactgggaactctggctccgaaaaactttgttatatatatcaaggatgttctggctttacattttatttattagctgtaaatacatgtgtggatgtgtaaatggagcttgtacatattggaaaggtcattgtggctatctgcatttataaatgtgtggtgctaactgtatgtgtctttatcagtgatggtctcacagagccaactcactcttatgaaatgggctttaacaaaacaagaaagaaacgtacttaactgtgtgaagaaatggaatcagcttttaataaaattgacaacattttattaccacaaaaa

SEQ ID NO: 74790 - DNA, 2042 bp, Homo Sapiens
  misc_feature (1614)..(1625): n is a, c, g, or t
cacacttgtaataaactgaaaaaatatttcaattaaaacaaccatatgccacaaaaagccactcccatcatccacaatactaaagtccttatacaacactagataaatttttatataaaacagtagaaactagcataccattaattagaaacctcaaaatattcagaaaacagtatcaagtactcaagagaaagctcaagaagccaaaacctcaagaatccatacatcctggttgttaccctaaattgtaattaactacccacacatttaatcataatcaactttttcaaagatatacaaatcaatgcatctatttaaaaggactactctttatagttcagaactttacattaacttttatattctactcagcagggtgtctgtctgtactccaaattagctctcatgttccaggaaataaatacaaactcatatgccttgtgatcactgatggcctgcttatgtaattctagtccactaaatgttaattccatagaatatgctcttgattatgtaaaaactctaatttcttgatgaaatactgtaattctccaaaggttacaattttgtaaagatatgcaataactgagtatcactcccatgaaagacaaaaaaagtataattttgttccaagattaacttagtctcatgtatctctattaagtctttcaaggattccagagaatcttttcatatctccatttctggaaagtgaaatcagtatagaagtaatttgggaaacttgaaaatggcattcatttttttcagcagatgccaaatttttgaccgacatgggtctcacaattactttgttaccaacagtcccagtcagttaacaggttgtaggaaaagattcgtttttgcagacactgctaagctgttcaaagagaagagagagagattaatttagtgacttataaaatgcacacaatatttcaaaatattttgaacacttcttgttggacttatatccagacgctgtcactacacttttaacaaaagtggactttttaagataagtctgctcaaagaagtgcagaaacagtaagtcaatatgatagaaatagtaggtcaaaatatgatgtgttagttcaattaatgtatgaactcctgccaccatcaaaagacaaatattaaaaagctacatctttagtctagttctgtattttaccagaggcacatttagaagaaaaacaaaagggtcacccaaatactaaattgttttcaaccattacagtaaatagagccaaacctagaaatttcaaaaacaatccattttatattccagaaatctcctttatccatgtgctaatcatccagaacacaattttctaaaaatagtaagacaacagtttcacattaatcataacttttttaattaacaagtagtgaatcggacactttaagatattgtttactacatactgaaataaacagatctgtttaaattcagaaacccaaacatttacagtaaaatgtgcttacacataaatatgaccaaatttatttaaagcccctattagatagatcctaagtacatgcaattaccatgtaaaaacaagaccatgaagttgatgtaaaaaatgacaaaatcactaagtcaccaaaactagnnnnnnnnnnnntgaaatggaaactgagaaaagacagttaataaaacataaggaacctaacaaagcagctttaaaaataggccatactaatccttccattttcaaaagttcttatcaagtaattccaaaaactgccatttataaaatgacattctaaaaatctacacttggaatttcaaagtatctcaattcagaaagctttgactactgtttctccccagcccacaatttcaaataatgcaggaaaagtattgacgtaaggaagaaaatactccaacagaatgttatagtttttagaaaaatgaacttactgctttccagaaccttttaagacccacagtcagcattaacaatcatttttcctattttcatccattattttccaatatcatgttagagatgaataaattctctgagcccataaataaa

SEQ ID NO: 74791 - DNA, 986 bp, Homo Sapiens
  misc_feature (56)..(559): n is a, c, g, or t
  misc_feature (743)..(743): n is a, c, g, or t
cgaggagctcccaggggaaacgcttgtacttataagtctgtcgggtttcccactcnnnnnnnnnnnnnnnnnnnnnnnnnnnnnnnnnnnnnnnnnnnnnnnnnnnnnnnnnnnnnnnnnnnnnnnnnnnnnnnnnnnnnnnnnnnnnnnnnnnnnnnnnnnnnnnnnnnnnnnnnnnnnnnnnnnnnnnnnnnnnnnnnnnnnnnnnnnnnnnnnnnnnnnnnnnnnnnnnnnnnnnnnnnnnnnnnnnnnnnnnnnnnnnnnnnnnnnnnnnnnnnnnnnnnnnnnnnnnnnnnnnnnnnnnnnnnnnnnnnnnnnnnnnnnnnnnnnnnnnnnnnnnnnnnnnnnnnnnnnnnnnnnnnnnnnnnnnnnnnnnnnnnnnnnnnnnnnnnnnnnnnnnnnnnnnnnnnnnnnnnnnnnnnnnnnnnnnnnnnnnnnnnnnnnnnnnnnnnnnnnnnnnnnnnnnnnnnnnnnnnnnnnnnnnnnnnnnnnnnnnnnnnnnnnnnnnnnnnnnnnnnnnnnnnnnnnnnnnnnnnnnnnnnnnnnnnnnnnnnnnnnnaagaattcggcacgaggaggctgtctggggtcttctgactgcaggggaaggatgtactttccaaacaaatgatacaaccctgaccaagctaaaagacgcttgttaaaggctattttctatatttattgttgggaaaagtcactttaaagacttgtgctatttggaagcaaagctattttttttngtcagtggaatgcagtttttttactattccatcatgaggaacaacatagattccatgatctttttaatgacagtacagactgagatttgaaggaaacatgcacaaatctgtaaaacatagaccttcgctttatttttgtaagtatcacctgccaccatgttttgtaatttgaggtcttgatttcaccattgtcggtgaagaaaattttcaataaatatgtattacccgtctgaagcttaaaaa

SEQ ID NO: 74792 - DNA, 629 bp, Homo Sapiens
ctcctgtccacccacaagacctgggctgtggtgtgtggtcttggcctgtgttctctgcagctggggtccaccttcccaagcctccagagagttctccctccacgattgtgaaaacaaatgaaaacaaaattagagcaaagctgacctggagccctcagggagcaaaacatcatctccacctgactcctagccactgctttctcctctgtgccatccactcccaccaccaggttgttttggcctgaggagcagccctgcctgctgctcttcccccaccatttggatcacaggaagtggaggagccagaggtgcctttgtggaggacagcagtggctgctgggagagggctgtggaggaaggagcttctcggagccccctctcagccttacctgggcccctcctctagagaagagctcaactctctcccaacctcaccatggaaagaaaataattatgaatgccactgaggcactgaggccctacctcatgccaaacaaagggttcaaggctgggtctagcgaggatgctgaaggaagggaggtatgagaccgtaggtcaaaagcaccatcctcgtactgttgtcactatgagcttaagaaatttgataccataaaatggtaaagacttga

SEQ ID NO: 74793 - DNA, 1289 bp, Homo Sapiens
tgctctggccagctgagtgatctcacatttcctcatataaacccagaccatcagtcttgagtgtggaaggccctactgccatcattttacagatgagaaaactggggcttagagaggatgtacttacccaagtgcaacagatgtacttacccaagctaagctgtgacagatagagatgtcaaaccagattgtcttcaggtcttctttttacctcagcatacatagctgtctgtcattactacctcccagctctgggtgactcggatttcccctcatccaggaataagaaaggggtgctgggtttaggggaccaggtcagagatcttaaggagtctgtgaaaagctgaaaagcagtagtaaggataaagccaccatctccttgccctcttctgctgcctctgaacaggaagtcttggccaaaaaggttctcacttctccctgtttctcctggcctcaccccctccctccactgccccaggatggatcacagtgactcccagtggttggcagacacttggcgttccacctctggctctcgggacctgagcagcagcaagcagctcagcagtcggctgggggcggatgcacgggacccactagactgtcgtcgatccttgctctcctgggactcccgaagccccggcgtgcccatgcttccagacaccagcactttttatggctccctcatcgctgagctgccctccagtaccccagccaggccaagtccccaggtcccagctgtcaggcgcctcccaccccagctggcccagctctccagcccctgttccagctcagacagcctctgcagccgcaggggactctcttctccccgcttgtctctggcccctgcagaggcttggaaggccaaaaagaagcaggagctgcagcatgccaacagttccccactgctccggggcagccactccttggagctccgggcctgtgagttaggaaatagaggttccaagaacctttcccaaagcccaggagctgtgccccaagctctggttgcctggcgggccctgggaccgaaactcctcagctcctcaaatgagctggttactcgtcatctccctccagcacccctctttcctcatgaaactcccccaactcagagtcaacagacccagcctccggtggcaccacaggctccctcctccatcctgctgccagcagcccccatcctgctgaaggaagggaggtatgagaccgtaggtcaaaagcaccatcctcgtactgttgtcactatgagcttaagaaatttgataccataaaatggtaaagacttg

SEQ ID NO: 74794 - DNA, 855 bp, Homo Sapiens
  misc_feature (276)..(276): n is a, c, g, or t
gttccaagaacctttcccaaagcccaggagctgtgccccaagctctggttgcctggcgggccctgggaccgaaactcctcagctcctcaaatgagctggttactcgtcatctccctccagcacccctctttcctcatgaaactcccccaactcagagtcaacagacccagcctccggtggcaccacaggctccctcctccatcctgctgccagcagcccccatccccatccttagcccctgcagtccccctagcccccaggcctcttccctctctngccccagcccagcttccagtcgcctgtccagctcctcactgtcatccctgggggaggatcaagacagcgtgctgacccctgaggaggtagccctgtgcttggaactcagtgagggtgaggagactcccaggaacagcgtctctcccatgccaagggctcccttcaccccccaccacctatgggtacatcagcgtcccaacagcctcagagttcacggacatgggcaggactggaagaagggtggggcccaaggggggagtcttgctgtgcccacctcggccctgcctcacccccacccccagcgagggctccttagccaatggttggggctcagcctctgaggacaatgccgccagcgccagagccagccttgtcagctcctccgatggctccttcctcgctgatgctcactttgcccgggccctggcagtggctgtggatagctttggtttcggtctagagcccagggaggcagactgcgtcttcataggtatgtgaggtctccccatcttactcctcactcatgccccttgcctttctaacaactgttatcatgtcatcattgttaaaacaactagt

SEQ ID NO: 74795 - DNA, 520 bp, Homo Sapiens
gcacgaggctcggccagccctgcctgcccaccaggaggatgaaggtctccgtggctgccctctcctgcctcatgcttgttgctgtccttggatcccaggcccagttcacaaatgatgcagagacagagttaatgatgtcaaagcttccactggaaaatccagtagttctgaacagctttcactttgctgctgactgctgcacctcctacatctcacaaagcatcccgtgttcactcatgaaaagttattttgaaacgagcagcgagtgctccaagccaggtgtcatattcctcaccaagaaggggcggcaagtctgtgccaaacccagtggtccgggagttcaggattgcatgaaaaagctgaagccctactcaatataataataaagagacaaaagaggccagccacccacctccaacacctcctgtgagtttcttggtctgaaatacttaaaaaatatatatattgttgtgtctggtaatgaaagtaatgcatctaataaagagtattcaattttttt

SEQ ID NO: 74796 - DNA, 1728 bp, Homo Sapiens
  misc_feature (1444)..(1484): n is a, c, g, or t
  misc_feature (1595)..(1595): n is a, c, g, or t
  misc_feature (1683)..(1683): n is a, c, g, or t
cgggcatcagcggggggcctggccatcccccagtcctcctcctcctcctcccggcctcccacccgagcccgaggtgcccccagccctggagtgctgggaccccacgcctcagagccccagctggcccctccagcctgcacccccgccgcccctgctgttcctgggccccctggcccccgctcaccacagcgggagccacagcgagtatcccatgagcagttccgggctgccctgcagctggtggtggacccaggcgacccccgctcctacctggacaacttcatcaagattggcgagggctccacgggcatcgtgtgcatcgccaccgtgcgcagctcgggcaagctggtggccgtcaagaagatggacctgcgcaagcagcagaggcgcgagctgctcttcaacgaggtggtaatcatgagggactaccagcacgagaatgtggtggagatgtacaacagctacctggtgggggacgagctctgggtggtcatggagttcctggaaggaggcgccctcaccgacatcgtcacccacaccaggatgaacgaggagcagatcgcggccgtgtgccttgcagtgctgcaggccctgtcggtgctccacgcccagggcgtcatccaccgggacatcaagagcgactcgatcctgctgacccatgatggcagggtgaagctgtcagactttgggttctgcgcccaggtgagcaaggaagtgccccgaaggaagtcgctggtcggcacgccctactggatggcccccagagctcatctcccgccttccctacgggccagaggtagacatctggtcgctggggataatggtgattgagatggtggacggagagcccccctacttcaacgagccacccctcaaagccatgaagatgattcgggacaacctgccaccccgactgaagaacctgcacaaggtgtcgccatccctgaagggcttcctggaccgcctgctggtgcgagaccctgcccagcgggccacggcagccgagctgctgaagcacccattcctggccaaggcagggccgcctgccagcatcgtgcccctcatgcgccagaaccgcaccagatgaggcccagcgcccttccgctcaggcgaagagccgccgcgggtcaccccagccccactgaggccagtagggggccaggcctcccactcctcccagcccgggagatgctccgcgtggcaccaccctccttgctgggggtagatgagaccctactactgaactccagttttgatctcgtgacttttagaaaaacacagggactcgtgggagcaagcgaggctcccaggacccccaccctctgggacaggccctcccccatgttcttctgtctccaggaagggcagcggccctcccatcactggaagtctgcaagtgggggtcgctgggggtggagagaacactaagaggtgaacatgtatnnnnnnnnnnnnnnnnnnnnnnnnnnnnnnnnnnnnnnnnncaaaggtccagccaccccgtcctccagcccgcaaggggtgtctggcgccttgcctgacacccagccccctctccccctgagcccattgtgggggtcgatcatgaatgtccngaagagtggcccttttccccgtagcccctggcgccccccttttctgttgggctgggatggggggagacagggttcaaggggccccccnccacccctccttccaggcccccctggcagccaaaaatggacctac

SEQ ID NO: 74797 - DNA, 564 bp, Homo Sapiens
  misc_feature (88)..(126): n is a, c, g, or t
aggaagggcagcggccctcccatcactggaagtctgcagtgggggtcgctgggggtggagagaacactaagaggtgaacatgtatgannnnnnnnnnnnnnnnnnnnnnnnnnnnnnnnnnnnnnncaaaggtccagccaccccgtcctacagcccgcaaggtggtgtctggcgcatttgcctgacacaccagccccctctccccctgagccattgtgggggtcgatcatgaatgtccgaagagtggccttttcccgtagccctgcgccccctttctgtggctggatggggagacaggtcagggccccccaccctctccagcccctgcagcaaatgactactgcacctggacagcctcctcttttctagaagtctatttatattgtcattttataacactctagcccctgcccttattgggggacagatggtccctgtcctgcggggtggccctggcagaaccactgcctgaagaaccaggttcctgcccggtcagcgcagccccagcccgcccacccctgcctcgagttagttttacaattaaaacattgtcttgttttgaaa

SEQ ID NO: 74798 - DNA, 557 bp, Homo Sapiens
gaaggacaggagacactcacaggaggccctggagacagatgtgcctcacaggcattcctgaggacctgtggcctggcagcacagagactgggtgaaaacagaaccttgtgatctgcaagttctgccgctgccctgtctgtgtctgtgaagcaaagtgtccagaaggggcccgcgtggaagcttctgagagcggttaggggaacggggccccacgtcctccccggagggctggagacagaggcaggccgtgcccccagcccagagtagggaggaggctggcaggcggcagctgtggaaaggaggcggagcccccagactcctgagccagcagaggaaggagtgggacagagcccaccccagagggagacaagaccccggggaagagacccctcagggtggccccccagcccctcccaggctcagctttcagcctgcacccccgtctggtccctcagaatgactgaggtttccactctttttctgccaaatctctagactccacgtccccgctctgccacctactctctgtgggatctgaataaagagacttaacatta

SEQ ID NO: 74799 - DNA, 2168 bp, Homo Sapiens
ggtccggaattctccgggatcagtcaccttccctggaaattctgctgtccagctgctccctgtgccgtgcctgtgattcgctggtgtatgatgaggaaatcatggctggctgggcacctgatgactctaacctcaacacaacctgccccttctgcgcctgcccctttgtgcccctgctcagtgtccagacccttgattcccggcccagtgtccccagccccaaatctgctggtgccagtggcagcaaagatgctcctgtccctggtggtcctggccctgtgctcagtgaccgaaggctctgccttgctctggatgagccccagctctgcaacgggcacatgggggtaagggctgggccaaaggggcatgaggaacgggaatgttgccctgtgtggggcctgtggggtgccagggagagatgggcacatctcttgcccttgagggcaaggggcatcccaaaagctgttggatgtggtggctcagtgggaggcaaggctctggggatgtacatgccctctactgccctccccctttgtgcctgatagggagcctcccggcgggttgagagtggggcatgggcatacctgagccccctggtgctgcgtaaggagctggagtcgctggtagagaacgagggcagtgaggtgctggcgttgcctgaactgccctctgcccaccccatcatcttctggaaccttttgtggtatttccaacggctacgcctgcccagtattctaccaggcctggtgctggcctcctgtgatgggccttcgcactcccaggccccatctccttggctaacccctgatccagcctctgttcaggtacggctgctgtgggatgtactgacccctgaccccaatagctgcccacctctctatgtgctctggagggtccacagtgagtctggtatttggcctgggtggggaaggggtgggtcccatacccagagggctcagtgattctggtggccttctttcctttcatccaggccagatcccccagcgggtggtatggccaggccctgtacctgcatcccttagtttggcactgttggagtcagtgctgcgccatgttggactcaatgaagtgcacaaggctgtggggctcctgctggaaactctagggcccccacccactggcctgcacctgcagaggggaatctaccgtgagatattattcctgacaatggctgctctgggcaaggaccacgtggacatagtggccttcgataagaagtacaagtctgcctttaacaagctggccagcagcatgggcaaggaggagctgaggcaccggcgggcgcagatgcccactcccaaggccattgactgccgaaaatgttttggagcacctccagaatgctagagaccttaagcttccctctccagcctagggtggggaagtgaggaagaagggattctagagttaaactgcttccctgttgccttcatggagttgggaacaggctgggaaggatgcccagtcaaaggctccaagcgaggacaacaggaagagggatccactgttaccaaaagtcctgattcccccatcaccaacctacccagtttgttcgtgctgatgttgggggagatctggggggagttggtacagctctgttcttcccttgtcctataccgggaactcccctccagggtacccacagatctgcattgccctggtcattttagaagtttttgttttaaaaaacaactggaaagatgcagagctactgagcctttgccctgaatgggaggtagggatgtcattctccaccaataatggtccctcttccctgacgttgctgaaggagcccaaggctctccatgcctttctacctaagtgtttgtattttattttaaattatttattctggagccacagcccccttgcttatgaggttcttatggagagtgagaaagggaagggaaatagggcaccatggtccggtggtttgtagttccttcaaagtcaggcactgggagctagaggagtctcaagctccccttaggaagaactggtgccccctccagtcctaatttttcttgcctgccccgccttggggaatgcctcacccacccaggtcctgacctgtgcaataaggattgttccctgcgaagttttgttggatgtaaatatagtaaaagctgcttctgtctttttcaaaa

SEQ ID NO: 74800 - DNA, 671 bp, Homo Sapiens
  misc_feature (111)..(119): n is a, c, g, or t
  misc_feature (385)..(420): n is a, c, g, or t
tagccaacttacaaaatatcacccaggaaataaagtctcatcattctcattgactagacaataaaagaacaatgggccttgtaaggtgggaatgaggaaatggcacaattnnnnnnnnntgattggttaacatcagattacttcaggttacttttttgtaagggttaaagcagagggacttccttattatgctgactcaatcagattgaaatttcctgttttcaggggaaaaaaatggtctgcttgggatctgtctgtttccttaaagtttcagtatgattgtgtaacatttggcatgagtgactctattgtggtttaatctggtttgttggagtctagtgcgtgagctcactccaaaacaatgacctcccacaatttttgtttnnnnnnnnnnnnnnnnnnnnnnnnnnnnnnnnnnnnggtatatattcactttttttacccctattggttctctttctctggagaaccctgaataatatgccaactttcctctttcctctataatcaacttcaatgaatatttctgtacatgtatccttgtgctcatgtcaaaaaaagcatttatgattatccttatgagtaaaattgctgcttctaagggtctaaacatcattatgaaatattgtaatattgctctccaaataaatcataccaatttattgtcaaaa

SEQ ID NO: 74801 - DNA, 1595 bp, Homo Sapiens
  misc_feature (707)..(815): n is a, c, g, or t
  misc_feature (1125)..(1139): n is a, c, g, or t
  misc_feature (1576)..(1576): n is a, c, g, or t
gagagtccaaactcagggacccagcactgggctgggttgggagtagggtgtcccagtggggttggggtgagcaggctgctgggatcccatggcctgagcagagcatgtgggaactgttcagtggcctgtgaactgtcttccttgttctagccaggctgttcaagactgctctccatagcaaggttctagggctcttcgccttcagtgttgtggccctagctatgggcctaaattgggctctaggtctctgtccctggcgcttgaggctcagaagagcctctgtccagcccctcagtattaccatgtctccctctcaggggtagcagagacagggttgcttataggaagctggcaccactcagctcttcctgctactccagtttcctcagcctctgcaaggcactcagggtgggggacagcaggatcaagacaacccgttggagcccctgtgttccagaggacctgatgccaaggggtaatgggcccagcagtgcctctggagcccaggccccaacacagccccatggcctctgccagatggctttgaaaaaggtgatccaagcaggcccctttatctgtacatagtgactgagtggggggtgctggcaagtgtggcagctgcctctgggctgagcacagcttgacccctctagcccctgtaaatactggatcaatgaatgaataaaactctcctaagaatctcctgnnnnnnnnnnnnnnnnnnnnnnnnnnnnnnnnnnnnnnnnnnnnnnnnnnnnnnnnnnnnnnnnnnnnnnnnnnnnnnnnnnnnnnnnnnnnnnnnnnnnnnnnnnnnncccttgtgccccgccctcgcccctaaaaaaactttttaaaaccattcctttgggcgcgaggccccccttggggccccgaaccccgcccacaaatttttttccccaaaacaaatacccggccctgaacttccccccttgggtttccccaacaaaagtaaaacgcccctctgcggacaaacgcaagccttccttaacacaaaaatccccggggggggttctctccgcgggggtcaataatatgggcgcccttccctgccaaaacaccgcgtccccccgttccggaaaattctctgatccgcccacatggttnnnnnnnnnnnnnnngctgctttggtatcatcgcccgcccccccgaagaaaacccatgggtggggagaatacagctacgttatagcacgttattcttgttcgacgcgaaatactgccgccgcgctgctctctttaacaacaacccgccgttatccgcggcgagagaacagcgtgttggagacctcccctccgaacgcgacctagtcaccgcacgccaccgcctgtggtatgcgcccctccgccaacacaccacaactagtattttgcccgcaagaggcgaggcgcacaaacaccgcgcggcggcgcagaaagacacaactgtctctccatattgtgtgccggcgccctcgtctccataaataaaataccctcaggcggcacatagacaccacacccatagcgccgcctatgtccggctccaaccccacaaaaagtgaggcccgcctggctcnacaaagcgtgctttggggg

SEQ ID NO: 74802 - DNA, 661 bp, Homo Sapiens
tccaggctcaatgacgggagatcggcagagggcaatagcggttcacgtacactgccgtgaggattggctgcacgaaacataccggtaagtggggcaagactgttatcgagtaccggtcacagaagacctcacgcctccccatcattgacattgcacccatggacataggagggcccgagcaggaattcggtgtggacatagggccggtctgcttcttgtaaaaacctgaacccagaaacaacacaatccgttgcaaacccaaaggacccaagtactttccaatctcagtcactctaggactctgcactgaatggctgacctgacctgatgtccattcatcccaccctctcacagttcggacttttctcccctctctttctaagagacctgaactgggcagactgcaaaataaaatctcggtgttctatttatttattgtcttcctgtaagaccttcgggtcaaggcagaggcaggaaactaactggtgtgagtcaaatgccccctgagtgactgcccccagcccaggccagaagacctcccttcaggtgccgggcgcaggaactgtgtgtgtcctacacaatggtgctattctgtgtcaaacacctctgtattttttaaaacatcaattgatattaaaaatgaaaagattattggaaagta

SEQ ID NO: 74803 - DNA, 998 bp, Homo Sapiens
  misc_feature (57)..(193): n is a, c, g, or t
gcgccctggcacgcataggcgcgggagaggcacgagcagggattgagcacctactgnnnnnnnnnnnnnnnnnnnnnnnnnnnnnnnnnnnnnnnnnnnnnnnnnnnnnnnnnnnnnnnnnnnnnnnnnnnnnnnnnnnnnnnnnnnnnnnnnnnnnnnnnnnnnnnnnnnnnnnnnnnnnnnnnnnnnnnnnggtctgcgtgacaccctaaagcagtgttcagttacccccggggaagaagcgcgaatgaacttgaaccacttgttggctggttcctgctcttgctcgttttttgcggatcgacacatagtgggcgctcaggaaaataaatgttggaagcttgagattgaacttgacagctcgaccctaggtacccgccacgaatccagcccagcccgcggggcaccgggtttctccagacctcgcagggaacatttgcggatgggctggtagaggaggctcggacatcccagttccgcacccgcactcgaccaacgcgtggtagcggaacccctgtcgtagcgaggcacagactgggttcaagtcccgactctgccgatttcagcctgagtgactttgagcgagtcactttttcccgtcgaaacctcagttgctccatccacaaaatgggaaatatgaacagccaccctaaaacggtgtggggaggattaaacgaaacaacgttcccaaaactctaaacttacaaatgttgtctcccgtccatcccataaacttaggcgacaaacctggcgcagggtgacctgagacaaaggcttcccggcccctgtctccaagtcgtccatccctggggcgtaggcacgttttagtgagccctgtccggcgaaacccgaaactgcggccaccttggcagcggtgggccccaaaaggaaatattcaaatattctgaaactcgtgcatgatttaggactgacatttttacgtttaattttcttgcagttttattcttgctagtaaaggtaattcgttagaaaccctt

SEQ ID NO: 74804 - DNA, 853 bp, Homo Sapiens
tttgctccggagcgtccagagtcctggccctgagcgggaatcgcagtggccgaggctgagcggcaggcggatcgccccgaccctcactcctggcgtctgagtctctggcgtagcccatgctgagtgggcggctggtcctgggtctggtctccatggctggccgcgtttgtttgtgccagggcagcgcgggatccggggccatcggtccggtggaggccgccattcgcacgaagttggaggaggccctgagccccgaggtgctagagcttcgcaacgagagcggtggccacgcggtcccgcctggcagtgagactcacttccgcgtggctgtggtgagctctcgtttcgagggactgagccccctacaacgacaccggctggtccacgcagcgctggccgaggagctgggaggtccggtccatgcgctggccatccaggcacggacccccgcccagtggagagagaactctcagctggacactagccccccatgcctgggtgggaacaagaaaactctaggaaccccctgaaccccaagagagggaggaccaggatccgaatgggctgggtgagcacgaattaccgaggccttccctttgatacagtccaggatttgtaagggatgaagacccctgggccccattctgttggggtccatacatactctccgaagatagcaacttgcttcaggtcaaagtgaacccgagaaaagagaagaatcactcactactgctcttgccctggactattcaggaagggcagcccggatgttccatgttaaatcgtgacagaattgcaccagacctgatgagttggaaacaatcctatacattaaaagaaattacactatgaa

SEQ ID NO: 74805 - DNA, 646 bp, Homo Sapiens
  misc_feature (33)..(33): n is a, c, g, or t
  misc_feature (580)..(590): n is a, c, g, or t
agagttcatcagacaagagatcattaaaatgtntgatgagagaatggcttactacacctccaggatgcagttccccatggagatggcggcagctccgagacgaacagggcctccagggaaggatggtgctccgggcaggccaggtgctccagggtcacctgggctccctggtcagattggcagagaaggacggcagggcttgccaggagtaagaggattgcctggtaccaaaggtgaaaaaggggacattggtattggcattgcaggagaaaatggtcttcccggccccccaggtcctcaaggtcctccaggctatggcaagatgggtgcaacaggaccaatgggccagcaaggcatccctggcatccctgggcccccgggtcccatgggccagccaggcaaggctggccactgtaatccctctgactgctttggggccatgccgatggagcagcagtacccacccatgaaaaccatgaaggggccttttggctgaaattccccacctgcctttggatgaaagactccgttgggaataaatggccaaagcttataggactctgtgacaggttgtgaatgnnnnnnnnnnngttgttgttgtttttaattgctgttaatattttttaaataataaagaaacaaaact

SEQ ID NO: 74806 - DNA, 1490 bp, Homo Sapiens
aaggcaaggtacgaggcgggtgggaatcggcacgaggggtcacttccaggcctcggaagtccagcagctgctacacaacaagttcgtggtcatcttgggggactccattcagagggctgtgtacaaggacctggtgctcttgctccagaaagactcactgctcacagctgcccagctgaaagccaagggggagctgagctttgaacaggaccagctggtggctgggggccagctgggcgagctgcacaacgggacacagtatcgtgaggtccgccagttctgctcgggctctggccaccaccttgtgcgcttctacttcctcactcgtgtttactccgagtaccttgaggatgttctggaagagctgacatatggacctgccccggacctggtgatcatcaactcctgcctctgggatctctccagatatggtcgctgctcaatggagagctaccgggagaacctggagcgggtgtttgtgcgcatggaccaagtattgccagactcctgcctgctggtgtggaacatggcgatgcccctcggggaacgtatcactgggggtttcctcctgccagagactccagcccctggcaggctccctgcggcgggatgtggttgaagggaacttctacagtgctacgctggccggggaccactgctttgatgtcctagacctccactttcacttccggcatgcagtacagcaccgtcatcgggatggtgtccactgggaccagcatgcacaccgccacctctcacacctgcttctgacccatgtggctgacgcctggggcgtggagctgcccaagcgtggctatccccctgacccgtggattgaggactgggcagagatgaatcatccattcccagggaagccataggcagaacccagacttcggggagcacctggccttgctcccaccccccaccttcttctttgcctcctcccatgccttttccctacccgcttcctcagccctcgccacctcccctcttcccacccctgccccaggataccccttttttcccaggccagcccttcccaccccatgaattcttcaactataatccagtggaggacttctcgatgccaccccacttaggatgtggccctggagtgaactttgtgcctggccctctgccacctccaatccctggccctaatccccatggtcagcactggggcccagtggtccaccgggggatgccacgctatgttcctaacagcccctaccatgtgcggagaatgggggggccctgcaggcagcggctcagacactcagagagactgatccacacatacaaactggacagacggcctcctgcccattcggggacatggcctgggtagactggatcttgggctgggactggatgtgccaatggcccttcagggcctgcctggcacctcaggtactgggctagggtgtctgctatgcctggtattgttcttgtccattgctgtcaccaataaaggcatggaagaacag

SEQ ID NO: 74807 - DNA, 1411 bp, Homo Sapiens
cggccatcaccactgtgggcatgcctcacttggctgccgccccgagaccccagcccgtacctgggcttcgcgcccgccaagtgggcccagccctggctcctgcgccctgtggcggccacctccatcgccttgctttcccttcgggcactgggggtcgctcagggcgagacatgggtgaacggaagtggaagctgtgagcgtcgcagcccgaggcgccgaggcctgaggcgccgtcggggccaccgcgacgctcgcatggagagcgctgggcgctgggctgtgcaccgacggctaacctggacccacggtctctgcggggcgggagctttgcagaaccgactggccgactggggcgcgggaacatgaggcttggctaggagcccgctgcgggccaggcgcgcggtgcgcaggcatacccgggtcgcgggtgaacaccgcggagccccgggacttgcctgtcgttgctggtggcggcatggtcttctgtctgtcgagcgaggagccgcgccgcccgctgcgaagcgacatggtccacttccaggcctcggaagtccagcagctgctacacaacaagttcgtggtcatcttgggggactccattcagagggctgtgtacaaggacctggtgctcttgctccagaaagactcactgctcacagctgcccagctgaaagccaagtaccttgaggatgttctggaagagctgacatatggacctgccccggacctggtgatcatcaactcctgcctctgggatctctccagatatggtcgctgctcaatggagagctaccgggagaacctggagcgggtgtttgtgcgcatggaccaagtattgccagactcctgcctgctggtgtggaacatggcgatgcccctcggggaacgtatcactggggggtttcctcctgccagagctccagcccctggcaggctccctgcgggcgggatgtggttgaaagggaacttctacaagtgctacgctgggccggggaacacgtgctttgatggtcctagaactccactttcacttccggcatgcagtacagcaccgtcatcgggatggtgtccactgggaccagcatgcacaccgcacctctcacacctgcttctgacccatgtggctgacgcctggggcgtggagctgcccaagcgtggctatccccctgacccgtggattgaggactgggcagagatgaatcatccattccagggaagccataggcagacccagacttcggggagcacctggctggtcccaaaccacaacttctttcttttgcctcctcccatgccttttccctacccgcttccctcagcctcgccactccccttctttccccaccactgacccaaggattacccttttttccagggcaagccttcacaccccatgaaattcttcaatata

SEQ ID NO: 74808 - DNA, 510 bp, Homo Sapiens
  misc_feature (259)..(298): n is a, c, g, or t
tgccaatgtaataaatgtacttcctggaagtgtctttcggatccactatatgcctcagcacatggaaccttaatgaccaaagtgaagagcagattattcatacggtgtaataagcatctggaatggacccatccgtgtacttcattcaaatgtgtaaatgtcatattcattcagatttataaagctagtagtgtatagtcagaaacagaatcaaagttagatatacatttttaaatatttactgcatatgaggctttcnnnnnnnnnnnnnnnnnnnnnnnnnnnnnnnnnnnnnnnnctagggaataatattgattgtatgtctactgtgctgcattaagaaaataaaatttctatataccaaaaatgtgaagttataccaaataaagtttctaagtgattaatgcatacgaacagctacatatacatatatctaaacctgaaaaatgaattgatattctgagtgaaaactacctaatataaataaaattagtgaaaagaaaacaaaaa

SEQ ID NO: 74809 - DNA, 947 bp, Homo Sapiens
gcggccgccgcgctccgaggtccccgggcctctgtctcccgggcgtcctccagcagcgggccttcggggccggtagccggctggagtacggggccttcgggagccgcgcgccttctccggcgtccgggtcgagcgcagatccctgtttattgggaaggatatgttcgattcttaaatacgccatctgacaaatcagaagatggaaggctaatttatactggcaatatggcccgagcagtgtttggtgtgaaatgtttctcttattctacgagtctgattggccttacatttctgccatacatttttacacaaaataatgctatttctgaaagtgtgcctctgcctattcaaatcatattctatggcatcatgggaagctttacggtgatcaccccagtgctgcttcactttattacaaaaggctatgtcattcgattgtaccatgaggccacaacagacacttataaagccattacctacaatgctatgcttgcagaaacgagtacagtgtttcaccagaatgatgtgaagattccagatgctaaacatgtatttaccacattttatgctaaaacaaaatcactgttagttaatccagtgctctttccaaaccgtgaagactatatccatctaatgggttatgacaaagaagaatttattttgtatatggaagaaaccagtgaagagaaacggcataaagatgacaaatgagcctatttgttagtgttcgtgcttaaatgtgatttacgttttaatgtataataataaaattgccttttgcattccgttagtgactgattgttaaaaataatttgaaattatcaaagcttttaatttccagagaatgatgtttgtttataataaaacaagctatgtttgaaaaccaaaatgtagtatctaccattcgtgttttagaaaggtatgtgaataaatatgttcatgctagt

SEQ ID NO: 74810 - DNA, 691 bp, Homo Sapiens
  misc_feature (245)..(294): n is a, c, g, or t
tgcggccgccgcgctccgaggtccccgggcctctgtctcccgggcgtcctccaccagcgggccttcggggccggtagccggctggagtacagggccttcgggagccgcgcgccttctccggcgtccgggtcgagcgcagatccctgtttattgggaaggatatgttcgattcttaaatacgccatctgacaaatcagaagatggaaggctaatttatactggcaatatggcccgagcagtgtttnnnnnnnnnnnnnnnnnnnnnnnnnnnnnnnnnnnnnnnnnnnnnnnnnntgttcaagcgattctcctggctcagcctcctgctgggattacaggtgtgaaatgtttctcttattctacgagtctgattggccttacatttctgccatacatttttacacaaaataatgctatttctgaaagtgtgcctctgcctattcaaatcatattctatggcatcatgggaagctatacggtgatcaccccagtgctgcttcactttattacaaaaggctatgtcattcgattgtaccatgaggccacaacagacacttataaagccattacctacgatgctatgcttgcagaaacgagtacagtgtattacgagtatgatgtgaagattgcagatgcgtaaacatgatttatcacatggattgctgatacacagtcacggatagttgatgca

SEQ ID NO: 74811 - DNA, 1105 bp, Homo Sapiens
ggggaagtgcgcaggcgctggcaagatggcgggaggggtgcgcccgctgcggggcctccgcgccttgtgtcgcgtgctgctcttcctctcgcagttctgcattctgtcgggcggtgagcaatttcaggcgctggctcagtcaataaaggatccgggcccaacacgcacattcacagtagttcccagggcagcagaaagtactgaaatcccaccttatgtgatgaagtgtccgagcaatggtttgtgtagcaggcttcctgcagactgtatagactgcacaacaaatttctcctgtacctatgggaagcctgtcacttttgactgtgcagtgaaaccatctgttacctgtgttgatcaagacttcaaatcccaaaagaacttcatcattaacatgacttgcagattttgctggcagcttcctgaaacagattacgagtgtaccaactccaccagctgcatgacggtgtcctgtcctcggcagcgctaccctgccaactgcacggtgcggaaccacgtccactgcttgggtaaccgtacttttcccaaaatgctatattgcaattggactggaggctataagtggtctacggctctggctctaagtctgcaggcccaggtgggggcttcatggtcagctcactgttggacttcattgacatcacccctgaaaaaggtggatttttgaggagcgtgagaagaagagcatgagaagtgctgaattacactgtgttgttgcagatgagcgtccctaaccacagcagtccttgaagaagaaagatggtctgataggaactgcttattcaggaacacattgcaaaatctgtgggtgtccttcgggatctgagggcctcactcctacaactgcaaggaattgaattcttctaacagtgtgatgaggttggaagaagactccaagatccagaaaggaacacagtcccaccaacacctgtgttgtaacctggtgacaccctgaaacagagaatccagctaagcgatgcccaaaatattcatccacaacgtgttgttttaagcttccaagtttctagtaatttgttataaagcaatagaaaagtaatatatcctttccgaggctcatcttcattcc

SEQ ID NO: 74812 - DNA, 677 bp, Homo Sapiens
agttggctatgttggaccagcagatggctctttgtacatttagctgtggtgttgcttcagaaaggagcagggcttagaaaaagcccttttgtccgtaggagttgatgtggtgtgagtgatatatttctatgtttttaatgtacagcatctgtactttgtttgccttgataaaggtaagataaatgaaacgctgaactatgctaatctggaatttgtttttatttgcctgaaatatatttttttctgtgaaaaaattaaaacgtacttaagccaggagaatgaattatacagtgattgaaaatccatttaattcctatgacttttgttttgtattgcccaagtcaaactacatcacttgtatctccagcccaaatgtagtctgccttgaaaagtctttcagctgtgactgcaggaagtgggagtgtttttattgttagctaattgctgtgactgcaggaagtgggagtgtttctgttgttggctaattgaagttattaggctcagcttcagtcatgtgtaagttttgcagtgtaatacatatgtagtctggtctgtatatatgaaaatttgaattaaactgcagaatgtttatgtctagttatggtttaaattttcttagtagtatataaaaggtaagagtactgaaaaattaataaaattgcaagttaagaaataaa

SEQ ID NO: 74813 - DNA, 458 bp, Homo Sapiens
gggtaaaggtcaattactgtgtattatgctttatacttcaaatgtttttcttattttatcaaatattacatttaaaaagaactgcaattttctggatgctttactttagtacgttgagtttattgatgatgcttggcacatttaaagagctgctgataaatgtttctaattaagtaacttgactcgcaaatttctggttaaagtcccttcaataaacttggagaaaaacattttgttgacaaatgtccttgaactctgacctacccaagcagtggacgtggtcccgcaccgtgcagttggcagggtagcgctgccgaggacaggacaccgtcatgcagctggtggagttggtacactcgtaatctgtttcaggaagctgccagcaaaatctgcaagtcatgttaatgatgaagttcttttgggatttgaagtcttgatcctatgtagcaaatgacaca

SEQ ID NO: 74814 - DNA, 1009 bp, Homo Sapiens
  misc_feature (886)..(886): n is a, c, g, or t
  misc_feature (928)..(928): n is a, c, g, or t
  misc_feature (948)..(948): n is a, c, g, or t
gggtccggaattcccgggatcaagatggcgggaggggtgcgcccgctgaggggcctccgcgccttgtgtcgcgtgctgctcttcctctcgcagttctgcattctgtcgggcggtgaaagtactgaaatcccaccttatgtgatgaagtgtccgagcaatggtttgtgtagcaggcttcctgcagactgtatagactgcacaacaaatttctcctgtacctatgggaagcctgtcacttttgactgtgcagtgaaaccatctgttacctgtgttgatcaagacttcaaatcccaaaagaacttcatcattaacatgacttgcagattttgctggcagcttcctgaaacagattacgagtgtaccaactccaccagctgcatgacggtgtcctgtcctcggcagcgctaccctgccaactgcacggtgcgggaccacgtccactgcttgggtaaccgtacttttcccaaaatgctatattgcaattggactggaggctataagtggtctacggctctggctctaagcatcaccctcggtgggtttggagcagaccgtttctacctgggccagtggcgggaaggcctcggcaagctcttcagcttcggtggcctgggaatatggacgctgatagacgtcctgctcattggagttggctatgttggaccagcagatggctctttgtacatttagctgtggtgtgtgcttcagaaaggagcagggcttagaaaaagcccttttgtccgtaggagttgatgtggtgtgagtgatatatttctatgtttttaatgtacagcatctgtactttgtttgccttgataaaggtaagataaatgaaacgctgaactatgctaatctgggaatttgtttttatttgccctgaaatatnatttttttctgtgaaaaaaattaatacgtactttaagccagngagaaatgaattaatacagntggattgaaaaatccatttaaattcctatggaacttttgggttttggaattgggcccaagt

SEQ ID NO: 74815 - DNA, 1004 bp, Homo Sapiens
ttttggagatatgtttgtgagtgacagacgtttacgagagatgctccacccggcatgcccagtagagtgcatcccagagctggagccaccactacagtgcagagagcagcatccgccgtgcacgcggatggagtcagccagggcagccgctctgtgctcccagaagagtgagtggtgagcagagactggattggcgtccccaggaagctgtataagccaggtgctaaggagccccgctgcgtgtgtgtgagaaccaccggcccccctagtggccagatgccggacaaccctccacacagaaatcgtggggacctggaccacccaaacttggcagagtacacaggctgcccaccgctagccatcacatgctcctttccactctaagccgtagcctcttctgttaataacacacagagagctctgccaagcacctgagtaggcccttgacacttgtgtgccctgggatgcctcctggcgcgaatcaggaggttctggaaggactctggctatattctgcaaatgtggctcatgccccttaccgtggctcggcgttgtggtgcctgagggacagccggccacctgcccagtactggtcagcttttcaacactattccctttgacctactggccatcttcctcacagccctcagatatcaacgggcacaaataagaccaactcaatttccacttgaatttacaaccaaaagcctgctgagttgattacagctgggccaatacagtacgaggcaataacaaattagtgtgggttgattctggaattggaaaagcttttgcttgtatggatacagcaaatccagatgtctctgaacaaagcaacaatttaaagcaacgacattttctgtcctttaagcacttaaaatcaggtgtggtgtgttttcaaaggcagaagtctgcattttgagcaaaaggtggcttcccagctctaacaaggtaactggttagcatgacattaaagcttgggcaaggcttcaaacttaaaaaaa

SEQ ID NO: 74816 - DNA, 698 bp, Homo Sapiens
  misc_feature (535)..(543): n is a, c, g, or t
ataatgtggcaggagtcccagctgtttaatttctagtcacatttcccagaaagttgttctaagttgagattactgacaagatttctcaagggcaggaccagatatgtgagagacttctagttcagagctgacccctctaagcctctgacacttaaacacgagtcctgctgtccccagcacacaactgcactgaagccttgttcctctcggctggtgtagagctcatctgcatgttgtgtgcagataccagtagcctccctgcttgaacaggcctctcctaggctaggcaggtgttcagaggcatgaaggtctgggcaggggaagggcgtcttctgaaatgggagttaccaggtttttaaatgctgctattgttttatttaccatttaaggtcttttctattatatctgagtaactagtcagtttttcttacagtgctcatagcagttgtatttgaattgtattttcagtgaaatttgttttacattgccatttaaaattggcctttaacagcttcccaactggcttataagatannnnnnnnnaatgaaaacataacccatgaggctcagatgctgttgaagaaataaatggtatgttgctgctgacagtagtgcttgcctattgtaacagcattggttctgctgtagcctcggtgaccatttaagttgaataaatctgtcattttcacccacaaaaa

SEQ ID NO: 74817 - DNA, 465 bp, Homo Sapiens
ctgtataaacatttcagcataaaaataggtactttatattactaaatgtctgaagacaaaagagcaattggaaatctctgtttcttgtttcgtcatacataggaaggcgacgtgatgcaaattttaacacaagattttattaaagacgggcaaattggtgaggcatacctgaatttctggagatatacaaatgcgtgaggctggcatcatatgcaaatgtggctttacaaattggttttattttctagctgtatttaaagaggtgttcaaaattccctactaatcaagaagcacccctgaaaaaactatgagataagatagtgttattaatggtttgcatctaaagaccaggaaacacattagccaatacagtccacaatcggtgaaatgctgccgtgcaaattgcacgtgcatatgcatttttactatattccctcagagaccgtaaaacaacaacaacaacaa

SEQ ID NO: 74818 - DNA, 1018 bp, Homo Sapiens
ggggacgctcgaagggcggggagcagagggagatacagaaaccgacaggggccaggcgcccggtggctccgaagcggggaagtgggacaagatggtttacatctcgaacggacaagtgttggacagccggagtcagtctccatggagattatctttgataacagatttcttctggggaatagctgagtttgtggttttgtttttcaaaactctgcttcagcaagatgtgaaaaaaagaagaagctatggaaactcatctgattccagatatgatgatggaagagggccaccaggaaaccctccccgaagaatgggtagaatcaatcatctgcgtggccctagtccccctccaatggctggtggatgaggaaggtaaatgtctgctctaagaagcagacaaccggacatgcgcattcatagcagaaggaaaccatcaagaagtggaaggctgaccatgatgagcagtagatgaatgtgtatgtctaaacaaggactgctctgtgtcctcacagatgaatgaggtcatgctgggaattccctctgcagggaactggcctgactgacatgcagttccataaatgcagatgtttgtctcattacctttttgtatagtttattaaagtattaatatagttttaataagtaaatatttttaggttgcagaatggactcctcatctttatattcacgaaaaagcaatctgaagaaaacaaataaaagcctgtgtatttagcactgttagtgtcaccttttcaacttctgaaaacactgtccatcgttaactttttctcatttataaatcactgtattataatagtagtatgcatagcatatctgtgctcttgaattaatttttatctttacacataattgtctcatcaatcttcaataccaccgtgttctcaatttgctaccaaatggtacatgtatcagggatatccataaaaccattgctaacaaacactgagctaccaatgcacatttactaaatagttttccaatcatggacttcagcctg

SEQ ID NO: 74819 - DNA, 620 bp, Homo Sapiens
  misc_feature (177)..(177): n is a, c, g, or t
cttctcggaggtgtcaggcagcacatggcgagaggaagaactgcctgtatcccagcgcccagcaccctcagcacagccccttcgtaggcagtgcctctcagtcagtggcctccccatgcccagcagggcccctgtagccagtgtaccacctgtccaccatccacggcccaagtccanccccagacgcctgcctggagcactggcagggactggaagcagaggactggacagcagccctactgaacaggggtcgcagtcgccagcccctggtactaggggacaattgctttgctgacttggtgcacaactggatggagctgcctgagacagggagtgaagggggtgacggaggtgggcaccgtgcccgtgctcggccccctcagttcctgcttggcctctctgagcagcttcggcgccggctggccagggctcggcggacagctatggcaggaaagcggctgtcatgcccacctcgcccagaacctgaactgcctgcggatgtctcacgctttgcagctctcatgagctgtcgtagccgccagcccatcatctgcaatgatgtcagctacctctgaccctgccctccagcctgggacaataaaagccttttttctagacaa

SEQ ID NO: 74820 - DNA, 677 bp, Homo Sapiens
taaagaaaaggctgttgtctctctttgtaaatatttaagtctagtgagtttattttgtacgcaattgctttaattttaagggaagtaaatctgaaactatcttgaagcccaaaggatttttagtaagtggattaacagtgatgaggtatttgcgattactttaaatgccaaaatgcttgagaactttgccaggttaaaaattacttaatatattttagaatgtaggttagaaagtagtaggacaaggaatagctttattactcttgagaacacttggataaatgaaaatatagtttgcttccgtgttaagttgtggttgagctatggagtgaccctggagctgccgcatcccacaggcctgagctcagcaagggttcaattcaagagagatgacgtctccacttggataatggcagacagtgtgggtagcggccatgcactaggggaattcacctctgtcaaattaatactctcctgtctactggattcttcttgtgcttcacctggattaaaaagctgtactgcctcttttgaaacagataaaacctttctataagtctcaattaatgagcttgcacaatcttgtatatgtacaggaaacccctcctgtctcctaatgtgattagtactgtaaaatattctataaaactgattaaaaggggagagcagtttgattc

SEQ ID NO: 74821 - DNA, 425 bp, Homo Sapiens
  misc_feature (163)..(282): n is a, c, g, or t
ggcacgaggcgcgagcgagcggttgtgcttgtgcttgtggcgcgaggtgcgggtttcggcggcggctgaggaagaagcgcgggcggcgccttcgggaggcgagcaagcagcagttggccgtgccgtagcagcgacccgcgcgcggcgggcagcggcccaggannnnnnnnnnnnnnnnnnnnnnnnnnnnnnnnnnnnnnnnnnnnnnnnnnnnnnnnnnnnnnnnnnnnnnnnnnnnnnnnnnnnnnnnnnnnnnnnnnnnnnnnnnnnnnnnnnnnnnnnggcggcgtgtgaatggcggcctccgcggcggcagcctcggcagcagcggccgcggccgcctctggcagcccgggcccgggcgacggctccgctggcggtgaaaagcgctccaccgtcccttcggccgcatcctcgggctctgc

SEQ ID NO: 74822 - DNA, 1202 bp, Homo Sapiens
cctaaggtaggaggcctgcggtgtaaattcggcacgaggcccagaaggtgactgtaggggcagcaggagcgcctggagcggcagcactggaccatgaccaagatccagaagcaccaggagcacattctgcgctttgcctcttgggctctggagagtgacaacaacacagcccttttgctttctaagaagttgatctacttccagctgcaccgggccctcaagatgattgtggatcccgtggagccacatggcgagatgaagtttcagtgggacctcaatgcctggaccaagagtgccgaggcctttggcaagattgtggcagagcgtcctggcactaactcaacaggccctgcacccatggcccctccaagagccccagggcccctgagcaagcagggctctggcagcagccagcccatggaggtgcaggaaggctatggctttgggtcaggagatgatccctactcaagtgcagagccccatgtgtcaggtgtgaaacggtcccgctcaggtgagggcgaggtgagcggccttatgcgcaaggtgccacgagtgagccttgaacgcctggacctggacctcacagctgacagccagccacccgtcttcaaggtcttcccaggcagtaccactgaggactacaaccttattgttattgaacgtggcgctgccgctgcagctaccggccagccaggactgcgcctgcaggaacccctggtgccccacccctggctggcatggccattgtcaaggaggaggagacggaggctgccattggagcccctcctactgccactgagggccctgagaccaaactgtgcttatggctcttgcggagggtctggtgctgagggtccccgctggcctcacctagtggcagcaccagcctcaggcctggaggtggtggctcctgagggtacctcagccccaggtggtggcccgggaaccctggatgacagtgccaccatttgccgtgtctgcagaagccagggatctggttatgtgccaccagggtgagtttggtttcccctggactgtccctggcggcctgcggatgtcccgggggggtggggcggtcctctgcctgtggtcccgactgaggagggggtggggctctcctggtgtgggacagctgggggtggccagctctccaccacgggagtgggggtgtggcttttgaacggcgccctgggggagccttc

SEQ ID NO: 74823 - DNA, 1586 bp, Homo Sapiens
aacatagcatagtacgaggctggtgttaaatcggcacgaggctcaatgcctggaccaagagtgccgaggcctttggcaagattgtggcagagcgtcctggcactaactcaacaggccctgcacccatggcccctccaagagccccagggcccctgagcaagcagggctctggcagcagccagcccatggaggtgcaggaaggctatggctttgggtcaggagatgatccctactcaagtgcagagccccatgtgtcaggtgtgaaacggtcccgctcaggtgagggcgaggtgagcggccttatgcgcaaggtgccacgagtgagccttgaacgcctggacctggacctcacagctgacagccagccacccgtcttcaaggtcttcccaggcagtaccactgaggactacaaccttattgttattgaacgtggcgctgccgctgcagctaccggccagccagggactgcgcctgcaggaacccctggtgccccacccctggctggcatggccattgtcaaggaggaggagacggaggctgccattggagcccctcctactgccactgagggccctgagaccaaacctgtgcttatggctcttgcggagggtcctggtgctgagggtccccgcctggcctcacctagtggcagcaccagctcagggctggaggtggtggctcctgagggtacctcagccccaggtggtggcccgggaaccctggatgacagtgccaccatttgccgtgtctgccagaagccaggcgatctggttatgtgcaaccagtgtgagttttgtttccacctggactgtcacctgccggccctgcaggatgtaccaggggaggagtggagctgctcactctgccatgtgctccctgacctgaaggaggaggatggcagcctcagcctggatggtgcagacagcactggcgtggtggccaagctctcaccagccaaccagcggaaatgtgagcgtgtactgctggccctattctgtcacgaaccctgccgccccctgcatcagctggctaccgactccaccttctccctggaccagcccggtggcaccctggatctgaccctgatccgtgcccgcctccaggagaagttgtcacctccctacagctccccacaggagtttgcccaggatgtgggccgcatgttcaagcaattcaacaagttaactgaggacaaggcagacgtgcagtccatcatcggcctgcagcgcttcttcgagacgcgcatgaacgaggccttcggtgacaccaagttctctgctgtgctggtggagcccccgccgatgagcctgcctggtgctggcctgagttcccaggagctgtctggtggccctggtgatggcccctgaggctggagcccccatggccagcccagcctggctctgttctctgtcctgtcaccccatccccactcccctggtggcctgactcccactccctggtggccccatcccccagttcctcacgatatggtttttacttctgtggatttaataaaaacttcaccagttcctcaggcgttggctggttgggggactgtggtcctggggcctggtttattgactgta

SEQ ID NO: 74824 - DNA, 1047 bp, Homo Sapiens
ccgggatttaaatcggccgagggcgtctggcacttaactcaacaggccctgcacccatggcccctccaagagccccagggcccctgagcaagcagggctctggcagcagccagcccatggaggtgcaggaaggctatggctttgggtcaggagatgatccctactcaagtgcagagccccatgtgtcaggtgtgaaacggtcccgctcaggtgagggcgaggtgagcggccttatgcgcaaggtgccacgagtgagccttgaacgcctggacctggacctcacagctgacagccagccacccgtcttcaaggtcttcccaggcagtaccactgaggactacaaccttattgttattgaacgtggcgctgccgctgcagctaccggccagccagggactgcgcctgcaggaacccctggtgccccacccctggctggcatggccattgtcaaggaggaggagacggaggctgccattggagcccctcctactgccactgagggccctgagaccaaacctgtgcttatggctcttgcggagggtcctggtgctgagggtccccgcctggcctcacctagtggcagcaccagctcagggctggaggtggtggctcctgagggtacctcagccccaggtggtggcccgggaaccctggatgacagtgccaccatttgccgtgtctgccagaagccaggcgatctggttatgtgcaaccagtgtgagtttggtttccacctggactgtcacctgccggccctgcaggatgtaccaggggaggagtggagctgctcactctgccatgtgctccctgacctgaaggaggaggatggcagcctcagcctggatggtgcagacagcactggcgtggtggccaagctctcaccagccaaccagcggaaaatgtgagcgtgtactgctgggccctattctgtcacaaaccctgccgcccccctgcatcagctggctaacgaactccacccttctccctggaaccagccccggtgggcaaccctggaatctgaaccctggaatcctggcccgcccttct

SEQ ID NO: 74825 - DNA, 1032 bp, Homo Sapiens
  misc_feature (472)..(472): n is a, c, g, or t
acgaagggtgcgtgctttgggccgcggccccgccgccgcaacagctcgggggacggccggggcgggggcgacggaccgtggtggactgtcccgtgtgcaagcaacagtgcttctccaaagacatcgtggagaattatttcatgcgtgatagtggcagcaaggctgccaccgacgcccaggatgcgaaccagtgctgcactagctgtgaggataatgccccagccaccagctactgtgtggagtgctcggagcctctgtgtgagacctgtgtagaggcgcaccagcgggtgaagtacaccaagggaccatactgtgcgctctactgggccagccaagtctcgggatggtgaacgtactgtctattgcaacgtacacaagcatgaaccccttgtgctgttttgtgagagctgtgatactctcacctgccgagactgccaagctcaaatgcccacaaaggaccaccaagtaccangttcttagaggattgcagtgatggaaccagcgcaagctcctgggccttcactggtgaagccgccttgggggacaaacatgcaacattgcagaagagcaccaaggaggttcgcagctcaatccgccaggtgtctgacgtacagaagcgtgtgcgagtggatgtcaagatggcatcctgcagatcatgaaggagctgacataagcggggcgtgtgctggtcaatgatgcccagaaggtgatggagggcagaaggagcgctggagcggcagcactggcacctgaccacgatccagaagcacaggagcacttctgcggcttgctctggggtcaggagagtgcaacaacacagccattgcgttaagagggaccactccagtgcacggccccaaagatgggtcccgggcgcaaggggcagactcagggacccagctggaagagcaagcagagcaggggaagcgaagaagagcgcaggccaaacggcgaaagagaaacacgggaagaggagaacaacacagggagcaggacgaaagagacgaagaacagaagcagccgccgcagaaa

SEQ ID NO: 74826 - DNA, 1462 bp, Homo Sapiens
  misc_feature (131)..(223): n is a, c, g, or t
  misc_feature (226)..(284): n is a, c, g, or t
ggcgcgcgggcgagcggttgtgcttgtgcttgtggcgcgtggtgcgggtttcggcggcggctgaggaagaagcgcgggcggcgccttcgggaggcgagcaggcagcagttggccgtgccgtagcagcgtcnnnnnnnnnnnnnnnnnnnnnnnnnnnnnnnnnnnnnnnnnnnnnnnnnnnnnnnnnnnnnnnnnnnnnnnnnnnnnnnnnnnnnnnnnnnnncgnnnnnnnnnnnnnnnnnnnnnnnnnnnnnnnnnnnnnnnnnnnnnnnnnnnnnnnnnnntgtgaatggcggcctccgcggcggcagcctcggcagcagcggcctcggccgcctctggcagcccgggcccgggcgagggctccgctggcggcgaaaagcgctccaccgccccttcggccgcagcctcggcctctgcctcagccgcggcgtcgtcgcccgcggggggcggcgccgaggcgctggagctgctggagcactgcggcgtgtgcagagagcgcctgcgacccgagagggagccccgcctgctgccctgtttgcactcggcctgtagtgcctgcttagggcccgcggcccccgccgccgccaacagctcgggggacggcggggcggcgggcgacggcaccgtggtggactgtcccgtgtgcaagcaacagtgcttctccaaagacatcgtggagaattatttcatgcgtgatagtggcagcaaggctgccaccgacgcccaggatgcgaaccagtgctgcactagctgtgaggataatgccccagccaccagctactgtgtggagtgctcggagcctctgtgtgagacctgtgtagaggcgcaccagcgggtgaagtacaccaaggaccatactgtgcgctctactgggccagccaagtctcgggatggtgaacgtactgtctattgcaacgtacacaagcatgaaccccttgtgctgttttgtgagagctgtgatactctcacctgccgagactgccagctcaatgcccacaaggaccaccagtaccagttcttagaggatgcagtgaggaaccagcgcaagctcctggcctcactggtgaagcgccttggggacaaacatgcaacattgcgagaagagcaccaaggaggttcgcaggctcaatccgccaggtgtctgacgttacagaagcgtgtgcaaagtggatgtcaagactggccatcctggcagatcatgaaggagctgaataagcggggccgtgtgctggtcaatgatgcccagaaaggtgactgaggggcagaggagcgcctggaacgcgcgactggaacattgacaagatccaaaaggcacaaggagcacaattcttgggccttggactcttgggggtctggacaatgagaacaacaaagacgttgtggtattcaaaagtgaattattccaattgacacggggccatccagcagatggggcaccggtgggacacatggagaataa

SEQ ID NO: 74827 - DNA, 1889 bp, Homo Sapiens
  misc_feature (15)..(15): n is a, c, g, or t
  misc_feature (1779)..(1779): n is a, c, g, or t
  misc_feature (1794)..(1795): n is a, c, g, or t
  misc_feature (1813)..(1814): n is a, c, g, or t
  misc_feature (1852)..(1852): n is a, c, g, or t
  misc_feature (1860)..(1860): n is a, c, g, or t
taggagcgagcctgngtggcgaattggcacgaggggggcccacccagcaggggaatggtgggggccataacctgggtgggaacttgtaacagtctcccacatccctgcttctcgaagtggtggactgtcccgtgtgcaagcaacagtgcttctccaaagacatcgtggagaattatttcatgcgtgatagtggcagcaaggctgccaccgacgcccaggatgcgaaccagtgctgcactagctgtgaggataatgccccagccaccagctactgtgtggagtgctcggagcctctgtgtgagacctgtgtagaggcgcaccagcgggtgaagtacaccaaggaccatactgtgcgctctactgggccagccaagtctcgggatggtgaacgtactgtctattgcaacgtacacaagcatgaaccccttgtgctgttttgtgagagctgtgatactctcacctgccgagactgccagctcaatgcccacaaggaccaccagtaccagttcttagaggatgcagtgaggaaccagcgcaagctcctggcctcactggtgaagcgccttggggacaaacatgcaacattgcagaagagcaccaaggaggttcgcagctcaatccgccaggtgtctgacgtacagaagcgtgtgcaagtggatgtcaagatggccatcctgcagatcatgaaggagctgaataagcggggccgtgtgctggtcaatgatgcccagaaggtgactgaggggcagcaggagcgcctggagcggcagcactggaccatgaccaagatccagaagcaccaggagcacattctgcgctttgcctcttgggctctggagagtgacaacaacacagcccttttgctttctaagaagttgatctacttccagctgcaccgggccctcaagatgattgtggatcccgtggagccacatggcgagatgaagtttcagtgggacctcaatgcctggaccaagagtgccgaggcctttggcaagattgtggcagagcgtcctggcactaactcaacaggccctgcacccatggcccctccaagagccccagggcccctgagcaagcagggctctggcagcagccagcccatggaggtgcaggaaggctatggctttgggtcaggagatgatccctactcaagtgcagagccccatgtgtcaggtgtgaaacggtcccgctcaggtgagggcgaggtgagcggccttatgcgcaaggtgccacgagtgagccttgaacgcctggacctggacctcacagctgacagccagccacccgtcttcaaggtcttcccaggcagtaccactgaggactacaaccttattgttattgaacgtggcgctgccgctgcagctaccggccagccagggactgcgcctgcaggaacccctggtgccccacccctggctggcatggccattgtcaaggaggaggagacggaggctgccattggagcccctcctactgccactgagggccctgagaccaaacctgtgcttatggctcttgcggagggtcctgggtgctgagggtccccgcctggcctcacctagtggcagcaccagctcaggggctgggaggtggtggcctcctgagggtacctcagccccccaggtgggtgggcccgggaaacccctgggatgacagtggcccacccatttgcccgtggtctgccagaaagccaggcggatcctggttatgtgcaacccagtggttgagtttttgtttccaccctgggactggtcaacttggccgggcccctggcanggaatgtaccccacnngggaaaggaattgggaannctggctccaacctcctggcccatggtgcctccccctgnaaccctgnaaaaagggaaggaaaaggaatggggccac

SEQ ID NO: 74828 - DNA, 1036 bp, Homo Sapiens
gggctaggtagcgaggcctgggtggcgaattcggcacgaggagcctgtagctcccctgctgaggcagtgtggttatgttcccagcagtgggggtcagacgcccttcctcagaactttctagttgccctctacctgactcctgacttgtattccttttagcagtagccttcttccctcggggagccaaagagtgtggtgtgtggcgctatattgtggctgctatttcatctggtttcttttaatgtgaggaactcacatactgacttcagtgggactcggtgagccggggccgtctgtgtggtgggaccccctttagcgggactcagtgagctggggccgtctgtgtggtggagccagggcctctccctttagtggagccaggttgtcgggccccgaatgtcactggtggatctaagaagggctgagtggtctgacaccaaaacatgccgcagggagggctgtggtgccggtgcttccaacaaggacagccctccttgaccctgaaaggaacactggcttgaaggactgcagacaggctctgaggggcacgccctcctcagcgagaggcagcaaggtggccacagtgtcactggtcaggtgcttctcaccacgggaaagccgccgacctgtgactcgcttgagatgggaaagcggcgccacagaccccgggtctccttggctgtctgtgggccgcccctggccaccttgtcctggctcgcagggtgcaggagcgcctcgttctctgggtggccggcttgctgctccggtttgggctgtcttaccataacaccgtcccagggctctgcaggccactgtgagcgctggctccctgggcagtgctcctccgtgtggactgtgcctcaggccagggctcaccagctggggtcctgtccggaaggatgggatctttctgggagctgcgccggacagagtggggagctcctagtttgtggggggaagctttgatatccatgccacgtccatccaccccaccccttttcgtcacgagcacaatggtcttacattggatttttgt

SEQ ID NO: 74829 - DNA, 1408 bp, Homo Sapiens
  misc_feature (1289)..(1323): n is a, c, g, or t
aataactatcaactcaaacttagggaaacttgcctttgtcttgggggaaaaaaaacaactagacaataaagcttcttttacatcatttgctaacctgatctcgttttaagagagagatggtagttatgttgcaagagtaaaatttataccatgaatgatacaggtctagtctggtggcactaattagagataatagcattgctgacaaaattataatctgctggtggcatttgcggaaaagaagcccttgcaaatttctaaacaacagtaaactctgttaggaaattctaaaatgtcttcaggccaaaaagggtataaggttagtaaaatgcctcaacagagtttgaataaaatattgaatttgagagttactggaattggatatgtaaaaacagggtggtaggttgggtcatgcttacaatggtctcaagttcaaataagctactgtgacaatacaccacttcacaggtcacacgcatttccaggggcttttcctttccctcagtaggtgctggcagagggtgtgctcagtcgctttccaatatagatgcctagccccaaagccaaacatgagaaaggaagagagatggaatggacaccttcagaaattctgcggagaaaatacccccctttcttcatggcgccacttttcctcatgcttaaagacacagaacgtttagggtgtctgaagtggaactccttgggtggaatgttttcgggtctactggaccagtctgatacccagtccgcacttttcttcaaagcctcgacttccttctctccttctacaacttcttcttctgactgagagctatggtccctgctggtgtgcatttccacatcaaacatgatctgcccatcttcttgtggcgaagggctgtcacagtgagaactgcctctggaactactctgtcctgattcatgttgtgcatccaaaagaatcttctccatgtctccattgtggatggaggatgaggatggtacgtgttccagccccccatttttcccattgccattatcattgccattgctgctgttcatgggtagctccacccaggaactgttgaggccggccggcgggggcagagactgctcattttcctcgcagttgttgttgttgttgtgcaggggcggcggcggctcgactaggtgggacgacatcgtcggacagctggcaggactgcggcagcagcaggaccgtctccggcactcaggcagcaacacaacaagccgagtcccccggccgtaatggccgaattcccgggcatatgtccggtaccgtcgactgnnnnnnnnnnnnnnnnnnnnnnnnnnnnnnnnnnncgcacgcttcctcgctcatctgactctgctgcgctcgatcgttcgaaataacgcgctagcgccctatagtgagtgtatacaattc

SEQ ID NO: 74830 - DNA, 423 bp, Homo Sapiens
  misc_feature (43)..(77): n is a, c, g, or t
atgcgacgagcgcagcgaagtgtatgagcgaggaagcggccgnnnnnnnnnnnnnnnnnnnnnnnnnnnnnnnnnnncagtcgacggtaccggacatatgcccgggaattcggccattacggccgggagaatttcctaacagagtttactgttgtttagaaatttgcaagggcttcttttccgcaaatgccaccagcagattataattttgtcagcaatgctattatctctaattagtgccaccagactagacctgtatcattcatggtataaattttactcttgcaacataactaccatctctctcttaaaacgagatcaggttagcaaatgatgtaaaagaagctttattgtctagttgttttttttcccccaagacaaaggcaagtttccctaagtttgagttgatagttattaaaaaga

SEQ ID NO: 74831 - DNA, 769 bp, Homo Sapiens
  misc_feature (690)..(724): n is a, c, g, or t
cccctttcttcatggctccactttttcctcatgcttaaagacacagaacgtttagggtgtctgaagtggaactccttgggtggaatgttttcgggtctactggaccagtctgatacccagtccgcacttttcttcaaagcctcgacttccttctctccttcttacgacttcttcttctgactgagagctatggtccctgctggtgtgcatgttccacatcaaacatgatctgcccatcttcttgtggcgaagggctgtcacagtgagaactgcctctggaactactctgtcctgattcatgttgtgcatccaaaagaatcttctccatgtctccattgtggatggaggatgaggatggtacgtgttccagccccccatttttcccattgccattatcattgccattgctgctgttcatgggtagctccacccaggaactgttgaggccggccggcgggggcagagactgctcattttcctcgcagttgttgttgcttgttgtgcaggggcggcggcggctcgactaggtgggacgacatcgtcggacagctggcaggactgcggcagcagcaggaccgtctccggcacctcaggcagcaacacaacaagccgagtccgccgcccccttttctgcgcctccccggccgtaatggccgaattcccgggcatatgtccggtaccgtcgactgnnnnnnnnnnnnnnnnnnnnnnnnnnnnnnnnnnngccaggccccggcctttcgcttcgtctcaaaacatcgagcttcct

SEQ ID NO: 74832 - DNA, 800 bp, Homo Sapiens
cattatgcagtacataactgtaatcttctgcaaaaccagtcaaatctaaccatgccacaaaaataactaccaccatctgtcttaaagaacgtgactcctatatggatggagattaacaagggcatagatcgattctatagaatatttcatttaattgattttattataactggattaggtctgagccctgggaaacagacatcaccttgttatacagaatcacacattatagttttaactgaagttgtttttcatataggacaatcataaatatgagtattacaagagctgactacatactttcaagtttatatttcctgacaaaggatatgacctttttccatcctgtaattcagagaaaaagaaccacttgccctactataaactctaaaaagaaaactgcacaaacccagggaacagggggcaaggagtgctcccctttgacctactattagcaggtccaacaaatgatatatcaccacgtctatgaaagaaatttctttctataaaagcacaaaattttaaatcggatttgacctttacataattaggccttccatccttgatggaaaaaatcataacagccagcagcttcaaaactggattggttaaaagggaaaaaacaccggggcacaaattaaataaaggcaacctttgggaatcttcacctccttcctccttttcccaatttaaatgggcgtggaaatatgaacacctcctttttataaaaaaattcctggccccatggaggttttcttcttccccttcctttttctggcgcctttaaaaaatcctttttc

SEQ ID NO: 74833 - DNA, 1403 bp, Homo Sapiens
ctgtgttaagtcctgttgatgttaagtcctgttgagagcaccaggtaaacactctgcaccccttctcttagtagtaataggtttttcactccttggcctcagctgtcctcacaggacagtgggggcagatcagagaacacatcagaaatacatacaaagaaatcgtacaaactggacaggttcccctccccctgccacaactggcatcccaacagagggaacaagtactaaatcatttttgacgacgtaaataagactgaaaacaggttaaacagttgctgaacttaagggcatgacaaaaaggactcctctctctgacccaggtaggcaaaatgctttgggtgtgaggtaaaaaaaatgggtaagagcagctgtacagagtggggtgaaatgttaaacagggtgcagtgcccaagggctaagaaccaggtccagcgcaagcctgagaccacaggaggcactcacagctcacaaaggcgtctcgcctgattggccagggcaggacctgccgcctcttctcggtgcacagacagtcatgccaaccctgggcagggtggcatctgcccctgctttccccactgagtggggagacagggcagtgtgctcaggccctcaatcctcacgcaggtaggcctcctgctccgactcagcccgctcctccccttcctcctgtgttttctgacggagctcttctatctgtgcttctgccagcttggtttctgctttccgggagagctggtgcacctcttccacctgcagtttcaccagctgaatgtgattcctggcggttatagaggcctgatctgcgccagtttgatatgcagcttctgctgccatctctgaaagaccaactgcagtcatccaagtggtttccagcttcaagtactcttggtgttttgaagtcatctcagctctggctcctatgatcacctgccacacttcatcttcctcctctgaattcattttcccaagtaaacttgtatattgtcggtaaagagaagttaaggtataaacagccttagtatattcagtaatagcttcaatcaacgcatatgtggtctgagagagaaaggtagaggtgctatctgttaccaaagacactgctctcctcatcaatgcttcactactaagggaatgaggctctgatttctgtgcaataggaaccgcacacagggttactccaaagccaatcgtcacagttttgtgccatggtcttatcaattctgagaaacaccgcttcttaaagttagccacaacaggaacacacaaacactgtctgtacctgaagaatgaagttacgctgcgcgacagccaactcttcagagccgccattgtgcagcgcacggacgccagacgccctcgtgccgaattcaacaccaagcctcgtacctagcctaagtctt

SEQ ID NO: 74834 - DNA, 939 bp, Homo Sapiens
  misc_feature (640)..(640): n is a, c, g, or t
  misc_feature (759)..(759): n is a, c, g, or t
cggctaggtacgaggccgggtggcgaatcggcacgaggggcgtccgcgcgctgcacaatggcggctctgaagagttggctgtcgcgcagcgtaacttcattcttcaggtacagacagtgtttgtgtgttcctgttgtggctaactttaagaagcggtgtttctcagaattgataagaccatggcacaaaactgtgacgattggctttggagtaaccctgtgtgcggttcctattgcacaggctgtttataccttaacttctctttaccgacaatatacaagtttacttgggaaaatgaattcagaggaggaagatgaagtgtggcaggtgatcataggagccagagctgagatgacttcaaaacaccaagagtacttgaagctggaaaccacttggatgactgcagttggtctttcagagatggcagcagaagctgcatatcaaactggcgcagatcaggcctctataaccgccaggaatcacattcagctggtgaaactgcaggtggaagaggtgcaccagctctcccggaaagcagaaaccaagctggcagaagcacagatagaacgagctccgtcagaaaacacaggaggaagggggaggagcgggctgagtcggagcaggaggcctacctgcgtgnaggattgagggcctgagcacactgccctgtctccccacttcatggggaaaacagggggcagatgcccacctgtcccagggttggcatgactggtctgtgcacccagaaaaaaggggggnaggtcctgcccctgggcaataaaggggaaaaaccccttttgtgaacctggaaaaggcccccccgggggggcccccagggtttggccctggaaacctgtttttataccccttgggggcccttggccccttgtttaaaaatttttcacccccactttttgtacggggtggctctttacccca

SEQ ID NO: 74835 - DNA, 911 bp, Homo Sapiens
  misc_feature (749)..(749): n is a, c, g, or t
  misc_feature (793)..(793): n is a, c, g, or t
  misc_feature (869)..(870): n is a, c, g, or t
tgcgtctggcgtccgcgcgctgcacaatggcggctctgaagagttggctgtcgcgcagcgtaacttcattcttcaggtacagacagtgtttgtgtgttcctgttgtggctaactttaagaagcggtgtttctcagaattgataagaccatggcacaaaactgtgacgattggctttggagtaaccctgtgtgcggttcctattgcacagaaatcagagcctcattcccttagtagtgaagcattgatgaggagagcagtgtctttggtaacagatagcacctctacctttctctctcagaccacatatgcgttgattgaagctattactgaatatactaaggctgtttataccttaacttctctttaccgacaatatacaagtttacttgggaaaatgaattcagaggaggaagatgaagtgtggcaggtgatcataggagccagagctgagatgacttcaaaacaccaagagtacttgaagctggaaaccacttggatgactgcagttggtctttcagagatggcagcagaagctgcatatcaaactggcgcagatcaggcctctataaccgccaggaatcacattcagctggtgaaactgcaggtggaagaggtgcaccagctctcccggaaagcagaaaccaagctggcagaagcacagatagaagagctccgtcagaaacacaggaggaaggggaggagcgggctgagtccgagcaggaagcctacctgcgtgaggattgagggnctgagcacactgccctgtctccccactcagtggggaaagcaggngcagatgccaccctgcccagggttggcatgactgtctgtgcacccgagaaaaagcgggcaggttcctgcccctggnncaatcaaggggaagaccccttttgtgaagcttgtgaatgcc

SEQ ID NO: 74836 - DNA, 1001 bp, Homo Sapiens
  misc_feature (672)..(672): n is a, c, g, or t
  misc_feature (742)..(742): n is a, c, g, or t
  misc_feature (764)..(764): n is a, c, g, or t
  misc_feature (777)..(777): n is a, c, g, or t
  misc_feature (869)..(869): n is a, c, g, or t
  misc_feature (923)..(923): n is a, c, g, or t
  misc_feature (935)..(935): n is a, c, g, or t
gtggaaaccgagtggggactttactgatagtgacagtgatgacttcggagaggctgacggccggtacttcagggtgtgtttcaaaaagctgcccctggagggaggtggtagggaggcggtggggagctgcactcaccccggcctgtcccctccagctcagccagcagtcacactgcccagatttctttcttttcctctgccgcctgctcagcccgctgctcaaggcctttgcacaggctgccgccttcctccgccagggccagctgcccgatactggtgaggcccttgttcccttgcagtcctcgaggcaggctgtgtctgtgctgggtgccaggtctaggtcttctctcttctgcagagttgggctacacagagcagctgttccagttcctgcaggccaccgcccaggaagaagggatcttcggtgagtcccaaccagtcagcccaggctcctgcaggcagtggtgtttgctggtggctgctgccccctgcaggacagtgacaacccaactctaggaaggcaggctgcagagtacagtcttctgtccagtcagagctctatccctccctgggcttctttacacaagaggagagaagcctgtgcccagtggctctctgttctccctacctagagccttcacttctctcttctttccagagtgtgcggaccanagctcgcatcagtgctgtctggacttcagagacttgagaaaacaggaggtttctgaatacacgacactgngtggagtgggggggtccagtcngatgcatccctgngtaaaggtacaactggacaccagctatcggtctctgtctgatacatctggtggtgtgctgctctgacattcccattcatcgaagagatcttnagtgtgtgatctggcgggcgcggcgcaccgtctctgcctgattaggctccggcnggagcaggcacngcgctgacctggacatcacgacagcgggataagacgggaatctgcgtctcggcgatctggctcagc

SEQ ID NO: 74837 - DNA, 1076 bp, Homo Sapiens
  misc_feature (83)..(117): n is a, c, g, or t
tcgatcactcactatagggcggtactgctctatagccgaacgaccgagcgcagcgagtcagttggagcgaggaagcggccggnnnnnnnnnnnnnnnnnnnnnnnnnnnnnnnnnnncagtcgacggtaccggacatatgcccgggaattcggccattacggccggggaagaaaacactagagtgctgctggaattccaaatctgaagaattctaacgactgcattctttgttattaaaaagggcacaatccttcctttttatttggcagtttaatttcagtaggaagcatgtcacatgtgcactgttggttagaattatgcatctgtcatgcctgactgctgaaccctacctaagccttttggcgcagtttaaaacttatactggtggactgtgaacctcaaaacaaatgggtatttttgggttttgaggatagatgttactccttaaagtttgtatttggggcatgaaaaactactgaaagaagaaaagtgctacagatactacatttcaaagagttggcattttccctttggccactcaagcagcatttgatgtatctaaagaaacaaagtcattgtttattttttaaaaaattatatgcagttgtataagatactacattccattgaaatgttggctatgtcctaaccaggcaaccagataacaaaaacattttgagtcttttatctaggtagttctaattattcagctacttagtttaacaaaggaaaatatcctgacttctctcatttcatttgtagacttttcattgtataggcacaaccaaagagtcagactggtttaaaactccagaaggaaaaaaagtatcccacacagtggatgttgtttctaagaatgctacaaaatcctgacatctcagacatctcaatgttaaaggaagaaaaaaaataccttttcatttcaaagaactaatatactttgatattgtgtaaaccttactcaagtttattgtcaagctttaactgcctttttagaactttttaaaatttcgagcccacaaatctattgtattagttgccttctataacaataaatcttcactgagcaaaaggc

SEQ ID NO: 74838 - DNA, 2285 bp, Homo Sapiens
  misc_feature (547)..(567): n is a, c, g, or t
tagctagtacgagctgggttaaatcggccgaggggacatctggcccctgcccaggccccaccagcagccaagagctggcaggcgctcctgagccccaggatcctgtgcgcagggtggccgggtggcaccgggacagcggcctgcccagggtgccacgggcactgacctggactttgacttatccagcgacagcgagagcagcagtgagtccgagggcacgaagtcctcctcctccgcctctgatggcgaaagcgaggggaaaagaggccggcagaagccgaaggctgccccagagggagccggggcgctggcacagggcagttccctggagccggggcggcctgcagcaccgagtctccccggagaggccgagcctggcgcgcatgccccggacaaggagcctgagctgggtgggcaggaggagggcgagcgggatggcctctgcggcctgggcaacggctgtgccgacaggaaggaggcggagaccgagtcacagaacagcgagctgtcgggggtcactgcgggtgagtccctggaccagagcatnnnnnnnnnnnnnnnnnnnnncacggatgaggatgaccacctcatctacctggaggagatcctggtccgtgtacacactgactactatgccaagtatgaccgctacctcaacaaggagatcgaggaggcgccggacatccgcaagatcgtgccggagctcaagagcaaggtgctggcagacgtggccataattttcagtgggctacacccgacaaaacttcccgatagagaagacgcgggagcattacaacgcacacggcgctgggagcgaagatcctcactcggctggtgctgagcccccgacgcccctgacagggccacgcacctgatcgccgcgcgagctgggagaacagccctgcggcctttcccgaccgggagggtgtgccccccaccgccttgttccacccgatgccggttcttcccaaggcccagcctggccccgaggttcggatctacgactccaacacggggaagctcatcaggacgggcgcccgggggcccccagcaccctccagctccctacccatccgccaggagccctcttccttcagagcggttccgccaccccagccgcagatgtttggtgaagagctgcctgacgctcaggacggagagcagcctggcccttctagaagaaagcgacagcccagtatgtctgagacaatgccgctgtacactctttgtaaggaggatttagagagtatggacaaagaggtggacgacatccttggagaaggcagcgacgacagcgacagcgagaagaggaggcctgaggagcaggaggaggagccccagccccggaagccagggacccgcagggagcggacgctcggggcacctgcgtccagcgagaggagcgcggcagggggccgggggcccagaggccacaagaggaagctgaatgaagaggacgccgccagcgagtccagcagggagtccagcaacgaggacgagggcagcagctccgaggccgacgagatggccaaggcgctggaggcggagctcaacgacctcatgtgagcgcgggcagcgggcagggactgaagcctgaccgacctccagcagcactcggacgtccccggaccagccctcagtctcggtccacgctgctttcttcccaaaggacatgtatatgtgcagagctccacatacagaaacacattattttgcagaaataggtgtttttaagaagttttactacaggaatgtctacttttgtaagtgacaggtgttaaaggcccaggtgtgctgtgccaaagagctcagcagaggctcacgtggcccaggctggtgcgcccgctgtctcggtaaggggcgggttggtgtgttttccccttgtgtaccagagcacattccttaggggacggctttgggggtcccacgagacatggactaggagtttaagcaggacagtgtgcgtgcacgagctccgagcccagcacagacatgcctggaacccccgccgcctgctgctccctcctagggaacccatttccggggaacgccgtgactgtcgggcagcctggagcttcctgcagcctcctacgcagggtccacgccacgtggcctgggctgccatcctgccgtcctcccactggcatcctggcaagggggcgttgcttttcctgggcggccttttatgtcttggagacacctgatgtaaagtttctgtaaatctatttcatatctgacccaccaaacagatttctctttaataaaaatcctttttgtaaaaaaaa

SEQ ID NO: 74839 - DNA, 1045 bp, Homo Sapiens
  misc_feature (555)..(575): n is a, c, g, or t
ctaggctagtagaggctgggtgtttaatcggcacgaggggacatctggccccctgcccaggcccccaccagcagccaagaagctggcaggcgctcctgagccccaggatcctgtgcgcagggtggccgggtggcaccgggacagcggcctgcccagggtgccacgggcactgacctggactttgacttatccagcgacagcgagagcagcagtgagtccgagggcacgaagtcctcctcctccgcctctgatggcgaaagcgaggggaaaagaggccggcagaagccgaaggctgccccagagggagccggggcgctggcacagggcagttccctggagccggggcggcctgcagcaccgagtctccccggagaggccgagcctggcgcgcatgccccggacaaggagcctgagctgggtgggcaggaggagggcgagcgggatggcctctgcggcctgggcaacggctgtgccgacaggaaggaggcggagaccgagtcacagaacagcgagctgtcgggggtcactgcgggtgagtccctggaccagagcatnnnnnnnnnnnnnnnnnnnnncacggatgaggatgaccacctcatctacctggaggagatcctggtccgtgtacacactgactactatgccaagtattgaccgtacctcaacaaggagatcgaggaggcgccggacatccgcaaagatcgtgccggagctcaagagcaaggtgctggcagacgtggcctaattttcagtgggtaacaccgacaatcttcccgatagaagaagacgcggggagctttaccacgccacggggctgggagggaagatcctcactcgggtgtggttggcccccgacgccctgaaggccagcactggacgcggcgggtggcaggaagtgtcgcgctggagttggcctgcgttcacctcagttgggctctgcgcctgcaaagggggggtcccgccggcacacctggtggaactgtccacgggcccacgtccaggcccaccgcggcacacagaacgccccacccggtcgagccccggg

SEQ ID NO: 74840 - DNA, 1051 bp, Homo Sapiens
agagtatgaagtcacggcgcgccgaattcggcacgaggggacttggaccagacgttgattcacacaaccgagcagcactgtcagcagatgtcgaataaaggcatctttcacttccagctgggccggggtgagcccatgctgcacacgcgcctgcgtccacactgcaaggacttcctggagaagatcgccaagctgtacgagctgcacgtcttcaccttcggcagccggctgtacgcacacaccatcgcaggctttttagaccccgagaagaagcttttttctcaccgaatattatcaagggatgaatgtattgacccattttctaaaacgggaaaccttagaaatctctttccttgtggagactcaatggtttgcattattgatgatcgagaagatgtctggaagtttgcccccaatctgataactgtgaagaaatatgtatacttccagggcacgggtgatatgaatgcgccccctgggtcccgagaatctcagacgagaaagaaagtaaatcattctcgaggcactgaggtctcagagccatctccgcccgtgagagaccctgagggggtaacgcaggcccctggagtggagcccagcaatggcctggagaagcctgcacgggagctgaacggcagcgaggccgccaccccgcgggactcaccccgccccgggaagccagacgagagggacatctggccccctgcccaggcccccaccagcagccaagagctggcaagcgctcctgagccccagggatcctgtgcgcaaggtggccgggtggcaacgggacagcggccctgcccagggtgccacgggcactgacctgaactttgacttatccagcgacagcgaaagcaccagtgagtccgagcgcacgaatcctcctcttccgctcgatggcaaagcgatgggaaaatagccggcaatccgtatgtgcctcaaggagccgggccttggacagcttttcctgatctggacgctctatactattctttttagcaacctgccttacctgaaatacttattgtgttagatgtattctgtttgt

SEQ ID NO: 74841 - DNA, 996 bp, Homo Sapiens
  misc_feature (229)..(229): n is a, c, g, or t
  misc_feature (241)..(241): n is a, c, g, or t
  misc_feature (246)..(246): n is a, c, g, or t
cattgtcggtgatgtttgattggcgatacattaccagaacgttgactgtacgattatcgatcattaggaatgccctcgagcaagaatcgcacgagtgtgaggacgcatagcgtcgagagtgcagttcagtcacgtgtgcggatgtgtgctccaagccttacagccccgcccccatcccgtgttgttgcagaactctccgtcttgagagcctcttccgagtgacctccgnccaccccggccntgtcntgctcggaagagctcactgccagctgcggcctgggcaccgcgggccatgtgtgtttgcatgaggaactctttagtggcagacacctaagagacggctgcggtcaccccacgcctccgcggctcaggagccgtcctgggtgcataggaccagtttctgtgacttttctccagttgggcatgttgacagacatgtttcccctcctcccaccctcattttctggtcctcgcgactgagagccaggggcgacatcatgaccttctgtcccggccgccttagccccgggcacagggaaggcagctgggccgtttctgtctgtgtcccatcctgctgtccttctgtcctggatgtttcatgggcccggggccccccagggaagcttacccctcctgtgctgggtggaggccacgggacacctcaggtgccacccaccttggccctaaaacagccaccaggaaagcagccggagagccggacagcaggcagcctgtctgggttcctgaggcctgggggtggcagacgagcccacggcgccgtggtcccagcagcagggttgtcagtcggagcatcctggggctccctggctcctggccgtctgtgaggtaggcgcagtaccgtgtatcgtaggtagcagtaggaacgggggccgccgcggccctgcagccgctcatggcggtgaggtgtgtgccaagcccacccggggtgcagggcgtgacgtgtggggaataaataggcgttgtgacctcaaaaaa

SEQ ID NO: 74842 - DNA, 1498 bp, Homo Sapiens
  misc_feature (780)..(798): n is a, c, g, or t
aaatgatcagtgtctatttgatgtgatgcagatcttataaatttgggaattataatattgacatttctgtgatttttatatatgtaatgtcttaattgagatttctgttaaggcagaaataattaggctagggctcttagttttcattcctattgcccaagtattgtcaaactatggtattattttaatgttactttaaaaatccataatctgctagttttgcatgtacttatatgaaaacagtgcagtaagttgaaaactcagtatctatggaattgataaatgttgatctggtgtagtatattttatcgcattttcttatattaaaaaatgtctgcatgattacattttatttcctttgtaatttacatttcagaatagtgtattgctatatgggtgccaagattgaatatgaagaacccgagtgtttgtagtattatagttttaagcaaatctgtgtggtgatacagccataagaatggggcttatataaactctgtacatgtaagattttgtacagagaatttttaactttataaattgtatatgaacatgtaaatcttttaaaatgtacataaaatactgtatttttttaccttgtgtgtgatagtctagtcattgcatgtaaatataatttattatgtattctgtagtataaatcatacattgatgacttacatttttactggtaagtcaacatccgttggatgttttctgaagtggctctttttgaagtgataatagattgtaattcaaaataaaattattaatgaattctcnnnnnnnnnnnnnnnnnnngcctacagccgcgggcgctccaacatcaaaatggtcctcgggccgaattcttggtctccaggggcaaatttcccaaaatggatgcgtaataatttctcaaacaattttaaaacgggtttcgctgggtgacatgtgttatccccccccaaatttttccaaataaaaataaggcgcgcggtaagaaaattggtttgaaacccgcctgggggccctcctccctggttgttccccccctcacaatttatgttttttcgcgtactggaacggcgcaggtctgttctttttctcttcctcctgtaactctgctcgtcttcgcgcttacctgtttggctcgtttttggtggcttggcctcttttcatctccaccacaaggaaaagatttctgtgtttttgctcttttttgttgttgttgtacttgtcttgctgggccgttgttggctgacagagtgtgtggaatgtagcggctttgcctgtctctttgtggtgtggtctttgccattctgtgctgctgctctttcgttttattagtcgcgtgtcgggtggcatcgcgggtggtatgtttgtacgttctgcctcttggtgtctgttcgtataatttcttctcctctacgcccctgttagtctgttgccctccttcctctctgcgctgtgggacggttcacttgttgcgttcttgggtatcgattgtccggtgcgtgtg

SEQ ID NO: 74843 - DNA, 1181 bp, Homo Sapiens
  misc_feature (22)..(22): n is a, c, g, or t
  misc_feature (78)..(112): n is a, c, g, or t
aaaactatatacctaaatgggncctccgcgtagagccgaacgacgagcgcagcgagtctgtgagcgaggaagcggcgnnnnnnnnnnnnnnnnnnnnnnnnnnnnnnnnnnncagtcgacggtaccggacatatgcccgggaattcggccattacggccgggggcggcgctgtttaaagatggcggcggaggaacctcagcagcagaagcaggagccgctgggcagcgactccgaaggtgttaactgtctggcctatgatgaagccatcatggctcagcaggaccgaattcagcaagagattgctgtgcagaaccctctggtgtcagagcggctggagctctcggtcctatacaaggagtatgctgaagatgacaacatctatcaacagaagatcaaggacctccacaaaaagtactcgtacatccgcaagaccaggcctgacggcaactgtttctatcgggctttcggattctcccacttggaggcactgctggatgacagcaaggagttgcagcggttcaaggctgtgtctgccaagagcaaggaagacctggtgtcccagggcttcactgaattcacaattgaggatttccacaacacgttcatggacctgattgagcaggtggagaagcagacctctgtcgccgacctgctggcctccttcaatgaccagagcacctccgactaccttgtggtctacctgcggctgctcacctcgggctacctgcagcgcgagagcaagttcttcgagcacttcatcgagggtggacggactgtcaaggagttctgccagcaggaggtggagcccatgtgcaaggagagcgaccacatccacatcattgcgctggcccaggccctcagcgtgtccatccaggtggagtacatggaccgcggcgagggcggcaccaccaatccgcacatcttccctgagggctccgagcccaaggtctaccttctctaccggcctggacactacgatatcctctacaaatagggctggctccagcccgctgctgccctgctgcccccctctgccaggcgctagacatgtacagaggtttttctgtggttgtaaatggtcctatttcacccccttcttcctgtcacatgaccccccgcccatgttttattaaagggggtgctgctggtgagccgtgtgtgcgtgtccctgcttgttgcc

SEQ ID NO: 74844 - DNA, 1115 bp, Homo Sapiens
  misc_feature (926)..(935): n is a, c, g, or t
  misc_feature (1038)..(1048): n is a, c, g, or t
tatacttctaggtagcgaggcctgggtggcgaattcggcacgagggtgcggcgctgtttaaagatggcggcggaggaacctcagcagcagaagcaggagccgctgggcagcgactccgaaggtgttaactgtctggcctatgatgaagccatcatggctcagcaggaccgaattcagcaagagattgctgtgcagaaccctctggtgtcagagcggctggagctctcggtcctatacaaggagtatgctgaagatgacaacatctatcaacagaagatcaaggacctccacaaaaagtactcgtacatccgcaagaccaggcctgacggcaactgtttctatcgggctttcggattctcccacttggaggcactgctggatgacagcaaggagttgcagcggttcaaggctgtgtctgccaagagcaaggaagacctggtgtcccagggcttcactgaattcacaattgaggatttccacaacacgttcatggacctgattgagcaggtggagaagcagacctctgtcgccgacctgctggcctccttcaatgaccagagcacctccgactaccttgtggtctacctgcggctgctcacctcgggctacctgcagcgcgagagcaagttcttcgagcacttcatcgagggtggacggactgtcaaggagttctgccagcaggaggtggagcccatgtgcaaggagagcgaccacatccacatcattgcgctggcccaggccctcagcgtgtccatccaggtggagtacatggaaccgcgggcgagggcgggcaccaccaattccgcacatcttcccctgagggctcccgagcccaaaggtctacccttctctaccgggcccgggaaactaccaagatccctctacaaaataggggctgggttccagccccgcttgctgtccctggnnnnnnnnnntcttgccaggcggccttgacaatgccacccacggtttttttctggagcgtggtaaattgggtccctaatgtcacccccccttctttccgggggcaccatggannnnnnnnnnngattgttttcattttaaaggggtggtgcctccttttcgccccccacacctatatatccccgccatca

SEQ ID NO: 74845 - DNA, 965 bp, Homo Sapiens
gggtgtgcggcgctgtttaaagatggcggcggaggaacctcagcagcagaagcaggagccgctgggcagcgactccgaaggtgttaactgtctgccctatgatgaagccatcatggctcagcaggaccgaattcagcaagagattgctgtgcagaaccctctggtgtcagagcggctggagctctcggtcctatacaaggagtatgctgaagatgacaacatctatcaacagaagatcaaggacctccacaaaaagtactcgtacatccgcaagaccaggcctgacggcaactgtttctatcgggctttcggattctcccacttggaggcactgctggatgacagcaaggaattgcagcggttcaaggctgtgtctgccaagagcaaagaagacctggtgtcccagggcttcactgaattccacaattgaagaattttccacaacaccgtccatgggaactgattggagcaggcgggaaaagcagacctcctggtcgcccgaccctgctgggccctcctttccattgaacccgaagcccccctccggaactacctttggtggttctacccgggcggcctggccttcccccttggggcctaacccggccagccgcggaagaagcaaagtctccctttcaagccccttttcctcccaagggggtggacccgggacctgttccatggtaacctcccgccccaaccacgggagggggggaaaccccaatgtgtggcaaggcgaaaagcggaacaaccaatccccaattccctattgccccctgggccccaaggcccccctcaacgcgggctccactccaggcgtggtagcaccactggaacccgccggagaaggtgccgcccccacccaatttctccaaaattcttccccggagggagctccaaaacctcagggtctacctttccccaaccgggccgttgacccttccaaatcccccttaaaatatggg

SEQ ID NO: 74846 - DNA, 1301 bp, Homo Sapiens
  misc_feature (1153)..(1161): n is a, c, g, or t
tattgaatgttataaaataatagctagaaacaactaatgaagcaggctgacccagagaccggaatttcccgggatgtttaaagatggcggcggaggaacctcagcagcagaagcaggagccgctgggcagcgactccgaaggtgtgaactgtctggcctatgatgaagccatcatggctcagacaggaccgaattcagcaagagattgctgtgcagaaccctctggtgtcagagcggctggagctctcggtacctatacaaggagtatgctgaagatgacaacagtctatcagacagaagatcaaggagccgtccacaaaaagtactcgtacatccggcaagaccaggcctgacggcaactgtttctatcgggctttcggattctcccacttggaggcactgctggatgacagcaaggagttgcagacggtgagaagggtgggcactgggcagccgaggcaggtgggtgtctacctccgtccccgggcgagtaggatgtgtctcgagtagggtgtctccctccttcccgggcgatgggctggactctggccttgccaggcggggcagtgctgtctcggccctggcgtctgggctggtcgaggagcccatgctgggcccgcctttccatcccacccccaggttcaaggctgtgtctgccaagagcaaggaagacctggtgtcccagggcttcactgaattcacaattgaggatttccacaaacaccttcatggaccctgatttgagcaggggggagaaacaaaacttctgttcgcccaacctggttgggcctcctttcatggaccaaaaccaccttccgaacttccttgggggttctaccctgccggttggtttcccctccggggctacccttgcaacgccgaagaagcaaaagttctttcgaagacactttctttcctagggcgtggaaccgaccttgtttcaggggaaatttctgcccactcccaggaaggttggaagcccccatgttcgccacgggagaaggcggaccacacttcccaccttccattgggcgcctgggcccccaggcccccctccagggggggttcccatcctcaggggtgggaagttaaccttgggaacacccctgacacaaaaggcgccggtatacccaccccaattccccgcccacannnnnnnnnccccctgaaaggggggcttctcaaagccccccaagggggtctaaacactttttctctttatccggggctttttggtgaaaccctcaccaagatatcccccccctacaaaaaaatataggggccatgggggggtcccccca

SEQ ID NO: 74847 - DNA, 532 bp, Homo Sapiens
ccctagcctctcaggcagcttctctgtctcaattattgactcttcttttgtctgctttaaaagctgaagtttcagccttcttacattagatacatacaagataatgtattccattttccaagctgaatgattcctaaactaaatcttctcacctaaatctgagttcccactgcctactgggcatttctacttgactttccacatagatatctcaaagtcaatacgtttcaccttcacaaacttctccccttaaattcctaccacagtaaatgacaggactttctaaatcacagaagtgaaaaaatatgtcatcctatactcttccatctcactccctacatacaaatcagtctctcgagtcttacaaatcctatttttaatctgtcaattccatcccactgtgactgtttaatccctgatttcttttatagatcactgccagaaactttttgccaatttctctgtatatagagttagtttgaatccatcttctacaataatgcaaaagggttcaatgaaaagaaaaattctc

SEQ ID NO: 74848 - DNA, 731 bp, Homo Sapiens
cggacgcgtgcagcgcggctggtggcgagatgtgcgcgcttcgagaggaaggcttcaagttggtggcgctgaagctggtgcaggcctccggaggagctgctgcgtgagcactacgccgagctgcgtgaacgcccgttctacggccgccttgtcaagtatatggcctccgggccggtggtggccatggtatggcaggggctggacgtggtgcgcacctcgcgggcgctcatcggagccacgaacccggccgacgccccgcccggcaccatccgcggggatttctgcatcgaggttggcaagaacctgattcacggcagcgactcggtggagagtgcccgccgcgagatcgctctctggttccgcgcagacgagctcctctgctgggaggacagcgctgggcactggctgtatgagtagcccggcagatgcgcgtcacagaggctctcacactccagcctcctccagggcccaggtgggcgggcttctggccccaccccacagcgcttggagcatccctttggacgggctgctgaacatccacctgtctggacgttgcatggagggtggcgcaggcctctccaatccctggcgtacagggtttcctgcccgaggagctgctccaggagcctgcgcggctcgcctggaaacgtgccaggacactgtcctggtgcccagcccaacgtggtccaacgtttttttataataaagtcctcgttttcgtttcaaaaaaa

SEQ ID NO: 74849 - DNA, 964 bp, Homo Sapiens
  misc_feature (196)..(256): n is a, c, g, or t
cggtccggaattcccgggatgatctgcctggtgctgaccatcttcgctaacctcttccccgcggcctgcaccggcgcacacgaacgcaccttcctggccgtgaagccggacggcgtgcagcggcggctggtgggcgagattgtgcggcgcttcgagaggaagggcttcaagttggtggcgctgaagctggtgcagnnnnnnnnnnnnnnnnnnnnnnnnnnnnnnnnnnnnnnnnnnnnnnnnnnnnnnnnnnnnnacgcctaggtgccgggtgcgggcgcaggcggcctgacccttccgcaggcctccgaggagctgctgcgtgagcactacgccgagctgcgtgaacgcccgttctacggccgccttgtcaagtatatggcctccgggccggtggtggccatggtttggcaggggctggacgtggtgcgcacctcgcgggcgctcatcggagccacgaacccggccgacgccccgcccggcaccatccgcggggatttctgcatcgaggttggcaagaacctgattcacggcagcgactcggtggagagtgcccgccgcgagatcgctctctggttccgcgcagacgagctcctctgctgggaggacagcgctgggcactggctgtatgagtagcccggcagatgcgcgtcacagaggctctcacactccagcctcctccagggcccaggtgggcgggcttctggccccaccccacagcgcttggagcatccctttggacgggctgctgaacatccacctgtctggacgttgcatggagggtggcgcaggcctctccaatccctggcgtacagggtttcctgcccgaggagctgctccaggagcctgcgcggctcgcctggaaacgtgccaggacactgtcctggtgcccagcccaacgtggtccaacgtttttttataataaagtcctcgttttcgtttcggtttgggcccaggaacaggc

SEQ ID NO: 74850 - DNA, 981 bp, Homo Sapiens
  misc_feature (335)..(335): n is a, c, g, or t
  misc_feature (392)..(392): n is a, c, g, or t
  misc_feature (447)..(447): n is a, c, g, or t
tggggggcgcggcggaggagcggtaatagaagaacgggaccacggggctggcaccagacaggtctggacgtgccagcgacccggcaggtccggagcagctcttcggccaggaaacgtgacgccagggatggagaggctgcgccaccctgcaggcaacggtccagacaggtggatgttcagcagcccgtccaaaagggatgctccaagcgctgtggggtggggccagaagcccgcccacctggggcccggaggaggctggagtgtgagagcctcctgtgacgcgcatctgccgggctactcatacagccagtgcccagcgctgtcctcccagcagnaggagctcgtctgcgcggaaccagagagcgatctccgcggcgggcactctccaccgnagtcgctgccgtgaatcaggttcttgccaacctcgatgcagaaatccccgcggantggtgccgggcggggcgtcggccgggttcgtggctccgatgagcgcccgcgaggtgcgcaccacgtccagcccctgccaaaccatggccaccaccggcccggaggccatatacttgacaaggcggccgtagaacgggcggtcacgcagctcggcgtagtgctcacgcagcagctcctcggaggcctgcaccagcttcagcgccaccaacttgaagcccttcctctcgaagcgccgcacaatctcgcccaccagccgccgctgcacgccgtccggcttcacggccaggaaggtgcgttcgtgtgcgccggtgcaggccgcggggaagaggttagcgaagatggtcagcaccaggcagatcatgatggcggtgcgggagcgggatccgcggggcggggcggtggcgcccggggcggggcctgcgcttaaagaggcctggtcggggcgctgcggcctccgcggggaggctgcttcacttgcaccccggaacccggcagccgtggggggccggagggcagctgcggaggccaagtctc

SEQ ID NO: 74851 - DNA, 844 bp, Homo Sapiens
ttttttttgaggatgtgaagcaactttaatcgccaccctcagacggggcagcaggagtgtcttaagcacagggccgttctaccccctgggagctgcctggggccagcccctcagttctggctgtggcaggttccccatcctagctccccggatctccatagggagtgtccagggaccctcaatctccagggccacttctgcaggagctcgggttcgaggttccacgtggccagaagagctcaggtctctgagggctggtgtgcccgggtacccatccgcatcactgctctcctcctgtccggctacgcccagggctgagtgacggtggtggcaagtgcttgtcctcagggcagcgaggtcttctgttctgacagcagcagggactccttcatggccaccagtaaccccagtgggcggaggcgctcctgggctcggagccaggacaaaaggaggagggtggcggtgaccaggcttgcactgagcaccgcagcagctgcaataaccccataggcagttgggcttccagactggtctccggcagaggaggatgtggcattcccgacagaggggacactctccagggtcacagggggccccatggttgtggcattcctgagagaggtgacactctccagggtcacaggggtgccccatggttgtggcatccccttccgggaggatctcattggttccacagccgagctcgtcgctggagtcgggacagtctgggtggccgtcgcagcgccacgtgagtggaatgcagtcatcgctcagcgtgcaacggagctcgcctgctaggcaggccaggcggctgcagttgcgcagtttcttgtcagttccccca

SEQ ID NO: 74852 - DNA, 925 bp, Homo Sapiens
aggctggaccggtccggattcccgggatgagcggtctggacagcgcgtggccggcgccgctgtggggacagcatgagcggcggttggatggcgcaggttggagcgtggcgaacaggggctctgggcctggcgctgctgctgctgctcggcctcggactaggcctggaggccgccgcgagcccgctttccaccccgacctctgcccaggccgcaggccccagctcaggctcgtgcccacccaccaagttccagtgccgcaccagtggcttatgcgtgcccctcacctggcgctgcgacagggacttggactgcagcgatggcagcgatgaggaggagtgcaggattgagccatgtacccagaaagggcaatgcccaccgccccctggcctcccctgcccctgcaccggcgtcagtgactgctctgggggaactgacaagaaactgcgcaactgcagccgcctggcctgcctagcaggcgagctccgttgcacgctgagcgatgactgcattccactcacgtggcgctgcgacggccacccagactgtcccgactccagcgacgagctcggctgtggaaccaatgagatcctcccggaaggggatgccacaaccatggggccccctgtgaccctggagagtgtcacctctctcaggaatgccacaaccatggggccccctgtgaccctggagagtgtcccctctgtcgggaatgccacatcctcctctgccggagaccagtctggaagcccaactgcctatggggttattgcagctgctgcggtgctcagtgcaagcctggtcaccgccacccctccttccttttgtcctggctccgaagcccagaagcgcccccggcccactggggggttactgggggggccatggaaagggatcccctgcctggctgttcacaaaacagaaagaa

SEQ ID NO: 74853 - DNA, 912 bp, Homo Sapiens
cggtctggacagcgcgtggccggcgccgctgtggggacagcatgagcggcggttggatggcgcaggttggagcgtggcgaacaggggctctgggcctggcgctgctgctgctgctcggcctcggactaagcctggaggccgccgcgagcccgctttccaccccgacctctgcccaggccgcaggccccagctcaggctcgtgcccacccaccaagttccagtgccgcaccagtggcttatgcgtgcccctcacctggcgctgcgacagggacttggactgcagcgatggcagcgatgaggaggagtgcaggattgagccatgtacccagaaagggcaatgcccaccgccccctggcctcccctgcccctgcaccggcgtcagtgactgctctgggggaactgacaagaaactgcgcaactgcagccgcctggcctgcctagcaggcgagctccgttgcacgctgagcgatgactgcattccactcacgtggcgctgcgacggccacccagactgtcccgactccagcgacgagctcggctgtggaaccaatgagatcctcccggaaggggatgccacaaccatggggccccctgtgaccctggagagtgtcacctctctcaggaatgccacaaccatggggccccctgtgaccctggagagtgtcccctctgtcgggaatgccacatcctcctctgccggaaaccagtctggaagcccaactgcctatgggggttatggcagcctgctgcggaggctcagtgcaagcctggtcaccgccacccttcctccttttggtcctggcctccgagcccaggaaacgcctcccgcccacctgggggttactggtggggccatgaaggaatccccgtgctggcggtcaaaaacagaaagaccttccctggccctgaagc

SEQ ID NO: 74854 - DNA, 895 bp, Homo Sapiens
  misc_feature (81)..(100): n is a, c, g, or t
  misc_feature (325)..(362): n is a, c, g, or t
  misc_feature (466)..(498): n is a, c, g, or t
ggttggtaaacgaacgggccaagtgccatagccaaaattaaccctcactaaagggaaaaagcttgcggccgcctctcaggnnnnnnnnnnnnnnnnnnnncattatttagagaatactttattagtttctgtaatcaaacccatgtagataagaccttacatatttaatacagtgcgttacccctgtacaaatggaaaaaaattaagtttaacgtttctagaccaatatggctgttaatttctgtacaatgccaactcaacacagtaaaccgggatactttttccaaagttgacagcacagctaaagtttccaaaaattcaaatnnnnnnnnnnnnnnnnnnnnnnnnnnnnnnnnnnnnnnaaaagaccaatagcagtatgttatgcatcaatagcagcaacagcttttccaggttctgcagtcatctaaataaaattatagagacatccagcacactccatttnnnnnnnnnnnnnnnnnnnnnnnnnnnnnnnnnccccagaaaattgcaaagttctgttactgttgtggtacctggcaccgttttttaaaattagcttctgaatcatcatctggaaagaaaacattctagaataacatcattaaaaacagctctgataaagcacggtcactactacgtatcataaagcaggtacaagatattttacattcacagaggtatgatacagtactgtcctatatctataatactagaggatacaattaaaaaggcattatttgagacttgattctacttttccagcagagggcccaaaggatggcatgacacagctctgtaaagaaatgcaccttcttaggatttcctttaattagtggcacagttctaggtactcactgttcttcataaacaccagctaaaaactggtataaaa

SEQ ID NO: 74855 - DNA, 1159 bp, Homo Sapiens
  misc_feature (126)..(464): n is a, c, g, or t
  misc_feature (1060)..(1080): n is a, c, g, or t
tgagtaatttgtatctctagagggcggacattgaaaaagcagcaagcgcttatacgtactagcgtatgtgcatgtgataaatagtattactcaatatgcctgatatgtgataaccgtataccgcannnnnnnnnnnnnnnnnnnnnnnnnnnnnnnnnnnnnnnnnnnnnnnnnnnnnnnnnnnnnnnnnnnnnnnnnnnnnnnnnnnnnnnnnnnnnnnnnnnnnnnnnnnnnnnnnnnnnnnnnnnnnnnnnnnnnnnnnnnnnnnnnnnnnnnnnnnnnnnnnnnnnnnnnnnnnnnnnnnnnnnnnnnnnnnnnnnnnnnnnnnnnnnnnnnnnnnnnnnnnnnnnnnnnnnnnnnnnnnnnnnnnnnnnnnnnnnnnnnnnnnnnnnnnnnnnnnnnnnnnnnnnnnnnnnnnnnnnnnnnnnnnnnnnnnnnnnnnnnnnnnnnnnnnnnnnnnnnnnaagaattcggcacgaggaacaaatgcaaattgtggactaacagttttaaccaatataatctttttaaaaagctaatttaaataacagcatatgtctgaaataaacatgtactacttcaaaattatattctagaaataagattttatccacttttaggaagagtctacagtccatgtaggccgcatgttgaaagaaaatcactgtcttgttgcactacacatgtgtaagcatgatataaaaaacagtggtatacaacagttatgtgatgcactgtatctgaacagtagcctgcgctaccttgatgtcagctggtaagtgataatttacacattaataattcaaagttaaataatgggaataatctatataaatattcatggtacttgggatacgttgttagacattatttccaatgattagaaactgcaaccaattgtcaatcctttgtcctaagctttaatatttaatactgctatcttttagtaacataaatgagcaatttagttgtgtaaacaagaatgaaagcaatattttatggtgaattttcattaactttcttggaaatcaagtggttaaaataaacctttactaaaacnnnnnnnnnnnnnnnnnnnnngcctacagccgcggccgcaagctttttccctttagtgagggttaatttcggctatggcacttggcccgtcgttttaaca

SEQ ID NO: 74856 - DNA, 1496 bp, Homo Sapiens
  misc_feature (1379)..(1432): n is a, c, g, or t
ggggctgcacgtgtggtgaggcctacagaagcggccttcagctggaccttggtctccccgccggacttcgagggtgtcatcgccgcccctgttgggggtgagcgccgcgcggctgcagcatgcctcacaggaagaaaaagccctttatagagaagaagaaagctgtgtcttttcacttggtccaccggagccaacgagatcctttagcagcagatgagagtgcaccccagagggttctattgcccacacaaaaaatagacaatgaagaaaggcgagcagaacagaggaagtatggagtgttctttgatgacgactatgactacctgcagcacctgaaggaaccatctgggccttcagagcttattccctcaagtaccttcagtgcacacaacaggagagaggagaaagaagaaacgctagtaattccaagcactggaattaagttgccttcatcagtgtttgcttcagagtttgaggaagatgttggattgttaaataaagcagctccagtttcaggacctcgactggattttgatcctgacattgttgcagctcttgatgatgattttgactttgatgatccagataatctgcttgaggatgactttattcttcaggccaataaggcaacaggagaggaagagggaatggatatacagaaatctgagaatgaagatgacagcgagtgggaagatgtggatgatgagaagggagatagcaatgatgactatgactctgcaggcctattgtcagaatgaagactgtatgtcatgtgcccggaaaaactcacagagctatagcagatcacttgttctggagtgaggaaacaaagagtcgcttcacggagtattcgatgacttcctcagtcatgaggagaaatgaacagctgaccctacatgatgagaggtttgagaagttttatgagcaatatgatgatgatgaaattggagctctggataatgcagaattggaaggttctattcaagtggacagcaatcgcttacaggaagttttgaatgactactataaagagaaggcagagaattgtgtaaaattgaatacccttgaacccttggaggatcaagacctgccaatgaatgagcttgatgagtctgaggaggaagaaatgattactgtagtccttgaagaagccaaagagaagtgggattgtgaatctatttgtagtacatactcaaatttatataaccatccacagcttatcaagtatcaaccaaagcccaaacaaattcgaatatcttctaaaacaggaatacctctcaatgtcttaccaaagaaaggactcacagcaaagcaaactgaaagaatacagatgattaatggcagtgatcttcctaaagtatcaactcagccacgttctnnnnnnnnnnnnnnnnnnnnnnnnnnnnnnnnnnnnnnnnnnnnnnnnnnnnnncgcaaggaacgaagagtggagaagaaagctaacaaattagcatttaaactggagaaaagaaggc

SEQ ID NO: 74857 - DNA, 451 bp, Homo Sapiens
aagcaaagaagataaaagagcaagaaagcaagctataaaagaagagcgcaaggaacgaagagtggagaagaaagctaacaaattagcatttaaactggagaaaagaaggcaagaaaaagagctgctgaacttgaagaagaatgttgagggtctaaagctatagacagtggagcatacagggcaaggcactttattaggggctcctcatctttggttattgactagaaacttcagaaagacaaaactgtttgccatttttactggcagataagaggaaaatacaatatttgtattatttttatactagtaagtgtcccctgccaaccatcttgtaaatattgtaatactttaatttttaatattataagcttacatttgctctgaagtaaatgacttcatgaatgtgaaatgtttgataaattaaaggaaaatatcttcataacgtgaaaaa

SEQ ID NO: 74858 - DNA, 683 bp, Homo Sapiens
atgctatacttttctgtttagtttacactaggaaacgtgttgatctacagtaatgaaatgtttactaagtggactggtgtcataaactttctccatttaagacacattgactcctttccaatagaaagaaactaaacagaaaactcccaatacaaagatgactggtccctcatagccctcagacatttatatattggaagctgctgaggcccccaagttttttaattaagcagaaacagcatattagcagggattctctcatctaactgatgagtaaactgaggcccaaagcacttgcttacatcctctgatagctgtttcaaatgtgcattttgtggaattttgagaaaaatagagcaaaatcaacatgactggtggtgagagaccacacattttatgagagtttggaattattgtagacatgcccaaaacttatccttgggccataattatgaaaactcatgatcaagatatatgtgtatacatacatgtatctggtttgtcaggctacaaggtaggctgcaaaattaaatctagacattcttttaatgccaccacacgtgttccgcttctctcttttaaagtatttataaaaatataaattgtacattttgtaaaatattatgtttgatttctctacttgtcatatcactaaataaacacgattttattgctgcgtgaaa

SEQ ID NO: 74859 - DNA, 1708 bp, Homo Sapiens
gaggctgggtttcgaattcggcacggagggtcggctggaaggaactggtctgctcacacttgctggcttgcgcatcaggactggctttatctcctgactcacggtgcaaaggtgcactctgcgaacgttaagtccgtccccagcgcttggaatcctacggcccccacagccggatcccctcagccttccaggtcctcaactcccgcggacgctgaacaatggcctccatggggctacaggtaatgggcatcgcgctggccgtcctgggctggctggccgtcatgctgtgctgcgcgctgcccatgtggcgcgtgacggccttcatcggcagcaacattgtcacctcgcagaccatctgggagggcctatggatgaactgcgtggtgcagagcaccggccagatgcagtgcaaggtgtacgactcgctgctggcactgccgcaggacctgcaggcggcccgcgccctcgtcatcatcagcatcatcgtggctgctctgggcgtgctgctgtccgtggtggggggcaagtgtaccaactgcctggaggatgaaagcgccaaggccaagaccatgatcgtggcgggcgtggtgttcctgttggccggccttatggtgatagtgccggtgtcctggacggcccacaacatcatccaagacttctacaatccgctggtggcctccgggcagaagcgggagatgggtgcctcgctctacgtcggctgggccgcctccggcctgctgctccttggcggggggctgctttgctgcaactgtccaccccgcacagacaagccttactccgccaagtattctgctgcccgctctgctgctgccagcaactacgtgtaaggtgccacggctccactctgttcctctctgctttgttcttccctggactgagctcagcgcaggctgtgaccccaggagggccctgccacgggccactggctgctggggactggggactgggcagagactgagccaggcaggaaggcagcagccttcagcctctctggcccactcggacaacttcccaaggccgcctcctgctagcaagaacagagtccaccctcctctggatattggggagggacggaagtgacagggtgtggtggtggagtggggagctggcttctgctggccaggatggcttaaccctgactttgggatctgcctgcatcggtgttggccactgtccccatttacattttccccactctgtctgcctgcatctcctctgttgcgggtaggccttgatatcacctctgggactgtgccttgctcaccgaaacccgcgcccaggagtatggctgaggccttgcccacccacctgcctgggaagtgcagagtggatggacgggtttagaggggaggggcgaaggtgctgtaaacaggtttgggcagtggtgggggagggggccagagaggcggctcaggttgcccagctctgtggcctcaggactctctgcctcacccgcttcagcccagggcccctggagactgatcccctctgagtcctctgccccttccaaggacactaatgagcctgggagggtggcagggaggaggggacagcttcacccttggaagtcctggggtttttcctcttccttctttgtggtttctgttttgtaatttaagaagagctattcatcactgtaattattattattttctacaataaatgggacctgtgcacaggaaaaaaa

SEQ ID NO: 74860 - DNA, 1093 bp, Homo Sapiens
  misc_feature (977)..(977): n is a, c, g, or t
gctggaccggtccggaattcccgggatatcgtcgacccacgcgtccgcccacgctgtcggctggaaggaactggtctgctcacacttgctggcttgcgcatcaggactggctttatctcctgactcacggtgcaaaggtgcactctgcgaacgttaagtccgtccccagcgcttggaatcctacggcccccacagccggatcccctcagccttccaggtcctcaactcccgcggacgctgaacaatggcctccatggggctacaggtaatgggcatcgcgctggccgtcctgggctggctggccgtcatgctgtgctgcgcgctgcccatgtggcgcgtgacggccttcatcggcagcaacattgtcacctcgcagaccatctgggagggcctatggatgaactgcgtggtgcagagcaccggccagatgcagtgcaaggtgtacgactcgctgctggcactgccgcaggacctgcaggcggcccgcgccctcgtcatcatcagcatcatcgtggctgctctgggcgtgctgctgtccgtggtggggggcaagtgtaccaactgcctggaggatgaaagcgccaaggccaagaccatgatcgtggcgggcgtggtgttcctgttggccggccttatggtgatagtgccggtgtcctggacggcccacaacatcatccaagacttctacaatccgctggtggcctccgggcagaagcgggagatgggtgcctcgctctacgtcggctgggccgcctccggcctgctgctccttggcggggggctgctttgctgcaactgtccaccccgcacagacaagccttactccgccaagtattctgctgcccgctctgctgctgccagcaactacgtgtaaggtgccacgggctccactctgttcctctctgctttgttcttccctggactgagctcagcgcaggctggggaccccagggagggccctggcacgggccactggnctggctgggggactgggggaactggggcagagactgagccccagggcaggaaaggaaccaacccttcaaccctcttctgggcccaattcggacaactttcccaagggccggccttc

SEQ ID NO: 74861 - DNA, 1077 bp, Homo Sapiens
actggggcagtaactataacggttctaaggtagcgaggcctgggtggcgaattcggcacgagggccacaggcaggtgcaggcgcagccgcggcgagagcgtatggagccgagccgttagcgcgcgccgtcggtgagtcagtccgtccgtccgtccgtccgtcggggcgccgcagctcccgccaggcccagcggccccggcgcctcgtctccccgcacccggagccacccggtggagcgggccttgccgcggcagccatgtccatgggcctggagatcacgggcaccgcgctggccgtgctgggctggctgggcaccatcgtgtgctgcgcgttgcccatgtggcgcgtgtcggccttcatcggcagcaacatcatcacgtcgcagaacatctgggagggcctgtggatgaactgcgtggtgcagagcaccggccagatgcagtgcaaggtgtacgactcgctgctggcactgccacaggaccttcaggcggcccgcgccctcatcgtggtggccatcctgctggccgccttcgggctgctagtggcgctggtgggcgcccagtgcaccaactgcgtgcaggacgacacggccaaggccaagatcaccatcgtggcaggcgtgctgttccttctcgccgccctgctcaccctcgtgccggtgtcctggtcggccaacaccattatccgggacttctacaaccccgtggtgcccgaggcgcagaagcgcgagatgggcgcgggcctgtacgtgggctgggcggccgggcgctgcagctgctggggggcgcgctgctctgctgctcgtgtcccccacgcgagaagaagtacacgggcaccaaggtcgtctactccggcgcgctccaacggcccggaaccagcccgggcacaggctacgacccagactacgctaggcaacccggggagaaccccaccacccacacaaacacacaccacggagtgagggccagcccagggagccggccggagggccccccaaagaaccccgatggggttcccacagtgtggggattgcggccccggtggaccctccgggggggaaaacccacccccccggga

SEQ ID NO: 74862 - DNA, 1290 bp, Homo Sapiens
cagtgcccaggactcaaggtgactttgacccaggggccaagttccacattccttctagcgtgccttacatcaggtacttcgtcagcttcatcatccagttccagttccacgaggcactgtgccaggcagctggccacacgggccccctgcacaagtgtgacatctaccagtccaaggaggccgggcagcgcctggcgaccgccatgaagctgggcttcagtaggccgtggccggaagccatgcagctgatcacgggccagcccaacatgagcgcctcggccatgttgagctacttcaagccgctgctggactggctccgcacggagaacgagctgcatggggagaagctgggctggccgcagtacaactggacgccgaactccgctcgctcagaagggcccctcccagacagcggccgcgtcagcttcctgggcctggacctggatgcgcagcaggcccgcgtgggccagtggctgctgctcttcctgggcatcgccctgctggtagccaccctgggcctcagccagcggctcttcagcatccgccaccgcagcctccaccggcactcccacgggccccagttcggctccgaggtggagctgagacactcctgaggtgacccggctgggtcggccctgcccaagggcctcccaccagagactgggatgggaacactggtgggcagctgaggacacaccccacactccagcccaggcagcccgccactgtcctgccaccgcaggcagcccctgtctggcccaagcactgacccacgcggactctgggaagcagacatcctgggctgctggcctcacatttccactggcagtggagcctttccctgctccacaaatggccaggtccccccaggggaaggcttccggctgttatcggctgcctcagggggcgagtaccttggagggcctgcttcaaggagggtgccccctggagggcacacaccagcctagtgcttaccttggctcctgcctgtaccagctccatgactctgctcgggtgaacagccttggctctcagacagccattctaacactgccagtgcagaggggcctcagacgctggagtgtagcagtggctgcacctgcacagggattagctgccagcagccaccctgctggcgtcccagcacacacctcctcactccctgcattggagggagtgtcattttaagggacatttttatgacttttatgtgtatgtttatgtagaaatttggaaaatacagaaaactgtaaagaaaataaaagccctttatatcaacgtcaagagaaa

SEQ ID NO: 74863 - DNA, 1246 bp, Homo Sapiens
ttggatatggaaaccacctacagcgtggccactgtgtgccacccgaatggcagctgcctgcagctcgagccagatctgacgaatgtgatggccacatcccggaaatatgaagacctgttatgggcatgggagggctggcgagacaaggcggggagagccatcctccagttttacccgaaatacgtggaactcatcaaccaggctgcccggctcaatggctatgtagatgcaggggactcgtggaggtctatgtacgagacaccatccctggagcaagacctggagcggctcttccaggagctgcagccactctacctcaacctgcatgcctacgtgcgccgggccctgcaccgtcactacggggcccagcacatcaacctggaggggcccattcctgctcacctgctggggaacatgtgggcgcagacctggtccaacatctatgacttggtggtgcccttcccttcagccccctcgatggacaccacagaggctatgctaaagcagggctggacgcccaggaggatgtttaaggaggctgatgatttcttcacctccctggggctgctgcccgtgcctcctgagttctggaacaagtcgatgctggagaagccaaccgacgggcgggaggtggtctgccacgcctcggcctgggacttctacaacgagcatgacatcaactttctgatgaagatggcccttgacaagatcgcctttatccccttcagctacctcgtcgatcagtggcgctggagggtatttgatggaagcatcaccaaggagaactataaccaggagtggtggagcctcaggctgaagtaccagggcctctgccccccagtgcccaggactcaaggtgactttgacccaggggccaagttccacattccttctagcgtgccttacatcaggtacttcgtcagcttcatcatccagttccagttccacgaggcactgtgccaggcagctggccacacgggccccctgcacaagtgtgacatctaccagtccaaggaggccgggcagcgcctggcgaccgccatgaagctgggcttcagtaggccgtggccggaagccatgcagctgatcacgggccagcccaacatgagcgcctcggccatgttgagctacttcaagccgctgctggactggctccgcacggagaacgagctgcatggggagaagctgggctggccgcagtacaactggacgccgactccgctcgcactgcgcccggtacgggctc

SEQ ID NO: 74864 - DNA, 722 bp, Homo Sapiens
aaggagggtatgtagtcatggctggacgagacagacttctggagggactgggaggactatgcccatggtttagggaacatctctggagagttctggctgggcaatgaggccctgcacagcctgacacaggcaggtgactactccatgcgcgtggacctgcgggctggggacgaggctgtgttcgcccagtacgactccttccacgtagactcggctgcggagtactaccgcctccacttggagggctaccacggcaccgcaggggactccatgagctaccacagcggcagtgtcttctctgcccgtgatcgggaccccaacagcttgctcatctcctgcgctgtctcctaccgaggggcctggtggtacaggaactgccactacgccaacctcaacgggctctacgggagcacagtggaccatcagggagtgagctggtaccactggaagggcttcgagttctcggtgcccttcacggaaatgaagctgagaccaagaaactttcgctccccagcggggggaggctgagctgctgcccacctctctcgcaccccagtatgactgccgagcactgaggggtcgccccgagagaagagccagggtccttcaccacccagccgctggaggaagccttctctgccagcgatctcgcagcactgtgtttacaggggggaggggaggggttcgtacaggagcaataaaggagaaactgaggtccccgg

SEQ ID NO: 74865 - DNA, 594 bp, Homo Sapiens
aaagccttcccggagacagaggcccccctggattcagaggaagccaagggatgcctgggatgccagggctgaagggccagccaggcctcccaggaccttccggccagccaggcctgtatgggcctccaggactgcatggattcccaggagctcctggccaagaggggcccttggggctgccaggaatcccaggccgtgaaggtctgcctggtgatagaggggaccctggggacacaggcgctcctggccctgtgggcatgaaaggtctctctggtgacagaggagatgctggcttcacaggggagcaaggccatccaggaagccctggatttaaaggaattgatggaatgcctgggacccccgggctaaaaggagatagaggctcacctgggatggatggtttccaaggcatgcctggactcaaagggagacccgggtttccagggagcaaaggcgaggctggatttttcggaatacccggtctgaagggtctggctggtgaaccaggttgtaaaggcagccgaggggaccctgggcccccaggaccacctcctgtcatcctgccaggaatgaaagacattaaaggaaggaagg

SEQ ID NO: 74866 - DNA, 493 bp, Homo Sapiens
cccaccttggggggtcacggattgctccctgtggccctggcttcagcccacctgctccatgaccctatgctcttctcctctggttctcgaagctgtctgtaaccagggcaggggagataactgtatgggaccattccctggcctccacctgccccagcactctccaggccagcacagtctggcactacagactacagggccggagacaccaggcttggaagtgaccactggccaagagctgacataaaagccaacttccccaaacaggaagggcctgttcttcacaaagataaagaaaactgccagcattttgctggccttaagaagccatgcaaaattaaccagtacatcatgaattaacttcttttactctgctgtgcactgaataccattatgaagcaatatacttttggattaaaaataagcatttttgtggaaaatctgctacatgttttcataaaataaagtgctatgatgtactaaaacctcaaaa

SEQ ID NO: 74867 - DNA, 1183 bp, Homo Sapiens
  misc_feature (1058)..(1067): n is a, c, g, or t
tctaggagcgggcctgggtggcgaattccgcacgagggctgtgcggcctgcgggcgcgcgctcccttatcggccaacggacgcgaggcgcgcgccatggaacagcggttagctgagtttcgggcggcgcggaaacgggcgggtctggcggcccaaccccctgctgccagtcagggcgcacaaaccccaggagagaaggcggaagcagcagcgactctaaaggcagccccaggctggctaaagcggttcctggtatggaaacctaggcccgcgagtgcccgggcccagcccggcctagttcaggaagcggctcagccccagggcagcacatcagagacaccatggaacacagccattcctctgccgtcgtgctgggaccagtctttcctgaccaatatcaccttcttgaaggttcttctctggttggtcctgctgggactgtttgtggaactggaatttggcctggcatattttgtcctgtccttgttctattggatgtacgtcgggacacgaggccctgaagagaagaaagagggagagaagagcgcctactctgtgttcaatccaggctgtgaagccatccagggcaccctgactgcagagcagttggagcgcgagttacagttgagacccctggcagggagataggacccagctgtgctgtcatgcagctaacctctgatgtggtcttcctcaccattggctatggatttgatttcaggtgtataggactaagggcagcttgcgggttagctctgtgactgcatagtttttctaccttctttccctgatcttttgctgccatttgatctttgatagttttggtgaaactctctaaaatacattcactgtgggtccgacgcaatttataaaaattatgtactcaagaagggagacctgtttgtttcatttctcatctgtttgggagatgattttagagcactagaaaggcactggggagattctcagcttaaaacatccagcagtttgaagtatgattaggtacatcagggctgcattgtcaatgttctctttaagtcttttaacatttatagcaannnnnnnnnncccggagagtttaggttgcaagttttgggtttcttgtttgtttttgttttgcttcctgctttaattctttaattttcagtcattactggtattgaaaaataaaatatctttaaaac

SEQ ID NO: 74868 - DNA, 659 bp, Homo Sapiens
  misc_feature (15)..(15): n is a, c, g, or t
  misc_feature (66)..(66): n is a, c, g, or t
agctttgcttctccnaggtagtacagactgagggatggtgggtctctgcaggcctcaggaaacccntaagagcaagtggagtccgagtcccttccccttgccagttcccgtcagcctgtgctgttggcgatggttctctgagcctgagcacagcgggtccgggccctgtcagcatggggccggaagccagttccacagaggaccccggctccggttcttccggagaggggtgttcatgctctgctgtctaaggtgatcagactcatcctcttcaaaattagatgtgggaaccaggagtgctcgtgtgctgagagcccagtgaggcacgggagcggcgtggccccccttccctgggaagatgttgaagaggggcagcgttggggggaggagggagctggtgctgcagtggccagtggctgtggctcatttcaggcctcaagctccggggaaaggacattggaaagcccatcgagaaggggcctagggcgaaatgaacacaaagcctcgaaatcagtgcgctccagctgatctcgttccgccggttccccttggccgccagttccgttctcctcacgggccgaacggaacaaggggtccagcttgcgggggaccctccccagcccattcctgctgtcaaacaaacaaaaccttgcaaagcg

SEQ ID NO: 74869 - DNA, 692 bp, Homo Sapiens
gctggaccggtccggattcccgggatatcgtcgaccacgcgtccggccggacggacgctcgtcttcgcccgccatggccgagagcgactgggacacggtgacggtgctgcgcaagaagggccctacggccgcccaggccaaatccaagcaggctatcttagcggcacagagacgaggagaagatgtggagacttccaagaaatgggctgctggccagaacaaacaacattctattaccaagaacacggccaagctggaccgggagacagaggagctgcaccatgacagggtgaccctggaggtgggcaaggtgatccagcaaggtcggcagagcaaggggcttacgcagaaggacctggccacgaaaatcaatgagaagccacaggtgatcgcggactatgagagcggacgggccatacccaataaccaggtgcttggcaaaatcgagcgggccattggcctcaagctccggggaaaggacattggaaagcccatcgagaaggggcctagggcgaaatgaacacaaagcctcgaaatcagtgcgctccagctgatctcgttccgccggttccccttggccgccagttccgttctcctcacgggccgaacggaacaaggggtccagcttgcgggggaccctccccagcccattcctgctgtcaaacaaacaaaaccttgcaaagcgcaaaaaa

SEQ ID NO: 74870 - DNA, 1383 bp, Homo Sapiens
  misc_feature (865)..(928): n is a, c, g, or t
  misc_feature (1250)..(1311): n is a, c, g, or t
tggggggaggaggaatacggctaggtacgaggcctggggtttaaatcggcacgaggctctagcagctgccgctgagccgccggacggacgctcgtcttcgcccgccatggccgagagcgactgggacacggtgacggtgctgcgcaagaagggccctacggccgcccaggccaaatccaagcaggctatcttagcggcacagagacgaggagaagatgtggagacttccaagaaatgggctgctggccagaacaaacaacattctattaccaagaacacggccaagctggaccgggagacagaggagctgcaccatgacagggtgaccctggaggtgggcaaggtgatccagcaaggtcggcagagcaaggggcttacgcagaaggacctggccacgaaaatcaatgagaagccacaggtgatcgcggactatgagagcggacgggccatacccaataaccaggtgcttggcaaaatcgagcgggccattgatgtgggaaccaggagtgctcgtgtgctgagagcccagtgaggcacgggagcggcgtggccccccttccctgggaagatgttgaagaggggcagcgttggggggaggagggagctggtgctgcagtggccagtggctgtggctcatttcaggcctcaagctccggggaaaggacattggaaaagcccatcgagaaggggcctagggcgaaatgaacacaaagcctcgaaatcagtgcgctccagctgatctcgttccgcggttcccttgggcgccagttccgttctcctcacggggccgaacggaaccagggggtccagcttggagggggaacctccccagccaattcctggtgtccaacagacaaaactttgnnnnnnnnnnnnnnnnnnnnnnnnnnnnnnnnnnnnnnnnnnnnnnnnnnnnnnnnnnnnnnnnaaagcagagccggcagaagaaatcactctagacgagcaaaagaagcaagagcaaggagcaggccgcaacaaagatgcgaagacgcacgattgtgaacacgaagaaaaggcgccccacaatagggagaacatactgaccggacaataataagagctagacatcacgacacagaagaagaagcagaaagagagaacgcagaaaacacaacgacgacaagagcggacgcaaggaagcgacacggagacaagagccagcacgacaggagcagcacaacgagagcaggacgagcagacgacacgcatagcgagaagcaggacaagcnnnnnnnnnnnnnnnnnnnnnnnnnnnnnnnnnnnnnnnnnnnnnnnnnnnnnnnnnnnnnncagggaacgagcaagaaaagacaaggagacagaaaaagaggagcacgagcgaagagacagcacgcgagaagc

SEQ ID NO: 74871 - DNA, 776 bp, Homo Sapiens
  misc_feature (740)..(740): n is a, c, g, or t
  misc_feature (746)..(746): n is a, c, g, or t
ggacagagtgaaaatcttaagtcccaatgggaagcagggaattccttggggtaaagtatcacttttctggggcggggctaggcataggtctctttgctttctggtggtggcctgtttgaaagtaaaaacctggttggcgtgtaggttccgtatctccctggagaagcaccagcaattctctttcttttactgttatagaatagcctgaggtcccctcgtcccatccagctaccaccacggccaccactgcagccaggggctggccttctcctacttagggaagaaaaagcaagtgttcactgctccttgctgcattgatccaggagataattgtttcattcatcctgaccaagactgagccagcttagcaactgctggggagacaaatctcagaaccttgtcccagccagtgaggatgacagtgacacccagagggagtagaatacgcagaactaccaggtggcaaagtacttgtcatagactcctttgctaatgctatacaaaaaattctttagagattataacaaatttttcaaatcattccttagataccttgaaaggcaggaagggaagcgtatatacttaagaatacacaggatattttggggggcagagaataaaacgttagttaatccctttgtctgtcaatcacagtctcagttctcttgctttcacattgtacttaaacctcctgctgtgcctcgcatcctacgcttaataaaagaacatgcttgaatacnccccancaaaccccccaaagaaattacaacatggtc

SEQ ID NO: 74872 - DNA, 1239 bp, Homo Sapiens
  misc_feature (501)..(640): n is a, c, g, or t
  misc_feature (738)..(798): n is a, c, g, or t
gaattcggcacgaggaggggagcagttcagctcgtgagaatcggttcgaaaccgccaagtcttttgccctccatggtgcacatgtgatcttggcctgcaggaacatggcaagggcgagtgaagcagtgtcacgcattttagaagaatggatgaaagactgagtcttagggaagaaacagccgagagatgaaatgccacagggatgtctaggttcaaacagcaacagagagagaaggagaaattcctgcagatcatcagggaccgaggcgtaactgaaactttggaatggatacagtgctactctcagctgaaagcacaaatcacttccatcacgtatatgagattcctcttgcagcactgcagaggggtgataagcaagagttgatcgatgacagaacacccacccaatttcttgactcattcttcaacgggcagggtctatacatgtggtatggctgcaatgtttgttgataacccctacattcacaaaacgggcgcatnnnnnnnnnnnnnnnnnnnnnnnnnnnnnnnnnnnnnnnnnnnnnnnnnnnnnnnnnnnnnnnnnnnnnnnnnnnnnnnnnnnnnnnnnnnnnnnnnnnnnnnnnnnnnnnnnnnnnnnnnnnnnnnnnnnnnnnnnnnnttgaggtgtagagctgttgaagaacttgcccagggttgcagagctctttcacaggggcagagcatgggctgaacaccagacctgtctcacactaaagnnnnnnnnnnnnnnnnnnnnnnnnnnnnnnnnnnnnnnnnnnnnnnnnnnnnnnnnnnnnnagctgtgtaatattccacaacccagaggagcagcttgaagccagctaaactgtcattggttggacacagtgatcctcgggtctcttgtgttttcacatgtcttgggaacagaagtgctggcagctttggtttcaggccatctttccaaggaacgttgtctagcaaagaaacttgcaaggtacagatagtgtctccctcaggagcagaggacaggatggctttctttccagtataataaagacagtgcctccttccaggacaacggtttggcagatttgcttgataaaggttggggtttgtaagcttggggctcctcagccatgactgaaacgtactatgagcacggcatctaccgggctgttccacatcctccctgtgggactaggggccagggcaatgggaatcagtgcagaaataaagctcatgctgtttgctctgaaa

SEQ ID NO: 74873 - DNA, 806 bp, Homo Sapiens
acggcagtactataacggtctaaggtagcgaggcctgggtggcgaattcggcacgaggggcgtgagcggtcgggccccgacgcgcgcgggtctcgtttggagcgggagtgagttcctgagcgagtggacccggcagcgggcgataggggggccaggtgcctccacagttagccatggcagcgctgcgctacgcggggctggacgacacggacagtgaggacgagctgcctccgggctgggaggagagaaccaccaaggacggctgggtttactacgccaatcacaccgaggagaagactcagtgggaacatccaaaaactggaaaaagaaaacgagtggcaggagatttgccatacggatgggaacaagaaactgatgagaacggacaagtgttttttgttgaccatataaataaaagaaccacctacttggacccaagactggcgtttactgtggatgataatccgaccaagccaaccacccggcaaagatacgacggcagcaccactgccatggaaattctccagggccgggatttcactggcaaagtggttgtggtcactggagctaattcaggaatagggttcgaaaccgccaagtcttttgccctccatggtgcacatgtgatcttggcctgcaggaacatggcaagggcgagtgaagcagtgtcacgcattttagaagaatggaaaacaaaataccaccctccgccagaaaagtgcagaataaaaattttccactagcaaaagaaggaaaaaataaaagatcttgaatagtctcatcaattacatcttcttttgtgggta

SEQ ID NO: 74874 - DNA, 571 bp, Homo Sapiens
tggcagaaggctgggggtgaatcggcacgaggcaggcgtgagcggtcgggccccgacgcgcgcgggtctcgttggagcgggagtgagttcctgagcgagtggacccggcagcgggcgataggggggccaggtgcctccacagtcagccatggcagcgctgcgctacgcggggctggaccgacacggacagtgaggacgagctgcctccgggctgggaggagagaaccaccaaggacggctgggtttactacgccaagtaagggggccgcagtggggccgcggacgcacctgggaccctgcacagcccacggacgccacctgcgcggggaggacgcgcactccagcgcagcgcgtgcggtgcaaagtgaaagtaactgttaaggagcttcagggaaaagggtccagggttcccagtaggggccggcccccttggtgggcctcgggtccagcgggggtcacctggtggcttcccggcgcgccctctgctgttcaggatgcagcactgcgcggcgcggcgagggcaaagcggcctcatccccgccaaaaaataaagatgttttaaaaagcgaaa

SEQ ID NO: 74875 - DNA, 924 bp, Homo Sapiens
ggacggcagtaactataacggttctaaggtagcgaggcctgggtggcgaattcggcacgaggccgcagttagccatggcagcgctgcgctacgcggggctggacgacacggacagtgaggacgagctgcctccgggctgggaggagagaaccaccaaggacggctgggtttactacgccaatcacaccgaggagaagactcagtgggaacatccaaaaactggaaaaagaaaacgagtggcaggagatttgccatacggatgggaacaagaaactgatgagaacggacaagtgttttttgttgaccatataaataaaagaaccacctacttggacccaagactggcgtttactgtggatgataatccgaccaagccaaccacccggcaaagatacgacggcagcaccactgccatggaaattctccagggccgggatttcactggcaaagtggttgtggtcactggagctaattcaggaatagggttcgaaaccgccaagtccttttgccctccatggtgcacatgtgatcttggcctgcaggaacatggcaagggcgagtgaagcagtgtcacgcattttagaagaatggcaacagggagctgccaccaccgtgtactgtgctgctgtcccagaactggagggtctgggagggatgtacttcaacaactgctgccgctgcatgccctcaccagaagctcagagcgaagagacggcccggaccctgtgggcgctcagcgagaggctgatccaagaacggcttggcagccagtccggctaagtggagctcagagcggatgggcacaacacccgacctgtgttgtgtccctcacgcaagtgccaggctgggccctttcaaatgtccttcaacaagatccgcagcagtcaggaatagagattcacacagactgcaaatcttagtaca

SEQ ID NO: 74876 - DNA, 1352 bp, Homo Sapiens
  misc_feature (770)..(906): n is a, c, g, or t
  misc_feature (914)..(927): n is a, c, g, or t
  misc_feature (945)..(1021): n is a, c, g, or t
  misc_feature (1032)..(1130): n is a, c, g, or t
  misc_feature (1147)..(1156): n is a, c, g, or t
aacagagaaaagctagacaaaatgataagatcagccatatttcattttgaatctgcagtggaaaaaaagcccacatttgagggtggctcatctagacctggcaagaatgtatatagaagcaggcaatcacagaaaagctgaagagaattttcaaaaattgttatgcatgaaaccagtggtagaagaaacaatgcaagacatacatttccactatggtcggtttcaggaatttcaaaagaaatctgacgtcaatgcaattatccattatttaaaagctataaaaatagaacaggcatcattaacaagggataaaagtatcaattctttgaagaaattggttttaaggaaacttcggagaaaggcattagatctggaaagcttgagcctccttgggttcgtctacaaattggaaggaaatatgaatgaagccctggagtactatgagcgggccctgagactggctgctgactttgagaactctgtgagacaaggtccttaggcacccagatatcagccactttcacatttcatttcattttatgctaacatttactaatcatcttttctgcttactgttttcagaaacattataattcactgtaatgatgtaattcttgaataataaatctgacaaaatattagttgtgttcaacaattagtgaaacagaatgtgtgtatgcatgtaagaaagagaaatcatttgtatgagtgctatgtagtagagaaaaaatgttagttaactttgtaggaaataaaacattggacttacnnnnnnnnnnnnnnnnnnnnnnnnnnnnnnnnnnnnnnnnnnnnnnnnnnnnnnnnnnnnnnnnnnnnnnnnnnnnnnnnnnnnnnnnnnnnnnnnnnnnnnnnnnnnnnnnnnnnnnnnnnnnnnnnnnnnnnnnnttgggggnnnnnnnnnnnnnnaaaaaattttttaaaacnnnnnnnnnnnnnnnnnnnnnnnnnnnnnnnnnnnnnnnnnnnnnnnnnnnnnnnnnnnnnnnnnnnnnnnnnnnnngggttggattnnnnnnnnnnnnnnnnnnnnnnnnnnnnnnnnnnnnnnnnnnnnnnnnnnnnnnnnnnnnnnnnnnnnnnnnnnnnnnnnnnnnnnnnnnnnnnnnnnntcttcttttaaaatttnnnnnnnnnngggcattttttaaaaagtggggggaattttttaaccttcccgcccccatgggaccccctccaaccgggtggtggtaaccctaattcccccgggggtatccccccttggccctggggaaaaaattttcccccgggacggaaagcttgctaaatgacccgtgaatcactgactcactatagagtaattaggcttccaa

SEQ ID NO: 74877 - DNA, 982 bp, Homo Sapiens
ggggccattttgtgaggtgccgccgtctctcctccagcaaggtcaggacttcaggactgaaacaatgaccgataaaacagagaaggtggctgtagatcctgaaactgtgtttaaacgtcccagggaatgtgacagtccttcgtatcagaaaaggcagaggatggccctgttggcaaggaaacaaggagcaggagacagccttattgcaggctctgccatgtccaaagaaaagaagcttatgacaggacatgctattccacccagccaattggattctcagattgatgacttcactggtttcagcaaagataggatgatgcagaaacctggtagcaatgcacctgtgggaggaaacgttaccagcagtttctctggagatgacctagaatgcagagaaacagcctcctctcccaaaagccaacgagaaattaatgctgatataaaacgtaaattagtgaaggaactccgatgcgttggacaaaaatatgaaaaaatcttcgaaatgcttgaaggagtgcaaggacctactgcagtcaggaagcgattttttgaatccatcatcaaggaagcagcaagatgtatgagacgagactttgttaagcaccttaagaagaaactgaaacgtatgatttgagaatacttgtccctggaggattatcacaccccaaatgcataatctcgttaatgattgaggagagaaaaggatcagattgctgttttctacaatggagcaggatattgctgaagtctcctggcatatgttaccgaatcaactggccttccagaggctaagaaatttctgttagtaaaagatgttctttttccccaaagcgttttatttgaaaggataacttgtgttttggttatttgtgtattcccacctgttgctggtaggatattattaacccatttaggtaaatactaattacagtcgtggtttctgcaagcagctcccactggatgtagctggcgtttatactac

SEQ ID NO: 74878 - DNA, 1253 bp, Homo Sapiens
  misc_feature (1236)..(1236): n is a, c, g, or t
gattcagaattaggtaaacatctgaaggtttagtatattagaaacacccaaaccagtaatatgctaacctgatgcactgctgaaagaaaatgtgaatttttcgtaataattgcattttagtgaattgtacagtgggtggaaagggcatttggagctcattagaatgagacatagtacaccccaatggccctgtttattaaatgtagtggattaagtgtctgtcaacaaatacaccaaaaccattttttatagaaacagtatttaatggtcactcaatagctttcaaaatacatttttgtattacagcactgcacaagctattctaatagtgctctggcctcatcattcctgcaaagcttgctttggggagttggataatgtgaaaattttaagtacctaggggagaaagagccatgtaaatatctgtaataaacttgtagcatatgtaaagttttcttggcctttatcttacaaaaatggagtattttagtatgaatttgctgaatgtaagaccgtggactgttttttataatatggcctaattttaaaggtccaaaataacttgtttttaaagtttgcccttgtgctaaagtgccagtgtatgtatgttatacttgatttggttgtaaactatatttcaaagtaaaccctagtgtaataagttttataactaaaaaggtttaagctgctaaaactatttttaagagatgtgaaatgcagtatgggactatctttttttcctcctctaagcccaaagattaactagagtccctccaaccttatagattgttggctttcacaatcttataacctaggatacaggtagtttcgagtatggtgccagtgatgttttgtttttgtttggtcaaggggtaggtgcaacccaatggaccacttatgcaaaagatgtaaactcttgcataatacattgataacatgttttgccaactttaaatgcttaaacataagcgaaaccagtagcaagtatgtgggtcagcttaaaaattttgattgttaatgccctattttctaatttggcacctcttgatgcctaagcaggtaagcagatgcctaagctgtatttctccaaataaatcaagatgaagtactgcccaagttaaatattgatagcctaaagacaagtttatgtagtacttaatgtacatgatatgaagcataaaattaaataaaatttttccccattggcttggttttatttcgccgcggcgcggagancgcgggcaaaaaactgt

SEQ ID NO: 74879 - DNA, 740 bp, Homo Sapiens
aacttacggctaggtagcgaggcctgggtgttgaattcggcacgaggccaccacccgcgtagcaccggcagccgctgtcccggcagtctccagccgtcccgcccgcttgtggccaactggctccagtcactccccgaaatgccagtcgacttcactgggtactggaagatgttggtcaacgagaatttcgaggagtacctgcgcgccctcgacgtcaatgtggccttgcgcaaaatcgccaacttgctgaagccagacaaagagatcgtgcaggacggtgaccatatgatcatccgcacgctgagcacttttaggaactacatcatggacttccaggttgggaaggagtttgaggaggatctgacaggcatagatgaccgcaagtgcatgacaacagtgagctgggacggagacaagctccagtgtgtgcagaagggtgagaaggaggggcgtggctggacccagtggatcgagggtgatgagctgcacctggagatgagagtggaaggtgtggtctgcaagcaagtattcaagaaggtgcagtgaggcccaggcagacaaccttgtcccaaggaatcagcaggatgtgtgggccaggatccccctctttgcacagcatgaggcaaaaatgtccagccacccccaggcatctgttagcagagtctgtctcttggctttgtcacttttccttttcttaaaacaaagccatgccaataaagtgatctgtgttcaaaacgtca

SEQ ID NO: 74880 - DNA, 943 bp, Homo Sapiens
  misc_feature (24)..(24): n is a, c, g, or t
ctgacatatacatacatacagtgnaatattattcagcttccaaaaggaagaaaattctgacatatgctgtgacatggatgcaccttgagtacattatgctaggtgaaataagccagtcacaaaaacaaatactgcatgattccatttaaatgaggggcctagaatatcaacttcatagacataagttagaatggtggttgccaggggctgggaggagggggtaggggttaggttttaataaatatcatttcagttttacaagatgaagagagttttgcagatgggttgtgggcataattgtacaacattatcaatgtatttaataccactgaattgtacacttaaaatggttaagatggtaaattttatgtgtgttttaacacaataaaaactgaaaaaagggatatatgttaccctaaataaaaaattcgtatgctgaactcagaacccccagtacctaagaacatgaccttatttggaaatgagattgttgttaatgtaattagttaagatgaggtcatgctgtaatagggtgggccccctaatccagtatgatttgtgtctttataaaaaagggaaatttgtgcacagagataacacaggggatatgccatatgaagatgaaggcagaattctacaagcccagggatgccaaagattgccagcaaaccaccagaagctaggagagaagtgtggattagattcttcctcacagccctcagaaggatccagccctgccaagaacttgatctcagacttctagtctccagaactgtgagacagtgcattttgttttgtaagtcagccatatggtttgtggcacttttttatggcagccctaggagatgaagacaatatgcaacatggtatgtccattataggacactgtgggccataaatgtgttctttggcctgaagaaataaaacttggaggtccaagttg

SEQ ID NO: 74881 - DNA, 859 bp, Homo Sapiens
accatgccatacttggttgactattttgagcattaaaattgctgtactaattatttagacatgatcacaattctgtatctttactgaggaaagattcacgtaagctctgaaaaatcggattctttggcagattttcctttgagtcaagtgtctgaaatggagtgaaaatatatcctaactaaattaatgtggaaagagcatttttttagacaatttcaattttaaacacataaaactttcaagatcttcaggactttttaaagcacatttgaaattattttagtaagaattttgttttatcaatagatgttgaattctgttttttaattaaatacaaagcttagatttcagaaagagagggaaaatagctggtggtcccagagtgtgctgctgttaattgtttaacaaaggggaaaatgtacataaacagataaagttaccataaattccatgaacttaaatctgtgattcattgccttaaaactttctctcttagaatttccataccgcatgccaaaccagtaaaatggcttttaaaaatgtatagtagacaatgtcagtttgtataaaagtaccaagtgaaaatatttattacatgcattggaaaaaaattgtttacctattgaatgttacctgtttatgtagagctctttagatgtaataaaagaaaagccttcagttaatttgtcttctgtaaaataacactgctggatgttcaaggggacaatccctatgagacaagtgataatggtttgtgcttccaaagcacctttcatccagagatttcaaagcatgacaagtaactaactaattttcttgcagcatgctttgaggtaagtaatgaatatagccctcgtgc

SEQ ID NO: 74882 - DNA, 990 bp, Homo Sapiens
  misc_feature (81)..(81): n is a, c, g, or t
  misc_feature (85)..(85): n is a, c, g, or t
  misc_feature (114)..(114): n is a, c, g, or t
  misc_feature (137)..(137): n is a, c, g, or t
  misc_feature (157)..(157): n is a, c, g, or t
  misc_feature (175)..(175): n is a, c, g, or t
  misc_feature (272)..(272): n is a, c, g, or t
  misc_feature (299)..(299): n is a, c, g, or t
  misc_feature (339)..(339): n is a, c, g, or t
  misc_feature (364)..(364): n is a, c, g, or t
caaagagactgggtcactgtgcaaagggggatccaacagttctctgctcaacatcatgcgagaagactgcgaccaatgacnaatnatgacccccagcccatctgcccactgtcncagtctccttctcgaaagagtgnagtgcatgagctccaagacngtgtggaactgttgtgtngaggagttggcaccggcctcgaccggaatgcctgcagatcacatcaagccaagcacaggattgagagccacacgtatgtgagtctgcaccacgcctnacccaaaagccaatctcaacatgcacntgcgcacacacacgggtgagaacccttccagtgccacctntgtgcaagaccttccgaacccaagnccagcctggacaagcacaaccgcacccacaccggggaaaaggcccttcagttgcgagttctgtgaacagcgcttcactgagaaggggcccctcctgaggcacgtgcccagccgccatcaggagggccggccccacttttgccagatatgcggcaagaccttcaaagccgtggagcaactgcgtgtgcacgtcagacggcaccaagggggtgaggaagtttgagtgcaccgagtgtggctacaagtttacccgacaggcccacctgcggaggcacatggagatccacgaccgggtagagaactacaacccgcggcagcgcaagctccgcaacctgatcatcgaggacgagaagatggtggtggtggcgctgcagccgcctgcagagctggaggtgggctcggcggaggtcattgtggagtccctggcccagggcggcctggcctcccagctccccggccagagactgtgtgcagaggagagcttcaccggcccaggtgtcctggagccctccctcatcatcacagctgctgtccccgaggactgtgacacatagcccattctggccaccagagcccacttggccccacccctcaataaaccgtgtggctttggactctcaaaaaaaa

SEQ ID NO: 74883 - DNA, 1153 bp, Homo Sapiens
  misc_feature (71)..(80): n is a, c, g, or t
  misc_feature (486)..(494): n is a, c, g, or t
  misc_feature (710)..(783): n is a, c, g, or t
  misc_feature (787)..(789): n is a, c, g, or t
  misc_feature (793)..(793): n is a, c, g, or t
  misc_feature (800)..(800): n is a, c, g, or t
ggttttaaaagcacaatcactaaactttatttgtaaaccattgtaactattaaccttttttgtcttattgnnnnnnnnnntgttgagaagcgtttttaacctgttttgttaatgctctatgtttgtatttggaatatttgaataatgacagatggtgaagtaacatgcatactttattgtgggccatgaaccaaatggttcttacttttcctggacttaaagaaaaaaagaggtttaagtttgttgtggccaatgtcgaaacctacaagatttccttaaaatctctaatagaggcattacttgctttcaattgacaaatgatgccctctgactagtagatttctatgatccttttttgtcattttatgaatatcattgattttataattggtgctatttgaagaaaaaaatgtacatttattcatagatagataagtatcaggtctgaccccagtggaaaacaaagccaaacaaaactgaaccacnnnnnnnnnggctggtgttcaccaaaaccaaacttgttcatttagataatttgaaaaagttccatagaaaaggcgtgcagtactaagggaacaatccatgtgattaatgttttcattatgttcatgtaagaagccccttatttttagccataattttgcatactgaaaatccaataatcagaaaagtaattttgtcacattatttattaaaaatgttctcaaatnnnnnnnnnnnnnnnnnnnnnnnnnnnnnnnnnnnnnnnnnnnnnnnnnnnnnnnnnnnnnnnnnnnnnnnnnncccnnnaaancccttgngggccccctggccccccaaaaattttctaaaaccttttgtttggcggcggggccccggggggaaagtgaaactgggcctaaagtggttcccaaggaaaacccggggccagaaaaaggggtttggatttccccccccataaaaaaagcccccggggggaaacccaagaggtttttggaaaaacccccaaaggggatttcttagggggccttcaccggggggtcttactcaccgggggttcccaaaggaggccccaaaattcaaaaataaacgcccccgccccctggcccttttatttggaaaaaacggggggggaaatttccctttaaagcttttcccggccaaaactgggaaa

SEQ ID NO: 74884 - DNA, 898 bp, Homo Sapiens
cgaagaattggtccagtgacctatagcattgatggctgcgtcaggaatctccacatggcagaggcccctgccgatctggaacaacccacctccagcttccatgttgggacatgttttgcaaatgctcagaggggaacatattttgacggaaccggttttgccaaagcagttggtggattcaaagtgggattggaccttcttgtagaatttgaattccgcacaactacaacgactggagttcttctggggatcagtagtcaaaaaatggatggaatgggtattgaaatgattgatgaaaagttgatgtttcatgtggacaatggtgcgggcagattcactgctgtctatgatgctggggttccagggcatttgtgtgatggacaatggcataaagtcactgccaacaagatcaaacaccgcattgagctcacagtcgatgggaaccaggtggaagcccaaagcccaaacccagcatctacatcagctgacacaaatgaccctgtgtttgttggaggcttcccagatgacctcaagcagtttggcctaacaaccagtattccgttccgaggttgcatcagatccctgaagctcaccaaaggcacaggcaagccactggaggttaattttgccaaggccctggaactgaggggcgttcaacctgtatcatgcccagccaactaataaaaataagtgtaaccccaggaagagtctgtcaaaacaagtatatcaagtaaaacaaacaaatatattttacctatatatgttaattaaactaatttgtgcatgtacatagaattctttctgtattcagatggtgctaattcagactccagactgaattttaattcaagttctttctcaagtctataaatattaaactgattatttcattctaaaa

SEQ ID NO: 74885 - DNA, 809 bp, Homo Sapiens
cctaccactctgtgacgtgggggcacgcgcagggatcccatcatttgtgttggggagctcagagtgcgcccaatcttggaatctttaagggatgagccagacccagacccgcggccttctagagagggtccggcagggagggtcggcgccctggcccggggtgggccggagccctgtgatgctgcatcgcccccaggaggagccagctgtgccccagagttggcgcgcccgagagaggacaagagcgcgcagcaggcgaagctggagggcgggactcgactttgttgtcgctgcccggaggagtcgagactggtacccggaggagctgtctcaccaggagaccacgtcctggaagtgtccgggactcgcgggacctgtggctgcagaccccgccggcacgcaggcccagagctggcgcactcctgaggatgagactctgggggccctagccggggtccacgggagggctgtccttggggactctaggatggcttcgttctggcccggctcacttctggagctgtgagacccaagacaaaaggggctgagggatttctcattgacaagagttcgtgcgggaaaaccacctgacccctagggatttgtcatcttaagactcaaaaggcttaataccaggaaccaccttggcaagatatttacccaccggccatctctgtttactcatgaatgttaaatgttaaaacgcagcgctctaaccctgcatattatttacttgcaaatgtctgtaatctgtaattgtgatgcctctgatggaataaattatctttttcagtctcctctaaaaaaaa

SEQ ID NO: 74886 - DNA, 1330 bp, Homo Sapiens
  misc_feature (533)..(543): n is a, c, g, or t
  misc_feature (1160)..(1170): n is a, c, g, or t
tgcatatagaaccagtgtgtacaaaaagcaggtggtacggtccggaatcccgggataatgtcgaccacgcgtcgccacgcgtcgggcctgctttacactaactataacaactaaatgttcaatcagttgtttgcctaactagcaaatgctgacatgtgttgttctactgcgcaatactcatttgctgtgtgattactgtttagtgttgaaaaaaatcaacttcacagtaagacactgataactaggaagaaaatactggtcttagttgtaattaggatacaatggtacagtgtgtaattaaaactagagtaaactgttggaatggctgttttacttaaatattatcaaaactagcataacataagcaaaatagataagtacaacactccatttagtgttttgccagattgttaccagaagtctacagataccaaactttcagttctgagtttgtacaggcaagtcctgggctgggtaaaaagttatattaatattgttatccacaagagatgtgattatgggttttgattacnnnnnnnnnnnccaaaccctgctttggaaatatcctgtgtacttaaaattcatattgctaagacactgtattagaatatttaatattccccagatcctcttaggataaactgtgggaatcctcctatgccatggatatcaaaggtccacattagtttttatttctccagtgatcagaaacattgatatcaatccctattaaattagtggggggaatattaactttatctacagtgtattactgtatattaaactgaaatagtccattaaaggatttttttataaatttattttggattaaaaatatcaacaccaataagtttttagaccaagttgtaatttttccaatatagagtctttgcatcacactgaggcatcttgcacagctgcagttaaggtgagaaagaatgctctgtgtgaagacagtgtacacaatgggttccggtttccttgcaccttgtgcagtatcctttatttctgtgctgttctctcctgagcatgaaaaatgatcattatccaatttgtatttccttggtacatattttaaaaacaacacagtcattgactttacaattcagtaatgaagtttggcaaagcctattttgtaaacaagttaattttataatgtnnnnnnnnnnngttaatctaaccttgacttgttatttgcactttcatagtctatacttgatacattcccactttatatacagtaggattctacaaacgtgtagatgtttggccaaatgaatgctgttaataatatgtaaaattctttgattaaacatttattacttaaact

SEQ ID NO: 74887 - DNA, 1041 bp, Homo Sapiens
  misc_feature (578)..(595): n is a, c, g, or t
  misc_feature (618)..(825): n is a, c, g, or t
  misc_feature (841)..(842): n is a, c, g, or t
  misc_feature (860)..(860): n is a, c, g, or t
  misc_feature (969)..(969): n is a, c, g, or t
  misc_feature (988)..(989): n is a, c, g, or t
  misc_feature (995)..(995): n is a, c, g, or t
tcatccttgtattttttttaaaatacactcccctcccccaccgccacacaccttacagttcaaaaggttggtttatttgtattttattttcaaattccctattccaaaaatagtgccgggtggcccaaagataacatctgaagggaaagaatgagaaagctcccagggaagcgggggatggggcgctgaggcagggttgttagaggactgtgtcatcctcaccaagctcattacatctgccagggcctgcctcaagaagcccagcccagccttttcctgggatgcagtgaaatcccatccatgaactcgatgggcccctcctgtgccggccgagaggcacacactgccttcacgacgtgactgctggacctggccgagcttgaggccacatgtgaagggtcctgctgtggtcatcttggtgactcggtcacagcagctactggccaagatcagacgtcgctgaggggctgttcaccaccatcctcgttctccagggtcaaggaagtgttttaacatgtcgtgttttcgacttgaccttgtggtatttttcttggcctagttgtgtgccatggatattnnnnnnnnnnnnnnnnnngcctcctccgtgccgaattcttnnnnnnnnnnnnnnnnnnnnnnnnnnnnnnnnnnnnnnnnnnnnnnnnnnnnnnnnnnnnnnnnnnnnnnnnnnnnnnnnnnnnnnnnnnnnnnnnnnnnnnnnnnnnnnnnnnnnnnnnnnnnnnnnnnnnnnnnnnnnnnnnnnnnnnnnnnnnnnnnnnnnnnnnnnnnnnnnnnnnnnnnnnnnnnnnnnnnnnnnnnnnnnnnagctgcattatgatcnngcacgcgcgggacaggcngtttgcgtattggcgctctcggcttctcgctactgatcgctgcgctcgtcgtcggtgcgggagcgtacactcatcaaagcggatacggtatcaagatcagggaacgcangaaacatgtagcaaggcanncaagcnagacgtaagcccgtgcgggttttcaaagtcgccctgaaaatcaaaa

SEQ ID NO: 74888 - DNA, 690 bp, Homo Sapiens
  misc_feature (40)..(40): n is a, c, g, or t
ccgcagacatgctcaatcaggcgattggcccctcacctcntcaagaggccccctggaccttcacgagcaaaaggtataccaggaggggtcctcaagattcgagatggcagcaaggaacccaggtcgagatgggacattgtgcggctcatcccacctcagacgtacctgcaagctgagggtgaagacggccagaacttggagaagagacggaatcttctgaactgcctcatcgtccgaatcctcaaggcccatggagatgaggggctgcacattgaccagcttgtctgtctggtgctggaggcttggcagaagggcccgtgtcctcccaggggtttggtcagcagccttggtaaggggtctgcatgcagcagcactgacgtcctctcctgcatcctacacctcctgggcaagggcacgctgagacgccatgacgaccggccccaggtgctgtcctatgcagtccctgtgactgtcatggagcctcacactgagtccctgaacccaggctcctcaggccccaacccacccctcaccttccataccctacagattcgctcccggggtgtgccctatgcctcctgcactgccacccagagcttctctaccttccggtagccctagacttggggtcaggggaaggtagagctggagcttttacagaaataaaacccaagagtttgattaaaaaaa

SEQ ID NO: 74889 - DNA, 481 bp, Homo Sapiens
  misc_feature (393)..(393): n is a, c, g, or t
ttagggaattttgcctcgaggccaagaattcggcacgagggaatcagctgggagcaagagacgctatctcccaaggccctggaaaagcacctgggaaagctggagctggctcaggagctgcgggacatggtgttcaagtgtgagaagcatgcccacctctaccgcaaactcatcaccaacatcctgggaggctgcatccagatggtgctgggccagatccgaagaccacagacgaacccaccggcccatcaacatccctttctttgatgtgttcctcacactgagtccctgaacccaggctcctcaggccccaacccacccctcaccttccataccctacagattcgctcccggggtgtgccctatgcctcctgcactgccacccagagcttnctctaccttccggtagccctagactttggggtcaggggaaggtagagctggagcttttacagaaataaaacccaagagtttgattata

SEQ ID NO: 74890 - DNA, 711 bp, Homo Sapiens
gggacagtcggcggccgcgcgcagcacgctcaaggccgggatggcggcggcggcggcggcaggaagcgggacgccccgagaggaggaggtacctgctggggaggcagcggcctcgcagccccaggccccaacgagtgtgcctggggctcgtctctcgaggttgcctctggcgcgagtgaaggccttggtgaaggcagatcccgacgtgacgctagcgggacaggaagccatcttcattctggcacgagccgcggaactgtttgtggagaccattgcaaaagatgcctactgttgcgctcagcagggaaaaaggaaaacccttcagaggagagacttggataatgcaatagaagctgtggatgaatttgcttttctggaaggtactttagattgattgccgagcggggcagttttgtgagccttcatctgaagccttcagttcacccctctgcacaggcctcagctttgaagaacggagtctttgcacttacacacactcttcctgttctgccttcacctatgccgggataagcagagatctcatcaattagctcttctctgcaaggtcttccactatttctgtctgtcttccatatcaagcctggatgcagctgctgctgcttagagcagagatgaagaaagtgttctgcataagtggcttcctgaatgatgaggaccagaataaaggtttttgatcaacctcaaaaaaaa

SEQ ID NO: 74891 - DNA, 713 bp, Homo Sapiens
  misc_feature (11)..(11): n is a, c, g, or t
  misc_feature (56)..(56): n is a, c, g, or t
ctctgctttcnccatgctgtatgtcttcactgctgagctctacccaaccctggtcnaggaacatggcggtggggtcacatccacggcctccagagtgggcagcatcattgccccctactgtgtttacctcggtgcttacaacagaatgctgccctacatcgtcatgggtagtctgactgtcctgattggaatcttcaccctttttttccctgaaagtttgggaatgactcttccagaaaccttagagcagatgcagaaagtgaaatggttcagatctgggaaaaaaacaagagactcaatggagacagaagaaaatcccaaggttctaataactgcattctgaaaaaatatctaccccatttggtgaagtgaaaaacagaaaaataagaccctgtggagaaattcgttgttcccactgaaatggactgactgtaacgattgacaccaaaatgaaccttgctatcaagaaatgctcgtcatacagtaaactctggatgattcttccagataatgtccttgctttacaaaccaaccatttctagagagtctccttactcattaattcaatgaaatggattggtaagatgtcttgaaaacatgttagtcaaggactggtaaaatacatataaagattaacactcatttccaatcatacaaatactatccaaataaaaataacatcattgtattaacgcaaatattaggtgacaaca

SEQ ID NO: 74892 - DNA, 1728 bp, Homo Sapiens
  misc_feature (102)..(139): n is a, c, g, or t
  misc_feature (186)..(236): n is a, c, g, or t
  misc_feature (395)..(405): n is a, c, g, or t
aaatgttgtcttttagcaggccagaactctaaatcctgtagaggtacatgggatattttattctttgcctgtactcataaaaatgaacagaagaaaatacgnnnnnnnnnnnnnnnnnnnnnnnnnnnnnnnnnnnnnnaaaaggtgaaatatcagccctcaagagactcacttgctaactttccnnnnnnnnnnnnnnnnnnnnnnnnnnnnnnnnnnnnnnnnnnnnnnnnnnncttacatggttctggtggattcacatttgctgatgctggtgctgtttttcgtgtgatcttcaacgtttttgggtgaccattgaccctgtgacctcaaaatggtgtccaactaaccacttaaaattaacatcttttttttaattaacgaatttatggtannnnnnnnnnncccttggcggggatggggttggggttgttttttctctattctagattatccagccaagaagatgaaaactacagagaagggatttggcttggtggcttatgctgcagattcatctgatgaagaggaggaacatggaggtcataaaaatgcaagtagttttccacagggctggagtttgggataccaatatccttcatcacaaccacgagctaaacaacagatgccattctggatggctccctaggaaacagtggaacagagttttgaccctcagtgactcttcttagcaataatgcatgcatttgatttaacaagactctggggcctgtgctgggaaccatctggacctttgcagaagttagagattcagtgcccccctttcttaaaggggttccttaacaaccacaaaaatccttatttctgcagtggcatagaatctgttaaaatttaattagaatcacaaatttatctcagaagctttttaacagttggtgaaatgtgcttgtccaacaaagcatcctaacagggtcgttcccatacacatttgacctggtcagccttttccaggtgaatagccccagttctgacataaagaaagttttatttgtattttactactgtttggtcaattttgatatataactggttacaaacagagccttactatttattagtggggaaatgattttaagaccgtccttttcagtatttaattctgacagatctgcatccctgttttgttttggattatttctgttttggaaaatgctgtctcatttaaaactgttggatatagctggatcctggataggaaaatgaaattattttttcattgtgttttttaattggggtgatccaaagctggcaccttcaggcacattggtctcatagccattactgtttttattgcccttctaagatcctgtcttcagctgggtcagagaaaacttcttgactaaaactggtcagaactcatcacagaaatgaaatacagtggtctctctctcccagaactggttgcagctaaaacagagagatctgactgctggctataggattttggacttaatgactgaaattgcaaattgtcctttttcttggcattacagattttgccaaaataactttttgtatcaaatattgatgtgtgaaagtgaaggagctagtctgctgaaccaggaatagtttgagatattgaactgtcatttttgcacatttgaatactttgcaggctggctttgtataaacttatcctctggtttcctatatgttgtaaatatttagaccataatttcattataaataaatctataaatattcaaa

SEQ ID NO: 74893 - DNA, 408 bp, Homo Sapiens
gtggggcctgcgccgggtgggctcactgacctcatgctccgggtgtcccagccacggagggtggtgtcgttcgctgtggccacctgggtgcagttatgatgtgggctccaccgtcctgaggtgaacttcagttgtcccttcccttccagggacgttgagctggccagctgggagtgtcacgatgttttccaaaggaagaagaaaagaagaagaatgtgaagtctgttcagaaaacgcgagaggatatcgtatactcaaggatattattgaaaataattactgaggataattaggaagctctgtctttgtttcctttccttaaatggcaaaaatgaaccttacttggggaaatctataaaactgagcacagcaaaaaatagaaagcatattaataggcctctattaaaa

SEQ ID NO: 74894 - DNA, 1705 bp, Homo Sapiens
taggaagtggcactacggaagctgttctgggccagaaagacttccagtttggagtcgtttgctgcggggagggaatgaatgggcgctgggaacacgcccgcgaggtggggacgcgccggccgtagcgaggtccttagcgtgtgagtggccggggtcgggtcgcttccccgcagcatggaggacgatgcaccagtgatctacgggctggagttccaggcacgtgccttaacacctcaaactgcagaaacagatgccattcggtttttggttgggacgcagtctcttaaatatgataatcagatccatatcatagattttgacgatgaaaacaacattataaataaaaatgtcctcctccatcaagcgggtgaaatctggcatattagcgctagccctgcagacagaggtgtgctgacgacctgctacaacagaacttcagacagcaaagtcctgacatgtgcagccgtgtggaggatgccgaaggaattggaatcaggcagccacgagtcccctgatgattcatccagcactgcacagaccctggagctgctctgtcaccttgacaacacagcccatggcaacatggcctgtgtcgtgtgggagccaatgggagatgggaagaaaatcatttccttggctgataaccatatcctgctgtgggatttacaggaaagctcgagccaggctgtgctggccagctcagcgtccctggaagggaagggacaactgaagttcacctcaggacggtggagcccacatcataactgcacccaggtggccacagcgaacgacaccaccctccgtggctgggacacccggagcatgagccagatctactgcatagagaatgcccacggacagctggtgcgggaccttgactttaatcccaataagcagtactacttggccagctgcggagacgactgtaaggtgaagttctgggacacccgaaatgtcaccgaacccgtgaagaccctggaggagcactcccactgggtgtggaacgtccgctacaaccactctcatgaccagctggtcctcacgggcagcagtgacagcagagtcatcctttccaacatggtgtccatctcgtcggagcccttcggccacttggtagacgacgatgacatcagtgaccaggaggaccaccgttctgaagagaagagcaaggagcccctgcaggacaacgtgatcgccacctacgaggagcacgaggacagcgtctatgccgtggactggtcctcggctgacccgtggctgtttgcctccctgagctatgacgggaggctcgtgatcaacagggtgcccagggccctgaagtaccacatcctgctatgactcccgggcctgggttatccaggtcccattgagtggttttcctcttggcagattctcaaacagtcgcagctctttggaggtgactcgtgttccaggtggatccctctctgggagagccgctgttcccttcctgtagcagcagcatttatgaatggggtgaatggggctattgtcgacggcacagctaatgcccgaacccagcccctgtcggcagagacagagccccacattattatgtgaataacaatgttttctgttttaagggtgtcaggagtttcgctttttaaaaaaatgtctgttcctgcagtagtaactcttctttctcttgagagtaaaaaatgaaataaaataaatccacgctgcaaaa

SEQ ID NO: 74895 - DNA, 810 bp, Homo Sapiens
  misc_feature (52)..(52): n is a, c, g, or t
  misc_feature (138)..(138): n is a, c, g, or t
  misc_feature (243)..(243): n is a, c, g, or t
  misc_feature (261)..(261): n is a, c, g, or t
  misc_feature (537)..(550): n is a, c, g, or t
gcacagagagatggagccccaggagcccttttgaagaccgaggaggcaaagnccgagggggcccaggacctgctcagagagtgcccaaatctgggcgttccagctccttagacggagagcaccacgatggataccacnagagatgaaccttttgggggccctccaggcagtggcaccccttctcgagggggccggagtggcagtaactggggtagagggagtaacatgaactctggcccgccngaggcgaggagcttcacnggggtggtggaaggggtcggtagaagctggaactgagtaccctgaggcctctctggacagtatgtaagaacttcttgtggactcaccaagagaaacaaaaggaagcctgcaccattgtagccctgaatcttttctgggcacctgaatcccaggaaccctcaatgaggtcttcaagatgaagagactgctgccagctaccagcctggctggccctgtcctgtccaccctcattgccccaactcccatgttgttttgtgaagataaaagctgggatcnnnnnnnnnnnnnnaagtctcacaagacatggggcatctccacaaatttaagttcctgtccatttggaaatttgtttctatgtgtacagtttgtcagagaaaaacaaagtttttgtatgaatacagaatgtgatttacgcaagaattgacagaaaactagttgtgaagtgcttgccttaaggaaacctttggtttccatcgcatcccatctgccaaggaatgcacggttgttgctgatgttcatgagcatattaaccactaggttatctaaatt

SEQ ID NO: 74896 - DNA, 1128 bp, Homo Sapiens
  misc_feature (69)..(103): n is a, c, g, or t
  misc_feature (986)..(1045): n is a, c, g, or t
tcatatgggcgcagcgcgctttagccgaacgacccgagcgcagcgagtagtgagcgaggaagcggccgnnnnnnnnnnnnnnnnnnnnnnnnnnnnnnnnnnncagtcgacggtaccggacatatgcccgggaattcggccattacggccgggcacagagagagagctgcaagagcatggaattcatgtgtttaaagataatcctttccatgtgaagtttaaaattactatatatttgctgatggctagattgagagaataaaagacagtaacctttctcttcaaagataaaatgaaaagcacatgcatcttttcttcctaaaaaaatgcaaagatttacattgctgccaaatcatttcaactgaaaagaacagtatgctttgtaatagagtctgtaataggatttcccataggaagagatctgccagacgcgaactcaggtgccttaaaaagtattccaagtttactccattacatgtcggttgtctggttgccattgttgaactaaagcctttttttgattacctgtagtgctttaaagtatatttttaaaagggaggaaaaaaaataacaagaacaaaacacaggagaatgtattaaaagtattttggtttagtgtaggtattatgccaattaacagtatgtgccttgggggaggagggaaagattagctttgaacattcctggcgcatgctccattgtcttactattttaaaacattttaataatttttgaaaattaattaaagatgggaataagtgcaaaagaggattcttacaaattcattaatgtacttaaactatttcaaatgcataccacaaatgcaataatacaataccccttccaagtgcctttttaaattgtatagttgatgagtcaatgtaaatttgtgtttatttttatatgattgaatgagttctgtatgaaactgagatgttgtctatagctatgtctataaacaacctgaagacttgtgaaatcaatgnnnnnnnnnnnnnnnnnnnnnnnnnnnnnnnnnnnnnnnnnnnnnnnnnnnnnnnnnnnnctcgtttgtatactattttcagagactttacttgcttcatgattagtaccaaaccactgtacaaagaattgtttgttaacaag

SEQ ID NO: 74897 - DNA, 943 bp, Homo Sapiens
  misc_feature (250)..(283): n is a, c, g, or t
  misc_feature (738)..(758): n is a, c, g, or t
  misc_feature (790)..(790): n is a, c, g, or t
cgatgtgacatatgaacagtggtaaaaaaagcaggctggtacggtcggaattcccgggatatcgtcgaccacgcgtcgccagaatgtctctcctgcacaaacatgaggaatctggctgctgtgtagcacactgagtgacgcaatcaatgtttactccgaacagaatgcatttcttcactccgaagccaaatgacaaataaagtccaaaggcattttctcctgtgctgaccaaccaaataatatgtatagnnnnnnnnnnnnnnnnnnnnnnnnnnnnnnnnnnccacagagagagagctgcaagagcatggaattcatgtgtttaaagataatcctttccatgtgaagtttaaaattactatatatttgctgatggctagattgagagaataaaagacagtaacctttctcttcaaagataaaatgaaaagcacattgcatcttttcttcctaaaaaaatgcaaagatttacattgctgccaaatcatttcaactgaaaagaacagtattgctttgtaatagagtctgtaataggatttcccataggaagagatctgccagacgcgaactcaggtgccttaaaaagtattccaagtttactccattacatgtcggttgtctggttgccattgttgaactaaagcctttttttgattacctgtagtgctttaaagtatatttttaaaagggaggaaaaaaataacaagaataaaacacaggagaatgtattaaaagtannnnnnnnnnnnnnnnnnnnngccaattaacagtatgtgccttggggggaganggaaagattagctttgaacattcctggcgcatgctccattgtcttactattttaaaacattttaataatttttgaaaattaattaaagatggggaataagtgcaaaaagaggaatcttacaaaattcatttaatggtactttaaactattttt

SEQ ID NO: 74898 - DNA, 800 bp, Homo Sapiens
acatgctctcacattcccatctctctggattctttttgcttcatattcctgctaccaatcattttcagacttggtacttcagaagcaatgcgaaaaatcagcagtcttccaacccaattatttacagtgctgcttttgtgatttctgaaaggtgaagatgcacaccatgtcctcctcgcatctcttctacctggcgctgtgcctgctcaccttcaccagctctgccacggctggaccggagacgctctgcggggctgagctggtggatgctcttcagttcgtgtgtggagacaggggctttatttacaacaagcccacagggtatggctccagcagtcggagggcgcctaagacaggcatcgtggatgagtgctgcttccggagctgtgatctaaggaggctggagatgtattgcgcacccctcaagcctgccaagtcagctcgctctgtccgtgcccagcgccacaccgacatgcccaagacccagaaggaagtacatttgaagaacgcaagtagagggagtgcaggaaacaagaactacaggatgtaggaagaccctcctgaggagtgaagagtgacatgccaccgcaggatcctttgctctgcacgagttacctgttaaactttggaacacctaccaaaaaataagtttgataacatttaaaagatgggcgtttcccccaatgaaatacacaagtaaacattccaacattgtctttaggagtgatttgcaccttgcaaaaatggtcctggagttggtagattgctgttgatcttttatcaataatgttctatagaaa

SEQ ID NO: 74899 - DNA, 1019 bp, Homo Sapiens
gtgaatcggacgaggacgaaagcggcaagtagagctccgtcctgacgcgccgcctcccgtgggctccggccggctaagccgcggcggacaactatgctgaaagccaagatcctcttcgtggggccttgcgagagtggaaaaactgttttggccaactttctgacagaatcttctgacatcactgaatacagcccaacccaaggagtgaggatcctagaatttgagaacccgcatgttaccagcaacaacaaaggcacgggctgtgaattcgagctatgggactgtggtggcgatgctaagtttgagtcctgctggccggccctgatgaaggatgctcatggagtggtgatcgtcttcaatgctgacatcccaagccaccggaaggaaatggagatgtggtattcctgctttgtccaacagccgtccttacaggacacacagtgtatgctaattgcacaccacaaaccaggctctggagatgataaaggaagcctgtctttgtcgccacccttgaacaagctgaagctggtgcactcaaacctggaagatgaccctgaggagatccggatggaattcataaagtatttaaaaagcataatcaactccatgtctgagagcagagacagggaggagatgtcaattatgacctagccagccttcacctgggactgccacatccccagtgaaatcagcatgtttctcggtgcagatctgaaatcacatccagctcctgatgttttcttctccctctgactgcagaggaagtgttcctacctgcaggaaggcacctgtcacacagggcgttcactcagaccatctgtgctctgccctgagttcagttgagaaaatcctattatcaaatttggatttcctggccccagaacttcccaaagacctgtaaaatggagggatttaccacctcacatatgtccagttaaacagtttgtggacttgtaaccgtcgcagcccaatgatacaacagtagtttaatcacgtgtattggcttgaatgtgattttc

SEQ ID NO: 74900 - DNA, 1001 bp, Homo Sapiens
tagctaggtacgaggctggtttgaatcggccgaggcatggaaacgaaagcggcaagtagagctccgtcctgacgcgccgcctcccgtggggctccggccggctaagccgcggcggacaactatgctgaaagccaagatcctcttcgtggggccttgcgagagtggaaaaactgtttggccaactttctgacagaatcttctgacatcactgaatacagcccaacccaaggagtgaggatcctagaatttgagaacccgcatgttaccagcaacaacaaaggcacgggctgtgaattcgagctatgggactgtggtggcgatgctaagtttgagtcctgctggccggccctgtatgaaggatgctcatggagtggtgatcgtcttcaatgctgacatcccaagccaccggaaggaaatggagatgtggtattcctgctttgtccaacagccgtccttacaggacacacagtgtatgctaattgcacaccacaaaccaggctctggagatgataaaggaagcctgtctttgtcgccacccttgaacaagctgaagctggtgcactcaaacctggaagatgaccctgaggagatccggatggaattcataaagtatttaaaaagcataatcaactccatgtctgagagcagagacagggaggagatgtcaattatgacctagccagccttcacctgggactcgccacatcccccagttgaaatccagcatgtttctcgggtgcagatcttgaacatcacatccagctcctgatgttttcttctccctctgactgcagaggaagtgttccctacctgcaggaagggcacctgtcacgcagggcgttcaatcagaacaactgtgctctggccggaagttcagttgagaaaatcctatatcaaattcgggttcccgggccagaactcccaagactgtaaagggggtttccacctcaatattccgttaacagttgggtgtgacgccaccagtaacggttaccggaaaa

SEQ ID NO: 74901 - DNA, 1443 bp, Homo Sapiens
cggctaggtacgaggcctggtgttgaattcggcacgagggcgcggcagaataagggttgattcctcggctgaccccacaatgtcgcaggagcaagggccggggtcctccacgcctcccagttctccgacacttcttgacgctctgctccagaacctttacgactttggaggtacagaaggtgaaacagaacagaagaagatcataaagaaaagggaaaacaagaagagagatgtgatggcttcagcggccttggcagcagagccatctcccctacctggttctctcataagaggccagaggaagagcgcttcgagcttcttcaaggaacttagagaagagcggcattgtgctccttctgggacccccacaggaccagagatcctggctgctgcagttcctccctcttccctaaagaacaatagggaacaagtagaagtggtagaatttcacagcaataaaaaaagaaaattgacgccagatcataacaagaacacaaaggctaatcctagtgtttggagagagatgtggatacacaagaatttaacctagaaaaagctcgtttagaagtgcaccggtttggtatcacgggttatggaaaaggaaaggagagaatcctggaacaggaacgtgccattatgctgggcgctaagcctcctaaaaagagttatgtgaattacaaggttttacaggagcaaattaaagaaaaaaaggcagcaaaggaagaagaaaagagactggcccaagaaacagatattttcaacgaaaaagaagaggaaaggacaggaggacaggaaatccaaaaagaagtccgctcccagtattttgtcaaatggacggattggacaggttggaaaattcaaaaatggaacactgattctgagcccagttgatatcaagaaaataaattcttccagagtggccaaatgaagtactttgtcaaataaaacgaggatgggaacaactgagtcaactgcagcggccctggaccctgtgcgactctagatagatcgttcttaacacgcatttcacagactgctttttcattttagaaaaaaagtcaaacagaagtaacatttctagttgccgaagtgtctgcttcatggtgctgaacgtgtcaggcccagtgcagcatgaatgtgaagtgaacccactgaaaagtgatttttaatgttctccagcaaacttcactcctgtttcatgttcactggtatttggtgcatttgcttgtaatacagttttttataactttactgttttgtaaatgctagtagtttacattaaattgccttatatttttaatgatttaatgttatgatatcatgaaagaaccaagaatctagtaatttatcagttttgtggaaaagcagttttaatttttagcctaccatgtgtacaaaatctacttcataagaagttatataaataaaataggtttgtagtat

SEQ ID NO: 74902 - DNA, 957 bp, Homo Sapiens
  misc_feature (365)..(365): n is a, c, g, or t
  misc_feature (369)..(369): n is a, c, g, or t
gatgcgacggcctcacggggctttggaggtgaaagaggcccagagtagagatagagagagaccgacgtacacgggatggctacgggaacgcgctatgccgggaaggtggtggtcgtgaccgggggcgggcgcggcatccggagctgggatcgtgcgcgccttcgtgaacagcggggcccgagtggttatctgccacaaggatgagtctgggggccgggccctggagcaggagctccctggagctgtctttatcctctgtgatgtgactcaggaagatgatgtgaagaccctggtttctgagaccatccgccgatttggccgcctggattgtgttgtcaacaacgttggccaccctcgccctcccntacntgcggaagagtcaagggaatgtcatcaacatctccagcctggtgggggcaatcggccaggcccaggcagttccctatgtggccaccaagggggcagtaacagccatgaccaaagctttggccctggatgaaagtccatatggtgtccgagtcaactgtatctccccaggaaacatctggaccccgctgtgggaggagctggcagccttaatgccagaccctagggccacaatccgagagggcatgctggcccagccactgggccgcatgggccagcccgctgaggtcggggctgcggcagtgttcctggcctccgaagccaacttctgcacgggcattgaactgctcgtgacggggggtgcagagctggggtacgggtgcaaggccagtcggagcacccccgtggacgcccccgatatcccttcctgatttctctcatttctacttggggcccccttcctaggactctcccaccccaaactccaacctgtatcagatgcagcccccaagcccttagactctaagcccagttagcaaggtgccgggtcaccctgcaggttcccataaaaacgatttgcagccagaaaaa

SEQ ID NO: 74903 - DNA, 532 bp, Homo Sapiens
agtttacttggcttcttgtctccaaggctcgccctcccctacctgcggaagagtcaagggaatgtcatcaacatctccagcctggtgggggcaatcggccaggcccaggcagttccctatgtggccaccaagggggcagtaacagccatgaccaaagctttggccctggatgaaagtccatatggtgtccgagtcaactgccactgggccgcatgggccagcccgctgaggtcggggctgcggcagtgttcctggcctccgaagccaacttctgcacgggcattgaactgctcgtgacggggggtgcagagctggggtacgggtgcaaggccagtcggagcacccccgtggacgcccccgatatcccttcctgatttctctcatttctacttggggcccccttcctaggactctcccaccccaaactccaacctgtatcagatgcagcccccaagcccttagactctaagcccagttagcaaggtgccgggtcaccctgcaggttcccataaaaacgatttgcagccaaaaa

SEQ ID NO: 74904 - DNA, 1157 bp, Homo Sapiens
  misc_feature (1016)..(1016): n is a, c, g, or t
  misc_feature (1020)..(1020): n is a, c, g, or t
  misc_feature (1022)..(1042): n is a, c, g, or t
ggggaagccggtggccgcggctgcggaacgggcggaggctgccggtttcgtaaccgtcgctcctcctcgctgactcgcgggctgtgaggcctgggtcggctcgggccgcaccgcgcggggccgctcggagtggaggccgcctgggggcaggcgggctagaggagcaggtacatgtgaagattttttggcagcttagcgtggaaaccattgaccaccctgctctcatttctacctgttctgtgttggcaagggagagtgcccaaatgagcaagatatcgcagcaaaacagcactccaggggtgaacggaattagtgttatccatacccaggcacatgccagcggcttacagcaggttcctcagctggtgcctgctggccctgggggaggaggcaaagctgtggctcccagcaagcagagcaaaaagagttcgcccatggatcgaaacagtgacgagtatcggcaacgccgagagaggaacaacatggctgtgaaaaagagccggttgaaaagcaagcagaaagcacaagacacactgcagagagtcaatcagctcaaagaagagaatgaacggttggaagcaaaaatcaaattgctgaccaaggaattaagtgtactcaaagatttgtttcttgagcatgcacacaaccttgcagacaacgtacagtccattagcactgaaaatacgacagcagatggcgacaatgcaggacagtagacctcaccctttccagactttagagcttgtggcttgaatgttaaaggtgtgaccaccgacaccactcatgtcaatggctgaaagttgtccatttccatgactcaaagacccattggaggctattttctgggatcagcactgaagagttgattagctaaaaatgttagccttgtaattcgaatatctggttttaaatgatagaggtttttgtgggaatcaaaatcccccaaatgttaaggtatatggtaaaaaaagaaatatctgggatcccgatgttcttaataaatcctgacttcccantaanannnnnnnnnnnnnnnnnnnnnaaaaacatgtcgggccgcctcggcccctccaagaaactttctaggaccatttcgttttggccgccgcggggccccggtagggtaaagtgaaacctgggcgcaataagctggcttt

SEQ ID NO: 74905 - DNA, 999 bp, Homo Sapiens
  misc_feature (56)..(56): n is a, c, g, or t
  misc_feature (977)..(977): n is a, c, g, or t
atcttgatccacagaaatacatgaaattctggtctgtccaccccatcaacaagtcntgaaacaagcaacagatggatagtctgtccaaatggacataagacagacagcagtttccctggtggtcagggaggggttttggtgatacccaagttattgggatgtcatcttcctggaagcagagctggggagggagagccatcaccttgataatgggatgaatggaaggaggcttaggactttccactcctggctgagagaggaagagctgcaacggaattaggaagaccaagacacagatcacccggggcttacttagcctacagatgtcctacgggaacgtgggctggcccagcatagggctagcaaatttgagttggatgattgtttttgctcaaggcaaccagaggaaacttgcatacagagacagatatactgggagaaatgactttgaaaacctggctctaaggtgggatcactaagggatggggcagtctctgcccaaacataaagagaactctggggagcctgagccacaaaaatgttcctttattttatgtaaaccctcaagggttatagactgccatgctagacaagcttgtccatgtaatattcccatgtttttaccctgcccctgccttgattagactcctagcacctggctagtttctaacatgttttgtgcagcacagtttttaataaatgcttgttacattccccgaaaccacaaagcacgaaaatatatccttggcgggccgccctcggcccctcgaaaagtcttttcagaaccattttctttgggcgcgcggggcccccgtagggtaacgggaacatgggccattagcgttggttcctaaagggaaattccggggaccaggaaccaaggagcttggggaacttccctccacccatataacaaaacgccccccggggcgggcaccgccccagagcgggtttctgtgagaaccaaaattccccanaagggggtgggttctccgggta

SEQ ID NO: 74906 - DNA, 2788 bp, Homo Sapiens
  misc_feature (46)..(46): n is a, c, g, or t
  misc_feature (122)..(122): n is a, c, g, or t
  misc_feature (2711)..(2711): n is a, c, g, or t
tatggcaatagcagcggcaatacgtggaacaacactggccactttnaaccagatgatgggacgagtgcatggaggactgcaacagaggagtgggggactgaagattggaatgaagatctttntgagaccaagatcttcactgcctctaatgtgtcttcagtgcctctgcctgcggagaatgtgacaatcactgctggtcagagaattgaccttgctgttctgctggggaagacaccatctacaatggagaatgattcatctaatctggatccgtctcaggctccttctctggcccagcctctggtgttcagtaattcgaagcagactgccatatcacagcctgcttcagggaacacattttctcatcacagtatggtgagcatgttagggaaaggatttggtgatgtcggtgaagctaaaggcggcagtactacaggctcccagttcttggagcaattcaagactgcccaagccctggctcagttggcagctcagcattctcagtctggaagcaccaccacctcctcttgggacatgggctcgacgacacaatccccatcactggtgcagtatgatttgaagaacccaagtgattcagcagtgcacagcccctttacaaagcgccaggcttttaccccatcttcaaccatgatggaggtgttccttcaggagaagtcacctgcagtggctacctccacagctgcacctccacctccgtcttctcctctgccaagcaaatccacatcggctccacagatgtcgcctggatcttcagacaaccagtcctctagccctcagccggctcagcagaaactgaaacagcagaagaaaaaagcctccttgacttctaagattcctgctctggctgtggagatgcctggctcagcagatatctcagggctaaacctgcagtttggggcattgcagtttgggtcagagcctgtcctttctgattatgagtccacccccaccacgagcgcctcttcaagccaggctccaagtagcctgtataccagcacggccagtgaatcatcctctacaatttcatctaaccagagtcaggagtctggttatcagagcggcccaattcagtcgacaacctatacctcccaaaataatgctcagggccctctttatgaacagagatccacacagactcggcggtaccccagctccatctcttcatcaccccaaaaggacctgactcaggcaaagaatggcttcagttctgtgcaggccacgcagttacagaccacacaatctgttgaaggtgctacaggctctgcagtgaaatctgattcaccttccacttctagcatcccccctctcaatgaaacggtatctgcagcttccttactgacgacaaccaatcagcattcatcctccttgggtggcttgagccacagtgaggagattccaaatactaccaccacacaacacagcagcacgttatctacgcagcagaataccctttcatcatcaacatcttctgggcgcacttcgacatccactcttttgcacacaagtgtgggagagtgaggcgaatctccattcttcctccagcactttttccaccacatccagcacagtctctgcacctcccccagtggtcagtgtctcctccagtctcaatagtggcagtagcctgggcctcagcctaggcagcaactccactgtcacagcctcgactcgaagctcagttgctacgacttcaggaaaagctcctcccaacctccctcctggggtcccgccgttgttgcctaatccgtatattatggctccagggctgttacatgcctacccgccacaagtatatggttatgatgacttgcagatgcttcagacaagatttccattggattactacagcatcccatttcccacacccactactccgctgactgggagggatggtagcctggccagcaacccttattctggtgacctcacaaagttcggccgtggggatgcctcctccccagccccggccacaaccttggcccaaccccaacagaaccagacgcagactcaccataccacgcagcagacattcctgaacccggcgctgcctcctggctacagttacaccagcctgccatactatacaggggtcccgggcctccccagcaccttccagtatgggcctgctgtgttccctgtggctcctacctcttccaagcagcatggtgtgaatgtcagtgtgaatgcatcggccacccctttccaacagccgagtggatatgggtctcatggatacaacactggtgtttcagtcacctccagtaacacgggcgtgccagatatctcgggttctgtgtactccaaaacccagcagtcctttgagaaacaaggttttcattccggtactcctgctgcttccttcaacttgccttcagccctaggaagtgggggccccatcaatccggccacagctgctgcctacccacctgccccctttatgcacattctgaccccccatcagcagccgcattctcagatccttcaccatcacctgcagcaggatggccaggacatcctcaatttcgtcgatgaccagcttggtgaataagtattactgtaccaactgggcctcctctagcaagcccctgaagccagtggaataaaatgaaatcttcgccctttaagaactcctgaccttaatgtggtagtagtatcttgtccttgaggggatttccttcccctcacccctnagactttcacaacctggtgactggaaagaccaccacaaatcttcatttcctccagaaactgctacatctacagccga

SEQ ID NO: 74907 - DNA, 664 bp, Homo Sapiens
gtactgtgtcctcaaatttaatggattaatgtgtcttgtatatataaaaagaaaacctctaccttcagcctctgcctattcttgctccgtctaggacatcctcaatttcgtcgatgaccagcttggtgaataagtattactgtaccaactgggcctcctctagcaggcccctgaaggcagtggaataaaatgaaatcttcgccctttaagaactcctgaccttaatgtggtagtagtatcttgtccttgaggggatttccttcccctcacccctaagactttcacaacctggtgactggaaagaaccaccacaaatcttcatttcctccagaaactgctacatctacagccgatttcaggcagtaaagggagagggatagaggagattgggtggaaaatggagaggatcaagaaggagctgagaccatttcaaagaaaaaaaatgctttatagagttttaagtatgacttagatgggtccaggcaaataaactaaaaagaagtgaaggcaacatgtatcgtctggcagaactaaatcttggagtggggtgagggatgaaagactacatattgggtacagtgtacactgctcgggtgatgggtgcgctaaagtcgcagaaatcactaaagaactcatccatgtaaccaaaccccacctgtacccc

SEQ ID NO: 74908 - DNA, 991 bp, Homo Sapiens
  misc_feature (805)..(818): n is a, c, g, or t
ggtacagcatcccatttcccacacccactactccgctgactgggagggatggtagcctggccagcaacccttattctggtgacctcacaaagttcggccgtggggatgcctcctccccagccccggccacaaccttggcccaaccccaacagaaccagacgcagactcaccataccacgcagcagacattcctgaacccggcgctgcctcctggctacagttacaccagcctgccatactatacaggggtcccgggcctccccagcaccttccagtatgggcctgctgtgttccctgtggctcctacctcttccaagcagcatggtgtgaatgtcagtgtgaatgcatcggccacccctttccaacagccgagtggatatgggtctcatggatacaacactggaagaaaatatccacccccttacaagcatttctggacggctgagagctaatttggcccaaggctgggggctgtgttttgtgtgtgtgtataaatttgcactgaagtcttgtttcagaaaccagaccactgaggagagcctgctgagctgaggccatggcctgcgtggcttggggaaatgagttggtggataccttctgggcttttgaacttgcccctcccccatttccctctcccccatgtgtctgaccctgtcttacccatttcaagttcaagcggtgcagcaccttcgaagcatcaatgcacacacctgctgttgcttttgatttctggaaggcatgtagtttcaacttgtaacaaaaatatttgtagtcttcaataaactgtggtatttctttagctccnnnnnnnnnnnnnnaccgtaaaccaaaccatgttcggcccgcctcggccctccaagaagctttcctaaaccatttcgtttggcggcgcggggcccagatagggtaaatggaacatggcccatagctggtctccctaggggaatccttgggcctggacctaaagggccttggaatttctcccccaatt

SEQ ID NO: 74909 - DNA, 436 bp, Homo Sapiens
gagtagtgggtgtgggaaatgggatgctgtagtaatccaatggaaatcttgtctgaagcatctgcaagtcatcataaccatatacttgtggctgaaagatacagacatatagcaataacaggaactggtcatgatgttagcaaaacaaggagccaagagacaagctaattcaacagaacattcatcctcattctgggttagaacaggacacggattatttccttcaattttatttaaggaaaaagcagtaaagtacacagagattaaatgattcatgaaaggtcttgaagctttccttgagctaaatactactgattctagtaggctggcttcttgataccaatagagtagacacaaaacatacacgaacaaccagttttactctctattcgacaagtctctgtctcttatactcttcaaaatctggctataaata

SEQ ID NO: 74910 - DNA, 620 bp, Homo Sapiens
ctccttctcccaccgctccatcgccgtgaaggacgggatcctcctggccaccgggctgcacgtccaccggaacagcgcccacagcgcaggggtgggcgccatctttgacagggtgctgacggagcttgtgtccaagatgcgggacatgcagatggacaagacggagctgggctgcctgcgcgccatcgtcctctttaaccctgactccaaggggctctcgaacccggccgaggtggaggcgctgagggagaaggtctatgcgtccttggaggcctactgcaagcacaagtacccagagcagccgggaaggttcgctaagctcttgctccgcctgccggctctgcgctccatcgggctcaaatgcctggaacatctcttcttcttcaagctcatcggggacacacccattgacaccttccttatggagatgctggaggcgccgcaccaaatgacttaggcctgcgggcccatcctttgtgcccacccgttctggccaccctgcctggacgccagctgttcttctcagcctgagccctgtccctgcccttctctgcctggcctgtttggactttggggcacagcccgtcactgctctgcctaagagatgtgttgtccccctc

SEQ ID NO: 74911 - DNA, 696 bp, Homo Sapiens
  misc_feature (239)..(239): n is a, c, g, or t
ttccacctggggcccgaggagatcagtaattcttccggactgtcagacagattcagcccggatacgtaagcacattcgtgacccagaggagctactacccgctgtatgtcggccccaagaagacatggccattgactatgagtcgttctatgtttacgcacagctgcctgtcaccccagatgtcctcatcatcccgtcagagctgaggtaccttcgtgaaggatgtcctcggctgtgtnctgtgtgaaccctgggcgccttaccaaagggcaggtgggaggcaccttcgcccgactctaccttaggaggccggcagcggacggggcagagaggcagagcccatgcattgctgtgcaggtcgtcaggatctgaggcttctgtcctctgctgttctctgctgtgtgggcccttaaagtcttagccaagagccaagacatagccctgtgacaaggtgaacagttgggtgggaaaggagagctgcagtgaccaggcccagcagggaggacttgtgcagccgggcctgcctctgagtggtgcctctcctggaaggaagctcttgcttctcagtccatgctccgtgtccagaagtaagccagctgtggatcccgcccactcagaaaaggcgagaaggctttgtgattttctacatgaatcaaacacagaaacaacttttggagaaattaaattctgagtgtg

SEQ ID NO: 74912 - DNA, 691 bp, Homo Sapiens
tccggaacttcagacagattcagccgaatactcaagcacatctgaccccagaggagctactacccactctacccgccccaagaagacatggccattgactatgagtcgttctatgtttacgcacagctgcctgtcaccccagatgtcctcatcatcccgtcagagctgaggtacttcgtgaaggatgtcctcggctgtgtctgtgtgaaccctgggcgccttaccaaagggcaggtgggaggcaccttcgcccgactctaccttaggaggccggcagcggacggggcagagaggcagagcccatgcattgctgtgcaggtcgtcaggatctgaggcttctgtcctctgctgttctctgctgtgtgggcccttaaagtcttagccaagagccaagacatagccctgtgacaaggtgaacagttgggtgggaaaggagagaggagccagccagggaggggcagctgcagtgaccaggcccagcagggaggacttgtgcagccgggcctgcctctgagtggtgcctctcctggaaggaagctcttgcttctcagtccatgctccgtgtccagaagtaagccagctgtggatcccgcccactcagaaaaggcgagaaggctttgtgattttctacatgaatcaaacacagaaacaacttttggagaaattaaattctgagtgtgacttctgaaaa

SEQ ID NO: 74913 - DNA, 650 bp, Homo Sapiens
  misc_feature (60)..(60): n is a, c, g, or t
atcaatagaatctaattaaaattactactccagggaataagaagtattgaggatttattntattgtgaattggttttaagtatggaataattgtctttacagttataaaaagtaattagtggtgtttacaaaatgttgggaatttctgctttgacagataggtaagtcccatgggaatttctgctttgacaaatagttaagtcccatggccttcagagaggcaggaagcagaaactttcaaaaaagtaacatttctctggatttaatgtggaaatagagaaaaatttaaagaataattaaaaaaccatggtagatgaaatttggtgattacatatagtttcggatgttaatgctagttgagagaagagaaaaagatagcaagtagaagcagagaacaggatcattggaagggacctgagaaattgccatttcatccattttagcaaatttaattagcatagcatgtaccagtactaggatcttgagtgagtgtgtgagtttagctctgcctaatatattactacttgggggatctttgggagactatatcttcttggagattgagtttcttctataaaataagcataatgctaccctaaatgtaagggttatcatgaagataaataataaaggactacaaaggaccaagc

SEQ ID NO: 74914 - DNA, 1041 bp, Homo Sapiens
  misc_feature (919)..(929): n is a, c, g, or t
tggtttggtagtttcttaaaagtgaaaattagacctaccatgtgacccagccattccactactaggtgtctacccaagaaaaataaaagcatgtttccacacaaagacttgtatacaaatattcatagcaactttatttggaatagcaaaaaaaagggaaaacaacccaaacagccatcagcaggtgaatggataaacacatggtggatatccatacaatgaaacactgctcagctgtgaaaaaggaacaaactattgaaacaatatccctgttcaggagcaggatttggagaatataagaagcatatcttttataatttaaaaacttgctttctaagatttgaactgaaagatcttttttgaagatgagtgtcatggaattgacatgatttgaagtgttatggcacttcctttgaataaaaaaatcgaagttgctaacaagttccatgtacttaaaaatattgggacagagcgctcaaagctatgaaaagttttgggccacccatgaatatgagataagattaacaagagaggagaaggaagtgaaaaatatggctttccatgcatttccaattgtatgaattaccattgaaggctagtgatgaaatgttactctctaggagtcagtgttttcacatctaaaaatggtatcagtcatagaaaaagcttatctgtctactgccaaaaagggaagagggtaatagcacgtattgagcacctactgtatattcagatgaggtcctgccatacgaaattcagtccccactgttctgggggccatgcaatcgtctttagataataggtgtggggctaggggttccgctgtgaagttaccttccttcccagggtgctcagccagcacaaagctgtggtgagatttgggtccaggtctcagactccagattccaaaccacatttnnnnnnnnnnntcatcacctgcagactgcctatagctttgacagtctctgtgtctccctttcgtttgcatccttcgggtggagaaaggtttatgaatattttagtaaatttgattcaaaagac

SEQ ID NO: 74915 - DNA, 2004 bp, Homo Sapiens
  misc_feature (45)..(59): n is a, c, g, or t
  misc_feature (128)..(145): n is a, c, g, or t
  misc_feature (1639)..(1653): n is a, c, g, or t
  misc_feature (1779)..(1779): n is a, c, g, or t
tcacctagacctacaacatcaatacatataaataaattctagtgnnnnnnnnnnnnnnnatttggggtgggggaggagaaaggaaggaaataccaggtaagagaaaagggctggagaacaggtgaccnnnnnnnnnnnnnnnnnnctcaaacagcaagtactgtgggtctgataccaggttcacctgaagggtacatcttaacagcatccagaaggctttcttttgacaaatcacacgcaccaccgcatcaggtgggaggggtctggccatgcggctcaagtgtccaggtggagatgaatgtgtggctcccgcaggcctgaactcacccaggaatggcttggcaaggagggccggtggggacagagagggctcatcccaggccccacaagcagccgcttgcagtgggagaaggaaaagcagacaagaagctcaggtagggaatgcctggaactgtcgggtgggcagcccctggggaagggactcaagcataaaggcttgggataaagagggaaaagaccaggtgagggcaggaggggagctgctgaaagatgcaggtgaacagtaaagcacctttcagtaaaactgccctttcccaggcagctctggggtgggcgctgttggtaggaggccgttctcccgcttccttagaattgtgagagcagtaagaagttacttcagcagttcctaagatgctccttccccatgttctacactagacacagagcttagagcccaagcctgagcgctgtcctgcacccgtgagacgctgaaggcagcctctggtggggggtgcatccccggccccctcctctaggtgttctgagccagcctcctctggaggaggaggtagacgctcagtgacccctaagaacagctgagaaacctgaactgtccccttccctttccttggaatgacagaatctggagtgatttccttgtttcttacttaaaaacaagcccagcacacgatggctcacacaagcctctggctggagaagctgccctcccggaggctgcgcaggccctttggaccttggtcagccctccacccagcctcaccctggacctgcccccgccgtctgaagacaaacgagactgatgcctactgcttagctcaggccctcctgtcctgacaacctgggtctgctgctgggagtgaagcaaaggaggaaaaggacaaactcccagtggcctcacttggggaccacacacgggtccactccctccatcaccaagtggtgttcacgatgagctgtgtgggaggtggagacaggtccagagaaagcagcaggctccggaagaggaaggaaggaaaatgacaggttacagaaggcttcagggaaagaaatgtgtgaaaaacacagcacccctgcagggcagggtatggagccccagaagcagagcccacggggcctgggatgggcctgtagtatgtcagctcaccccatctgggccaacctgggagccaccagcagccatctccatgatttgtctctggtgcccagcacatccactggctttagaggagcccaggacagggaccctgtgtgattctcatgctaaaactgtcatcaacttcatgggctgcctgtaagcgccctgggctcatcaagccaggagctggaacccaactatgannnnnnnnnnnnnnnaacctgcctgctgctctgagcaccccatcgcttcccaggcggggagccaggcaccagaatgctcgcaatcggtgccctcaagaacctccttttctttttgcaaataacctcaagggtgaaccagcntgaggaatcaggaggggatgcattcttaagagtcacctcttaaggtactgcagtgacgtatcaaactaaacaggacagaggctagagatggaagggagcggaggggctggcaagaaacatataaaagttcagctatacacatggagcttgcgtttttgttttcttttcctttcccctttgtaaaaccctcgtgccgattcaaccacccggcctcgtactagcctt

SEQ ID NO: 74916 - DNA, 1099 bp, Homo Sapiens
aatacaagaatgaaaatatttataataggactcgacttggagaaattgctattcttcctgttgtccaaaccataaatctgaggataacctgggcttttctctttcctcttctcctaaccagtttttcaccaagtcctgtgccatttcacctcctaacgtctgtcagctatccttttgcctttacctcaccactattaccctagagaagactttcattatttctcatctggattaccagctcgatctctaatctgcttcagttcatccttcttgctacttctaggctaaacatcaaaaacagatctggtaggggcggggaaatgagggggaagaaacaaaaacgtgatggtgcctcatgctgcttaaaatcttcagtacattgatgttttgatggcggactacataagcgttaaaaattgtgtttttcagaatctttaaaatataagacagtgctatctagtgaataaaaaaattagtttgaaagatatctggagaaatcgcattcataaaacaattggaagtgaaactattaaaacaatagggctttttaaaattaaaaatatttaaaattcaaaagtaattaatagtgttggaagatgtaggtgagaaaatattcctgaaagtagaactgaaagagacaaagagaaaagatgaaagccacagaagataaatacaggggtcaaaaccagactaacagttttagaaagtgaaaaaagttaaaaaagaaatgggggcagtgggttattagaaataacataaatggctggtatggtttgtctgtgtcctcacccaaatttcatctcgaattgtaatccccataatccccatgtgtctagggagagacctggtgggaggtgattggatcatgggggtggtttcccctacgatgttctcctgatagtgggtgagttctcacaagatctgatggttttataaagggctctgcccctttaactcctcactctttctcctgaagccttgtgaagaaggtgctttgcttcccctttgcgttcccccatgattgtaagtttcttgaggcctccctggccatgctgaactcttcagtcaattaaacactttcctttataaattaaaaaaa

SEQ ID NO: 74917 - DNA, 1027 bp, Homo Sapiens
  misc_feature (26)..(26): n is a, c, g, or t
  misc_feature (72)..(72): n is a, c, g, or t
  misc_feature (110)..(110): n is a, c, g, or t
  misc_feature (130)..(130): n is a, c, g, or t
  misc_feature (137)..(137): n is a, c, g, or t
  misc_feature (214)..(214): n is a, c, g, or t
  misc_feature (297)..(297): n is a, c, g, or t
  misc_feature (328)..(328): n is a, c, g, or t
cagtgaagctgctccaagcgaccctnactggacagatgagaggtcaggtcgctcgcctctgcccgtcacttnccaatatcacgacatgatgttagtcgaggaacatgagntcagcatgaagccatccgtntccacgntgttgcagcctcgcccaccaagagatccagctaacatgtacaagtgtgcctcatcagccctgcgcagcagtgtactntgcgttaagatctgcagtggtccgccaacgtcgtggcccttagtatgtgcatgtaagaccgcatgatcatgagtcctgtgaanaacaatgtgagcagaggcctcaacatcgcantggtgaatggaaccacgggagctgtgctgagacagaaggcatttgacatgtactccggagatgttatgcacctagtgaaattccttaaagaaattccggggggtgcactggtgctggtggcctcctacgacgatccagggaccaaaatgaacgatgaaagcaggaaactcttctctgacttggggagttcctacgcaaaacaactgggcttccgggacagctgggtcttcataggagccaaagacctcaggggtaaaagcccctttgagcagttcttaaagaacagcccagacacaaacaaatacgagggatggccagagctgctggagatggagggctgcatgcccccgaagccattttagggtggctgtggctcttcctcagccaggggcctgaagaagctcctgcctgacttaggagtcagagcccggcaggggctgaggaggaggagcagggggtgctgcgtggaaggtgctgcaggtccttgcacgctgtgtcgcgcctctcctcctcggaaacagaaccctcccacagcacatcctacccggaagaccagcctcagagggtccttctggaaccagctgtctgtggagagaatggggtgctttcgtcagggactgctgacggctggtcctgaggaaggacaaactgcccaagacttgagcccaaattaaattttatttttgctgggtttgaatg

SEQ ID NO: 74918 - DNA, 662 bp, Homo Sapiens
  misc_feature (88)..(101): n is a, c, g, or t
aatataaaccacagaatatatttaattcaaattaaacatgaaactagaataatgttcggtccttatcaagtagcaattacattgtttnnnnnnnnnnnnnngaacagtacatttctgtctacattccgacaatccaacgaggcggcatgggtcacatccagtttgatgaggtgacagagccagcagtcaccatccatgggcatggttctgaggggactggggagacacagaccatacatgatacaaaatgattctgcagcaagtctgaaggagcgcagcctccctcctaatacataagaatgaacgtccaggtagcagagagtaggcgacttgcataatgagcgcattttattaaatagatagttaacgcactgcttcttactcattccaagttgctgtaggtgctgcccgcattaacagcagggacaaaagcttcctatgcgcgtttcagcaggaatactctctccactccaggtacttctttgttttggatttttttggcatgatttccttcccatgtaaagaaagcaacttcttcaagacacaggtcattcagctttagtggtggcctccaggttctccttgggccgtgcagaaggccaggtcccgcacagtgaggccctcctttgtcctccactgaaagcttttcactgttcggtctg

SEQ ID NO: 74919 - DNA, 955 bp, Homo Sapiens
  misc_feature (68)..(68): n is a, c, g, or t
  misc_feature (90)..(90): n is a, c, g, or t
cgaggtgcggagactgcagaccagtgcttcactgtgtggagtggggcaggcaggggctggaccccagngacttgccttccccacccactntgctgccagcaggcccagggatccctgacctgcaccaggtggcaccaagggtcctgagtcctggagatgtccccagaagctgctgtgcctcacagcgctgtgagccagaccctccttgggcagacaggctgactggcagcaccagctttgggggcagagtcctaggatgaggcttgggcagtgctggtagggtttcaaggtgctattagtggggcagggggcaggccggctgctcacagagcacccaagttcctcaccagctactctggccatatatccaacaccagaaagcaacaagtgtggctgtgtccatctctgctcccccaaaggcccgctctaggccttatcctccctctaggtcctgccacaacctgtccctggctggctccagcgtcctcgtccctcctgggcctgtgcaccggtgggtggggcgcccatagcactgccggtaaaggagcctgcatgttcaggcccctcgggggattggggggactggggaggcgcagcctagacccaattgcttgcccccatgaggctagcactaataggaaacccttttttgttgtcatttaatgtctttattcctgcctttaatatggggaggaaggttccataagctacatgtttcctagttaagctctttcctattgtgtttatacagttttgtttgttatactctttgcaccttaaacccccaccactccccgacactattgccttcccagcatggctggagtgggaagaggcttgggccccgggggaatggttagggggactgaacccctctgaccttatgaggcccatggcactggggcagggagctggggacattttaatcatcaataaacgaagcactttattctgt

SEQ ID NO: 74920 - DNA, 1320 bp, Homo Sapiens
cggcctcggcagcggtgttctcgcgcttgcgaagtcgggctccggctcggctcgcggggactgtgcacgaggttggcgacgccgccccgccgggccccagatcaggccgcagagatcgggagccgcgggagcactaaggcgcaagggccacagcagcagccgggctcagagggtcccagctatgccaaaaaagttgcgctctggcttgctgggctgcttggagctggtgggactgtgagcgtcgtctatatctttggaaacaacccggtggacgaaaatggtgccaagattcctgatgagttcgacaatgatgatcatcgagcccaccagcccttgccttctcccagaccctctgcaggaaccgtactaccagccaccctacacgctcgttttggagctcaccggcgtcctcttgcatcctgagtggtcgctggccactggctggaggtttaagaagcgcccaggcatcgagaccttgttccagcagcttgcccctttatatgaaattgtcatctttacgtcagagactggcatgactgcgtttccactcattgatagtgtggacccccatggcttcatctcctaccgcctattccgggacgccacaagatacatggatggacaccatgtaaaggatatttcatgtctgaatcgggacccagctcgagtagtagttgtggactgcaagaaggaagccttccgcctgcagccctataacggcgttgccctgcggccctgggacggcaactctgatgaccgggtcttgttggatctgtctgccttcctcaagaccattgcactgaatggtgtggaggacgtgcgaaccgtgctggagcactatgccctggaggatgacccgctggcggctttcaaacagcggcaaagccggctagagcaggaggagcagcagcgcctggccgagctctccaagtccaacaagcagaacctcttccttggctccctcaccagccgcttgtggcctcgctccaaacagccctgaactctgggcctcctcaaactcagtgcctgggtccagggccccagtgcttccagaccaagacttgggccaccacttgtccaataaagtacatcccagacgccacacctgctgtgtcccgagagtctccagatgggggcatcagggtgaggtccgggactcttgggtcatcgtcccacagtggctgatcggctgccaagcacagtgggggtgctttgttggatcagagcagatttttcaccctggtctcggaatctaaaaaccctcgctgtgtcttcctgtgtgttgcgtgatctgtgaaaaatacatctccctctgcccac

SEQ ID NO: 74921 - DNA, 917 bp, Homo Sapiens
tccccccgtacggtctagcgtcgaggccgtggtgttaaatcggcacgagggcagactggcggcctcggcagcggtgttctcgcgcttgcgaagcgggctccggctcggctcgcggggactgtgcacgaggttggcgacgccgccccgccgggccccagatcaggccgcagagatcgggagccgcgggagcactaaggcgcaagggccacagcagcagccgggctcagagggtcccagctatgccaaaaaagttgcgctctggcttgctgggctgcttggagctggtgggactgtgagcgtcgtctatatctttggaaacaacccggtggacgaaaatggtgccaagattcctgatgagttcgacaatgatccaattctggtacagcagttgcgccggacatacaaatatttcaaagattatagacagatgatcatcgagcccaccagcccttgccttctcccagaccctctgcaggaaccgtactaccagccaccctacacgctcgttttggagctcaccggcgtcctcttgcatcctgagtggtcgctggccactggctggaggtttaagaagcgcccaggcatcgagaccttgttccagcagcttgcccctttatatgaaattgtcatctttacgtcagagactggcatgactgcgtttccactcattgatagtgtggacccccatggcttcatctcctaccgcctattccgggacgccacaagatacatggatggacaccatgtacaggatattccatgtctgaatcgggacccagctcgagtagtagtatgtggactgcaagaaggaagccttccgctgcagcctataacggcgtagccctgcggccctgcggacggcaactctgatgaccgggtctggtgggatctgtctgctttctcagaccattgctgaa

SEQ ID NO: 74922 - DNA, 686 bp, Homo Sapiens
  misc_feature (391)..(399): n is a, c, g, or t
ttccgacaagcatgtgtgttcatacatgcatacccccaacaaagggcaatgcactgtgtaacagaactgaacacaatttaacaaagctgctcccagccttcctgtcacctctttggcagtagggcaggccatctcaacttcggacacacaaagacattctcttcaggaggaaggctgtcctgtgtggtggggacaaggcttcagttgcaagatggtcgtctctccttcttcctgaataagacaacgtaccactgttataagattccaagtgaattccttcagaggaagagaaggacaacataagaaggcgtggatgacagactttcagttaaactaacaaagaaagaacactgcagcaccatctatgcctacctttttctcagcgtttatnnnnnnnnnttcatattccctacaaagcaaaactatggtataacaggacaactaagactgccctggcaccagagaaactacaatctagatgtgctctgcttccagtcggccgagaagcctgcagcaaatcacctaaacacttaaggtctttgtgtgccatccacacccaactgcaactagagactttcattagcccctttctgtctcagagctttcggtggttctacaagtcaccagcctggatctctaacaatctccctctccaaagctgttaatacattcacatccaaaataaa

SEQ ID NO: 74923 - DNA, 3155 bp, Homo Sapiens
ccgccacgaccacagctcggtttaatcggcacgaggcgaggcttcgccccgtggcgcggtttgaaattttcgcggggctcaacggctcgcggagccggctacgcggagtgacatcgccggtgtttgcgggtggttgttgctctcggggccgtgtggagtaggtctggacctggactcacggctgcttggagcgtccgccatgaggagaagtgaggtgctggcggaggagtccatagtatgtctgcagaaagccctaaatcaccttcgggaaatatgggagctaattgggattccagaggaccagcggttacaaagaactgaggtggtaaagaagcatatcaaggaactcctggatatgatgattgctgaagaggaaagcctgaaggaaagactcatcaaaagcatatccgtctgtcagaaagagctgaacactctgtgcagcgagttacatgttgagccatttcaggaagaaggagagacgaccatcttgcaactagaaaaagatttgcgcacccaagtggaattgatgcgaaaacagaaaaaggagagaaaacaggaactgaagctacttcaagagcaagatcaagaactgtgcgaaattctttgtatgccccactatgatattgacagtgcctcagtgcccagcttagaagagctgaaccagttcaggcaacatgtgacaactttgagggaaacaaaggcttctaggcgtgaggagtttgtcagtataaagagacagatcatactgtgtatggaagaattagaccacaccccagacacaagctttgaaagagatgtggtgtgtgaagacgaagatgccttttgtttgtctttggagaatattgcaacactacaaaagttgctacggcagctggaaatgcagaaatcacaaaatgaagcagtgtgtgaggggctgcgtactcaaatccgagagctctgggacaggttgcaaatacctgaagaagaaagagaagctgtggccaccattatgtctgggtcaaaggccaaggtccggaaagcgctgcaattagaagtggatcggttggaagaactgaaaatgcaaaacatgaagaaagtgattgaggcaattcgagtggagctggttcagtactgggaccagtgcttttatagccaggagcagagacaagcttttgcccctttctgtgctgaggactacacagaaagtctgctccagctccacgatgctgagattgtgcggttaaaaaactactatgaagttcacaaggaactctttgaaggtgtccagaagtgggaagaaacctggaggcttttcttagagtttgagagaaaagcttcagatccaaatcgatttacaaaccgaggaggaaatcttctaaaagaagaaaaacaacgagccaagctccagaaaatgctgcccaagctggaagaagagttgaaggcacgaattgaattgtgggaacaggaacattcaaaggcatttatggtgaatgggcagaaattcatggagtatgtggcagaacaatgggagatgcatcgattggagaaagagagagccaagcaggaaagacaactgaagaacaaaaaacagacagagacagagatgctgtatggcagcgctcctcgaacacctagcaagcggcgaggactggctcccaatacaccgggcaaagcacgtaagctgaacactaccaccatgtccaatgctacggccaatagtagcattcggcctatctttggagggacagtctaccactcccccgtgtctcgacttcctccttctggcagcaagccagtcgctgcttccacctgttcagggaagaaaacaccccgtactggcaggcatggagccaacaaggagagacctggagctcaacggcagcatcctgagtggtgggtaccctggctcggcccccctccagcgcaacttcagcattaattctgttgccagcacctattctgagtttgcgaaggatccgtccctctctgacagttccactgttgggcttcagcgagaactttcaaaggcttccaaatctgatgctacttctggaatcctcaattcaaccaacatccagtcctgagaagccctgatcagtcaaccagctgtggcttcctgtgcctagactggacctaattatatgggggtgactttagtttttcttcagcttaggcgtgcttgaaaccttggccaggttccatgaccatgggcctaacttaaagatgtgaatgagtgttacagttgaaagcccatcataggtttagtggtcctaggagacttggttttgacttatatacatgaaaagtttatggcaagaagtgcaaattttagcatatggggcctgacttctctaccacataattctacttgctgaagcatgatcaaagcttgttttatttcaccactgtaggaaaatgattgactatgcccatccctgggggtaattttggcatgtatacctgtaactagtaattaacatcttttttgtttaggcatgttcaattaatgctgtagctatcatagctttgctcttacctgaagccttgtccccaccacacaggacagccttcctcctgaagagaatgtctttgtgtgtccgaagttgagatggcctgccctactgccaaagaggtgacaggaaggctgggagcagctttgttaaattgtgttcagttctgttacacagtgcattgccctttgttgggggtatgcatgtatgaacacacatgcttgtcggaacgctttctcggcgtttgtcccttggctctcatctcccccattcctgtgcctactttgcctgagttcttctacccccgcagttgccagccacattgggagtctgtttgttccaatgggttgagctgtctttgtcgtggagatctggaactttgcacatgtcactactggggaggtgttcctgctctagcttccacgatgaggcgccctctttacctatcctctcaatcactactcttcttgaagcactattatttattcttccgctgtctgcctgcagcagtactactgtcaacatagtgtaaatggttctcaaaagcttaccagtgtggacttggtgttagccacgctgtttactcatacagtacgtgtcctgtttttaaaatatacaattattcttaaaaataaattaaaatctgtatacttacatttcaaaagg

SEQ ID NO: 74924 - DNA, 983 bp, Homo Sapiens
tgtctagcagatctaattatgcttgaaaacaacacctgctacttagggtctttgagttccagcttattggtgtttctcagctgcaatgttgggagagaaataggggtagaatgtccattcatgatagaatgtctgttcatgagttgggatgggtcctgaccccattctccctcctgtccaggtccaatgaagcgtcaagtggcagtaaaatcaacccgaggctttgctcttaaatcaacccatgggattgcaattaaatcaaccaacatggcctctgtggacaagggggagagcgcacctgttcgtaagaacacacgccaattctatgatggcgaggagtcttgctacatcattgatgccaagcttgaaggcaacctgggccgctacctcaaccacagttgcagccccaacctgtttgtccagaatgtcttcgtggatacccatgatcttcgcttcccctgggtggccttctttgccagcaaaagaatccgggctgggacagaacttacttgggactacaactacgaggtgggcagtgtggaaggcaaggagctactctgttgctgtggggccattgaatgcagaggacgtcttctttagaggacagccttcttcccaacccttcttgaactgtcgtttcctcaggaactgggtcttcctgattgttgaaccctgacccgaagtctctgggctagctactccccccagctcctagttgatagaaatgggggttctggaccagatgatcccttccaatgtggtgctagcaggcaggatcccttctccacctccaaaggccctaaagggtggggagagatcaccactctaacctcggcctgacatccctcccatcccatatttgtccaagtgttcctgcttctaacagactttgttcttagaatggagcctgtgtatctactatctccagtttgtattatttcttgaaagtcttttaacaatatgataaaactaagattgtgaaa

SEQ ID NO: 74925 - DNA, 531 bp, Homo Sapiens
tttaggtaataatcacggcatctttaattggcaaactcagggccaagatctatctggctgtcagtctgggctgagaactggtgttgcaagctgggctttccccaggctgtgttgagggttaggggaggggactgagatgtacactggaaattaaaacctggtacaaaggtatctcctactgccaaggttcctcttctcaccccatgtgcccctgtgataaagtgacacacgagtcaacccgccccagaaaagctgagggagagagagaccacggtgggattggattggagatgaggttcgaataaagtcagttcattacttgacacccgaacagtgtcttttctccaaaacttctacctcctttcaggctgataaatctggttccttcctccctgggtaggccagacacagggctgagctgggtgacaggtgagggcgcacaggccagcagaggtcacaggcccttgctctccttgggcaggtgttgtcctgaccagaggcagggcaggggctgcccgtggctggactctg

SEQ ID NO: 74926 - DNA, 628 bp, Homo Sapiens
  misc_feature (33)..(33): n is a, c, g, or t
gtgtgaagcagaagtacctggaatacaagaagnatccccaacagcaacccacctgagtatgaattcctctggggcctgcgagcccgccatgagaccagcaagatgagggtcctgagattcatcgcccagaatcagaaccgagacccccgggaatggaaggctcatttcttggaggctgtggatgatgctttcaagacaatggatgtggatatggccgaggaacatgccagggcccagataccatcagtacattctgaatagcaaccgtgccaacaggagggccacgtggagagctggcgtcaacaagtggcaccaatggaggggccagcaccagcgtcctagatggccccagcaccagctccaccatccggaccagaaatgctgccagagctggcgccagcttcttctcctggatccagcaccgttgacgaactgcagcgatcttactggccaagccagagcgcctcctctcagattccttctcgacacagcaccctaggcggcttcttcctgtcagtcggaggtggcatgcaagatgaagctctctttgctcttcctgctttcattttgtgcttttccttgtgttttcatgttttgggtatcagtgttacattaaagttgcaaaatt

SEQ ID NO: 74927 - DNA, 803 bp, Homo Sapiens
gatctgaggaagctcatcacagatgactttgtgaagcagaagtacctggaatacaagaagatccccttacagcaacccacctgagtatgaattcctctggggcctgcgagcccgccatgagaccagcaagatgagggtcctgagattcatcgcccagaatcagaaccgagacccccgggaatggaaggctcatttcttggaggctgtggatgatgctttcaagacaatggatgtggatatggccgaggaacatgccagggcccagatgagggcccagatgaatatcggggatgaagcgctgattggacggtggagctgggatgacatacaagtcgagctcctgacctgggatgaggacggagattttggcgatgcctgggccaggatcccctttgctttctgggccagataccatcagtacattctgaatagcaaccgtgccaacaggagggccacgtggagagctggcgtcagcagtggcaccaatggaggggccagcaccagcgtcctagatggccccagcaccagctccaccatccggaccagaaatgctgccagagctggcgccagcttcttctcctggatccagcaccgttgacgaactgcagcgatcttactggccaagccagagcgcctcctctcagattccttctcgacacagcaccctaggcggcttcttcctgtcagtcggaggtggcatgcaagatgaagctctctttgctcttcctgctttcattttgtgcttttccttgtgttttcatgttttgggtatcagtgttacattaaagttgcaaaattaaaaa

SEQ ID NO: 74928 - DNA, 357 bp, Homo Sapiens
ggggtgagatgtcagagggagggccggggtgggggcgctgggggcaacggcaacagcatggacggacacttattttgttacgtacacccctccctggttcgcgtgtgtccacggatgttgtcactttggtttcttgtgcttttataggcaccgttgacgaactgcagcgatcttactggccaagccagagcgcctcctctcagattccttctcgacacagcaccctaggcggcttcttcctgtcagtcggaggtggcatgcaagatgaagctctctttgctcttcctgctttcattttgtgcttttccttgtgttttcatgttttgggtatcagtgttacattaaagttgcaaaatt

SEQ ID NO: 74929 - DNA, 622 bp, Homo Sapiens
tgatcttttccacaagataacaatggctctttgaatattaaaataagagatattcagggccaatgcagttttggtgtcctggaaagcaagttctaaaattctcaaatctagtgttaaatggacagcctttgtcaagactgaaaattctcatgctgcgcaaagtgctcgaataccatctgatgtcaaggtatataatcttactcatctgaatccatcaactgagtataaaatttgtattgatattcccaccatctatcagaaaaacagaaaaaaatgtgtaaatgtcaccaccaaaggtttgcaccctgatcaaaaagagtatgaaaagaataataccacaacacttatggcctgtcttggaggccttctggggattattggtgtgatatgtcttatcagctgcctctctccagaaatgaactgtgatggtggacacagctatgtgaggaattacttacagaaaccaacctttgcattaggtgagctttatcctcctctgataaatctctgggaagcaggaaaagaaaaaagtacatcactgaaagtaaaagcaactgttataggtttaccaacaaatatgtcctaaaaaccaccaaggaaacctactccgaaggggtgaaca

SEQ ID NO: 74930 - DNA, 1807 bp, Homo Sapiens
  misc_feature (1655)..(1714): n is a, c, g, or t
ggctaggcccgcgtgcgctggagacctccgcgctggcccccgcgagcctcctgccctggcccggcgctgcggctctgccgcggcggcagcatgggtggcccccggggcgcgggctgggtggcggcgggcctgctgctcggcgcgggcgcctgctactgcatttacaggctgacccggggtcggcggcggggcgaccgcgagctcgggatacgctcttcgaagtccgcagaagacttaactgatggttcatatgatgatgttctaaatgctgaacaacttcagaaactcctttacctgctggagtcaacggaggatcctgtaattattgaaagagctttgattactttgggtaacaatgcagccttttcagttaaccaagctattattcgtgaattgggtggtattccaattgttgcaaacaaaatcaaccattccaaccagagtattaaagagaaagctttaaatgcactaaataacctgagtgtgaatgttgaaaatcaaatcaagataaagatatacatcagtcaagtatgtgaggatgtcttctctggtcctctgaactctgctgtgcagctggctggactgacattgttgacaaacatgactgttaccaatgaccaccagcacatgcttcacagttacattacagacctgttccaggtgttacttactggaaatggaaacacgaaggtgcaagttttgaaactgcttttgaatttgtctgaaaatccagccatgacagaaggacttctccgtgcccaagtggattcatcattcctttccctttatgacagccacgtagcaaaggagattcttcttcgagtacttacgctatttcagaatataaagaactgcctcaaaatagaaggccatttagctgtgcagcctactttcactgaaggttcattgtttttcctgttacatggagaagaatgtgcccagaaaataagagctttagttgatcaccatgatgcagaggtgaaggaaaaggttgtaacaataatacccaaaatctgattggtcatatttttccaaagagtaatgcagtctggatataaatgtattttctgtcttccttataaggggattctcccagctgctaaatttaaacagtaaatatcacattttgtcattaacacagctataacttgccgtggttctcagatttattttggactattttgatgccaagtgaatataagagcttgtactgaaaccatttatttctttctattttgctatttgcaaatgcttgttatcttccctacatgaagtggcagtaacctttttcacatttaagctacccttctaccttttgaagtgatttgcagttactcatctgagacagcatcagtatttgactaaatcattgtttcacaactgaatagtcttgttcttttagtagcaatgaaatcctaagctcttgaggccattcacctgccaacctgaccatactgctttcaaaagtcttttctcatcagtagaatctattttggtcacttctagtcaatgaaaaatgtaaacttttaggagagaatgtttcctaggactcacccactccattcaatgttacatataaaatagtgtgatcaatcacaatgtccatctttagacagttggttaaataaattatctggtcttttggaaagaccgtnnnnnnnnnnnnnnnnnnnnnnnnnnnnnnnnnnnnnnnnnnnnnnnnnnnnnnnnnnnnacttagatcgggagtttggaccaagctgaccaatattgggaaaccggtgtctctaagaataacaaattctcggtggggggagcgccgtaccca

SEQ ID NO: 74931 - DNA, 667 bp, Homo Sapiens
  misc_feature (27)..(27): n is a, c, g, or t
ccacagggaagttcatctgtgctttcnccagggatctattacttttcttatgatatcacattggctaataagcatctggcaatcggactggtacacaatgggcaataccggataaagaccttcgacgccaacacaggaaaccatgatgtggcttcggggtccacagtcatctatctgcagccagaagatgaagtctggctggagattttcttcacagaccagaatgcctcttctcagacccaggttgggcagacagcttattctccgggtttctcttatacgttgacacagattacctagattccatatcagaagatgatgaattgtgatcaggaccaagatccctgtggtaaacactctgattgaatctggggttccagaaggtggaacaagcaggaatgggatccaaagagactcccactcagattctaaagcatttaaagacaattatagcagaatttatcaaaacaagatgaaacacagaaaagttgaaaccacaacaaaatgaattctattaaagaatagccccagatataaattctcttgaaagcaatgttcataaatatttaagcaaattaaagacaatgttaacaaattttctattaaatgccctgagtgataaaaccagttggcaataatattgccttattaaatcttcaaaaaataa

SEQ ID NO: 74932 - DNA, 1146 bp, Homo Sapiens
  misc_feature (260)..(319): n is a, c, g, or t
  misc_feature (550)..(550): n is a, c, g, or t
tgggtggcgaattcggcacgaggagccaggttcccaggaggcctcaccatactccctttcagggccagggctccagcaagcccagggcaaggatcctgtgctgctgtctggttgagagcctgccaccgtgtgtcgggagtgtgggccaggctgagtgcataggtgacagggccgtgagcatgggcctgggtgtgtgtgagctcaggcctaggtgcgcagtgtggagacgggtgttgtcggggaagaggtgtggcttcaannnnnnnnnnnnnnnnnnnnnnnnnnnnnnnnnnnnnnnnnnnnnnnnnnnnnnnnnnnnctggtgggcatgtgagatgagtgactgccggtgaatgtgtccacagttgagaggttggagcaggatgagggaatcctgtcaccatcaataatcacttgtggagcgccagctctgcccaagacgccacctgggcggacagccaggagctctccatggccaggctgcctgtgtgcatgttccctgtctggtgcccctttgcccgcctcctgcaaacctcacagggtccccacnacaacagtgccctccaggaagcagcccctcggaggcagaggaaggaaaatggggatggctggggctctctccatcctccttttctccttgccttcgcatggctggccttcccctccaaaacctccattcccctgctgccagcccctttgccatagcctgattttggggaggaggaaggggcgatttgagggagaaggggagaaagcttatggctgggtctggtttcttcccttcccagagggtcttactgttccagggtggccccagggcaggcaggggccacactatgcctgcgccctggtaaaggtgacccctgccatttaccagcagccctggcatgttcctgccccacaggaatagaatggagggagctccagaaactttccatcccaaaggcagtctccgtggttgaagcagactggatttttgctctgcccctgaccccttgtccctctttgagggaggggagctatgctaggactccaacctcagggactcgggtggcctgcgctagcttcttttgatactgaaaacttttaaggtgggagggtggcaagggatgtgcttaataaatcaattccaagcctcaaaaaaaa

SEQ ID NO: 74933 - DNA, 1072 bp, Homo Sapiens
  misc_feature (526)..(586): n is a, c, g, or t
  misc_feature (712)..(714): n is a, c, g, or t
agtgcatgtactatgaaccagctggttcaaaaaagcaggctggtaccggtccggaattcccgggatatcgtcgaccacgcgttcgccgccgctctcccggcgcggcagctgtctgggctgctgcgcgccgcctaggtgtctgggcgatctatgggcaagagcaagggccacgatgacagattacggcgaggagcagcgcaacgagctggaggccctggagtccatctaccctgactccttcacagtattatcagaaaatccacccagcttcaccattactgtgacgtctgaggctggagaaaatgatgaaactgtccagactaccctcaagtttacatacagtgaaaaatacccagatgaagctcccctttatgaaatattctcccaggaaaatctagaagataatgatgtctcagacattttaaaattactagcattacaggctgaagaaaatcttggtatggtgatgatttttactctagtgacagctgtgcaagaaaaattaaatgaaatagtagatcagatnnnnnnnnnnnnnnnnnnnnnnnnnnnnnnnnnnnnnnnnnnnnnnnnnnnnnnnnnnnnncaattattccatggtactccagttacaattgagaatttcttaaattggaaagccaagtttgatgcagaactctggaaattacaaagacccggatgaaagaagaagaacagcaggaaaaataaattnnnaagtgggaaacaactatttgaaacagatcataatcttgacacatctgatatccagttcttggaggatgctggaaacaacgtggaggtagatgagtctttgttccaagaaatggatgacttggagctggaggatgatgaagatgatccagactataatcctgctgacccagagagtgactcagctgactaatggactgtccccatctgcagagaggcttgactgccacagcatctgtggctatgctcagagggttatgattttcctttctttttttctaagaaaaaattattttcaggagaatattcttctgatagctttcatcattgaacttaataaactgaccttaaaatttcaaat

SEQ ID NO: 74934 - DNA, 627 bp, Homo Sapiens
aacaatcttggtatggtgatgatttttactctagtgacagctgtgcatgaaagaattaatgtttttagtagatcacataataactagatgtgaagtagaaatgaaactataggataaagaagcagaagaagctgtaaagcaattattccatggtactccagttacaattgagaatttcttaaattggaaagccaagtttgatgcagaactcttggaaattaaaaagaaaaggatgaaagaagaagaacatgcaggaaaaaataaattaagtgggaaacaactatttgaaacagatcataatcttgacacatctgatatccagttcttggaggatgctggaaacaacgtggaggtagatgagtctttgttccaagaaatggatgacttggagctggaggatgatgaagatgatccagactataatcctgctgacccagagagtgactcagctgactaatggactgtccccatctgcagagaggcttgacctccacagcatctgtggctatgctcagagggttatgattttcctttctttttttctaagaaaaaattattttcaggagaatattcttctgatagctttcatcattgaacttaataaactgaccttaaaatttcaaatat

SEQ ID NO: 74935 - DNA, 1474 bp, Homo Sapiens
  misc_feature (41)..(75): n is a, c, g, or t
aacgaccgagcgcagcgagttgtgagcgaggaagcaggcgnnnnnnnnnnnnnnnnnnnnnnnnnnnnnnnnnnncagtcgacggtaccggacatatgcccgggaattcggccattacggccgggggccgttctgctcgctcgctccccgctctggagtacgtgtctggcttgggagccgctcggacacgctggcttgggtctgccatcatggatgttctcgcagaagcaaatggcacctttgccttaaaccttttgaaaacgctgggtaaagacaactcgaagaatgtgtttttctcacccatgagcatgtcctgtgccctggccatggtctacatgggggcaaagggaaacaccgctgcacagatggcccagatactttctttcaataaaagtggcggtggtggagacatccaccagggcttccagtctcttctcaccgaagtgaacaagactggcacgcagtacttgcttaggatggccaacaggctctttggggaaaagtcttgtgatttcctctcatcttttagagattcctgccaaaaattctaccaagcagagatggaggagcttgactttatcagcgccgtagagaagtccagaaaacacataaacacctgggtagctgaaaagacagaaggtaaaattgcggagttgctctctccgggctcagtggatccattgacaaggctggttctggtgaatgctgtctatttcagaggaaactgggatgaacagtttgacaaggagaacaccgaggagagactgtttaaagtcagcaagaatgaggagaaacctgtgcaaatgatgtttaagcaatctacttttaagaagacctatataggagaaatatttacccaaatcttggtgcttccatatgttggcaaggaactgaatatgatcatcatgcttccggacgagaccactgacttgagaacggtggagaaagaactcacttacgagaagttcgtagaatggacgaggctggacatgatggatgaagaggaggtggaagtgtccctcccgcggtttaaactagaggaaagctacgacatggagagtgtcctgcgcaacctgggcatgactgatgccttcgagctgggcaaggcagacttctctggaatgtcccagacagacctgtctctgtccaaggtcgtgcacaagtcttttgtggaggtcaatgaggaaggcacggaggctgcagccgccacagctgccatcatgatgatgcggtgtgccagattcgtcccccgcttctgcgccgaccaccccttccttttcttcatccagcacagcaagaccaacgggattctcttctgcggccgcttttcctctccgtgaggacagggcagtcttggtgtgcagcccctctcctctctgtcccctgacactccacagtgtgcctgcaacccaagtggccttatccgtgcagtggtggcagttcagaaataaagggcccatttgtgggatgccgc

SEQ ID NO: 74936 - DNA, 1381 bp, Homo Sapiens
  misc_feature (132)..(132): n is a, c, g, or t
  misc_feature (152)..(152): n is a, c, g, or t
  misc_feature (178)..(178): n is a, c, g, or t
  misc_feature (213)..(213): n is a, c, g, or t
  misc_feature (220)..(220): n is a, c, g, or t
  misc_feature (240)..(240): n is a, c, g, or t
  misc_feature (251)..(251): n is a, c, g, or t
  misc_feature (258)..(258): n is a, c, g, or t
  misc_feature (293)..(293): n is a, c, g, or t
  misc_feature (302)..(302): n is a, c, g, or t
  misc_feature (320)..(320): n is a, c, g, or t
  misc_feature (325)..(325): n is a, c, g, or t
aagcgcagtacgcacgcataattggtagctcatcatagcccccagcttacattatgtcccgctgttgtgtgtggatttgacggatacaattcacacggaaaagttgactggatcggaattatacgactcatntagggaattggcctgcgagnccaggaatcgcacggagccaaatctngtgctccatatgtgcaaaagggactggatatgatnatcatgntccggacgagaccactgacntgagaacggtnaaagctnagctgtgagcgaggcgtgctagcaaggagccactngggggtgtntgctgtggctgctgtccntactntgcggtcagccgttaaacactggagcgctgctgaccatagccacgctgccactggtgtgggcatccacagcatagcacagggccctgctgggcagcagcaccctaggtcttaaagtcttcaactgtctccctctaggtggagaaagaactcacttacgagaagttcgtagaatggacgaggctggacatgatggatgaagaggaggtggaagtgtccctcccgcggtttaaactagaggaaagctacgacatggagagtgtcctgcgcaacctgggcatgactgatgccttcgagctgggcaaggcagacttctctggaatgtcccagacagacctgtctctgtccaaggtcgtgcacaagtcttttgtggaggtcaatgaggaaggcacggaggctgcagccgccacagctgccatcatgatgatgcggtgtgccagattcgtcccccgcttctgcgccgaccaccccttccttttcttcatccagcacagcaagaccaacgggattctcttctgcggccgcttttcctctccgtgaggacagggcagtcttggtgtgcagcccctctcctctctgtcccctgacactccacagtgtgcctgcaacccaagtggccttatccgtgcagtggtggcagttcagaaataaagggcccatttgtgggatgccgcagtccataaacaaaagcgaagaaatagtgaataagagacacacggttgttgggaggggaggaggcacgctcgaaaaactctgtttgaaacacacagtgcgtggggcgggcgggcgccccgggaggagaacagtaaccggaacgggcgccacagagcgatggtgcccacaaggagagaaccccggcgaggggcagagaaccaacgggggcgggaggatgtctgcacccagtgattaaaaagaaagccccggcgggggaacagcacaggagtgtgtgattgagaacacacatcgcaaagggggagtcaccggaggggagaatacagggcggtattaacacaagacggaggcaccacagcgcacccgtccgtaattaaaattacgcg

SEQ ID NO: 74937 - DNA, 951 bp, Homo Sapiens
  misc_feature (384)..(507): n is a, c, g, or t
  misc_feature (804)..(804): n is a, c, g, or t
tctcctccgaatatcctggtctggttctccagttcagtgtttcagattaaatcccctgacacagtaaaactcatgtgcactgacttctcctccgaatatcctgctttggtttctccagttcagtatttcaaattaaatcccctgacacagtgaaactcatgtgcaccgacttctcctctgccccagatggtgtaacctgggctggccagacaggcacctccccagtgggcgtgtcttcagacaaaggtggctttgctttgttgaagttactgatataaagatcagcgcctgaaacagattctccgggatattaccggagacggagtgttttattattagcctttcttaggtggacatttccatttgaattaaaagtcctttagnnnnnnnnnnnnnnnnnnnnnnnnnnnnnnnnnnnnnnnnnnnnnnnnnnnnnnnnnnnnnnnnnnnnnnnnnnnnnnnnnnnnnnnnnnnnnnnnnnnnnnnnnnnnnnnnnnnnnnnnnnnngcgtctgccatcatggatgttctcgcagaagcaaatggcacctttgccttaaaccttttgaaaacactgggtaaagacaactcgaagaatgtgtttttctcacccatgagcatgtcctgtgccctggccatggtctacatgggggcaaagggaaacaccgctgcacagatggcccagatactttctttcaataaaagtggcggtggtggagacatccaccagggcttccagtctcttctcaccgaagtgaacaagactggcacgcagtacttgcttaggatgggccaacaggctctntggggaaaagtctgtgatttcctctcatcttttagagattcctgccaaaaattctaccaagcagagatggaggagcttgactttatcagcgccgtagagaagtccagaaaacacataaacacctgggtagctgaaaagacagaagga

SEQ ID NO: 74938 - DNA, 786 bp, Homo Sapiens
cagtcgacggtaccggacatatgcccgggaattcggccattacgccccggccccccgcgagtatttgaggtccggggcggctccggcgcctctgcccgccgttctgctcgctcgctccccgctctggagtctgccatcatggatgttctcgcagaagcaaatggcacctttgccttaaaccttttgaaaacgctgggtaaagacaactcgaagaatgtgtttttctcacccatgagcatgtcctgtgccctggccatggtctacatgggggcaaatgggaaacaccgctgcacagatggcccagatactttctttcaataaaagtggcggtggtggagacatccaccagggcttccagtctcttctcaccgaagtgaacaagactggcacgcagtacttgcttagggtggccaacaggctctttggggaaaagtcttgtgatttcctctcatcttttagagattcctgccaaaaattctaccaagcagagatggaggagcttgactttatcagcgccgtagagaagtccatgaaaacacataaacacctgggtagctgaacaagacagaaggtaacaatttgcggagttgctctctccgggctcagtggatccattgacaaggctggttctgggtgaatgctgtctatttcagaggaaactggggatgaacagtttggaccaaggagaacaccgaggagagactgtttaaagtcagcaagaatgagggagaaaactgtgcaaattgatgttaagcaatctacttttaagaagactatataggagaa

SEQ ID NO: 74939 - DNA, 1015 bp, Homo Sapiens
  misc_feature (49)..(89): n is a, c, g, or t
  misc_feature (93)..(127): n is a, c, g, or t
ggggaggggcagaactaatactacctcatatgggccagcgcgtttagtnnnnnnnnnnnnnnnnnnnnnnnnnnnnnnnnnnnnnnnnnccgnnnnnnnnnnnnnnnnnnnnnnnnnnnnnnnnnnncagtcgacggtaccggacatatgcccgggaattcggccattacggccgggggcccgccgtaactgactcgctcgctccccgctctggagtctgccatcagtggatgttctcgcagaagcaaatggcacctttgccttaaaccttttgaaaacgctgggtaaagacaactcgaagaatgtgtttttctcacccatgagcatgtcctgtgccctggccatggtctacatgggggcaaagggaaacaccgctgcacagatggcccagatactttctttcaataaaagtggcggtggtggagacatccaccagggcttccagtctcttctcaccgaagtgaacaagactggcacgcagtacttgcttaggatggccaacaggctctttggggaaaagtcttgtgatttcctctcatcttttagagattcctgccaaaaattctaccaagcagagatggaggagcttgactttatcagcgccgtagagaagtccagaaaacacataaacacctgggtagctgaaaagacagacggtaaaattgcggagttgctctctccgggctcagtggatccattgacaaggctggttctggtgaatgctgtctatttcagaaggaaactgggatgaaccagtttgacaaggagaacaccgaggagagactgtctcaagtcagcacgcaatgaggacgaactgtgcaattgatgtttacgcaatctaccttttaagaagaacctatatagggaggaaactcattacccaaactcttcggtgctttccattattgctcggcaggaactgcactatgcatcatcatgcatccaggacggagacacctgactttgaccaccggggtgaaaaaggcatcccttcagcagaagttcggtagcgaag

SEQ ID NO: 74940 - DNA, 1113 bp, Homo Sapiens
ggggccctgtactgtggtcaaagtcaaggcctccgggcaggactcgcggcccctccggctggcgggtggggttgacccgcacgtcccgccccgcctctccctccgcgctccggacgggcgacggtagctcgagacccgggactccgcccgcctccccgcgagtatttgaggtccggggcggctccggcgcctctgcccgccgttctgctcgctcgctccccgctctggagtctgccatcatggatgttctcgcagaagcaaatggcacctttgccttaaaccttttgaaaacgctgggtaaagacaactcgaagaatgtgtttttctcacccatgagcatgtcctgtgccctggccatggtctacatgggggcaaagggaaacaccgctgcacagatggcccagatactttctttcaataaaagtggcggtggtggagacatccaccagggcttccagtctcttctcaccgaagtgaacaagactggcacgcagtacttgcttaggatggccaacaggctctttggggaaaagtcttgtgatttcctctcatcttttagagattcctgccaaaaattctaccaagcagagatggaggagcttgactttatcagcgccgtagagaagtccagaaaacacataaacacctgggtagctgaaaagacagaaggtaaaattgcggagttgctctctccgggctcagtggatccattgacaaggctggttctggtgaatgctgtctatttcagaggaaactgggatgaacagtttgacaaggagaacaccgaggagagactgtttaaagtcagcaagaatgaggagaaacctgtgcaaatgatgtttaagcaatctactttttagaagacctatataggagaaatatttacccaaatcttggtgcttccatatgttgggcaagaactgaatatgatcatcatgctttcggacgagaccactgacttgagaacggtggagaaagaactcacttaagaaaagttccgtaaaatggaccaagctggacatgatggatgaaaaaggaggtggaaatgtcccctccccgggtttaactagaggaaagctacaacatggagaatgttcctgcccaacctgggca

SEQ ID NO: 74941 - DNA, 631 bp, Homo Sapiens
aaaacaaaaatgggacaaatactgggtcattattcctccaaaggtgagctggtattatgaagaggctttgatttctttctctttatcaggatattcttccacctctgaggagaacattaactcttcactaagatccatgcctggcctataagacaaaaatagccaagataatccaaccagaagagccaccacgagattcaccacaatccatggctggagaatctgttcctcaattcctgcttccctaaaaatgtagaaacactcattagaagtgccttcagtttggttcatatacacaaatatatctattttatgaactttaagaaaaaacagcagtcctctcctagagaaataacaagtaaagtgtgaaagaaaatataatttccctgtaaaatataccacatatataatgagaacaagggttcaaaggttatttaaactctgaacagatctgctgtatacattcatataaatgcaaagttagtattcccaagaaaattctctaaaagttttccttccaactaccatgacattaatcctcaataaagtatctttgctttctctttacctaatgtccctagccactctctcaaaaaagactacttttggatgctacgtgcagcatttgggg

SEQ ID NO: 74942 - DNA, 902 bp, Homo Sapiens
gtagtaaataattattacatgatactcaatcactaagccagatttcagaaaagacaaacttcatatttcaatttattcagtaaggggaggtcaaaaatgaaggcttttttcccttctaccatattcgctaaatttatgtttaaacctgatatatattttataacactatttaagttatggctttttctaaaccagtgctttttaaggtaatagttataaatacaactgttttgagaaaataggaaataaacactttcacttgctggtttctagttcattattccctttgtcattaagatgataatgctagacaaattaatgtttagacataaacagcaaacacaattttaacatttttcataatattgagagatgtttcagtattatataatcaaaaaatctattacaaatacacatgtatacatcttataaaaatacatttaaaaacaaaaatgggacaaatactgggtcattattcctccaaaggtgagctggtattatgaagaggctttgatttctttctctttatcaggatattcttccacctctgaggagaacattaactcttcactaagatccatgcctggcctataagacaaaaatagccaagataatccaaccagaagagccaccacgagattcaccacaatccatggctggagaatctgttcctcaattcctgcttcccagaggctaccattaacagaagaaggtgtgtaaaggtggattctgtcacttgtcatttgctgactcagagatagtataagagcagtaaagtacaagaaagatgctaaagctgtaggatccagggccaaaaaatttcggattgctactgatattttagcaaagtcaatcctgtcaaaagctgaaattgtactcagagccaaaagcaagcctcgtgc

SEQ ID NO: 74943 - DNA, 498 bp, Homo Sapiens
cagggagatcattctttttattgccaaggaccaagaaacaaagtgtagaaatgctatacacaatggtcatgagctacaaggtaggaatggggtgcaggggagacgtggtaacacacagcactattctgaacgaactccagctctccattctaacacttgaaccaaggaaagacagcagtcctttttcactaagcctgcaacagaatgcaaatgtgacttggtttatcagctcccacaggacaggcagcgcaaaaggctattgtaagctggttttgggagcccccagctcaaacagagagtggatgctgaaggtggtccctggccgccactggtggctggtccccggcttgctaggtcctgggcatgtctcgattctcaatgatcagcttgtcagttgaatacagttggccaatgtggacctttgtgaagcaccatggggagccgtaaaccccttgcccagtttcttttgagtttattcagatttagccagaaaaggaa

SEQ ID NO: 74944 - DNA, 1299 bp, Homo Sapiens
gggcttttttttccaaaatggcagcctccagtcgcgcacaagtgttatctctgtaccgggcgatgctgagagagagcaagcgtttcagcgcctacaattacagaacatatgctgtcaggaggataagagatgccttcagagaaaataaaaatgtaaaggatcctgtagaaattcaaaccctagtgaataaagccaagagagaccttggagtaattcgtcgacaggtccacattggccaactgtattcaactgacaagctgatcattgagaatcgagacatgcccaggacctagcaagccggggaccagccaccagtggcggccagggaccaccttcagcatccactctctgtttgagatgggggctcccaaaaccagcttacaatagccttttgcgctgcctgtcctgtgggagctgataaaccaagtcacatttgcattctgttgcaggcttagtgaaaaaggactgctgtctttccttggttcaagtgttagaatggagagctggagttcgttcagaatagtgctgtgtgttaccacgtctcccctgcaccccattcctaccttgtagctcatgaccattgtgtatagcatttctacactttgtttcttggtccttggcaataaaaagaatgatctccctgagcctttgaccccagataaacccctcccaattaatgcattttcatttcctactgatacaaggcctggagagggctgttgggggccctcagggagggttcaactctgagacgagaactgccttggtgaaggcaagttcaagcaccacttgagactgggggcagcatggagtagggcagggctacgggggtacacggtgcaccctgcaacttatacctgagcccagtacaacaaaggtgacgggtgtgtaggtacacacccagagatggagcactgcagatcagcaacctcagccccacctgggaatttgctggaaatgcaggctcaagcccctccccacacctggtgaatgagagagccccagcctgacccaagcccagggcgactcccataccctgaagcctggggcatgctgggcagcaccggtgcccaaatctggctggtggacagaagcacctggagagttggagagctttttaaaaagacatctctcagcacttccctctctgcagattctgactcagtaagtgaggggtgaggcacagtcatttttctctattctgaagctctcccactgttttcaatgtttaaccaactggggacccctgctctttaagtatattacaggtaataaagatattgtttgtatgcttttaaa

SEQ ID NO: 74945 - DNA, 473 bp, Homo Sapiens
tcttccctggaggactcttggatcgcctgtgatcttggccaggagaccaggtgcctgggtcccttcctggaaggggacaagttacacaccccagccccattttcccaccaacttctacatgccttgggagaacctgctacatgttggctgcccccttcccctatttcagcagtgcccagtcctgcttataaacctgaggcctgctccccataccctgccctgtgcaagtgccagccgttattccaggcagcccaatgttgttgaggccagatggattcctggaagcagctggcccatggatgtgagtcatcacagtattctagaaacagagaagaggtcttaacctaatgcgcatagagaaattgttctcattgtaaacatacccctgtccttagctgatctaggtggaagcccagcttcatgtgctagggggcatgataatgataataaaggaattgtatctaggaaaaaaa

SEQ ID NO: 74946 - DNA, 1075 bp, Homo Sapiens
  misc_feature (232)..(232): n is a, c, g, or t
  misc_feature (242)..(242): n is a, c, g, or t
  misc_feature (981)..(1015): n is a, c, g, or t
tggcagatgcagagcacgtccttcccgggcatgaggtcgcctcaggtaggatggcgccatcgcggactgcgcatctagacgcctggggagcgtccatctcgctctatggagtcgtgtcgagatgtgatcgtgaggagatagcagaagcccaccaccataaacagagagaagatccacctctacgctatgcagtaagaagtatcatgttatgcacaccagaacccagtcttcnaacggatccntgaagaatgtgctgtagatgaactgagcaggcagggctgcaccgtcacagtgtctgatttgtatgccatgaactttgagccgagggccacagacaaagatatcactggtactctttctaatcctgaggttttcaattatggagtggaaacccacgaagcctacaagcaaaggtctctggctagcgacatcactgatgagcagaaaaaggttcgggaggctgacctagtgatatttcagttcccgctgtactggttcagcgtgccggccatcctgaagggctggatggatagggtgctgtgccagggctttgcctttgacatcccaggattctacgattccggtttgctccagggtaaactagcgctcctttccgtaaccacgggaggcacggccgagatgtacacgaagacaggagtcaatggagattctcgatacttcctgtggccactccagcatggcacattacacttctgtggatttaaagtccttgcccctcagatcagctttgctcctgaaattgcatccgaagaagaaagaaaggggatggtggctgcgtggtcccagaggctgcagaccatctggaaggaagagcccatcccctgcacagcccactggcacttcgggcaataactctgtggcacgtgggcatcacgtaagcagcacactaggaggcccaggcgcaggcaaagagaagatggtgctgtcatgaaataaaattacaacatagctacctggggnnnnnnnnnnnnnnnnnnnnnnnnnnnnnnnnnnncctgagcaggcggccgcaagcttattccctttagttgagggttaattttagctatggcac

SEQ ID NO: 74947 - DNA, 819 bp, Homo Sapiens
  misc_feature (791)..(791): n is a, c, g, or t
attaaaaaagaggatggtaccggtccggaattcccgggatatcgtcgacccacgcgtccgggctgcttaggttggcaccggtccgtggtccccgggggcgcagtcgcagcgctcccgccctccaggcgtcagcgagtgcgcggtccagtgcggccggaacctggcgcaactcctagagcggtccttggggagacgcgggtcccagtcctgcggctcctactggggagtgcgctggtcggaagattgctggactcgctgaagagagactacgcaggaaagccccagccacccatcaaatcagagagaaggaatccaccttcttacgctatggcaggtaagaaagtactcattgtctatgcacaccaggaacccaagtctttcaacggatccttgaagaatgtggctgtagatgaactgaccaggcagggctgcaccgtcacagtgtctgattttgtatgccatgaaccctgagccgagggccacacacaaagatatcactggcactctttctaatcctgaggttttcaattatggagcggaaacccacgaagcctacaagcaaaggtctctggctagcgacatcactgatgagcagaaaaaggttcgggaggctgacctagtgatatttcagttcccgctgtactggttcagcgtgccagccatcctgaagggctggatggatagggtgctgtgcccaggctttgcctttgacatcccaggattctacaattccgggtttgctccaggggaaaactagcgccttcctttccgtaaccaccgggaggcacggnccgaagatgtaccacgaaagacagggag

SEQ ID NO: 74948 - DNA, 939 bp, Homo Sapiens
tgcgtaaaaagggcctgcagtcccgcggcgcggggcaggttccgggctgcttaggttggcaccggtccgtggtccccgggggcgcagtcgcagcgctcccgccctccaggcgtcagcgagtgcgcggtccagtgcggccggaacctggcgcaactcctagagcggtccttggggagacgcgggtcccagtcctgcggctcctactggggagtgcgctggtcggaagattgctggactcgctgaagagagactacgcaggaaagccccagccacccatcaaatcagagagaaggaatccaccttcttacgctatggcaggtaagaaagtactcattgtctatgcacaccaggaacccaagtctttcaacggatccttgaagaatgtggctgtagatgaactgagcaggcagggctgcaccgtcacagtgtctgatttgtatgccatgaactttgagccgagggccacagacaaagatatcactggtactctttctaatcctgaggttttcaattatggagtggaaacccacgaagcctacaagcaaagggtctctggctagcgacatcacctgatgagcagaaaaaggttcggggaggctgacctagtgatatttcagttcccgctgtactggttcagcgtgccggccatcctgaagggctggatggatagggggctgtgccaaggctttgcctttgacatcccaggattctaccattcccggtttgctcccagggaaaactaacgcttcctttccggaaccccgggaggcaccgccgaacatgtaccccaagaccaggagtcaatggaagattcctcaaatcttcctgggggcccctcccagcatggggaccttaccacttccggggggatattaaagatcctttgaccccttcaacaatcaccttttgcctctcgtggaagttggcgttccccgaagg

SEQ ID NO: 74949 - DNA, 973 bp, Homo Sapiens
  misc_feature (315)..(334): n is a, c, g, or t
cagttctgcatgttcagtcctgggtataaatgctgaaagggaaatcacgtggttttggctttggccacgggctctgtctcctgctcgtattctatttccacataggctcgttttctccgcagtggtcctctcaagggcattttgcctttgtgtttcgcactaagggccttttcttcctcctcctcactggaggatttaccatcctgatcttcatcactgctggcatccagtttatccatatcctcaaaattcacttatgtcactctcatctacctcaccatcttcgacaaattctctttttccccacatcttccnnnnnnnnnnnnnnnnnnnntttttcctcagtatctgaagagtcactctctgcctcctgttgttccagggctttgtcgaaggcatgaatggggaagttgtagatgtcgccatacgtatcttgtttcagtctctccagtaattccttctcaatggcattgtccagctgagcagctattaatgccttttcctctcttcttttctccctacgctccaccttcttactcaaaggaacaagtttcctctgtcgctttagtgtaagttttctaattcgaattaggtattgggtgatcttggtgaatctctgcttacatttgtgtcgaatgaaacggggccagtaaatcagattttcatctatttgctccagtgctttctcatagtttttactaagccggacccgttcccagagacgccgaggaaaagccgctcgttctataaccttcatatacaagtagcactgtcctttctcttctttaatagtggcatactgactatttgccaggggacaggatgaccgattacacagtccagtcaggctatattcatttcggcagaagctctgagtcttggttcttattttgaaggaacaaaattgcttgtttcctagtgtatcccagataacatcatccgactgcatggtgtccgcggctcagcgtgcccc

SEQ ID NO: 74950 - DNA, 712 bp, Homo Sapiens
  misc_feature (22)..(22): n is a, c, g, or t
ttatgtacatgcgatacaaatntgagcagtacatgtgtgcagacaaacctggaagctccccagacccctctggggaggttaacaccaacgtggccttctgctctgtgctacgcagccgcctgggaagccaccctctgctcttctcaggggaggtagactgcacagacccccaagccccatccacacagcccccaacctgctatgtggagctcaagacctccaaggagatgcacagccctggccaatggaggagtttctacagacacaagctcctgaaatggtgggctcagtcattcctcccaggggtcccgaatgttgttgctggcttccgtaacccagacggttttgtctcttccctcaagacctttcctaccatgaagatgtttgaatatgtcaggaatgaccgtgacggctggaatccctctgtgtgcatgaacttctgtgccgccttccttagctttgcccagagcacggttgtccaggatgaccccaggctcgttcatctcttctcttgggagcctggcggcccagtcaccgtgtctgtacaccaagatgcaccttacgccttcctgcccatatggtatgtggaagctatgactcaggacctcccatcaccccccaagactccctctcccaaatagtaatgctttagagggaggcagtcatatctctgtgtgcagataataaaagcatatttctaagaggtaaaaaa

SEQ ID NO: 74951 - DNA, 1075 bp, Homo Sapiens
  misc_feature (843)..(843): n is a, c, g, or t
  misc_feature (1013)..(1013): n is a, c, g, or t
ctggaccggtccggaattcccgggatttcggcctctggcgtgcctgccatgacgtcatagctctgcggaaggtggaagttggggagctttgaggtaactggattcttgatctgagcgcagacgtccttcctaacctcactgcatttggaggacctggagggagggtgggtgaagggcaaggaaagaggcaggatgagagcttggccgcggtggcgtctgaggggcctgaatgtttcaaggccagagcctggcgatcaggtggctcgcttagtcctaaaccagtcatccttctccaggcctcctctgtagaatggaaactctgtacccctgcttgtcttaggacctcatggatcccagggggaccaagagaggagctgagaagacagaggtagctgagcctcggaacaaactacctcgtccagcaccttctctgcccacagaccctgccctctactctgggccctttcctttctaccggcgcccttcggaactgggctgcttctccctggatgctcaacgccagtaccatggagatgcccgagccctgcgctactatagcccaccccccactaacggtccaggccccaactttgacctcagagacggatacccggatcgataccagccccgggacgaggaggtccaggaaaggctggaccacctgctgtgctggctcctggaacaccgaggccggttggaggggggtccaggctggctggcagaggccatagtgacgtggcgggggcacctgacaaaactgctgacgacaccgtatgagcggcaggagggctggcagctggcagcctcccggttcccgggaacactatacctgagtgaagtggnagacaccgaacgctcgggcccagagggcttgctcggggcacgcttcctcggggagcttatgtacctgggataccaattttgagccagtacatgtggggcaacccgccctgggaaaccacccttctgcttcttctccgggggagggtagaatggcaccgaaccccccaagncccccatccacacagggcccccaaccctgcttatgtggaagcttccaggaacctccagggga

SEQ ID NO: 74952 - DNA, 864 bp, Homo Sapiens
ggcaactcacctgcacacatgtactgcctcaaatttgtatccccatgtacataagctcccggaggaccggtgccggagcaaagcctcttgggcccgagcgtttcggtgtctccaacttcactcaggttatagtgtttccctggaaccgcgagcctgccaggctgccagccctcctgccagctcatacggtgtcgtcagcagttttgtcaggagccccgcgccacgtcactatggcctctgccagccagcctggacccccctccaaccggcctcggtgttccaggagccagcacagcaggtggtccgagcctttcctggacctcctcgtcccggggctggtatcgatccgggtatccgtctctgaggtcaaagttggggcctggaccgttagtggggggtgggctatagtagcgcagggctcgggcatctccatggtactggcgttgagcatccagggagaagcagcccagttccgaagggcgccggtagaaaggaaagggcccagagtagagggcagggtctgtgggcagagaaggtgctggacgaggtagtttgttcccaggctcagctacctctgtcttctcagctcctctcttggtcccctgggatccatgaggtcctaagacaagcaggggtacagagtttccattctacagaggaggcctcaaagctccccaacttccacctccgcagagctatgacgtcatggcaggcacgccagaggccgaaggatgcaaaagtggttttctgctttcgatgatgcaatcattcagcgacagtggcgggcaaacccctcccggggcgggggaggtgtgagcttcacgaaggaggttgacaccaacgtggccaccggcgcccctccac

SEQ ID NO: 74953 - DNA, 805 bp, Homo Sapiens
caggcccgtcagtgctgggaggggcggtggcgacgcacataccagcatcacctccgccaggccgggccccacgccggccgcggattggctccctccaagggcacgcacgcccggggactcgttggcggcgtggaggggcgccggtggccacgttggtgtcaacctccttcgtgaagctcacacctcccccgccccgggaggggtttgcccgccactgtcgctgaatgattgcatcatcgaaagcagaaaaccacttttgcatccttcggcctctggcgtgcctgccatgacgtcatagctctgcggaggtggaagttggggagctttgaggacctcatggatcccagggggaccaagagaggagctgagaagacagaggtagctgagcctcggaacaaactacctcgtccagcaccttctctgcccacagaccctgccctctactctgggccctttcctttctaccggcgcccttcggaactgggctgcttctccctggatgctcaacgccagtaccatggcagatgcccgagccctgcgctactatagcccaacccccactaacggtccaggccccaactttgacctcagagacggatacccggatcgataccagccccgggacgaggaggtccaggaaaggctggaccacctgctgtgctggctcctgggaacaccgaggcccggttggaggcggggtccaggctggctggcagaggccatagtgacctggcgggggcacctgacaaaaactgctgacgacaccgtatgagcggcagcgaggcttggcagctggcagcatcca

SEQ ID NO: 74954 - DNA, 1083 bp, Homo Sapiens
tggatgtatatatagaagacccacacttgcctccctcactaggactacttccaggagcccgggtccacttcagccagttggagaaaagggtttccagatctcacaatgtttattgttgtttccggtcatccacttatgtgcaggtcctgagttttccccctgagaccaccatcagcgttcccctgccccacatctacctggctgaacttctgcagggtggtcagtccccattccaggccactgcctcttgccatatcgtctctgtcttcagccttcagctcttctgggctcctggtggaggatgggactgccgaagccgtggtgacctgtaggaatcaccatgtggcagcagcactagggctgtgtcctagagagtgggcctccctcctagatttcgtccaagtgccaggcagagtggtcttgcagtttgcagggcctggagcccaacttgagtcttcagccagggttgacgagcccatgaccatgttcctctggacactttgtactagcccctctgtcctccgtcctattgtgctttcttttgagctggaaaggaaaccgtcgaagatcgtcccattagaacctcctcggctacagcgattccagtgtggagagctccctttcctgactcacgtgaaccccaggctccgattgtcctgcctttctatccgagagtcagagtactccagctctctggggatccttgcttcctcctgttaactgaactgcaaggatggcctgagagtccttccttgctgaaaacctgaaggcctaggtcctggctcctctccctacttgttctgtgattgaaccaaggactccagattcacaaactgctactccactataatttcccttctttggtgttctggtgccagcctgccttggcaaaattgtggcaacaggaaatcatggccctattaatatgtcctctgattgggacaaggcacctgcattcacaggcggccctgagcacctgggttctgactttgtcgcaggagctgagggaacaaaagacttgctcgctgtggggtgatggtgacaggcctattgacctgcaatgaagccctctggtgtcatttc

SEQ ID NO: 74955 - DNA, 519 bp, Homo Sapiens
ctgctacacttgtgccgactgtgggctgaacctgaagatgcgcgggcacttctcgggtgggtgacgagctgtactgtgagaagcatgcccgccagcgctactccgcacctgccaccctcagctctcgggcctgagcccgccatgccctcagcctgcctcactgctgggccagggtcatgcctatataagttggcatggcagggacaatggtgggcagttgctcttacatgagctaagtttggagacctgaggcccctttgtcctcgctgggtgggccaaggtctgggacctgtcttggactgtgggagactcaccctcaccttgccaggcctctcccctgcaggactggcattgcactagtctgaggtggccactgcctttgatcaacctttgtgtgcgagggtctaagtagggtcgaacacagaagtgggaaggagaggggtgggccaggggctaatggtgtcactgtgtaaagtttttgacatactagctctataaatatatgaatatggacaaaat

SEQ ID NO: 74956 - DNA, 1296 bp, Homo Sapiens
ctctccgcgcccctgtcggcgcggaaccctggcctcgtccgcggccagctccctggagcctcgcatcagcgggggcgcccccgcgagctgcgctctccccggccggagcgctcctcctccagcccccagcccgcagggtactttgccctcggagcgaaggaggctccagaactggtagagccgggccatcggcctgggaatcgctccccgcggctgaacactaaggaacggagaacacagaagcatggcttccaaaggtatggcgttgacggtggatgtggccgggccagcgccctggggcttccgtatcacagggggcagggatttccacacgcccatcatggtgactaaggtggccgagcggggcaaagccaaggacgctgacctccggcctggagacataatcgtggccatcaacggggaaagcgcggagggcatgctgcatgccgaggcccagagcaagatccgccagagcccctcgcccctgcggctgcagctggaccggtctcaggctacgtctccagggcagaccaatggggacagctccttggaagtgctggcgactcgcttccagggctccgtgaggacatacactgagagtcagtcctccttaaggtcctcctactccagcccaacctccctcagcccgagggccggcagccccttctcaccaccaccctctagcagctccctcactggagaggcggccatcagccgcagcttccagagtctggcatgttccccgggcctccccgctgctgaccgcctgtcctactcaggccgccctggaagccgacagggccggcctcggccgcgctggcgactcggcggtgctggtgctgccgccttccccgggccctcgttcctccaggcccagcatggactcggaagggggaagcctcctcctggacgaggactcggaagtcttcaagatgctgcaggaaaatcgcgagggacgggcggccccccgacagtccagctcctttcggctcttgcaggaagccctggaggctgaggagagaggtggcacgccagccttcttgcccagctcactgagcccccagtcctccctgcccgcctccagggccctggccacccctcaccttgccaggcctctcccctgcaggactggcattgcactagtctgaggtggccactgcctttgatcaacctttgtgtgcgagggtctaagtagggtcgaacacagaagtgggaaggagaggggtgggccaggggctaatggtgtcactgtgtaaagtttttgacatactagctctataaatatatgaatatgga

SEQ ID NO: 74957 - DNA, 596 bp, Homo Sapiens
gatgcccaggctggagtgtagtggccagaacgaagtcaggaaaagggtggaatgtaagtccctaaggacacaatcttactcacaattgtatctccaacatttggcataatgcctaatacgtaagtattttatgaattaattaaacgagaacacaagcctaaattaaggcaatggcaatggagaagaagaaaccaacttgagaaatatttaaaggtcattgtcaatggaacttagtgactttaatggttaattttatctatcaacttggctaggcgatgctacccatgttactcagtttttggtcaaacactagtctagttgttgctatgaattgtatttgttagatgtgattaacatttaaatcagcagactttgattaaagtacattaccctctataatgagggtgggccgcatccggtcagttcaaattaaaacgagacccttaagaagaagcaattcagcctccagactgcagcgtcaaatctccctgggtctccaggctgtttgtctgccctgcagatttcagacttgccagctcccagaataatgtgagccaattccttaaaataaatctctttctgcatatacacaaaaa

SEQ ID NO: 74958 - DNA, 643 bp, Homo Sapiens
gacaggggctaatacattgtatattaaaaacaatctatatgaaatagatcaacattccaatgaagtcacaaacatagaaatatcataaaggtataaaagatgttcagtgttcacagtaatcaaggaatcaggacactgaaacgaggtgcactgctaccatcaatgagaataaagggaaaaggcacatgttatttttggtggtagcttaaatttctaggagtttggtaatactaaaaactccaagagttaaacatttcaatcatcctttaattgtacatttccagtgagaggaatttttccaagggagataacgggtcgtgtgtgcctagaagacggcacagtggtccaagatgcagtcctggtgacgatgaacagggtcaatattaatacaagtggaactgcattttgacaagtcatacaacgaggactgggttacccacagagatgatgtgatccatgttcacagacgggaaggtaacaacaatggctaccatttatgaacacgtacttctgaggcgcgtccacgttccttatgaggaaggtactgttgttgtccacactttgcacatgaggaaacggaggcttggagaggtcaagcaacttgctcagagtcaccagccagtcaggggcagaaccaggattg

SEQ ID NO: 74959 - DNA, 1123 bp, Homo Sapiens
  misc_feature (989)..(1023): n is a, c, g, or t
cagtcgacggtaccggacatatgcccgggaattcggccattacggccgggacagaaaagtactagagaatatatctatagaaacttctttcagataaccctaaagatgatactagaatgtttataaaattattgagaagattatttgtgttataaagcttatttgtaccatagtaaaggatgtttttgttcctcttcattctgggctaatctgtcaatactgaagtccagtcttttcccccctttcttaccagctcaaccttgattcctgtgacccattctttctgatctttcgtagttcatagtcaccaggcatgagtaccttggatagccctctgaagtctgttaccacccagatttccaactcgggttaattggtactaattctattagctggtataaataatccaaaatctgtgcagactctgggagcaaaatgttctactcagtttggaatactgtgccttaaaatatatttcattgtaacagcaccttgtatatatagttggccaaggacagagttgttacaagttacgtggaactttcatagcaaatcttgacagtaaataccttgttcttgtattaggtctatatcctgaattgacctttagcaagaatctttagatctgctggagggctgggatggcttttggacttcagtgaaaaagaatttctgctactcattgttgataacgcttcagtactgtataaatgtttatccttttccacgtaatttgttttctatgatatgagaacttttattataatttgcctcagtcttgatagaatcttaacaaaaataaaatctgtggtcgtctgaggtattctccatgctataacccagtttagctgatgcatttggagcttgggtgctgaaattaaatataacctatttgagttaaggatttattactagtgctccagtggtcacaggaacaataaaaaaggaacaacgatagaaatacgtgatctaggaaagaaggcaactgnnnnnnnnnnnnnnnnnnnnnnnnnnnnnnnnnnntatacgatattctattttgatttagcaattacttgttttctagtgttctgtcaatttttggtgacttttataattacattaaaactaagatgctgaatta

SEQ ID NO: 74960 - DNA, 510 bp, Homo Sapiens
tcttaactccacaaagaaagcatcctaaatccccagttcctcctcctcccaaccccagggataccttgtagacagtgccaaaaaacagctccaacccccagcagctgggaagagagccagaagctgcccttcctcctcatcctggcccctccccagcccccgccaatactgtgaacccccttcccactcagcctggtttcctggtgagggtcctgcagtcatgggccctgggggacccccagggcaaggcccatgggagggaagggaccaagggcatccttgggccaactgtccacctctcttgtccactattctctcctttccacttctgtcttcaaaaggctccttcctaggatggatcgggtgctaggacaactgcagtccaatccaccagctctccctgcccctgtgtcttatttcagacatgagaataactgtacagtgtaaacttataaagcgtttttaatggttgtagattggaaataaagtatgtcatatgaacagctaaaa

SEQ ID NO: 74961 - DNA, 1048 bp, Homo Sapiens
gtctctcctctccccgcccgccggcggtgcgtgtgggaaggcgtggggtgcggacccggccccgacctccccgtcccgcccgccgccttctgcgtcgcgggtgcgggccggcggggtcctctgacgcggcagacagccctcgctgtcgcctccagtggttgtcgacttgcgggcggcccccctccgcggcggtgggggtgccgtcccgccggcccgtcgtgctgccctctcggggggtttgcgcgagcgtcggctccgcctgggcccttgcggtgctcctggagcgctccgggttgtccctcaggtgcccgaggccgaacggtggtgtgtcgttcccgcccccggcgccccctcctccggtcgccgccgcggtgtccgcgcgtgggtcctgagggagctcgtcggtgtggggttcgaggcggtttgagtgagacgagacgagacgcgcccctcccacgcggggaagggcgcccgcctgctctcggtgagcgcacgtcccgtgctcccctctggcgggtgcgcgcgggccgtgtgagcgatcgcggtgggttcgggccggtgtgacgcgtgcgccggccggccgccgaggggctgccgttctgcctccgaccggtcgtgtgtgggttgacttcggaggcgctctgcctcggaaggaaggaggtgggtggacgggggggcctggtggggttgcgcgcacgcgcgcaccggccgggcccccgccctgaacgcgaacgctcgaggtggccgcgcgcaggtgtttcctcgtaccgcagggccccctcccttccccaggcgtccctcggcgcctctgcgggcccgaggaggagcggctggcgggtggggggagtgtgacccaccctcggtgagaaaagccttctctagcgatctgagaggcgtgccttgggggtaccggatcccccgggccgccgcctctgtctctgcctccgtttatggtagcgctgccgttagcgacccgctcgcagaggaccctcctccgcttccccctcgacggggttggcggggagaagcgagggttccgccggccacc

SEQ ID NO: 74962 - DNA, 1007 bp, Homo Sapiens
aaagctagtagaggcctggttgagaatcggcacgagggcgagctcctggaggcggcgggatggaggcggcggccggagtgtggggctggggctgccttttccgcgtcccctggaggagacctcaggcagcctctgtaggtctgaggacccgcctgcatgccaggttctccgggaggctttggacttgggagcctttgaacgtgcccttgagaggcggatcagaagggggcaggttttacgcatcatgtgttgagcccctcacatgcaccctccaaggacctgtcggggatggagcagcttgctggagacaaggggcatggcctcagcggtggcgccgggagcctggaaacctggccggcgtcaggcacatcatcctggtcctctcaggaaaggggggcgttgggaaaagcaccatctccacggagctggccctggcactgcgccatgcaggcaagaaggtgggaatcctggatgtggacctgtgtggccccagtataccccgcatgctcggggcgcagggcagggctgtgcaccagtgcgaccgcggctgggcacccgtcttcctggaccgggagcagagcatctcgctcatgtctgtgggcttcctgctggagaagccggacgaggccgtggtgtggagaggcccaagaaaaacgcgctgataaagcagtttgttgtccgacgtggcctgggggggaggctggactacctggtggtggacacgccccggggacctcccgatgagcacatgggccaccttagaagccctggcgtccctaccagcccctgggggcctcgtgctcccacgcccaggcggtgtccgtggcggacgtgtaggcgcgagtgactctgtagaagacggttgcggtgtggatcctgcgatatacggtacgggccctgccggtggcacgtttcccggggggaaggtgccatcggtgcctaagtcggcggccgctcaaggaccggggcgaacagaccggccttgtcctaattagcggcccaatggg

SEQ ID NO: 74963 - DNA, 1108 bp, Homo Sapiens
  misc_feature (960)..(960): n is a, c, g, or t
acggcccgcgggcgtaagcggactgcagccgcgagctcctggaggcggcgggatggaggcggcggccgagcctggaaacctggccggcgtcaggcacatcatcctggtcctctcaggaaaggggggcgttgggaaaagcaccatctccacggagctggccctggcactgcgccatgcaggcaagaaggtgggaatcctggatgtggacctgtgtggccccagtatcccccgcatgctcggggcgcagggcagggctgtgcaccagtgcgaccgcggctgggcacccgtcttcctggaccgggagcagagcatctcgctcatgtctgtgggcttcctgctggagaagccggacgaggccgtggtgtggagaggccccaagaaaaacgcgctgataaagcagtttgtgtccgacgtggcctggggggagctggactacctggtggtggacacgcccccggggacctccgatgagcacatggccaccatagaagccctgcgtccctaccagcccctgggggccctcgtggtcaccacgccccaggcggtgtccgtgggggacgtgaggcgcgagctgaccttctgtaggaagacgggcttgcgggtgatgggaatcgtggagaatatgagcggcttcacctgcccacactgcacggagtgcaccagcgtcttctccaggggcggcggaagaggagctggcccagctcgccggggtgcccttcttaggctccgtgcccctggaccctgcgctcatgaggaccctggaggagggccacgacttcatccaggagttcccccgggagccccggccttcgctgcactcacctccatagcccagaagattctggacgcgacgcccgcgtgcctcccctgactaaggcaccttgcagccgcttttccagggccaccaaggggctctggctccagccctctcaaagaaaacaaaagccctgggcctcgggntcccggggcccctgcaaggggcaggccccaaggcagcgttcagccgggaagagctttctcccccggaccaagccccagcccccagggatggtgttcggcaacccaacagcttcctgtccctgggttgggccttgccaaaggcccgggc

SEQ ID NO: 74964 - DNA, 917 bp, Homo Sapiens
ggcccgcggcgcgttagcggactgcagccgcgagctcctggaggcggcgggatggaggcggcggccgagcctggaaacctggccggcgtcaggcacatcatcctggtcctctcagtgaaaggggggctgttgggaaaagcaccatctccacggagctggccctggcactgcgccatgcaggcaagaaggtgggaatcctggatgtggacctgtgtggccccagtataccccgacatgctcggggcgcagggcagggctgtgcaccatgtgcgaccgcggctgggcacccgtcttcctggaccgggagcagagcatctcgctcatgtctgtgggcttcctgctggatgaagccggacgaggccgtggtgtggagaggccccaagaaaaacgcgctgataaagcagtttgtgtccgacgtggcctggggggatgctggactacctggtggtggacacgcccccggggacctccgatgagcacatggccaccatagaagccctgcgtccctaccagcccctgtggggccctcgtggtcaccacgccccaggcggtgtccgtgggggacgtgaggctgcgagctgaccttctgtaggaagacgggcttgcgggtgatgggaatcgtggagaatatgagcggcttcacctgcccacactgcacggagtgcaccagcgtcttctccaggggcggcggagaggagctaggccagctcgccggggtgcccttcttaggctccgtgcccctggaccctgcgctcatgaggaccctggaggagggccacgatttcatccaaggagttccctgggagccccgcttcgctgaatcaccccatagccaaaagaattctggacgcgaagccgatgctccctgataaggcacttggagcgttccaggcacaaggtctgtccagctctcagaa

SEQ ID NO: 74965 - DNA, 1169 bp, Homo Sapiens
ttcgctctagctgggaggctgacggcccgcgggcgtaagcggactgcagccgcgagctcctggaggcggcgggatggaggcggcggccgagcctggaaacctggccggcgtcaggcacatcatcctggtcctctcaggaaaggggggcgttgggaaaagcaccatctccacggagctggccctggcactgcgccatgcaggcaagaagcgctgataaagcagtttgtgtccgacgtggcctggggggagctggactacctggtggtggacacgcccccggggacctccgatgagcacatggccaccatagaagccctgcgtccctaccagcccctgggggccctcgtggtcaccacgccccaggcggtgtccgtgggggacgtgaggcgcgagctgaccttctgtaggaagacgggcttgcgggtgatgggaatcgtggagaatatgagcggcttcacctgcccacactgcacggagtgcaccagcgtcttctccaggggcggcggagaggagctggcccagctcgccggggtgcccttcttaggctccgtgcccctggaccctgcgctcatgaggaccctggaggagggccacgacttcatccaggagttccccgggagccccgccttcgctgcactcacctccatagcccagaagattctggacgcgacgcccgcatgcctcccctgactaaggccaccttgcagccgctttccagggccaccaagggctctgctccagcctctcagagaaacagaggcctgggctcggttcccgggccctgcaggggcaggcccaggcagcgtcagcgggagagcttctccccgaccagcccagccccaggatgtgtcgcaccagcagctctgcctggttggcctgcagtgccgtggtctgcgtgctctgcagctgtgagacgggggcggcctgggctctcttcccatccatgttgcctacctgtgcccctggcagccgcgtgtccacacagttagcggagcgcaggacttctgcagtcctcaggtgaccccgggcctccagcaccctgggtcgctgtcatctgtgtttagctcggggagtgccccctaagggggcgaactgacctcaggcatgtcttgtaactgtagaggcgcctgccattaaacgtgtccgctgctgtggcgacagaaaaaaaa

SEQ ID NO: 74966 - DNA, 987 bp, Homo Sapiens
  misc_feature (924)..(933): n is a, c, g, or t
ggcccatggccacctccccattttctgtgccttatctcactgtttcagctgagtccaagttgtttactctgttcctctccagaggggctctctgtcccagttgggcagctcacctttgggacataagcctttgccccacaagctgtggagagggccaaaaccaagctgcttgagcccactctcttgctgagagtccaggcctgcctgcctgccagccagaggtgccccttatgcacatccagtcctaccagcctgcttccaggagcctagagtgggaaaggcacctgggggagccctggtgaagggctggacctgacccatggaggcaggaggaagacctggctttcttggtttgtccggccctggggagcagccttccctactcactttccccttgcggcaccaaatggtcactccttccagagcaaaaactggcactcatagcaagccagaacccccatccccatcctcatgggtctgtggctgggtgcaggccatcaaaatggacaccacgagacagaagtggggactgcctggccacctagcgccttcccactccttaagcaagcacaaagaagatgaggcagagaattgtcagagctgaaagttcctttggttgctcacaactcaggtatgcacccatgtggcagccaggcagcggagccctactagactgccagtctcatgcacccagacctgtggccagattgtggcctctggctgcctcaggcattttcctctttgcattgggttttcctgcattagtaactacagctgcaacagacatcctccacattgtgcacactggttttgcctttgtcctcaagagttgatacttggcattagcatgaaacttgtgggtgtgggaggatggagagagaactctaacacaaaacatcttattaaaattgtacttgagagacnnnnnnnnnnctctgttgtattttgacagaattatttttattaaaatacacatccatgagcaaa

SEQ ID NO: 74967 - DNA, 969 bp, Homo Sapiens
ccccgtaccaatatttggagtccttagacattagattatatgaaaatgattgattgataggtaagaaaggttaaagagaaatgactttttaggaactagacttgaacgtataattaatatgtggaactagtttgcttttataattcattgtatcaagaaggagtcatgttttaaatccaaggcattgagactatctagaagcaaaaaagttggttttaaaaattctttttattagaagtgtgtttaaaaacatgtctttttttcccttgagcgacagtggcctcactacattgcccaggctagtcttgaactcctgggttcaagcagtcttcctgccttggcctcctaagtagcagggattacaggcatgcacccacatgccaatttttattgcttaaaatggcgagttctatggatattatctagccccaagcccatatctgtacacttttgttcattttataataccagaaagaatgttctatcagtaaaagaaggttttaagtatgaatctccatttttgtggagtttttctaccctgtaaaaattaactttgtggttcccagtaattacagtaaggagtttttctatattttcacagttggatttatctaaggatatttctcagcatattaaggaatccttttctacatttgagcaaatactgaggttcatgttgtaccaaataataataaattgcttttgtgtttaatatgtaacacgtaagaacaattgaaattttcttctaagatttaatactagtcttttagtataaaggaatgtaactggagaaaaaaattaatgctacagccatttatcctgtgttatgtgttatataatctgaaatttgtcacaatgttacaatccaggaagttttttttctggtttcttcttccaaaggaaaataatagcctacttgtattttgaagtaactgaaataaaactctctcgcaagcctttttgcacatt

SEQ ID NO: 74968 - DNA, 2316 bp, Homo Sapiens
  misc_feature (597)..(607): n is a, c, g, or t
  misc_feature (1592)..(1653): n is a, c, g, or t
  misc_feature (1695)..(1712): n is a, c, g, or t
  misc_feature (1873)..(1883): n is a, c, g, or t
  misc_feature (2026)..(2038): n is a, c, g, or t
cagaatctcagtgattctcaaagtaaaaaggcataaccaagcactctcttatcttgccttattgctatactatttacatcccactgcagaacagcagatttgaggcttttctatatacttctcagagcactgaaaagaaaggaagggtttgcagaggagagtgtagaaatcccagtggtagcatgtaccaacaggtgagtagaaaggtagtgttagcctgacatttgagttatactctgtgctgcctgagcaagatttgtagaatcatataattaccttttcatgtatatttgaaatcagaggtgtttaaaatacctatgagataccaatgtagccttaacatatgtcaaaatgcattgctggttagataattatttggactacacataaactcctaatattgaatcattacctatcaggtattatctttatggaacttttcaatatctttgctttataaagattctaaacatgtatctgagctggtaatattttaaaatctccattatttgtgtaaaactgtttataagcagtgtttgagagggtctgctttaccattaccccctcaatatcatgatcatccaatctcaaatgtgnnnnnnnnnnngaaatttgattttagggattgtgagtaaacaagtttatatagagagacattgtgaagttaaagttttcagaagttacatttgtgcagttcttaccttttcctcatatagtgccattgaaatagactgaaattatcttggcaaaagttagacaaccaaagacgactttagtggactggttttcaaaacttgagcagctgaaaagcaaaagccgttgtttcccatgacaatgtagcctttgtggatttgggtttgtgctttgggttgaaaagaagtttttagtcctaggccagtagatggcagcagcttttcattgcagacaaaacctcttgaaacccttcccccatggcacaaactcgcccatgatggaaagcatctagatttctgcctccttttacagttaatccaggagagggagtcctttgccaactgatgaccaacagttccaagccagatagtctcgtgaacagtgacaatacagaaataaggtgttatttctgttcagatctccaccggcctttgttcttttaaaacttgaatataggtgggagacataagaaaggaaagaaaagacttaaaactggagtgacaggacaaataatcattactttcaattcatgactgctttatattcatttgatgaaatcatttgtatacaaaccagggagagttttctttacacccttgacaatatatcacatactcttcaagatcataataatatcattaatataaatttaaacaacatggcttgttagaaaatatgctaattgctatggtctcattatgtttgcttagcttttatttgtttttctgtgaacagttagagagctaatttttttcaaaggtgattgtaagtcatattttatatagcattttgcttgattatttgctctgtactgaatttgtactctattgccattagatcttacaataatgttccactctgcaaatttttaaggttcaaataaagtttaattgtttgcnnnnnnnnnnnnnnnnnnnnnnnnnnnnnnnnnnnnnnnnnnnnnnnnnnnnnnnnnnnnnncacaacaaaacaaaccaacggaggaaacgcccccaaaacggnnnnnnnnnnnnnnnnnntgcttgtgcgggccgccccgccccctaaaaaaacttttaaaaaacttttcgtttggggcgcggggccccccgcataagaaagtgaaaacagggcaaaacctgggtttccaaaagaaaaaaccggggcataggcaaaaagggggttgggcgttccccccccnnnnnnnnnnnccccccggggggggaacaccgggcggttttttgaaaaaaactcccaaacggggcgtttctcggagggggtctttcgggggggtctcatccacacaagggggggtccccaggggacggccccccaaatattaaaaattatacannnnnnnnnnnnnggggacatttgtttcccagaaaaaaacggggggggaaaattttcttttaacgaatattcttttcgccgataagggggaagcccccccctccacaaaagcgggtttgtgggggaacccctgtaaaatccgccccaggggggaaataccacgcacacttttggtcgccccctctgtggggtataactaaaatttgggccccacacgcgggggaacaaaaacggcgcgggccacaaaaaaataatatgtgccctcactatttttgggccaccaccctctta

SEQ ID NO: 74969 - DNA, 746 bp, Homo Sapiens
  misc_feature (82)..(116): n is a, c, g, or t
aatgataatcactattagggcgctagctcgtcgcagcgaacgaccgagcgcagcgaagataggtgagcgaggaagcggccgnnnnnnnnnnnnnnnnnnnnnnnnnnnnnnnnnnncagtcgacggtaccggacatatgcccgggaattcggccattacggccggggctccttcacttgcctggacgctgcgccacatcccaccggcccttacactgtggtgtccagcagcatccggcttcatggggggacttgaaccctgcagcaggctcctgctcctgcctctcctgctggctgtaagtggtctccgtcctgtccaggcccaggcccagagcgattgcagttgctctacggtgagcccgggcgtgctggcagggatcgtgatgggagacctggtgctgacagtgctcattgccctggccgtgtacttcctgggccggctggtccctcgggggcgaggggctgcggaggcagcgacccggaaacagcgtatcactgagaccgagtcgccttatcaggagctccagggtcagaggtcggatgtctacagcgacctcaacacacagaggccgtattacaaatgagcccgaatcatgacagtcagcaacatgatacctggatccagccattcctgaagcccaccctgcacctcattccaactcctaccgcgatacagacccacagagtgccatccctgagagaccagaccgctccccaatactctcctaaaataaacataagcacaaa

SEQ ID NO: 74970 - DNA, 939 bp, Homo Sapiens
  misc_feature (85)..(93): n is a, c, g, or t
aacgggtgatgcggttggaatttcaggaaccctgtgaacagagaacaatgaagctagagactggcaagtaagaaggaagtttaannnnnnnnncaggattcagtggagtccattaatgcataccaggagcaaagatcagcccagggtaaggcaagtctgggaggaagcccaccctgccctacagcagccctggaactcagaataggtggtgagtctgccatggtttgctactgggcagcacactagaccaacttgggaatgtggaagagtgagtctatgttccctcagccatccccaagtttacacacaggcatagcagccctactgtgagtcagcaatcattcctgacttgcagtaaggacaatttgcatttacggaaagcaaactggagggggtagcctaagtccgcactgcccatgttattaccctttgcaatgtgaaaaaccatggtgaggtaggttgggcaggttttatcctctccacaaaggtgagcctttgctccacagccagcacctggcagagtgggagagatggcagaaccaaagcttctcattaccctccagcaggcaagagtaggtcagtgggatcatggactgaaacaagacattgtgtgagctggtccgtcactcagaagcagggtcctgaaggaagctggaatggcatgagttaggtggggggaataggtggtggtggcccctcaaccagacaattagaatcagcctccaccttaactgcccacccccagtgagttctgcctcagcttcttgactaaccccttgtaggggcaaaactcctggaagggacagccccaccctgagccagcttcacgtgagggtatagtagtttgtgaggcacaaagggcatcttgctgactacagccatctgctgctcccgccgccactgccgtcgcctctccttagtcacagcttcagacgggac

SEQ ID NO: 74971 - DNA, 736 bp, Homo Sapiens
agaagataaggactagggagttcatctctgtattccaccagaaggtacagtgactcataactagagtctttagatgaaacttactgaggtgaataacttaatatatttctgttttcattcccaagagaggccatgtctggagatagaccttgaatttaataaattttaggcactataccatttcagtggagaaaattgttgggaaatttggggggatggatatataagggggaggaagtcactggccagtttgaggtgcttccattggtctgggtaactagccatttcttcctgattgtgcctagtatatcccagacagtttgtttctatgcagaagaattttatatgaaattttcatttctttgcaaaaacttgttccttctttcagttcatgacatcatccatgctaaagtctgagtcatctgcttccatttttgttattccccacatccagtcttcagctaagtcctgtcagttctacctcaagtctttcccgtctttcttcctcacctatgtaatttcagtagtctctcagcttcacttaacctcttactccagcctactttatacacaatgttagattcatcttactgaaacatagttctgaccatgtattccatgtatgtgttctctctcccctattagactgtaagctccttatgggcaggatctgtgtctgagtcatctttgtatcttgcctagcacctatcaataaatacttcttgaatgaacaaaa

SEQ ID NO: 74972 - DNA, 1296 bp, Homo Sapiens
ccaggaggcatcagggagggagaccagggaactggggtggtgcttcagaggaaactttgggagttcagacgagagtgcaccatggtggtagagaagcacagctttggccccatagatggccgggtgcaggacggcatcaggtttcgggtactgacggttcagattcactccacgtgagtctgtgcggtagtgtccccggaccacaccatcggggttcaacatgggaatcagcttaaagacgaagaggcgacggagggtttgggcccggggatcatcaggtcggaggatgaagtccagaaagccattgaagacaaagctagatggagtctcccctgggtgtactctaactgcttaagaaggaatatcctcttggcctgcgaaaacggaatggtcgagggggtgctggtatcagggaaatagctgctctagaccggggctctcgatcttctcgaagcccatggcaggaagtgatcgtcagcagatctacacgaagtccatccagagaatagcaaaggagctcccgatggtaatagatggtatccagggggctgctatgggtagggtggttctccggaaagcgctggtctagctggtttagcagttcctggcagtcactgtaggagaaggggtagcagaaggcgaagaaggtggtggccccacggccctccacgaaacgatgaacaaaggataacacaaactgcgtctctgtcatctcaaaggtgggccggtctcgaatgcgttcccagcgtggccgggtgggcagtgtgcgcacaaagggggccatgccctgggaatacagcttgctctgcttgttcatgttcataatgttgatcttgatgagttttcctggcattcctccccggacgctgaagtagaaccatgacctgttcccattctcaaattccgtttcagcacagtctggtcgggtccacacgttgaattcatagtcaggggaagaggcaatgccactggtcagggctgacgccccacctcctaccccttccccatcactggacaaagattccaccttctccacgtgggctagattccctgaatcaaagcgagaactgaacagcaatcccccacagcgcagctccatggtggggctgggaaagcatcctcctgccccgctctggccctgagagctctctccgggccggtgatcccgctccctctcccgctagcgaggccgcaccttgggccccggcacccgggccctccacccgggcccccaaaaacacccgagcgccgcggtgcctcgtgccgaattcgccacccaggcctcgctaccttgga

SEQ ID NO: 74973 - DNA, 1264 bp, Homo Sapiens
  misc_feature (43)..(77): n is a, c, g, or t
  misc_feature (1200)..(1220): n is a, c, g, or t
taacgaccgagcgcagcgagtctattgagcgaggaagcggcgnnnnnnnnnnnnnnnnnnnnnnnnnnnnnnnnnnncagtcgacggtaccggacatatgcccgggaattcggccattacggccggggcctgcgcgttgtgggctgcggtaggagggccgcagttgcagtcagggtccgccagctcggggccagcgcatggggctgctgagaccgctccggacgtgcgaagcgttcgcggtgcggtaggaagctgaagtcttcagcagaaccctgacctaggtagggagtctcaattggccctgggtgaagaaaaggcagaagcggaagcatctgaagacacaaaggcccagtcctatgggagagggagctgcagggagcgggagctggacatcccagggcccatgagtggggagcagcccccacgcctggaagctgagggagggctcatctcccctgtatggggggcagaagggatacctgcccctacttgctggattgggactgaccctggcggcccctctagagcccaccagccacaggccagtgatgccaacagagagcccgtagctgagaggtctgagcctgcactcagtggcctgcctcctgccaccatggggtctggagaccttctgctctccggggaaagccaggtggagaagaccaagctttcttcctccgaggagttccctcagactctgagccttcccagaacaacaactatttgctcaggacatgatgctgataccgaagatgatccatccctagcagatttgccccaggcactggacctcagccagcagcctcacagctcaggtctctcttgcctgtcacagtggaagtccgtgctgagcccaggttccgcagctcagccttccagctgcagcatctctgcttcctccacaggcagcagtctccagggtcaccaggagagggcggagcctcgtggtggttctctggccaaggtctcctcctccctggagccggtcgtcccccaggaaccttcctctgtggtggggctaggacctcggccccagtggtcaccacagcctgtgttctctgggggtgatgcttctgggctaggcaggagacgcctctccttccaggctgagtactgggcctgtgtgctgccagattccctgcctccatcacccgaccgccactcccctctctggaacccaaataaagagtatgaagatcnnnnnnnnnnnnnnnnnnnnncctgagcaggcggccgcaagcattattccctttaggtgagggta

SEQ ID NO: 74974 - DNA, 562 bp, Homo Sapiens
gcagaagggataccttcccctacttgctggattgggaactgacctggcggtcccctctagatcccaccatgccacaggccagtgatgccaacagagagcccgtagctgagaggtctgagcctgcactcagtggcctgcctcctgccaccatggggtctggagaccttctgctctccggggaaagccaggtggagaagaccaagctttcttcctccgaggagttccctcagactctgagccttcccagaacaacaactatttgctcaggacatgatgctgataccgaagatgatccatccctagcagatttgccccaggcactggacctcagccagcagcctcacagctcaggtctctcttgcctgtcacagtggaagagctgatctgctggctgtataatgttgcagatgttactgaccacgggactgcagccaggtccaatcttacaagtctcaagtcttctctgcagctttaccgggtaatatgcggtcctggctctggcttgttccctcacaagagtgtggctaaattactcgattacaaagtaaaatctcaaataacc

SEQ ID NO: 74975 - DNA, 927 bp, Homo Sapiens
ctaatgtctcccccaactgcccaccagcagaggccactgccctgccattttctgggcccagagagccaagccttaagcagtggccctccagagtaccccagaaacagggtggcatgggcttggcatcttggagccaacttgcatctacccccagagccccaggcagtagggatgctcgttgggagcgcagagagccagccctgaggggtgcgaaggaccggctgactataggcaagcaccttgatatgggctctccccagctaaggacacgggacagagggtggccctcgcccaggccagagagggagaagaggaccagccagagtgcccggcgccctacctgcacagagtctaggtggaaatcagaagaggaagtggaaagtgatgacgagtatcttgccctccccgctcggctgacacaggtttctagcctggtttcgtatctaggatccatttctaccttggttaccctgcccactggggatatcaaagggcagagccccttggaagtgtcagacagtgatgggccagcttccttcccttcaagctccagccaaagccagcttccccctggagctgccctccaaggatctggggatcctgagggccagaatccctgtttcctgcgctccttcgtccgtgcccacgactccgcaggggaaggcagtctggggagcagccaggccctcggggtctcctctggactgctgaaaacacgcccctccttgccagctaggttggaccggtggccattctcagacccagatgttgaagggcagcttccccaggaaaggaggagaacagggaacaagaatcactggtgcaatgtgtgaaggtaatgacactcaacgttaggaagctttgtgtacaggtgtcttgtctcttcccccaatccactaacatcataataaaacatgttcatgtcgc

SEQ ID NO: 74976 - DNA, 1790 bp, Homo Sapiens
  misc_feature (66)..(66): n is a, c, g, or t
  misc_feature (203)..(377): n is a, c, g, or t
agaattccatccattccgtcgatctgctgccaaagaatgttactgattgggcaataattatttacntggtgtgtgggcaccactgttttttaaatgagtgttttcatttgtatcaaactggacctgctttcctcaaggattgcccaaaaggagacacaaatttactaaacacttatcaataatagaacaccgtgctaggcaannnnnnnnnnnnnnnnnnnnnnnnnnnnnnnnnnnnnnnnnnnnnnnnnnnnnnnnnnnnnnnnnnnnnnnnnnnnnnnnnnnnnnnnnnnnnnnnnnnnnnnnnnnnnnnnnnnnnnnnnnnnnnnnnnnnnnnnnnnnnnnnnnnnnnnnnnnnnnnnnnnnnnnnnnnnnnntgtacttcattcaggacactttcccccacatttagaaaagctgtaattatcttccagtgagacagcatagcaaatgtgatcactgtcccttcctcactccccaggtgttcaagcagccctggccagggatcatgcgcacagtctatgggaaccacgaacgctttgagacaacctactttaagaagtttcctggatactatgttacaggagatggctgccagcgggaccaggatggctattactggatcactggcaggattgatgacatgctcaatgtatctggacacctgctgagtacagcagaggtggagtcagcacttgtggaacatgaggctgttgcagaggcagctgtggtgggccaccctcatcctgtgaagggtgaatgcctctactgctttgtcaccttgtgtgatggccacaccttcagccccaagctcaccgaggagctcaagaagcagattagagaaaagattggccccattgccacaccagactacatccagaatgccacctggcttgcctaaaacccgctcagggaaaatcatgaggcgagtgcttcggaagattgctcagaatgaccatgacctcggggacatgtctactgtggctgacccatctgtcatcagtcacctcttcagccaccgctgcctgaccatccagtgaacatgatcctgacctttacctaggattcctcctgctccaaactttgcccatcctctttgccccctcaggagtgctgagggccagtgttgacccacactaccctcccttgaccagctgtctgggaccggaaaccagctttgtctccaggtagagacaacatcctgtgactgccaggcagaaaggacagggcccaggtcagcctcagtctgctgtgcctccagactgcagagctctcagaacccagaacagagacgaaaaggctacctctcctacccaagttaagtgttcaaaggggatgtgagggcctccactgaagcagggaggcagctgtgtaatcctatgtcagctctcttaggaagccccagtacttatattgggcatgcacttgcccttaaaaacaatgatttgtgagtccaggaacaatttactatttttaaaatattttgctgcttctgttctgggtctgaattcccttttgtgccagatgccagtactgtctgcccattggctccaggggctgtatgggcagattcagtctccagagggtattcagatcatctgcttctttgaaggagtaaatgtgttttgttcctagggccagaggagcttgtcttccttgtcctctgttcccaccctcccctgaacagaacccagcccataagagacattctcagatgaaactctgttttcttgccccagtcaggctcaagccctgtggttgtaggaataaagcctgtgatctcaaaaaaa

SEQ ID NO: 74977 - DNA, 586 bp, Homo Sapiens
ctggcttggaatcccagctctaccacttactagctaggtgacctcagagaagtaactttacccctctgagcttcaggatcctcatctgtaaatcagagaaaatactttctgtcttccaaagttattgtgaggattaaattaatagtatatggaaattgcctagcacggtgttctattattgataagtgtttagtaaatttgtgtctccttttgggcaatccttgaggaaagcaggtccagtttgatacaaatgaaaacactcatttaaaaaacagtggtgcccacacaccaagtaaataattattgcccaatcagtaacattctttggcagcagatcgacggaatggatggaattctaggctgagtcagaaggcctggatgtaagccctgtccctgttactaacttgctcttgggaaagtgaaatggggtggggttgaagggacaggtgaggctcctgcaagtatgaatacaataatcacaacagctaatgtttatcaagtactaattgttagtttctctgctaaccccttcatgtggattatctaactcaatcaagcaagcaaccataggagacaaaggcattat

SEQ ID NO: 74978 - DNA, 720 bp, Homo Sapiens
  misc_feature (11)..(11): n is a, c, g, or t
gtgccaccgcntcgcctgcaacacgtgcccctacgtgcacaacatcacccgcaaggtaacaaatcggaagtacccaaaacttgaaagaagtggatgatgtgcttggtggagcagctgcctgggagaatgttgactctactgcagagtcgtgtcccaaatgcgaacatcctcgtgcttacttcatgcagcttcagacccgctctgcagatgagccgatgaccaccttctacaagtgctgcaatgctcagtgtggacaccgctggagggattagggccaggatggcccagctgccctagtgtgtgcttgccttgtccctcggggtagatgcttagctggcagtatgagttgtgtgtcctgagggtctttgctagtgtggtggaaagataaaccttttgaggtgaagagccagggggtcaggaaatatggcctatctgccaggcagggtggatgaagtcatgaatgtctgggagtttttctgtgtggggaggagacagagacccataactaaatatgctctgtgtaaagtcctattctttcatcttccactttattggcagttgacattcccttactcccaatcaacactcttaaatatttgtactgtttgtaaaacttagtacatgtccctaaatatttaactgttacttgtaaacttgtgtaatttattatttattttaatcaaaattctgaatatttcatttaaatgaaaattggaaaaa

SEQ ID NO: 74979 - DNA, 1155 bp, Homo Sapiens
cagtcgacggtaccggacatatgcccgggaattcggccattacggccgggacctaaaatcacatccttattgattctgagtctgctaaaagttatttcaagctaatttgaatattatcgcaaaaagtttacttgagaaaacaagttgaaattgaaattttgacttgctaaaattacattttttaaacggtagttttgaatgacattctaaatgtaatttagtttgacttgtgtgtttatatggccaatttggggtatggtcctgtactgttttttcgtaatgtcataatgggagctgcagtgttgcgcaggtatcaaagagcttcccagttttcatgttagtaaacttggaaataattttctcatgcacctgatttttagcttcctattttaacaccgagttattcttaaagctttatgggagtaaatacccatctgtcattaactaaaatgaggtagttaggtatggaagtagacagtggcttaccaaattgagattggcaaacttgtgggaactctttgttttcctttcacatctgtgagttcaaatataatacaaattaatgtagaacgtagagtactaaagtgactttttttcagagcatgtatacactttattttatcattgttctcctctagatactttcagtttctgatggcatagctgaagtcatgttgtggctttattagtttcaggaacttggatgtctgttttaaaccttagctatcattttagtcatcccaggaagtttgacttgactattcttatttaaatatttttcaaactgttgcaacttaatactaggaaaaaggaaggactagctgagctgacggaagttaagcttgctttcttaaccgcaaggcttagagcctttattatgctaattggcattatgaattttttagggactccttaacacacagctatcccaaacctgttttttaggacacctaagtgttactaattcagaaatgctgttcagggtctagggatggttgacaaagtatagccatatttttgtgtagcctgagagctaagaatgttctttacattttttaaatggttggaaaagaatcaaaagaattattttgtgacacgtgagaattatgtgaaattcaaatttcagtgtccataaataaaattttattggaacac

SEQ ID NO: 74980 - DNA, 684 bp, Homo Sapiens
gctggagtcaggcgctcccctgcctgtgacccttttccaacaagctgatgctgagccagcggcctgctgtgtccctcatactcctcccaacagtccaaacccctaccagacagaagccacgtcgcttctgcacacgtgtctgagagcgtctgccatagacgtctgtgcgtttccgtgaagcactgcgccctaaggacccaactctgactagcagctgcctcccactcccaaacactaaccccgctcaggagactcgcactgggtgtagactgcgtctttgcagagggagatgatagaggcttctgatgacgccagagctgtaagtgtcgtgacgagctgggcgcccagcccttcttaagctgttctgtttctgtggctttaactgacatatttctgtagcatctgccttcatctcatctcagcgtaatgaaatattaatgaaatcgctgaaaagctttgccttcgagaggccagaagcctcgcggaatgtctgcaagtccaaagacgcgtgtgggttgtgccctgaagtgccgtccagcaggcgcgtgcggccgggccggcctgtgcgtgtggcctttgccttcttccctttcttcctgttttctgtttttttaatttggggattgagaaagctgtacgattttgttaaagaaaaaaataaaccattttttaaagttgtaaaaa

SEQ ID NO: 74981 - DNA, 1062 bp, Homo Sapiens
agactggctggcaggagtcaggccccagcagccctcctgcccccaaagctttccgagtctggtgggcaggacttctcgctgcccttccaagcccggctttggccagaaaaggcttccccaggtggctcttctaccaggcttttcctttgatgccgcctggatttccgcacctgcctgtctcctctcccagagcacagtatttggggagactttgactatttattcagactcctggctatgtattgcacattggcaagtgctctggggatgaggcatgggtataggaagggagaaaggagttggagacaagatcctcttcattttccaagatcaaagtcagcctcttctccccatgcttctaggaactgcctggttttcaagcaggtcctggctgagcgggctctgagttctgtactggaattgagtgtaaagatgggaagagaactgggctgactccaggacctccaggatgaggcagaggcatgatgcttcctgctcacctgggccaccctctctccaggacttgtcagctggtggttcagccccttctccaaccccttcataagcttgggccactgcctgggacccagcagacactgcccaggactctttagtgcactcactcttgtctgccccctaccttccctcctggaaccacactacttgaatcaccattactttgcctcgctggcagagttgggtcaagtgccctctccttgaccttgagatgaaggtcaagagcacagggaccaggccttggttaggctgagctcccagcaggacaccgcctgcagaaaggacctgccctgataatgtcccttccccagattctcaagcagatgcccaagggaggtccccacagagccagagtgcctgaggcttcctgcttgagaacctgccccctggatcttggacacttacagattgagctgtatgaattcagcgggtctcactccagagggtcagaacgtttgctttagttttttcatctgttttgttccttgagtcagtgctgttgatgacgagttgtcttgaataaatcatgtgttctttgcaatgggc

SEQ ID NO: 74982 - DNA, 957 bp, Homo Sapiens
  misc_feature (932)..(932): n is a, c, g, or t
tttttgattggattaaaaaagtgtattggatttccaatactaaataaaaacatgaaatcgtttttaaaaagccatagagtttacagcatcaactacagaaaaggccaaacaagtgtgtacagacgccagtcccagcagccctctgggcccctcccacaggcagtgcggcgacagacacaggtgttccaaatccccccgaggaagctgctgagcggcagctcaaccaggacactacaggacacacaatggtttagtttcgaaaatcacaggaaaatgtaagaaaatgtattaaattgtgaaaaggtgcaatacagaatagctttcctttttcttaattttttaaaaaacccccaactttgaacagttattttatttaaaaataggcccctcccccacccgccccaattctgtggcagtatccaggtaccaaggccctgaggtaacagaagcagtcagggtttgtgggaggaaatgccccaaatactgagcatgttctttgggcaaaaggtagtttctggggaatctggccctcctggtggccagagtgctgggacagctctcttcaggatcagtttaagtgcactggttttccagaatcccgcctggcacccccatgtgaccagcgagctcggcagcagcagttcctgcattgcacctttcattgccccccaaatcataaatacaaagagttcatcttgtaaaaaagcaagtatgtgacaagatcaaacatggcaaatccccaagttcaaaggcaggtggcctggggtacccactggtggtttcagcagctgatctcttcttggctatagaactgaagcccgatttactgtctacactgccttccacgctgtcttctggggatctgttggggagtaggggaagatgcctgagcgtcagtcgtgtgttttccattatatattcttaatattaanaaaccacacacctcagctccttacc

SEQ ID NO: 74983 - DNA, 558 bp, Homo Sapiens
  misc_feature (440)..(494): n is a, c, g, or t
accaaaaagtaaggaaagaaggtggaaagtttggttttgcagagtctataccaaatcaaaggatcacagcatttaaaatggaaaaggcccctattgatacctcggatggagaaaaaaaagcaaaagaaatcattgctgaagcagaacccccttcaaaagttgtttctacacctgggctatggactcctggaactgcccaaattggaaagggagtaaaaaactcctggggtgatcttgaagactctgagaaggaagatgatgaaggcggtggtgatcaagctatcattcttgatggtataaaaatggacactggagtagaagtctctgatattggaagccaagatgctcccataatactctcagatagtgaagaagaagaaatgatcattttggaaccagacaagaatccaaagaaaataagaacacagaccaccagtgcnnnnnnnnnnnnnnnnnnnnnnnnnnnnnnnnnnnnnnnnnnnnnnnnnnnnnnngctgccaattaaagctaacagttgtatatctgtatatataactattaaaagggatatttattcc

SEQ ID NO: 74984 - DNA, 1008 bp, Homo Sapiens
ctctctcagatggccgctccagctttcgaacctggcaggcagtcacatctcttggtgaagttgaatcgactcatggaaagatgtctaagaaattcgaagtgtatagacactgagtctctctgtgttgttgctggtgaaaaggtttggcaaatacgtgtagacctacatttattaaatcatgatggaaatattattgatgctgccagcattgctgcaatcgtggccttatgtcatttccgaagacctgatgtctctgtccaaggagatgaagtaacactgtatacacctgaagagcgtgatcctgtaccattaagtatccaccacatgcccatttgtgtcagttttgcctttttccagcaaggaacatatttattggtggatcccaatgaacgagaagaacgtgtgatggatggcttgctggtgattgccatgaacaaacatcgagagatttgtactatccagtccagtggtgggataatgctactaaaagatcaagttctgagatgcagtaaaatcgctggtgtgaaagtaacagaaatcacagagctaatattgaaagctttggagaatgaccaaaaagtaaggaacttggggcacacttgaatcaatcttacaagaagaaaactttcattctcatcttcaacagttcatcaaatagcaatatttttgttactcagttttcttaacttgttaagtgtttctacacctgtgctatggactcctggaactgcccaaattggagagggagtagaaaactcctggggtgatcttgaagactctgagaaggaagatgatgaaggcggtggtgatcaagctatcattcttgatggtataaaaatggacactggagtagaagtctctgatattggaagccaagatgctcccataatactctcagatagtgaagaagaagaaatgatcattttggaaccagacaagaatccaaagaaaataagaacacagaccaccagtgcaaaacaagaaaaagcaccaagtaaaaagccagtg

SEQ ID NO: 74985 - DNA, 822 bp, Homo Sapiens
  misc_feature (78)..(78): n is a, c, g, or t
cgcctctagggtggtcagagaatagcagctgggattttggagagggagaggataggtaaagcagcgtattgaagcatntgcggaggggtgtattagtcctcccaccctgagcacaccaggacggggatgcatccttgccttgtgtgcttgtaaaggcttctttcccttggtatagcaacttcaactgcacctgaacctccaacctctgcccagcctctggtgcagggtggatagaggtctagccagcccttacttcctgaagagagctctgtgggaaactcgaggctacagtagcttcccggctcccagctcctaccctacccccaccaaagcagaaacgggagacggcaacgttctggctgccattagacttacgtctccctcccctacgtcccctagcttcccaagacaggaagaaatgtgcaaaaggcccctccggagaaaactattttgccgttcagctgttctttacagaggatgttattttagtgagacccaggtcctagaccttctgattcctatttatttttttaacagactagtctcaaagtacagcacaaaatctcttctctgccttctcttgtgatgttccagagagcatctgtggttgtgatttggaataagtcatatttatttggtttactgtgcctattcagatctctgtatgttgtgtgtgtttctgtgtcctggaattggatgcgtgggactcgttctgtccgcggagtgcactctttttttcagtgtggcccacatatcttgtaaatgtttgctgaagagttgtgtctatatatagagaaaatatatataaacagagaaatatgt

SEQ ID NO: 74986 - DNA, 636 bp, Homo Sapiens
  misc_feature (21)..(21): n is a, c, g, or t
tcaaggcctcggccatttttntacagaaaagcctgattttaaaatgctcttagagacgttctccagccagaagagaaagaagccaggagggtgctctgagatattcagtcaccacagttcccaaatggcctaggaattcagagagtcagaatatcaccattactccccaatgggaacccccgacagtctcagcatggtgtgagggtgtggacggggggcctggcaggtaccaatcactcatcccgctcagtgaagacacagtgttcagctacggaagccataaggcaggccgagcttctgcccatccggaggaaatctcagctatccaacggcggtcaggagcagaggaaaataaagcagaataactagaaaacacgctcacagatcctaatgtttaacggttacaaatgacgacggaaaaacaaactcctgaccatatattatatagtttcaagcagcaagaaggaggatattgaacattctcaacacacataataaacgcttgagatgatgatatgctcattaccctgatttgatcactagacatcccatgtatcaaaacatcactgtgtatccgatgaatatctacaattattgtcaattaaaaacatcattaaaaacagactagactgcatt

SEQ ID NO: 74987 - DNA, 724 bp, Homo Sapiens
cttaagtgttagcgatatatgtaaggcagatgacgtgatctttaagactgctatatatatcagtctcttactctataaggttttaaattagaataagcttttatcaaatagataattgatgcaatttaggattcacgcaagtttcagtgtcaaatggcggtcttatagtttcaattctgaaaatagcaaacttaataaacagccactttaaacttgttctggcaaaccagaccctgctgtagatatagtctaaggtagttaaccatataagccttttcaactcttaatgccctccacatgaatcagcagttaagaaggttctagaacccatgaaagcttttgtatgtattactaggttttgtttttcttatgtttgctgattttacagttctgactaaagctgacctaaatggatcagtttatgtgtaatattctagtgctttaatgactctttttttctttggagggagggtaacattatttggacagatgcagaaggaactgttagtgagtcaagacaaacacatctgaaataaaggaactgtgtattaacatgttaacaattcataactgcactttttatgacattttgaaaatctatttataggtacagaacaatgggttttgttaaactgtatcacatttatacttgcagaaatttatttcattgttattagtaggaattttattggttcaataaaattggcaaaactgaacaccaaaa

SEQ ID NO: 74988 - DNA, 792 bp, Homo Sapiens
  misc_feature (579)..(587): n is a, c, g, or t
  misc_feature (628)..(654): n is a, c, g, or t
  misc_feature (680)..(730): n is a, c, g, or t
gggaccgcggccgctaccccgaccactcggtggacaggagagaaggttcaaggtcaatgatgggagaacgagaaggacagcattacccagaacgccatggaggaccagagcgccacggccgggactcccgcgatggctgggggggctatggctctgacaagaggatgagcgagggccgggggctgcctcctccccccaggggcagacgtgactggggggaccatggccgaagagaggatgaccggtcatggcagggcacggccgacgggggcatgatggacagggatcacaagaggtggcaaggtggcgagagaagcatgtccggtcactccgggcctggccacatgatgaaccgaggaggaatgtcagggcgcggcagctttgccccaggcggggcctcccggggccaccccatcccacacggtggcatgcagggcgggtttggaggccagagccgggggagcaggcccagcgatgcccgcttcactcgccgctactgagtacttggaatcctgtgtcctgtctcgtggcaacaaggctatgttctgttaggagttaccttaaactgtgtaaaaatannnnnnnnnaatctgctgccatattgtagctcaatacaatgtgaatttgnnnnnnnnnnnnnnnnnnnnnnnnnnngtaataaatgtgtttccgttcacatnnnnnnnnnnnnnnnnnnnnnnnnnnnnnnnnnnnnnnnnnnnnnnnnnnngaccgcgtatgcggccgcaagcttattccctttagtgaggttaattttcgctaggcactggc

SEQ ID NO: 74989 - DNA, 1867 bp, Homo Sapiens
ttcatttccatcaacaggtttcaagcagtctttacttgggtttaaaaacagtgcttcatgcatttacaataagttattacagaactctaagtcactgatgcacacacaaaagctaaacccaacttactaactatgcagacctctcctgatctccccaggctgggcagtaattagtaccttacaggtgtgatccatggcccagagaaggcagccactgtcagttacagttggactgctgcatcacagtggaggcagcagagttgaagatccacagagggctgtaatacagcccagaaaagacaatggagagtgaaggctagaaacattgaggaaggggtcaagaagcacttgtacttcctgttatcttttccaatagaatattcctgcaagttacccatcagaaaaaggtgttcagagggtttgaaaaagaagtggttagcccatgccagtgaaggtgacaaaaaacaaaacaacttgatttttggtcatatcagaaaggatggagggaaacacccaagtacatgcatggacacaagtgctccagccaaaggagtgctgttttcaccagccaaaaattttctaacagcaacaacaaaaacccacagatgtaagtaacatggaagtggatcagtcctaagccaaataaggattcccacctgggggcaaaagctgacttcctaggacatgaactgaacacatcacagtaaaagcccagtagaggctgctgccagttccagctattagtaattatgagggggacaggatgacaccttcacacggaccacccctagcaagagggtttgtttcagttctagctgtgagaggaatgtctgcagttcccacaggtgtgccatgctgtgaagcccatggcccctgctcctctctctgcctcccacacacttaacagtacacacagactttgctggcaagtgctgtttgttcctgcactgctatactatacgactgcaggacaatgccatccgctccatggttcattcagcgccttgtcccaaggtagttggtggagagcaggaccacgttgtgcagcaagagagacagctcagcttctttcaggctgcaggaaatctgcagccattctcccagccaagttcgacacctatcttcaccaatatgcgtagaattcaggccacggagataacaagccgattttacttcctgagcagtcagctggccaatccccagctttgccaaagccttgtccagttggtgaatcacagttgtatgagtcttcaaacgatgtctcaacaagggaggaggcaggtaagatgtgagaagcatggcccggctcaaggctttcacgtgcaaagcctggagttggttcatgcccagaggatggttagagaaacactctctcagagccaagatatcatgtattgctgggtgggtaccacgctgtatctgtctcaaatgctccatctcccggtatggaagttgatgaaactttatattgtgcttccacatatttgtctttattcttctagcctttttggcatcagcccataacatctgcaatcctttcatgaagattgtgtacaggacatagaagcgggggaaatgacgacccaagaaacgatggtatttcccattaatcgcttttgtcttggttaccacataagacatcaagttcttcacatctgcctttggagaaaggtgaagctttgaagaccgaggggccccccaagccaggccagagcgaccaagttgcagcctccgggtgacaaaatgtccaggggtgactgccgagccccacacagccgaccgagcccagcacaccctggagagcgccaatcttcacagcgagcctcgtgccgaattcaacaccaagcctcgtacctagccgtaattt

SEQ ID NO: 74990 - DNA, 1208 bp, Homo Sapiens
  misc_feature (44)..(78): n is a, c, g, or t
  misc_feature (931)..(931): n is a, c, g, or t
  misc_feature (1049)..(1049): n is a, c, g, or t
  misc_feature (1103)..(1103): n is a, c, g, or t
  misc_feature (1125)..(1125): n is a, c, g, or t
  misc_feature (1144)..(1144): n is a, c, g, or t
  misc_feature (1191)..(1191): n is a, c, g, or t
aaacgaccgagcgcagcggagtttttgagcgaggaagcggccgnnnnnnnnnnnnnnnnnnnnnnnnnnnnnnnnnnncagtcgacggtaccggacatatgcccgggaattcggccattacggccggggctcttctctcccgcttctctcgctgtgaagatggcgctctccagggtgtgctgggctcggtcggctgtgtggggctcggcagtcacccctggacattttgtcacccggaggctgcaacttggtcgctctggcctggcttggggggcccctcggtcttcaaagcttcacctttctccaaaggcagatgtgaagaacttgatgtcttatgtggtaaccaagacaaaagcgattaatgggaaataccatcgtttcttgggtcgtcatttcccccgcttctatatcctgtacacaatcttcatgaaaggattgcagatgttatgggctgatgccaaaaaggctagaagaataaagacaaatatgtggaagcacaatataaagtttcatcaacttccataccgggagatggagcatttgagacagttccgccaagacgtcaccaagtgtcttttcctaggtattatttccattccaccttttgccaactacctggtcttcttgctaatgtacctgtttcccaggcaactactgatcaggcatttctggaccccaaaacaacaaactgatttcttagatatctatcatgctttccggaaagcagtcccacccagaaattattagttatttagaaaaggtcatcccctctcatttctgatgcaggactccggggggcgtctgacagatctgtgcaccaagatacagcgggggtacccacccaggcaatacatgatatcttggctcctgagagagtgtttctctaaccatccctctgggcatgaacccaactccaggctttgcacgtganagccttgagccgggccatgcttctcacatcttacctgcctccctccttgttgagacatcgtttgaagactcatacaactgtgattcaccaaactggacaggcttttggcaagctgggngattggccagctgactgctcaggaagtaaaatcggctttggtatctcccgtggnctgaatttctacgcatattggntgaaagaatagtgtcaaancttgggcttgggagaattggcctgcagaatttttcctgcagccctgnaaagaaagctggagcct

SEQ ID NO: 74991 - DNA, 1947 bp, Homo Sapiens
cggtccggaattcccgggatatcgtcgacccacgcgtccggctactctgtcgccgccgtcagaccggaattgccggtgccgccgccaccgctgtctgtgcgcccacctctgctgctaccatggggatcttagagaagatctcggagatcgagaaggagatcgctcggacacagaagaacaaggccactgagtatcatctgggcctgctgaaagctaagctcgccaagtatcgggcccagctcctggaaccgtccaaatcggcctcgtccaaaggagagggctttgatgtcatgaagtcgggtgatgcccgtgtggcgctgattggatttccctctgtgggtaagtccacattcttgagtctgatgacctccacggccagcgaggcagcgtcctatgagttcaccactctgacgtgtattcctggggtcattgaatacaaaggtgccaacatccagctcctggaccttcctggaatcattgaaggcgcagcccaaggaaaaggccgtggccggcaggtgatcgctgtggcgcgcacggctgacgtcatcatcatgatgctggatgccaccaagggagaggtgcagaggtctctgctggagaaggagctggagtctgtgggcatccgcctcaacaagcacaagcctaacatctacttcaagcccaagaaaggtggtggcatctcctttaactcgacagtcacgctgacccagtgctcggaaaagctggtgcagctcatcctgcacgaatacaagatcttcaatgcagaagtgcttttccgagaagactgctccccggacgagttcatcgatgtgatcgtgggcaaccgggtgtacatgccctgcctgtatgtttataacaaaatcgaccagatctccatgggaagaggtggaccgcctggcccgaaaacccaacagtgtggtcatcagctgcggcatgaagctgaacctggactatctgctggagatgctttgggagtacttggccctgacctgcatctacaccaagaagagaggacagaggccagacttcacagacgccatcattctccggaaaggggcctcagtggagcacgtgtgccaccgcatccaccggtcactcgccagccagttcaagtacgccctggtgtggggcaccagcaccaagtacagtccgcagcgggtgggcctgacccacaccatggagcatgaggacgtcatccagatcgtgaagaagtaacggcgcctgccgggcctcccgcccacctgcctcgtctccctggggaggtggtcccactgggacacacaaacacccaaacagaaaaatacaaatacacgtaccccaggaaggggtccctcaagtctctgctatttacagaagtttcttcagtaggcagacgaagagtgtgttggggcaaaggggctcggttggaggcatttcccataagactgagccctctcatgggggttttgagtttgtagtgctgagcctgcatctgtgcctcccagccccctgcactgagggagcaagttgcccacatgcccgccagccagggcctaaagcagatggcatgctcagtgccaggctggtagctgggcctgtttgggtccctggaggctgtggctgctgtcatggcacctcactccctcagctcttgccagcttctctgacacttgggttgggggcccttccaggaggaaacccccttgggtgccccacacagggctctccatgatgggaaccagtggttagtggcttcaaaggcccagctgacaccctccacagcctaaggggtgtcctaaagtgcctccccctgtattccccctcccagggcagcccctgcccagcacaaaaccccaggaccctggctctgcacgcctggggcagggacttttgagtttaggatctgtattttctaagtccccagttctcctggctctcctttctgaaataaaggattgaaaacggaaa

SEQ ID NO: 74992 - DNA, 636 bp, Homo Sapiens
  misc_feature (29)..(29): n is a, c, g, or t
  misc_feature (97)..(97): n is a, c, g, or t
aacttcgcgatttggattatttttcattntcttctcagcctaaaggctatccagctgtgaggataagtcagaaaccactatgcaaccagattaaatntgtcaacagtgtgtatagtgaacgataaaagctccgatggtaattgtaaaataaaaggatgaggaaaaggcagctctgtatccctgattaccttgctgcaaaaagtttattaacatctgtgtatacacaaggaggatggttattttatgcttattttctcttagacttgaaacccacatgacaccagagatgttccgaacaccattgcatgaaattgctcttagcataaaacttctgcgtctaggaggaattggccaatttctggccaaagcaattgaacctccccctttggatgctgtgattgaagcagaacacactcttagaggtacttacaaatacaaacctacttgacgcagatattaatcataccatctgtcttgttctggcagataacacttacaaatgaatcaagatgatgaagatgtagtcaacagggctgtgataataatagtaaggcctccagtcttaccttagatagttagtatagtcactgttctaatgagcaatgagaaggaagaaagggacaatgtgagtcttta

SEQ ID NO: 74993 - DNA, 3392 bp, Homo Sapiens
  misc_feature (3032)..(3092): n is a, c, g, or t
  misc_feature (3127)..(3142): n is a, c, g, or t
  misc_feature (3155)..(3163): n is a, c, g, or t
  misc_feature (3294)..(3303): n is a, c, g, or t
taccggtccggaattcccgaggatcaaaattcagttgtcattattagaggggctactggatgtgggaaaaccacacaggttccccagttcattctagatgactttatccagaatgaccgagcagcagagtgtaacatcgtagtaactcagcccagaagaatcagtgcggtttctgtggcagagcgagttgcatttgaaagaggagaagagcctggaaaaagctgtggctacagcgttcgatttgagtctatacttcctcgtcctcatgccagtataatgttttgtactgtaggtgtgctcctgagaaaattagaagcaggcattcgaggaatcagtcatgtaattgtagatgaaatacatgaaagagatattaatactgacttccttttggtagtactgcgtgatgttgttcaggcttatcctgaagttcgcattgttcttatgtctgctactattgataccagcatgttttgtgaatatttcttcaattgccccatcattgaagtttatgggaggacttacccagttcaagaatattttctggaagactgcattcagatgacccactttgttcctccaccaaaagacaaaaagaagaaggataaggatgatgatggtggtgaggatgatgatgcaaattgcaacttgatctgtggtgatgaatatggtccagaaacaaggttgagcatgtctcaattgaacgaaaaggaaactccttttgaactcatcgaggctctacttaagtacattgaaacccttaatgttcctggagctgtgttggtttttttgcctggctggaatctgatttatactatgcagaagcatttggaaatgaatccacattttggaagccatcggtatcagattctacccctgcattctcagattcctcgagaggaacagcgcaaagtgtttgatccagtaccagttggagtaaccaaggttattttgtccacaaatattgctgaaacaagcattaccataaacgatgttgtttatgtcattgactcctgcaagcagaaagtgaaactcttcactgctcacaacaatatgaccaactatgctaccgtatgggcatcaaaaacaaaccttgagcaacggaaagggcgagctggccgagtacggcctggattctgctttcacctgtgcagccgagctcgttttgagagacttgaaacccacatgacaccagagatgttccgaacaccattgcatgaaattgctcttagcataaaacttctgcgtctaggaggaattggccaatttctggccaaagcaattgaacctccccctttggatgctgtgattgaagcagaacacactcttagagagcttgatgcattagatgccaatgatgagttgactcctttgggacgaatcctggctaaactccccattgagcctcgttttggcaaaatgatgataatggggtgtattttctacgtgggagatgctatctgtaccattgctgctgctacctgctttccagagcctttcatcaatgaaggaaagcggctgggctatatccatcgaaattttgctggaaacagattttctgatcacgtagcccttttatcagtattccaagcctgggatgatgctagaatgggtggagaagaagcagagatacgtttttgtgagcacaaaagacttaatatggctacactaagaatgacctgggaagccaaagttcagctcaaagagattttgattaattctgggtttccagaagattgtttgttgacacaagtgtttactaacactggaccagataataatttggatgttgttatctccctcctggcctttggtgtgtaccccaatgtatgctatcataaggaaaagaggaagattctcaccactgaagggcgtaatgcacttatccacaaatcatctgttaattgtccttttagtagccaagacatgaagtacccatctcccttctttgtatttggtgaaaagattcgaactcgagccatctctgctaaaggcatgactttagtcacccccctgcagttgcttctctttgcctccaagaaagtccaatctgatgggcagattgtgcttgtagatgactggattaaactgcaaatatctcatgaagctgctgcctgtatcactggtctccgggcagccatggaggctttggttgttgaagtaaccaaacaacctgctatcatcagccagttggaccccgtaaatgaacgtatgctgaacatgatccgtcagatctctagaccctcagctgctggtatcaaccttatgattggcagtacacggtatggagatggtccacgtcctcccaagatggcccgatacgacaatggaagcggatatagaaggggaggttctagttacagtggtggaggctatggcggtggctatagcagtggaggctatggtagcggaggctatggtggcagcgccaactcctttcgggcaggatatggtgcaggtgttggtggaggctatagaggagtttcccgaggtggctttagaggcaactctggaggagactacagagggcctagtggaggctacagaggatctgggggattccagcgaggaggtggtaggggggcctatggaactggctactttggacagggaagaggaggtggcggctattaaaacttggttatgtcagttcctgtgtgtagacagtaaggaaaaaaaggcatgctatgtgttacgtgttttttccagtatgtttatttgccaccaaaaagtaaatgcattttcacccattctgtggttcattgtagtttaaggaaaccaagcatatagatgcattagtgattttgtttatattatgtaaaatataacgatctcttaaaaataccacagtttgtattttttctttaaggagtaaagatttgcctttaaataacttggtattttcctggctttcgtttaatacaatagaaaataaagtattacaccgaaaaccgcccctgccgcccctcccttttattactatttccaatttcccccacctaacaatatttcaccacaagcccccccgccaaaannnnnnnnnnnnnnnnnnnnnnnnnnnnnnnnnnnnnnnnnnnnnnnnnnnnnnnnnnnnntcccggtggccgctttgccggccttccccgctaannnnnnnnnnnnnnnnactcatcttcatnnnnnnnnnacccaacacgggccggaccgcctaattctccgcgcccaccccccccgtaaaaattctcgcccccctatcttatcttccccctttcctattgccccgacctccaacggtccgctcgctctctcgctttactnnnnnnnnnngttccgtctattatcccgacttcctcctacatgttccccattcccgctcccccttctttgtcggacccccctatctgcgcccgctcgcc

SEQ ID NO: 74994 - DNA, 882 bp, Homo Sapiens
  misc_feature (410)..(410): n is a, c, g, or t
  misc_feature (421)..(421): n is a, c, g, or t
  misc_feature (446)..(446): n is a, c, g, or t
  misc_feature (453)..(454): n is a, c, g, or t
  misc_feature (503)..(503): n is a, c, g, or t
  misc_feature (539)..(539): n is a, c, g, or t
  misc_feature (546)..(546): n is a, c, g, or t
  misc_feature (754)..(773): n is a, c, g, or t
tagcggatcctaactcccacttggttgctgtgctggaagctaaacacactcttagagagcttgatgcattagatgccaatgatgagtagactcctatgggacgaatcctggctaaaatccccattgagcctcgttttggcaaaatgatgataatggggtgtattttctacgtgggagatgctatctgtaccattgctgctgctacctgctttccagagcctttcatcaatgaaggaaagcggctgggctatatccatcgaaatttggctggaaacagattttctgatcacgtagcccttttatcagtattccaagcctgggatgatgctagaatgggtggagaacgaagcagagatacgtttcggtgagcacaaaacgacttaatatggctacactaagaatggactggngaagccaaagntcagctcaaagagattttgattaantctgggnnttccagaagaattgtttggtgacccaagggtttactaacactggaccanataaataatttggatgtggttatcttccctcctggnccttggngggggacccccatggatggctttcctaaggaaaagagggaagatcctccccactgaaaggggggtaatgggctttttccccaaatcatctgggaaattggcccttttaaagccccgaaattgaaagacccctcttcccttcttttggatttgggggaaaaaaattctaaatccgcccctttctggttaaaggggtgtggttttttttnnnnnnnnnnnnnnnnnnnnttctcccttttgccccccacaaaaaagcccaatttcgtgtggtggcaaattggcggctttgtaaaaaaaccggggggttaaaaaccgcggaaaaattcccttggggagg

SEQ ID NO: 74995 - DNA, 508 bp, Homo Sapiens
  misc_feature (143)..(143): n is a, c, g, or t
gtgggtgatctagaggatccggctcccactggttggtgtgatgaagcagaacacactcttagagagcttgatgattagatgcaatgatgagttgattccttggggacgaatcctggttaaactccccattgagcctcgtttgnggaaaatgatgataatggggtgtatcttctacgtgggagatgctatctgtaccatggctgctgctacctgctttccagagcctttcatcaatgaaggaaagcggctgggctatatccatcgaaatttggctggaaacagattttctgatcacgtagcccttttatcagtattccaagcctgggatgatgctagaaggggtggagaagaagcagagatacgttttggtgagcacaaaagacttaatatggctacactaagaatgacctgggaagccaaagttcagctcaaagagattcggattaattctgggttcccagaagatggtcggtagacacaagtgtttactaacactggaccagatagt

SEQ ID NO: 74996 - DNA, 1024 bp, Homo Sapiens
  misc_feature (876)..(905): n is a, c, g, or t
atacggctaggtacgaggctgggtggtgaatcggcacgaggccatgacccagctgtgatccatgagaacgcatctcagcccgaggtgctggtccccatccggctggacatggagatcgatgggcagaagctgcgagacgccttcacctggaacatgaatgagaagttgatgacgcctgagatgttttcagaaatcctctgtgacgatctggatttgaacccgctgacgtttgtgccagccatcgcctctgccatcagacagcagatcgagtcctaccccacggacagcatcctggaggaccagtcagaccagcgcgtcatcatcaagctgaacatccatgtgggaaacatttccctggtggaccagtttgagtgggacatgtcagagaaggagaactcaccagagaagtttgccctgaagctgtgctcggagctggggttgggcggggagtttgtcaccaccatcgcatacagcatccggggacagctgagctggcatcagaagacctacgccttcagcgagaaccctctgcccacagtggagattgccatccggaacacgggcgatgcggaccagtggtgcccactgctggagactctgacagacgctgagatggagaagaagatccgcgaccaggacaggaacacgaggcggatgaggcgtcttgccaacacggccccggcctggtaaccagcccatcagcacacggctcccacggagcatctcagaagattgggccgcctctcctccatcttctggcaaggacagaggcgaggggacagcccagcgccatcctgaggatcgggtgggggtggagtgggggcttccaggtggcccttcccggcacacattccatttgttgagccccagtcctgnnnnnnnnnnnnnnnnnnnnnnnnnnnnnnagtctctggggtcaggaagaaaccttattttaggttgtgttttgtttttgtataggagccccaggcagggctagtaacagtttttaaataaaaggcaacaggtcatgttcaatttcttc

SEQ ID NO: 74997 - DNA, 1375 bp, Homo Sapiens
ggtcgtcgtctgcggcggcggcggcggctgaggagcccggctgaggcgccagtacccggcccggtccgcatttcgccttccggcttcggtttccctcggcccagcacgccccggccccgccccagccctcctgatccctcgcagcccggctccggccgcccgcctctgccgccgcaatgatgatgatggcgctgagcaagaccttcgggcagaagcccgtgaagttccagctggaggacgacggcgagttctacatgatcggctccgaggtgggaaactacctccgtatgttccgaggttctctgtacaagagatacccctcactctggaggcgactagccactgtggaagagaggaagaaaatagttgcatcgtcacatgatcacggatacacgactctagccaccagtgtgaccctgttaaaagcctcggaagtggaagagattctggatggcaacgatgagaagtacaaggctgtgtccatcagcacagagccccccacctacctcagggaacagaaggccaagaggaacagccagtgggtacccaccctgcccaacagctcccaccacttagatgccgtgccatgctccacaaccatcaacaggaaccgcatgggccgagacaagaagagaaccttccccctttgctttgatgaccatgacccagctgtgatccatgagaacgcatctcagcccgaggtgctggtccccatccggctggacatggagatcgatgggcagaagctgcgagacgccttcacctggaacatgaatgagaagttgatgacgcctgagatgttttcagaaatcctctgtgacgatctggatttgaacccgctgacgtttgtgccagccatcgcctctgccatcagacagcagatcgagtcctaccccacggacagcatcctggaggaccagtcagaccagcgcgtcatcatcaagctgaacatccatgtgggaaacatttccctggtggaccagtttgagtggggacatgtcagaagaaggagaactcacccagagaagtttgccctgaagctgtgctcggagctggggttgggcggggagtttgtcaccaccatcgcatacagcatccggggacagctgagctggcatcagaagaccgacgccttcagcgagaaccctctgcccactgctggagactctgacagacgctgagatggagaagaagatccgcgaccaggacaggaacacgaggcggatgaggcgtcttgccaacacggccccggcctggtaaccagcccatcagcacacggctcccacggagcatctcagaagattgggccgcctctcctccatcttctggcaaggacagaggcgaggggacagctccagcgccatctgagggaatc

SEQ ID NO: 74998 - DNA, 1216 bp, Homo Sapiens
cggctaggtacgaggcctgggtgtgtgaatcggcacgagggtcgtcgtctgcggcggcggcggcggctgaggagcccggctgaggcgccagtacccggcccggtccgcatttcgccttccggcttcggtttccctcggcccagcacgccccggccccgccccagcccgtcctgatccctcgcagcccggctccggccgcgccgcctcttgccgccgctaatgatgatgatggcagctgagcaagaccttcgggcagaagcccgtgaagttccagcgtggaggacgacggcgagttctacatgatcggctccgaggtgggaaactacctccgtatgttccgaggttctctgtacaagagatacccctcactctggaggcgactagccactgtggaagagacggaagaaaactagttgcatcgtcacatggtacaaaaaacaagaacctaacactacaggatcacggatagcacgagctctagccagccagtgtgaccctgttaaaagcctcggaagtggaagagattctggatggcaacgatgagaagtacaaggctgtgtccatcgagcacagagccccccgacctacctcagggaacagaaggccaagaggaacagccagtgggtacccagcctgcccaacagctcccagcacttagatgccgtgccatgctccacgaaccatcaacaggaaccgcatggggccgagacaagaagagaacttcccctttgctttgatgaccatgaccagctggtgatccatgagaacggcttctcagacccgaggtggctggtacccatccgggtggacctggagattcgatgggcacaagctggaagacgccttacctgggacactgactgtgaacttgctgacggctgaaatgtttcgagaaatctctgtggaacactgcgttgacccgcggagttgtggggccgccatacgcgcgagcaaacaaagcagacagcgggcctacaccggggaaggacccgtgggacgctctaccaccggcgtcaaaaagcacacacccggcggggaaaacaccggcggccagacagtggggcgcgcagagaacgacaccacagcgcaacgcacgacgcaacgggggagggtacagccaccaacggcaggcagtactaagaagacaccgcacgactagacgcaggcacgagtcgtgaaacagtagcgcacccacggaccacgatgaggtagcacg

SEQ ID NO: 74999 - DNA, 698 bp, Homo Sapiens
aagaggtcttgagtatagttacccttgagattaagtcctgcaacaaagatcaggaaaagggtgggtctttccattcaaagtcattattttagatggcttcaagatagctacgataaaggtctaaaggaactggcataggagcaaggcagcaaagcagtaaattaggcttgataattatgtaagaaagaactttgggtgtagttaccagaagcaaatcaatcagaagactacatttttagaggaattttattaatcatactaaatctggctcaaatatcattgttcgggtgttaaaacagagggtaactgtccaaccccaagcttgcataagtagaaaaatagagcataaaaccttaacagctccccagtacccacacaggatgtggccatggagaatgatggacaaaaaaagaacatttcagaagctcgtataaggagctgtactaaagactggacagggagtttctcctgaagactagaattggagtttcatcagaactttcttcagtttcaaggagatgggccgcaaaatgtttatgcagtatttcatcattattatacatgaatagtattgctcagtatcacatttttttctgaatgagagaatgtattatagttatctgtccctgagttaccactatatattgggtttgcagggatgggggtgacaataaagataatttgtctttttagttttt

SEQ ID NO: 75000 - DNA, 1001 bp, Homo Sapiens
  misc_feature (825)..(834): n is a, c, g, or t
tgagaatccttttgaaattcaagaccattctcaggatcagcaaatagaaggagatgaggaggatgaagagaagattgatgaacctattgaagaagaggaattagaggaagagacagcaaaggaagaacctgctgacttccctgttgagcaacctgaagaaaattaaatataaggtattagatttaaaaggagctttacatttcggttctaatgtaaaaaagggtaagaaatttaatagcttaaaatatgaattaacacccatgttgcatgcattccacatattaaaatttgttttatataatttctaaatgtttaacatttgtttaataaaatgaaggcaaaactattttagtttagtttttatagctaccagacttagatccgataaattgtttgtataatttttaagcttaatttttattactttattggtgttaaggataacaaatgtgtattgttagtatatctattctaatcattttatcttaaatgctgctcttgggagtgaatattcaagtgtgcatcaattttttgaatacttaccctggaagatataaactgggcaagtattttgtgctctgtgtatttttttactgcattagacattgaatagtaatttgcgttaagatacgcttaaaggctctttgtgaccatgtttccctttgtagcaataaaatgttttttacgaaaactttctccctggattagcagtttaaatgaaacagagttcatcaatgaaatgagtatttaaaataaaaatttgccttaatgtatcagttcagctcacaagtattttaagatgattgagaagacttgaattaaagnnnnnnnnnnttctcaatcatatttttaaaatataagactaaaattgtttttaaaacacatttcaaatagaagtgagtttgaactgaccttatttatactctttttaagtttgttccttttccctgtgcctgtgtcaaatcttcaagtcttgctgaaaatacatttgatacaaagtt

SEQ ID NO: 75001 - DNA, 1225 bp, Homo Sapiens
tcttagacctgttccttgcccaggaggctgagcggctgaggaaacagactggggcagtggaaaaggtggaagagcagtgccatccattgaatgggttgaacttttcacaggtcatctttgctttgaaccagaccctcctgcagcaggaaagcctgcgagcaggcagtcttcagatcccctacacgacggaggatctcatcaaacactataactgcggggacctcagctccgtcatcctcagccatgacagctcccaggttcccaattttattaatgccacgctaccacctcaggagcgcatcactgctcaggagattgacagctacttacgccgggagctgatctacaagcggaatgagagaatagggaagcgggtgaaggcccttttggaggagttccctgacaaaggcttcttctttgcctttggagctggtcatttcatgggcaacaacacagtgctggatgttttgcggcgtgaagcctatgaggtagaacacgcccctgctggacgacccatccacaaagggaagagtaaaaagacctccacacggcccactctgtccaccatctttgctccaaaagtccctaccctggaagtaccggcaccagaagccgtatcctcagggcactcaacgctgcctccccttgtgtcccggcctggaagtgccgacacgcccagtgaggccgaacagaggttccggaagaagcggaggcggtcacagcggaggccgcgactccggcaattcagcgatctgtgggtccgcctggaggagagtgacatagtcccgcaactccaggtccctgtcctggacaggcacatctccactgaactgcggctccctcgccgtgggcattcccaccacagccagatggtggccagcagtgcctgcctgtctctctggactcctgtgttctgggtgctggtgctggctttccaaacagagacacccctcctgtaacgactggaagcaccaggctaagaacctgacccctcggacttgaagaatggccattcctgtactccacattctggtctagccttgttgggcccaatccagaagagactgctcttgaaaaagcggcccagtgttgattcttctctttccaaggaatgtgactttgggttatccaactttgggggcaggtgtacagttttgtaacatagtgagttgtgtgaaaataaattataaatgagttgtatgaaaataaatacctttttttgtat

SEQ ID NO: 75002 - DNA, 1226 bp, Homo Sapiens
  misc_feature (176)..(191): n is a, c, g, or t
  misc_feature (885)..(885): n is a, c, g, or t
  misc_feature (908)..(908): n is a, c, g, or t
  misc_feature (986)..(986): n is a, c, g, or t
  misc_feature (992)..(992): n is a, c, g, or t
  misc_feature (1002)..(1002): n is a, c, g, or t
  misc_feature (1025)..(1025): n is a, c, g, or t
  misc_feature (1032)..(1032): n is a, c, g, or t
  misc_feature (1041)..(1041): n is a, c, g, or t
  misc_feature (1094)..(1094): n is a, c, g, or t
  misc_feature (1105)..(1105): n is a, c, g, or t
  misc_feature (1128)..(1128): n is a, c, g, or t
tttgctaccaaactacagataaccatttctagaaaagaataagactgatccatttctgcctctcatgtggagcctaggattcttcagatagtaaagacagttggagtctgtcaggacagctactgccacattcttggcagcatttcttaccagattgctgattccatgacttgtannnnnnnnnnnnnnnnctggagtcataatttcagaaagagtaaagataaactttcttattaaaaactggttttaggtccaaataatgaagatgtagaaaaacaacctacagtcccattataacattttgaaattcatttataaaaaatttacagcagctgtaaagtttcagtatcgtaaggacaacgtgatcctacaaacagccaaaggatgtagacaagatgtttttctgtcttccaaataacacaaactgaaaagaaaagcctttgcttttccttggccacataaaactagtatttccacactactggttaataaccccaagaaacctttgcttctcttagtcaatttgctcattatggctacaagactacagctcaacatcacaagcccagaagaaatgctggtaagacatcaatctgagcatttcccgagacccaatcacaacatttcagtgctttccttatttgtcaagagctatcataccagtcattgtgcaaaatgcaaatattccaatgattatttcagtacatttcttaaacgacaagatgaaacccaagaggaatgggagtgtgcatagtgaaatatttaagatgcaaaggcaagtttggagggaagatgcagaaataaacgaacgtgcacacttaaagattataccatctttggggtttttctaatatactttgaagctatacattccaggatatttgntaatatgaatccagtagatgtcntgtatcatgcttctaaccaggaccttcaatattaaggcatttacattcacgcctaagagtaccacattcctctagatnacttgnagagggacangactgatgaacggaaccagtcangaagganggtactgangtccaagagagcactcttagctctatgtagcactggatctataattttttcanatgcagtatantttgagagcatgtgcagagaganagtaattgtcatgttttatcatttatccacgcgcatgcagtgatcggaagcactccgtaccgataaagatctcaaatgatgggtgtaacacagtccgg

SEQ ID NO: 75003 - DNA, 683 bp, Homo Sapiens
  misc_feature (50)..(50): n is a, c, g, or t
tgccaatgcccacctccttgagccacagttagctgccaactgggtcttgngacaccctccagtacctggctcaagagagaccaggccgggccgagccttcttcccactgcagtggactagacccacggccaggggatgggcatccccaggtagcaatcccacaatgcactgtacctcagagagagagcacgccaggggcaccaagggaccgagccctctgtccagagggggacagcggtcacaatactgctcaccaaaagacaaaggccaggctgccctcgggcacctctcagtcttcacttttgtctctccggaagaaccagcagtctgattccgtctatttcagcccccgtctctctcttctccacccccacgctgctgaaccattttcatgtcaatcacaaaggaaaaataagtggggatggggggaaatacctaggagtctattatcacatacatattaatatgttaatactttctttaaaaaaaacctcttgatgttattattttgcagactacgctttatagtacctgtgtgacgggacctagaacactggatacaaatagagctatgttggtttatcataatatgtacgcagaaactttctttttgtcatattatccttgtaatgtaagaagattgttaataaaagcatttaaatttactcaccactgttgaaaaa

SEQ ID NO: 75004 - DNA, 1489 bp, Homo Sapiens
  misc_feature (1138)..(1138): n is a, c, g, or t
gttgttgttaaaaacataccagctggttataatattgttctccacgatccttgtgatgattctgagcctggcactcccaaatctgggaagcatagtttatttgcaagtgttcaccttccaaatcatgaggcatagcatgacttattcttgtttggaaaactcttttcaaaactgaccatcttaaacacatgatggccaagtgcccaaaagccctcttgcggagcaaatttcagaatatatatgtggatccaagctctgatagttcaggtgctggagggaagagagacctgtgtgtttagaggccaggaccacagttaggattgggttgtttcaatactgagagacagctacaataaaaggagagcaattgcctccctggggctgttcaatcttctgcatttatgagtggttcagtcatgaggttttccaaaagatgtttttagagttgtaaaaaccatatttgcagcaaagatttacaaaggcgtatcagactatgattgttcaccaaaataggggaatggtttgatccgccagttgcaagtagaggcctttctgactcttaatattcactttggtgctactacccccattacctgagggaaactggccaggtccttgatcatggaactatagagctaccaggacatatcctgctctctaagggaatttattgctatcttgcaccttctttaaaactcacatatgcagacctgacactcaagagtggctagctacacagagtccatctaatttttgcaacttcctgtggccagtgtgtataaccccttccactatctcacagatagtcacagcgtccattccatagtctgtctcctcacatctgttagtattgacacagcacagacaccacaagccatcaggttcttcatggggcaggtgaaatacttctaccccatgggtaaatgtatttacatattaccaagagaagaagcacattatctatgatcttttggcccagttcttatttagcatttttattccagcctacttggaaacatgtttttatttgcaatatatgcctgactgaattaagcttgcttgttttaaacaaccaaatcattggaacagaaaaggatttaaaaaacaagaatgcatgatctcagcgtgattaaaaaanaatcagtggaaataaatgatcatagaaggtgcttttcaaaacaactgctattataattctcaaagtcctactctgccaaaagaagattaaaagtcatacattacattacaaggaaatgttcatgtgggaagagggttgctgaaaatcaacaacgcttgaagttaaaaagtgtgtctttgtagatttcattgtataatgtgtatttcttaggagatggctgacttgattgatctacgctaagtggagacatttcacatttttaaaaccaaatgttcaatctgtattactctttgccatcttgtatgtagaggctatttttaaatcattaaatttttagatctctgttttcat

SEQ ID NO: 75005 - DNA, 669 bp, Homo Sapiens
  misc_feature (1)..(1): n is a, c, g, or t
nataaaccttacggatctgagtagaaacagatttctcacaacttgcttctccggctcaatttcacagttcggcatacactcaggcactgtcaaaagcttgacaatgttccagggaaaatattaaccgtaaactttccaagaggaattaaaggagcaggcagaaatgtcaggacgtcctctcttttgaaagcacatcccaagtttgcgcacgtgtacgttttggagagaagcacatgcagcaagctcaaatgacatccagtatggtcccactttaccatgtcacggtggaaagggaaggggaaaaaaaggacatatcctctttggctaaaaggcacggaggtctctccctctccctctcaggcctgaccagttgaacactgcacactctgatgtataaatatttgcctctggctaaagttcaagcagccctgtgtggctgccagacacaacagaaaaccaacatccaagggaaagtgtttactgcagtgggggccaaaggagcaagtgccagcaaaagatcacatctgattggccaggcatgtctgtggtgttaccataagacctggccactggccactggtcgctggggtgttccacccttttagtgatggttatgttctttaatgcacagccttgccacagttaacgcaagacgaaaagacatcctga

SEQ ID NO: 75006 - DNA, 782 bp, Homo Sapiens
  misc_feature (715)..(715): n is a, c, g, or t
aaattttaagaagatttttatttaaacacttttattacaatatttaggtggcacaataactaacaagcttctgagacaggaggtaacattctcatagactttgcaactcagccagaagtaaaactcgaaataaatatgtcatttaaagtaactatgaaggtaataataaaaggagtgttgttagtactaagaaggttttcaatgcagggtccaatagctatatttacatatacagaaaaaatgaaattagttactaaacataacaaaaaaaacttggtatacctatagcaatgcatatttaccaaaaactggtgaaaaatatattgagagatatgttaaatatttgctgaaaagaaaactacttgtctgtatgtgaaaccccatgaatcattttacacatcaggaccaaaaaactaactccttttattcctcaaaaatcaaaagtggtctcatctaacccaaaaatcacagacttgtcagttattgtcttctcattttgaacattatttactattttttctctctaaacagtaagttcttagtcaaaatttattattttgtcccatctagaaaatatggtctatggtacttcactagggtggtctaggagtagattctagggagttccccaagctctggcagtacatgtgtcttgtatggggccatatgcacatttttgggaggggtgatagtctatgtcttatccatttctcanagcaataaaaggaagacccactagccaactgtagcagtttcccaagtaaaatataaagatgattcac

SEQ ID NO: 75007 - DNA, 1043 bp, Homo Sapiens
ccgagaccgcgaggtgggtggagcgggtcttcctggaagggtgcgataaggccgggcgaggtgcctgggatgcttctccccttccgcgaggaagagatctaattgggtagggcgggtgtagactagcctgccgagccgcccgctggcacctgcagcctcctgggcgcccgccgggccccggcgagaaagttgttaaagggagcgaggtggttgttcctggggtccgaggcgcgcctctcacgccctgcccaacagaagccgcagtcccgtggggtctggagacgcagtttcctgttaatgacaataaatccctgctccccctgcctcagacatctacgcagcgaaatcgagcctggccttgagggtccacaccgcgagggaagatgcgtgcgcccattccagagcctaagcctggagacctgattgagatttttcgccctttctacagacactgggccatctatgttggcgatggatatgtggttcatctggcccctccaagtgaggtcgcaggagctggtgcagccagtgtcatgtccgccctgactgacaaggccatcgtgaagaaggaattgctgtatgatgtggccgggagtgacaagtaccaggtcaacaacaaacatgatgacaagtactcgccgctgccctgcagcaaaatcatccagcgggcggaggagctggtggggcaggaggtgctctacaagctgaccagtgagaactgcgagcactttgtgaatgagctgcgctatggagtcgcccgcagtgaccaggtcagagatgtcatcatcgctgcaagcgttgcaggaatgggcttggcagccatgagccttattggagtcatgttctcaagaaacaagcgacaaaagcaataactgaaaaagactgtcctgtcagcgatgactttatacatcaagggggtcttgttttgctagagagtttggggtttggtttgtggatttcattgtgatttataataaggcttattttcacagaataaaataaagcaaaacgagggaggattttattgggggaagtgcagcaaa

SEQ ID NO: 75008 - DNA, 701 bp, Homo Sapiens
  misc_feature (65)..(148): n is a, c, g, or t
ctcctgtgcacctggcgaggctgaaggcgaggggtggaggaggccccagcacagcctcatctccnnnnnnnnnnnnnnnnnnnnnnnnnnnnnnnnnnnnnnnnnnnnnnnnnnnnnnnnnnnnnnnnnnnnnnnnnnnnnnnnnnnncacgtgtgctctgggctccgaggcttctccagagctgggagctggctggcgtggcaagggcatgctctggggcagtgtgtccctcaggaaccagggtcctccctcccctttctgcctggtcagccccgtggcctctggcccaccaagctccctgtcacccagccatggtgtggtccaggcagggacatctcggtaccctttctgcactccgtgggccctgggtgcgctgaggcctggaggcgtctacactggctccacatccacttcccccgcagctcgtgtgggcgctcgtccacaaacactccgtggctgagaggcagcggatccaggcagcgatgctgagccacctcctccgagccttcctttcacacagaccaccccggaggacacgtggatgatggggtcagagatcactgagctgcccctcaagggggcctggaacccgggtgctggggtcatgctgcctccgtggctccaaggtgagggtcatcttcacgagcaaagagaaccaataaagtgacaacgaacgtttgaggcttccagccctcccccc

SEQ ID NO: 75009 - DNA, 1199 bp, Homo Sapiens
gggggggagggctggaagcctcaaacgttcgtggtcactttatgggttctcttggctcgtgaagatgaccctcaccttggagccacggaggcagcatgaccccagcacccgggttccaggcccccttgaggggcagctcagtgatctctgaccccatcatccacgtgtcctccgggggggtctggtgtgaaaggaaggctcggaggaggtgggctcagcatcgctgcctgggatccgctgcctctcagccacggagtgtttggtgggacgagcgcccacacgaaacaggaggaggccacggaggccggggctcggggaggctcacgaggcagccacggcccaggtcagttgggagtgggggctccctcgccctcgtgaaccccaggccccagcaggtcttcgtccagccccagtggggtgctgggtccccgtttgccgactggtgctgccctggtcatcctgtgtctggccacttctgccacggggtctccttgtacctcaatgtgtgattgtcccgcaggaagaagcgccagacggtccagtgtgacgcgccaggacggagccgagggtccagccctgggcaaatgtccaacggggccggacccgggttgagcgtgtgggggtcgatacttcacccacgatgaggcagctccggtgggccggggatggccggcacccagccaagggcatggcggccccagttcctgtgggggggcacgggtcaatccaataaactcggaaatctcacggattgggcaacgccaaccatgttaccgcaagaaacagaacctctgggaagcacacgtgttagcgccgggggatcccacaccaacaactttgtcgtataacggcggtgtccgtttctcgcccaagaggaaaccctggatgatttccgcccaaggtgcacgaacagagacaccgagggggtgggagcgcggatccacactccaaaggaacaaccatgtttcgctggtcgcactcggagggagcgaactcctaccatgggccgagagaagagagagaatcacaacgacgccatagatgtcttgtcgaagcacactgctcgtcttgcgcagatgcagctcgagaaaaaatacagttaacatcaacacgatctgggtggtaacctgcagaccaaagaaactaccacgccgtaggaagaacaaaacgacgtttgtcagtctgcctctggcagacca

SEQ ID NO: 75010 - DNA, 568 bp, Homo Sapiens
gcaccgggcgcaacagagccatatttctcttctttcaaaagcaaatgggagaaatatcgctgaattctttttctcagcaaggaacgcccctgagaaagagaatgcgtccctgagggtaggcctctgaaatggccacttggggggtggctgtattttacagtcacagctgtagggatgaaataagccccagtctcctgtagcgctcccaggcttattaggatgaggaaattcccgcctaataaattttggtcagaccggttgtctgctctcaaaccctgtctcctgataagatgttatcaatgacaatgcatgcccaaaacttcattagcaattttaatttcgccccggtcctgtggtcctgtgatctcgccctgcctccacttgccttgtgatattctattaccttgtgaagtaggtgatctttgtgacccacaccctattcatacactccctccccttttgaaagtccctaataaaaacttgctggttttgcggcttgtgaggcatcacggaacctaccgacgtgtgatgtctcccctggacacccagctttaaaatttcaaaaaaa

SEQ ID NO: 75011 - DNA, 1159 bp, Homo Sapiens
catacctggaccttctgcaatctcttaacataaattatgaagatgtcacagacacttattacttccccaaccaatacccttgtgatttcctatgcctgtctttactttaatcttttaatcctgtgatcttcgtaagctgaggaggatgtatgtcacctcaggaccatgtgataattgcaacaactgcacaaattgtagagcatgtgtgtgtgaacaatatgaaatctgggcaccttgaaaaaagaacaggataacagcaattgttcagggaacaagagagataaccttaaactctgaccgccggtgagccgggcggaacagagccatatttctcttctttcaaaagcaaatgggagaaatatcgctgaattctttttctcagcatggaacatccctgagaaagagaatgcgcacctaggggtaggtctctgaactggcccccctggggcgtagccgtctcttatggtcgaggctgcagagatgaaataaactccagtctcccatagcgctcccaggcttattaggaagaggaaattcccgcctaataaattttggtcagaccggttgatctcaaaccctgtctcctgataagatgttatcaatgacaatggtgcccaaaacttcattagcaattttaatttcgcctctggtcctgtggtcctgtgatctcgccctgcctccacttgccttgtgatattctattaccctgttaagtacttgatgtctgtcacccacacctattcgcacactccctccccttttgaaaatccctaataaaaacttgctggtttttgtggcttgtggggcatcacggatcctaccaacgtgtgatgtctcccccggacgcccagctttaaaatttctctcttttgtactctgtccttttatttctcaaaccagccgacgcttagggaaaatagaaaagaacctacgtgactatcggggcaggtcccccgataagaagggatattatgatacctgagacagttaactgatgggagtattgatagacataaaggttggttccaggccaggcacagtggctcaagcctgcaatccccacaccgaggcgggagtattgcttgaaaccaggagttcaagaccagcctcccggccgtaatggccgaattcccgggcatatgtccggtaccgtcgactg

SEQ ID NO: 75012 - DNA, 607 bp, Homo Sapiens
  misc_feature (16)..(16): n is a, c, g, or t
  misc_feature (93)..(93): n is a, c, g, or t
gagatggaagccaacntcaaggtctgtggtcccatccagcctctgacccttggcatcttcagcctccagttcgccacccctaccgggcagctntgcccctgccagggattggccggcaggtggcactgctgctccctctggtggccgctgacgggagcagctcataaacaatggggacttggttgatggagggaggtggatggatctggggaggggcctgctcctccctccccaagcttctgtgctcagctgccaacttctggggcagaaagcagagctccaaggatccctgccccacagaacctgtcccgggggctggtgaacgtggccgccaagctgacccacaataaagatgtcagagacctgtttgtggacctcgtggagaagtttgtggaaccctgccgctccgaccactggccactcagcgacgtgcggttcttcctgaatcagtattcagagtctgtccactccctcgatggcttccgacaccaggccctctgggaccgctacataggcaccctccgcggctgcctcctgcgcctgtatcatgactgaggtgcctcccaacgctccgcccacgctgacaataaagttgctctgagtttgg

SEQ ID NO: 75013 - DNA, 1407 bp, Homo Sapiens
caggagcgaggcctgggtgttgaatcggcacgagggcgccagtcccgagcagtgctcgctcctgctcggggcgctgcggccccgggcgtcgccatgaccagtgagctggacatcttcgtggggaacacgacccttatcgacgaggacgtgtatcgcctctggctcgatggttactcggtgaccgacgcggtggccctgcgggtgcgctcgggaatcctggagcagactggcgccacggcagcggtgctgcagagcgacaccatggaccattaccgcaccttccacatgctcgagcggctgctgcatgcgccgcccaagctactgcaccagctcatcttccagattccgccctcccggcaggcactactcatcgagaggtactatgcctttgatgaggcctttgttcgggaggtgctgggcaagaagctgtccaaaggcaccaagaaagacctggatgacatcagcaccaaaacaggcatcaccctcaagagctgccggagacagtttgacaactttaaacgggtcttcaaggtggtagaggaaatgcggggctccctggtggacaatattcagcaacacttcctcctctctgaccggttggccagggactatgcagccatcgtcttctttgctaacaaccgctttgagacagggaagaaaaaactgcagtatctgagcttcggtgactttgccttctgcgctgagctcatgatccaaaactggacccttggagccgtcgactcacagatggatgacatggacatggacttagacaaggaatttctccaggacttgaaggagctcaaggtgctagtggctgacaaggaccttctggacctgcacaagagcctggtgtgcactgctctccggggaaagctgggcgtcttctctgagatggaagccaacttcaagaacctgtcccgggggctggtgaacgtggccgccaagctgacccacaataaagatgtcagagacctgtttgtggacctcgtggagaagtttgtggaaccctgccgctccgaccactggccactcagcgacgtgcggttcttcctgaatcagtattcagcgtctgtccactccctcgatggcttccgacaccaggccctctgggaccgctacatgggcaccctccgcggctgcctcctgcgcctgtatcatgactgaggtgcctcccaacgctccgcccacgctgacaataaagttgctctgagtttggagactggtcctcgctccggggagcaagtggggggcgtgcagatgtgcctgtgtctgtctctgagcacctggtgtccgtgtacaaggatggatgtgtacagtggctccttgggaactgagacatatctcagggaatggtgtctgtgctcagcccatccaccagaagagtctgctcacaagccaaaaaaa

SEQ ID NO: 75014 - DNA, 856 bp, Homo Sapiens
ctcatcgagaggtactatgcctttgatgaggcctttgttcgggaggtgctgggcaagaagctgtccaaaggcaccaagaaagacctggatgacatcagcaccaaaacaggcatcaccctcaagagctgccggagacagtttgacaactttaaacgggtcttcaaggtggtagaggaaatgcggggctccctggtggacaatattcagcaacacttcctcctctctgaccggttggccagggactatgcagccatcgtcttctttgctaacaaccgctttgagacagggaagaaaaaactgcagtatctgagcttcggtgactttgccttctgcgctgagctcatgatccaaaactggacccttggagccgtcggtgaggcccccactgacccagactcacagatggatgacatggacatggacttagacaaggaatttctccaggacttgaaggagctcaaggtgctagtggctgacaaggaccttctggacctgcacaagagcctggtgtgcactgctctccggggaaagctgggcgtcttctctgagatggaagccaacttcaagaacctgtcccagaggctggtgaacgtggcagccaaactgacccacaataaagatgtcagagacctgtttgtgaacctcgtggagaagtttgtggaaccctaccgctccgaccactggccactcagcgacgtgcggttcttcctgaatcagtattcagcgtctgtccactccctcaatggcttccgacaccaggccatatgggaccgttacatgggcaccctccgcgggtgctcctgcgcctgtatcatgactgaggtgcctcccaaggctccgccacgctgacaataaa

SEQ ID NO: 75015 - DNA, 295 bp, Homo Sapiens
ggcacgaggtatatcttccttgacagcaaaggcctagaatatcctgcagtggtagagtttgctccattccagaagatagccaaaaagaagctgagaaaaaaagatgccaagactggaagcatcgaagatgatccagaatataagaagtttttagaaacctactgtgtggaggaagagaagaccagtgccaaccctgagactctgctgggggagatggaggcgaagacaagagagctcattgctagaagaaccacacctcttttggaatatattaaaaatagaaaattagaaaagc

SEQ ID NO: 75016 - DNA, 1647 bp, Homo Sapiens
  misc_feature (775)..(775): n is a, c, g, or t
gctggaccggtccggattcccgggatatcgtcgaccacgcgtccggttgtcccgcgagccgccgaccaggcctcgaacgggatggcagaggaggtgaggagggaggaagcgtccggagtggggcgggcccggactccgacccccggggcgcttccagccccccagctggtcaccgaggcaccgccgcttcacccaggccagtagccgccccctcgcgcaccccggccccgcctcacacgcgcgcccaagcgagccccgggctcccctcgggcccagcgtggcgcaggggtcagtggttctctcgggtctcgggacaggtgagcaccctgatgaaggccacggtcctgatgcggcagcctgggcgggtgcaggacatcgtgggcgccctccgcaagggcggcggagaccggttacagatttctcaatatggtcatgctgcttcctctaattggacagaaggcgcccacaccagtacctacggccgatattatcctccccaagccagcggctccccagtgatttctgattttgacatgaccttgaacaggtttgcatataatggaaagcgatgcccttcttcttacaatattctggataatagcaagatcatcagtgaggaatgtcggaaagagctcacaacgctccttcaccactattacccaattgaggatcgacccaccaccgggaccgtcaaggaaaagctacctcaatatggtggaaatgggggaccaaagcgcacaatctcctatgtcagcagaagattcagaagtttaangatagcccaggtggttagagagtccaatgcaatgctcagggagggatataagaccttcttcaacacactctaccataacaacattccccttttcatcttttctgcgggcattggtggatatcctggaagaaattatccgacagatgaaagtgttccaccccaacatccacatcgtgtctaactacatggattttaatgaagatggttttctccagggatttaagggccagctgatacacacatacaacaagaacagctctgtgtgtgagaactgtggttacttccagcaacttgagggcaaaaccaatgtcatcctgctgggagactctatcggggacctcaccatggccgatggggttcctggtgtgcagaacattctcaaaattggcttcctgaatgacaaggtggaggagcggcgggagcgctacatggactcctatgacatcgtgctggagaaggacgagactctggatgtggtcaacgggctactgcagcacatcctgtgccagggggtccagctggagatgcaaggcccctgaaggcgcaggctccagcccggcctgcaggccgtggtgaggaggggcgcctccccagagtctgctcccccgtgaacacagagcagaggccagggtggccagcagtggctgggtccttccgcgcccctccgtcctcctttccctgagcaccttcatcaccagaggcttgaaggaaccccgccatgtggcagggcacaggcactgttcctggtgaaccttggaccacagcatgtcagtgctctagggattgtctactccagggattttcttcaaaatttttaaacatgggaagttcaaacaaatataatgtgtgaaacagatcaaaatttttaaaat

SEQ ID NO: 75017 - DNA, 1058 bp, Homo Sapiens
  misc_feature (702)..(702): n is a, c, g, or t
  misc_feature (769)..(769): n is a, c, g, or t
  misc_feature (953)..(953): n is a, c, g, or t
ggcctgggtggcgaatcggcacgaggcggggctgtcgttgtcccgcgagccgccgaccaggcctcgaacgggatggcagaggaggtgaggagggaggaagcgtccggagtggggcgggcccggactccgacccccggggcgcttcgagccccccagctggtcaccgaggcaccgccgcttcacccaggccagtagccgccccctcgcgcaccccggccccgcctcacacgcgcgcccgagcgagccccgggctcccctcgggcccagcgtggcgcaggggtcagtggttctctcgggtctcgggacaggtgagcaccctgatgaaggccacggtcctgatgcggcagcctgggcgggtgcaggagatcgtgggcgccctccgcaagggcggcggagaccggttacaggtgatttctgattttgacatgaccttgagcaggtttgcatataatggaaagcgatgcccttcttcttacaatattctggataatagcaagatcatcagtgaggagtgtcggaaagagctcacagcgctccttcaccactattacccaattgagatcgacccacaccggaccgtcaaggagaagctacctcatatggtggaatggtggaccaaagcgcacaatctcctatgtcagcagaagattcagaagtttcagatagcccaggtggttagagagtccaatgcaatgctcaggnagggatataagaccttcttcaacacactctaccataacaaacattcccttttcatcttttctgcggngcattggtgatatcctggaagaaattatccgacagatgaaagtgttccaccccaacatccacatcgtgtctaactacatgggattttaaatgaaagatggtttttctccaggggattttaagggccaagctcctacacaccttaccacaaggaacaggctcctgcgtgtgaaggaactccgggntaacttcccaggcaactttgaggggcaaaaacaaatggtcatcccgtgcttgggaaggaattctaatcggggggacttcacccactgggccccaaatggggggtt

SEQ ID NO: 75018 - DNA, 1297 bp, Homo Sapiens
  misc_feature (79)..(113): n is a, c, g, or t
aaaatgataatcatataggggctagcggcgtttttcgaacgaccgagcgcagcgaagtagtgagcgaggaagcggccgnnnnnnnnnnnnnnnnnnnnnnnnnnnnnnnnnnncagtcgacggtaccggacatatgcccgggaattcggccattacggccggggaggggtgggctttgcgaagatggcggcgctgggggtgctggagtccgacctgccaagtgccgtgacacttctgaaaaatctccaggagcaagtgatggctgtaactgcacaagtgaaatcactgacacaaaaagttcaagctggtgcctatcctacagaaaagggtctcagcttcttggaagtgaaagaccagctgctgctcatgtaccttatggatttgacccacctcattctggacaaagcctcaggaggatctcttcagggacatgatgcagttttgagactggtagagattcgaacggttttggaaaagcttcgtcccttggaccaaaagctgaagtatcaaattgacaagctgatcaagactgcagtgacaggcagccttagtgagaatgacccacttcgttttaagcctcatcccagcaatatgatgagcaagttgagctctgaggatgaggaggaagatgaagcagaagatgaccagtctgaggcttcagggaagaaatctgtgaagggagtgtctaagaaatatgttcctccacgcttggttccagtacattatgatgaaacagaagctgagcgggagaagaagcgtctagaacgagccaagagacgggcattgagcagctctgtcattcgtgaacttaaggagcagtactcagatgctccagaggaaatccgtgatgctcggcatccccatgttacccgccagagtcaggaggaccaacacaggattaactatgaggagagcatgatggtgcgtttgagcgtcagtaagcgagagaaaggacggcgaaaacgagcaaatgtcatgagctcacaacttcattcccttacacacttcagtgacatcagtgctttgacagggggaactgttcatcttgatgaggatcagaatcctattaagaagcggaagaagatacctcagaaaggtcggaagaaaaaaggttttcggaggcggcggtgattatgggtgtacatatttgtatattttttgtcatcctgagatacttctaatttcattgtatataggtggttttccctggaattcattaattgtttgctttggacatgtggaaagagccttactaataaaattgattttacttatgaattaaagcccctttttgcac

SEQ ID NO: 75019 - DNA, 709 bp, Homo Sapiens
taggctaggtacgaggcctgggtggttgaattcggcacgagggcggcgctgggggtgctggagtccgacctgccaaggtgccgtgacacttctgaaaaatctccaggagcaagtgatggctgtaactgcacaagtgaaatcactgacacaaaaagttcaagctggtgcctatcctacagaaaagggtctcagcttcttggaagtgaaagaccagctgctgctcatgtaccttatggatttgacccacctcattctggacaaagcctcaggaggatctcttcagggacatgatgcagttttgagactggtggagattcgcacggttctggaaaagcttcgtcccttggaccaaaagctgaagtatcaaattgacaagctgatcaagactgcagtgacaggcagccttagtgagaatgacccacttcgttttaagcctcatcccagcaatatgatgagcaagttgagctctgaggatgaggaggaagatgaagcagaagatgaccagtctgaggcttcagggaagaaatctgtgaagggagtgtctaagaaatatgttcctccacgcttggttccagtacattatgatgaaacagaagctgagcgggagaagaagcgtctagaacgagccaagagacgggcattgagcagctctgtcaattcgtgaactttaggagcagtactcagatgctccagaggaaatccgtgatgc

SEQ ID NO: 75020 - DNA, 626 bp, Homo Sapiens
cttttttgaggaattatcagggaagtgaggaaatgtttgggagaggactttctaagctctatttaggtgttagatctaattacttatagattctgtagtctggtgaaggtgtgggtgacgtgatgagaggtttgagaaatgggtgaaatgaaatgggggatatgtaggtcaaatcaaattaaagatgatttttttaatgtgaataaagttatgttctgatagtttgtacagaaaaaataaaatggatgcccatgttttattgctattactaaatgtcaagattgtatgctattatgtcttgtaaatttcttttgttggtgtaaatatggaaatgccacattggttaagtgccatcatttgtaatgcaatgtgtcacttgaaaagagatttgaagaaactgacaacttcaaaaacaaatgagaagcccaaggaactgtgagcaattaaaagcaaaccgcgacaccctttgtctccaccacacatagtgtactttggaagcacaacgtccaggctggtaccgcagcgccatgcccattcctcgcctcgttcataggacacttcactgccattttctattcacataaaagaaaaataaatgtggaaatttcatccctggaaaaagagaa

SEQ ID NO: 75021 - DNA, 613 bp, Homo Sapiens
ggccaggtgaggttggggcctgtgggccgccagtccatacggtgctgtcactgcccatcttcggtgacaccctggggtgaggtgctcagcaccttcctctcgaggagccacattttcctcctttgtgttaggggacataacaagctctgctgggcttgagggacccagaccaggtgtctgcagtcagctcctgagacacagctggccggcacaacaggtgttacatcaggggtttcctgtggccgtttgaactttgagcatttatctaaattaaattggcccagggttggctggtgggtcacccagcagaggcttctccccatagcacgaggatgtgttgcctgggcacggtgactgcggttattcctggaggtcggcagacatgccaaccttgggctatttgagctggagaagctatgtgatgctagccggtggctttttgggctaggccccagtttgaggctcccctgggaactagagccaggaacagccagtggcactgacaaggggacggagtccaaggcgttattgggccacctgacagctggacagaaaaggggcagacacaccgaggatgcgatttaaaataaatgcagatgttttttaggaaaaa

SEQ ID NO: 75022 - DNA, 988 bp, Homo Sapiens
cagtcgacggtaccggacatatgcccgggaattcggccattacggccgggggacgggaaggagccgagcttgggtcatggcggcgccgggcgcgctgctggtgatgggcgtgagcggctcggggaaatccaccgtgggcgccctgctggcatctgagctgggatggaaattctatgatgctgatgattatcacccggaggaaaatcgaaggaagatgggaaaaggcataccgctcaatgaccaggaccggattccatggctctgtaacttgcatgacattttactaagagatgtagcctcgggacagcgtgtggttctagcctgttcagccctgaagaaaacgtacagagacatattaacacaaggaaaagatggtgtagctctgaagtgtgaggagtcgggaaaggaagcaaagcaggctgagatgcagctcctggtggtccatctgagcgggtcgtttgaggtcatctctggacgcttactcaaaagagagggacattttatgccccctgaattattgcagtcccagtttgagactctggagcccccagcagctccagaaaactttatccaaataagtgtggacaaaaatgtttcagagataattgctacaattatggaaaccctaaaaatgaaatgacaatgattttgtatcagtggtccaaacagaactaagcataaatcattgtgccatcccaaacctcgttccagccgccttgcccatactagattctaaatgtttctaaaggcaaaccccaatgtgtcaagacagacttgtttaggtgtaattttaggaattatgctggttcatcaggaagcagagggggagttttaaaagtcaagcttaaattgaagtttaaattcatctataaccaaatcaaatgatcagaggaaattctgtaatcaatgctggaaatcgttacattgtttagaacattcttgctcatgcctgtatttgcacaaataaatgaaacttcgctgtccttgg

SEQ ID NO: 75023 - DNA, 653 bp, Homo Sapiens
aaaggaagagaatcctaaacataatgtcagggtagtagttaccctcgggctgaagggtaaaatcaggaaaaaggacagaggaggagcagatgttagggtcagaaccctggttctttggttgtgttgtaagttcacaagtgattaccatattattcaaatacatttacacagaggcccaggcacagacaaggatgaaataggagccaaggtatgctatgagccaaggattatgagtaatccaattttgtgcactttaagccatttgaaaaacagaaaagcaaaacaacaaaataatttttaagaaattgaatatagggtgttatgctctgaatgtgtccccctaaaattaatcaccaatgtcataagattaggaagtagggctttaaggtagtgattcagtcatgaagggagagtgttcacgaatgagtttaggatccttacacaaggactggatggagtgggcttcccctgttttgcccttccaccttctgccatgtgaggacacagtgcatctcctcctgaagacacagtgcacaagataccatcttggatgcagagaccagaccctcaccagacaccaatcctgctggcaccttgatcttggacttctagcctatggaactgtgagaaatacatttctgttcttcagaaaa

SEQ ID NO: 75024 - DNA, 505 bp, Homo Sapiens
aagagcagcacttcgtactagataagcacaatcatagccccaccgtgatgagctgctagtctgaataacattccctgacttagggaaaggcacacaaaaacatataaagaatatgtctattttcatatgtgtgatactgacagagccatggtattcctaaaatataggtttctcttttttcttgtattcttagcaaattgcatttattcactacattacaaaccatcactgatgtatccaaaatagcacacatagttcagtatgaaaataagagaataaaatctgttataagcaagtgatttaggtattttcttttgtgtttatgcattatctgactatattaaaacctgtttttctatttaccttctatcagttttctctaccaattatgttttttcaatgctctataagaatgaatatggaaattatatttcttttttctgtaaaagagttgcaactactttattatatttagaaatccaataaacttcttattacatttaaa

SEQ ID NO: 75025 - DNA, 1849 bp, Homo Sapiens
  misc_feature (89)..(105): n is a, c, g, or t
ataataatttacttacttataatgtcatcctctcctcctacacggctggtaccggtccggaattcccgggatcggcggcggcggctcannnnnnnnnnnnnnnnnagccccgtagaaccgagggggtcggcccgggggtcccgggggaggtggagatggtgaaggggcagccgttcgacgtgggcccgcgctacacgcagttgcagtacatcggcgagggcgcgtacggcatggtcagctcggcctatgaccacgtgcgcaagactcgcgtggccatcaagaagatcagccccttcgaacatcagacctactgccagcgcacgctccgggagatccagatcctgctgcgcttccgccatgagaatgtcatcggcatccgagacattctgcgggcgtccaccctggaagccatgagagatgtctacattgtgcaggacctgatggagactgacctgtacaagttgctgaaaagccagcagctgagcaatgaccatatctgctacttcctctaccagatcctgcggggcctcaagtacatccactccgccaacgtgctccaccgagatctaaagccctccaacctgctcatcaacaccacctgcgaccttaagatttgtgatttcggcctggcccggattgccgatcctgagcatgaccacaccggcttcctgacggagtatgtggctacgcgctggtaccgggccccagagatcatgctgaactccaagggctataccaagtccatcgacatctggtctgtgggctgcattctggctgagatgctctctaaccggcccatcttccctggcaagcactacctggatcagctcaaccacattctgggcatcctgggctccccatcccaggaggacctgaattgtatcatcaacatgaaggcccgaaactacctacagtctctgccctccaagaccaaggtggcttgggccaagcttttccccaagtcagactccaaagcccttgacctgctggaccggatgttaacctttaaccccaataaacggatcacagtggaggaagcgctggctcacccctacctggagcagtactatgacccgacggatgagccagtggccgaggagcccttcaccttcgccatggagctggatgacctacctaaggagcggctgaaggagctcatcttccaggagacagcacgcttccagcccggagtgctggaggccccctagcccagacagacatctctgcaccctggggcctggacctgcctcctgcctgcccctctcccgccagactgttagaaaatggacactgtgcccagcccggaccttggcagcccaggccggggtggagcatgggcctggccacctctctcctttgctgaggcctccagcttcaggcaggccaaggccttctcctccccacccgccctccccacggggcctcgggacctcaggtggccccagttcaatctcccgctgctgctgctgcgcccttaccttccccagcgtcccagtctctggcagttctggaatggaagggttctggctgccccaacctgctgaagggcagaggtggagggtggggggcgctgagtagggactcagggccatgcctgcccccctcatctcattcaaaccccaccctagtttccctgaaggaacattccttagtctcaagggctagcatccctgaggagccaggccgggccgaatcccctccctgtcaaagctgtcacttcgcgtgccctcgctgcttctgtgtgtggtgagcagaagtggagctggggggcgtggagagcccggcgcccctgccacctccctgacccgtctaatatataaatatagagatgtgtctatggctgaaaaaa

SEQ ID NO: 75026 - DNA, 684 bp, Homo Sapiens
  misc_feature (131)..(131): n is a, c, g, or t
ctcggccccgggccccgcgcccccggtttcggctcccgccgcgttgccctccagcaccgccgcggagaacaaggccagccccgcggggacagcggggggacctggggctggagcagctgctgggggcacgngacccttggcggcgcgggccggggagccagctgagcggcgtggggcggctccggtgtcggcgggtggcgcggcgcccccggagggggccatatctaacggggtttacgtactgccgagcgcggccaacggagacgtgaagcccgtggtgtccagcacgcctttggtggacttcttgatgcagctggaagattacacgcctacgatcccagatgcagtgactggttactacctgaaccgtgctggctttgaggcctcagacccacgcataattcggctcatctccttagctgcccagaaattcatctcagatattgccaatgatgccctacagcactgcaaaatgaagggcacggcctccggcagctcccggagcaagagcaaggaccgcaagtacactctaaccatggaggacttgacccctgccctcagcgagtatggcatcaatgtgaagaagccgcactacttcacctgagccacccaacctaaatgtacttatctgtccccatgtccccacaccagcctgttttcataataaactttattgtgacagcc

SEQ ID NO: 75027 - DNA, 1319 bp, Homo Sapiens
  misc_feature (59)..(354): n is a, c, g, or t
gcggccgcggctgtaggggagtgacaggatccgatgtacctatttaagaatttaagagnnnnnnnnnnnnnnnnnnnnnnnnnnnnnnnnnnnnnnnnnnnnnnnnnnnnnnnnnnnnnnnnnnnnnnnnnnnnnnnnnnnnnnnnnnnnnnnnnnnnnnnnnnnnnnnnnnnnnnnnnnnnnnnnnnnnnnnnnnnnnnnnnnnnnnnnnnnnnnnnnnnnnnnnnnnnnnnnnnnnnnnnnnnnnnnnnnnnnnnnnnnnnnnnnnnnnnnnnnnnnnnnnnnnnnnnnnnnnnnnnnnnnnnnnnnnnnnnnnnnnnnnnnnnnnnnnnnnnnnnnnnnnnnnnnnnnnnntttaagaggtcactcagttgtgctgtggagaatggaccggagggacaagaggggcagcagggatggtgggctggagtagggtgctggcaatgagggagtctggctcagatgtgggatgtgtatggaagaatataaatgatggtgtggatgtcagggtgagggaggagacaaaaccacgatgacccctagctttgtggcctgaactgtgggtggctgaggggatcgttaattgaatggggcagactgaggcttgtgaggaagatcagagtctgttcttgacatgagatgcccttcagacatctcttcactcaggtccaactagggatacagaaacactgaatatttcaacagcagaaattgaatggggggattgatagcgctggcgagggaagcagctggaaagagacagatggcaccctgagacagcccagaggtgaataggacccccaggctgcagggataaagctcagtggtggtttacctcaccggggaccagggtcacacagcaaagctggaacaacagaggcgtgttgtgggggagcctcagaggggacaaaacctctgcctgagatcccaccccaggtgggcatgggggccactgaggttggggatgaaaatgccggtaccgtcagtgcacagccctgttccagacagtgctgcctggaagatttctgggctctcctgaggcgccaccccgcacctgagccacctccttggactcctgtcctctaccccttgaggacctccctcccttctaccctagctgtcttcttgaacttgggactctcctttcccaagacttccatcactagctcctggagggactggactttgcatcttcccttcgcgtggagcctcagtgtgagaggccctagccaatgcgtgcatgtcagaggtggtggggaccacatcagaagaagaggggggtgatgaaattaacaaataaaaagtatggggaaaaaaaa

SEQ ID NO: 75028 - DNA, 556 bp, Homo Sapiens
  misc_feature (495)..(507): n is a, c, g, or t
gaccccagagaagccactgtcaggaaaggaagtgaaccctactgaagccagagaattcaccccggccaaagcaggccctctgggtccagcccctcattccacaccacaccagtattgcatccatctactgcagctacacatcctgagggcagcaccacccactctggcctgctggcccatcgcaggactagcccaggcacctgccgggcattgcaggatatccagtggggcctgtgactgctccctgatgcgtcagaagagaagtgttgcactttagtggaggagctgaggagcacctgcccccttgtagcttgagttccttttggtaacagtagcagcctccatggtggtgtctgggatgcacgtgcacccgctgccttcagctgtatgtgtgtgttcctgctggagttgtgttactgacaggataatgacattacaaagaaattgtgttatattcaactttgccttgataattattgtaaacactttgttcannnnnnnnnnnnnattcacaaactaaatccaccaggaaattataaagttatttaaaaaccgt

SEQ ID NO: 75029 - DNA, 1809 bp, Homo Sapiens
  misc_feature (136)..(136): n is a, c, g, or t
  misc_feature (831)..(841): n is a, c, g, or t
aacagaccaatgcaggggaggtggcctcctcactctcaagtactgaaattcggagacatagccagaggccgacacaagtgcggaagaggaagagccaccgcctgttaaaatagcctggaaaactgcggcagcaagngaaatccttaccagcttccattacgatgcacaaagggagcctggatttgcagaagtgtaacatgtctccagttgtgaaaattgaacaagtgtttgctcttcagaatgctacaggggatgggaaatttatcgatcaatttgtttattcaacaaagggaattggtaacaaaacagaaataagtgtcagggggcaagacaggcttataatttctacaccaaaccagagaaatgaaaagccaacgcagagtgtatcatctcctgaagcaacatctggttctacaggctcagtagaaaagaagcaacagagaagatcaattagaactcgttctgaatcagagaaatccactgaggttgtgccaaagaagaagatcaaaaaggagcaggttgaaacagttcctcaggctacagtgaagactggattacagaaagggtcggcggaccggggagtgcagggctctgtcagattcagtgacagctccgtctccgcagcgattgaggaaactgtggactgagattcctgtacaatttcatcccagaaactccagacttgtagtctccatgcaagatttctttgtcggcggcttgataaacaggttctttgttttcgattttgatttcgccaatcatcattattggcattttcctgcctggtttcttcttcaagactctgaacaattgctttaacagtcaaatgannnnnnnnnnncggtttgagctggatgggtacagcttaaatcatgggtccagcctaaaaaccaccatttaacttacactgatcaatttcaacatggactgtatttggttttttgtttttaaataaagcatcattaatgcacatctgcaggggtttgccaaacagcccaaactgtatacattacaatcattaaaagttcttattttttttaatattagtgccgttatcatggagaacagcatgacagctgtctttggcagtctgtcatttttctagcattttcagaaactcatcggaaatggcggtacctgtgtttcccttcgaaagcctctcagtacagcactcctgttcctctgttaaaactccttgttaatccagtgatcttttaggccaaggaaatattttgtgatggtgttctgggtccatacaccagcaatgaaggagatagatttgtgtacttgtgttttttaatcagcattaacatgggcaggcaccctcatttatagatgtcaggaaacattcagtgaaaaacttgtagaatgggatgtgataacgaggttccagtaatctgagcagtctaacgaggcccacctcctccaccacagaacgtggctatgttccaagtgctactctcactcagcctgttgcggatcttcatggcctcaggagacttgtttctccatgggctcttctggactgcacacttccaccatagcttgctgggttgatctagatgtctgtttgttgtatggaaattttgggggaaaaaatccaaaacacaaactgtgggttgaaatattaaccgtctccttggttccttggtattcaccgtgcctgatctgcacatttcatcgtggctgtttctgtatagcctatactgcattagcccaagagattgttgctttgtaactttttgcactattgttttggctggatttgtattacacacagttttaaaaaaaacaattccacactaaaaa

SEQ ID NO: 75030 - DNA, 872 bp, Homo Sapiens
tgggagcggcaccaccgcctctgtggtcagaacctgcatggccagagcccccacggccagggccggccgctgcttcctgtaggcaggggctcctctgccaggtccgccgactgcagcgtgcccagcccagccctcgacaagacctcggcaaccacatcgcgttcctcaacacctgcttctgtgacagctatcgacaccaacggactctgagccccggactctgcttaccctgatggctgctcagcaccacagagtgcttgggctgagggactgactgttggaacccgtgcatgtagctgccgggtcatcagcaagaaatgaattggaggcaggaagagtccaagcctgaataataacaccccacagcctctctgtgcacttgctgtctgcggagccagtgtgccattctctgcacatgggcagccagcctgagctgcctcctccatggctttcctggtttgttcctctctccactgaagctgacttagccggccccttttcagtgtagaccaccagctcccctccccatctccttgagtcagcagactgtccaatgtgctcagccaggctggaggcggcaggcggcaggcagcaggctgtggaggaggcccctcggtcagggagcggcctgcctcacccctgaatagctccttcggccccatctccatcctcagcagatgacactgattggcctcacggggacttgggtaagcaacaggcggcattcaggactcttctcaaccctgctgttcagacttgataagatctcagagtccacaggaaagaagtcactgttgcaataaaagcacccgtagtagcaaaaacataaaacaaataaaacttcccccacatcacagatgattttggacaag

SEQ ID NO: 75031 - DNA, 693 bp, Homo Sapiens
  misc_feature (12)..(12): n is a, c, g, or t
ctaacattcttntgttcatccctgttgcccccacaggaaacatcccaggaaaaaccggtcagtgttccttcctcccctgatccttaggtttctgaaatagggttctgttacatcctcttcgatagcctgtttaaaatgtttagaaggtctggagctcaaaaatgcgttcttccacattgataatttagtaaactgagaacattgacatcactacagggcagcataagaggttgcttacatgtggtagcagctctggtttgattcaagttgctaccatgtacattgacagcacatataccataaccagcgtgttgggttgaattgcactttctacctttgtatgagatttacagactttccttctgggtttgtatcatgaccagaggggtactatagggttggtttatactgcaatatagaggatcagaagccatttgatttggtaggtgtgtcagaagggagaatgatggcagacgaactgctggaagaggtcagaagatagccatgctaaaatgcaattatatcctcatgtttatcccaaactaatcttggacttttccactcattagctttgttttgcccttgtttcccttgaaggtttaagttcaaccatattctgtcaactgttcagtttcagtggaatcttgtatttctggttcattataacaaattgttcgcttaaatccaaaaaaa

SEQ ID NO: 75032 - DNA, 666 bp, Homo Sapiens
  misc_feature (568)..(605): n is a, c, g, or t
tcctttaatatgaaccaacaatctggagcacaccgaagggcaatctaaattgtggcttgaaggactgcactaaaacccactaaaaagatgcgaaaacctgatgagggcaaaccagttaaacctaacaccctgccttgtctgggctcatcacctctccctatcccagactaactttactgtgaaatcctaccacattccatgtctgaatttttggattcggggtggattttcgttgtccgtggaagaacacatggatctctctggctttctcacccaagttggccacttacgctaatcctggaagtatgatcacttttgaacctgccccttaaccttgacgaggatacaaaagtgaaagcatcatcccccaaaggatcactgcacagtcctactacagtatttttaagtagccctctaaatacttaattttaagcaaaatcccttggccgcacttttaaggtttttttatatgtgtatagttaccaacctaaaaataaaaaatccgaacagcatacttgaagaatgtaatactcaaactctcagtgcttccttatggtttctaataggnnnnnnnnnnnnnnnnnnnnnnnnnnnnnnnnnnnnnnggacagggttgggagggtcttttatttttcctttgaaatacagaagtgatgtttttaaatg

SEQ ID NO: 75033 - DNA, 1048 bp, Homo Sapiens
  misc_feature (31)..(32): n is a, c, g, or t
  misc_feature (38)..(38): n is a, c, g, or t
  misc_feature (63)..(65): n is a, c, g, or t
  misc_feature (67)..(67): n is a, c, g, or t
  misc_feature (69)..(69): n is a, c, g, or t
  misc_feature (96)..(97): n is a, c, g, or t
  misc_feature (100)..(100): n is a, c, g, or t
  misc_feature (108)..(108): n is a, c, g, or t
  misc_feature (112)..(112): n is a, c, g, or t
  misc_feature (115)..(115): n is a, c, g, or t
  misc_feature (126)..(126): n is a, c, g, or t
  misc_feature (155)..(155): n is a, c, g, or t
  misc_feature (175)..(175): n is a, c, g, or t
  misc_feature (217)..(217): n is a, c, g, or t
  misc_feature (227)..(227): n is a, c, g, or t
  misc_feature (229)..(229): n is a, c, g, or t
  misc_feature (282)..(282): n is a, c, g, or t
  misc_feature (317)..(317): n is a, c, g, or t
  misc_feature (332)..(333): n is a, c, g, or t
ggataaaaggtatcatctaatgcaagcacanngatcanggcagctttaggatgtctgatgctnnntnanaatatgcttcccatcatactggggagnnaanggagtcanggtntangggtatcgtcncaggaaatagaagtgaaatgtcttataangtgaaacttccccttgcccntgcaatgtagctggcatcaaaacggaggcaaaccgatgattnaaccaccacntnggaaaacccaatgggacatgtaaccagaggtcctggagtgggtgtggttcccntatccccaagtcactcctgtttgtttgttttcttnggggtttgttatttnntgggctggcaatccaaaatagaaaatctgatcctttgaggctctaaaggaaaatcagctgcctctaccaaccaccctctatcagcagtggcccaggaaggaggtcaagcatcttcggccgatatttaaacatgggcagcttccttcaggatgatcaccgaggctcccgtgactttgaactccctactctccagaatccaggggctatagcgatggggactgcggaattacgagggctggctgttttacaccggtcacattttctattggcagtgactgattcatgggaaagggctttgaaggaactacttcagtgcacacacaaggtacgaacctctcaggcctttcgaagaactttcataattcatgaaagcccagttctgaagattcacgtatccatctggagacctacaggaagaaagtgattgggttcctctggttcttgcctgcttcactgtggatgggaagaggtgacaacctcagtctccctttgggacctgtccaagggtaggcaaccaccttcaccttcacacagattgaggagacactggactttttacccattttctttaatcttcaatattaatattgtgtttacattgatgagaacaagagttaatgccctaccctctgctgggctgtttgtattgagttgcaatgtgaccagcgaaagctgcatttaataaatgaaagtacagactgtttcttccccaaaa

SEQ ID NO: 75034 - DNA, 651 bp, Homo Sapiens
gaattgaacagccacattgccagatgtgtgttccagaatagaagtgatgtggatgggtgggcaattgggaggagaaccaaaagggcctggatgagtcagagtttcaagaggaggcatttgaacaattcaagcaggagaaagaataaagcaagtttcaaagtccagaaggaacatggcatgtgtatataatgggagggagggagtgacaagagcagcatggagaggtttggataggtggccttcaaggtactttccaatcctaagtgcctgcagagtggaagctgctggtctcggagaagtctggaccacagagatcttctcccaacccaagcataccaaagggatgcgacacatgccggcagtaacagcggctcacttgggtacgatttcttgtgcacagatcctgcctttcccagataagcagtgaatctagtcctaatcaccccgttacacagagtggagaacagagggggtttgcccaggtattatgctgcaagtcagagctggggccagaatccagatagcctgtccttagtcccatgctcttctgtaatactccactagattgtattattgcagaaagcatctgttaaacacagaacttggcttttgttttccccagagaaaaaataaaagatactattggaaatt

SEQ ID NO: 75035 - DNA, 1040 bp, Homo Sapiens
  misc_feature (628)..(628): n is a, c, g, or t
  misc_feature (697)..(697): n is a, c, g, or t
  misc_feature (774)..(774): n is a, c, g, or t
  misc_feature (864)..(864): n is a, c, g, or t
  misc_feature (947)..(947): n is a, c, g, or t
  misc_feature (966)..(967): n is a, c, g, or t
  misc_feature (980)..(980): n is a, c, g, or t
  misc_feature (998)..(998): n is a, c, g, or t
aaatcataattaaatatatttaattctcaaacctttaggaaatgtaaaaagagtcacataataataaacacatatcataatgtgaataatatcatacgggctgctataaaggtctgtggtcagcatccctctgaggtaggcattattatcttcattttatggttgaggaaattggggcttgaagaggttaagtaatttcccacaatcacacaagtaggtagtggcacgctagcatcccatttctgttctatgggactgcaaagcccgatgctcacactcattccactataccttctcccttgagttcaaaaacttacaggagttctagacttttcaaactcacgatactaatcaagaacgattttaagtattaagagtttcctctgcttcattctgtttccaaaggaaaatatacgtcgcatgaactcatgatcatctcagcatgaactcctgagtgaaggctctcctcagcgtgactcaggaacatttcctcaggcattatctgtcgcacaggccttgccatccagctcgcttcttcagctctgacacccagtcggggttgtcatcttcctcctcaaagtccgtgtcctcctcatctagcccaggctctaagtcgctctggatccanaatgacagaatcgtgacctccatcaacactgtccgatgcttctgtttcttcagacagggggcctttcangaaccttctgaacctggtctatatattgtgtatgtttgaaaagcaagctgagatcagcatcttaaggatgttcacanagtgtcaggggtctctttgagcactgcttacgagtagtattttgctgtacttattacagaacactctatcgtctctgctgttaactggangtgatatggtgcatttccaagctgtagactgtatgggtaattttctccactgtcgtctatgagattggtgactggtttctcanatggcgactatacctttcnntccgtacctccangcactcactatttcatangcttcatcataggaccttcactgtctccctgacggctgtcat

SEQ ID NO: 75036 - DNA, 657 bp, Homo Sapiens
  misc_feature (19)..(19): n is a, c, g, or t
aaagactgggatcaccaanatagtttcaaaattctcagtttgtactaaagaccagaagatcagagaaggaaactttaatgctgtctagcctcctgctattaatgcaatcaaagaatacttttgcatatgtcttgataattaaatagtatttgttaactgtgatatgcatacacttatataagcagaattatgagttaaagtaatacttagcaatatgattttataatggctcctcattatgcttgctgttgaaccttttatgaggagtgaatataaagtattggttttccctcacaaatttaaagattatgttattaatactattataactgcatcaatcaagtcagataaaggcaactataaaatagtagtagtgtttgtttcctatctcaagggcgaaattttatgggaactcaatttattatgcagtttttaagtttaaaataccaagaaagatgtcactagattctcttctatgtgatttttgttttttatataaagcagtgtagtggtgtttagaagctgaggccacctgtaaggcaaatctgccttaagtgtattatgtgttacttaaaggcaaatttgtgatctaaaagtacaagagtgatttttgagctaggattataaaatacataataaagatgtgagaagataaaa

SEQ ID NO: 75037 - DNA, 672 bp, Homo Sapiens
gaacaatcagcagtgtcttggccacggtggataacgacaaggaaaaacaatcgcttcaatgatgggaaggtggatcccgccgggaggtactttgctgggaaaagacttcaaactgtgaagttgcctgttgataaaacaacttcatgctgctttggagggaagaattactctgaaatgtatgtgacctgcgcccgggatgggatggaccccgagggtcttttgaggcaacctgaagctggtggaattttcaagataactggtctgggggtcaaaggaattgctccctactcctatgcgggatgaggacaggtcttctttcctgccagagggagctctgaagacaactagagaattctgggcctgaaatttcaatctagttagaaagaaaaatgaggcaatgattttattaacagcgttaagttttaatttacaacttttaaaaggcagagcatttttaacaaggggtgacaggtggttttgataacacacttataaggctttctgtaaaaggtactatagaagggcgaagaatcgttcaactgtcaatcagcctcttgattctttgtaaattgccagggtgggtgggtacatatctcttcttgattctgcatttcatacttaactatattaaagcttcaaggaacaataaatagtaacctggtaatgaaaaaa

SEQ ID NO: 75038 - DNA, 834 bp, Homo Sapiens
  misc_feature (63)..(71): n is a, c, g, or t
cttttggagatgttttatgatcaattccaaacatacagtacagggaaggtgaaatgagtaagnnnnnnnnntcatatttaagtccccgttaacactaagccatattattcaaaatgtgtttcaaaatactcagccagatcaccaaatctcagtcactaccttagtataaatattcactaagaaaatagtcaagcaacagaaatccattgtgagacaccatctagagagaacagctacactgctatatataatttattaacttagtagtttagtttctcaatatttagcaagtttaaaaattaccattaccattggtttatagtgccattaatataaatccataatttcaaagtcatcattcctttcactgtgaactaagacttcttaaaagataggtgtgggtgggggaacagtaatgactgtagctgatgggcagtgttcaaagccaaaaagactggcaagcttggaaaggcatacactatacatacacacactctcagtatactactgttccccttatttttgctgtacattcttgtctgaaaagatggtataaattattcccttaaatttgaaaaaacaattaagatgaatacattttcatcttcatttcaaaattatccttctaaataaaaaagttcctcatgtttgttaaatctgttcaaaagttggatttaaatactttcttcacaacatgtacaatgttttcacccttactgcctcattacaatcagtttggcaataagacctccagtgctttatcaaaaatggcattcaatagattataagattgttaaatctgcatttcaatcattcttaccacaatgaattata

SEQ ID NO: 75039 - DNA, 647 bp, Homo Sapiens
tgcccaaggccctcctggtgacaggtgccagattgagtggtggttgctgccaggcaggccacgctgtgttgacgctgcactcagcacgtgggtgttggctctgccggttttgtggtgtggggaccctacaggaggctgcggccctgagagcctgggatcagcgaggtgtccgacatcccttcctcaacggcaacaaaaactccccaagtcagcactttggttattttatagccacaaccctcttggaaaacagtggggaagactatggaacatagaaagtgtggatgtatcacttctctctaaaatgtcattgttagcactaattacaggttcatgtttttctgtgtatgtagcttttccctatatagctgaaaaagtattaaagtcaaatataaggtgggaatgggatggaagggaggagatcaatacaacttatatttttgcagtttctactggaagaaaaaagttttcaatacctagaccaacttgttgaatttttaaaacttatgcactataaatgcaactttctctactgctttctcagtgcctttaggaagctttcaaatttttttgtactgtggtttgtattaaatttgcaatattgatgtaaaatacatgacatgctagtacatgtttaacaaaaattt

SEQ ID NO: 75040 - DNA, 1271 bp, Homo Sapiens
  misc_feature (55)..(55): n is a, c, g, or t
  misc_feature (1178)..(1178): n is a, c, g, or t
ggtggactgggagctatgaaatgactaaattcctccttgcagtgttacccttcanagattgtataggtattctctcctcttcttcccccagtccccattacttatttgcacacttgttttaactgacttcctgttttgatatttatcaccaagaccataaactcatcaatatgaattttcttgatgtatactcacgactgtctttgatttatgttcctaaatttttttagatagggtatgttgtgcttggcagaattcttttttggcttaatttttacttcctttcccagcttgcttgagtcttccttaacctggttttctcttaacaccaatgatgaaccctgagaaaatgcctgcatttggcctttgcctagaacaggagctgagtatttaagatgtattatcctcgggtcatcctgaaaattaatgtattccctaaaatttcttcttgtctatcatcaaggcctttttttatttgttaagaatttttatattaaatgtaaaacatataaatattttctattgtataatcttggattcaacatctgtgaggatcatttttgtaagatacatagaatttgtgcatttctttatgaacttactgttagtgttcttggtttcggctgtttatgactcatgtttatgtacattctgctcccaaaatgtttttgtactctgcaactaattacttttggataacaaaagccttgtgtttaatgccctaaagtatttgggggtttccttgtgagagggtggccgaatcatctacctctctcttccatagttgctgtgcaatcgtacgggtaaaattcttaattacttacaaaaactgtgatagaggggagaggtacagatttggtttttaaattgattttaaaatactttatagaaatttagtaagaagtaaaggcaaaagactttttttccccccatcctaggaaaccccgagctatgattataatgtagaacagcctctattcagtgtctaaaatggggtcctcaaaacccacgaaagaaatagatccattttacctgaaattcatctcatgccctttatcttaccccttctggaaaataacttttggcctccttttttaaaaagaagctttgagggctggggcgctttatgaaggcaatattatgtaagggagaaagatccgccggggccccccaaaaanggcgacacgggcgacggtagacggccgcgtggtgtgggcccctggggccccgaggaaacctgttccacaaaccattcccttcggggagggggg

SEQ ID NO: 75041 - DNA, 966 bp, Homo Sapiens
cagtcgacggtaccggacatatgcccgggaattcggccattacggccggggagttggctaaattcttgcagaatatatgggaaaaaaatcatagcaaagaattcagcttccctcaaaagaaagctatttttgtttccttcactccactaaatttgaaccagtagcacggatcaacacgacttctgcaatgagagtataacggtagctcttggtacagtcatattcatatttttaaatctttctttgaccaaaactattgcattgttttcattacattttgactgcgttacttattaaggccgaatgactttgacacccccgtggattatttttatgatcacatcaaatttaaacaatgtccaaagtgtaactttaatgttatattttgtttcaaaccctctggtctaagattattgagaaagatgttttttcctcctccctcaaatatgttatctcttcatatataaacaaaataagttattccatgcttttcaggaactgtaaaaattatttcaaaaagatatttgaaaaagttttctctattctgggacacaaatgcttccatttatttcaaaagaagaagaagaaaaatggaatcttaatttaaaaaaatatatgtggtagtatctgctatgagatattcagtctctataacaaacacacgggacacagcttcttttaaaacccttgtttcagtccatattcaacttcatggaacttctgaaacatcattcaattttgaactttatttaagagcatttttgtactgctgtctctgactgtcatggaaagttctgtaattctaaggtgtttctggttttatttttaatttcttcatctgtaccacagtcaaattagcaaccatctcccccatcccttgggctttctgtagatcagtggatgttaggtttaaacttctgttttctttgatgaagctttcaataaaaaatgaaaataaaatcaatt

SEQ ID NO: 75042 - DNA, 1266 bp, Homo Sapiens
ggtccggaattcccgggatatcgtcgacccacgcgtccgcctcaccaaaatggcgctagctcggaagctgccgaggtgctaggagttgccgaagcaagtccggaagctaccgagcgagtccggaagttgccgaaagggagcagcggggaaggaggatggcggatatcatcgcaagactccgggaggacgggatccaaaaacgtgtgatacaggaaggccgaggagagctcccggactttcaagatgggaccaaggccacgttccactaccggacgctgcacagtgacgacgagggcaccgtgctggacgacagccgggctcgtggcaagcccatggagctcatcattggcaagaagttcaagctgcctgtgtgggagaccatcgtgtgcaccatgcgagaaggggagattgcccagttcctctgtgacatcaagcatgtggtcctgtacccgctggtggccaagagtctccgcaacatcgcggtgggcaaggaccccctggagggccagcggcactgctgcggtgttgcacagatgcgtgaacacagctccctgggccatgctgacctggacgccctgcagcagaacccccagcccctcatcttccacatggagatgctgaaggtggagagccctggcacgtaccagcaggacccatgggccatgacagacgaagagaaggcaaaggcagtgccacttatccaccaggagggcaaccggttgtaccgcgaggggcatgtgaaggaggctgctgccaagtactacgatgccattgcctgcctcaagaacctgcagatgaaggaacagcctgggtcccctgaatggatccagctggacaagcagatcacgccgctgctgctcaactactgccagtgcaagctggtggtcgaggagtactacgaggtgctggaccactgctcttccatcctcaacaagtacgacgacaacgtcaaggcctacttcaagcggggcaaggcccacgcggccgtgtggaatgcccaggaggcccaggctgactttgccaaagtgctggagctggacccagccctggcgcctgtggtgagccgagagctgcgggccctggaggcacggatccggcagaaggacgaagaggacaaagcccggttccgggggatcttctcccattgacaggagcacttggccctgccttacctgccaagcccactgctgcagctgccagcccccctgcccgtgctgcgtcatgcttctgtgtatataaaggcctttatttatctctcaaaaaaaa

SEQ ID NO: 75043 - DNA, 1885 bp, Homo Sapiens
  misc_feature (93)..(93): n is a, c, g, or t
  misc_feature (120)..(120): n is a, c, g, or t
  misc_feature (139)..(139): n is a, c, g, or t
  misc_feature (144)..(144): n is a, c, g, or t
  misc_feature (155)..(155): n is a, c, g, or t
  misc_feature (183)..(183): n is a, c, g, or t
  misc_feature (208)..(208): n is a, c, g, or t
  misc_feature (225)..(225): n is a, c, g, or t
  misc_feature (275)..(275): n is a, c, g, or t
  misc_feature (788)..(830): n is a, c, g, or t
  misc_feature (1823)..(1823): n is a, c, g, or t
tcatcatgcacccagctacactttgtccgctgtatgttgtgatgtgacgatacattcaacagaacagtatactgatcgaattatcgactcatntaggaattgccctcagccagaatcgcnacgaggctgaccgacatcntaatntacagagtgcntaaacacacatgaacagatcagagcatntagtgagacaacatgaaatgatacntatggagtgtgatcatntgcagtgaccaaaatgaatctgaagttgacccatctgtaaatgctgatcntaaacaaatgaatgaaattctggtgacacactgtctggaaaataatatgccgtcttctgatcttgcggatgaaaaggttgaaactgtgtctcaaccatctgaaagcccaaaagataccatagataaaaccaaaaagcctcgtactcgaagatctagatttcattctccatctacaacttggtcacccaacaaagacactccacaagaaaagaagcggccccagtctccatctcccagaagagaaactgggaaagaaagcaggaagtctcaatcaccatctcctaagaatgagtcagccagaggccggaaaaaatcccgttctcagtccccaaaaaaggatattgcaagagaaaggaggcaatctcagtctcggtctccaaaaagggatactactagggaaagcagaagatctgaatcactgtccccaagaagagaaacttctagagagaacaaaagatctcagccaagagtgaaagattcttccccaggagaaaaatccaggtcccagagcannnnnnnnnnnnnnnnnnnnnnnnnnnnnnnnnnnnnnnnnnnaaggagaaccagaaagtggtctaggtccagatctcattctaggtccccctcaagatgtagaacaaaaagtaagagttcatcatttggtagaattgacagagatagttactctccccggtggaagggaagatgggcaaatgatggttggagatgtccacgaggaaatgatcggtacagaaagaatgacccagagaaacagaatgaaaatacaagaaaagaaaaaaatgacatccatctagatgctgatgatccaaattctgctgacaaacatagaaatgactgtcccaattggataacagaaaaaataaactctgggcctgatccaagaaccagaaatccagaaaagttgaaagagtctcattgggaagaaaatagaaatgaaaattcaggaaattcttggaataaaaactttggttctggttgggtatctaaccgtggtagaggcagaggcaaccgtggcagaggcacttacagaagtagttttgcctataaagatcagaatgaaaatcggtggcaaaatcgaaaacccctctcagggaattcaaacagttcagggagtgaatctttcaagtttgtggaacagcaatcctataagcgaaaaagtgaacaggagttctcatttgatacaccagcagatagatctggatggacatctgcatccagctgggccgtgagaaagactttgccagcagatgtacaaaactactactcacgacgaggcagaaattcttcaggtccacagtctggatggatgaaacaagaggaggaaacatctggacaggattctagcctaaaagaccaaacaaaccagcaagttgatggttctcagctacctataaatatgatgcaaccgcaaatgaatgtaatgcagcaacaaatgaatgcacaacaccagcctatgaatatcttcccatatccagtgggtgttcatgctcctttgatgaacatccaacgcaatccatttaacattcatcctcagctacccttgcatcntcacacaggagtgcccctcatgcaggtagccacctctaccagtgtatcttcggggaataaca

SEQ ID NO: 75044 - DNA, 2449 bp, Homo Sapiens
aggggcgagagagtatgaagtcgacggcgcgccgaattcggcacgaggcgaccccggagtctccgcgggcggccagggcgcgcgtgcgcggaggttctcctcgtccgcccgttgttcagcgagggactctctgcgcgtgccgcagctgacggggaaactgagcgcacgtgagcggaggcctgtaggagctgtccaggccatctccaaccatgggagtgaggcacccgccctgctcccaccggctcctggccgtctgcgccctcgtgtccttggcaaccgctgcactcctggggcacatcctactccatgatttcctgctggttccccgagagctgagtggctcctccccagtcctggaggagactcacccagctcaccagcagggagccagcagaccagggccccgggatgcccaggcacaccccggccgtcccagagcagtgcccacacagtgcgacgtcccccccaacagccgcttcgattgcgcccctgacaaggccatcacccaggaacagtgcgaggcccgcggctgctgctacatccctgcaaagcaggggctgcagggagcccagatggggcagccctggtgcttcttcccacccagctaccccagctacaagctggagaacctgagctcctctgaaatgggctacacggccaccctgacccgtaccacccccaccttcttccccaaggacatcctgaccctgcggctggacgtgatgatggagactgagaaccgcctccacttcacgatcaaagatccagctaacaggcgctacgaggtgcccttggagaccccgcgtgtccacagccgggcaccgtccccactctacagcgtggagttctctgaggagcccttcggggtgatcgtgcaccggcagctggacggccgcgtgctgctgaacacgacggtggcgcccctgttctttgcggaccagttccttcagctgtccacctcgctgccctcgcagtatatcacaggcctcgccgagcacctcagtcccctgatgctcagcaccagctggaccaggatcaccctgtggaaccgggaccttgcgcccacgcccggtgcgaacctctacgggtctcaccctttctacctggcgctggaggacggcgggtcggcacacggggtgttcctgctaaacagcaatgccatggatgtggtcctgcagccgagccctgcccttagctggaggtcgacaggtgggatcctggatgtctacatcttcctgggcccagagcccaagagcgtggtgcagcagtacctggacgttgtgggatacccgttcatgccgccatactggggcctgggcttccacctgtgccgctggggctactcctccaccgctatcacccgccaggtggtggagaacatgaccagggcccacttccccctggacgtccaatggaacgacctggactacatggactcccggagggacttcacgttcaacaaggatggcttccgggacttcccggccatggtgcaggagctgcaccagggcggccggcgctacatgatgatcgtggatcctgccatcagcagctcgggccctgccgggagctacaggccctacgacgagggtctgcggaggggggttttcatcaccaacgagaccggccagccgctgattgggaaggtatggcccgggtccactgccttccccgacttcaccaaccccacagccctggcctggtgggaggacatggtggctgagttccatgaccaggtgcccttcgacggcatgtggattgacatgaacgagccttccaacttcatcaggggctctgaggacggctgccccaacaatgagctggagaacccaccctacgtgcctggggtggttggggggaccctccaggcggccaccatctgtgcctccagccaccagtttctctccacacactacaacctgcacaacctctacggcctgaccgaagccatcgcctcccacagggcgctggtgaaggctcgggggacacgcccatttgtgatctcccgctcgacctttgctggccacggccgatacgccggccactggacgggggacgtgtggagctcctgggagcagctcgcctcctccgtgccagaaatcctgcagtttaacctgctgggggtgcctctgggtcggggccgacgtctgcggcttactgggcaacacctcaaaggagctgtgtgtgcgctggacccagctgggggccttctaccccttcatgcggaaccacaacagcctgctcagtctgcccccaggagccgtacagcttcagcgaagccggcccagcaaggccatgaggaaaggcccctcacccctgcgcctacgaacttccctcccccaacttctaaaagcctggtccccccagggcccacttcggcggggggaagaccgggggcccgggccccctcttcctgggagttcccccagggactctaaccaccctggaa

SEQ ID NO: 75045 - DNA, 2201 bp, Homo Sapiens
  misc_feature (28)..(29): n is a, c, g, or t
  misc_feature (1249)..(1249): n is a, c, g, or t
  misc_feature (2123)..(2141): n is a, c, g, or t
ctttccatttgtctttttcgcaccttcnncctatacggtcctaggtagcgaggcctgggtggcgaatctcggcacgagggccctacgacgagggtctgcggaggggggttttcatcaccaacgagaccggccagccgctgattgggaaggtatggcccgggtccactgccttccccgacttcaccaaccccacagccctggcctggtgggaggacatggtggctgagttccatgaccaggtgcccttcgacggcatgtggattgacatgaacgagccttccaacttcatcaggggctctgaggacggctgccccaacaatgagctggagaacccaccctacgtgcctggggtggttggggggaccctccaggcggccaccatctgtgcctccagccaccagtttctctccacacactacaacctgcacaacctctacggcctgaccgaagccatcgcctcccacagggcgctggtgaaggctcgggggacacgcccatttgtgatctcccgctcgacctttgctggccacggccgatacgccggccactggacgggggacgtgtggagctcctgggagcagctcgcctcctccgtgccagaaatcctgcagtttaacctgctgggggtgcctctggtcggggccgacgtctgcggcttcctgggcaacacctcagaggagctgtgtgtgcgctggacccagctgggggccttctaccccttcatgcggaaccacaacagcctgctcagtctgccccaggagccgtacagcttcagcgagccggcccagcaggccatgaggaaggccctcaccctgcgctacgcactcctcccccacctctacacactgttccaccaggcccacgtcgcgggggagaccgtggcccggcccctcttcctggagttccccaaggactctagcacctggactgtggaccaccagctcctgtggggggaggccctgctcatcaccccagtgctccaggccgggaaggccgaagtgactggctacttccccttgggcacatggtacgacctgcagacggtgccaatagaggcccttggcagcctcccacccccacctgcagctccccgtgagccagccatccacagcgaggggcagtgggtgacgctgccggcccccctggacaccatcaaagtccacctccgggctgggcacatcatacccatgcagggccctggcctcacaaccacagagtcccgccagcagcccatggccctggctgtggnccctgaccaagggtggagagccccgaggggagctgttctgggacgatggagagagcctggaagtgctggagcgaggggcctacacacaggtcatcttcctggccaggaataacacgatcgtgaatgagctggtacgtgtgaccagtgagggagctggcctgcagctgcagaaggtgactgtcctgggcgtggccacggcgccccagcaggtcctctccaacggtgtccctgtctccaacttcacctacagccccgacaccaaggtcctggacatctgtgtctcgctgttgatgggagagcagtttctcgtcagctggtgttagccgggcggagtgtgttagtctctccagagggaggctggttccccagggaagcagagcctgtgtgcgggcagcagctgtgtgcgggcctgggggttgcatgtgtcacctggagctgggcactaaccattccaagccgccgcatcgcttgtttccacctcctgggccggggctctggcccccaacgtgtctaggagagctttctccctagatcgcactgtgggccggggccctggagggctgctctgtgttaataagattgtaaggtttgccctcctcacctgttgccggcatgcgggtagtattagccacccccctccatctgttcccagcaccggagaagggggtgctcaggtggaggtgtggggtatgcacctgagctcctgcttcgcgcctgctgctctgccccaacgcgaccgctgcccggctgcccagagggctggatgcctgccggtccccgagcaagcctgggaactcaggaaaattcacaggacttgggagattctaaatcttaagtgcaattatttttaataaaaggggcatttggaatcagnnnnnnnnnnnnnnnnnnngaccgcgtatgcggccgcaagcttattccctttagttgagggttaattttagcttggcac

SEQ ID NO: 75046 - DNA, 807 bp, Homo Sapiens
cttagaagtagtccaaatgtactctcatatttggtgatcagcacattcttatatcctgctctagcaatgagtacccatttgttacacttaccaaactctctaaaaacatatactgtgagtaagatttgaagccaggaataaaaggcagtctgaaagaaaacgtcctatacgatgcagttgtttggaaatggctgatttctgatatgaaacccaacttgatacactgtttggttctttgacttgggatctatctgaattgctttcactagtacacaaaaggttaagttaaaactactttaaacttgtatagcctgccatctgaggtgaattattttcaaaaaatactaaatctatgaactgagactagcaattagttggctgctccctaccatgattttacttttaatagcaatacagttatattggtgataaatatgacaggcttaagtactgctgtccttttgcatcttcctaagcatcttggttaaatttctgaagtttaaaaattagatccagatttcttctgttgtgtctgaagagaaccatgacatttagaagtatattggtaatctattaggtccattggcaaagtatattggtccatattcaaacctattccaaaaggttagaagtgtttaagattcctttattgtggtaccatgtctgtttacctatgcttatgagcaacaataaattactagtttaccttctggaattttaattgttataaccgaatcaattattggaaagtgaaaaacacctcccggtcacacaacagggtacgtaaataaatgtgttgttaccagt

SEQ ID NO: 75047 - DNA, 626 bp, Homo Sapiens
cttttcaacctgagtggggagtatgacaaggccgtggactgcttcacagctgccctcagcgttcgtcccaatgactatttgctgtgaaataagctaggcgcccacccgggccaatggaaacaagagtgaagaagcagaagctgcgtaccgccgggccctcgagctccagcctggctatatccggtcccgctataacctgggcatcagctgcatcaacctcggggctcaccgggaggctgtggagcactttctggaggccctgaacatgcagaggaaaagccggggcccccggggtgaaggaggtgccatgtcggagaacatctggagcaccctgcgtttggcattgtctatgttaggccagagcgatgcctatggggcagccgacgcgcgggatctgtccaccctcctaactatgtttggcctgccccagtgacagtgggacgggctgccctaaatatacagcctctgcagacactgcttctgaatgaacgggctggagtttccttgggatcctgaactcatattggattctctacctaccatcttggacaattcatgtaggaaaacaaatcctcatttgttcaaacaatagatgaaaattattaaagttttgacacatattaaaa

SEQ ID NO: 75048 - DNA, 443 bp, Homo Sapiens
ccattctatgtcaaacattccaagtactctttgagagcccagcattacatcaacatgcccgtgcagttcaaaccgaagtccgcaggcaaatttgaagctttgcttgtcattcaaacagatgaaggcaagagtattgctattcgactaattggtgaagctcttggaaaaaattaactagaatacatttttgtgtaaagtaaattacataagttgtattttgttaactttatctttctacactacaattatgcttttgtatatatattttgtatgatggatatctataattgtagattttgtttttacaagctaatactgaagactcgactgaaatattatgtatctagcccatagtattgtacttaacttttacaggtgagaagagagttctgtgtttgcattgattatgatattctgaataaatatggaatatattttaaaaa

SEQ ID NO: 75049 - DNA, 479 bp, Homo Sapiens
ttgatgtaatgctgggctctggaaagagagaggcacatgacagcagcatgtcatgacagcacccgtgaccctgtcccaggcagcacagtgcctggctcaggtgttgaggaaagagctcggtcaagccacattcagcttaaatgtatttatgatttcttggatgctattatttaatgagaaaataacacaaaggagagaaaaacgtaaaattggattaaaacagtattgcatacgtatgtattcctggctatccagtaactattaatatataaaaaggaaaataagaggtctaaactatcatacatacagctttgtatactgcctgcaaaaactatctacctaagaaagggttcgggaacaccctaaatgcccgttttactcagtccagacagcatattgcactggaaagattaaaacaacttgtcccaaccctatcattaatgggctgtgcagtttttgctctaaaattcatatgatcc

SEQ ID NO: 75050 - DNA, 986 bp, Homo Sapiens
  misc_feature (900)..(925): n is a, c, g, or t
aaaaatagggctaaggtacgaggcctgggtggcgaattcggcacgagggcgctcgaggcgagttggcggagctgtgcgcgcggcggggcgatggggggctcgggcagtcgcctgtccaaggagctgctggccgagtaccaggacttgacgttcctgacgaagcaggagatcctcctagcccacaggcggttttgtgagctgcttccccaggagcagcggagcgtggagtcgtcacttcgggcacaagtgcccttcgagcagattctcagccttccagagctcaaggccaaccccttcaaggagcgaatctgcagggtcttctccacatccccagccaaagacagccttagctttgaggacttcctggatctcctcagtgtgttcagtgacacagccacgccagacatcaagtcccattatgccttccgcatctttgactttgatgatgacggaaccttgaacagagaagacctgagccggctggtgaactgcctcacgggagagggcgaggacacacggcttagtgcgtctgagatgaagcagctcatcgacaacatcctggaggagtctgacattgacagggatggaaccatcaacctctctgagttccagcacgtcatctcccgttctccagactttgccagctcctttaagattgtcctgtgacagcagccccagcgtgtgtcctggcaccctgtccaagaacctttctactgctgagctgtggccaaggtcaagcctgtgttgccagtgcgggccaagctggcccagcctggagctggcgctgtgcagcctcaccccgggcaggggcggccctcgttgtcagggcctctcctcactgctgttgtcattgctccgtttgtgtttgtactaatcagtaataaaggtttagaagtttgnnnnnnnnnnnnnnnnnnnnnnnnnngagcgcgtatgcggccgcaagcttattccctttagtgagggtaattcacgcttagcactgc

SEQ ID NO: 75051 - DNA, 574 bp, Homo Sapiens
gctgagccaaaggctttgtcattcctttctcttcctgtacatctgagcagacccactccagctttctggtgtcacaggcgggaatgttagttagtaggtagacttagatcccatttctgtcctgctcccaggaagattcttaggtcctcttcaatccagcagcccctcccagaggtgtgatcagcaggatgctgaggaaccatgttgcctttcctgtcaatcacagccaccttcctgttatctcctaaatggatctggcttttcctggaggctgccatggttggaagatggtatcagagggcctgcctgggcagtctgtctccgggccagggtcagggaccctctgcctctggcagccttaacctgtcctctgctaggaccagggtgatttcaagccagggaagcaactgggaccctgaaaactgtccctccccagcccgctccccctctctgtgccctggtccccttgctgccatgtggatgctgttgtgattgctgtttgtatattatcaaaatgtttttatattaaaaatgtttggtctgaaaattaaaagcacttcatttagaaaaaaaa

SEQ ID NO: 75052 - DNA, 761 bp, Homo Sapiens
ggcacgagggaagaggcgggagtggacctggtcagccctaccccactgacccccaccggacccaggcgcggcctccgccacagccacagcccctgcccctgctgcggcgcggcgaggcgaggcgatggccaaggtgtcggtgctgaacgtggcggtcctggagaacccgagccctttccacagccccttccggttcgagatcagcttcgagtgcagtgaagccctggcggacgacctggagtggaagatcatttatgttggctcggctgagagtgaggaatttgatcagatcctagactcggtgctggtgggccctgtgccagcagggagacacatgtttgtctttcaggccgacgcccccaacccatccctcatcccagagactgatgccgtgggtgtgactgtggtcctcatcacctgcacctaccatggacaggagttcatccgagtgggctactacgtcaacaacgagtacctcaaccctgagctgcgtgagaacccgcccatgaagccagatttctcccaggtggggcctgtttccacttcctgcttcccacaaggccgttctttatacttggggggagttcagccattcaaattgagagtcaaggtcacttcttaaggttttcaagtaatattcagttcttacagtactgtgttagaagaggagaaaaagacctttgtctctcaaaggcatgtcttagagaattaagattaggccagcctgggcaacatagtgagaccctgtccctaacccccgc

SEQ ID NO: 75053 - DNA, 1154 bp, Homo Sapiens
aaaacttcggctaggtacgaggctgggttctaatcggcacgagggagagaagaggcgggagtggacctggtcagccctaccccactgaccccaccggacccaggcgcggcctccgccacagccacagcccctgcccctgctgcggcgcggcgaggcgaggcgatggccaaggtgtcggtgctgaacgtggcggtcctggagaacccgagccctttccacagccccttccggttcgagatcagcttcgagtgcagtgaagccctggcggacgacctggagtggaagatcatttatgttggctcggctgagagtgaggaatttgatcagatcctagactcggtgctggtgggccctgtgccagcagggagacacatgtttgtctttcaggccgacgcccccaacccatccctcatcccagagactgatgccgtgggtgtgactgtggtcctcatcacctgcacctaccatggacaggagttcatccgagtgggctactacgtcaacaacgagtacctcaaccctgagctgcgtgagaacccgcccatgaagccagatttctcccagctccagcggaacatcttggcctcgaacccccgggtgacccgcttccatatcaactgggacaacaacatggacaggctggaggccatagagacccaggacccctccctgggctgcggcctcccactcaactgcactcctatcaagggcttggggctccctggctgcatccctggcctcctccctgagaactccatggactgcatctaactgcaggaacccagagtgtcccagcacgccgggaggggcaaccaggcctcccagcgagtcctgcagggcccatctagaggactttgggggccatcagctgcaatccaggtctgtcaaactcagcccctaggaaagaacaggccttggggtctcccctagtcctggccagaaggatgatctcgctttttcctctacaggcctataagaagcagggactccaggtctaaattctgacttggggtcttttcggcctcataaaatctaactaaggccactgtgccactggtgcacccttggagtacattggatccaagcttttcccacagacctccctgggcccacctagagggtttccttgggccagggcctggtcaaggctccac

SEQ ID NO: 75054 - DNA, 2467 bp, Homo Sapiens
  misc_feature (1816)..(1949): n is a, c, g, or t
  misc_feature (2435)..(2435): n is a, c, g, or t
ggggatggtgtgtggccaaaactggggcatcgtggaggccatggtggtctgccgccagctgggcctgggattcgccagcaacgccttccaggagacctggtattggcacggagatgtcaacagcaacaaagtggtcatgagtggagtgaagtgctcgggaacggagctgtccctggcgcactgccgccacgacggggaggacgtggcctgcccccagggcggagtgcagtacggggccggagttgcctgctcagaaaccgcccctgacctggtcctcaatgcggagatggtgcagcagaccacctacctggaggaccggcccatgttcctgctgcagtgtgccatggaggagaactgcctctcggcctcagccgcgcagaccgaccccaccacaggctaccgccggctcctgcgcttctcctcccagatccacaacaatggccagtacgacttccggcccaagaacggccgccacgcgtggatctggcacgactgtcacaggcactaccacagcatggaggtgttcacccactatgacctgctgaacctcaatggcaccaaggtggcagatgggccacaaagccagcttatgcttggaggacacagaatgtgaaggagacatccagaagaattacgagtgtgccaacttcggcgatcagggcatcaccatgggctgctgggacatgtaccgccatgacatcgactgccagtgggttgacatcactgacgtgccccctggagactacctgttccaggttgttattaaccccaacttcgaggttgcagaatccgattactccaacaacatcatgaaatgcaggagccgctatgacggccaccgcatctggatgtacaactgccacatagggtggttcccttcagcgaaaagacggaaaaaaagtttgagcacttcagcgggctcttaaacaaccagctgtccccgcaagtaaagaagccctgcgtggtcaactccctgtcttccaggccacaccacatctttccatggggacttccccccaacaactgagtctgaacgaatgccacgtgccctcacccagcccggcccccaccctgtccagacccctacagctgtgtctaagctcaggaggaaagggaccctcccatcattcatggggggctgctacctgacccttggggcctgagaaggccttgcgggggtggggtttgtccacagagctgctggagcagcaccaagagccagtcttgaccgggatgaggcccacagacaggttgtcatcagcttgtcccattcaagccaccgagctcaccacagacacagtggagccgcgctcttctccagtgacacgtggacaaatgcgggctcatcagcccccccagagagggtcaggccgaaccccatttctcctcctcttaggtcattttcagcaaacttgaatatctagacctctcttccaatgaaaccctccagtctattatagtcacatagataatggtgccacgtgttttctgatttggtgagctcagacttggtgcttccctatccacagcccccaccccttgtttttcaagatactattattatattttcacagacttttgaagcacaaatttattggcatttaatattggacatctgggcccttggaagtacaaatctaaggaaaaaccaacccactgtgtaagtgactcatcttcctgttgttccaattctgtgggtttttgattcaacggtgctataaccagggtcctgggtgacagggcgctcactgagcaccatgtgtcatcacagacacttacacatacttgaaacttggaataaaagaaagatttatgnnnnnnnnnnnnnnnnnnnnnnnnnnnnnnnnnnnnnnnnnnnnnnnnnnnnnnnnnnnnnnnnnnnnnnnnnnnnnnnnnnnnnnnnnnnnnnnnnnnnnnnnnnnnnnnnnnnnnnnnnnnnnnnnnnnnnntgaatatgcctgctgaaagtggacatcgaaaataaaaaacagccatagaaaactcgatcgtgtctgaccatcctccacaaggaagtagtgatttcattactgctgtgtaccggcgggcagaccgaacagagatgaaatactatgtttttttcccgtcctgaaaaacagtcccgagactgattgtaattcattaaccctaacaaagaacatccccgccggtcacccaaggggtttataaaactatattcggtgggggcctgggccccttggttaactttactaggagatctgccgctgcgtaaaaaatcgtgccacccccccgcccctattttccaaggtgtaattgaaactggtgaaactccccccgggggggagcagaccccaagggggtggtggaaatcaaacccgccacggaaaaaaagccccccttttcgcccaaaaaataaaatttcccccccgagaaatagcggtcgaacaaaaaaaggnatcatttattggccaatcatttctaaaagaag

SEQ ID NO: 75055 - DNA, 502 bp, Homo Sapiens
  misc_feature (447)..(447): n is a, c, g, or t
  misc_feature (483)..(483): n is a, c, g, or t
gctggtggagagaaacgggtcccttgtgtgggggatggtgtgtggccaaaactggggcatcgtggaggccatggtggtctgccgccagctgggcctgggattcgccagcaacgccttccaggagacctggtattggcacggagatgtcaacagcaacaaagtggtcatgagtggagtgaagtgctcgggaacggagctgtccctggcgcactgccgccacgacggggaggacgtggcctgcccccagggcggagtgcagtacggggccggagttgcctgctcagaaagtgagagctcctcccctccctccccaccgggctcccgaggggaccagagtcccaccagttattcctcaagagactctgaagccttgccatgagccaagcaatagaggaaggtagaatgaaatcctaagggagaaaaactgggggcaagagagatgaccgncaccccaaccacagatcgctgtctatgatgtagtgnggagaaaagcgggagggag

SEQ ID NO: 75056 - DNA, 1041 bp, Homo Sapiens
  misc_feature (895)..(954): n is a, c, g, or t
ggaagcgaggcctgggtggcgggcgcactgccgccacgacggggaggacgtggcctgcccccagggcggagtgcagtacggggccggagttgcctgctcagaaaccgcccctgacctggtcctcaatgcggagatggtgcagcagaccacctacctggaggaccggcccatgttcctgctgcagtgtgccatggaggagaactgcctctcggcctcagccgcgcagaccgaccccaccacgggctaccgccggctcctgcgcttctcctcccagatccacaacaatggccagtccgacttccggcccaagaacggccgccacgcgtggatctggcacgactgtcacaggcactaccacagcatggaggtgttcacccactatgacctgctgaacctcaatggcaccaaggtggcagagggccacaaggccagcttctgcttggaggacacagaatgtgaaggagacatccagaagaattacgagtgtgccaacttcggcgatcagggcatcaccatgggctgctgggacatgtaccgccatgacatcgactgccagtgggttgacatcactgacgtgccccctggagactacctgttccaggttgttattaacccccaacttcgaggttgcagaatccgattactccaacaacatcatgaaatgcaggagccgctatgacggcccaccgcatctggatgtacaactgccacataggtggttccttcagcgaagagacgggaaaaaaagtttgagcacttcagcggggctcttaaacaaccagcctgtccccgcagaaaaaaaaacctgccggggtcaacttccggtctttcagggccacaccacatcttccaatggggacttcccccccaacaaactgaagcctgaaacgaaatnnnnnnnnnnnnnnnnnnnnnnnnnnnnnnnnnnnnnnnnnnnnnnnnnnnnnnnnnnnntaacaggctgggggtccctaaaacctctccggggaggggaaaaaggggaacacccttccccccttcaatttctcagtgggggagggc

SEQ ID NO: 75057 - DNA, 694 bp, Homo Sapiens
tctatctctctgagaagctcatctgacctcctgactctcagccctacagagtagggagttgatgctgacaggatgaaggtttaggaataaatatgcctgggaagagactgggaaggttctagggtgaggcacctcagtaactcatggtaccttggccaagttggaaggaagcagtttgttaatgaggcacagtaatcctggctgcagggtctaggaggtaagaccagctgggatgaccttccctgggttaatcaatttccctctagacaacacaaactgcaggcatgtgactaactttgaaagaacacccatcatgtggctgctgtcacccttgaccagctgtggtggtggttactccatctgtggttggagcgcctctttgggattcacttcaaggtcttgtgcctatttttctgcatatcttctgtgatgacaaatctctgtcccctgagtgttaatttgatttttagaaatggccaaaagtaacgtgatccaaactttttttcagtaatatggagactgagctgcatggtagttggggatcaaaaatatgtgaccttaatgagatttttatgatttctaaagtaacaataaaagcagtttttagagttgagttccagagagggcagggcaatggcagtgacatgtttgtcattttaataataaataacatctattgagtgcttaagaggtg

SEQ ID NO: 75058 - DNA, 1005 bp, Homo Sapiens
agaggagggaacccggtgaacgttcgggcggcccgaagagttgtctgtccaacatcgaggcggacacctactgggtgcatgagcaagctgctggatggcatttaaggacaacaacacctgtgcccaaaccggggattcaaatgaaagtgaaaatgcctagaagaattcgggagccggattgatgagcaagtgcaccggcacttggaccaacacgaagtgagatacctgcagtttgccttccgctggatgaacaacctgctgatgagggaggtgcccctgcgttgtaccatccgcctgtgggacacctaccagtctgaaccggacggcttttctcatttccacttgtacgtgtgcgctgcttttctcgtgagatggaggaaggaaatactagaagaaaaagattttcaagagctgctgctcttcctccagaacctgcccacagcccactgggatgatgaggacatcagcctgttgctggccgaggcctaccgcctcaagtttgcttttgccgacgcccccaatcactacaagaaatgagcccaggcccacccgcagctggcctcactgtcccgggtggcgcgccccacctgcctggctggtggtaggcccctgtgagctggtcccgggctgctaaaaggccttgtgaggtggccccaccctccaggggagctggtgaagatgggccacagacctggtctagggctgacaaagacagggacagcctttgttttctgagataccaaagagagccaggggagggccccgggttcggcggccagaggcaggtcaggggtcccctctccctctccctgcaatgtccttgccaaatgactgcctcctgctgcccctagtccggggcagcctaggaggccgaccctctttggagtcctgctgtctgggtgccagggccggaacgaggtagtggccatctcatacctactctgaaatgcaaaacttctattctgttgagtgaaagaataaaatgtagacaaaatctaaaaaaaa

SEQ ID NO: 75059 - DNA, 1041 bp, Homo Sapiens
  misc_feature (50)..(50): n is a, c, g, or t
  misc_feature (74)..(75): n is a, c, g, or t
  misc_feature (80)..(80): n is a, c, g, or t
  misc_feature (97)..(97): n is a, c, g, or t
  misc_feature (125)..(125): n is a, c, g, or t
  misc_feature (127)..(127): n is a, c, g, or t
  misc_feature (209)..(209): n is a, c, g, or t
  misc_feature (218)..(218): n is a, c, g, or t
  misc_feature (225)..(225): n is a, c, g, or t
  misc_feature (248)..(248): n is a, c, g, or t
  misc_feature (321)..(321): n is a, c, g, or t
ttcgtaggaaactcagctatggaattatagctgcagtatacctccctganggtgtttgaaaagttacagatcanngattnttccaaaatccagtatnaaaggacactggggcacctctcaacatntntgcctgactgatatcagctgattgtgggatctgtctactcgtgggagcacaccaaacatgtttctgttctattgaagatgcntatgctcanggaaagngatgcctttgagtccctcttccnagagctttgagacctggcgtcggggagatgtctttctcgcttggataccttggaaactagtaagagaaatccntacagttactgactaaagattcagataaagtgaaggattttttgagaagttacaacacacactggatcaaaagaagaatgaaattctgtctgactttgagaccatgaaacttgctgttatgcaagcatatgacccagagatcaacaaactcaacaccatcttgcaggagcaacggatggcctttaacattgctgaggctttcaaagatgtgtcagaacccattgtatttctgcaacagatgcaggagtttagagagaaaatcaaagtaatcaaggaaactcctttacctccctctaatttgcctgcaagccctttaatgaagaactttgataccagtcagtgggaagacataaaactagtcgatgtggataaactttctttgcctcaagacactggcacattcattagcaagattccctggagcttttataagttatttttgctaatccttctgcttggccttgtcattgtctttggtcctaccatgttcctagaatggtcattatttgatgacctggcaacttggaaaggctgtctttcaaacttcagttcctatctgactaaaacagccgatttcatagaacaatcagttttttactgggaacaggtgacagatgggtttttcattttcaatgaaagattcaagaattttactttggtggtactgaacaatgtggcagaatttgtgtgcaaatataaactattataaaatccaaaaaa

SEQ ID NO: 75060 - DNA, 1880 bp, Homo Sapiens
cagtcgacggtaccggacatatgcccgggaattcggccattacggccggggagtggagggagggaagatggcggaggtgggggagataatcgagggctgccgcctacccgtgctgcggcggaaccaggacaacgaagatgagtggcccctggccgagatcctgagcgtgaaggacatcagtggccggaagcttttctacgtccattacattgacttcaacaaacgtctggatgaatgggtgacgcatgagcggctggacctaaagaagatccagttccccaagaaagaggccaagacccccactaagaacggacttcctgggtcccgtcctggctctccagagagagaggtgaaacggaaggtggaggtggtttcaccagcaactccagtgcccagcgagacagccccggcctcggtttttccccagaatggagccgcccgtagggcagtggcagcccagccaggacggaagcgaaaatcgaattgtttgggcactgatgaggactcccaggacagctctgatggaataccgtcagcaccacgcatgactggcagcctggtgtctgatcgaagccacgacgacatcgtcacccggatgaagaacattgagtgcattgagctgggccggcaccgcctcaagccgtggtacttctccccgtacccacaggaactcaccacattgcctgtcctctacctgtgcgagttctgcctcaagtacggccgtagtctcaagtgtcttcagcgtcatttgaccaagtgtgacctacgacatcctccaggcaatgagatttaccgcaagggcaccatctccttctttgagattgatggacgtaagaacaagagttattcccagaacctgtgtcttttggccaagtgtttccttgaccataagacactgtactatgacacagaccctttcctcttctacgtcatgacagagtatgactgtaagggcttccacatcgtgggctacttctccaaggagaaagaatcaacggaagactacaatgtggcctgcatcctaaccctgcctccctaccagcgccggggctacggcaagctgctgatcgagttcagctatgaactctccaaagtggaagggaaaacagggacccctgagaagcccctctcagaccttggcctcctatcctatcgaagctactggtcccagaccatcctggagatcctgatggggctgaagtcggagagcggggagaggccacagatcaccatcaatgagattagtgaaatcaccagcatcaagaaggaggatgtcatctccactctgcagtacctcaatctcatcaactactacaagggccagtacatcctcacactgtcagaggacatcgtggatggccatgagcgggccatgctcaagcggctcctgcggatcgactccaagtgtctgcacttcactcccaaggactggagcaagagggggaagtggtgaccagacactgcccactgcagtgccaagacggcagcaggactggggctgatagcccaccccgcccccactgcagctcccacaaagcactctaagggagatggggctgaggacagctcaaaaaggagaggacaggcctggcaggggcccactggtgcccagcaccaaggcgagctccgggctcagaccaactccaaggtcagctggccacaggcccaggcctcctctgaagcagggaccagagggagccaggcagctgtgtacagtgagaagggatccggatgggggagctctgtacagagggctggtgattgtaaaaatttcttttgtaaagtagaagttgggggtggggtgggtgctggctgcaaaaatttctggcttctcttacccctattgcccccggcaataaattgtttctatatgccagaaa

SEQ ID NO: 75061 - DNA, 774 bp, Homo Sapiens
tcggctaggtagcgaggcctgggtggttgaatcggcacgaggggaagatggcggaggtgggggagataatcgagggctgccgcctacccgtgctgcggcggaaccaggacaacgaagatgagtggcccctggccgagatcctgagcgtgaaggacatcagtggccggaagcttttctacgtccattacattgacttcaacaaacgtctggatgaatgggtgacgcatgagcggctggacctaaagaagatccagttccccaagaaagaggccaagacccccactaagaacggacttcctgggtcccgtcctggctctccagagagagaggtgccggcctcggcgcaggccagcgggaagaccttgccaatcccggtccagatcacactccgcttcaacctgcccaaggagcgggaggccattcccggtggcgagcctgaccagccgctctcctccagctcctgcctgcagcccaaccaccgctcaacgaaacggaaggtggaggtggtttcaccagcaactccagtgcccagcgagacagccccggcctcggtttttccccagaatggagccgcccgtagggcagtggcagcccagccaggacggaagcgaaaatcgaatgtttgggcactgatgaggactcccaggacagctctgatggaataccgtcagcaccacgcatgactggcagcctggtgtctgatcgaagccacgacgactcgtccccggtgaagaatttggtgcttgagtgggcggacgcctcaacggtatttcc

SEQ ID NO: 75062 - DNA, 1079 bp, Homo Sapiens
  misc_feature (999)..(1022): n is a, c, g, or t
tattggtgtcatctagccccagttacatttctcgtgtattgttgatgtgacgtacattcaccagaacagttgctgatcgattatcgatccttaggattgcctcgagccagaatcgcacgaggccttgtgcggaatgcgtgatgacgcccgcccgccatctggttaaaggactcgtcaacacggagtgtcccgggctgcatgtgctacagctagaatgaagcacatcaacctatcatttgcagcgtgtggatttctgggcatttaccacttgggggcagcatctgcactttgcagacatggcaaaaaacttgtgaaggatgtcaaagccttcgctggggcgtctgcgggatcgttggttgcttctgttctgctaacagcaccagaaaaaatagaggaatgtaaccaatttacctacaagtttgccgaagaaatcagaaggcagtctttcggggcagtaacgcccggttatgacttcatggcccgactaagaagtgggatggagtcgattcttcctcccagcgctcacgagctggcccagaaccgactgcacgtatccatcaccaacgccaaaaccagagaaaatcacttagtctccactttttcctccagggaggacctcattaaggtcctcctagccagcagttttgtgcccatttatgcaggactgaagctagtggaatacaaagggcagaagtgggtggacggaggcctcaccaacgctcttcccatcctgcccgtcggccggacagtaaccatctcccccttcagtggacgactggacatctccccgcaggacaaagggcagctagatctgtatgttaatatcgccaagcaggatatcatgttgtccctggcaaacctggtgagactcaaccaagccctttttcccccaagcaagaggaaaatggaatctttgtatcagtgtggttttgatgacactgttaagtttttacttaaagaaaattggtttgaataaaatgcataaaagtttataatgcnnnnnnnnnnnnnnnnnnnnnnnncctgagcaggcggccgcaagcttattccctttagtgagggtaattttagcttggcac

SEQ ID NO: 75063 - DNA, 1006 bp, Homo Sapiens
  misc_feature (27)..(27): n is a, c, g, or t
gggccgggtggtgaatcggcacgaggncaagatggtggtttgtcccgtgtaagggaacaggtgtggggaagaggtggggttgggttccaactctggctttttctggtagaaaggcctaacccattacaccagaagaccatgggtgaagtctagatggggaggagaagtgaggccagggtacagtcttgccagacgactctgaggagggcaagggacagttccatggcccttcccggactgcactaggctgggagctctgttgtgtggaggggtggtcagaggtctgtgaagagcgggcaggaggcatgagcaggcgaggagctggcctgtcccgggaagcagcccagcctgtggctgcccccgacaccaggaggagggccaggagagttccagggggctgaggcacacagagaggccaacttcctccctgcccagccttccttgtatctctccagactcggacaatcaaagggagagagggtgtatcgggtcctgttccagccggcatcgccgggtggcttccaggcctcagagctgtgtggcagggccccctgctggggctggacatcactgcagtccagtgcaaagccgcccccagagcccaggtgtccccccaacctaaccagacctggtgccttgacgcccccaccccagctgggacggtacagagaagggtcttggtttcctctcctactcccttccttaggctcctgaactcgtttgctcctaaatcttgttaattctttttctctggattttggtttcttttggctttcccttgccttcccctttctctgtctccaacactctttccccatgtctttctggctgtctctatgttcctcttctcttatcctcaactttctgtccattcgggcctcctccccacctcccacgccccagcccctccctccttggtctccttttcgatatgccaaaccaattttgggtcgagtgcatttaacgagaacaaaacaaaaggctcataacaacaagaacgtttcag

SEQ ID NO: 75064 - DNA, 1327 bp, Homo Sapiens
  misc_feature (617)..(726): n is a, c, g, or t
  misc_feature (735)..(748): n is a, c, g, or t
  misc_feature (774)..(783): n is a, c, g, or t
  misc_feature (786)..(827): n is a, c, g, or t
  misc_feature (859)..(956): n is a, c, g, or t
  misc_feature (1089)..(1134): n is a, c, g, or t
  misc_feature (1181)..(1191): n is a, c, g, or t
ctcagtggaacacaccattctccccccctcaacagcacactcagtgcagcaagactgacccctgaccccctcccagccctccctaccttggacaggaaggaagtaatgcaccttctcttgctgattatttatttgtttggagagacagaaatgtaaaagtgtatctagaaatatctatatctctatatatttttaactgactctttggaatccccttaaagcagttggtagaaggaatggtatttgtatggggggagggaggctggaatggagaatctggattctctcctcttccccattctccagagggagggaggtggtgaggaagaggaagggaggggcaggatgggccatggaggtgccccacccccacacctgacaatcacccacactcctggggctcttcctgggtcctggggcagggcgagtccaagtgtgaggctgttgatttgttttcaatatttcttttcgtgctgtatggtgatgctttcttagtattctacacaataagaaaagacaaagtcctcgagattcttatgagttttgtttgaaaactctttcactatatttgttgtaaagaggtttactattaaaagaaaaagaatacacgtttctgnnnnnnnnnnnnnnnnnnnnnnnnnnnnnnnnnnnnnnnnnnnnnnnnnnnnnnnnnnnnnnnnnnnnnnnnnnnnnnnnnnnnnnnnnnnnnnnnnnnnnnnnnnnnnncttgggggnnnnnnnnnnnnnnaaaaaattttttaaaacctttttttnnnnnnnnnnccnnnnnnnnnnnnnnnnnnnnnnnnnnnnnnnnnnnnnnnnnncccgggcaagaacaagggttggattccccccnnnnnnnnnnnnnnnnnnnnnnnnnnnnnnnnnnnnnnnnnnnnnnnnnnnnnnnnnnnnnnnnnnnnnnnnnnnnnnnnnnnnnnnnnnnnnnnnnnaatttaaatttcccccccaccgggccctttttggaggaagggtggaattttttaaacctttcggccgactgggaaccctcccaacggggttgtgagaactgaaaccccccggggatccaccccttgggccctnnnnnnnnnnnnnnnnnnnnnnnnnnnnnnnnnnnnnnnnnnnnnntttgtcctatttgggcgcccctttttaattaaaaaagggggggaaannnnnnnnnnnggggtttggtggtgtaaaacaaaaaataatattatttctcacaaaaaaacccccctttaaggagaaaaaaagcggccccgggtttttttctccccgtagaaaacaccccccaagtctggttggagcgatatatagt

SEQ ID NO: 75065 - DNA, 1131 bp, Homo Sapiens
tgggttttcagcggctcttggtccgttatgtccctgtccgtctcgagttgtgctgctcatgtgccgtgggtgtgttcgcgtgcgcttttttgtctggcgcgcgggtcggtgtacattttctcccctgttcttgttttgtgcccttgggccttatttagggtgactcttttgcgcctatgtttgttcctctacaatcaggctgtttccggtctgcggattttccccgggttttcgtggtctccattgggtccggtgtcctctctagccaatttgccgttcactcactcctcttgagtaactggcacttgccatagtactcactggagtcattctaatggcccttctgcctctctcaggttttccacagctttcagggaacagttgggtcaagaggacaccccccctcaccacctcagttgaacacaccagtctccccccctcgacagcacactcagtgcagcaagactgacccctgaccccctcccagccctccctaccttggacaggaaggaagtaatgcaccttctcttgctgattatttatttgtttggagagacagaaatgtaaaagtgtatctagaaatatctatatctctatatatttttaactgactctttggaatcccctggggtggggtgaggggtaagtttaggctttcgcggaggggaggagacatggagcctgggaactccttgttctcccctctgctgcctctccccaccccttaaagcagttggtagaaggaatggtatttgtatggggggagggaggctggaatggagaatctggattctctcctcttccccattctccagagggagggaggtggtgaggaagaggaagggaggggcaggatgggccatggaggtgccccacccccacacctgacaatcacccacactcctggggctcttcctgggtcctggggcagggcgagtccaagtgtgaggctgttgatttgttttcaatatttcttttcgtgctgtatggtgatgctttcttagtattctacacaataagaaaagacaaagtcctcgagattcttatgagttttgtttgaaaactctttcactatatttgttgtaaagaggtttactattaaaagaaaaagaatacacgtttctgataaaa

SEQ ID NO: 75066 - DNA, 942 bp, Homo Sapiens
ggcacgagggctgccagtgctttcaaaaaacatgaagtcaatgaggaaacaggaacaaaaatcaggagtgtggtagtggattagtgaaagtctcctcaggaaatctgaagtctgtatattgattgagactatctaaactcatacctgtatgaattaagctgtaaggcctgtagctctggttgtatacttttgcttttcaaattatagtttatcttctgtataactgatttataaaggtttttgtacattttttaatactcattgtcaatttgagaaaaaggacatatgagtttttgcatttattaatgaaacttcctttgaaaaactgctttgaattatgatctctgattcattgtccattttactaccaaatattaactaaggccttattaatttttatataaattatatcttgtcctattaaatctagttacaatttatttcatgcataagagctaatgttattttgcaaatgccatatattcaaaaaagctcaaagataattttctttactattatgttcaaataatattcaatatgcatattatctttaaaaagttaaatgtttttttaatcttcaagaaatcatgctacacttaacttctcctagaagctaatctataccataatattttcatattcacaagatattaaattaccaattttcaaattattgttagtaaagaacaaaatgattctctcccaaagaaagacacattttaaatactccttcactctaaaactctggtattataacttttgaaagttaatatttctacatgaaatgtttagctcttacactctatccttcctagaaaatggtaattgagattactcagatattaattaaatacaatatcatatatatattcacagagtataaacctaaataatgatctattagattcaaatatttgaaataaaaacttgatttttttgtaa

SEQ ID NO: 75067 - DNA, 1485 bp, Homo Sapiens
  misc_feature (166)..(166): n is a, c, g, or t
ggtccggaattcccgggatccgagcgccagcgcgggaaccgggaaaaggaaaccgtgttgtgtacgtaagattcaggaaacgaaaccaggagccgcgggtgttggcgcaaaggttactcccagacccttttccggctgacttctgagaaggttgcgcagcagctgntgcccgacagtctagaggcgcagaagaggaagccatcgcctggccccggctctctggaccttgtctcgctcgggagcggaaacagcggcagccagagaactgttttaatcatggacaaacaaaactcacagatgaatgcttctcacccggaaacaaacttgccagttgggtatcctcctcagtatccaccgacagcattccaaggacctccaggatatagtggctaccctgggccccaggtcagctacccacccccaccagccggccattcaggtcctggcccagctggctttcctgtcccaaatcagccagtgtataatcagccagtatataatcagccagttggagctgcaggggtaccatggatgccagcgccacagcctccattaaactgtccacctggattagaatatttaagtcagatagatcagatactgattcatcagcaaattgaacttctggaagttttaacaggttttgaaactaataacaaatatgaaattaagaacagctttggacagagggtttactttgcagcggaagatactgattgctgtacccgaaattgctgtgggccatctagaccttttaccttgaggattattgataatatgggtcaagaagtcataactctggagagaccactaagatgtagcagctgttgttgtccctgctgccttcaggagatagaaatccaagctcctcctggtgtaccaataggttatgttattcagacttggcacccatgtctaccaaagtttacaattcaaaatgagaaaagagaggatgtactaaaaataagtggtccatgtgttgtgtgcagctgttgtggagatgttgattttgagattaaatctcttgatgaacagtgtgtggttggcaaaatttccaagcactggactggaattttgagagaggcatttacagacgctgataactttggaatccagttccctttagaccttgatgttaaaatgaaagctgtaatgattggtgcctgtttcctcattgacttcatgttttttgaaagcactggcagccaggaacaaaaatcaggagtgtggtagtggattagtgaaagtctcctcaggaaatctgaagtctgtatattgattgagactatctaaactcatacctgtatgaattaagctgtaaggcctgtagctctggttgtatacttttgcttttcaaattatagtttatcttctgtataactgatttataaaggtttttgtacattttttaatactcattgtcaatttgagaaaaaggacatatgagtttttgcatttattaatgaaacttcctttgaaaaactg

SEQ ID NO: 75068 - DNA, 971 bp, Homo Sapiens
cagtcgacggtaccggacatatgcccgggaattcggccattacggccgggggagaaggttgcgcaacagctgtgcccggcagtctagaggcgcagaagaggaagccatcgcctggccccggctctctggaccttgtctcgctcgggagcggaaacagcggcagccagagaactgttttaatcatggacaaacaaaactcacagatgaatgcttctcacccggaaacaaacttgccagttgggtatcctcctcagtatccaccgacagcattccaagatagatcagatactgattcatcagcaaattgaacttctggaagttttaacaggttttgaaactaataacaaatatgaaattaagaacagctttggacagagggtttactttgcagcggaagatactgattgctgtacccgaaattgctgtgggccatctagaccttttaccttgaggattattgataatatgggtcaagaagtcataactctggagagaccactaagatgtagcagctgttgttgtccctgctgccttcaggagatagaaatccaagctcctcctggtgtaccaataggttatgttattcagacttgccacccatgtctaccaaagtttacaattcaaaatgagaacaagagaggatgtactaaaaataaagtggtccatgtgttgtgtgcagctgttgtggagatgtcgattttgagattaaatctcttgatgaacagtgtgtggttgggcaaaatttcaaagcactggaatggaattttgagagaggcattacagacgctgataactttggaatccagttccctttagaccttgatgttaacactgaaagctgtaatgactggtgcctgattcctcattgtaagtacggacttatttaatcttgattataaatgctttctctaagtacattctgaaatgattccagtaaagcgtaatatttcaaaatgacctttaacattata

SEQ ID NO: 75069 - DNA, 1360 bp, Homo Sapiens
cggtccggaattcccgggatgagaaagtgaaaggtgaggcacggccctgcagattttccagcggatcccccggtggcctcatgtcgcgcagtggaaccgatcctcagcaacgccagcaggcgtcagaggcggacgccgcagcagcaaccttccgggcaaacgaccatcagcatatccgctacaacccgctgcaggatgagtgggtgctggtgtcagctcaccgcatgaagcggccctggcagggtcaagtggagccccagcttctgaagacagtgccccgccatgaccctctcaaccctctgtgtcctggggccatccgagccaacggagaggtgaatccccagtacgatagcaccttcctgtttgacaacgacttcccagctctgcagcctgatgcccccagtccaggacccagtgatcatccccttttccaagcaaagtctgctcgaggagtctgtaaggtcatgtgcttccacccctggtcggatgtaacgctgccactcatgtcggtccctgagatccgggctgttgttgatgcatgggcctcagtcacagaggagctgggtgcccagtacccttgggtgcagatctttgaaaacaaaggtgccatgatgggctgttctaacccccacccccactgccaggtatgggccagcagtttcctgccagatattgcccagcgtgaggagcgatctcagcaggcctataagagtcagcatggagagcccctgctaatggagtacagccgccaggagctactcaggaaggaacgtctggtcctaaccagtgagcactggttagtactggtccccttctgggcaacatggccctaccagacactgctgctgccccgtcggcatgtgcggcggctacctgagctgacccctgctgagcgtgatgatctagcctccatcatgaagaagctcttgaccaagtatgacaacctctttgagacgtcctttccctactccatgggctggcatggggctcccacaggatcagaggctggggccaactggaaccattggcagctgcacgctcattactaccctccgctcctgcgctctgccactgtccggaaattcatggttggctacgaaatgcttgctcaggctcagagggacctcacccctgagcaggctgcagagagactaagggcacttcctgaggttcattaccacctggggcagaaggacagggagacagcaaccatcgcctgaccacgccgaccacagggccttgaatccttttttgttttcaacagtcttgctgaattaagcagaaagggccttgaatcctggcctggaatttgggcagatatagcattaataaaactgtgcatctcaaacttttatcacat

SEQ ID NO: 75070 - DNA, 867 bp, Homo Sapiens
cgaagcttcatcaccgccgtccctgcccatccaggggaagggcgacctcacaaccggcagccaaggtactgggcacccagctcctctgtgactgaggcccatgcatcaacaacagcccgggatctcagggaccgacatgagtggcagcgttacatccgaccagggggtggaagcacatgaccgtactgggtggtgacgggagaaaagataaccgagaggtagggcttggctgtgctacgggcagggccgaaccccaatgctgagtctccaactctggtttgaaagttgtaagaggggaaatccatagttaccagactcctcgagcagactttgcttggaaaaggggatgatcactgggtcctgaggtaaaggagtatcactctctgcagcagaagtccctcaagaggtctagccaccctcctccccagcagcagttggagccaggttacctggactgggggcatcaggctgcagagctgggaagtcgttgtcaaacaggaaggtgctatcgtactggggattcacctctccgttggctcggatggccccaggacacagagggttgagagggtcatggcggggcactgtcttcagaagctggggctccacttgaccctgccagggccgcttcatgcggtgagctgacaccagcacccactcatcctgcagcgggttgtagcggatatgctgatggtcgtttgcccggaaggttgctgctgcggcgtccgcctctgacgcctgctggcgttgctgaggatcggttccactgcgcgacatgaggccaccgggggatccgctggaaaatctgcagggccgtgcctcacctttcactttctccgtccacaccacccctccccgatcccggga

SEQ ID NO: 75071 - DNA, 861 bp, Homo Sapiens
gagaaagtgaaaggtgaggcacggccctgcagattttccagcggatcccccggtggcctcagtgtcgcgcagtggaaccgatcctcagcaacgccagcaggcgtcagaggcggacgccgcagcgagcaaccttccgggcaaagcgaccatcagtcatatccgctacaacccgctgcaggatgagtgggtgctggtgttcagctcaccgcatgaagcggccctggcagggtcaagtggagccccatgcttcgtgaagacagtgccccgcacagtgaccctctcaacgcctctgtgtcctggggccatccgagccaagcggtagaggtgacatcgccacaggtacgagtagcacgcttccatgtttgagcaagcgacgttcccagtactccatggcagcctgagtgcccccagatccatggacccaggtgatcatccccttttccaagcaaagtctgctcgaggagctctgtaaggtcatgtgcttccaccccgtggtcggatgtaacgctgccactcgatgtctggtcccttgagatccgggctgttgtggatgcatgggcctcagtcacagatggagctgggtgcccagtacccttgggtgcaggatgtggtcaggagggagttgacattggtgtcttgggactaacagagctccgtatccctatctgatagatcttggaaagacaaaggtgccatgatgggctgtatctaacccccaaaccacactgacaggtatgggccagcaagaatcctgccagatattgcccaagcgtgaaggagcagatctcagcgaggcctataagagtcagcatggagagcccctgtaatggagtacagcgccaggagctactcaggaaggaa

SEQ ID NO: 75072 - DNA, 1362 bp, Homo Sapiens
aattcccgggatacttaatccagagtacaggggctggggtcagggaaggaagatctaaagaacccactgtgggtcaggggaatgggaccagcaggacatatgggcaagctctgcaggacagacaggcagacaaaccctctgatctatgaagtctctgcagggcaaggggaccagggacctggaaccctcttggccaaggggagtgggagagacagagggaaggtcacaggcaagggtgcctatctaagtggaactaattgcccgagggctcagcaaggccaagaggagacagccgtgacggtaaacttcccctctaccagcctccaagccccacgccagcgagcaggctgcctgcccaccccgtgcccccagccagctggctgtgccagggcagagccatgccacatctgtatatagatggggtttttccaatacagctggttcgtgataaactgcatgaaactcctgccgtcctgcgcctgctggggcctccaggcaaaggccacgttggggttgggggtggggctggtccttctccctcccacaggcctgtgttctttgggggcttgctcccatgcagacaggatcacctaacagagatggaagccagggcatggatggggctttgggtcctcgaggttggaccccagcttcttgccaccttcccctccgggcagtcagctctccatccatccccctctttaatctatgaatcatagggctcggtggtgtgtaacacacacacccctatcgttgtccttcaaatactcagcattaccattggttgaggccaaattcagagctttctcaaatcagatttacaatctccattttcattaacggggaaacatccccgagccactgagtgctgtgctttgtcactgaaggttagatctgaacccagggtgtcaacagctgctctcaactccccacctctgggcactgaggagtatttcccctcattctacctctctaaggctatgcacccctccccacgtcttccagctgggggatggggggagtcataggaaaagcccccatctcccatctgggatagggaccttccatcagccttaaccctgggaaatgcctgctgcccccaatgactcttggtttcgtctcccacatacagaagcagggtggaggggaagggtgggtctcagttagcaggggtccccagggcaagtcagcctcctccctccatgcctctctggtcagtgtgccttagggtggcctctcactcccaccactctgggccccttgggggaggactggggagggggccgtgggagagccctgacgctggaacctgtatacacaataaaggacagtctcacagaaaaaaataaagaaagagaaatt

SEQ ID NO: 75073 - DNA, 749 bp, Homo Sapiens
gtcaggaaggtcagccttaaagttaagcatgttcaagaaagacacttttcagacagcctgtttatttactgagagctctggcattgggcattttgtctttagtattctcacatagcctacaacctgttcctgttaggaacaagccaagatagctaagaagttacggaagccatgcaatatgtcaattacattgctttttataaatggacaacttatgtgggcatttttgggcagtatatgacttccttgcaggctcttaagatggaagggtttctgtaaaaaggacagttacgggtataatatggctaagagaaatataatacagaacctgaaataaaagtaacttcaccagggagttatcctgacttaggtgacatacagtcccagttggcagttactttaaccaggagccctagcataacctcaagactcttagaaactttagaacatggaaattgttaaaagctttgaattgcacatttagattgtggctattaggaatttttaaagttgtaattcctaaaataacaggtcacactaaccggtcttgtccatattcagggttgagtgtaaaaatgaaaggaatcacaaaactgaacttagacctgtggtttaaggatcaaggtgttcactagaagtcactgttactaatacttgatgacaatgtaaagaaacattaaggattatatttgattgttttcaaagacactggctggatgtggtggctcacacttgtaattcctagcact

SEQ ID NO: 75074 - DNA, 1272 bp, Homo Sapiens
  misc_feature (72)..(104): n is a, c, g, or t
  misc_feature (1023)..(1049): n is a, c, g, or t
  misc_feature (1097)..(1100): n is a, c, g, or t
  misc_feature (1102)..(1103): n is a, c, g, or t
  misc_feature (1105)..(1196): n is a, c, g, or t
tttataccaatctgtatatagtataatttacattcaagtttaattgtgcaacttttaacccctgttggctgnnnnnnnnnnnnnnnnnnnnnnnnnnnnnnnnnaactaatactgagagatttggtcagaatttgaggccagtttcctagctcattgctagtcaggaaatgatatttataaaaaatatgagagactggcagctattaacattgcaaaactggaccatatttcccttatttaataagcaaaatatgtttttggaataagtggtgggtgaataccactgccaagttatagctttgtttttgcttgcctcctgattatctgtactgtgggtttaagtatgctactttctctcagcatccaataatcatggcccctcaatttatttgtggtcacccagggttcagagcaagaagtcttgctttatacaaatgtatccataaaatatcagagcttgttgggcatgaacatcaaacttttgttccactaatatggctctgtttggaaaaaactgcaaatcagaaagaatgatttgcagaaagaaagaaaaactatggtgtaatttaaactctgggcagcctctgaatgaaatgctactttctttagaaatataatagctgccttagacattatgaggtatacaactagtatttaagataccatttaatatgccccgtaaatgtcttcagtgttcttcagggtagttgggatctcaaaagatttggttcagatccaaacaaatacacattctgtgttttagctcagtgttttctaaaaaaagaaactgccacacagcaaaaaattgtttactttgttggacaaaccaaatcagttctcaaaaaatgaccggtgcttataaaaagttataaatatcgagtagctctaaaacaaaccacctgaccaagagggaagtgagcttgtgcttagtatttacattggatgccagttttgtaatcactgacttatgtgcaaactggtgcagaaattctataaactctttgctgtttttgatacctgcnnnnnnnnnnnnnnnnnnnnnnnnnnnaaaaatgataaaacttcagaaaataaaatgtcagtgtttgataaaccnnnncnncnnnnnnnnnnnnnnnnnnnnnnnnnnnnnnnnnnnnnnnnnnnnnnnnnnnnnnnnnnnnnnnnnnnnnnnnnnnnnnnnnnnnnnnnnnnntcctccccttccaccctaatatctctttaattccctcatcccactcccctcttcatcataccctaataataatttt

SEQ ID NO: 75075 - DNA, 701 bp, Homo Sapiens
gaagtgaatcaggcgccgggtagtgggttgctgggctgggcttgctgaggtagaggcagcgccaagaagaggcctttgccgctggtcgggattgggatgtcgaagaacacagtgtcgtcggcccgcttccggaaggtggacgtggatgaatatgacgagaacaagttcgtggacgaagaagatgggggcgacggccaggccgggcccgacgagggcgaggtggactcctgcctgcggcaaggaaacatgacagctgccctacaggcagctctgaagaacccccctatcaacaccaagagtcaggcagtgaaggaccgggcaggcagcattgtcttgaaggtgctcatctcttttaaagctaatgatatagaaaaggcagttcaatctctggacaagaatggtgtggatctcctaatgaagtatatttataaaggatttgagagcccgtctgacaatagcagtgctatgttactgcaatggcatgaaaaggcacttgctgctggaggagtagggtccattgttcgtgtcttgactgcaagaaaaactgtgtagtctggcaggaagtggattatctgccctcgggagtgggaattgctggtacaaagaccaaaacaaccaaatgccaccgctgcccctgtggggtaccatctggtttctctcaacctttgcccttcttgccttttttcatattctgggaaagg

SEQ ID NO: 75076 - DNA, 1373 bp, Homo Sapiens
  misc_feature (962)..(994): n is a, c, g, or t
ggggagcgcgaacctgaggaggaagaaacggggctagcgcgcaggcccagaacggtccgagccgcggcagtcggcgacgccccagagcggaagagggaagtgaatcaggcgccgggtagtgggttgctgggctgggcttgctgaggtagaggcagcgccaagaagaggcctttgccgctggtcgggattgggatgtcgaagaacacagtgtcgtcggcccgcttccggaaggtggacgtggatgaatatgacgagaacaagttcgtggacgaagaagatgggggcgacggccaggccgggcccgacgagggcgaggtggactcctgcctgcggcaaggaaacatgacagctgccctacaggcagctctgaagaacccccctatcaacaccaagagtcaggcagtgaaggaccgggcaggcagcattgtcttgaaggtgctcatctcttttaaagctaatgatatagaaaaggcagttcaatctctggacaagaatggtgtggatctcctaatgaagtatatttataaaggatttgagagcccgtctgacaatagcagtgctatgttactgcaatggcatgaaaaggcacttgctgctggaggagtagggtccattgttcgtgtcttgactgcaagaaaaactgtgtagtctggcaggaagtggattatctgcctcgggagtgggaattgctggtacaaagaccaaaacaaccaaatgccaccgctgccctgtgggtagcatctgtttctctcagctttgccttcttgctttttcatatctgtaaagaaaaaaattacatatcagttgtcctttaatgaaaattgggataatatagaagaaattgtgttaaaatagaagtgtttcatcctttcaaaaccatttcagtgatgtttataccaatctgtatatagtataatttacattcaagtttaattgtgcaacttttaacccctgttggctgnnnnnnnnnnnnnnnnnnnnnnnnnnnnnnnnnaactaatactgagagatttggtcagaatttgaggccagtttcctagctcattgctagtcaggaaatgatatttataaaaaatatgagagactggcagctattaacattgcaaaactggaccatatttcccttatttataagcaaatatgtttttggaataagtggtggggtgataccactgcctaagtatagctttgtttttgcttgccctcctgatatctgtactgggggtttaagtatgctactttctctccgcatccaataatcatggcccctcaatttaatttgggggcaccccaggggtccgaaccaggaagtcctggctttaaatcaaagggatcccttaaaaatatccaaagctttgtttggggcataaaaa

SEQ ID NO: 75077 - DNA, 873 bp, Homo Sapiens
tgatgaaagtgattttgatgatgaagcatactatgcagccttgggaactaggccacctattaatatggaagaactggatgaatcataccagaaagtaattgaactcttctctgtatgcactaatgaagaccctaaagatcgtccttctgctgcacacattgttgaagctctggaaacagatgtctagtgatcatctcagctgaagtgtggcttgcataaataactgtttattccaaaatatttacatagttactatcagtagttattagactctaaaattggcatatttgaggaccatagtttcttgttaacatatggataactatttctaatatgaaatatgcttatattggctataagcacttggaattgtactgggttttctgtaaagttttagaaactagctacataagtactttgatactgctcatgctgacttaaaacactagcagtaaaacgctgtaaactgtaacattaaattgaatgaccattacttttattaatgatctttcttaaatattctatattttaatggatctactgacattagcactttgtacagtacaaaataaagtctacatttgtttaaaacactgaaccttttgctgatgtgtttatcaaatgataactggaagctgaggagaatatgcctcaaaaagagtagctccttggatacttcagactctggttacagattgtcttgatctcttggatctcctcagatctttggtttttgctttaatttattaaatgtattttccatactgagtttaaaatttattaatttgtaccttaagcatttcccagctgtgtaaaaacaataaaactcaaataggatgataaagaataaaggacactttgggtaccaaaaaa

SEQ ID NO: 75078 - DNA, 714 bp, Homo Sapiens
gcaccagcagcctccgccgggcgcccctcagctccctgcttggctctgtctctccacacccggcagggccgcgggctgccccagccctgggggtcgtgggcagctgctactcagtgccaaccccgtggggcacagagccatatacctcgctgtccggcccccaccccagcctcgccttcccaccccatcgtctccacttcaggaaaagccgcactttacacccccacctgcctcttccccctccatccctgctccccgatcctgagcggttggggtggggtccctcagcaaccccaggcgtgggtttgaggagacaggtgatttacatcccctttgctgtcctcccccggtaccaaggcagggagcctccggaggagccggccctgctggccacgcaggggccagactccagcctgtttccccagccctgcaggtcttccttctgtgggaagcttcctagcaagatggcttggagtcctggtccccctcctccctggccctctcgttcgtttctgtttctgtttacacgttggagtggggtcctccgtgggcggcggcgcgccctgccccgggtgtcgtccggcctcttgtgctcgagcccctttccgagttggactcgaccatccctcaccccaccaaggaccacactgtgaagtgataactgccttgaacccccctttgctgttttatttattaaacttgatttgaagcccg

SEQ ID NO: 75079 - DNA, 824 bp, Homo Sapiens
  misc_feature (42)..(51): n is a, c, g, or t
  misc_feature (81)..(101): n is a, c, g, or t
agcatgtagtctggggaagatcataagaaaggaatacttttnnnnnnnnnnttggaaacatgtaacaaagcaagggtaaannnnnnnnnnnnnnnnnnnnnagtgctgtgactgtaaaagtgtactttccattaattattagccgagttaagagaatggtcacattgaagtactgtgtggactagaaatgtaccctgtcatcatgcaatgaaatattgttatcgttttaacatagctcatttatgtagaatgaattctggtggtttaccccaagtcacagttaggacggtagatggtgagatcgcagatgcgctattatctagattcagtgttacattttcgatgtttatcactcagtgggtttttattaatatgctgattaagttatttactgggccagtcattgtgctaaatagttgctcttttgtgtttcattgccttgatgtttgagtgtaatctagcattttaatacagtgtttattttgcatgatctttaacaaatgttttaagcaattttaaaaaggcaggatgttattgacattatacactgaagtcttaacattttaacatttatagtgcttatttgcaaaattgtataattaggaattatttcagagacaatgttttctttttcaggtgagtagttgccgcgtaatatcattggagtacattctttatactgtttgtgaaattaatactagcatattaagtgtacaaatagatttagaaaacaataaaaaattgcatgctattctgactcatgaatttttattcactatgatgattcacattttgattaaaaataaaagtagtttgtgtgtttg

SEQ ID NO: 75080 - DNA, 2500 bp, Homo Sapiens
  misc_feature (43)..(81): n is a, c, g, or t
  misc_feature (84)..(118): n is a, c, g, or t
  misc_feature (1717)..(1731): n is a, c, g, or t
aatgtattagatcacttatagggcgcctagctcggttgcaagnnnnnnnnnnnnnnnnnnnnnnnnnnnnnnnnnnnnnnncgnnnnnnnnnnnnnnnnnnnnnnnnnnnnnnnnnnncagtcgacggtaccggacatatgcccgggaattcggccattacggccgggggtcgtccctgctagtactccgggctgtgggggtcggtgcggatattcagtcatgaaatcagggtagggacttctcccgcagcgacgcggctggcaagactgtttgtgttgcgggggccggacttcaaggtgattttacaacgagatgctgctctccatagggatgctcatgctgtcagccacacaagtctacaccatcttgactgtccagctctttgcattcttaaacctactgcctgtagaagcagacattttagcatataactttgaaaatgcatctcagacatttgatgacctccctgcaagatttggttatagacttccagctgaaggtttaaagggttttttgattaactcaaaaccagagaatgcctgtgaacccatagtgcctccaccagtaaaagacaattcatctggcactttcatcgtgttaattagaagacttgattgtaattttgatataaaggttttaaatgcacagagagcaggatacaaggcagccatagttcacaatgttgattctgatgacctcattagcatgggatccaacgacattgaggtactaaagaaaattgacattccatctgtctttattggtgaatcatcagctaattctctgaaagatgaattcacatatgaaaaagggggccaccttatcttagttccagaatttagtcttcctttggaatactacctaattcccttccttatcatagtgggcatctgtctcatcttgatagtcattttcatgatcacaaaatttgtccaggatagacatagagctagaagaaacagacttcgtaaagatcaacttaagaaacttcctgtacataaattcaagaaaggagatgagtatgatgtatgtgccatttgtttggatgagtatgaagatggagacaaactcagaatccttccctgttcccatgcttatcattgcaagtgtgtagacccttggctaactaaaaccaaaaaaacctgtccagtgtgcaagcaaaaagttgttccttctcaaggcgattcagactctgacacagacagtagtcaagaagaaaatgaagtgacagaacatacccctttactgagacctttagcttctgtcagtgcccagtcatttggggctttatcggaatcccgctcacatcagaacatgacagaatcttcagactatgaggaagacgacaatgaagatactgacagtagtgatgcagaaaatgaaattaatgaacatgatgtcgtggtccagttgcagcctaatggtgaacgggattacaacatagcaaatactgtttgactttcagaagatgattggtttatttccctttaaaatgattaggtatatactgtaatttgattttttgctcccttcaaagatttctgtagaaataacttattttttagtattctacagtttaatcaaattactgaaacaggacttttgatctggtatttatctgccaagaatatacttcattcactaataatagactggtgctgtaactcaagcatcaattcagctcttcttttggaatgaaagtatagccaaaacatnnnnnnnnnnnnnnntcctcagtatagcttgcaattaagacctagatcacagtatttaagtgttttgcgttttatacatgaggtcagtgctacagccacctagcatgaactaacccagcttccacctccataaagttacctagagttgttgagttggaatatgttctggcatttacctgacctgccaatcattagggagaggcaacaaggtaattcagcctttcctcctatcagcacaaagaaactcaaagctgttttttccctttctgttccaaagcagtcttatcctgacaggagcggtctatactagtgcagatttcaacactttttttaaacgttttaattactatagtgttatgtagagatttgattgagcagctaatgtttctgaactttacttactaattttcagtgtccttaagggttctgtagtgttatcaaagcaaaaagaaaatgctgcataaaaataccaaacttcagcaactgttaatactcagatcatatacctcttaataaatagcatcttatgctaattagccctgctaaactatgtacagaggaaactgttcaagtattggatttgaaagtaagtgacttatgtttaacagaactaatgatgtattgaaacactgtattatgaaaagctaaattatacatcattgtaactatgtagaaagtgtagactaatgtataatcaaaatgctaaggatttttatatggccttgtatgaggggagtttgaatgttaataaacatgttttccactttaagatccagtaaaaaaa

SEQ ID NO: 75081 - DNA, 782 bp, Homo Sapiens
cgcatgcgggggcgcaggagtcaggcggattttattgaccggacggcaggcggggtctatgagcggctcctggaagcgcgcggccactcctcctgggtcaggcgcggaggcgccacgggcgggcgggggacgctgtcagaacggtccgggggccaggcagggcaggccaaggcggtttgctgcggggtccaccgctgggcgggagacgtctctccgaagtctctggccagctccgctgaagtccagggactccggttccagcgcaggctctggggcgcgcgggctccggggcgcacggacggggatccctgcctgggagctcctgcgtcgcgtctcccacagctcctgaacccacgagggcagcaggagaggagcctcgcgggctgcgggttcgggggagagggtgtccctggccaggggcccggcggccgcgcgcagcgcgcggcgccacagatagggtgagcgacgcagccccatgagcaggccagcggcgcggcccaccgtgtggtagcggggactcgccacgtgcttgtaccacgcgccggagggcagcggcagcaggagcagaagcagcagcagtgccagccgcggccggctcgcgggagccccccgctcccctgggcgccacgccagggcgctcgcgtcgacggccgcccggcggggcgggccacgaaccggctcggctgggtttgggcgcgcagtggagttggacgcccaggtaccggagcgcaggaggctggaggcgagccgtgggtccctgcaggcccagctataaccgctcg

SEQ ID NO: 75082 - DNA, 935 bp, Homo Sapiens
ggcgcggccccggccggggagcggagtccgcggtggaggcgcgggaggggccgggcccctcccgacgggactcccccgcgggcccaccaccgcccccgacccacgggcggacgggcgatccccccaaggggtctttaaacctccgcgccggaacgcgctaggtacctggacggcgggggggcggacgaggaggcgggggaggggaccggcgtccggcccccgaccctcgagacgccctagcgggaaggccggggagagcgagcggggccgtgcccggcggcgcggaccggcgcggcggaggcgacgggaatccggccggccccgaagacggggagccggcgcggcggggccggacgacgggctccggcggggaggatggcaccgagacctccagacccgccggcgacgccgccgtataacgccctcgggcccgccgacacccacttcgtcggggtcgctgccgtggacttctccccgccgcccgcgggtcccgcgatccgcgcacatcagttagacgccggtctttctgtcacgcttgctctctctctcgctccggtgccctcccctgaagttccctgcttctcgcctgcccggtgggccggggcgttcgagtgatctatgggttcgatgtgacgggcacgcctgcctcctcccgctggcggtgggccccttgttgtgttgggctcgtgtctgttttcggcgtacgttgttcgccgcagctgttctactggcggtctgctttccttcgtgcacgccgtgcgtgtttgtgctcggcgcttgtcgtcgcccggcgtgacacgctgctcgcggttttgtgtcgcctgtcagctcgtctcggcctcccgtctgacggcgctcgcgctgtgtactgtgggtgtggggtgctgagcgctgtgttgcgcgtgtgggtgtttttctcttgtgtggcgcgctgg

SEQ ID NO: 75083 - DNA, 1826 bp, Homo Sapiens
  misc_feature (78)..(112): n is a, c, g, or t
  misc_feature (661)..(669): n is a, c, g, or t
  misc_feature (1588)..(1592): n is a, c, g, or t
  misc_feature (1596)..(1596): n is a, c, g, or t
  misc_feature (1599)..(1601): n is a, c, g, or t
  misc_feature (1603)..(1642): n is a, c, g, or t
  misc_feature (1645)..(1645): n is a, c, g, or t
  misc_feature (1666)..(1668): n is a, c, g, or t
ttaagactcattatagggcgctagcgtctttgcagccgaacgacgagcgcagcgagtagtgagcgaggaagcggccgnnnnnnnnnnnnnnnnnnnnnnnnnnnnnnnnnnncagtcgacggtaccggacatatgcccgggaattcggccattacggccgggggaaaattgcacctattttacctttttaagagtaagccatgaaatcttgtaacatgtctcttaactatttataatgaaaagtggcatttgggtatagtcaccacagcaatgttctacatccctaagattatctaggtaggacatgtcaaagatgactgttgtcattctggaggtcctattagagaatattataaaaagggtgaccttgtaggaaggatctgagtcctccccctgaggttctctttttcttggtgctttattagcaactctggatatttttataaaactagttacattataaacggtttcaaacatgtttaatttacattaggtttttatgtaagagtgtcatggaagcactcagcaagcaggctgattgcaatagactcagacatgcgaataaatgtaattgagagtctattcatggtgaggagtacatcccagtgcctttaacctggatttctaatcttaagtgaaatgggtgcagcattcctttggnnnnnnnnntctttttattttcaagtgataattttgtgtttttctcatataagttttctccagagcacccaccttctcttccttcttggtctgtcattatattgcaaaatatttttcctctgaatgaaattatcacaggttgtctcaagcacaaccaactgaatgtctcttaactgtggggaccaaaagggagagagcctggggtctacaagaggagacacatcatcaaatgtttgaatgatcacaaattaagacattatcagcccagtaaatttcttgcttaatgtttttccaagttctggcttgaatatttcttattaaagctatcttatgtgggtattttattttgaaaggtattatagtttgtatatttaacagtaaggaggaaactgtaaccaaaattagtatttctctatacgtattggtacttgaagattcctttcaaaagaaatccagcgttttcctaattttagtacttaatttctctttttaatttaagtgatctttctaattcgaaagctgtgttctttttgaataccgtgcatgggggttaagctgatgttaaaacagtttgcaataaaaaaaaatgaatcagcttaagtcatttaatcatttcaagtgcattctgcatcctttaaaaataagtttaagaaatttaagagaattgtgttttcattaagttttgcatatcttttgttatgccatgtaaattccctttttcgtatgattaaaggaaggttatgataaaatgattagttcatttacattcacttgtagcaattacatgagaatttgaattttgtcgtgtttgggtttgttcattcctgtgaatgatggtacagttaggtgagattttctgttatggtacccaaactcaccatttggtcctctttaatctttgagggtttcaataaaaattgttcactcnnnnnaaanaannnannnnnnnnnnnnnnnnnnnnnnnnnnnnnnnnnnnnnnnncanaacaaccaccacaacccaaannnccctttgtgggccccgcctccgccccccaaaaaatctttctaaaaaccatttcctttgggccccgcgggcccccctggggaaagggaacctgggcccaaaacttgttcccccaagaaaaaaccggggccaggaaataagggtctgggaactccccacc

SEQ ID NO: 75084 - DNA, 1183 bp, Homo Sapiens
  misc_feature (476)..(476): n is a, c, g, or t
  misc_feature (643)..(684): n is a, c, g, or t
gagcagtgtctatgtattaatgcgttagaaagaaagctgcttgtgtatgctttggtaattgcctcaggatatttcttttaaaataagctgttttaagaggaacagaagggaaatctgctacctagtctatacacagcgtgaacctcacagggggcttctgataccctcaaacatggaggactttcaggaacttaactattctggaataaggaatgaatcaactgaccttgggccagcaggtttttaactaaattgttacttgcctttctcacccagttaatcagtctctgtacttgtttccctttttgaaacaagtgtcttggttaactaattctgttttatggttgtgctaaattcatagcaggtgccttattctttgcttttagtcaaaccattccatatcagaattttccttggtttactatagatatttggctttaagttgttgtttgtgttttttaatgtacaatgttctngataaatttgactgttaaattgctatagctagcaatcattttacatatgtaaaattgcattccctttgtatttcatgtgtaattcaccaattaagtgcagtttatattcaggttggattatgcatgtttaggtaaacgaaagctgtgtcttacttgatttattcttnnnnnnnnnnnnnnnnnnnnnnnnnnnnnnnnnnnnnnnnnncggaaatgattttacagttatctgagtgtaccttttatagttagtagaaaatgattttaaagaatgtttagtattgtacttaaatggtatgcagaggcacagatgtaaggtttataactggaaataggtggtaagaaaaatatatagaaagcacaatgatttgaatatttttccacttaggatttcctaatctccttgtcatccaattcaagctcaagatgaagcacaattctttgatctccctttgccagttgaattttatagatcatctaatgttgagcacagtatgagaataaatattggggttgtcaacattactcagttactctttgtggtttagctctaacatttcaacaagttgtcaattaattgtatctgttgggttgtatataatgttgctcaaaataattaagtggacttccaaaaataagatttccattgtaacaggatgcattgtgatgggctttgacttacattaaagaaatgtggatagtcaaaa

SEQ ID NO: 75085 - DNA, 2508 bp, Homo Sapiens
  misc_feature (1234)..(1242): n is a, c, g, or t
tccgacgaggacattcccgttgttgcgttgcgtttccttcctctttcactccgcgctcacggcggcggccaaagcggcggcgacggcggcgcgagaacgacccggcggccagttctcttcctcctgcgcacctgccccgctcggtcagtcagtcggcggccggcgcccggcttgtgctcagacctcgcgcttgcggcgcccaggcccagcggccgtagctagcgtctggcctgagaacctcggcgctccggcggcgcgggcaccacgagccgagcctcgcagcggctccagaggaggcaggcgagtgagcgagtccgaggggtggccggggcaggtggtggcgccgcgaagatggtcgccaagcaaaggatccgtatggccaacgagaagcacagcaagaacatcacccagcgcggcaacgtcgccaagacctcgagaaatgcccccgaagagaaggcgtctgtaggaccctggttattggctctcttcatttttgttgtctgtggttctgcaattttccagattattcaaagtatcaggatgggcatgtgaagtgactgaccttaagatgtttccattctcctgtgaattttaacttgaactcattcctgatgtttgataccctggttgaaaacaattcagtaaagcatcctgcctcagaatgactttcctatcatgcttcatgtgtcattccaaggtttcttcatgagtcattccaagttttctagtccataccacagtgccttgcaaaaaacaccacatgaataaagcaataaaatttgattgttaagatacagtaagtggaccctactttattcagtcaattaagagtaaagttttatatggtggttattaaaacagttatgaacaattagtctaactctgcatagacagggtctagaatttggtaacccaaatgtataactgcagttagcttaaattacaatttgaagtcttgtggtttttatatagctaggcactttattactcttttgaactgaaagcacactcccttataggttcatgtaactgtcctgtaataaggtgcttataaatggaacaactacacagcctagttttgccacaacctttagcatctaaaaagttttaaaagcttctaaatgtctaatataaagggagatgcttatagccacaacatctattttaccaatattgtttccattacactaccttggattttgcatgagtgagtatagtaacccaagatgccatnnnnnnnnncttgatcgttttctgacttaatcagttactgtggtttcactaaaagctaccgtggtggagtgaagtcagtcagggaaggttgtttatgttacatttatttcaccagaactattttaatatatcaaaggggtttactatgccaaacaaaattctagggaaaaatactgctaaaaatggatgcctcatcagaacatgctgttgagtccaatgtgccataagacatttttagcatgttaaatagcacttttaatagcaaaaaaaggcacatcaactgcgaagttatccttagtttgcaaatgctttttctagattaatgatttttcaatcattagggtactagacacatcagcctaaagtggcatctggaattgaactggatttactgataatgatcagtctttagtcttccctttgttatatgactttataggttatgattgatcaaatttacgttttactaatggtaagggtgagggtcatagggcaggttttgggttttctagtactgttgaaaactgcaagtattggctatttgtatacttagccataacttggtgaaaaaaaacctgagcagtgtctatgtattaatgcgttggaaagaaagctgcttgtgtttgctttgttaattgcctcaggatatttcttttaaaataagctgttttaagaggaacagaagggaaatctgctacctagtctatacacagcgtgaacctcacagggggcttctgataccctcaaacatggagaacagtaagggagcagagtggttaaggactttcaggaacttaactattctggaataaggaatgaatcaactgaccttgggccagcaggtttttaactaaattgttacttgcctttctcacccagttaatcagtctctgtacttgtttccctttttgaaacaagtgtcttggttaactaattctgttttatggttgtgctaaattcatagcaggtgccttattctttgcttttagtcaaaccattccatatcagaattttccttggtttactatagatatttggctttaagttgttgtttgtgttttttaatgtacaatgttctgataaatttgactgttaaattgctatagctagcaatcattttacatatgtaaaattgcattccctttgtatttcatgtgtaattcaccaattaagtgcagtttatattcaggttggattatgcatgtttaggtaaacgaaagctgtgtcttacttgatttattctttaaaaataaagttccctgaatatttgaaaaa

SEQ ID NO: 75086 - DNA, 1615 bp, Homo Sapiens
  misc_feature (792)..(847): n is a, c, g, or t
ggctagtacgaggccggggtgtttaattcggcacgaggcggaaacaaaaagggaatgggaaaaaagaaaacagatcctgggagggggcgggaaatacaaggaatattttttaaagaggattctcataaggaaagcaatgactgttcttgcgggggataaaaaagggcttgggagattcatgcgatgtgtccaatcggagacaaaagcagtttctctccaactccctctgggaaggtgacctggccagagccaagaaacactttcagaaaaacaaatgtgaaggggagagacaggggccgcccttggctcctgtccctgctgctcctctaggcctcactcaacaaccaagcgcctggaggacgggacagatggacagacagccaccctgagaacccctctgggaaaatctattcctgccaccactgggcaaacagaagaatttttctgtctttggagagtattttagaaactccaatgaaagacactgtttctcctgttggctcacagggctgaaaggggcttttgtcctcctgggtcagggagaacgcggggaccccagaaaggtcagccttcctgaggatgggcaacccccaggtctgcagctccaggtacatatcacgcgcacagcctggcagcctggccctcctggtgcccactcccgccagcccctgcctcgaggactgatactgcagtgactgccgtcagctccgactgccgctgagaagggttgatcctgcatctgggtttgtttacagcaattcctggactcgggggtattttggtcacagggtnnnnnnnnnnnnnnnnnnnnnnnnnnnnnnnnnnnnnnnnnnnnnnnnnnnnnnnnaatgacaatgaagtgacactttgacatttcctaccttttgaggacttgatccttctccaggaagaaggtgctttctgcttactgacttaggcaatacaccaagggcgagattttatatgcacatttctggatttttttatacggttttcattgacactcttccctcctcccacctgccaccaggcctcaccaaagcccactgccatggggccatctgggccattcagagactggagtgagatttgggtgtggagggggaggcgccaaggtggaggagcttcccactccaggactgttgatgaaagggacagattgaggaggaagtgggctctgaggctgcagggctggaagtccttgcccacttcccactctcctgccccaatctatctagtacttcccaggcaaataggcccctttgaggctcctgagtgccctcagatggtcaaaacccagttttccctctgggagcctaaaccaggctgcatcggaggccaggacccggatcattcactgtgataccctgccctccagagggtgcgctcagagacacgggcaagcatgcctcttcccttccctggagagaaagtgtgtgatttctctcccacctccttccccccaccagacctttgctgggcctaaaggtcttggccatggggacgccctcagtctagggatctggccacagactccctcctgtgaaccaacacagacacccaagcagagcaatcagttagtgaattgaatggaaataaacgctttagttataaa

SEQ ID NO: 75087 - DNA, 737 bp, Homo Sapiens
  misc_feature (62)..(62): n is a, c, g, or t
  misc_feature (82)..(82): n is a, c, g, or t
  misc_feature (88)..(88): n is a, c, g, or t
  misc_feature (605)..(620): n is a, c, g, or t
agagagttaaattctcttagcatcagacaacttgattcctaaggtttccagtgtgtcaccanacaaaaagtgcattgatagngacctntgtctcttcctccctttgattaattgcccggcatcacagtttactagattaccaagtgttacatcatattaaataaaatgtagcagaaccatctgcatcaatatattcctgtttagatttttgcaggagagaagttaaaaggatttgctccttgtatgatgtaagtggcccaccccaattttgtaacatgatgcaagtgtctggcactaagggaagcaagagtagggttgtggaaagaccaagctgatggggagggacttgtttacgggaatttttttagttttccttttcaaaggaaaacattaaaatcccttaggaatttggtattcacatctcagagaactacaacacaaaagtgcagacttatatttgagaattaatgttaaccctttgtgtctagtttgaagcttcttgtatttgtctaaaacaacaagccagaattttgtatctcctttgataaaaagtgtgtataatgtaaagtagttttgcatattcttgtgctgcacatgggctgaannnnnnnnnnnnnnnnaaaaacttgaagcagaaccttgtaatttgtgtaaatgacaagtgtaaaatcctaccataaaatgctaaaaatatgcactgtttcaaataaaaccaagaaatgcagcattaaaaaaaa

SEQ ID NO: 75088 - DNA, 1634 bp, Homo Sapiens
ggcagtactatccggtccttaggtagcgaggcctgggtggcgaattcggcacgagggtgaacatggcggcgcccgttgtcacggccccgggcagagctctgctgcgggcgggcgctggacggctgcttcggggaggcgtccaggagctactgcggccgcgacatgaagggaacgcccctgacctggcctgcaacttcagcctttctcaaaatcggggcacggtcatcgtggagcgctggtggaaggtaccgctggccggggagggccggaagccgcgcctgcaccggcgacatcgcgtctataagctggtggaggacacgaagcatcggcccaaagaaaacctggagctcatcctgacgcagtcggtggagaatgttggagtccggggtgacctggtctcagtgaagaaatctttaggccggaatcgactccttcctcagggactggctgtatatgcatcccctgaaaacaagaagctgtttgaagaggagaaattgctgagacaagaaggaaaattagagaagatccagaccaaggcaggtgaggcgacagtgaaatttctaaaaagctgtcgcctggaggtagggatgaagaacaatgtcaaatgggagctgaaccctgaaatagttgcccgccacttctttaagaatcttggtgttgtggttgccccacatacattaaagttaccagcagagcctatcacacggtggggcgagtattggtgtgaggtgacggtaaatgggcttgatactgtgagagtgcctatgtctgtcgtgaactttgagaagcccaagaccaaaagatataagtactggttagcccagcaagctgccaaggctatggcccccaccagcccccagatctaaatctactctccctccaaggcagcaaagcagaatcgggagcagtggagcagaaatgtgcaagcaccctgatctcactcccagctctgaccaaatacagaattttagagaacatctgaagacatcagactgcactgcgtatacatgttgaattcttcatttttgccatctttaactgtcatcactggggcagggaagtcctgttccagaagtaccaggctgtagatttgataagctagatgcagtagaccgaaaccatccaaaacctgtttagcttcttcctccattggagtttattgggacaaacaggagagccagccattgtctccagtacttgcctcattctcatcatccaaactgaacatttgtatcccaagcagaaataaagagaatatgttctttttaagtaagtgttgcttactggtcttgagtagatgagacaggacatccaactgagatttccttgagccacagaggtttgctgcaccaagtggctagacggtttccttgaggaatggtgacatcaggctaagtgttggtctctgttgctggcaagctggacattcactgatgcagtagttagatcagacttgatgagtccatgacgttgaacccttgcatttgctccaccatggctcctccgttcattgatcactttgccagcattggggtgccagcaacaaagcctggttaacattatttggctaagtcattccatctgcttggttggtacttttctgtggtggatgttatctgatgggaattaaccag

SEQ ID NO: 75089 - DNA, 740 bp, Homo Sapiens
caacctataggctaggtacgaggctgggtgttaaattcggcacgaggcgatgaccgtgccctggcggccaggaaagcgacgcatcacttataaggaagaggaggacttgacactccagccccgttcctgcctccagtgctcctgagtccctagtaggcctccaggagggcaaaagcaccgagcagggtaaccacgaccagcttaaagaactgtattcggctgggaacttgacggtgctggctactgaccccctgctccaccaggacccagtacagttagactttcacttccgccttacctcccagacctctgcccattggcacggccttctctgtgaccgtcgactcttcctggatatcccatatcaggccttggatcaaggcaaccgggaaagtttgactgcaaccctggagtacgtggaagagaagacaaatgtggactctgtgtttgtgaacttccagaatgatcggaacgacagaggtgccctgctgcgggccttcagctacatgggctttgaggtggtcagaccagatcaccctgccctccctcccttggacaatgtcatctttatggtgtatccccttgaaagggatgttggccacctgcccagtgagcctccttgaacatgcttattccaacgctttgaggggctggaagccttgacacatggaatcaggggcccgggatgtgattcaggacactttccatcctaggaataaagggtagtgcaatcatcaaaa

SEQ ID NO: 75090 - DNA, 586 bp, Homo Sapiens
tgcggccgcgacatgaagggaacgcccctgacctgtcctgcaacttcagcctttctcaaaatcggggcacggtcatcgtggagcgctggtggaaggtaccgctggccggggagggccggaagccgcgcctgcaccggcgacatcgcgtctataagctggtggaggacacgaagcatcggcccaaagaaaacctggagctcatcctgacgcagtcggtggagagtaaggcccgggccgaggcgcttcctctcaggctggtccggtttggcatcagctttttctagcccgtccccctcaactatttgccttgctttttctttgtggaaacaatccaactctatatgtgagaagaggaagccataaaaactattgtgattgtgacactggcctccagcattgaaaattaaaacataaaggcagcaacatcattaacagtgtgtggggagaggagcctgacaatttgtgccacagatactgaaatcctccatgggacgacaactccctctatacaggggatattaaatttatacatcaagttctaaagaaactaattagcagtctcttaaatcttgttcctagtgaatat

SEQ ID NO: 75091 - DNA, 1146 bp, Homo Sapiens
aagaaactccgcaagctgctcaagcgcctgcagaacaacgacacgtgcagcatgccacgcctcacgtgcttcacccacaacaaccagcactggcagacggcgcctttctggacactggggcctttctgtgcctgcaccagcgccaacaataacacgtactggagcatgaggaccatcaatgagactcacaatttcctcttctgtgaatttgcaactggcttcctaaagtactttgatctcaacacagacccctaccagctgatgaatgcagtgaacacactggacagggatgtcctcaaccagctacacgtacagctcatggagctgaggagctgcaagggttacaagcagcgtaaccccccggactcgaaacatggacctgggacttaaagatggaagaagctatgatcaatacaggggacaactgtgggaaggctgggaaggttaagaaacaacagaggtggacctccaaaaacatagaggcatcacctgactgcacaggcaatgaaaaaccatgtgggtgatttccagcagacctgtgctattggccaggaggcctgagaaagcaagcacgcactctcagtcaacatgacagattctggaggataaccagcaggagcagagataacttcaggaagtccatttttgcccctgcttttgctttggattatacctcaccagctgcacaaaatgcattttttcgtatcaaaaagtcaccactaaccctcccccagaagctcacaaaggaaaacggagagagcgagcgagagagatttccttggaaatttctcccaagggcgaaagtcattggaatttttaaatcataggggaaaagcagtcctgttctaaatcctcttattcttttggtttgtcacaaagaaggaactaagaagcaggacagaggcaacgtggagaggctgaaaacagtgcagagacgtttgacaatgagtcagtagcacaaaagagatgacatttacctagcactataaaccctggttgcctctgaagaaactgccttcattgtatatatgtgactatttacatgtaatcaacatgggaacttttaggggaacctaataagaaatcccaattttcaggagtggtggtgtcaataaacgctctgtggccagtgtaaaagaaaaaaaa

SEQ ID NO: 75092 - DNA, 1068 bp, Homo Sapiens
  misc_feature (968)..(1026): n is a, c, g, or t
ggcacgaggcttcctctcgccaggccttcctggctgaagcctcagtcatgacgcaactgcggcatagcaacctggtgcagctcctgggcgtgatcgtggaggagaagggcgggctctacatcgtcactgagtacatggccaaggggagccttgtggactacctgcggtctaggggtcggtcagtgctgggcggagactgtctcctcaagttctcgctagatgtctgcgaggccatggaatacctgggagggcaacaatttcgtgcatcgagacctggctgcccgcaatgtgctggtgtctgaggacaacgtggccaaggtcagcgactttggtctcaccaaggaggcgtccagcacccaggacacgggcaagctgccagtcaagtggacagcccctgaggccctgagagagaagaaattctccactaagtctgacgtgtggagtttcggaatccttctctgggaaatctactcctttgggcgagtgccttatccaagaattcccctgaaggacgtcgtccctcgggtggagaagggctacaagatggatgcccccgacggctgcccgcccgcagtctatgaagtcatgaagaactgctggcacctggacgccgccatgcggccctccttcctacagctccgagagcagcttgagcacatcaaaacccacgagctgcacctgtgacggctggcctccgcctgggtcatgggcctgtggggactgaacctggaagatcatggacctggtgcccctgctcactgggcccgagcctgaactgagccccagcgggctggcgggcctttttcctgcgtcccagcctgcacccctccggccccgtctctcttggacccacctgtggggcctggggagcccactgaggggccagggaggaaggaggccacggagcgggaggcagcgccccaccacgtcgggcttccctggcctcccgccactcgccttcttagagnnnnnnnnnnnnnnnnnnnnnnnnnnnnnnnnnnnnnnnnnnnnnnnnnnnnnnnnnnnaagataaggagaaagaaagtacccagcaaatgggcattttac

SEQ ID NO: 75093 - DNA, 955 bp, Homo Sapiens
  misc_feature (540)..(607): n is a, c, g, or t
gggattcgcggaatctttttttgggggaaaagtgatccctttggggggagggccttaatccaaagatttcccctaaaggaccgtttttcccctggggggaagaagggttccaaggaaggattggccccggacgggtgccgccccccagtcttagaagtcatgaagaactgctggcaccttgaccgccgccatggggccctcctttcctaccagctcgaggagcagcttgagccacatcaaaaccccccgaagctgcacctgtgacgggtggcctccgcctgggttcatgggcctgtggggactgaacctggaagatcatggacctggtgcccctgctcactgggcccgagcctgaactgagccccagcgggctggcgggcctttttcctgcgtcccagcctgcacccctccggccccgtctctcttggacccacctgtggggcctggggagcccactgaggggccagggaggaaggaggccacggagcgggaggcagcgccccaccacgtcgggcttccctggcctcccgccactcgccnnnnnnnnnnnnnnnnnnnnnnnnnnnnnnnnnnnnnnnnnnnnnnnnnnnnnnnnnnnnnnnnnnnnaagataaggagaaagaaagtacccagcaaatgggcattttacaagaagtacgaatcttatttttcctgtcctgcccgtgagggtgggggggaccgggcccctctctagggacccctcgccccagcctcattccccattctgtgtcccatgtcccgtgtctcctcggtcgccccgtgtttgcgcttgaccatgttgcactgtttgcatgcgcccgaggcagacgtctgtcaggggcttggatttcgtgtgccgctgccacccgcccacccgccttgtgagatggaatcgtaataaaccacgccatgaggacaccgccgcccgcctcggcgcttcctccaccgaaaaaaa

SEQ ID NO: 75094 - DNA, 1049 bp, Homo Sapiens
  misc_feature (140)..(140): n is a, c, g, or t
  misc_feature (173)..(173): n is a, c, g, or t
  misc_feature (272)..(272): n is a, c, g, or t
  misc_feature (317)..(317): n is a, c, g, or t
ttccgatgaagcgcgtgcgccaccaattattgattagtcatcatagcaccccagcttacattttgtccggttgtatgtggtggaatttgacgataacatttcacacggaacagtttgactgatacgatttatacgcttcnttttaggaattgccctcgagcccagaatcgcanggagtgtgcagggatccaaaggaacacagtatgaggtcaactggcagtacagtgtacagccttgacaaactagaaatattagagtagcccaaacacacntccaaactgtaaggctgtgcacaaaacataaaaaaggcagccttnccatctcctgcactggctgagtccatttacttgtgtacttgttctagtgagtggtgggactgtacatttttgaatagacctcaaaaatacttcattctgctgctgttcagttggctttttaaacctgtctgcagtaggacactgaaaacagcaagaacttcggggtgaacacccgctgatcctttaacaaggatttctggcaggaaactcacaaaaaggagaactgaaaatttagacatacagttggccattgtaaaaaacatcagtttcctctcatacattccaagtaaaccaagtaaaataagtgttggagtaacacttgcataaaagaatttaaggagtgatagctctttctgttctgccattcccaacattcctgggggaaaggagactcaatgagttaatactatttcactgagcccaagatggaaacttggtttgacctaaaacatctgattaatataggctagctgatttcttaaaaattcgttgcattgaaggatattttgcatgtctgtaacacctgtcaatacttgtttgtattgatttctgatattcttgcagctgactacgtgtaattgggcagatcagctttgcagtagattatgctgcatcctcgtggcaaaattctgtattcttagtgattgttacaaacccctttattgctgtctgagaaagtgaaagattgtgtatttctattaaaacatttacaatcaaaaagaaagaagacag

SEQ ID NO: 75095 - DNA, 805 bp, Homo Sapiens
  misc_feature (658)..(658): n is a, c, g, or t
  misc_feature (661)..(679): n is a, c, g, or t
  misc_feature (681)..(685): n is a, c, g, or t
cggctaggtacgaggctgggtgttgaattcggcacgaggcgttacgccagtttgaaccaaagacgcccaaggttgaggccgagttccagagcatggggtctcggttgtcccagccttttgagtcctatatcactgcgcctcccggtaccgccgccgcgcccgccaaacctgcgcccccagctacacccggagcgccgacctccccagcagaacaccgcctgttgaagacctgctggagctgtcgcgtgctttctgggttggggctgatgggggcgggcgggtacgtgtactgggtggcacggaagcccatgaagatgggataccccccgagtccatggaccattacgcagatggtcatcggcctcagcattgccacctggggtatcgttgtcatggcagaccccaaagggaaggcctaccgcgttgtttgaaagtaccaccagtgaatctgtcttctgtctctgtccctttccccgtgacacacagagcaggcatggaatttaatgggtgttctggacagacacttgtacatggacagacatcactactgtggatactacaagactgaaaagaaaatcgtatgttgtcattctctggctatggagtgtttgtggccttcacagatttcacaggaaccaataaatccctcagagaagtngannnnnnnnnnnnnnnnnnnannnnnaaacatggtcggccgcctccggcccctcgagaagcctttctaggaccatttccttttgggcgccgcgggcccccagtagggtaagggggaacatgggtccatagcctggttttcctagac

SEQ ID NO: 75096 - DNA, 1209 bp, Homo Sapiens
  misc_feature (632)..(632): n is a, c, g, or t
cgtttacgccagtttgaaccaaagacgcccaaggttgaggccgagttccagagcatggggtctcggttgtcccagccttttgagtcctatatcactgcgcctcccggtaccgccgccgcgcccgccaaacctgcgcccccagctacacccggagcgccgacctccccagcagaacaccgccttttgaagacctgctggagctgtcgcgtgctttctgggttggggctgatgggggcgggcgggtacgtgtactgggtggcacggaagcccatgaagatgggataccccccgagtccatggaccattacgcagatggtcatcggcctcagcattgccacctggggtatcgttgtcatggcagaccccaaagggaaggcctaccgcgttgtttgaaagtaccaccagtgaatctgtcttctgtctctgtccctttccccgtgacacacagagcaggcatggaatttaatgggtgttctggacagacacttgtacatggacagacatcactactgtggatactacaagactgaaaagaaaatcgtatgttgtcattctctggctatggagtgtttgtggccttcacagatttcacaggaaccaataaatccctcagagaagtaaaacaggttctntgtcttatctggggaaggaacagtataacttatatctaaatataattgcttaattaagcattatatataaacataatagtatgtcttatataattgcatgtcatattatctctaataaacctaaatatgtcagtatatagtaggataactttgcaaaaactttgtaaataccagcactatggtacaaccaacgcgaaaaattagctatttacctccatcattcacacgagtaccgttcaatttctctccatcatgggtcccacaactggacacctaacacgggttgggcatctgccatatcttagacgtcggtaaacatttcgggggtattgacattgcacgataccttggcagggcatttccaactccctcaccttttcgaaacgtcacagctaatgtgagagagaacactgcactgggcagagtaagctcaaccacccgaacgaagaccccatagatttgcaaggggcacactaacaccgcgaggacatcacctggttgatcaagaatggacagccatgccaccagggcagaaccaatatgaagtggagcataacatcggccaaacgttcagtcc

SEQ ID NO: 75097 - DNA, 656 bp, Homo Sapiens
agaattcggcacgagggcggtcgtggccaggactggcgcagctgccgtttcaggcgaggggcgcagaatgcagcggccgccagcctggagcgcgggccctggggccgcaacccgcgccgggcgaggtggcagcacaccctgggccccccactccccgccgcaagtcctgaggatggccagcagagaaacaagaaaatggactccctggctgctggagagttgaatgccagccaccagccatgggtgccagagtttgtagcctattggaggaaaacacaccaagatcacctctgcagcctgcacagccgggcctttggactcctggatgctagagtgacctgggcgctgaggagggcccccgagccagtaccaggaaaggatagactcctgcttgcagcattcccagcagaggcatcgcctgtggacaccgcgtctgtgtctgtatatggcagagctcccagatatatgcacaagggagtgaaaaaatgtgtttgcaccccagtctctaaaaattcaacagcctggttacttctgggtggtatatcgtaggtggctttaatacgtgttatttgctcatctgtatttcttactctttgcacaattaaaccatgttccttttacttatgtacatttttaataaaagaaagttgttaatg

SEQ ID NO: 75098 - DNA, 565 bp, Homo Sapiens
gccctggggccgcaacccgcgccgggcgaggtggcagcacaccctgggccccccactccccgccgcaagtcctgaggatggccagcagagaaacaagaaaatggactccctggctgctggagagttgaatgccagccaccagccatgggtgccagagtttgtagcctattggaggaaaacacaccaagcctacgccactctgtgccctttagccaaggaagcccagctgaggccccgcagcgtccctgcccagcagagctacaggaggcccgaggccccttcctgttcactcttgctctatagacgccacgctgcaaagcagatgtgcagggacaccacctgaagacccagcctgcagctcagccctacacactgtggatggtggagatcccagagggccaagagaagcttattgagacttctctgcactgcccctcccacagcaggaggttcatggcccatgcatttctgggagggttgacagggcccaggttgtggaatacctgtctgtgagccccatgtcctgtcttgtcccagctgcctgtagtttgacagagtatgctag

SEQ ID NO: 75099 - DNA, 777 bp, Homo Sapiens
  misc_feature (596)..(610): n is a, c, g, or t
tgcctgggactttcccagttttggcactgaaagtcccaaatcctgggaaactcctcagtcctaagcaaactggaacagttggtcagcctatctccaagccttttgcacctcctaatctactctagatcacctctgcagcctgcacagccgggcctttggactcctggatgctagagtgacctgggcgctgaggagggcccccgagccagtaccaggaaaggatagactcctgcttgcagcattcccagcagaggcatcgcctgtggacaccgcgtctgtgtctgtatatggcagagctcccagatatatgcacaagggagtgaaaaaatgtgtttgcaccccagtctctaaaaattcaacagcctggttacttctgggtggtatatcgtaggtggctttaatacgtgttatttgctcatctgtatttcttactctttgcacaattaaaccatgttccttttacttatgtacatttttaataaaagaaagttgttaatgacaagagaaaaaatacataatctagggctagaacttacctttcacaccccggagcctgagaaaaaaaacctgtacagttgccctttctcgtactccgnnnnnnnnnnnnnnntcgccgcacttgggcggcgccccccacgggcccccaaatattagccccgtgttcacccgtgccgggagaactttccccctccctccgaattgcccccggcgccgaaaactggcttcccgaaaaggcccgggtccccctttctctcccggctcaaatatcttccacct

SEQ ID NO: 75100 - DNA, 1026 bp, Homo Sapiens
  misc_feature (56)..(107): n is a, c, g, or t
  misc_feature (111)..(145): n is a, c, g, or t
ccccccgcggaacccgttgcgtatcgcgttcacgttatactcctatagggcgctannnnnnnnnnnnnnnnnnnnnnnnnnnnnnnnnnnnnnnnnnnnnnnnnnnnccgnnnnnnnnnnnnnnnnnnnnnnnnnnnnnnnnnnncagtcgacggtaccggacatatgcccgggaattcggccattacggccggggggagtctgcaggatggcaccggacccctggttctccacatacgattctacttgtcaaattgcccaagaaattgctgagaaaattcaacaacgaaatcaatatgaacgaaaaggtgaaaaggcaccaaagcttaccgtgacaatcagagctttgttgcagaacctgaaggaaaagatcgcccttttgaaggacttattgctaagagctgtgtcaacacatcagataacacagcttgaaggggaccgaagacagaacctcttggatgatcttgtaactcgagagagactacttctggcatcctttaagaatgagggtgccgaaccagatctaatcaggtccagcctgatgagtgaagaggctaagcgaggagcacccaacccttggctctttgaggagccagaggagaccagaggcttgggttttgatgaaatccggcaacagcagcagaaaattatccaagaacaggatgcaggccttgatgccctttcctctatcataagtcgccaaaaacaaatggggcaggaaattgggaatgaattggatgaacaaaatgagataattgacgaccttgccaacctagtggagaacacagatgaaaaacttcgcaatgaaaccaggcgggtaaacatggtggacagaaagtcagcctcttgtgggatgatcatggtgattttactgctgcttgtggctatcgtggttgttgcagtcttggccgaccaactgatggcagtaaagagaccaccagcagtgacacctgccaatgacagatgcaagcccaacacccttttggtacgcaaaaactgctctcaataaaatcccccaaagctctg

SEQ ID NO: 75101 - DNA, 645 bp, Homo Sapiens
gggccgaggggggggcggagtctgcaggatggcaccggacccctggttctccacatacgattctacttgtcaaattgcccaagaaattgctgagaaaattcaacaacgaaatcaatatgaacgaaaaggtgaaaaggcaccaaaggtccagcctgatgagtgaagaggctaagcgaggagcacccaacccttggctcttttttgagccagaggagaccagaggcttgggttttgatgaaatccggcaacagcagcagaaaattatccaagaacaggatgcaggccttgatgccctttcctctatcataagtcgccaaaaacaaatggggcaggaaattgggaatgaattggatgaacaaaatgagataattgacgaccttgccaacctagtggagaacacagatgaaaaacttcgcaatgaaaccaggcgggtaaacatggtggacagaaagtcagcctcttgtgggatgatcatggtgattttactgctgcttgtggctatcgtggttgttgcagtctggccgaccaactgatggcagtaaagagaccaccagcagtgacacctggcaatgacagatgcaagcccaacacccttttggtacgcaaaacctgctctcaataaattcccccaaagctcaaaaaaaa

SEQ ID NO: 75102 - DNA, 988 bp, Homo Sapiens
  misc_feature (70)..(70): n is a, c, g, or t
  misc_feature (830)..(838): n is a, c, g, or t
cagtcgacggtaccggacatatgcccgggaattcggccattacggccggggtatatattcagtggcattntggagaacaaagtgaatttacttcgacttcttaaattttgtaaaagactataagtttagacatctttctcattcaaatttaaagatatctttctcctcttgatcaatctatcaatattgatagaagtcacactagtatataccatttaatacatttacactttcttatttaagaagatattgaatgcaaaataattgacatatagaactttacaaacatatgtccaaggactctaaattgagactcttccacatgtacaatctcatcatcctgaagcctataatgaagaaaaagatctagaaactgagttgtggagctgactctaatcaaatgtgatgattggaattagaccatttggcctttgaactttcataggaaaaatgacccaacatttcttagcatgagctacctcatctctagaagctgggatggacttactattcttgtttatattttagatactgaaaggtgctatgcttctgttattattccaagactggagataggcagggctaaaaaggtattattatttttcctttaatgatggtgctaaaattcttcctataaaattccttaaaaataaagatggtttaatcactaccattgtgaaaacataactgttagacttcccgtttctgaaagaaagagcatcgttccaatgcttgttcactgttcctctgtcatactgtatctggaatgctttgtaatacttgcatgcttcttagaccagaacatgtaggtccccttgtgtctcaagacnnnnnnnnncttaattgcatttgttggctctattttaatttttttcttttaaaataaacagctgggaccatcccaaaagacaagccatgcatacaactttggtcatgtatctctgcaaagcatcaaattaaatgcacgcttttgtcatgtcaaaaaaaa

SEQ ID NO: 75103 - DNA, 724 bp, Homo Sapiens
  misc_feature (534)..(550): n is a, c, g, or t
atagatatttttcaaaaataccagtgatgtcattgcaggacaattttatggacacactcacagagacagcattatggttctttcagataaaaaaggatatgttgcagtattacttgaatctgacagaggcgaatctaaagggagagtccatctggaagctggagtatatcctgacccagacctacgacattgaagatttgcagccggaaagtttatatggattagctaaacaatttacaatcctagacagtaagcagtttataaaatactacaattacttctttgtgagttatgacagcagtgtaacatgtgataagacatgtaaggcctttcagatttgtgcaattatgaatcttgataatatttcctatgcagattgcctcaaacagctttatataaagcacaattactagtatttcacagtttttgctaatagaaaatgctgattctgattctgagatcaatttgtgggaattttacataaatctttgttaattactgagtgggcaagtagacttcctgtctttgctttcnnnnnnnnnnnnnnnnngatgccttaatgtagatatctttatcattctgaattgtattatatatttaaagtgctcattaatagaatgatggatgtaaattggatgtaaatattcagtttatataattatatctaatttgtacccttgttgaaattgtcatttatacaataaagcgaattctttatctctaa

SEQ ID NO: 75104 - DNA, 885 bp, Homo Sapiens
gacgttagggctaggtacgaggctgggtgttaattcggcacgaggtggagctgtcctcgcgggccgcgggtgctggtcacctggtggcagtgcaaatggtatagtggcgcggcacggtccagtgcgctgcacgcgacgggcgcgcgggtggtggctgtgagccggactcaggcggatcttgacagccttgtccgcgagtgcccggggatatgaaccctgtgttgcgttggaccatgggttgacttggtgatgtgccacctgatgcgggcgctgggcagcgtgggcccctgtgaacctgctggtgaacaaccccgctgtcgccctgctgcagcccttcctggaggtcaccaaggaggcctttgacagatcctttgaggtgaacctgcgtgctggtcatccaggtgtcgcagattgtggccagtgggcttaatagcccggggagtcccaggggccatcgtgaatgtctccagccagtgctcccagcgggcagtaactaaccatagcgtctactgctccaccaagggtgccctggacatgctgaccaaggtgatggccctagagctcgggccccacaagatccgagtgaatgcagtaaaccccacagtggtgatgacgtccatgggccaggccacctggagtgacccccacaaggccaagactatgctgaaccgaatcccacttggcaagtttgctgaggtagagcacgtggtgaacgccatcctctttctgctgagtgaccgaagtggcatgaccacgggttccactttgccggtggaagggggcttctgggcctgctgagctccctccacacacctcaagccccatgccgtgctcatcctacccccaatccctccaataaacctgattctgctgcccaaaaaaaaa

SEQ ID NO: 75105 - DNA, 957 bp, Homo Sapiens
cagtaactataacgggtattggtagcgaggcctgggtggcgaattcggcacgaggggagctgttcctcgcggggccgccgggtgctggtcaccggggcaggcaaaggtatagggcgcggcacggtccaggcgctgcacgcgacgggcgcgcgggtggtggctgtgagccggactcaggcggatcttgacagccttgtccgcgagtgcccggggatagaacccgtgtgcgtggacctgggtgactgggaggccaccgagcgggcgctgggcagcgtgggccccgtggacctgctggtgaacaacgccgctgtcgccctgctgcagcccttcctggaggtcaccaaggaggcctttgacagatcctttgaggtgaacctgcgtgcggtcatccaggtgtcgcagattgtggccaggggcttaatagcccggggagtcccaggggccatcgtgaatgtctccagccagtgctcccagcgggcagtaactaaccatagcgtctactgctccaccaagggtgccctggacatgctgaccaaggtgatggccctagagctcgggccccacaagatccgagtgaatgcagtaaaccccacagtggtgatgacgtccatgggccaggccacctggagtgacccccacaaggccaagactatgctgaaccgaatcccacttggcaagtttgctgaggtagagcacgtggtgaacgccatcctctttctgctgagtgaccgaagtggcatgaccacgggttccactttgccggtggaagggggcttctgggcctgctgagctccctccacacacctcaagccccatgccgtgctcatcctacccccaatccctccaataaacctgattctgctgccccagactattgtgctattccctaagctggccaccagggtacctggggggctttgggggcccaagtggtgggaacccccgggccaaagaacc

SEQ ID NO: 75106 - DNA, 870 bp, Homo Sapiens
gccgacatggagctgttcctcgcgggccgccgggtgctggtcaccggggcaggcaaaggtatagggcgcggcacggtccaggcgctgcacgcgacgggcgcgcgggtggtggctgtgagccggactcaggcggatcttgacagccttgtccgcgagtgcccggggatagaacccgtgtgcgtggacctgggtgactgggaggccaccgagcgggcgctgggcagcgtgggccccgtggacctgctggtgaacaacgccgctgtcgccctgctgcagcccttcctggaggtcaccaaggaggcctttgacagatcctttgaggtgaacctgcgtgcggtcatccaggtgtcacaggtgagctgccctgtgggctggacgggaattctcgtgagtgatgccagctctgcctcacggtctcgctgcgattccagattgtggccaggggcttaatagcccggggagtcccaggggccatcgtgaatgtctccagccagtgctcccagcgggcagtaactaaccatagcgtctactgtgagtgccccagctgtgccctcagcccaacccagacccagactcgccctcatcagcgaccccagcccaagcagcttgggttctcttcgtaggctccacaagggtgcctggacatgctgaccaaggtgatggccctagagctcgagccccacaaggtgagcagagactgggtacctaccccaagctaggacacgccacttgccctggatgaaccccaggctgtcacggtagtaggatccgagtgaatgcagtaaaaaccacagtggtgattgacgtcccatggggccaaggcacctggaagtgaaccacaaaggccaagatatggtgaacagaaatccg

SEQ ID NO: 75107 - DNA, 1176 bp, Homo Sapiens
aaaatttactgtttatttctttgttacacaaaggtggtccaagacatcttagtccatctcctatgtccttttggccataattacacacacaataatggcaagctagattaggagtctagctcagggtcaagtttttccactttaatgactatctctggagctaaagcggcagcaccagcttgttggttctctgcctctgactccgacaacacttcttcctttatttttacaggcttattactggcctcctcctcttcatctgaagactcatcgagctcccattcatcatctatgtccatttcaaatactctcacatgacgaagatttgagcttaacacacaggacacttttcgaaaaccattcccagcaacatactgtgctttcatactttccagtaatctccagtgcttctcgaaatgcatggtacgggtgggaatagcactacactgttcatctagccttgtagaataagtcccagtgaactgatattctgcagaatcttcactgttatatactaaagacaaaggcagctggaccaagagtctatctcttccttcacgtcctacagtgtctttaagaactactgttagcagtttcatcattcataaagacggtgcatctaaacaagctgtagatgctagaattaaaataagttttgttatatcaaagatgatcgtgactacggagaaaatattgtatgcatgttatactggcagcaagcagaaaaaaatttaaaagttaagtgacattctgtacaataacatttaaaatatatcattggtttgtattaaaatcagttactttttgtactgattattcacatatataaccaaatcttaaaaatgggtaatcatgacccccaaaaatctgtgaagttgtttcagttctagaaagcccctggccatcaatggttaggccttaagcctgtggaaattctatgaatgacaccttatatacacattcagcagagttgactagactgagaaataaaaataagatactacacatgaaaaataggcacagcaactccaaggactttatcataaaaaaacttattttatgtgaggaaaaaagtgagaaaaagatcagcctatgattagtcacttctttcccttgcgaagcctcagggatggcttaggtactgtgggcaattgaatcctaagaaactcatttttg

SEQ ID NO: 75108 - DNA, 1000 bp, Homo Sapiens
  misc_feature (55)..(55): n is a, c, g, or t
  misc_feature (57)..(57): n is a, c, g, or t
  misc_feature (61)..(61): n is a, c, g, or t
  misc_feature (124)..(124): n is a, c, g, or t
  misc_feature (138)..(138): n is a, c, g, or t
  misc_feature (180)..(180): n is a, c, g, or t
  misc_feature (216)..(216): n is a, c, g, or t
  misc_feature (263)..(264): n is a, c, g, or t
  misc_feature (268)..(268): n is a, c, g, or t
  misc_feature (274)..(274): n is a, c, g, or t
  misc_feature (277)..(277): n is a, c, g, or t
  misc_feature (303)..(303): n is a, c, g, or t
  misc_feature (315)..(315): n is a, c, g, or t
aatgaagtagagtctgaaaataatcatattagacgccattgtagctaaaaatgtntnaacntgattgagaaaatgttgagccacgtgtaccaaaaagaataattggtattctatccaatgtctntgtgactgttgatntaaccaaattgttatctatctagcattaaacaagtctcagtntctaaggagtacatgactgacctgacatcatgtctntaagcctttagattatgactatccagttgttccacagagttcttttnntccncctctntcntgaagatctgtgagtaatggactaantgctattaaatntgggagctttacatatgccacaacagaaaaagtcagaagaagcatctacagttgtttagatgcacagttttatgatgatgaaactgtaacagtagttcttaaagacactgtaggacgtgaaggaagagatagactcttggtccagctgcctttgtctttagtatataacagtgaagattctgcagaatatcagttcactgggacttattctacaaggctagatgaacagtgtagtgctattcccacccgtaccatgcattttgagaagcactggagattactggaaagtatgaaagcacagtatgttgctgggaatggttttcgaaaagtgtcctgtgtgttaagctcaaatcttcgtcatgtgagagtatttgaaatggacatagatgatgaatgggagctcgatgagtcttcagatgaagaggaggaggccagtaataagcctgtaaaaataaaggaagaagtgttgtcggagtcagaggcagagaaccaacaagctggtgctgccgctttagctccagagatagtcattaaagtggaaaaacttgaccctgagctagactcctaatctagcttgccattattgtgtgtgtaattatggccaaaaggacataggagatggactaagatgtcttggaccacctttgtgtaacaaagaaataaacagtaaattttattttttcat

SEQ ID NO: 75109 - DNA, 1137 bp, Homo Sapiens
tcagaatgatgatgagctgcccatgaaagaaggagactgcatgacaatcatccacagggaagacgaagatgaaatcgaatggtggtgggcgcgccttaatgataaggagggatatgttccacgtaacttgctgggactgtacccaagaattaaaccaagacaaaggagcttggcctgaaacttccacacagaattttagtcaatgaagaattaatctctgttaagaagaagtaatacgattatttttggcaaaaatttcacaagacttattttaatgacaatgtagcttgaaagcgatgaagaatgtctctagaagagaatgaaggattgaagaattcaccattagaggacatttagcgtgatgaaataaagcatctacgtcagcaggccatactgtgttggggcaaaggtgtcccgtgtagcactcagataagtatacagcgacaatcctgttttctacaagaatcctgtctagtaaataggatcatttattgggcagttgggaaatcagctctctgtcctgttgagtgttttcagcagctgctcctaaaccagtcctcctgccagaaaggaccagtgccgtcacatcgctgtctctgattgtccccggcaccagcaggcccttggggggctcacctgaaggctcgaaggcactgcacacttgtatattgtcagtgaagaactgttagttggttgtcagtgaacaataactttattatatgagtttttgtagcatcttaagaattatacatatgtttgaaatattgaaactaagctacggtaccagtaattagatgtagaatcttgtttgtaggctgaattttaatctgtatttattgtcttttgtatctcagaaattagaaacttgctacagacttacccgtaatatttgtcaagatcatagctgactttaaaaacagttgtaataaactttttgatgctagctgtttactggtttttgtttttgatgtcataaatagaccttgtttaatagtcacaagccgttgggatatcatacccagctgaaaaagaacaaactgcttaacataagtatatgtatcgtaataagagttttttaccagctaagtgattcaatgtaagtggtttttaaaataaaatactgtagagatcatggtg

SEQ ID NO: 75110 - DNA, 717 bp, Homo Sapiens
caccaccatgtgcgagcgtggatttgaaaacctcttcatgctttccggaggtctaaaagtcttagctcagaaattcccggaaggactgattactggttccctgccagcatcttgccagcaggcccttcctcctgggtctgcccggaaacgatccagccccaaagggccacccctaccagctgagaataaatggagatttaccccagaagacttaaaaaagatagaatattatctggaagaggagcaagggcctgcagatcatcctagccgactgaaccaagctaactcctccggaagagagtccaaggtgcctggtgcccgaagcgctcagaatctgccaggtggcggccccgccagccactcaaacccccgctccctcagcagtggtcacctgcaaggcaaaccctggaagtaaagactttgtctcacttaggcaaataaatgttcttcctcttttcagaacccctgagcatttcccaagttgggtcatttccagaaacttctgcagaggaaagaccatgacatatgtatgggataggcctcttccctgtccctgtctccagttcctctcccctcaggaggccacctcaggaaggattttgacaggtgaccataaaaaccagaggtgtgacaggctctagtctcctccctgttgtttacagcatatttaagtcttgtgaaactgtataggaaaaaagtatctacgtttttagtttt

SEQ ID NO: 75111 - DNA, 830 bp, Homo Sapiens
ccgtatggtgacctatagaccaggtttacaaaaagcaggctggtaccggtccggtattcccgggatatcgtcgacccacgcgtccggcggcggcggcggtggcctttggggccgaagtgggcgtgcggctcgcgctgttcgcggccttcctggtgacggagctgctccccccgttccagagactcatccagccggaggagatgtggctctaccggaacccctacgtggaggcggagtatttccccaccaagccgatgtttgttattgcatttctctctccactgtctctgatcttcctggccaaatttctcaagaaggcagacacaagagacagcagacaagcctgcctggctgccagccttgccctggctctgaatggcgtctttaccaacacaataaaactgatcgtagggaggccacgcccagatttcttctaccgctgcttccctgatgggctagcccattctgacttgatgtgtacaggggataaggacgtggtgaatgagggccgaaagagcttccccagtggacattcttcctgtatgaatatcatatggactctaccctatgcttgttttcacatcattgaatttaacctagaaagctagtagggatgggaaaatctgactactcttgtttctacaatttggaaaatccccccttctttagtaactccacagtttaacaagtttgagccttgactatttgggtaaatattacagaacagaaaggtagtttaccttcatgagatttgcacatttaattgttatattatttgcctagatcctgcaatcttgtactagcaataaaaataccttaaaagaagaaaa

SEQ ID NO: 75112 - DNA, 995 bp, Homo Sapiens
  misc_feature (63)..(63): n is a, c, g, or t
  misc_feature (121)..(121): n is a, c, g, or t
  misc_feature (159)..(159): n is a, c, g, or t
  misc_feature (200)..(200): n is a, c, g, or t
  misc_feature (233)..(233): n is a, c, g, or t
  misc_feature (266)..(266): n is a, c, g, or t
  misc_feature (326)..(326): n is a, c, g, or t
gggcgaccgcgtccttgtgccgcagcccagacgcaggtcacattagcaggacccagcgtctgncagaaatgaaaagaccaggcccgaagaggtgcagagcgatccgctgcgagccaggagnagcgtcgcgtggagtctgcctgaacctccatgcccgcnagaggacggacacgcgacgtctagcgagaagccaagatgtngaccaggaagatcaagctgtggacatcaacgcncacatcacctgccgcctgtgcagcgggtacctnatcgacgccaccacgtggaccgagtgtctgcacacctgtacgtgccctgcccgcgccacncagggagggcgcgcccttcccagctctgtgctcttcagaaccttggcttttgtgttaccacacgcttttagctcaagcccgacaaaagcaggaaccaggaccaggggcagagacgatcttgaagataagtcagaaaagtcatttcacgctaaaggtcctgtgggtggtgtcagagcagatgaggcctcgcttaggagagcgaaacacaggagagaccccacattcctcccacggagcagcaaggccagtagccgctgtgacagtgctcactgctggcagtttccaaatctccagaggagttccttagatccttcaaaggggaaccttccagtgtgttcttcacacctgatgtgcgtcctcacacctgatgagtctgtgctttggtgttagaggactcacacctggggctggacctgagtgtttttctaagtgtggctaccgctgacgggcaggtgccatccatcaggctgaggctcggctcttatgctaacctgaggccccatggctggcggccctgctggtgtggacgaccgctgtgtgcgtctcttgatggctggggagcattttgtttaaacaggatctttaaaatgaagtgtacgcttataatacaagtgatgcttgtgtatttctcactttaggaaataaaatatttgccaatttgatagaaaa

SEQ ID NO: 75113 - DNA, 1194 bp, Homo Sapiens
cagtcgacggtaccggacatatgcccgggaattcggccattacggccggggatgctccgagcgcggcgcccccgacgcggcgctcggctcggctcgggcatttccgcctctttgttttaaactccggacgggcttttttctcctcctcttgggggggacccagagggagcggcgccccctcccccctccggcgcggtaccccgcgtgcgccttgctcgcccgcagccccgagaccgcaggcgtcacaatgtagcagggaccccaggcgtcgtgctcagacacactgggccacaacagagccaggcccggacggcagggtgcagaagcgagtccgcgtgcggagccaggaggcagcgtcgcgtgggagtgctggcctgaagcctccatgccccggcagagcgacggaccacgcggacgtctagcggaggctcccgtgtcctcagtatgcatcaggtctcccgaacctcacagccccgcaggcagggagcgagaacggggacccatccgacttgggaagtctctgtgaccagaaagcccaagattgttcgaccaggaacatccaagctgtgggacatcaacgcccacatcaccaggccgcctgtgcagcggcaacctcatcgacgccaccacggtgaccgagtgtctgcacacctctcaagcccgacaaaagcaggaaccaggaccaggggcagagacgatcttgaagataagtcagaaaagtcatttcacgctaaaggtcctgtgggtggtgtcagagcagatgaggcctcgcttaggagagcgaaacacaggagagaccccacattcctcccacggagcagcaaggccagtagccgctgtgacagtgctcactgctggcagtttccaaatctccagaggagttccttagatccttcaaaggggaaccttccagtgtgttcttcacacctgatgtgcgtcctcacacctgatgagtctgtgctttggtgttagaggactcacacctggggctggacctgagtgtttttctaagtgtggctaccgctgacgggcaggtgccatccatcaggctgaggctcggctcttatgctaacctgaggccccatggctggcggccctgctggtgtggacgaccgctgtgtgcgtctcttgatggctggggagcattttgtttaaacaggatctttaaaatgaagtgtacgcttataatacaaa

SEQ ID NO: 75114 - DNA, 2054 bp, Homo Sapiens
ggcgcccccgacgcggcgctcgtgctcggctcgggcatttccgcctctttgttttaaactccggacgggcttttttctcctcctcttgggggggacccagagggagcggcgccccctcccccctccggcgcggaccccgcgtgcgccttgctcgcccgcagccccgagaccgcaggcgtcacaatgtagcagggaccccaggcgtcgtgctcagaaaatggaaaaagagccaggccggaaggagggtgcagaagcgagtccgcgtgcggagccaggaggcagcgtcgcgtgggagtgctggcctgaagcctccatgccccggcagagggacggacacgcggacgtctagcggagaagccaaagatgttgaccaggaagatcaagctgtgggacatcaacgcccacatcacctgccgcctgtgcagcgggtacctcatcgacgccaccacggtgaccgagtgtctgcacaccttctgcaggagctgcctggtgaagtacctggaggagaacaacacctgccccacctgcaggattgtgatccaccagagccaccccctgcagtacatcggtcatgacagaaccatgcaagatattgtttacaaattggtaccaggcctccaagaagcggaaatgagaaagcagagggagttctatcacaaattgggcatggaggtgccgggagacatcaagggggagacctgctctgcaaaacagcacttagattcccatcggaatggtgaaaccaaagcagacgacagttcaaacaaagaggccgcggaggagaagccggaggacgacaacgactaccaccgcagcgacgagcaggtgagcatctgcctggagtgtaacagcagcaaactgcgcgggctgaagcggaagtggatccgctgctcagcccaggcgaccgtcttgcatctgaagaagttcatcgccaaaaaactcaacctttcatcctttaacgagctggacattttatgcaacgaggagatcctgggcaaggaccacacactcaagttcgtggttgtcactaggtggagattcaagaaggcgccgctcctgctgcactacagacccaagatggacttgctgtgaatggtgccacacagcgcccacagactgggccctcgcacccttgggtgctcccggccgccgcgcttaagaacattgcctctgggtgtcatgtggaccagacttctgaatagagaatatttataacttttgtatgagagagaattcacactcaacaagacactaccagcaccacgtttacagaggatgaaaacacttcacagtctcccagagccgatcgtcctctcccccgccccaccccgtgcttcagccttgcagggagagtgatgctccaggcaacacggttctgagtcaccttctgacacgagctccctctgcttgctttccaggtcttgaaaatctgaattcacttcagtttagtttatgaattttaggtttcatgataagcctcaagtgtagttggacttttattgaatccttcctaagttattgaaaaaatgtcttttcatggtgaatgacaatatttatgttgcctttagcttcttgaagatttagaagttatataaaaaattaatttaaaagcaaaccaaaagaggtttccattaacattatgatttaaccattgtatttaatttcccaccttatgaaacacaacagcagctccctgactggttcgcctttcattgtgtgaggtcggcacttggactcactcagaactgtcgctcacctgtggctgacacacccagccctggaaacggggccccagacgccacgtcgggatttctgacatgctcagcaggtagaccagaggccgtgtgaccagctcagtgctggtttacggaacaactcttacttttaaaaattacttgttcccccaaattgttgagtgccgccgtttggtttcctatgttttctttccctgttttgattttgctgaagggagcggtggtggtggttaggatcagagctctcctggcatccgtggggaggatttgctggtggtggcttcgggcttatgcccagac

SEQ ID NO: 75115 - DNA, 893 bp, Homo Sapiens
  misc_feature (774)..(774): n is a, c, g, or t
  misc_feature (796)..(796): n is a, c, g, or t
  misc_feature (864)..(864): n is a, c, g, or t
gcggccgcccccattcccctcccggatctggtccgagttgtttttccgcggctgtaaaccggaagggctctgagctgcactgccggctccgggctgggggatctgtgcctggcatggggacgagttctggcctccttagggtacggggagagcttggactttggtcctgacgtggtggacgacacaccttcgaagagtggacgttacctcagttgtctgttgttagagtttaatcgatcactcctctgttttgttgtgttctttcccagaaataactttaccaaaggaaagctattttgcgaactatcttctccagcggagatggccaatgtgctttgtaacagagccagactggtttcctatctcccaggattttgctctttagttaaaagggttgtcaatcccaaagccttttcgactgcaggatcatcaggttcggatgagtctcatctggctgctgcacctccagatatatgctctcgaacagtgtggcctgatgaaactatgggaccctttggacctcaagatcagaggttccagcttcctgggaacataggttttgattgtcacctcaatgggactgcttcacagaagaaaagcctggttcataaaactttgcctgatgttctagcagaacctttatcaagtgaaagacatgagtttgtgatggcacaatatgtgaatgaatttcagggtaatgatgcacctgttgaacaagaaattaacagtgcagaaacttactttgaaagtgccagagtagagtgtgcaatacanacatgtccagaattgctgcganaagattttgaatcactgtttccagaagtagctaatggcaaactaatgattctgactgtaacacaaaanactaagaatgatatgactgtttggagtga

SEQ ID NO: 75116 - DNA, 2035 bp, Homo Sapiens
  misc_feature (1894)..(1894): n is a, c, g, or t
  misc_feature (1905)..(1905): n is a, c, g, or t
  misc_feature (1950)..(1965): n is a, c, g, or t
  misc_feature (2006)..(2006): n is a, c, g, or t
cagtcgacggtaccggacatatgcccgggaattcggccattacggccgggggcctgctcaccgccagcgtaggtgctaccaccgctgccgtcgccgccgccattttgatggcaggaagagtccggttctgggacagctggagacagtggtggtgactgaaataactttaccaaaggaaagctattttgcgaactatcttctccagcggagatggccaatgtgctttgtaacagagccagactggtttcctatctcccaggattttgctctttagttaaaagggttgtcaatcccaaagccttttcgactgcaggatcatcaggttcggatgagtctcatgtggctgctgcacctccagatatatgctctcgaacagtgtggcctgatgaaactatgggaccctttggacctcaagatcagaggttccagcttcctgggaacataggttttgattgtcacctcaatgggactgcttcacagaagaaaagcctggttcataaaactttgcctgatgttctagcagaacctttatcaagtgaaagacatgagtttgtgatggcacaatatgtgaatgaatttcagggtaatgatgcacctgttgaacaagaaattaacagtgcagaaacttactttgaaagtgccagagtagagtgtgcaatacaaacatgtccagaattgctgcgaaaagattttgaatcactgtttccagaagtagctaatggcaaactaatgattctgactgtaacacaaaaaactaagaatgatatgactgtttggagtgaagaagtagaaattgaaagagaagtgctcttagaaaagttcatcaatggtgctaaggaaatttgctatgctcttcgagctgagggttattgggctgactttattgacccatcatctggtttggcattttttggaccatatacaaacaacactctttttgaaactgatgaacgctaccgacatttaggattctctgttgatgaccttggatgctgtaaagtgattcgtcatagtctctggggtacccatgtagttgtagggagtatcttcactaatgcaacaccagacagccatattatgaagaaattaagtggaaattagcagaaatatccattcatttgctgtactatttgtatgtaatatttgggttgatctataaacactgtcagactaaagtttttaaaatatacttatttctaagtatttatttcagcatttatgaatttgcaacattggcaagtgatttgggattttaaaattgcaaatgttcatttattcatatcattgaatacacgttgaacacatccacattgtataggatgtggtaattagcttgtaaccagggtatgatctgctattgttatttctcctctttattggaaaaaggcctcagttttaattattttcttcccaaaataaatcacacatttggttacaataccacactggaccaccctccccagcgccccgtccttaaccccctgccggcccgccccgactcttcgaagcaaccttttcccaaacccattcgcttgggccgccgcggggcccctacccagggtacagccgcacaatatgccccaatacccctggttctttcttaaggcgagaatcccttgggcccctattgacaccccactcgcccttcggagacttcccctttcaccctcaccttttgactcataatcccggcacgcggtgccggccgttcaaaccctcgaccgcacgtgttcccttggaaaaaccacaaaatctcccctcgaaattggcgcaacccctttttggacacggccccttttgttatcctggggggaatcctttaccaccgatactacggggaggcctgcctcattatttccccaccgctcttttcgggtcctttccccctgaggtntttgcgcaccncgcggcgtcagccacttgagacccccgttttccgtctccctccannnnnnnnnnnnnnnnctcgtggtcaactctccctttctccaccccgttcctgttcnccggcttccccgctattttgtggcccacc

SEQ ID NO: 75117 - DNA, 754 bp, Homo Sapiens
  misc_feature (49)..(49): n is a, c, g, or t
  misc_feature (77)..(111): n is a, c, g, or t
agattatagactcatatagggcgctagtcggtacagccgaacgacgagncagcgagtagtgagcgaggaagcggcgnnnnnnnnnnnnnnnnnnnnnnnnnnnnnnnnnnncagtcgacggtaccggacatatgcccgggaattcggccattacggccggggggatggcaggaagagtccggttctgggacagctggagacagtggtggtgactgaaataactttaccaaaggaaagctattttgcgaactatcttctccagcggagatggccaatgtgctttgtaacagagccagactggtttcctatctcccaggattttgctctttagttaaaagggttgtcaatcccaaagccttttcgactgcaggatcatcaggttcggatgagtctcatgtggctgctgcacctccagatatatgctctcgaacagtgtggcctgatgaaactatgggaccctttggacctcaagatcagaggttccagcttcctgggaacataggtttggatggtcacctcaatgggactgcttcacagaagaaaagcctggttcataaaactttgcctgatgtactagcagaacctttatcaagtgaaagacatgagtatgtgatgggcacaatatgtgaatgaatttcagggtaatgatgcacctgttgaacaagaaattaacagtgcagaaacttactttgaaagtggccagagtagagtgtgcaatacaaacatgtccagaattgctgcgaaaagattttga

SEQ ID NO: 75118 - DNA, 728 bp, Homo Sapiens
ctgttcaaaatatgtcccgctatgtgatactcttcttttaaaaagaaaatagagaatagcaaatcttcatgataatcctcaaaagaacaaaatgcttaactttatctcttaatttctaaaggtaaataacctaggttcagcttttgcttaaacattaaatatcttttccattttttaatgtttgtaagctagatatgccagctttgtttctacattgcaacccaaaaactgtttcttttcacttaattataaaaccagtaattcatttactcttgcccaaaactatacactgtatttctgttatagtaacaaaatagagttatgtagaattgtatggaactcaaatttaaaccatgctttcttgtagtactgattgaaacttacacgttttattctactcatagtgagcttattcttattttggattgattttccaaaaccacagcttcagcagcaacaatcagaatgtccaaatgctgtcctttcccttacagagaagaacaatggtaactaaaagctgcatataactagcaataactacattgaacggtgtgcattgttcatgattgttgtgttttaagacttgtatataaactgctttttccaaactctgtataacttttaaatggctggaactactcgtataaggactagactgtatttttgacatgctcctatttttgtaacttgaaaaaataaaattttgccttgtgacagattttctcaaa

SEQ ID NO: 75119 - DNA, 2638 bp, Homo Sapiens
  misc_feature (848)..(890): n is a, c, g, or t
  misc_feature (994)..(1002): n is a, c, g, or t
cagtcgacggtaccggacatatgcccgggaattcggccattacggccgggaggctacatcctggacgacggtttcatctgcacggacatcgacgagtgcgaaaacggcggcttctgctccggggtgtgccacaacctccccggtaccttcgagtgcatctgcgggcccgactcggcccttgcccgccacattggcaccgactgtgactccggcaaggtggacggtggcgacagcggctctggcgagcccccgcccagcccgacgcccggctccaccttgactcctccggccgtggggctcgtgcattcgggcttgctcataggcatctccatcgcgagcctgtgcctggtggtggcgcttttggctgctcctctgccacctgcgcaagaagcagggcgccgccagggccaagatggagtacaagtgcgcggccccttccaaggaggtagtgctgcagcacgtgcggaccgagcggacgccgcagagactctgagcggcctccgtccaggagcctggctccgtccaggagcctgtgcctcctcaaccccagctttgctaccaaagcaccttagctggcattacagctggagaagaccctccccgaaccccccaagcgtgtgatcttctattccatggctaactggcgagggggtgattagagggaggagaatgagcctcggcctcttccgtgacgtcactggaccactgggcaatgatggcaattttgtaacgaagacacagactgcgatttgtcccaggtcctcactaccgggcgcaggagggtgagcgttattggtcggcagccttctgggcagaccttgacctcgtgggctagggatgactaaaannnnnnnnnnnnnnnnnnnnnnnnnnnnnnnnnnnnnnnnnnngttcttacctgtatgtctccagtatccactttgcacagctctccggtctctctctctctacaaactcccacttgtcatgtgacaggtaaactatcttggtgaannnnnnnnncctagccctctcacatttatgaagcaagccccacttattccccattcttcctagttttctcctcccaggaactgggccaactcacctgagtcaccctacctgtgcctgaccctacttcttttgctcttagctgtctgctcagacagaacccctacatgaaacagaaacaaaaacactaaaaataaaaatggccatttgctttttcaccagatttgctaatttatcctgaaatttcagattcccagagcaaaataattttaaacaaaggttgagatgtaaaaggtattaaattgatgttgctggactgtcatagaaattacacccaaagaggtatttatctttacttttaaacagtgagcctgaattttgttgctgttttgatttgtactgaaaaatggtaattgttgctaatcttcttatgcaatttccttttttgttattattacttatttttgacagtgttgaaaatgttcagaaggttgctctagattgagagaagagacaaacacctcccaggagacagttcaagaaagcttcaaactgcatgattcatgccaattagcaattgactgtcactgttccttgtcactggtagaccaaaataaaaccagctctactggtcttgtggaattgggagcttgggaatggatcctggaggatgcccaattagggcctagccttaatcaggtcctcagagaatttctaccatttcagagaggccttttggaatgtggcccctgaacaagaattggaagctgccctgcccatgggagctggttagaaatgcagaatcctaggctccaccccatccagttcatgagaatctatatttaacaagatctgcagggggtgtgtctgctcagtaatttgaggacaaccattccagactgcttccaattttctggaatacatgaaatatagatcagttataagtagcaggccaagtcaggcccttattttcaagaaactgaggaattttctttgtgtagctttgctctttggtagaaaaggctaggtacacagctctagacactgccacacagggtctgcaaggtctttggttcagctaagctaggaatgaaatcctgcttcagtgtatggaaataaatgtatcatagaaatgtaacttttgtaagacaaaggttttcctcttctattttgtaaactcaaaatatttgtacatagttatttatttattggagataatctagaacacaggcaaaatccttgcttatgacatcacttgtacaaaataaacaaataacaatgtgctctcgggttgtgtgtctgttcacttttcctccctcagtgccctcattttatgtcattaaatggggctcacaaaccatgcaaatgctatgagatgcatggagggctgccctgtaccccagcacttgtgttgtctggtggtggcaccatctctgattttcaaagctttttccagaggctattattttcactgtagaatgatttcatgctatctctgtgtgcacaaatatttattttctttctgtaaccataacaacttcatatatgaggacttgtgtctctgtgcttttaaatgcataaatgcattataggatcatttgttggaatgaattaaataaacccttcctggggcatctggcgaatccca

SEQ ID NO: 75120 - DNA, 957 bp, Homo Sapiens
  misc_feature (13)..(13): n is a, c, g, or t
  misc_feature (38)..(38): n is a, c, g, or t
  misc_feature (379)..(415): n is a, c, g, or t
aaaatgatttctnagatgattgaataacagtagtcctntgatagaagataatgacttggtttatggccttaatatactacttaattacttaagatgtttattaatagaatgataaatgtacagagtaacctataagcatgacatacttttgctttcagtagtctcatgtaaaaaaaaaaacttgaaaatagtaatacctgagtacccatgggaataatagacactggcgaggtagggtggggagcgggagcaagagctgaaaaacttacctactggggactgtgctcactacctgggtgacaggatcatacgtaccccaaacctcaacatcacacagtatactcagctaacaaacctgcccatgtgtttcctgaatctnnnnnnnnnnnnnnnnnnnnnnnnnnnnnnnnnnnnnagacaatagtattacccatgggacaaaatttgtactattagcaagaatcattttgtgtctcatttagaaacaatttgacttttgttccagtgtttaaactttgacaaaaatggttttgaatagatctttataacctgatgccataaatacaagattctctgataccttcatttaatatatcaatattgggcctaaaacagtattctgtaaagcttaaattggtattaactatgatcatcttgatgtctatgatagataataaacaaggtcatacataccttactaaacaattttggtttttcaccaacattttattctttaaaagatttagactaacagaattatttagcatttcgagtcatgtgctttatttagcaagtgagtaaaaatattggaatattgaagtatttgcataaaaaatcaaatggtggtgttttgtaatctctattgtatttcctattaaggtttcatatattactttcccattgttcctgaatttgttatcctatatataaacagaaacatggatgagtaccatatac

SEQ ID NO: 75121 - DNA, 1427 bp, Homo Sapiens
  misc_feature (169)..(169): n is a, c, g, or t
  misc_feature (186)..(186): n is a, c, g, or t
  misc_feature (232)..(232): n is a, c, g, or t
  misc_feature (317)..(317): n is a, c, g, or t
  misc_feature (377)..(377): n is a, c, g, or t
  misc_feature (380)..(380): n is a, c, g, or t
ccaacaaaaatctccctgttgatcactgggaacagcaggagagcgcccacaggagaaagcagcatttgagatatggcgtgacgacggttactccagagtgtgccaagtgagacgcccctacatgagtgcttccagagttgccgatgattcctccaagagagtcaccttngaggagtggactcgctnaaggggactgatatgccagccacatgagactacagaatgcctgtantcgatatgtccagagtcgtggctagacgacctaccctccacagcagcctgcagcctgtttccagacctcctcaacagaatcaagnagctagaggcttggacgggtgactttacaatgccctccactgtgtggctgacaggcttcntcnaacccccagtcgttcctgactgccatcatgcagtccacggctcgcaagaatgagtggccactggaccagatggccctgcaatgtgacatgacgaagaagaacagagaagagtttaggagtcctcctcgggaaggggcctacatccatggcctcttcatggaaggtgcctgctgggacacacaggctgggatcattacagaggcaaagctgaaggatctgacaccccctatgcctgtgatgttcatcaaggccattcctgcagataagcaggactgccgcagtgtctattcctgtcctgtgtacaagactagtcagcggggacccacctacgtgtggactttcaacctgaagactaaggaaaacccatccaagtgggttctggctggagtagccttgcttctccagatttagcatcctgcagagccaccgagaaaataaaaaagctgggcttggaggctgcctagagggacaggtgggtgaagggtcaccacagacacttagaacggtaagaaaccatgagcactcacaattctgtagaattcctctagggaacttggagaggtgtgcctaaggtgaggctgagctgaaggaatgtgggcccaggtttcttaataaaatgatttactcttcaactgtgtctggcccaggatttgagagctgctgaatcataaatgatcatgtagagaccaagagaaacaaaccacaagggccctgaccttgttacacaacactatcctaggtgctcttcttccaggctaccccacgcagtccttggaccagtggtattggcatcacccatgaaccagaatctccattttaacaatctctctggaaaatctgtatgcacattatagtttgagaaacactaccctggagcaggggtcaccaacatttttccataaagagccagttagtgaatacttttagtgatttacaggccacaatgcctctgtttgaactttgcaactttgccgtggtagaccaacagtaaccataaatgatgagtaaatgaaggggtgtgattgcattctaataaattttatttac

SEQ ID NO: 75122 - DNA, 1006 bp, Homo Sapiens
  misc_feature (103)..(103): n is a, c, g, or t
  misc_feature (107)..(107): n is a, c, g, or t
cgaacccgctgggtctaccccgtatccctaggaaacggcagctataaaataaagctctgaccccccataccagcattgagcttaagatgcttggggatcctcnaccntgggtttagagagagcgactgagtgtgaagttgtccccgtcctcctgaccctcacaaaggatcgagtcggcgtgtactgcaccactcccggagtgagtccgtgcacgcagtggccatctgcaaagcttcacgttccagtgtccatctgtcacgtgctgtgcggggatcgcccaattctgcctgacctgtggcacggtgccacaccagccacatgatggagtgtttcggacccaggaggtgtgtcccaccgggtgtggtgccactgcctgcttgaaagcactttctgaacctacagaagttgggtattgtctgaaatcccagaggacccataagtgccggtgacaagctgtctgtcaggggagaggctccagaacctgggttcgtccccagtgagaccggaggatgatcccccaaggactgcgcagcatcagctcttggtgggcctctgccttctcttctgtttggccacctggtgtggatgtcactgtgtgaagataaggacagaagtgcagagctgcgctttgtgtgttgtctatgtcggctgagctaccaaggtggaagttttcatggagaaaagcacctggctccagggccagtgttacagtgttaccctgtaaggtgttagccttaaaccaccgagcagcgttctcttgatgccagtgcagagaccagagtcagatgcccgaggacagtgggtaggaatttcatcaacaaatggacctatggcatcatggctttagaagctggtacatttactgagctgatggacagtggccttctaaaatatgacacttaaattgtaaatatgcactgtacttaaggattcttaagatgtatttttttgttatttctcctccagctgctatcccttggctaataaaattctagtaatttgaaaa

SEQ ID NO: 75123 - DNA, 1293 bp, Homo Sapiens
  misc_feature (1109)..(1109): n is a, c, g, or t
ggctatagaacagtggtacaaaaaagccaggctggtaccggccggatatcccgggatatcgtcgacccacgcgtcgcagaggcccctgggaaccttcgtttatacagtgggagccccactcgcagcgagaaagagcaggtctccatcagctccttctactacaaggagcggaaatcaagacgatggaaaagtaagcgtgagggatcagactctggcaatcgacagatcaaggctgctgggaaagtcatcatccaggatatgcttgcctcctgcctgttcacaaatcgctgggagagctgtacatattgaatgtgaatgatattcaggaaacatgtcagaagaatgccgcctctgccttgctcgttggaagaaaggatcttgtccagcctagctttacctcttctggttcctgctccagtatgtcagacccagggctcaacactggcggctggaacatagcgggaagagaggcagagcacttgtcctccccttggggagaatcctcaccagaagagctccgctttgggagtctgacctacagtgatccccgtgagcgagaacgcgaccagcatgataaaaataaaaggctcctggaccccgccaatacccagcaatttgatgactttaagaaatgctatggggaaatcctctaccgttggggtctgagagagaagcgagctgaagtgttgaagtttgtctcctgtcctcctgaccctcacaaagggatcgagttcggcgtgtactgcagccactgccggagtgaggtccgtggcacgcagtgtgccatctgcaaaggcttcacgttccagtgtgccatctgtcacgtggctgtgcggggatcgtccaatttctgcctgacctgtgggcacggtggccacaccagccacatgatggagtggtttcggacccaggaggtgtgtcccaccgggtgtgggtgccactgcctgcttgaaagcactttctgaacctacagaagttgggtattgtctgaaatcccagaggacccataagtgccggtgacaagctgtctgtcaggggagaggctccagaacctgggttcgtccccagtgagaccggaggatgatcccccaaggactgcgcagcatcangctcttggtgggcctctgcccttctcttctgtttggccaccctggtggtgggatggcactgggtggaaaaataaggacagaagtgcagaagctgcgcctttgggtgggtggcccatggccggctgagctacccaaagggggaaggttttcatggaagaaaaagcccttgtgttcccggggccaa

SEQ ID NO: 75124 - DNA, 991 bp, Homo Sapiens
  misc_feature (162)..(164): n is a, c, g, or t
  misc_feature (167)..(171): n is a, c, g, or t
attcccagggccctggtccctaggccccgcggtggttttaggggagcacggctgggcccacatgtccatttgacttactggggcccccccggccaaagcgaatggttttagaaaactttttgaggggccgaggggggccgccaaggtgttttttcgttttcnnnggnnnnnggggggctaaaccaataatcagttttattttttctcatgtgatagaagtctggaagtccagggctgctgcagacactcaaagaggccacaggggaggccagggtcgctgtgagctttctgcagtcacttccttagactgtggttttcatatgcacggtcgttaaggtggatcttccaatactaggtactggatctctttgcaaggtgaaaagtaaagcaaagaacaaaacatacagggaggaattcatgtttaagaacgatccccattcaagagctttctcagaagcccatgtggtgacatctgctgatctgtcagtggccagggctgtgagacatggatggtaccagctgcaagaaaacctgtaagagattttttaaaagtatcagcacactttactaatctgacagaacctggattctcttgatatgggaagaagatgagagtggacaccggggaagtcactagaagtatctgtcactcttggctggacagcaggctgcaaacatattaccacttgatggaggcatcatgctctggtcgcaatccgtgtgcatcaggtaccagtaacaaagtggtactgagaaatatcctcatgtcacatagatctcaatatgccattggtcaaggaggttgtccagaaggaaattaggacgttatcaaggatgaagctatagtaaaaatactataaacaaacctttcgtgatgaggctcaagggttattcagaggagtataaccttaaaaataaagatgaaaacttatgaaggggctctgtttcatgcagagagatcgtgcagcccgtatcaccggaaaactcgtgg

SEQ ID NO: 75125 - DNA, 126 bp, Homo Sapiens
ccccccttttaagatgcttgctcctctcccttttctttttaccaccctacctttattgttagtggttacaaagtgaccacatattatgtactttgctgtaaataaagacagacaaaaaggcaaaaa

SEQ ID NO: 75126 - DNA, 809 bp, Homo Sapiens
  misc_feature (14)..(14): n is a, c, g, or t
  misc_feature (83)..(83): n is a, c, g, or t
  misc_feature (98)..(98): n is a, c, g, or t
atctatgtctcatntcatatctaactcatgttatgatacgaatcaatatatatgttgatatcatgagttatataatatgagtntgacatgatcatcanacatagtatatacatatcaacataactatgttgatgattcatatcaaattctcaatgcaggtcattactgtaagttttccatttttgttacaaataataagtaagatgatactgtaaaatctctgttcttcacaaggtacctctttaattcatagccttttatgtcagcattattcttcttttgggggttggtcagcaactttgagtgccattgcaagcagcatcatttaagtagttttataaagaaaagaagtctgatatcttgggcagcttgctgcttactggggagaccagcatgcttagacacttattgccagggttaaacatatgctctggcaccaagttcaaatctttcctccccatttgtgagctgtgggactttaggcaagttatctaaatgctgctatgctatagtctccccacctgtaaaacagaggatgataccaataccttcctcatagggtacataagattaaataaatacaaacttgtacttaaaatgtagctctcaataaatgtgcattatgatttacatacgaaataatagcatttaacaaatgtaggtagaattttaagtatcatgttaaaattaggatacgaaatgcctctgctgacattcttgttactcttttctccacagtcaaaacctgaatcagaatatttcaaaagagaggaaataaaagttcagcttaaaactgttctgccctaaaa

SEQ ID NO: 75127 - DNA, 1050 bp, Homo Sapiens
tttttttacattttaaagacatttttattgagctaattttaacaacattgctttagctggtgacagctgccccaaaccaaaacaaagccatcatgaatgctattcaacatcctcaatgtaatccagtatgtttttgtacttggaatatagttaaacttttgacattacataatcaagcaaatagcagtgcatactatattattcaaaaagactttatctatttcatttaaaaaatcaagttgcaagtggcctcagctttatcaacaatcgtagtgacacattccacacttcatgctctcaaaataaaaagtgccctaaaactaactctaagttttttagtcactgacattaatactaaccaggttacaggaattgaagtttaacattgtacaatataagcggcaataagttactgatatctgctgacaaattccactcaaactaaatatatccttgatacattcaaaaagacattttgtaaattttaataagctagttagtgtatatgctgcagtgcaaaaaaagtgacaccctagtttcctgagctttaggaaattaacaattttctgactactactttcaacttaaaataggctctttattatatgaagccatgacaaaactatacaattaaattgggcttttggagaactgaaagactggtcagagtcagggtgatttaggacaatgaaaaagttttcaaaagcaaaagtatttacaacactacaaggatactatggatctgcatgtacgtgttaaagattaaagatgaacctattgattcaccattgtacctcctcttcaaagatattacactgaggccgcgctgtggtccaactgtaatcctgtactatcgggaggccacgtgggtggaatcacctgagacgagttgcgaatgccggcaaaagtggaaccctctaattagtcaaaatagcggatggcgggacttatcccgcgaacaagtaaagaacgataaccaaagaaagcaaagcaggaacagcacgtgaagacctgtctaaacaagctgataaaacaagttaactatccacc

SEQ ID NO: 75128 - DNA, 769 bp, Homo Sapiens
  misc_feature (723)..(723): n is a, c, g, or t
tttgtgaaatcagaagtttaatatgacacaattaaatatatttgtatatctcacaccggaggtttctcttcaaacataaggagttagaaattacaagtaggcatatgcttcctatattcagataaattcatttcgattaattaaattccagatagagagaagtaattttggaaaagaaatgatagctatattaaagcagatattcattacaataccatgtagagacataagcaatattttggcatcattctgtccgctcagtaggccgtgttccctctggtagggcctttggagagtaccatctatctaagatggaggaatgctgtgggaagggcgggatggaggtgcgttttctacgctgaaccccacacaggaaatctgcagcccacacagctgcctctgcgccgccttccatgtgatcatcctggtcaatgaagtgaattgtcctatttctggggtagggggtgatggcgaatcggatactcaaatgttattttgtcaaatccgaatcatctctacgtgcttaggtttacatgatgtcaaaacacgtggttcattaagtgatcccgggaagaggggcagggccggtcggctggtttctcacttcccttccaggctctacgcagtgcgtgcaggtcgccctgatctcctctcccgggagggaaatgctcgcagccctctccgagttgccctgatctccttctctcccaggagggaaatgtnccctctctggggcccacaggtccgggacgtgcctggaggagcagcg

SEQ ID NO: 75129 - DNA, 633 bp, Homo Sapiens
  misc_feature (383)..(498): n is a, c, g, or t
gtcctggactatttattttcatttctttttcaaattaattttgctttaaaacaagtgtgatgccatatcaagtccatgttattctctcacagtgtactctataagaggtgtgggtgtctgtttggtcaggatgttagaaagtgctgataagtagcatgatcagtgtatgcgaaaaggtttttaggaagtatggcaaaaatgttgtattggctatgatggtgacatgatatagtcagctgccttttaagaggtcttatctgttcagtgttaagtgatttaaaaaaataataacctgttttctgactagtttaaagatggatttgaaaatggttttgaatgcaattaggttatgctatttggacaataaactcaccttgacctannnnnnnnnnnnnnnnnnnnnnnnnnnnnnnnnnnnnnnnnnnnnnnnnnnnnnnnnnnnnnnnnnnnnnnnnnnnnnnnnnnnnnnnnnnnnnnnnnnnnnnnnnnnnnnnnnnnttttgggccgcccccccgcccctaaaaaattttttaaaacctttttttgggcccggggcccccaaaggaaaggaaactgggcacgaaccggttcccaaggaacaccgggccaagacaggggttggactccccccc

SEQ ID NO: 75130 - DNA, 673 bp, Homo Sapiens
gaagccgtatgtatctcgaggtcagggattatatcttgctcacagttgtatcctgagggcctggttttgtgtccagcatgtagaaatgacacttagtgtttgttcaatgagtctgtgaaggtagcacattaatgattatcatgtgtaatgagtggcggaatacatttattatagtttttgtctttaaaaacgcagagaattgtctaacttggccatatgtattttcacatttcaggagcatttagacagcacccgtggctcagttcattccttagatgcaggcttgctgttgccatctggagatcctttcagtaaatcggacaatgacatgtttaaagatggactcaggagagcacagtctacagacagcttgggaacctcgggctcattgcaatccaaagctttaggctataactacaaagcaaaatctgctggaaacctggacgagtcagattttggaccactggtaggagcagattcagtgtctgagaactttgatactgcatcccttgggtcactccagatgccaagtgggttttatgttaaccaaagatcaggaaagagcaatcaaggcgatgacaccagaacaagaagagacagcgtccctcctctccagcgttacccagggcatggagagtgcctatgtgtcccctagtggttatcctcgtgccga

SEQ ID NO: 75131 - DNA, 1572 bp, Homo Sapiens
gaacgaggaatgaaatgaaaaaggcccaagaggatgctgagaaacttcggtccgttgtgatgccaatggaaaaggaaattgcagctttgaaggataaactgacagaggctgaagacaaaattaaagagctggaggcctcaaaggttaaagaactgaatcattatctggaagctgagaaatcttgtaggactgatctagagatgtatgtagctgttttgaatactcagaaatctgttctacaggaagatgctgagaaactgcggaaagaattgcatgaagtttgccatctcttggagcaagagcgacaacaacacaaccagttaaaacatacgtggcagaaggccaatgaccagtttctggaatctcagcgtttactgatgagagacatgcagcgaatggagattgtgctaacttcagaacagctccgacaagttgaagaactgaagaagaaagatcaggaggatgatgaacaacaaagactcaataagagaaaggatcacaaaaaagcagatgttgaggaagaaataaaaataccagtagtgtgtgctttaactcaagaagaatcttcagcccagttatcaaatgaagaggagcatttagacagcacccgtggctcagttcattccttagatgcaggcttgctgttgccatctggagatcctttcagtaaatcggacaatgacatgtttaaagatggactcaggagagcacagtctacagacagcttgggaacctcgggctcattgcaatccaaagctttaggctataactacaaagcaaaatctgctggaaacctggacgagtcagattttggaccactggtaggagcagattcagtgtctgagaactttgatactgcatcccttgggtcactccagatgccaagtgggtttatgttaaccaaagatcaggaaagagcaatcaaggcgatgacaccagaacaagaagagacagcgtccctcctactccagcgttacccagggcatggagagtgcctatgtgtcccctagtggttatcgtttagttagtgaaacagaatggaatctcttgcagaaagaggtacataatgctggaaataaacttggtagacgttggtgatatgtgttccaattacgaaaaacagttacagggaattcagattcaggagggctgaaacgagagaccaggtgaaaaaattacgctgaatgctaaggaaggtaattgaccagttagagacgacatgaaaggtaagcagggaactgggaagacttcatagagaaaagcagggaaaaaatcagagtaccagaaatactgaacggtccataaaaccaggaccctaaaattctaccgtcagagaacacgaggggcttcccagacagaaggagataagaacaaaagggagtgagacgcacgggagagaatacaaaagtggattaaacaaaataagacacgagaacagcggctgcatacacagcgaacacaccaaaacagagggaggtaaacaagcagaatgcgagcgacaaagaacagaacctcatcatagacagccataaaaataatcgaggacgaagaagcagagaccgaatcggagcc

SEQ ID NO: 75132 - DNA, 1306 bp, Homo Sapiens
  misc_feature (44)..(78): n is a, c, g, or t
atactgaccgagcgcagcggagtgtatgagcgaggaagcggcgnnnnnnnnnnnnnnnnnnnnnnnnnnnnnnnnnnncagtcgacggtaccggacatatgcccgggaattcggccattacggccgggggaaaggaacaagggaaagagccggtgaaggggcagaacaggcaggttccctcgacccaggaccccctgttcccaggctatggcccccagtgccctgtagacctggcaggccccccgtgcttgcgacccctatttgggggtctgggtggctactggagggccttgcagaggggcagagaaggcaggaccatgacatctagggcctctgaactttctccggggcgcagcgtgacggctggcatcatcattgttggagatgagatccttaagggacacactcaggacaccaacaccttctttctgtgccggacactgcgctccctaggggtccaggtttgccgagtctcagttgtacctgatgaggtagccaccattgcagctgaggtcacttctttctccaaccgcttcacccatgtcctcacagcagggggcatcggccccactcatgatgatgtgacctttgaggcagtggcacaggcctttggagatgagctgaagccacaccccaagttggaagcagccaccaaagccctaggaggggaaggctgggagaagctatcattggtgccctcctctgcccgcctgcattatggcacagatccttgcactggtcaacctttcagattccctctggtctccgtccgaaacgtctacctcttcccaggcattccagagctgctgcggcgggtgctggaggggatgaagggactattccaaaacccagctgttcagttccactcaaaggagctatatgtggctgctgatgaagcctccatcgcccccattctggctgaggcccaggcccactttggacgtaggcttggcctgggttcctaccctgactggggcagcaactactatcaggtgaagctgactctagactcagaggaagaaggacccctggaggaatgcttggcctacctgactgcccgtttgccccagggatcgctggtcccctacatgcccaacgctgtggagcaggccagtgaggctgtatacaaactcgctgaatcaggtagggaccttatggaggaggggcattatgcccaaagccattggtggcaccccagatctcagtaatgcaggggctgttgggtgcttcctgcaaatccctgagagggcagaagatagcttctgttaattcattattcttccaataaatgttgattgagtaccta

SEQ ID NO: 75133 - DNA, 539 bp, Homo Sapiens
atatccgcagcatctcccttttcctgagctgaacagtttctacaggacactatcaagaggtataatctgcagatgttggaagctgagggcagcatgaagcaggccctgggtgaactgcaggcacggcacccccagctggaggctgtccttatgggcacccgccggactgacccctactcctgtagcctctgccctttcagccccactgacccaggctggcccgcattcatgcgcatcaacccactgctggactggacctacagagacatctgggattttctgcgtcagctgtttgtcccatactgtatcctgtatgaccgaggatacacatcactggggagtcgggagaataccgtgcggaacccggccctgaagtgcctgagcccaggaggacaccccacataccgtccagcctatctactggagaacgaagaagaggagcggaactcccgcacatgacctcccaccctaggagggagggaaggacaccgtcctagggtataacctggcaataaaccgtgcctctcactgtgaaaaaa

SEQ ID NO: 75134 - DNA, 1388 bp, Homo Sapiens
ggcacgaggagccggtgaaggggcagaacaggcaggtgagagtctaagagggctcagtaatctgaagcttggtgggaagaagggattctgggctagaaagggtgcagaagcctgaagtagaaagagacgggattttggtccggggtggagagcgaatgcattgaaaagggccaaggcccaggataaggtagacatttaaaggggtacggatgcccaaggtagagcagacacttgaggagaccagctcagcaaacggaagacacttaaagtggtaggttctcaagagagaagaagtttttaagactagagctaagcaagacatttaaaaggacatgggttgggatttgggaacacgtttattccagaggcaggaacaaaggagtcgcttgtcaaggatctggttagagaagactagggtcttcctcgaaggaagcacgcgcacgcctgctctcccccattgtcttttctggcttctccaggttccctcgacccaggaccccctgttcccaggctatggcccccagtgccctgtagacctggcaggccccccgtgcttgcgacccctatttgggggtctgggtggctactggagggccttgcagaggggcagagaaggcaggaccatgacatctagggcctctgaactttctccggggcgcagcgtgacggctggcatcatcattgttggagatgagatccttaagggacacactcaggacaccaacaccttctttctgtgccggacactgcgctccctaggggtccaggtttgccgagtctcagttgtacctgatgaggtagccaccattgcagctgaggtcacttctttctccaaccgcttcacccatgtcctcacagcagggggcatcggccccactcatgatgatgtgacctttgaggcagtggcacaggcctttggagatgagctgaagccacaccccaagttggaagcagccaccaaagccctaggaggggaaggctgggagaagctatcattggtgccctcctctgcccgcctgcattatggcacagatccttgcactggtcaacctttcagattccctctggtcttccgtccgaaacgtctacctcttcccaggcattccaagagctgctgccgcggggtgctggagggggatgaagggactattccaaaaacccagctgttcagttccaactcaaaggaactatatgtgggctgccgatgaaaccctccatcgccccccattctgggctgaaggccccagccccacttttggaacgaaagcctggggccttgggttccccaaccctggactgggggccggcacactaactatacacggcggaaagcttggactcctagaaccccccgacaggaaggaaaagggaccccctttgggacggcc

SEQ ID NO: 75135 - DNA, 555 bp, Homo Sapiens
  misc_feature (91)..(91): n is a, c, g, or t
  misc_feature (121)..(121): n is a, c, g, or t
  misc_feature (152)..(152): n is a, c, g, or t
ccctttccctaagctggacagttttctaaggacattatcaagaggtataatctgcagatgttggaagctgagggcagcatgaagcaggccntgggtgaactgcaggcacggcacccccagntggaggctgtccttatgggcacccgccggantgacccctactcctgtagcctctgccctttcagccccactgacccaggctggcccgcattcatgcgcatcaacccactgctgagcaagctataccagagaatcagatagcaagccctccctcagaggccaagggagcagaagagccatggatggtccccttcccaggacagcaggggtagaagtgggaaagatacacatcactggggagtcgggagaataccgtgcggaacccggccctgaagtgcctgagcccaggaggacaccccacataccgtccagcctatctactggagaacgaagaagaggagcggaactcccgcacatgacctcccaccctaggagggagggaaggacaccgtcctagggtataacctggcaataaaccgtgcctctcactgtgaa

SEQ ID NO: 75136 - DNA, 653 bp, Homo Sapiens
agacacggcagctggggagccgtccagggatacacgaggggctgctgggcccttggacaagggtggaagctggtgtgactcctgagtgccccgcggctgtggtgccgggggcagggtgcgtgggaggacggagcctgggagcggggcggggccgccgcgcaagggggcgacgcataaaggcctgctggcttggggcgcctgcctccctgctcctctgtcctcgcacagcgaacctgggctcctgcccaggacaggcaccagggtcatggcctgggacctggacaatggccccctccacctccctcccctcccggctccccggccaaagggagagcttggtctctggacctgccttaggaaggaaagggagggcaggaaggaaaagaaaggacttggaggtggcaggagtccgagccctgctccttgtgggcgctcacactgcccccggagcctgctgggagtggggccagccgtggacagctgaggttggggtcaatgcctcctgggcacccttgcctcgccccagaccggcccgtccagtccccatcacacctcggcggcctttatttattctgttcccccagctcggccacttctctgaaggagggctgggttctgggcctgtatcgaataaacacaaacctggatggcgc

SEQ ID NO: 75137 - DNA, 1418 bp, Homo Sapiens
  misc_feature (41)..(75): n is a, c, g, or t
acgacgagcgcagcgagacgtttgagcgaggaagcggccgnnnnnnnnnnnnnnnnnnnnnnnnnnnnnnnnnnncagtcgacggtaccggacatatgcccgggaattcggccattacggccggggagtagcggaggggaggtcgtgatggcggcgccggaggcggaggttctgtcctcagccgcagtccctgatttggagtggtatgagaagtccgaagaaactcacgcctcccagatagaactacttgagacaagctctacgcaggaacctctcaacgcttcggaggccttttgcccaagagactgcatggtaccagtggtgtttcctgggcctgtgagccaggaaggctgctgtcagtttacttgtgaacttctaaagcatatcatgtatcaacgccagcagctccctctgccctatgaacagcttaagcacttttaccgaaaaccttctccccaggcagaggagatgctgaagaagaaacctcgggccaccactgaggtgagcagcaggaaatgccaacaagccctggcagaactggagagtgtcctcagccacctggaggacttctttgcacggacactagtaccgcgagtgctgattctccttgggggcaatgccctaagccccaaggagttctatgaactcgacttgtctctgctggccccctacagcgtggaccagagcctgagcacagcagcttgtttgcgccgtctcttccgagccatattcatggctgatgcctttagcgagcttcaggctcctccactcatgggcaccgtcgtcatggcacagggacaccgcaactgtggagaagattggtttcgacccaagctcaactatcgagtgcccagccggggccataaactgactgtgaccctgtcatgtggcagaccttccatccgaaccacggcttgggaagactacatttggttccaggcaccagtgacatttaaaggcttccgcgagtgaatgagtgcttcttaatcctaaaaacacaatggctgaattatctttctccatgtggcgctgaatcacccatctggtttggagctagagttgcttcctggtgagagaggaagcaactctccttctggttgtctgcctcccctcagatttcctgataggctgatggcatgtggctgtgactgtgactgtaatcattgctgaacaacatctctttgaatcaaaggttgattttcccagagggtgctgggtcaggcatttctattaggagttggaaagcaaaaatgggtccatagacactctatggaggtgtccctttctgctctttgctgtgtcctttcagaatttttaccaggaacataatgtggatgtgacttatgaacttaaatataaaataaatagattcttattatgaacggcacacaatccaaccccaataaaaaaaccctgtc

SEQ ID NO: 75138 - DNA, 1340 bp, Homo Sapiens
  misc_feature (105)..(105): n is a, c, g, or t
  misc_feature (250)..(250): n is a, c, g, or t
  misc_feature (544)..(544): n is a, c, g, or t
cagtcgacggtaccggacatatgcccggtgaattcgtgccatcgacggctcggagataggactttgctagtagcgataacgaatagtgtgccgacgtggtcctgntggagtaatagtagatatatggtgttattacagactagtattgcatattgagaagaattcgaggatctatatgatgatgatgactctggaattctctagcgagattgagagagaaccgcactggttgaggcatgcagaagctgtntgtgagagtagtgtactagagtggtagtacatgacgagtctataattgtgatctatgcaatgtggagtctcgggtggaggtcgatattaaataagaacaatggttggtgaaaagtgaatgatatgtatttttccaaatgcttcatggttaggagtcttcaagttccatgttccccagatttgagatatactaaagaaagaaattcaaaagtagctatttggggcccacaaaaataactattattttagccttagagccttacacttgtttcatgaagagaaaggacttgcatanacaaaataaacaaagcaagacaaattaaaaatatgtgggggagagatcagtgaaaagtggttttcttaatgcagccctgcttggtccccattaacaattgcttgaaattcacatggatgtaaaattataattgtcaggatcttattcagatgatcttttaaggtttaactggttttgcttttgtttatctatatgtcaaaatacttgtaaattgggaacaaacttctctcagcttcttgaagttgttcaactatccttgccactggaagaccaaacaaggttttcactgctttttcttttacataatatgctgagaattatttcttatgctttttactacaaacaaaattactcacctggattaaagattaaggccttaatctgtttagattatctttaatctccatgaaatcgtgaaataagacaagaatagtgtttcagctgtaggccattttacagctaattgcccataaattgtagcatttattgacctgaagtactaagctaattgtcttgactactcaaagcccctgaattgttgtcaactttcccctttgtgttgtgtagccctaacgtcatttagcttgttgtctgatgcctccagtaggacacctccgatggagctttgatttctgagcagcgaaagctcccttcctaagatgcatctcgcataggctgcctatgatgaaggaccgtgcacctccactccaacagagtgctgagtttaaaagttgacctgtgtttgtaatttcactttcatcttgcttaataaatatctgctggattctttcattca

SEQ ID NO: 75139 - DNA, 1513 bp, Homo Sapiens
  misc_feature (140)..(154): n is a, c, g, or t
  misc_feature (783)..(795): n is a, c, g, or t
  misc_feature (1075)..(1084): n is a, c, g, or t
  misc_feature (1269)..(1281): n is a, c, g, or t
  misc_feature (1420)..(1435): n is a, c, g, or t
cctggacactgtgatgcgcatgggcaaggccagcgcccggggcttctgaaccgagcggggtgtttcatttttttgcttttccctgtcttaggctcccaatctttgactgccttcccatggcgatctataagttgaaagannnnnnnnnnnnnnnaatcacctcatgatgatggagttaaaagtaaaccgtgcagaccctggggtccctgttgtacgctgcatcatcccgctggccctgtgccctggagggtgggcggctcatggtgccacagcccctggcagggacggccggcccgcccccgtgactgacggacagatgcagggatggccgaggcagccctcgctccagctgaacgcctccattgctgcttgttctggagacccccgcccccgcaccttccagacttagcagaagaacaaactgaagaacagacccagccagagaagcagggattccagaagctgcccattaagggagaaggagaggatccggtcggcagcagccctgagcagaaagctggaggggggactgtcgcggggttctcctggtggggttaatttcattaaattttttccttttttctattcatttcgatggacgcaatcttaagccaccctgggccttgctcctgggaggtgagcgtgcacaggtgtgtgcaggtcaggaggtgccgtccaggtgtgcggcgagccgctgcgcacagatgtcaggatttccgtttgggtctagtttagaacctgtccttaaacctaggggttgctgtcaggatttgctttcagacnnnnnnnnnnnnngtaattccctttagagtctacaaaaatgtttttaaaaggatcaggtctgcttttagtttcatttttgtttctttcccgtcccactctttaaaaactggttccgtgaggaaaggcagaagccgttccgtgtctcttgcaggctgggccggcttcatgccagtgcgagggcgtcccgtgcccacgtacatacgtatgtctccatgagttctgggctccactggttccaattgagctccagccctggttttcctacccatgcagttagggactttaatttaannnnnnnnnngtagggccaccgccttcaaacacaactgctacaacattctaataaaggctcatttaacccccaggctcctgtcgtgtgaatatcctcagtctgtaggaaactttttttgacacagcatagaagacctagttttggaaaacattatctaattttttgttgtgcaaatccccaaatttctcactaannnnnnnnnnnnngtgcataacttggatgggctgaaggaggtgaggacagattggggaagggtggctttcattccaagatccagggatttggggaaaaggaaggaatttgatgttttttggggtgggaggggagggtgtgttttttaccccnnnnnnnnnnnnnnnntcaagagtatgcaagcatttctattcctcgcattcccccgtgtgcctggcaaataaatacctgtctcctacgaaaaaa

SEQ ID NO: 75140 - DNA, 729 bp, Homo Sapiens
  misc_feature (101)..(101): n is a, c, g, or t
ccacccagcaggcgggcctggactgccgtgtgtgccccacctgccagcaggtgctcgcgcatggcgatgccagcagccaccaggcgctgcatgctgcccgngacgacgacttcccctccctgcaagccatcgccaggatcatcacgtagctcccgccagcgtggccagagctgtcgcaccgtgagcgtccttcctccttcctctccgggctgccaggcagccaggtaaggcctggtgaggccacttggcctcttggttggccaggcccaccaggaagtcaccaggacagtccacccgccctgttggcacactcaagcgggagtccacccctgcctcagtggtgggccagtctcggtttgcattcttgtgcttttgggaggtgccaggggagggaagggctgggatgctgggacctgttgttgctggcaaagccagaggtcacagtggcctgatctgggccctcccaaagctgagggctgcagcccgtggggcctcagagctgaaagctgcggcgccactggtgccagagtcagatgtcacagatgtgttgtgtaaacagttggctgtttcgtgcttcaagaatgttcaggattaaaagcagacaagaaattgtgctacttgaagttgaatctttttatgagacaagctgaatctgggatctcaaattgcctctgaccttttataagacagtttatcttcaaataaatttattttgcaataccacgcaaa

SEQ ID NO: 75141 - DNA, 937 bp, Homo Sapiens
ggagcgcgagttcctgcggcgcaccgaggtggacagcaaaggcaacaagatcatcatgacgcccgacatgtgcatcagcttcgaggtggagcccatggagcacaccaagaagctgctctaccagtacgaggccatgatgcacctgaagagggaggagaagctgtccagacatcaggtctgggagtcagagctggaggtgctggagattctgaagcttcgagaggaagaggaggcggcgcacacactgaccatctccatctatgacaccaagcggaatgagaagagcaaggaatatcgggaggccatggagcgcatgatgcacgaagagcacctgcggcaggtggagacccagctggactacctggccccattcctggcccagctcccgccaggagagaaactaacatgctggcaggcggtgcgcctcaaggatgagtgcctcagcgacttcaagcagcggctcatcaacaaggccaacctcatccaggcccgctttgagaaggagacccaggagctgcaaaagaagcagcagtggtaccaggagaaccaggtgacgctgacacccgaggatgaagacctgtacctgagttactgctctcaggccatgttccgcatccgcatcctggagcagcgcctcaatcgacacaaggaactggccccactgaagtacctggctctggaggaaaagctctacaaggacccacgcctgggggagctccagaaaatattcgcttgatgtccctcctggggcctcagccagagctgccagagaaaggaaacctcttcccgcagcctggctcctgtgttccctctatccagccaatgcctgtttacacagacacctggcctcactgccagcccacctcccctacagccctgtttgttcctgcttctcatgattttcctgtaaataaacacactcttaatttgccaaaaa

SEQ ID NO: 75142 - DNA, 1710 bp, Homo Sapiens
  misc_feature (78)..(112): n is a, c, g, or t
  misc_feature (852)..(876): n is a, c, g, or t
ctgatacatcactatagggcctcagcgtgagcagccgaacgacgagcgcagcggagtagtgagcgaggaagcggccgnnnnnnnnnnnnnnnnnnnnnnnnnnnnnnnnnnncagtcgacggtaccggacatatgcccgggaattcggccattacggccgggcatacatatatatactatatatggatgaaacatattttaatgttgtttacttttttaaatacttggttgatcttcaaggtaatagcgatacaattaaatttgttcagaaagtttgttttaaagtttattttaagcactatcgtaccaaatatttcatatttcacattttatatgttgcacatagcctatacagtacctacatagtttttaaattattgtttaaaaaacaaaacagctgttataaatgaatattatgtgtaattgtttcaaacatccattttctttgtgaacatattagtgattgaagtattttgacttttgagattgaatgtaaaatattttaaatttgggatcatcgcctgttctgaaaactagatgcaccaaccgtatcattatttgtttgaggaaaaaaagaaatctgcattttaattcatgttggtcaaagtcgaattactatctatttatcttatatcgtagatctgataaccctatctaaaagaaagtcacacgctaaatgtattcttacatagtgcttgtatcgttgcatttgttttaattctgtgggaaaagtattgtatctaacttgtattactttggtagtttcatctttatgtattattgatatttgtaaattttctcaactataacaatgtagttacgctacaacttgcctaaaacattcaaacttgnnnnnnnnnnnnnnnnnnnnnnnnngttaacttcatttaaactcattgaaaacatagtatacattactaaaaggtaaattatgggaatcactgaaatattttggtagattaattgtcgtaacattgtctttctttgtattctttagtttcatgattttgatttttaaaattattagcacacaactattttcagccctttaataatggagcatcaaaaacatcacctgtaaccccaagcaaatatagaagactgtattttttactatgatatccattttccagaattgtgattacaatatgcaaagagtcataaatatgccatttacaataaggaggaggcaaggcaaatgcatagatgtacaaatatatgtacaacagattttgctttttatttatttataatgtaattttatagaataattctgggatttgagaggatctaaaactatttttctgtataaatattatttgccaaaagtttgtttatattcagaagtctgactatgatgaataaatcttaaatgctttgtttaattaaaaaacaaaaatcaccaatatccaagacatgaagatatcagttcaacaaatactgtagttaagagactaactctccacttgtatgggaactacatttcactcttggttttcaggatataacagcacttcaccgaaatattctttcagccataccactggtaacatttctactaaatctttctgtaacacttaaagaattccctcattcattaccttacagtgtaaacaggagtctaatttgtatcaatactatgttttggttgtaatattcagttcactcacccaatgtacaaccaatgaaataaaagaagcatttaaaagg

SEQ ID NO: 75143 - DNA, 657 bp, Homo Sapiens
  misc_feature (28)..(28): n is a, c, g, or t
  misc_feature (37)..(37): n is a, c, g, or t
ctgaccacacgggagtaggaagcagttngggagggantcagcagcctgtccctgcccctgccctcagctgagctcgggctcacgtgagagccctcctgcccaatggggctgcgtctccaggtacagggccctgccagtcccatgctggctacttgcagcacccctctctcacccctagggaagcgctgcaaaggcagctgaatggctgaagaacaggaggatgacgtggagggtgtgtgcaagcctctgtcctgcggctgggagatcacagacaccctgtgcgtgggccctgtcttcaccccagcgagcatcatgtgagtgggcctcgttccccccggagaatcccagcggggcctcagagatgcatctgggagaggtggggaagatggcaggcaagggtacccttggccaggactctggtgcccaccctgccacccccgcgctccacctgcagtgtttctgccctgtaaataggaccagtcttacactcgctgtagttcaagtatgcaacataaatcctgttccttccagctgtgtctgcctcctctgcagtgcaaggggcctggtcagccaggtgtgggggtgttcttggggtctcctttggtctccttcccacctttgtaaatataatgcaaataaataaatatttaggttttt

SEQ ID NO: 75144 - DNA, 549 bp, Homo Sapiens
  misc_feature (303)..(325): n is a, c, g, or t
tttagagcacttgaggaacctaaaagatgactggttcagcattttgtgtggtagataagaaagaaattatcacaaaaaatcagaaatgaacagtgagagaaaaataggaccccagacagtttataccttccatttgctgttttaaaagtgtgagcctgccaagtcaacaagtatgcctttagcgcacatgtaaatagcctgcacttcctaaatctcgtgtggcctcccatggttacattcttcaaaggttaactgagttgagaggaagattcagcatttaaaagagaagggttgaaaaagatnnnnnnnnnnnnnnnnnnnnnnntttaattggcccagggttacttaaataaatcataaccattttgccacattctgtaactgtttagctaaggtcaaattaagtttaccctatggattttgtttcatcttttgtttcgtgtatatactgtttgcctttttcataaaaatcttggatttgttatatattgttcctgttatttttgacatctttgctattgtaaataaattactattttgttttaagtt

SEQ ID NO: 75145 - DNA, 1497 bp, Homo Sapiens
  misc_feature (119)..(154): n is a, c, g, or t
  misc_feature (840)..(844): n is a, c, g, or t
  misc_feature (846)..(846): n is a, c, g, or t
  misc_feature (849)..(851): n is a, c, g, or t
  misc_feature (853)..(856): n is a, c, g, or t
  misc_feature (859)..(860): n is a, c, g, or t
  misc_feature (863)..(865): n is a, c, g, or t
  misc_feature (1033)..(1044): n is a, c, g, or t
  misc_feature (1191)..(1205): n is a, c, g, or t
  misc_feature (1312)..(1312): n is a, c, g, or t
  misc_feature (1405)..(1405): n is a, c, g, or t
agtctgagccgggggcgcgggcgccttccgcagagacctgcgcccacaggtgctgtcttagtggactgggacgtgaacctttcgctctccttctggactgggagaagggaggcttgggnnnnnnnnnnnnnnnnnnnnnnnnnnnnnnnnnnnnaaagatctcctcagggtcggacttcattttgtactgtgggctgtgctggccctttcaaggtttttcaagagttggttttgcgtttccaacctcggagaattccaggcactccccttccccctccgctgacatacttgtataagcggtcatcgttgcgtcatggggcaggcgtggggagcttcctgtcgccttgcgtgggtgtggggcctgggaggaggtcctggggcgtgcacccgccctgggcagtggggaggagagtggcctgagttacttcacccccgcgtgctgctggttaatgtcccgcgtctctgcaccttcgggtgggagcggggactgatctactttcacattctcaagtttttctcatctgcattagaggtgcccagtaggttcccaggttccagcgtgcccctccctcagacacacggacacaatcagccgagaagttcctggtctgaatcacgagaatgtggaggggtggggggtgtcagtggaaaggcataaggctgagctgagaccagttgctggtgaaactgggccaatctggggaggggaacatccttgccagggagtttctgagggtctgctttgtttacctttcgtgcggtggattctttttaactccgtctacctggcgttttgttagaaatgtcagataggaaaataaaaaccatttgagtaaaacnnnnnanaannncnnnnaannaannnccttgtccggccgccctcgggccctcgagaaagcttttctaaacccattccttttgggccgcgccgggccccacataagggaaagagggaacctgggccccataacctgggtttcccaaggaaaaacccggggccctggacacaaagggcttgggaattccccccccnnnnnnnnnnnncccccgggggggaaaccacgagaaggttttttgaaaaaaaatccccccaaagggaagttcctctcagggggcatttttacggggaatctttaccacacacggggatttcccctaacccgcgacccccccacaattcaaaaatatttnnnnnnnnnnnnnnnggtgaccattttatttcatgagaaaaaggggggggtcggaatcttctccaaatgcactttcctccttcgcccccccctatgggagcacccaaccctctcccctaaanacaccgccgcctctttgataaaacacatgtgaaagcttcccgccaagggcgaggtattaaatcaccaacctctctttgtttcctactcccctntcgccggtacaaatacaataataattcctttccgcccccctggtgggccaacaaaccacaacccgtgtccttaacaaaataccaatctctcg

SEQ ID NO: 75146 - DNA, 1835 bp, Homo Sapiens
  misc_feature (353)..(353): n is a, c, g, or t
  misc_feature (655)..(690): n is a, c, g, or t
gcggtgtccccacgggttgactccagcagacatggaacaacccggtcgccggctaaaagttcccccccggaaggtacaagcgagccctccggaactccgggacggatgtgtccctcgcccagtggcccaggtcaccacaacggtccaactcacgcttaccccgttccccggaccccccccaccgtccacatgcgcggattcagaccagggacttctcgcctgatgggcccggtgtctgaggacgggcacgctggaacctgggaacctactgggcacctctaatgcagatgagaaaacttgagaatgtgaaagtagatcagtccccgctcccacccgaaggtgcagagacgcgngacattaaccagcagcacgcggggatgaagtaactcaggccactctcctccccactgcccagggcgggtgcacgccccaggacctcctcccaggccccacacccacgcaaggcgacaggaagctccccacgcctgccccatgacgcaacgatgaccgcttatacaagtatgtcagcggagggggaaggggagtgcctggaattctccgaggttggaaacgcaaaaccaactcttgaaaaaccttgaaagggccagcacagcccacagtacaaaatgaagtccgaccctgaggagatctgttnnnnnnnnnnnnnnnnnnnnnnnnnnnnnnnnnnnncccaagcctcccttctcccagtccagaaggagagcgaaaggttcacgtcccagtccactaagacagcacctgtgggcgcaggtctctgcggaaggcgcccgcgcccccggctcagactcctacggtgccgtccctgcacactgaaggcgatggctccccggggacagagtccctctccgggcctctcagcagcccgggcggcggcttctctccacggttttcgcgggcgcttcccccaggatggaggggggtggcctcgcctcaggtctgcgccctcgggccgacggttcgacgcgcgctctgggctccggcagcgccgctcggggtcctcagaaggccaccacggcccgcacgagcacgttgagcatgctgtccgccgggcggcaagcgggctttgcctcgcacgcgggcggcgccgtcggaggggccgcggggctgcagttcaggaggccggagaagcgcctctgcaggacgcgggccaggttgggaaaggcgccctccgcttgcgccggagggggctgcaggcgatcggcgacttcggatgacgctccctcctcttcttccttttcttccagacgggctttcttgctcgggaccagtccagcgtccccgccgtcgctcaggctgctgctgcgtcgtttgcggctgactttggcggggcgcggggcacagcaggcggaggtctcctcggctgtcggcgcctcctgcgtgtccattggctccggaaacgggtgctcaccgtcgggggtcgctgtctcggccgtggactcggcttctcggggcgggtgcaggcgagggtcagaggggagggcggccggcaacgacacctcgggctcgagggcctccaccttggccgagaggtagagctcccgggcgctgcgcatgaccagcgacagctgcagactccggtgcagccgcaggccaccgcgctgcatgcgggagtgatacatcttccacaccgacagggtcatgatgcgctgtgcctctttctgcacttccatggcgactcgacggcgacagcggcgggggctcccgggagggacagaacaggcagcaggtgcactccggacaacgggctcgctcacgcctctctacacaaaccaacccacgcagtgacacatgcccgggaattccggaccggtacc

SEQ ID NO: 75147 - DNA, 756 bp, Homo Sapiens
  misc_feature (28)..(28): n is a, c, g, or t
tcagctgtcaggaggagcttcaagcacntgcatgtttccagcctcagtcaggaacagtggaggccatgtgtcttttggcagtcagtccagatgggaattggctagctgcatcaggtaccagtgctggagtccatgtctacaacgtaaaacagctaaagcttcactgcacggtgcctgcttacaatttcccagtgactgctatggctattgcccccaataccaacaaccttgtcatcgctcattcggaccagcaggtatttgagtacagcatcccagacaaacagtatacagattggagccggactgtccagaagcagggctttcaccacctttggctccaaagggatactcctatcacacacatcagttttcatcccaagagaccgatgcacatccttctccatgatgcctacatgttctgcatcattgacaagtcattgccccttccaaatgacaaaaccttactctacaatccatttcctcccacgaatgaatcagatgtcatccggaggcgcacagctcatgcttttaaaatttctaagatatataagcctctactcttcatggatcttttggatgaaagaacactcgtggcagtagaacggcctctggatgacatcattgctcagctcccaccacccattaaaaagaagaaatttggaacctaaaacagggcactgtctgtgtccttccttgaactgtctaccctgttgcttttcacaaatcatggtaataaaacaagttattcttgaaaaa

SEQ ID NO: 75148 - DNA, 696 bp, Homo Sapiens
aaccaggttattcagataccccagagttcaaagttgaaagcaagttagccaaatcaatgatacttccggatgagggtcaccttccgaatactggcctaatcacttttctgtgtaagatttatgtgcttactcgcaaagtagacaaatagtcaaatcagcaaaagccagtatacaaaggccagccccttccccgagagcctcccgaagaactgtgggaacacaaaccagggaatctgtaaaacaaaagcccctctcctccaagaaatgtactagctacctgtattctgatttactagctacctttattctgagtctctgtcctcttaccttattgtacttgttgcttttagaactttaagattcagaagaagatttgggaggtagcagtgaagaactcaccaatgacttgtcaatgatgcagaacatgtaggcatcatggagaaggatgtgcatcggtctcttgggatgaaaactgatgtgtgtgataggagtatccctttggagccaaaggtggtgaaagccctgcttctggacagtccggctccaatctgtatactgtttgtctgggatgctgtactcaaatacctgctggtccgaatgagcgatgacaaggttgttggtattgggggcaatagccatagcagtcactgggaaattgtaagcaggcaccgtgcagtgaagctttagctgttttac

SEQ ID NO: 75149 - DNA, 466 bp, Homo Sapiens
ccatttggtaggaaaggagtttgaaacaattaaagtatatattttagtggcagatgctgccgtcattctctattcctgtagtaagcagtgtcttaggcctgaggaagtaataacttctgttttatctctctggaccttctttacaggcgggatggttaaataagtagatgaaaaaagtagaaacattaacatctagaagtaatttgcacagtgatcagcaaattatcctggcagtgatttaaaactctaatggtctccttggcttttgccatcatctccagggcaggtctggctgtggacactgtgtgaattcagagatgtaactgttttgtcctcacaggaacagtggaggccatgtgtcttttggcagtcagtccagatgggaattggctagctgcatcaggtaccagtgctggagtccatgtctacaacgtaaaacagctaaagcttcactgcacggtgcctg

SEQ ID NO: 75150 - DNA, 703 bp, Homo Sapiens
cggacaggggcacacgtggcaaagagacggtggtgtgtttctctcctccatctgcgtgtgcacacatgtgctgggcacgcgtgtggtgaggtctgagagggccccgggctgcactggtgtgggctgcacaggcacagacgcagacggccccggccgtgtcctgtggccccctgtcggatggatgcgtcccgtttgtagagaagagcctttgggcccattcactcgttcagcagacacgcatgggactgatgctttgagttttcttctgtggggttttcctttctctggtctccgtgcagcccctgccctccctcgggtgctgctggcctcaaaggaggaactcgtggggggagggtgtgatttgcagacctgggtctctgctctgctctgggggtggggcttgctttcacagagaccctccttccctctcacccctcctctcccggcctcgccaggagtcttggctgttggcagctcagaggtgggggaggcctgtggtgtgaggtgccctgcacctgctcctgctcctgtcaccccttcctgctgcctcctccatgcccaaggaacacccatggtgcagtcctcaggcaaggccaggacggggctgaggccctgcgtggagatgctgcaccagcggaaggctgagacccgcttaccttagttcatctgttcactcgtaataaaaagaattctctcaggtcag

SEQ ID NO: 75151 - DNA, 1150 bp, Homo Sapiens
  misc_feature (445)..(445): n is a, c, g, or t
  misc_feature (449)..(501): n is a, c, g, or t
  misc_feature (855)..(912): n is a, c, g, or t
ggcacagagtttcaaggcaaacgaatgcacgtgcagttgtccaccagccggcttaggactgcgcccgggatgggagaccagagcggctgctatcggtgcgggaaagaggggcactggtccaaagagtgtccgatagatcgttcaggccgcgtggcagacttgaccgagcaatataatgagcaatacggagcagtgcgtacgccttacaccatgagctatggggattcattgtattacaacaacgcgtacggagcgctcgatgcctactacaagcgctgccgtgctgcccggtcctatgaggcagtggcagctgcagctgcctccgtgtataattacgcagagcagaccctgtcccagctgccacaagtccagaatacagccatggccagtcacctcacctccacctctctcgatccctacgatagacacctgttgccgacctcangagnnnnnnnnnnnnnnnnnnnnnnnnnnnnnnnnnnnnnnnnnnnnnnnnnnnnntccacttcatattacgggcgggatcggagccccctgcgtcgcgctacagccccagtccccactgttggagagggctacggctacgggcatgagagtgagttgtcccaagcttcagcagccgcgcggaattctctgtacgacatggcccgggtatgagcgggagcagtatgccgatcgggcgcggtactcagccttttaaagcttgaggtgggatgtgtgtgggctgaaattccgagctgcggttgtgcatgagaatacacccttcgtggtaccccatctccgggacgttctcggctctgtgcgttcagtccctcaggaaccgtggaccttaatttaccttgctaagttcagacnnnnnnnnnnnnnnnnnnnnnnnnnnnnnnnnnnnnnnnnnnnnnnnnnnnnnnnnnnaatacttctgtagcttcccattcatgttctcttctcccagcaggcctcattgtgtgcagaaactgtggtgggggctgtgctgtctcctccctgcctcctgcctcctgcggctgttggatttgggaatgaccttggtgagagtctcactgctcccagggtctctttttggtccaaaggctagacctatagagttggatccctttttttctttccggtgaaataaatggtttttcaactt

SEQ ID NO: 75152 - DNA, 1005 bp, Homo Sapiens
  misc_feature (769)..(789): n is a, c, g, or t
  misc_feature (958)..(958): n is a, c, g, or t
cagaagcgtccgcgccgcgaggaggaggccctgctggtttctgtgcgggctcttgtcaggatggtgaagctgttcatcggaaacctgccccgggaggctacagagcaggagattcgctcactcttcgagcagtatgggaaggtgctggaatgtgacatcattaagaattacggctttgtgcacatagaagacaagacggcagctgaggatgccatacgcaacctgcaccattacaagcttcatggggtgaacatcaacgtggaagccagcaagaataagagcaaaacctcaacaaagttgcatgtgggcaacatcagtcccacctgcaccaataaggagcttcgagccaagtttgaggagtatggtccggtcatcgaatgtgacatcgtgaaagattatgccttcgtacacatggagcgggcagaggatgcagtggaggccatcaggggccttgataacacagagtttcaaggtgaaccaccctctttgggtagagggctgaacacaaggctgtgtgcagaaaatggttggataagtaaaaggagaggtttggtaaagataacagctgttggctggctggtgatgaacgaaataagtgtgggtgatggacttcttatgatgtacgaatgcatgggacttaggggctttaccttaggcaaatgtctcctggagaaaagccactcaccttttattcggagcccctacggcttttgtgcttatcagtgcagaaaacccttttctttgaaggctttctgaagttactgggccnnnnnnnnnnnnnnnnnnnnngtagtagagcacagttcagagttcctcactctgaatttattgccctcagcacaggatcagaattctgcattttacgtgaagaacctctcaaaaacatgtcaagcgacacttataggaccagaatccttgttaactgtcctaccttacacaaactctttaaagggttcantcttgttgctttatatatcctgtacaagggattgtatttgagttaag

SEQ ID NO: 75153 - DNA, 945 bp, Homo Sapiens
ggggccgccattttagcgttttgtcagaagcgtccgcgccgcgaggaggaggccctgctggtttctgtgcgggctcttgtcaggatggtgaagctgttcatcggaaacctgccccgggaggctacagagcaggagattcgctcactcttcgagcagtatgggaaggtgctggaatgtgacatcattaagaattacggctttgtgcacatagaagacaagacggcagctgaggatgccatacgcaacctgcaccattacaagcttcatggggtgaacatcaacgtggaagccagcaagaataagagcaaaacctcaacaaagttgcatgtgggcaacatcagtcccacctgcaccaataaggagcttcgagccaagtttgaggagtatggtccggtcatcgaatgtgacatcgtgaaagattatgccttcgtacacatggagcgggcagaggatgcagtggaggccatcaggggccttgataacacagagtttcaaggtgggatgtgtgtgggctgaaattccgagctgcggttgtgcatgagaatacacccttcgtggtaccccatctccgggacgttctcggctctgtgcgttcagtccctcaggaaccgtggaccttaatttaccttgctaagttcagaccttctcttcctttcctttcctttcctctcctgcccattttcctgttcttctgtccttcaatacttctgtagcttcccattcatgttctcttctcccagcaggcctcattgtgtgcagaaactgtggtgggggctgtgctgtctcctccctgcctcctgcctcctgcggctgttggatttgggaatgaccttggtgagagtctcactgctccagggtctctttttggtccaaaggctagacctatagagttggatcactttttttctttccggtgaaataaatggtttttcaacttaaaaaaaa

SEQ ID NO: 75154 - DNA, 1065 bp, Homo Sapiens
aactaacggctaggtacgaggctgggtgttaattcggcacgagggccggtcgttcggacgtcttgcctgtcgctggaggagaggtccgggctctccaggaaggtggctgcggcgacaaaatgaagatattcgtgggcaacgtcgacggggcggatacgactccggaggagctggcagccctctttgcgccctacggcacggtcatgagctgcgccgtcatgaaacagttcgccttcgtgcacatgcgcgagaacgcgggcgcgctgcgcgccatcgaagccctgcacggccacgagctgcggccggggcgcgcgctcgtggtggagatgtcgcgcccaaggcctcttaatacttggaagattttcgtgggcaatgtgtcggctgcatgcacgagccaggaactgcgcagcctcttcgagcgccgcggacgcgtcatcgagtgtgacgtggtgaaagactacgcgtttgttcacatggagaaggaagcagatgccaaagccgcaatcgcgcagctcaacggcaaagaagtgaagggcaagcgcatcaacgtggaactctccaccaagggtcagaagaaggggcctggcctggctgtccagtctggggacaagaccaagaaaccaggggctggggatacggccttccctggaactggtggcttctctgccaccttcgactaccagcaggctttggccaacagcactggtggctttgatgggcaagcccgtcagccacaccacccttctttggtcgcgaccgcagccctctgcgccgttcacctccccgagcctcttatgtggctccctctgacggcccagccagcaacctacccgggcccagccggccgggtcactgggagctgcctacagggcccagccttctgcctctttgggtgttggctatcggactcagcccatgacagcccaggcagcctcttaccgcgctcagccctctgtctcccttggggcaccatacaggggccagctggctagtcctagctcccagtctgctgcagcttcttcactcggcccatatggtggagcccagccctcagcctcggccctt

SEQ ID NO: 75155 - DNA, 1050 bp, Homo Sapiens
gctggcgcgcgagaaagtgtcccggtcgcgtccaggctcgagcggccgtcgccattttgtaaggttctctctgacgtgggagccgccgtcgctgccgccacccggaggctcttgtcaggatggtgaagctgttcatcggaaaccttccccgggaggctacagagcaggagattcgctcactcttcgagcagtatgggaaggtgctggaatgtgacatcattaagaattacggctttgtgcacatagaagacaagacggcagctgaggatgccatacgcaacctgcaccattacaagcttcatggggtgaacatcaacgtggaagccagcaagaataagagcaaagcttcaaccaagttacacgtgggtaacatcagccccacttgtaccaaccaagagcttcgagccaagtttgaggagtatggtccggtcatcgaatgtgacatcgtgaaagattatgccttcgtacacatggagcgggcagaggatgcagtggaggccatcaggggccttgacaacacagaggttcaaggcaaaaaaatgcatgtgcagttgtccacaagccggcttcggactgcccctggtatgggagaccagagtggctgctatcggtgtgggaaagaagggcactggtccaacagagtgcccagtagatcgtacgggtcgtgtggcagactttactgagcagtataatgaacaatatggagcagttcgaacaccttacaccatgggctacggggaatccatgtattacaacgatgcatattggagcactcgactactataagcagataccgggtccgctcttatgaggcagtagcagcggcggcagcgcttctgatacaactacgcaggaggagacctgtgccatttgctcaagtcaagcaaacttgtgacagcacctcaatctcatctctggggcctatgaaagaacgtatgccaatctggctgtgcataccatgatgggtggggggccatctctaatggaggcggccaggtttgactccccattggagcgtggcaagaacggcgaagaattaagcgaaggtgc

SEQ ID NO: 75156 - DNA, 1105 bp, Homo Sapiens
  misc_feature (954)..(1009): n is a, c, g, or t
aaaataaggctaggtagaggctgggtgtaaatcggcacgaggagcgttttgtcagaagcgtccgcgccgcgaggaggaggccctgctggtttctgtgcgggctcttgtcaggatggtgaagctgttcatcggaaacctgccccgggaggctacagagcaggagattcgctcactcttcgagcagtatgggaaggtgctggaatgtgacatcattaagaattacggctttgtgcacatagaagacaagacggcagctgaggatgccatacgcaacctgcaccattacaagcttcatggggtgaacatcaacgtggaagccagcaagaataagagcaaaacctcaacaaagttgcatgtgggcaacatcagtcccacctgcaccaataaggagcttcgagccaagtttgaggagtatggtccggtcatcgaatgtgacatcgtgaaagattatgccttcgtacacatggagcgggcagaggatgcagtggaggccatcaggggccttgataacacagagtttcaaggcaaacgaatgcacgtgcagttgtccaccagccggcttaggactgcgcccgggatgggagaccagagcggctgctatcggtgcgggaaagaggggcactggtccaaagagtgtccgatagatcgttcaggccgcgtggcagacttgaccgagcaatataatgagcaatacggagcagtgcgtacgccttacaccatgagctatggggattcattgtattacaacaacgcgtacggagcgctcgatgcctactacaagcgctgccgtgctgcccggtcctatgaggcagtggcagctgcagctgcctccgtgtataattacgcagagcagaccctgtcccagctgccacaagtccagaatacaggcatggccagtcactcacctccaactctctcgatccctacgatagacacctgttgccgacctcaggnnnnnnnnnnnnnnnnnnnnnnnnnnnnnnnnnnnnnnnnnnnnnnnnnnnnnnnntccacttcatattacgggcgggatccggagcccctggcgtcgcgctacagccccagttcccactgttggaaagggctaacggttacgggcatgaga

SEQ ID NO: 75157 - DNA, 756 bp, Homo Sapiens
  misc_feature (50)..(94): n is a, c, g, or t
cgtccacctctctcgatccctacgaaagacacctgtggccgacctcaggnnnnnnnnnnnnnnnnnnnnnnnnnnnnnnnnnnnnnnnnnnnnntactgcagcttccacttcatattacgggcgggtatcggagccccctgcgtcgcgctacagccccagtccccactgttggagagggctacgtgttacgggcatgagagtgagttgtcccaagcttcagcagcctgcgcggaattctctgtacgacatggcccggtatgagctgggagcagtatgccgatcgggcgcggtactcagccttttaaagcttgaggtgggatgtgtgtgggctgaaattccgagctgcggttgtgcatgagaatacacccttcgtggtaccccatctccgggacgttctcggctctgtgcgttcagtccctcaggaaccgtggaccttaatttaccttgctaagttcagaccttctcttcctttcctttcctttcctctcctgcccattttcctgttcttctgtccttcaatacttctgtagcttcccattcatgttctcttctcccagcaggcctcattgtgtgcagaaactgtggtgggggctgtgctgtctcctccctgcctcctgcctcctgcggctgttggatttgggaatgaccttggtgagagtctcactgctccagggtctctttttggtccaaaggctagacctatagagttggatcactttttttctttccggtgaaataaatggtttttcatccaa

SEQ ID NO: 75158 - DNA, 1532 bp, Homo Sapiens
  misc_feature (225)..(269): n is a, c, g, or t
tccaagctttaaaaaggctggagtaccgcgccccgatcggggcatactgctcccgctcataccgggggccatgtcgtacagagaattccgcgcggctgctgaagcttgggacaactcactctcatgcccgtaaccgtagccctctccaacagtggggactggggctgtagcgcgacgcagggggctccgatcccgcccgtaatatgaagtggaagctgcagtaannnnnnnnnnnnnnnnnnnnnnnnnnnnnnnnnnnnnnnnnnnnnctgaggtcggcaacaggtgtctatcgtagggatcgagagaggtggaggtgaggtgactggccatggctgtattctggacttgtggcagctgggacagggtctgctctgcgtaattatacacggaggcagctgcagctgccactgcctcataggaccgggcagcacggcagcgcttgtagtaggcatcgagcgctccgtacgcgttgttgtaatacaatgaatccccatagctcatggtgtaaggcgtacgcactgctccgtattgctcattatattgctcggtcaagtctgccacgcggcctgaacgatctatcggacactctttggaccagtgcccctctttcccgcaccgatagcagccgctctggtctcccatcccgggcgcagtcctaagccggctggtggacaactgcacgtgcattcgtttgccttgaaactctgtgttatcaaggcccctgatggcctccactgcatcctctgcccgctccatgtgtacgaaggcataatctttcacgatgtcacattcgatgaccggaccatactcctcaaacttggctcgaagctccttattggtgcaggtgggactgatgttgcccacatgcaactttgttgaggttttgctcttattcttgctggcttccacgttgatgttcaccccatgaagcttgtaatggtgcaggttgcgtatggcatcctcagctgccgtcttgtcttctatgtgcacaaagccgtaattcttaatgatgtcacattccagcaccttcccatactgctcgaagagtgagcgaatctcctgctctgtagcctcccggggcaggtttccgatgaacagcttcaccatcctgacaagagcctttcaccacgtcacactcgatgacgcgtccgcggcgctcgaagaggctgcgcagttcctggctcgtgcatgcagccgacacattgcccacgaaaatcttccaagtattaagaggccttgggcgcgacatctccaccacgagcgcgcgccccggccgcagctcgtggccgtgcagggcttcgatggcgcgcagcgcgcccgcgttctcgcgcatgtgcacgaaggcgaactgtttcatgacggcgcagctcatgaccgtgccgtagggcgcaaagagggctgccagctcctccggagtcgtatccgccccgtcgacgttgcccacgaatatcttcattttgtcgccgcagccaccttcctggagagcccggacctctcctccagcgacaggcaagacgtccgaacgaccg

SEQ ID NO: 75159 - DNA, 1072 bp, Homo Sapiens
  misc_feature (970)..(971): n is a, c, g, or t
tccaaggtagcgaggcctgggtggcgaattccgcacgaggaataagagcaaaacctcaacaaagttgcatgtgggcaacatcagtcccacctgcaccaataaggagcttcgagccaagtttgaggagtatggtccggtcatcgaatgtgacatcgtgaaagattatgccttcgtacacatggagcgggcagaggatgcagtggaggccatcaggggccttgataacacagagtttcaaggcaaacgaatgcacgtgcagttgtccaccagccggcttaggactgcgcccgggatgggagaccagagcggctgctatcggtgcgggaaagaggggcactggtccaaagagtgtccgatagatcgttcaggccgcgtggcagacttgaccgagcaatataatgagcaatacggagcagtgcgtacgccttacaccatgagctatggggattcattgtattacaacaacgcgtacggagcgctcgatgcctactacaagcgctgccgtgctgcccggtcctatgaggcagtggcagctgcagctgcctccgtgtataattacgcagagcagaccctgtcccagctgccacaagtccagaatacagccatggccagtcacctcacctccacctctctcgatccctacgatagacacctgttgccgacctcaggagctgctgccacagctgctgctgcagcagcagccgctgctgctgttactgcagcttccacttcatattacgggcgggatcggagccccctgcgtcgcgctacagccccagtccccactgttggagagggctacggttacgggcatgagagtgagtttgtcccaagcttccgcagccgcgcggaattctctgtacgacatggccccggtatgagcggggaccagtatgaccgatccggccgcggtactccggcctttttaaagcttgaaagcggggatgtgtgtggggcctgaaaattcccnncctgccgggtgtggcatggaaaaatacccccctttcctgggtaccccccatctcccggggaacgttctccgggctctggtggcggttcaagtccccttcag

SEQ ID NO: 75160 - DNA, 396 bp, Homo Sapiens
aaagatgaccaggccacactgctgggagaggctacggttacgggcatgagagtgagttgtcccaagcttcagcagccgcgcggaattctctgtacgacatggcccggtatgagcgggagcagtatgccgatcgggcgcggtactcagccttttaaagcttgaggtgagaggggtggggtgttccctcttctggtcttgccatccctcctgcagcctaaagggctccaattaggctgccctgcttgcttgcttgcttttgcagggctaggggaaggttactaggatggctcacaggctagagagaagtcctaactgcttaactttaaaatacatagagttccttggccctcatggctatttttcagggcttctggtagtgggagtcaatttgattct

SEQ ID NO: 75161 - DNA, 853 bp, Homo Sapiens
  misc_feature (753)..(803): n is a, c, g, or t
gatcaacccagacaagctttctgaactagaagatcttctgccatctagaccggaagttcctaacataattggagaaacagaggaggtagagcttcaggaatttgatagcactcgaggctcaggaggtggtcagaggcgtgaagcctataatgatagctctgatgaagaaagcagcagccatcatggacctggagtgcagtgtgcccatcagtaaactctgcaaacaaattgcacaggtggattttctttccacatttgcctgatttgttctcagcaatccagctggagtgtcttatcaatccagatgaactgagggacatctgttggtctatgtataacttttaaaattggtatagtatctacagagtgtataatttaaactaaccacaaagctttacatcttcattttgactgttccatagcagaataaagcacttgaaaggaaacaagactccctttcacacatggattattataagtttcaatcctggtatctgtgcttgatttttatcagttttgtgtagatttttatgtttcatattttaaatttaaatcccacattgtaaagtttgtacaatttgtcctgaagctttgtgtttggctgcacctgcataagctgctacaaatagaataaagaatttcatagcctgtatctatcatttagatgcatggaaaaaaatgggctttgcacacaatgggtttggagctgactgggaacaatggaaaaaattacattagctgtggttgtaaagnnnnnnnnnnnnnnnnnnnnnnnnnnnnnnnnnnnnnnnnnnnnnnnnnnnaccatcttgtgaaaggtttttgaaactcgataataaaaagcggttggtgt

SEQ ID NO: 75162 - DNA, 1524 bp, Homo Sapiens
gggggcgtagccggagccggcgacgtgaggcgggcgttgctcgcgcgacaagtagttgctgggacagcgaaatggaggggtgtgtgtctaacctaatggtctgcaacctggcctacagcgggaagctggaagagttgaaggagagtattctggccgataaatccctggctactagaactgaccaggacagcagaactgcattgcactgggcatgctcagctggacatacagaaattgttgaatttttgttgcaacttggagtgccagtgaatgataaagacgatgcaggttggtctcctcttcatattgcggcttctgctggccgggatgagattgtaaaagcccttctgggaaaaggtgctcaagtgaatgctgtcaatcaaaatggctgtactcccttacattatgcagcttcgaaaaacaggcatgagatcgctgtcatgttactggaaggcggggctaatccagatgctaaggaccattatgaggctacagcaatgcaccgggcagcagccaagggtaacttgaagatgattcatatccttctgtactacaaagcatccacaaacatccaagacactgagggtaacactcctctacacttagcctgtgatgaggagagagtggaagaagcaaaactgctggtgtcccaaggagcaagtatttacattgagaataaagaagaaaagacacccctgcaagtggccaaaggtggcctgggtttaatactcaagagaatggtggaaggttaaacagcttggatttattcttactttgtatgttgtgttgttgtccccagtgtcctacaaactaatgtatttgtgcacaagacatcatctatgaatgatgaagttttctcaccttcaaagtcttataaacatgttgactcttgttcctgctgagttacttgttcgaagcttacagcttgttttccaggcatcgaataactgttgagattgttctactgttgtcgtatattcttctatattgaattctggttaatttggagtaactaattctgtggctgttgtgagtcttcagcaccctcccatgtaccttatatccctctctgaaacagaacagctccaatagcaacaagctagttgttctgccagatgtttctatgtggattctgtaatgttcctccatacagttaaaacatcctaacttgtttttcaagctcactcaggcctacgccaaacgtttctgttttttttaaccatgaggtttaatttatttttgtgataggagggatatttacatattttagtggaccacattttaagttggatggtgtgctctaaaatactgaaaaacaatagcccatatacctatgtatttgtttttgatgggttgtttactctgaaataaaatgtatggttttcttaaaaggaagttttaaagtacctattttgtgtcatcctgtattgaaaagaatgtcaagcttgttaaaatgacatgtaacaaaaatgtattttgatttgtatttcagaaactaaaaaataaaatgttgaaagaataaaa

SEQ ID NO: 75163 - DNA, 1062 bp, Homo Sapiens
cccagacaaattcccaaggttaatttcccaaaccccttaggaaaaaatggtgaaggttggaggtgggggacacaggtgcgcagctgcacagagtcagcagcagcagcctgctccccgccactgaggactcggcctggactgcagtgcctcccaaatcaaccacgcagcaagaggggagtgcagggagggccctgaacaccaagcctctgaaaggctaagggacacagctccagctgtcccaggaaaaccagcaataaataaaagtgaggcacggccccacccacacatatcatctagtcacccatcttcactctggaggtctgaagaattgcgacgatgaccccaaagaggccaatggcgctgccaaagatctccacgatgagaatctttacaaagaggctggggttctgagcatcggccagggcagccccactgcccacgatgcccacgcagactccacagaagaggttagacaggcctacggtgaggccagccccaaacatggagtagcctgcatggtagttccgatggccgatggccttggggtctgtggcactgaaaggctcagccatgttgctaatgacaattgccatgatgatgccgtagatggccacagcctcacagaagatgatgctgaccaggttcttggtcttgatcctgggggccttcactcctccaccaatgatggaggagccggtaatatagatgccccaggctgccccaaccacagacagggagatagctaggccaatgcccaggttggaccacatgaagggcgaagtctccgtcaggaaccatgccacatcaaagcggaagcccaaatcaaaaatggtgtagcagactcccacggccagcgcgcaggcccagaaggccacgaagaccccggagtagagcagtgctagccccgtcatggcggcgacggcggcgggggtcggaacggcggggccggagctacaaacgcgtcccagcgtccaccgtccgtcccgcagtctgtccgcccgccccgcagcgtcacctaaccctcgtgccgaattcaacacccagcctcgtacctagccgtaa

SEQ ID NO: 75164 - DNA, 1020 bp, Homo Sapiens
ttaaggctaggtagcgaggctgggtgtcgaattcggcacgaggacggtggacgctgggacgcgtttgtagctccggccccgccgttccgacccccgccgcgtcgccgccatgacggggctagcactgctctactccggggtcttcgtggccttctgggcctgcgcgctggccgtgggagtctgctacaccatttttgatttgggcttccgctttgatgtggcatggttcctgacggagacttcgcccttcatgtggtccaacctgggcattggcctagctatctccctgtctgtggttggggcagcctggggcatctatattaccggctcctccatcattggtggaggagtgaaggcccccaggatcaagaccaagaacctggtcagcatcatcttctgtgaggctgtggccatctacggcatcatcatggcaattgtcattagcaacatggctgagcctttcagtgccacagaccccaaggccatcggccatcggaactaccatgcaggctactccatgtttggggctggcctcaccgtaggcctgtctaacctcttctgtggagtctgcgtgggcatcgtgggcagtggggctgccctggccgatgctcagaaccccagcctctttgtaaagattctcatcgtggagatctttggcagcgccattggcctctttggggtcatcgtcgcaattcttcagacctccagagtgaagatgggtgactagatgatatgtgtgggtggggccgtgcctcacttttatttattgctggttttcctgggacagctggagctgtgtcccttagcctttcagaggcttggtgttcagggccctccctgcactcccctcttgctgcgtgttgatttggaggcactgcagtccaggccgagtcctcagtgcggggagcaggctgctgctgctgactctgtgcagctgcgcacctgtgtcccccacctccaccctcaacccatcttcctagtgtttgtgaaataaacttggtatttgtctgggtcaaaacc

SEQ ID NO: 75165 - DNA, 915 bp, Homo Sapiens
  misc_feature (128)..(128): n is a, c, g, or t
gggggaaaaagaacagggctgttgtccagtgacaccaaatcagagacaaaatagagagcccctgtaggagaaaaccagaagatggaaatgaggaggtggaactgtttgggggaatctatagttatagntagagaaggagagcaacttcagcttcttccagaaggagggtaaggctagctttggggacaaggacacagaggcttcccaaggggattcatcacctgaagaattgcgacgatgaccccaaagaggccaatggcgctgccaaagatctccacgatgagaatctttacaaagaggctggggttctgagcatcggccagggcagccccactgcccacgatgcccacgcagactccacagaagaggttagacaggcctacggtgaggccagccccaaacatggagtagcctgcatggtagttccgatggccgatggccttggggtctgtggcactgaaaggctcagccatgttgctaatgacaattgccatgatgatgccgtagatggccacagcctcacagaagatgatgctgaccaggttcttggtcttgatcctgggggccttcactcctccaccaatgatggaggagccggtaatatagatgccccaggctgccccaaccacagacagggagatagctaggccaatgcccaggttggaccacatgaagggcgaagtctccgtcaggaaccatgccacatcaaagcggaagcccaaatcaaaaatggtgtagcagactcccacggccagcgcgcaggcccagaaggccacgaagaccccggagtagagcagtgctagccccgtcatggcggcgacggcggcgggggtcggaacggcggggccggagctcacaaacgcgtcccagcgtccaccgtccgtcccgcagtctgtccgcccgccccgcagcgtc

SEQ ID NO: 75166 - DNA, 1095 bp, Homo Sapiens
  misc_feature (837)..(837): n is a, c, g, or t
  misc_feature (844)..(895): n is a, c, g, or t
tcggacggtggacgctgggacgcgtttgtagctccggccccgccgttccgacccccgccgccgtcgccgccatgacggggctagcactgctctactccggggtcttcgtggccttctgggcctgcgcgctggccgtgggtgaggccgggtcctggcgggcgggagcagcatcgcggccgagctggccgggtcggaactcggcggggaagtggcctgcggggaatactggccccccgcgcgctctgcacccgaggctctggggacttgcgcctgcgagggcctctgactccgacaaaggagacccggatttccagctgcttgaggaggggtgcgggcgggtaggggccgcgagggcagcactcccccgtcctgccactatcgctgtctcccctcgctcccacgtctcactgctgtcccccctttcttgctcctgaccggcccgctcggtcacaagccggctgctccggttcctcttttcccagtcgctttgccctcccccacccacagcttgttgggtaaacagcggaacggactgggccggcgggatctgccgggaacgcttgctccctcggtcccgcctcggattccgggcttgacggtggcgtgaccctgccggcccacgtgctagcgcctgaccagtggatacactacccgggcgggggccccaagggggggccgaaacccagggaacaatccccgccccctgggccgccccccatgcggaacccagtgcgccgtgaccgagcccggcggggtcgcgccccccgaccgcgcccggggccccgtcccgagacattttctctaaaccccttcagatgatcaccctcccctacttantctactnnnnnnnnnnnnnnnnnnnnnnnnnnnnnnnnnnnnnnnnnnnnnnnnnnnnacgccaccaagtactcggtcgcgaggcaagagcgcatcaatggataaccgatgcggggttgacagcctctttgaggcggggcggttcccggtacccaacagcggtctcgatttcccctcggccgcgactgctagtgcgcttgcgcgcccgactaacctagcccgagcgcgtgcggctaggcccgtctgcggccgacggta

SEQ ID NO: 75167 - DNA, 896 bp, Homo Sapiens
cggactctgactgcgcggagaccgctggactctggtcgcggcttagtccgctgatcctcgcttgggtgcccgcccttagcggcccggcgttgaattccgggaagtgggagcttcaggctcgctccgtgcgggtatgggcgctaatgtcacttgggatggttgcgcaaggacatcgcggcggacactgacaaggaaccggggaggaacgggggtggggagagactgcgatgggactcgggaagccgggaagggccgcgctgaataagcctaaggggccgggtcgcaaggagtgtcgggtagcacaggcctcggctcagtcggagcgccaggcctcagggtccgggcgggggctgctgcgtcacaccaggcagcctgggaacgcaactgttgggcaaccgtggtggcctctcgccacctcttacgcttgggcgatctgcgattgacgcatcctgggagctgatgtcccgcacgggcggggcgccggaggaggagagaaaatagagacccggttgttgacagcctgtgatgccgcttgattcatgtgtgggtggcctggtttagaaatgtaccacccttcctttctaggttcctccccggagggcggggtgacgggtgcggcgccgaatcgcaacaaaaaacgctgctcgagggatgttagtaactgtctcagcttaagttgctgccttttagcttacagtttgtatcgtaactgtaattgtggatcttagttaaatcccttcagtgtgttggaaacatatttttaagtgtatttttgaaacatacttagagcattttgaaatgcttttttgaaagcgttttttaaatcaaaattctgttacactttatttttttcagtctgcagatgaacttgactcactcaaggttaatgatttttg

SEQ ID NO: 75168 - DNA, 1027 bp, Homo Sapiens
gggggaacctaacgaggagagcccaggcctaggcaggaggcctggaaccctcttggctaaggtgctgttcctgttcctgcaaggtctccagaacccctttggaaatggtgaaggaaccagcccaatagaagtacagagccagctgacaagtccttgtaaagctcactcctcagtccttggcacagccatgttttgtcttctctcttggtatttcttctctcccaactttagccattttgccttggaatcatgattacaattttttcctttgcagatgccttcctgggggatactcctccccaccctaaagggtcgcctgcaacttaggcggattgggtctctctgctgtggcgttctctcttgagagaccctctgaattttagcacaaagtgccttctgtttcacagctgccaccacctttagaggaatttcgtcagaaaaatgtggaggctccatattaatgcattattttttaaaaagttttgataactcttaaagcatcatttgcacctatgtgggaactttgcctgttgcaaagtattgtggccgagctgcagctgggagcctgctttctgccagtcttgaggttctgaagatcagctttgaaaggaaagtatgtcctagcttagccattcagaagagaaaaatggaatatcagagttacagttgtcagtgaaactactttggattttaacctcttagaggaagaaaaaaggttagggaagtgtcaactctggatgaaggtgatgtgtttgcctctcagtctttcattcatagcctgctagtgaaaaggaagtaaatgagattcttttgtgtgactttgtagtctctttgtattaccaaatagttggggtgttgactcctgtgtgttttgcaagaatgtgtggtaagcctgggtaaagagaaggaactgcggtgttgggagagtctttgtgttggggagtggcaggggatgatttgtttcaggggaaaatgcccacattttaacttttaaacttctgaataaactgtgtaaaaacagtagtgg

SEQ ID NO: 75169 - DNA, 995 bp, Homo Sapiens
tcaggtctgagtagcattgccttaaatcttatccagttagaacattgatttatttacatgatgttcagattttccagtgaaaaatacccttctgaacaaaacatgtacttactctccgaaaggcatctatctgtgctattgcaaacactccttgagattttaggggaattctaatgttgtaccctttcgtggcagctttgactgttggcatagccatttgttatgtagtggtagcgactttcctgctatgcaggaatccctcccatgacgtgtatgttttacatgatgtgtgcctcttcacgcagtaaatagtttcttgttaatgtatgtttgaggagtttgaacgtcagtgtcacttacccacaaagttattcaagttgtaaaaggttatacaataatttaacaactaccttttttattctgtcgggttactgacctcactttatgtaaatacttcgcatgacaaattcagtaactcgtctatttcagcatgcataagacttttcactagggaaactgataaagcttgagtcaactaaatctgccttcatactttatcaaggggaaccaagcctgctgtgcttacatcagcatctggaagactttcctctcctctaatctgtgtacacatctccaagcaaggaagaaaaaacaaactctgctcagacgcctatgaaacacctgaatgaactttgatgaagtacagtctgagttaccatcatgcacaagtagaactgctcttggacttgttttcctgttgtttgtggaacctacgcgtttgaatggcttgaacgttgcatcttttaaagttattttttaaggtttcttggcatttatcctagttgtccgtgtttggcaatgtgctgttaaagtaatagacttttaatctttatgtattttttgttttctctggagtacttggacagatgttatagtggtttcttttaggaaaatctgtcattaaaaaagttatagccttgcaaataaccactcac

SEQ ID NO: 75170 - DNA, 2256 bp, Homo Sapiens
  misc_feature (1428)..(1465): n is a, c, g, or t
  misc_feature (2141)..(2141): n is a, c, g, or t
tctacatcctcatacaaaggggcaccagctagctcagccccacagcctaagcccctaaagcgtttcaagcgagctgcagggaagaagggtgctcgcacccgtcaggggcctggtgcagagtctgaagacctgtatgacttcgtttttattgtggctggcgagaaggaggatggcgaagagatggagattggggaagtggcttgtggagctctggatggatcagatcccagctgcctggggcttccagcactggaagcttcacaaagattccgcagcatctccaccttggagctattcacagttccactctccacagaggcagccctgacactatgccacctgctgagctcctgggtgtcactgggagagcctcacactctcctacaatggcctgggctctaacatctttccgcctgctagacagcctgcgggccctgtcaggccacggctggatgtcgcctccgtgccctgcatctcagtgacctgttctcaccactgcccatcctggagctgacacgtgctatcgtgcgagcactgcccctgctacgggtcctctctattcgtgttgaccacccaagccagcgggacaaccctggtgtgccagggaatgcagggccccctagccacataataggcgatgaggagataccagaaaactgcctggagcagttggagatgggatttccacggggagcccagccagccccactgctgtgctccgttctgaaggcctcgggttctctgcagcagctgtccctggatagtgccacctttgcctctccccaggattttgggcttgttttgcaaacactcaaagagtacaacctagccctgaaaagactgagcttccatgacatgaatctcgctgactgtcagagcgaggtgctctttttgctacagaatctgactctgcaagagattaccttctccttctgccgtctgtttgagaagcgcccagcccaatttctgcctgagatggttgctgctatgaagggcaactccacactgaagggcctccggctgccagggaaccgcctggggaatgctggcctgctggccttggcagatgttttctcagaggattcatcctcctctctctgtcagctggacatcagttccaactgcatcaagccagatgggcttctggagttcgccaagcggctggagcgctggggccgtggagcctttggtcacctgcgcctcttccaaaactggctggaccaggatgcagtcacagccagggaagccatccggcggctccgggctacctgccatgtggttagcgactcatgggactcatcccaggccttcgcagattatgttagcaccatgtgatggggcccgtacctcacagtctcatgctcggtaccatcagcttgcaggggctgaagcatgggctgcccagaaccccaaccaccagttctatcnnnnnnnnnnnnnnnnnnnnnnnnnnnnnnnnnnnnnntcccttgcactgaggtcctggaggccttgatgaggcccagcaaacaggcattctcacagctgggtttatagtctttgggccccttactcagtatcctgggaaccctgggccaggaggttacagtggtcatcataattgctgaagagatcccctcccctgcccctgggttcctgccttccctcctcaagcaggcacccaggctttagagaagtatagggggcttcttccctgctgggcttaccacactgctctcaggcctcaaaccctttcatacctttattcttttttttaaccaaaaaagtttttcttataaaataaattttgggcaaacatcatgcagcccttcttgatgattttctcccagagaacaaaattcaacagggccctgtggagcaaggagccccttttccctatctccttcctctaagagctacacccagaccagctggttatcagcggaggccccgctgctcctcatgagaacgctggtggaagacgaaggtgatggcagtggaggcagcatcccaggcagcctggagtacctcatcccggagcccccacttatcagtgcagtggttccaccctgccaggtctgaagtgcagtcagaaccatcagggggtggccggatctgacggctgttgacacaacgtcggcagtgcaacctgtcatgtgtgntcactgaggctagttcatcaaggataaacagcatcttcaactcgcccagagagaagtggcgctctacatcctgctcgctcatcaccacacagctgctcagtgccttcttgtggcc

SEQ ID NO: 75171 - DNA, 2031 bp, Homo Sapiens
agggggagagagtatgaagtcgacggcgcgccgaattcggcacgaggccagccgcaggcagaggttaggggtagctgatgtttgcacccgaggaggctttgctaagaaacatccccttagtcataccacacccaagtataattgatctaggagtttatctaaaatagtagctcctaagagacttggaaagtgtgctaatttcttcgaaatttctttagaataattcacattcttccccatatcgcttatggagccgtcctaactgctgaccttttcaagatggcggtccgcgggcgacactctcgggctcgcgcacctccccaagatggcggcgcccgaggcctggcgcgcccggagttgctggttctgtgaggtagcggcggcaacgaccatggaggccacgtcccgggaggcggcgccagcgaagagctcggcctcgggccccaacgctccccccgccctgttcgagctgtgcgggcgggcggtgagcgcccatatgggggttctggagagcggggtgtgggccctcccaggcccaatacttcaaagcatcctacctctgctcaatatatattacttggagaggattgaggaaactgccctcaagaaaggcctctcaactcaggccatctggcgccgactctgggatgaactgatgaagacaaggccttccagtttggaaagtgtgacatgttggcgagccaagtttatggaggcctttttttcccatgttctacgtgggaccattgatgtgtcttctgacaggcgtctttgtgatcagcggttctcacctcttctgcacagctcccgccatgtccgacagctcaccatctgtaacatgctgcagggtgcaaccgagctggtggctgagcccaaccgcagggttctggagaccctggccagctccctgcacactctcaagttccgccacctgctgttctctgatgtggctgctcagcagtcacttcggcagctgttgcatcagctcattcaccatggggctgtcagtcaagtgtcgctatactcctggcctgtgcctgagtcagcccttttcatccttattctcaccatgagtgctggcttctggcaaccagggcctggtggcccaccctgccgcctctgtggagaggcctcccgaggccgggccccatcccgagatgaagggtccctcttattgggctcacgtcggccccgccgggatgctgctgagcgatgtgctgcagccctgatggccagccggcgtaagagtgaagccaagcagatgcccagagctgcacctgccactcgggtaacacgccggagcacacaggagagcctgacagcaggcggaacagaccttaagagggagctgcaccccccagccacctcccatgaggctcctggcaccaagcggtcaccttctgctccagcagccacctcctctgcctcttcttctacatcctcatacaaacgggcaccagctagctcagccccacagcctaagcccctaaagcgtttcaagcgagctgcagggaagaagggtgctcgcacccgtcaggggcctggtgcagagtctgaagacctgtatgacttcgtttttattgtggctggcgagaaggaggatggcgaagagatggagattggggaagtggcttgtggagctttggatggatcagatcccagctgcctggggcttccagcactggaagcttcacaaagattccgcagcatctccaccttggagctattcacagttccactctccacagaggcagccctgacactatgccacctgctgagctcctgggtgtcactggagagcctcacactctcctaaaatggcctgggctctacatcctccgcctgctagacagcctgcgggcctgtcaggcaagctggatgtcgctccgggcctgctctagtgactgtctccactgccatccggactgaacggcttctgcagcatgcctgcacggtctttatcggtgacaccagcccggaacctggggcggaagctgccttacctttagcatagataatatctggtttgtg

SEQ ID NO: 75172 - DNA, 336 bp, Homo Sapiens
gcttgaggagggaaggcaggaacccaggggcaggggaggggatctcttcagcaattatgatgaccactgtaacctcctggcccagggttcccaggatactgagtaaggggcccaaagactataaacccagctgtgagaatgcctgtttgctgggcctcatcaaggcctccaggacctcagtgcaagggaaaaaggaaaaaagagaaaaaaggtgacagaaagagaaagatagaactggtggttggggttctgggcagcccatgcttcagcccctgcaagctgatggtaccgagcatgagactgtgaggtacgggccccatcacatggtgctaacat

SEQ ID NO: 75173 - DNA, 1486 bp, Homo Sapiens
tgcggccgccctcgtggctgagtacctcgccctgctcgaggaccaccgccacctgcccgtgggctgcgtttccttccagaacatctcatccaatgtgctagaggagtccgccatctccgacgacatcctgtcgcccgacgaggagggcttctgctccgggaagcacttcactgagctggggctggtagggttgctggaacaggcagccggctacttcaccatgggcgggctctacgaggcggtgaatgaggtctacaagaacctcatccccatcctggaagcccaccgtgactacaagaagctggccgcggtgcacggcaaactgcaggaggccttcaccaagatcatgcaccagagttccggctgggagcgcgtgttcgggacgtatttccgcgtgggcttctacggcgcccacttcggtgacctggatgagcaggagtttgtgtacaaggagccatcgatcacgaagctggcagagatctcacaccggctggaggagttctacacggagagatttggcgacgacgtcgttgagattatcaaagactctaaccctgtggacaagtccaagcttgactcacaaaaggcctacatccagatcacgtatgtggaaccgtactttgatacctacgagctcaaggaccgggtgacctactttgaccgcaactatgggcttcgcacattcctgttctgcacgccgttcacgccggatgggcgcgcacacggggagctgcccgagcaacacaagcgtaagacgctgctcagcaccgaccacgccttcccctacatcaagactcgcatccgtgtgtgccaccgggaggagacggtgctgacgccagtggaggtggccatcgaggacatgcagaagaagacacgggagctggcctttgccaccgagcaggacccaccagatgctaagatgctacagatggtgcttcagggctctgtagggcccaccgtgaaccagggtcccctggaggtggcccaggtgtttttagcagagatcccggaagaccccaagctcttccggcatcacaacaaattgcggctctgcttcaaggacttctgcaagaaatgtgaggatgcgctgcggaaaaataaggccctgattgggccggaccagaaggagtaccaccgtgagctggagcgcaactactgccgcctgcgggaggctctgcagcccctgcttacccagcgcctgccccagctgatggcacccaccccacccggcctcaggaactccttgaacagagcaagtttccgaaaggcagacctctgagcccacaaggaccaaagctgtacctagaggaaccagcacccgggcctcagctgtctgtgctgcgaggggagtctgccctggtgcccactgggctgtggggtgaccacactgtacttggggctgggccctctgcccctgtgtccccatctgtgtgcactgatgcttcctcccttttttaatttaaaatggtttttataagcaaaaaaa

SEQ ID NO: 75174 - DNA, 1283 bp, Homo Sapiens
  misc_feature (262)..(301): n is a, c, g, or t
tttttggaattcttaagctgtttcactacctgttgtatcatcatctcaaaaatggttctgccatgttgagttgactcccatagtcaaaaacaatgttttctttaacaattcaagtaaccaaaattgtacatgaataaatttataggtcatttttgcagaactggattaagaaaaaataaaatgtaatacattttctagtaaaacttctagtaaaggggtattggatgaattaattttgatttaataattgcctcacaatctnnnnnnnnnnnnnnnnnnnnnnnnnnnnnnnnnnnnnnnntgtaaggaaactggggtaaaagaacatgatgatgagagaaaagaagcgcatagaagccagtgattcttatctttcagaggaattatttcacaatactgatagtactgggaattgttaaaagtacattcctcatgtgaacctaaagtcagcaatggttctgccattttgatgttgtttataaaacagggtgtgaacctaacaaccacaacttcagtgttaacctactaaaatgctagaacttgattttctaagtccacatcccactgccagcaacaggatgaagcattagcactggcaccatgcagttaagagatgtgctttatattcgtgccaggagagagaaaattcatgtgtggaagataatccacaaccctgaaattttaccagtaattatttcagcacatataactgaaaataaaaaatggcagaaggactaaagaagaaaaaggaattctcttcttaggctatacttaaggctgtttatacaatgctaagataactgcaagacttctccaacttttagagcagtagtatttaagaatattgcacacaattctgtgtcaaagataaccctcagtttctaactttcagtcacagagacaataaagcaggagcccagtttcagacttcagtcaaaagaacattaaaaccatctcaatcactttaatcaagaaatggattaagtacaaaagtatttcataacttgaggaatcaactctaagaactcagctgtgtgtttttatatgtaaagaatgaatatataaatctttattctttcctaaatttattaattttatgacaattttatggttgctaaaagcaggcataaaaatttagagaggaaatctgtggagttgttactattatggaaggacttgttttcactgaaaacaatttgaaatatcttctgtactcagcgtgtgtaagaagattctaggcaacatcactgacaaatgtcaggaagaaatggtatgccctattt

SEQ ID NO: 75175 - DNA, 941 bp, Homo Sapiens
  misc_feature (736)..(737): n is a, c, g, or t
  misc_feature (741)..(741): n is a, c, g, or t
  misc_feature (744)..(744): n is a, c, g, or t
  misc_feature (748)..(750): n is a, c, g, or t
  misc_feature (752)..(752): n is a, c, g, or t
gacagggaagatcaagtcttggacacgtaaagcccaactttgaaggtccccctgttttgaatccctctggaatccaaacacggttaaatatagcaggtgaaggaggcgggggcctgtgcccacggctgctccctctcccaaacattggtttttgaatctgtgagacccagaaggggcccactgagcccactcactccagcctttggcaaccattgttccaggtcccccagggcttcctcccacagcagctgtgaatggcacagtgaccttcctgcagcgtggagatggcacatccttgctgctggggacttggccctgctatttatttttgtatttatgtcttaatctcttccactgatgcatcctccaagggtagatggggagggtctgtgtgaaggggccggcttctcttggtgcctgctgggttgcaggggcaggaagcgtgtggactgcagcttctgctggtgctccccccgtcctcctggaggcagtataggagagagagcaaggattgagtctgagacttaagcactcggtcccagcttgccagttcctggttctgtgtccttggacaaactacctaacctttctgagcctcctatacctcatccgacacaaatggggatgatacctacctccagggttggcgtgaggattcatgggctattatagatgaaaactgcacaaggccagaaccagcaggcactcaataaacgttcatgtccttttttctctnngacncanaaannnanacacccacacaccttttccttgtcgggccgccctcggcccctcgaaaaagcttttcctagaccaattcggtttggggggcgcggggccccagtaaaggtaaaggggaacacaggggcaattagcctggtttccctaagggagaatcctggggcccattgaacaaagtgggttggagaatttcccccccc

SEQ ID NO: 75176 - DNA, 816 bp, Homo Sapiens
tagcggagatgaaatatcctgctcttgcagtgatgcatctcggccaagagtacagtggagaaatcacagatgccctgaaaaaggtatttggtgaacataaagcgaatgatcgaatggtgagtggagcatatcgccaggaatttggagaaagtaaagagataacatctgctatcaagagggttcataaattcatggaacgtgaaggtcgcagacctcgtcttcttgtagcaaaaatgggacaagatggccatgacagaggagcaaaagttattgctacaggatttgctgatcttggttttgatgtggacataggccctcttttccagactcctcgtgaagtggcccagcaggctgtggatgcggatgtgcatgctgtgggcataagcaccctcgctgctggtcataaaaccctagttcctgaactcatcaaagaacttaactcccttggacggccagatattcttgtcatgtgtggaggggtgataccacctcaggattatgaatttctgtttgaagttggtgtttccaatgtatttggtcctgggactcgaattccaaaggctgccgttcaggtgcttgatgatattgagaagtgtttggaaaagaagcagcaatctgtataatatcctctttttgttttagcttttgtctaaaatattattttagttatgatcaaagaagagagtaaagctatgtcttcaatttaatttcaatacctgatttgtactttccttgaaagctttactttaaaataccttacttataggcctggtgtcatgctataagtatgtacatacagtttcacttcaaaaataa

SEQ ID NO: 75177 - DNA, 1370 bp, Homo Sapiens
  misc_feature (476)..(487): n is a, c, g, or t
ggacttcaagaatgcatttaattataaactaaatactatgtcttttagaaaatttcaactccttctaacagttctaatctctcttcttttcaatactttcttcttataggtcatcaggcattgaaaacatattgatacctatctgccatgtttctgttggcaaatataaaatattaatatagtgtgattttttaatttttcaaaagctgtgatattggctagttacaatgacatactactaaatataatagtctagcacataaaaaagcattctaccattagtgtgtttgtatatgtgtatgcacatacatacataattgagttatctaaaatgtggttcaggctactatcactactaaagaaatccacaaaacaaccaacctaaaaaatcagtaccactgtcagctaacataataatgtaatttagatatgaatcatcagcatgaaaaaaagtaataccttaacagtacatttcnnnnnnnnnnnnaaagacaaccattattgcagtatttcaaatctgaaatgggttactttcaaaaagtgttacaattgcctactaagataatttcttccatgctttattataaagtgcagaaacaacatgacttctgtatttaaaaaaccaaaaactacggttcatttttctagatactgcacacattccgcagcaaattttaaacttggatcttctgttgacttcagatgtggttggtatcactgctcagatacagagttatgatgatcagtagaaaagtctctatttcacagcatgggtttctttagaaacaggctcctgtgcaaaggcagtacttttaccatgaacatctctagactgtgattattaaatatagtgataatatacatgggtttactgggatattgaaaaataaaagataatgaacccaatttagtaaatcaacataaatacaaaacagagcgaattagccctctacaactgagctcgtcctgcgtcttgagcttgggttctttctggaactgtctcaaaccttagtgggggaagtgaccttatccacagattgcttttcccagaggttccgcttgctggatacgtctcctggtctcaagtcagaaggtttgggagcaggtgacttgtttccatctggggttttagttagccattcattgatgcggctagaaacccctaccttcaagccagcagtttccttatttggtgtgcctgctgcagtgggggatgaaaacacattccctttctcccacatactcttgatgttgcgtacaccttcagcaggaacaggaagaaccgaggctgccggctttgtaggttttgcgctttttgttccctcaattgcactggtatactgctccagtctgctgtcaatcttggagac

SEQ ID NO: 75178 - DNA, 653 bp, Homo Sapiens
gttagtgcaggccaagttcctgatgggagcacgctgagaacatttggcagcgtgtgcctctatgacatgattcagcccagagtaacactgatggctcagcacggatccgatcagcaccagcttcttgtctgtaccaagttggtggagcccttccacgcccaggtgggctccctgtacatcgtcctcggggagctccagcatcagcaggacagaggctccgtggtgaaggcgcgcgtgctgacctgtgtggaggggatgaacctgcccttgttggaacaagccatccgggagcagagactgtacaagcaggagcggggcggcagccagtaggaaacagcagcctagcaacaccctcacctgcttcagagcccgaaccctctggagctgcaggagcccgggagagcacagacgcctccccagcgacggccttgtctggagctcgaaagccgaggggcgggtgatgaatccagccccttcccctactttgggattggctcagcaatgagaacccagaaagcatgccataaatccgacagccccaccccaggagactgcaggtggccgagcttgggcgccggggccgtgcttggtgtggggccatggagggttccagaaggtcctggtgaataaaggcccagggggcgtgctcttga

SEQ ID NO: 75179 - DNA, 984 bp, Homo Sapiens
ggaccggtccggaattcctgggatatcgtcgaccacgcgtccggtgacagcggcccagacagagggggcgatgtccgcgtcgtggctggggccggtcgcggggcagactaatcccctgctcctggccaggggaggctcccgagcggatcctcgggaaaggggctccgaaggtcaagaaactgccctgctgggcgtccggggagtgggaaaataaagcactttttgtatcccgcccctcccccgtcacgtgaccacgcgaggcggaaagaagaaatccgaggaccggcgacgcctagaacaggagcccatgatgctgcccaaacctgggacctattacctcccctgggaggttagtgcaggccaagttcctgatgggagcacgctgagaacatttggcaggttgtgcctctatgacatgattcagtccagagtaacactgatggctcagcacggatccgatcagcaccaggttcttgtctgtaccaagttggtggagcccttccacgcccaggtgggctccctgtacatcgtcctcggggagctccagcatcagcaggacagaggctccgtggtgaaggcgcgcgtgctgacctgtgtggaggggatgaacctgcccttgttggaacaagccatccgggagcagagactgtacaagcaggagcggggcggcagccagtaggaaacagcagcctagcaacaccctcacctgcttcagagcccgaaccctctggagctgcaggagcccgggagagcacagacgcctccccagcgacggcttgtctggagctcgaaagccgaggggcgggtgatgaatccagcccttcccctactttgggatgggtcagcaatgagaaccagaagcgatgcaaaaattcgaagcccacccaggagatgcaggtggcgagctggggcgggcggctgggggggcaggggctcccaacgccgggaaaaaggcggggggctggaaaacaagaaacacaaacc

SEQ ID NO: 75180 - DNA, 728 bp, Homo Sapiens
ccttagaataacactatatgcaatgtaactcacaatgttccaggaccaaagacttgatggaggggctagaggcgacccttgttgtaaaaggcgatcagaacacctgagggaggaaggggcttgcagttttcccagcccttctcgctgccaaggcagcagtggtgctgtggatgggctggggactgcgggacagagcctgctactacttgggagttggtgctgccctgtggcatggaggggtgggaggggctgagatggctgctggcccggcctccaagagttctggacaggaggcagacactgcccagatgctcggtggagggacagtgatggcctttgactcatgaggcctagagaaaagtatcaaaggtctcaccatgtaagagtgatttccgatttctctcctttcagttgtgtgaaaaaacagctggcctgggttccattagcaaattaaatcatcttcaatcttaaattagagaccagaatgatcttcaggataaaaagaacttctgaatctctgcaataggaaatgtttcgatcatgcaagtgctttcccagccaaatgtctgtgctctctgtgtcactgagggccacaggttcctctaacatctgtcactgtcacttcaccaggcaggccttggagttccatgacaaaatcacttttgtcagacaaagaatgtatcctttacttttctcaaatggaataaaattatttcttctgtggagga

SEQ ID NO: 75181 - DNA, 723 bp, Homo Sapiens
  misc_feature (21)..(21): n is a, c, g, or t
gggtcatcatctatgtaagcntaagcggcacattcccatttaatgaagatgaagacatacacgaccaaattcagaatgcagctttcatgtatccaccaaatccctggaaggaaatatctcatgaagccattgatcttatcaacaatttgctgcaagtaaaaatgagaaagcgctacagtgtggataagaccttgagccacccttggctacaggactatcagacctggttagatttgcgagagctggaatgcaaaatcggggagcgctacatcacccatgaaagtgatgacctgaggtgggagaagtatgcaggcgagcaggggctgcagtaccccacacacctgatcaatccaagtgctagccacagtgacactcctgagactgaagaaacagaaatgaaagccctcggtgagcgtgtcagcatcctctgagttccatctcctataatctgtcaaaacactgtggaactaataaatacatacggtcaggtttaacatttgccttgcagaactgccattattttctgtcagatgagaacaaagctgttaaactgttagcactgttgatgtatctgagttgccaagacaaatcaacagaagcatttgtattttgtgtgaccaactgtgttgtattaacaaaagttccctgaaacacgaaacttgttattgtgaatgattcatgttatatttaatgcattaaacctgtctccactgtgaaaaaaaa

SEQ ID NO: 75182 - DNA, 495 bp, Homo Sapiens
  misc_feature (18)..(18): n is a, c, g, or t
gaggtcctaaggaacaangggtacaatcgctctctagatatgtggtctgttggggttatcatctatgtaagcttaagcggcacattcccatttaatgaagatgaagacatacacgaccaaattcagaatgcagctttcatgtatccaccaaatccctggaaggaaatatctcatgaagatgttgacttgatacaatataatacctatatcttggggtgcttgagtagtcattgcactgcttgatcctcacagcaatcctctggtctcagttttcttttctgatatggtgatgctaattcctaccttactgggttattatatacaatatcaggacatgtaacttgttcatgttacagattgccatgaaaatagtgagaataagaaaagaagcacaagtatcttttttcaggaataaagaagaaacaactataaacaccagggaaatacaaaaagttgtataacaaagtcgtgtataataaagatgcaactaacaaa

SEQ ID NO: 75183 - DNA, 1330 bp, Homo Sapiens
tggtaccggtccggatttcccgggatatcgtcgacccacgcgtccggtaggacggagggtagtgcgtctagagacacatattccccacggatttgacgatggtgttcggtcttgaatggaaatgtagtcttaggccagtcttaggtttttgaacaggatagtaggtatccggagtcgattgagggccagagcaggcactggggttcggatcctgggcaaagtttcccacgttgagggtctcgaggacgcctagatctctttcccagggccatggcgaacccgaagctgctgggaatggggctaagcgaggcggaggcgatcggtgctgattcggcgcgatttgaggagctgctgctgcaggcctcgaaggagctccagcaagcccagacaaccagaccagaatcgacacaaatccagcctcagcctggtttctgcataaagaccaactcctcggaagggaaggttttcatcaacatctgccactccccctctatccctcctcccgccgacgtgaccgaggaggagctgcttcagatgctagaggaggaccaagctgggtttcgcatccccatgagtctgggagagcctcatgcagaactggatgcaaaaggccaggcatgtaccgctacgacgtagctgtcaacagcgacttctaccgggaggattgcagaacaggcgatttctttgcggggagctcgtgatcaccatcgccagggagggccttgaagacaaatacaacttgcagctgaatccggaatggcgcatgatgaagaaccggccattcatgggctccatctcgcagcagaacatccgctcggagcagcgtcctcggatccaggagctgggggacctgtacacgcccgcccccgggagagctgagtcaggccctgaaaagcctcacctgaacctgtggctggaagcccccgacctcctcttggccgaaattgacctccccaaactgacccttcaaatatagtttcccagcgtgtgaggctaccatgcctggtccaggtgatcatcctgttgctggggagggtgacctgattccgccacctctccaggatggagccctggggctgtcgctggagatcggggagaaccgcctggtgatggggggcccccagcagctgtatcatctagacgcttatatcccgctgcagatcaactctcatgagagcaaggcagccttccaccggaagagaaagcaattaatggtggccatgccgcttctgccggtgccttcttgatcagggtgtctccttgtgcttctgagatgtggagaagaggctgctggctaccctaaaagttgaaataaaagatttttgccttt

SEQ ID NO: 75184 - DNA, 1167 bp, Homo Sapiens
  misc_feature (1000)..(1000): n is a, c, g, or t
gacggcagtaactactaacggtcttaaggtagcgaggcctgggtggcgaattcggcacgaggggagggtagtgcgtctagagacacatattcccaacggatttgacgatggtgttcggtcttgaatggaaatgtagtcttaggccagtcttaggtttttgaacaggatagtaggtatccggagtcgattgagggccagagcaggcactggggttcggatcctgggcaaagtttcccacgttgagggtctcgaggacgcctagatctctttcccagggccatggcgaacccgaagctgctgggactggagctaagcgaggcggaggcgatcggtgctgattcggcgcgatttgaggagctgctgctgcaggcctcgaaggagctccagcaagcccagacaaccagaccagaatcgacacaaatccagcctcagcctggtttctgcataaagaccaactcctcggaagggaaggttttcatcaacatctgccactccccctctatccctcctcccgccgacgtgaccgaggaggagctgcttcagatgctagaggaggaccaagctgggtttcgcatccccatgagtctgggagagcctcatgcagaactggatgcaaaaggccagggatgtaccgcctacgacgtagctgtcaacagcgacttctaccggaggatgcagaacagcgatttcttgcgggagctcgtgatcaccatcgccagggagggccttgaggacaaatacaacttgcagctgaatccggaatggcgcatgatgaagaaccggccattcatgggctccatctcgcagcagaacatccgctcggagcagcgtcctcggatccaggagctgggggacctgtacacgcccgcccccggggagagctgagtcagggccctgaaaagcctcacctgaacctgtgggctgggaacccccggacctcctccttggccggaagttgaccccccccaaactggatggagccctggggctgtcccctggnaaatcgggggagaaccgcctggtggattggggggccccccaacagcctggatcatcttaaacgccttaaatccccgctggcgaatcaacctcctcttgaaagccaagggcggccttttcccccggaagaagaaaagccattattggggggccaaggcccgcttctgg

SEQ ID NO: 75185 - DNA, 1592 bp, Homo Sapiens
  misc_feature (1355)..(1378): n is a, c, g, or t
aattaggctaggtacgaggcctggtgttgaactccggcacgaggcgatagaccggaagtgtggcttcgtttacagttcggcacgtaggacggagggtagtgcgtctagagacacatattcccaacggatttgacgatggtgttcggtcttgaatggaaatgtagtcttaggccagtcttaggtttttgaacaggatagtaggtatccggagtcgattgagggccagagcaggcactggggttcggatcctgggcaaagtttcccacgttgagggtctcgaggacgcctagatctctttcccagggccatggcgaacccgaagctgctgggactggagctaagcgaggcggaggcgatcggtgctgattcggcgcgatttgaggagctgctgctgcagctctcatgcataagaattgctccatttgaggaacaaatgaggggtctgatggcacagactccgagcctggaggtagttttcctttatacaggcctcgaaggagctccagcaagcccagacaaccagaccagaatcgacacaaatccagcctcagcctggtttctgcataaagaccaactcctcggaagggaaggttttcatcaacatctgccactccccctctatccctcctcccgccgacgtgaccgaggaggagctgcttcagatgctagaggaggaccaagctgggtttcgcatccccatgagtctgggagagcctcatgcagaactggatgcaaaaggccagggatgtaccgcctacgacgtagctgtcaacagcgacttctaccggaggatgcagaacagcgatttcttgcgggagctcgtgatcaccatcgccagggagggccttgaggacaaatacaacttgcagctgaatccggaatggcgcatgatgaagaaccggccattcatgggctccatctcgcagcagaacatccgctcggagcagcgtcctcggatccaggagctgggggacctgtacacgcccgcccccgggagagctgagtcaggccctgaaaagcctcacctgaacctgtggctggaagcccccgacctcctcttggccgaaattgacctccccaaactggatggagccctggggctgtcgctggagatcggggagaaccgcctggtgatggggggcccccagcagctgtatcatctagacgcttatatcccgctgcagatcaactctcatgagagcaaggcagccttccaccggaagagaaagcaattaatggtggccatgccgcttctgccggtgccttcttgatcagggtgtctccttgtgcttctgagatgtggagaagaggctgctggctaccctaaaagttgaaataaaagatttttgcctttnnnnnnnnnnnnnnnnnnnnnnnnacctcgaggacactcatagtgatcggggtgtgccggacacaccagcgacggacactggcaaagggccccagtggccaataccctgttccccgtgcacccccagcatttcgcttggcccccacaggcgggctagactcggcccgggatcccccataatgggaagctcaataaccttcgcatagcaccaggttaccctgcatttagacttgcgcaa

SEQ ID NO: 75186 - DNA, 1007 bp, Homo Sapiens
aaacttacggctaggtacgaggctgggtgttgaattcggcacgagggtaggacggagggtagtgcgtctagagacacatattcccaacggatttgacgatggtgttcggtcttgaatggaaatgtagtcttaggccagtcttaggtttttgaacaggatagtaggtatccggagtcgattgagggccagagcaggcactggggttcggatcctgggcaaagtttcccacgttgagggtctcgaggacgcctagatctctttcccagggccatggcgaacccgaagctgctgggactggagctaagcgaggcggaggcgatcggtgctgattcggcgcgatttgaggagctgctgctgcaggcctcgaaggagctccagcaagcccagacaaccagaccagaatcgacacaaatccagcctcagcctggtttctgcataaagaccaactcctcggaagggaaggttttcatcaacatctgccactccccctctatccctcctcccgccgacgtgaccgaggaggagctgcttcagatgctagaggaggaccaagctgggtttcgcatccccatgagtctgggagagcctcatgcagaactggatgcaaaaggccagggatgtaccgcctacgacgtagctgtcaacagcgacttctaccggaggatgcagaacagcgatttcttgcgggagctcgtgatcaccatcgccagggagggccttgaggaccaaatacaacttgcagctgaatccggaatggcgcatgattgaaagaaccggcattcatgggctccatctcgcagcagaacattcgtcggagcagcgtctcggatcaggagctggggactgttcacgccgcccgggagagtggattaggctgaaagctaacgaactgtggtggagccgactccttgggaatggctccatgtgacctgggttcttgaatggaacccgtgttggcccggtttaaaattcggggaacctaagagccaaaaaatggccgtaaagtg

SEQ ID NO: 75187 - DNA, 528 bp, Homo Sapiens
  misc_feature (367)..(384): n is a, c, g, or t
gtcccaagatttccttccagcaccttaatgaatgttcatatgatagaatgttttaagtatcagcaaagcattcatggatgcctgcttttcattctcagaaggctaaacctgttttgggtatgatgctacttcagaacatattgtctggcacaagatttcttctaataagtggtttatttaaactcaatttcggtggactgttgaattgaaaaacaccaaaggagtcttcttgtctggagactggattgttccagttttaaatacctgtgcccataagtatcccatttcatgaatgtgtgttggcatggggaaaaaatttccctgctctttgagtggagcgaaagcaattggttaagctgtagcagcnnnnnnnnnnnnnnnnnnaaagtaataataaaacttgaactgaaaaaagataaaacttgaactagaatactactcttgtatgcttagaatgtttatagtgttaaatgtttatgtggggttgtcaacatttttattatttatagctgaattatgttttgttaa

SEQ ID NO: 75188 - DNA, 1612 bp, Homo Sapiens
  misc_feature (50)..(50): n is a, c, g, or t
  misc_feature (732)..(741): n is a, c, g, or t
  misc_feature (1561)..(1561): n is a, c, g, or t
caggagtggtacttaaaccagacagcagggttcagaggtggcacacgtgnacaaagctgaggccctgcacctcaacagctgactgccaggtgcctgtgggtgaactgaggggagtagagggagagggcaggtggaactggggcagaatctagtcatgccctaaagctagtcctgtaaacaatggtgccccagaaagctgcaggtggtgtttggagaagcagttacttttcagttacaagacccatctccctagtctcagccttacaacaccacgggactaaggaagagcacttccttgcctccgtaaggccagaggaagaaccatcccaatcatttgatctccagctccacagtagagagaaacctacaaaatgtcaaaccagcttcccgactcccaggagctcaagccaagcccagaggcagtggctggggtccctgcaggtcatgaggggcctatgcctttactccttttaaacaccagcacccgtcttttccccaacctaaaaccaaccaccagcatttcactacaggaccaaatggaaaccgagggaaccctgggtcttgggaagaacaacaggaaaccaaggtctgacctagggttccctcccagtcttcacatcactctggcctcatcaccaaggtgacagaggacacaggggagggggaaaacccacacacactccttggaatgggtcctgttatttatgcttgctgcacagacatattagaagnnnnnnnnnngctttgtattattcttccacatatgctggctgctgtttacacaccctgccaatgccttagcactggagagctttttgcaatatgctggggaaaggggagggagggaatgaaagtgccaaagaaaacatgtttttaagaactcgggttttatacaatagaatgttttctagcagatgcctcttgttttaatatattaaaattttgcaaagccctttgagctactgccttagtctacccactgtccttttgttatgaggtagaggatctcatgacaccatacacacaaacccatcattgcctgtgaatgcacgtagggccagaattccccagttcccgctcctctgagggttgatactgctgggaatgccaaccactccacaagcagagggaagccccctcaggcctgcaggaggagccgcagcagtgtgtccaattcaaaccagcagcaaagagcctgacattttcccatccatctatgaggaaagccatctcacagaacatggacataggcaacttgctctcccacaccaagggatgggaatctctcctacctatagtcatccctgcactcctgactttactccaggacccagggtccaactaatggcagagcccctcttggttccttcaaacaagaaaagcaatacctacggactggtgtacacttccatccttggttataacaggaatgttatcaagctgtcagaacaggatgaagtgctcccagtggatatccatcagggagggttagggacactcgtggcagcctgtctagcagcctgggctctctgaaagtccctacttcctgaggggtacgcanatactgttctatttcactatcagaaatgttctcatctccagtgacagtgga

SEQ ID NO: 75189 - DNA, 1053 bp, Homo Sapiens
agattcatcaagggaaaacatgtatcctgtaagttgctgctgccctgtgaaaaggagtccataggctgctgttatattcagagtcaagaaagtgtggttcaggacaacctgagagtggaaagtggggacgggagctgcctccgaagacgcccggcagcccatcaccaggaggaccatggcccaagggcatggaagcatgtggctgctgagagggtcgtgggccatctccaccaccaccctcgcgtcagggcatgggcccaggctggcgttaagggcactttgcctgcttagtcaaaaggtggcatcgaatcacctgggctgtcacatgttttgtttagtttcatggatagtatgggaccaaacttgcaaattaatcattgcaatctaaggggaaaatagaagaaattaaggtgggggtggggggacggggagcccatggggataaaagtaattaaaatccattgaatttagctatttcacttggggcaacatttaatctccaagattaaatcttggtttatggggaaggttatatattttcatctcatttttatgtatcatctttaagacaaattgttaagtacaaatgaaaatcaggtaacatacaaaggcatttcatcaaatagttaaatttcctatgaaagttagtaaaatacatatttttataataccatgttcaagtgaagtgtttttgctttctgccaagagtcattaaatgatatagcaagtatttgggtctctcttggtgttatcaggattaattgcccaaggctgcgattttgtgagcatagaagaggaaagcaagcatctctcacaagcagtgacatgaatctgtaataatgagtgaggctgttagcaaattttgtgtgatggcagataactcagttttggagaaaattagaatcacagctaccaagaagcacatatcgtttcaactttcccacccaagtattagtgaagtgatttaggaccttgatttatatttcttagagaagctggctcgaggcctttgtttcattactgtttgatgaggcatgatcccttactttaaaa

SEQ ID NO: 75190 - DNA, 1276 bp, Homo Sapiens
tgatctagagcgatccgtgatcatcccccttcgtatgctactatcaagagggctgggcattctctgctggtaattcctgaagaggcatgactgcttttctcagccccaagcctctagcctgggtgtgtacggaggatctaacctgggtgagtacggagggtctagcctgggtgagtatggagggtctagcctgggtgtgtatggagggtctagcctgggtgagtatggagggtctagcctgggtgtgtatggagggtctagcctgggtgagtatggagggtctagcctgggtgtgtacggagggtctagtctgagtgcgtgtggggacctcagaacactgtgaccttagcccagcaagccaggcccttcatgaaggccaagaaggctgccaccattccctgccagcccaagaactccagcttccccactgcctctgtgtgcccctttgcgtcctgtgaaggccattgagaaatgcccagtgtgccccctgggaaagggcacggcctgtgctcctgacacgggctgtgcttggccacagaaccacccagcgtctcccctgctgctgtccacgtcagttcatgaggcaacgtcgcgtggtctcagacgtggagcagccagcggcagctcagagcagggcactgtgtccggcggagccaagtccactctgggggagctctggcggggaccacgggccactgctcacccactggccccgaggggggtgtagacgccaagactcacgcatgtgtgacatccggagtcctggagccgggtgtcccagtggcaccactaggtgcctgctgcctccacagtggggttcacacccagggctccttggtcccccacaacctgccccggccaggcctgcagacccagactccagccagacctgcctcacccaccaatgcagccggggctggcgacaccagccaggtgctggtcttgggccagttctcccacgacggctcaccctcccctccatctgcgttgatgctcagaatcgcctacctgtgcctgcgtgtaaaccacagcctcagaccagctatggggagaggacaacacggaggatatccagcttccccggtctggggtgaggagtgtggggagcttgggcatcctcctccagcctcctccagcccccaggcagtgccttacctgtggtgcccagaaaagtgcccctaggttggtgggtctacaggagcctcagccaggcagcccaccccaccctggggccctgcctcaccaaggaaataaagactcaaagaagacaaaaaaa

SEQ ID NO: 75191 - DNA, 3315 bp, Homo Sapiens
  misc_feature (2176)..(2176): n is a, c, g, or t
  misc_feature (2180)..(2220): n is a, c, g, or t
  misc_feature (2223)..(2230): n is a, c, g, or t
  misc_feature (2232)..(2242): n is a, c, g, or t
  misc_feature (2244)..(2284): n is a, c, g, or t
  misc_feature (2286)..(2324): n is a, c, g, or t
  misc_feature (2326)..(2346): n is a, c, g, or t
  misc_feature (2348)..(2348): n is a, c, g, or t
  misc_feature (2350)..(2357): n is a, c, g, or t
  misc_feature (2359)..(3018): n is a, c, g, or t
  misc_feature (3089)..(3089): n is a, c, g, or t
  misc_feature (3219)..(3275): n is a, c, g, or t
ggtcctaggtagcgaggcctgggtggcgaattcggcacgagggcagcccgggctcagtctccgccgccgccgtgaacatggagcccccggacgcaccggcccaggcgcgcggggccccgcggctgctgttgctcgcagtcctgctggcggcgcacccagatgcccaggcggaggtgcgcttgtctgtacccccgctggtggaggtgatgcgaggaaagtctgtcattctggactgcacccctacgggaacccacgaccattatatgctggaatggttccttaccgaccgctcgggagctcgcccccgcctagcctcggctgagatgcagggctctgagctccaggtcacaatgcacgacacccggggccgcagtcccccataccagctggactcccaggggcgcctggtgctggctgaggcccaggtgggcgacgagcgagactacgtgtgcgtggtgagggcaggggcggcaggcactgctgaggccactgcgcggctcaacgtgtttgcaaagccagaggccactgaggtctcccccaacaaagggacactgtctgtgatggaggactctgcccaggagatcgccacctgcaacagccggaacgggaacccggcccccaagatcacgtggtatcgcaacgggcagcgcctggaggtgcccgtagagatgaacccagagggctacatgaccagccgcacggtccgggaggcctcgggcctgctctccctcaccagcaccctctacctgcggctccgcaaggatgaccgagacgccagcttccactgtgccgcccactacagcctgcccgagggccgccacgggccgcctggacagccccaccttccacctcaccctgcactatcccacggagcacgtgcagtttctgggtgggcagcccgtccaccccaacaagctgggtaccccagggttgacactggtccagctgctctgccggggggacggcagccccagcccggagtatacgcttttccgccttcaggatgagcaggaggaagtgctgaatgtgaatctcgaggggaacttgaccctggagggagtgacccggggccagagcgggacctatggctgcagagtggaggattacgacgcggcagatgacgtgcagctctccaagacgctggagctgcgcgtggcctatctggaccccctggagctcagcgaggggaaggtgctttccttacctctaaacagcagtgcagtcgtgaactgctccgtgcacggcctgcccacccctgccctacgctggaccaagggactccactcccctgggcgatggccccatgctgtcgctcagttctatcaccttcgattccaatggcacctacgtatgtgaggcctccctgcccacagtcccggtcctcagccgcacccagaacttcacgctgctggtccaaggctcgccagagctaaagacagcggaaatagagcccaaggcagatggcagctggagggaaggagacgaagtcacactcatctgctctgcccgcggccatccagaccccaaactcagctggagccaattggggggcagccccgcagagccaatccccggacggcagggttgggtgagcagctctctgaccctgaaagtgaccagcgccctgagccgcgatggcatctcctgtgaagcctccaacccccacgggaacaagcgccatgtcttccacttcggcaccgtgagcccccagacctcccaggctggagtggccgtcatggccgtggccgtcagcgtgggcctcctgctcctcgtcgttgctgtcttctactgcgtgagacgcaaagggggcccctgctgccgccagcggcgggagaagggggctccgccgccaggggagccagggctgagccactcggggtcggagcaaccagagcagaccggccttctcatgggaggtgcctccggaggagccaggggtggcagcgggggcttcggagacgagtgctgagccaagaacctcctagaggctgtccctggacctggagctgcaggcatcagagaaccagccctgctcacgccatgcccgcccccgccttccctcttccctcttccctctccctgcccagccctcccttccttcctctgccggcaaggcagggacccacagtggctgcctgcctccgggagggaaggagagggagggtgggtggggtgnggannnnnnnnnnnnnnnnnnnnnnnnnnnnnnnnnnnnnnnnntcnnnnnnnncnnnnnnnnnnncnnnnnnnnnnnnnnnnnnnnnnnnnnnnnnnnnnnnnnnnncnnnnnnnnnnnnnnnnnnnnnnnnnnnnnnnnnnnnnnnannnnnnnnnnnnnnnnnnnnncncnnnnnnnncnnnnnnnnnnnnnnnnnnnnnnnnnnnnnnnnnnnnnnnnnnnnnnnnnnnnnnnnnnnnnnnnnnnnnnnnnnnnnnnnnnnnnnnnnnnnnnnnnnnnnnnnnnnnnnnnnnnnnnnnnnnnnnnnnnnnnnnnnnnnnnnnnnnnnnnnnnnnnnnnnnnnnnnnnnnnnnnnnnnnnnnnnnnnnnnnnnnnnnnnnnnnnnnnnnnnnnnnnnnnnnnnnnnnnnnnnnnnnnnnnnnnnnnnnnnnnnnnnnnnnnnnnnnnnnnnnnnnnnnnnnnnnnnnnnnnnnnnnnnnnnnnnnnnnnnnnnnnnnnnnnnnnnnnnnnnnnnnnnnnnnnnnnnnnnnnnnnnnnnnnnnnnnnnnnnnnnnnnnnnnnnnnnnnnnnnnnnnnnnnnnnnnnnnnnnnnnnnnnnnnnnnnnnnnnnnnnnnnnnnnnnnnnnnnnnnnnnnnnnnnnnnnnnnnnnnnnnnnnnnnnnnnnnnnnnnnnnnnnnnnnnnnnnnnnnnnnnnnnnnnnnnnnnnnnnnnnnnnnnnnnnnnnnnnnnnnnnnnnnnnnnnnnnnnnnnnnnnnnnnnnnnnnnnnnnnnnnnnnnnnnnnnnnnnnnnnnnnnnnnnnnnnnnnnnnnnnnnnnnnnnnnnnnnnnnnnnnnnnnnattccatttatatcgctttcccgctccatccaccttgtgctaccgtttgttcttccgtttatccccgtaantccctataatagtttcccctctctgttctaccctgctttcctccgcccacctgttatacaccgtctttccgcaaattgtaatgttgctgctgagtcttcacccgctcaccttaacgcgggctctttatannnnnnnnnnnnnnnnnnnnnnnnnnnnnnnnnnnnnnnnnnnnnnnnnnnnnnnnncctctcattccccggttccactttattattgatctcccgc

SEQ ID NO: 75192 - DNA, 403 bp, Homo Sapiens
cgatctagaggatcccgtaggtggttgtgggtagcacagctggaagctgacgtctcgtgtcatccttgcggaagccgcaggtagagggtgctggtgagggagagcaggcccgaggcctcccggaccgtgcggctggtcatgtagccctctgggttcatctctacgggcacctccaggcgctgcccgttgcgataccacgtgatcttgggggccgggttcccgttccgggctgttgcagtgtggcgatctcctgggcagagtcctccatcacagacagtgtccctttgttgggggagacctcagtggcctctggttttgcaaacacgttgagccgcgcagtggcctcagcagtgcctgcggcccttacccaaaaacacctgcgggttaccgagctcggaattcg

SEQ ID NO: 75193 - DNA, 514 bp, Homo Sapiens
agcatggggtgctctacgtctattggggcatgtttgaggccggcgaccgccaggtcaccctcagcgacctgcactgcctggacctgcacaggatggaggcgtggaaggccttggtggagatggacccagaaactcaggagtggctggaggagacggactcggaagaggacagtgaggaggttgagggcgccgagggtggggtcgacgacgaagacagcggagaggagagcggtgcggaggactgagagcccctgccaggggcgcctggcaagtgctgtgcccacgtccgcccaggacccagccgtgttgagtgaagctcttggggccagcgtgcgtcctgacgcacaggagagagctgaaggtgggtggcccaggccagggtgtgaactttctcccatggtttagtctctgacgcggcactgggccggaagttcaactgagtgcagtgcaggtggattccctcagcagcctgtgtgttgtgtgaaataaattggacttgaaacaagaaaaaaaa

SEQ ID NO: 75194 - DNA, 981 bp, Homo Sapiens
ggaacgaggacggctgtcacctgccgcgtcccacgtgccagcagcactgacagggagcgagacagaggtggcggcagcagtcagcgggcactttactcctgaggctggctgcaacatctgtgcaaggaagcctacagttttcaattcaggacttggcagaaaaaaagagaggaactagtttgtaaaaagtaataaatgacccaagggtctcaaaatgtatgagattgtgtgcctaaaattaaaatagcttccagaatatatctgactcccttttttgtcatcttcaataaatgaatgcatctttcatggaatgttacacagctgactttaggttttaatcttattacagaatgtctccctcctcatacaccagtcttcctagttaatagtaaactactataggttaataacatctgtaaaggcggctacatatagcacagtactgtgccctgttagaataactgaatgtgtcatacctgttagattctagttgtcttcttcattatgctgtaatctcatttaatttcatttcaattactcatgtaagggtttcgctgtaaaatcttaataaagtaaaaagctcacaataaataaacaaaaaataagtatgctgctttaaggcaagtgggcatccatcagttaagagactcaaacatgaattaaatgcaaacaaatatgaaaccaaggaaggctatgaattaagtaaaaattttaacattttgggtgaagtggaagccaaaaagtcaaaacccagaggatttggaaagggtgattcttgacaaatggtagtaaacttcacagtccagaccatggctggtcactggctgtccgtctgctattaaagtttttgtagttttggtaggtttgagagcggtaactaacccgtggagatccctgttcagctggcaaaccgttttgggaaacttgttctccttttgaagtatcccactgctgctgggactcggcttcctctgaaacctt

SEQ ID NO: 75195 - DNA, 3879 bp, Homo Sapiens
  misc_feature (3353)..(3367): n is a, c, g, or t
  misc_feature (3385)..(3399): n is a, c, g, or t
ttcttctctttcttccgcctgtgctctttcttggccttgtgcttgtctatgttctttttaagtttctctttttgaggaacctcaagtgtctgacgagcatttatggcagaacttgcatccaacaaagaatggcttgacaaaatcgagaaggaaggaatgcagctcatttcagaaaagcctgagacggaagctgtggtgaaggagaaactcactggtttacataaaatgtgggaagtccttgaatccactacccagacaaaggcccagcggctctttgatgcaaacaaggccgaacttttcacccagagctgtgcagatctagacaaatggctgcacggcctggagagtcagattcagtctgatgactatggcaaagacctgaccagtgtcaatatcctgctgaaaaagcaacagatgctggagaatcagatgcaagtgcggaagaaggagatcgaagagctccaaagccaagcccaggccctgagtcaggaagggaagagcaccgacgaggtagacagcaagcgcctcaccgtgcagaccaagttcatggagttgctggagcccttgaacgagaggaagcataacctgctggcctccaaagagatccatcagttcaacagggatgtggaggacgagatcttgtgggtcggagagaggatgcctttggcaacttccacggatcatggccacaacctccagactgtgcagctgttaataaagaaaaatcagaccctccagaaagaaatccaggggcaccagcctcgcattgacgacatctttgagaggagccaaaacatcgtcactgacagcagcagcctcagcgctgaggccatcagacagaggcttgccgacctgaagcagctgtggggtctcctcattgaggagacagagaaacgccacaggcggctggaggaggcgcacagggcccagcagtactactttgacgctgctgaggccgaagcctggatgagcgagcaggagctgtacatgatgtcagaggagaaggccaaggatgagcagagtgctgtctccatgttgaagaagcaccagatcttagaacaagctgtggaggactatgcagagaccgtgcatcagctctccaagaccagccgggccctggtggccgacagccatcctgaaagtgagcgcattagcatgcggcagtccaaagtggataaactgtacgctggtctgaaagaccttgctgaagagagaagaggcaagctggatgagagacacaggttattccagctcaaccgggaggtggacgaactggagcagtggatcgctgagagggaggtggtcgcagggtcccatgaactgggacaggactatgagcatgtcacgatgttacaagaacgattccgggagtttgcccgagacaccgggaacattgggcaggagcgcgtggacacggtcaatcacctggcagatgagctcatcaactctggacattcagatgccgccaccatcgctgaatggaaggatggcctcaatgaagcctgggccgacctcctggagctcattgacacaagaacacagattcttgccgcttcctatgaactgcacaagttttaccacgatgccaaggagatctttgggcgtatacaggacaaacacaagaaactccctgaggagcttgggagagatcagaacacagtggagaccttacagagaatgcacactacatttgagcatgacatccaggctctgggcacacaggtgaggcagctgcaggaggatgcagcccgcctccaggcggcctatgcgggtgacaaggccgacgatatccagaagcgcgagaacgaggtcctggaagcctggaagtccctcctggacgcctgtgagagccgcagggtgcggctggtggacacaggggacaagttccgcttcttcagcatggtgcgcgacctcatgctctggatggaggatgtcatccggcagatcgaggcccaggagaagccaagggatgtatcatctgttgaactcttaatgaataatcatcaaggcatcaaagctgaaattgatgcacgtaatgacagtttcacaacctgcattgaacttgggaaatccctgttggcgagaaaacactatgcatctgaggagatcaaggaaaaattactgcagttgacggaaaagaggaaagaaatgatcgacaagtgggaagaccgatgggaatggttaagactgattctggaggtccatcagttctcaagagacgccagtgtggccgaggcctggctgcttggacaggagccgtacctatccagccgagagataggccagagcgtggacgaggtggagaagctcatcaagcgccacgaggcatttgaaaagtctgcagcaacctgggatgagaggttctctgccctggaaaggctgactacattggagttactggaagtgcgcagacagcaagaggaacgaggagaggaagaggcggccgccttctcccgagccgagcacgaaggtttcagaggaagccgagtcccagcagcagtgggatacttcaaaaggagaacaagtttcccaaaacggtttgccagctgaacagggatctccacggatggcagaaacggtggacacaagcgaaatggtcaacggcgctacagaacaaaggacgagctctaaagagtccagccccatcccctccccgacctctgatcgtaaagccaagactgccctcccagcccagagtgccgccaccttaccagccagaacccaggagacaccttcggcccagatggaaggcttcctcaatcggaaacacgagtgggaggcccacaataagaaagcctcaagcaggtcctggcacaatgtttattgtgtcataaataaccaagaaatgggtttctacaaagatgcaaagactgctgcttctggaattccctaccacagcgaggtccctgtgagtttgaaagaagctgtctgcgaagtggcccttgattacaaaaagaagaaacacgtattcaagctaagactaaatgatggcaatgagtacctcttccaagccaaagacgatgaggaaatgaacacatggatccaggctatctcttccgccatctcctctgataaacacgaggtgtctgccagcacccagagcacgccagcatccagccgcgcgcagaccctccccaccagcgtcgtcaccatcaccagcgagtccagtcccggcaagcgggaaaaggacaaagagaaagacaaagagaagcggttcagcctttttggcaaaaagaaatgaactcctttccttcacctcctgcccttctcttaccttttcagtgaaattccagcatgcaagctcagaaccaacacattactctctgtgcctaatgttcctcaatgtggttgannnnnnnnnnnnnnnaatttatagagcatttcnnnnnnnnnnnnnnnaaacacacctaaacactttatctccaagtttacaaaagtttgaggtgcagtagggaaggccagattttttttcttaagtgaacttcatttagattagatctcagtattttaaccgtgtccctcaatttggtgagcgctgtgtttggaaataacccgcctctaggtgctgatgggtatgcaaggcagcgggtgcttaatcaatatttccgtggtgctcaccagaggcaaaattgtcccaatatcctgacaccattctctctccatttacttcggggggtaaccctgactcttgactcttagaattgcccgaaatggggctaacctttattaaccaaatcgcatattagtgatcttgctgcaagccaccagtgcagttccactttaaactcttacaagaccaaaccatttgtatctggcatcacttaattaacacaccgaagtgcgggttacctgcatacaactgctatgacggtaaaaatg

SEQ ID NO: 75196 - DNA, 971 bp, Homo Sapiens
  misc_feature (636)..(636): n is a, c, g, or t
  misc_feature (740)..(740): n is a, c, g, or t
  misc_feature (763)..(776): n is a, c, g, or t
gcagagaccgtgcatcagctctacaagaccagccgggccatgttgcccgacaccaatcctgaaagtgagcgcataagcatgcggcagtccaaagtggataatctgtacgctggtctgaaagaccttgctgaagagagaagacgcaagctggatgagagacacaggttatcccagctcaaaccgggaggtggacgacctggagcagtggatcgctgagagggaggtggtcgcagggtcccatgaactgggacaggactatgagcatgtcaaactgttttaatttttcaaacaaatggaacagaagccattgtggttcatcctgattacttgaacgttgcacttggtggaccgtgcctgggagcgctcgcatgccccctggcttcagaagtcatgtcagtgtctctgtagacaaactccactgtacatcttggattaatcttctgattcattgttcattttctcaagactttttgtggaattctctgataaaggaagcttttaggatggtatctatcaggccaccagcaggaattgaaaatgttttcacaaaaatccttttccttagaaataaaagctggtgacagagatggtttccttgtaccgataaaacaaaaccaaatccatattatacatcanaaccttgtgagacattcacttgctcttttgccatatttagatgtgttagtggaatcagaaacctgttttgatatgtgttctccatgaagtaagtctgatttgtncttttatttcatgatgcatgtcnnnnnnnnnnnnnngtcaggataacgtcatatagcatcttggttagtttttccttatctctatgtacatatctatctacttctgactgtagatgggtatatagatagatgccaaagcttcttatggttctgggggtagtatgcatcatttattggggtctctgcctttaaacacatcaaaattcattttagacaaaaaaacttctgcct

SEQ ID NO: 75197 - DNA, 1422 bp, Homo Sapiens
  misc_feature (23)..(23): n is a, c, g, or t
  misc_feature (104)..(104): n is a, c, g, or t
  misc_feature (430)..(455): n is a, c, g, or t
  misc_feature (731)..(742): n is a, c, g, or t
  misc_feature (827)..(835): n is a, c, g, or t
gggcttctgttggcatttaagcntaaagacactcacccctgcagtgcatgagacagcctggcacaatgaagaattagccctcccaaaatgtagaatattttatntcaagggatagggcagattaccattagaagcaaaattaaaagtacaagctgggcaaactgacagaatactagataggagagactaattccaaccttctaaatttggctagtaaagtgcaataaaggcattgataagttctgttagctcaccatagcacttgtaaatcaggaattaataattgaatcagatttaagggctctgtcctgttatacatatttaaggcagaaaaaaagttacatgtcgattaggtacttatcaagaatggtcaagctgagattttggttaatagagtaagcttacatatctagagaaacaacatagtggnnnnnnnnnnnnnnnnnnnnnnnnnntctaccggtaatttcccaatagctttgaatattcacagcagagctttattacttgagagaaagactggaagacctgaaagccacttctgctttctaaccccagttccttaaatattgaaatcttgtacattttgtgaaattccagtatgttttgcttaaggtgttaataaaattagtttgcatcatgtagtcattgagtgagggggagatataagccaaggattttaaattgacccttagctatagagaatttgctataagctagtcttgtttgtnnnnnnnnnnnngaacaaagaaaaagaaacaaggtgtatgtcacttgttttatgctcatgaagggtaggtccgtgtgaactggcatggccagcctgnnnnnnnnngaaactagaagtactagtttgtcacgggctcctgttgtagcagcgaatatagttaaaatacgtccattaaaaaagaacataatttaggctccttaccaattttagtggcctatagctaatctcctacgtagtttccttgacagattggtttccccaggggtcccgtattggcgccctcaaattggctcgtacattatgcaaaggccttgtgaatagtcttaccctcctttgaaacgcttgaaacacgttgtagtgacttaagcccttttgaggatgataccatctccaggtgctgcttggcttaaatctttagcaggcacctcttttcccttcaatatctgttgctgcagatttttaagaacaaatttggtttttacaactggccttgtgcctggtgtcagctcgatagcatgatctcattgtccttccccatggttcccttaccaatttattttgccagattgagctggccagattcataatctccctttgctaaatcttccctaatgagataggtttctaaattggctgaaccaaaggcccttgggtgccccaggccataaaaattgtcattggactcttgccca

SEQ ID NO: 75198 - DNA, 1146 bp, Homo Sapiens
  misc_feature (115)..(135): n is a, c, g, or t
  misc_feature (926)..(981): n is a, c, g, or t
gttatgctgagcgttagtgtgtatgtatgtgcgtacatgcgccaggtgcctgtgccctcgtgtaggatggttgcttaatatggttttataagttcagtttacacaggattcttannnnnnnnnnnnnnnnnnnnnggcaaacaccattcagttataagaactttgccaaagtatgatagaataattcaagagcatatacagagagttaccacttgacccagctatttaattgcaaatacagttgttttcatttcatttcctaccagaaaaaggaatcagcaacctagtttttgaaaacacaagtataattcctcttttgtacttctttttcacaaatgcttttatttattctaaattgaatttaaaaatccttcctaaagccattaactctttaattctcctgatatgcctttacttcctatgaagttattggtagatgttgaggcccagaaactgatagaatattgaagatcttcttaaatgaccaatttaaccataaccaaatattgaatatcattcttcagtcacatctaagtcaggcactttttcacatagatcagggcttttggctcagtcacgaaatctacaagttagcaaagcttacaaaacattattcgtcaggtatgggaatcaaatatagacacttgtttgtctttgctttccatttctatgtgtcacatacatatatgtgtcctcttataactttagtcttcaaaattatttcaatatccttcttctcactatatttatttgtgtgatggaaatgctttcaggccgtagatcattgttggtgttaatctgtggttaatcctcattttagttccgtcttatctgatacttagaaatatctcagccattttggaggctgtgcagtatcagaagacgtggagtttgttctgtctctgcctgtagctaattatggtggnnnnnnnnnnnnnnnnnnnnnnnnnnnnnnnnnnnnnnnnnnnnnnnnnnnnnnnncctgtgtgtctttagtgtcctcactggtaaaatgaagaggctggccatgagctggaagggttaagtttataattccagctatttcacacccgtcttccttgaagggatgatagtgatagatattacacgactgtaagtccctcttttaataaactaaatgaaaga

SEQ ID NO: 75199 - DNA, 644 bp, Homo Sapiens
attcaaggagtgtggacgctgcagtgcagttgtgagggcagttagcagccgcctcttgtgcatcctgtcaactctgattagttagagtttaggctcaaaagagttggtggactgagattgaaatttggttgtgcaagagaaaggaaaggagacacttagtaccaccagtttcagcaataaagaagggtcattctgtattcaaaattgtactgtagataaatcattcatgagattgtaaaaaatgtttgtcttgtgaccttgtgcttttgaagtcagacaaaaccgtgtaatcaacttgcacaaaaagagggtacacagtgaacatataaacacagacctaatcaaacaggagcagattcctcatggtgcttgtttattatatatatttaatcctgcttgacactttacccaagggagatggtcccttttatcagttgaatgttagcagcgttatttcagagtgtggtgactggttagagaaactcatgtactcaaccagccacagtttcaaacaaaatttttatgtgcaaaggacagcaaccttcttgtatgttaaaccaccagtacgctttgtacatctgtgataacgcctgttttatattcaaatgaacaaataaaagcttttatttttgttgctctgaaaa

SEQ ID NO: 75200 - DNA, 953 bp, Homo Sapiens
  misc_feature (52)..(90): n is a, c, g, or t
  misc_feature (94)..(128): n is a, c, g, or t
  misc_feature (754)..(757): n is a, c, g, or t
  misc_feature (760)..(764): n is a, c, g, or t
  misc_feature (767)..(770): n is a, c, g, or t
  misc_feature (772)..(772): n is a, c, g, or t
  misc_feature (774)..(776): n is a, c, g, or t
  misc_feature (781)..(781): n is a, c, g, or t
  misc_feature (783)..(783): n is a, c, g, or t
tgaaagactcactaatagtgagccgctaagccgtccgggtctttgttcagtnnnnnnnnnnnnnnnnnnnnnnnnnnnnnnnnnnnnnnnccgnnnnnnnnnnnnnnnnnnnnnnnnnnnnnnnnnnncagtcgacggtaccggacatatgcccgggaattcggccattacggccggggagtccagatcaaaaatggcggtagttggtgtgtcctcggtttctcggctgctgggtcggtcccgcccacagctggggcggcctatgtcgagtggcgcccatggcgaagagggctcagctcgcatgtggaagactctcaccttcttcgtcgcgctccccggggtggcagtcagcatgctgaatgtgtacctgaagtcgcaccacggagagcacgagagacccgagttcatcgcctacccccatctccgcatcaggaccaagccgtttccctggggagatggtaaccatactctattccataaccctcatgtgaatccacttccaactggctacgaagatgaataaagagaatctggaccactacccgggcaccagggaccacagcactggtttggaccgttactctgcacatggaccagaaaaagtatatgggaccttaagctcaccttctttacttgtatcaaatgatgactggtatactggtctcccatccctttgcttgtggcaggagatggcttaaataaataacttaaacttaaaaaacccaaaccattatatttaaccaataaatctttnnnnttnnnnnaannnnanannnaaaananaaaaaaatggtcggccgccctcgggccctcgaaaaagccttctctaaacatttccgtttgggcgccgcgggcccaaaaagggaaaagtgaaaattggcccataccctgtttcccataggaaaatccctgggcccatggacctaagggccttgggaatccctccaccaaat

SEQ ID NO: 75201 - DNA, 2512 bp, Homo Sapiens
ggtccggaattcccgggatcttcaggggaaactgaggccggcttgttcgggagagacggcgcgagcagtcagccaggtaggccggcagccaggtaggccggcccgggtccgcggcgcggaactcggccgcgaagagctcttgcgtctggaagctaccgggccgatgaagggggatgtggccccccacggctcgcggggctcgcagaatcttatcttggctttggatcttagaagagaatcactaaccagagacgagactcagtgagtgagcaggtgttttggacaatggactggttgagcccatccctattataaaaatgtctcagagcaaccgggagctggtggttgactttctctcctacaagctttcccagaaaggatacagctggagtcagtttagtgatgtggaagagaacaggactgaggccccagaagggactgaatcggagatggagacccccagtgccatcaatggcaacccatcctggcacctggcagacagccccgcggtgaatggagccactggccacagcagcagtttggatgcccgggaggtgatccccatggcagcagtaaagcaagcgctgagggaggcaggcgacgagtttgaactgcggtaccggcgggcattcagtgacctgacatcccagctccacatcaccccagggacagcatatcagagctttgaacaggtagtgaatgaactcttccgggatggggtaaactggggtcgcattgtggcctttttctccttcggcggggcactgtgcgtggaaagcgtagacaaggagatgcaggtattggtgagtcggatcgcagcttggatggccacttacctgaatgaccacctagagccttggatccaggagaacggcggctgggatacttttgtggaactctatgggaacaatgcagcagccgagagccgaaagggccaggaacgcttcaaccgctggttcctgacgggcatgactgtggccggcgtggttctgctgggctcactcttcagtcggaaatgaccagacactgaccatccactctaccctcccacccccttctctgctccaccacatcctccgtccagccgccattgccaccaggagaaccactacatgcagcccatgcccacctgcccatcacagggttgggcccagatctggtcccttgcagctagttttctagaatttatcacacttctgtgagacccccacacctcagttcccttggcctcagaattcacaaaatttccacaaaatctgtccaaaggaggctggcaggtatggaagggtttgtggctgggggcaggagggccctacctgattggtgcaacccttaccccttagcctccctgaaaatgtttttctgccagggagcttgaaagttttcagaacctcttccccagaaaggagactagattgcctttgttttgatgtttgtggcctcagaattgatcattttccccccactctccccacactaacctgggttccctttccttccatccctaccccctaagagccatttaggggccacttttgactagggattcaggctgcttgggataaagatgcaaggaccaggactccctcctcacctctggactggctagagtcctcactcccagtccaaatgtcctccagaagcctctggctagaggccagccccacccaggagggagggggctatagctacaggaagcaccccatgccaaagctagggtggcccttgcagttcagcaccaccctagtcccttcccctccctggctcccatgaccatactgagggaccaactgggcccaagacagatgccccagagctgtttatggcctcagctgcctcacttcctacaagagcagcctgtggcatctttgccttgggctgctcctcatggtgggttcaggggactcagccctgaggtgaaagggagctatcaggaacagctatgggagccccagggtcttccctacctcaggcaggaagggcaggaaggagagcctgctgcatggggtggggtagggctgactagaagggccagtcctgcctggccaggcagatctgtgccccatgcctgtccagcctgggcagccaggctgccaaggccagagtggcctggccaggagctcttcaggcctccctctctcttctgctccacccttggcctgtctcatccccaggggtcccagccaccccgggctctctgctgtacatatttgagactagtttttattccttgtgaagatgatatactatttttgttaagcgtgtctgtatttatgtgtgaggagctgctggcttgcagtgcgcgtgcacgtggagagctggtgcccggagattggacggcctgatgctccctcccctgccctggtccagggaagctggccgagggtcctggctcctgaggggcatctgcccctccccccaacccccaccccacacttgttccagctctttgaaatagtctgtgtgaaggtgaaagtgcagttcagtaataaactgtgtttactcagtgaaa

SEQ ID NO: 75202 - DNA, 1020 bp, Homo Sapiens
cccactccgggagagtatcctggctcccagtaggaggcggagagccaaggggcgtgcaagagagagggggctgggctcccgggtggcaggaggccgcggctgcggagcggccgccctcgatccgggcgatggaggaggaagcaagcgagggggctggttcctgagcttcgcaattcctgtgtcgccttctgggctcccagcctgccgggtcgcatgatccctccggccggagctggtttttttgccagccaccgcgaggccggctgagttaccggcatccccgcagccacctcctctcccgacctgtgatacaaaagatcttccgggggctgcacctgcctgcctttgcctaaggcggatttgaatctctttctctcccttcagaatcttatcttggctttggatcttagaagagaatcactaaccagagacgagactcagtgagtgagcaggtgttttggacaatggactggttgagcccatccctattataaaaatgtctcagagcaaccgggagctggtggttgactttctctcctacaagctttcccagaaaggatacagctggagtcagtttagtgatgtggaagagaacaggactgaggccccagaagggactgaatcggagatggagacccccagtgccatcaatggcaacccatcctggcacctggcagacagccccgcggtgaatggagccactggccacagcagcagtttggatgcccgggaggtgatccccatggcagcagtaaagcaagcgctgagggaggcaggcgacgagtttgaactgcggtaccggcgggcattcagtgacctgacatcccagctccacatcaccccagggacagcatatcagagctttgaacaggtagtgaatgaactcttccgggatggggtaaactggggtcgcattgtggcctttttctccttcggcggggcactgtgcgtggaagcgtaaacaagagatgcaggaattgggtgagtcggatcccagcttgggaggccacttacctgaag

SEQ ID NO: 75203 - DNA, 1635 bp, Homo Sapiens
  misc_feature (101)..(101): n is a, c, g, or t
  misc_feature (121)..(121): n is a, c, g, or t
  misc_feature (298)..(298): n is a, c, g, or t
gttcaaaaaaagtgggcccccctaaaatggggtttttaaggggggtaaggggatggaaaggaaaaagggaaacccaaggtttaattttggggaaaattggngggaaaaatgattcaatttntgaggcccccaaaccatcaaaaccaaaggccaattctagtctccttttctggggaagaggttctgaaaacttttcaagcctccctggcagaaaaaacatttcaggggaggctaaggggtaagggttgcaccaatcaggtagggccctcctgcccccagccacaaacccttccatacntgccagcctcttttggacagattttgtggaaattttgtgaattctgaggccaagggaactgaggtgtgggggtctcacagaagtgtgataaattctagaaaactagctgcaagggaccagatctgggcccaaccctgtgatgggcaggtgggcatgggctgcatgtagtggttctcctggtggcaatggcggctggacggaggatgtggtggagcagagaagggggtgggagggtagagtggatggtcagtgtctggtcatttccgactgaagagtgagcccagcagaaccacgccggccacagtcatgcccgtcaggaaccagcggttgaagcgttcctggccctttcggctctcggctgctgcattgttcccatagagttccacaaaagtatcccagccgccgttctcctggatccaaggctctaggtggtcattcaggtaagtggccatccaagctgcgatccgactcaccaatacctggcatctccttgtctacgctttcccacgcacagtgccccgccgaaggagaaaaaggcccacaatgcgaccccagtttaccccatcccggaagagttcattcactacctgttcaaagctctgatatgctgtccctggggtgatgtggagctgggatgtcaggtcactgaatgcccgccggtaccgcagttcaaactcgtcgcctgcctccctcagcgcttgctttactgctgccatggggatcacctcccgggcatccaaactgctgctgtggccagtggctccattcaccgcggggctgtctgccaggtgccaggatgggttgccattgatggcactgggggtctccatctccgattcagtcccttctggggcctcagtcctgttctcttccacatcactaaactgactccagctgtatcctttctgggaaagcttgtaggagagaaagtcaaccaccagctcccggttgctctgagacatttttataatagggatgggctcaaccagtccattgtccaaaacacctgctcactcactgagtctcgtctctggttagtgattctcttctaagatccaaagccaagataagattattcaaatccgccttaggcaaaggcaggcaggtgcagcccccggaagatcttttgtatcacaggtcgggagaggaggtggctgcggggatgccggtaactcagccggcctcgcggtggctggcaaaaaaaccagctccggccggagggatcatgcgacccggcaggctgggagcccagaaggcgacacaggaattgcgaagctcaggaaccagccccctcgcttgctcctcgtgccgaaatcgccacccaggcctcgcttcgt

SEQ ID NO: 75204 - DNA, 947 bp, Homo Sapiens
cggtccaaggtagcgaggcctgggtggcgaattcggcacgaggcgggcattcagtgacctgacatcccagctccacatcaccccagggacagcatatcagagctttgaacaggtagtgaatgaactcttccgggatggggtaaactggggtcgcattgtggcctttttctccttcggcggggcactgtgcgtggaaagcgtagacaaggagatgcaggtattggtgagtcggatcgcagcttggatggccacttacctgaatgaccacctagagccttggatccaggagaacggcggctgggatacttttgtggaactctatgggaacaatgcagcagccgagagccgaaagggccaggaacgcttcaaccgctggttcctgacgggcatgactgtggccggcgtggttctgctgggctcactcttcagtcggaaatgaccagacactgaccatccactctaccctcccacccccttctctgctccaccacatcctccgtccagccgccattgccaccaggagaaccactacatgcagcccatgcccacctgcccatcacagggttgggcccagatctggtcccttgcagctagttttctagaatttatcacacttctgtgagacccccacacctcagttcccttggcctcagaattcacaaaatttccacaaaatctgtccaaaggaggctggcaggtatggaaagggtttgtggctgggggcaggagggccctacctgattggtgcaacccttaccccttaccctccctgaaaatgtttttctgccagggaagcttgaaagtttttcagaacctcttccccagaaaggagactagaaatgcccttggtttttgatggtttgtgggcctcagaaattgaatcattttcccccccaactcttccccacaataaacctgggggtttcccttttccttccatcccctaa

SEQ ID NO: 75205 - DNA, 749 bp, Homo Sapiens
gatgctgtcatgctcagtggccatttacagttctccaaagtctagccctgtttcagacctgcacttcacctctaagttatgtacaactcaacctgcatccctctaaaagtcctatatccatattcaccattggctaatttgaggccctgagtgggccttgaatgctaaaaagaagcagggtacgcagggctacatgtagataccacaccaaggctggaggctggtctgtcataagacagaaagaaagacgctgggcccaattttgacttggccaggggacaccttggtgtgtttgttatctttatctgtgggtaggctagctgacccatctccttgagtcattccctttgggaaaccccactgccagtattgatctcctttttgccttgtactgaatgacacattacctccacactctcccggactaggtggtcaacagggccacagggttgctttctgtctttggtggggcaggggagttgacagggatgagggtccaaggaataagcatgaatgacaagaaaacaagggaaagagttaacctgtcacatagcaggttaactttttcagggtttgcagttagaggtattcgaccattcactggctgagccagatcacgggaacttgagagcttttactgtgattcttcaatgtaaaaaataaacaacaatgtcaaactgtgtttatatgatttgtataaagcctttttaagattactatttaaataaacattataccagagataaaaa

SEQ ID NO: 75206 - DNA, 696 bp, Homo Sapiens
  misc_feature (658)..(658): n is a, c, g, or t
  misc_feature (677)..(677): n is a, c, g, or t
aagagtaagaaaaatatacaactatatttaaaatacttaaattaacaagatagtacttttccattctaacaaaatatcatacattcagtttaaacaagagttaatatccagacacacgttttcaaaatacctgatgctagttgaaaattagtgaccatgaggctttccaagatatttctaattagcaaactgtgtacaattttgaagaagtgtacacaccgtgctggaagacagacactgaacaggtcaaaatgcaaactcatgtatctttcatcaacctaaatcttgttgcttcacttttctaaatgatactttggctgtcagcgaatcttatagcttcttttcccttaaagacaataatatataacaacaccaccccacacaaataaccataaacttctttgtgtgaaataagccctatcaaaatgtgttcatgtatttctgtaccaactgatctatactgagactgtcatgaaaaaggtatcaaacaagtgtaacaggcctacacttaaacctctgcctcaaaggagaaatcagatacttgccacgttattgcaaagtcaaagctgctacacttaaaatatggtagatagtttagaaaaatcaaatcaaaaatgttttctcactggctttttcagataaagaagttggaccacanaccaacacatctgtgtganaacagccaccaatttgagt

SEQ ID NO: 75207 - DNA, 786 bp, Homo Sapiens
  misc_feature (78)..(78): n is a, c, g, or t
cggcaactgcttcggatgatcaggctgttgtgctgaaggccctgagattggcgcccgaggggcgtctgcgaagggacngggctgcgggccctcagctccctgctcgtccatggcaacaacaaggtcatggctgctgtcagcacccagctccggagcctgtcactgggccctaccttccgagagagggccctcctgtgcttcctggaccagctggaggatgaggacgtgcagactcgagtggctggctgcctggccctaggctgcatcaaggctcccgagggcattgagcccctggtgtacctctgccaaactgacacagaagctgtgagggaagctgcccggcaaagcctacagcagtgtggagaagagggacagtctgcccatcgacggctggaggagtccctggacgccctgccccgcatctttgggcctggcagcatggccagcacagcattctaaactattcacccatgggttcctggtgcccctttccccccactttcagggctcaccaggcactggcagggagggtaagggctggctccagatacccctcccccacagattcctagcaatgaaaatctaatatattcttctgttgcccctggggttggagagtcagtgcctgcagtcaagtgcctcccagcctcggctcagcacatcccttgccacaaatcagtgtctggggcttggccaccctgccgctgcccagccacatcccttggttttgtattttatttacagagttttacagaaaataaaaaagcaaaatgtctttccaaaaaa

SEQ ID NO: 75208 - DNA, 1491 bp, Homo Sapiens
tttctatcaagtgtgggttggtagccctgcttgacttaaaatgagtgttacagctgttgggaaacaggaaatggggctggattacacaaagacatccaaaactaacacaaacacacatggacttcctggtatgtaaattctttttgagatgagagatctccctttacagaatttagtatataacagattcaataaccaaacttcgtgacctctcaatattaaataactaaatgtgcaaaagaaccaccattatataggacaacaaaagctatacattttctatgaaacagtatgtgcacagattttcaaagctgtgaaaatacaataaagagcacaacacattttggtcactttattaaatgacattaaatagtttaagtttcaactactaaacagcactttgaatggtgaaaacacagatagtatattgtcatacttgaatgcttttctttaaaaacacaattccagtccttatatatattacaaaacagccttaaaggaagaagtgacatcttttctacagtacttaagatactcaatacagaactgaaaagcagtctaacagaaacaaaggcaagtcttcacagctgtatgatttcagcagccaaagctggatgatggactgaaacattactatacaactgggacaaaacatatacaatatcacaatactaagcaaaaacgctttacacccaaagaaataaaacaggttacaaaatgtggagaatttagcaggcaaaactgtattacaagcaacattttaaatcatcatttttaatccattgcaactatttaaaacatctaaaacaaatataaaaatgagccttttagtattttactgacgtgatttttttgtctttaaatatttgttaaagcttgatgttatactcaaagtacatattatatagctaaaatgtcaagtgagaagagtgtatacaaagtggtccaagttttatttcaaactctgatttccaattaacccttctaagtattattctttaagttatagtttcatccatggtgaaaaagatttagaaggttgcctaaaattttcacatctatgtctttgagtaaataattagaccatgttgaaaattcccaggtctagtaaatcaggtttaaaatattctgaacttgtagaaataccaactggtaacagttggccagagtgtactgccttcaaatatttctcataaatcttgtctttttcattttttctaaagtaaatacacacctgccccacccaattaaataaatctgattacatggctagcataatatctaaatatacaggatttattagtgatatttcatcatgggaaagtgggggagaggggcgtggatccaccaaacctcacaaattctgtatcacaatcctagtgctcttggatgttttaccactagttcttccaagataaaaatggcaatctcttaatcatcccccggccgtaatggccgaattcccgggcatatgtccggtaccgtcgactg

SEQ ID NO: 75209 - DNA, 746 bp, Homo Sapiens
ggagctgtaagacaagatatataatgacattgctctgaggatgaggctttttgaggatttccaagcttatttgtctcctctgatacaagggtggtggttgaaggctgatggtcttcatggctactgtggttctgaggctgctgttttccaacggtaatgcagatctgcaatgaggtgtgattcttcttagctttcctgcattccctccatctgtagggtccttctcctgaatgaataccctggacagatttgactgtgggctgctccttctgctatccctgggggttctccttgctccaacttgaagagcgaatctggcttggtgcctcgataccctattgatactaggttgatgtagttctccaacattacttccttgtacaagaccttctgagactggtccaaaaactgccactcctccctggtgaagcccacagccacatcttcgaatgacaatgacccctcccctgaagaactgccttgctctctcctcacagacattacaatcgtggcatttttcatgtgtttcctgttatttcagctgggccttgcccatttcgttcaactcttaggggctagcaactctagtatgttctctctcttctgtctattctgggccttcccagaagtggtggtcaggtatcatctcaggtcaagctaccactggaaatgatgatcttccccagcctggaagctccttcttccattactgaaaatgtctgttcctatacgccaaaccacaagcg

SEQ ID NO: 75210 - DNA, 842 bp, Homo Sapiens
  misc_feature (750)..(784): n is a, c, g, or t
atttcggcactaggctgaccctggggctgctggactgtccgggagtcagcgccaccacagtgctgcccttccacaccagcaccgagatgttccagggcatgagagtcaggtttcccaacctctttcccccactgaagccggagacggtggcccggaggacagtggaagctgtgcagctcaaccaggccctcctcctcctcccatggacaatgcatgccctcgttatcttgaaaagcatacttccacaggctgcactcgaggagatccacaaattctcaggaacctacacctgcatgaacactttcaaagggcggacatagagacaggatgaagacatgcttgaggagccacggagtttgggggccacagcacctgggcacacacccgagcacctgtccattggcatgcttctgctgggtgagcaggacagctcctgtccccagcgaagaatccggctgcccctgggccagtcccaggacctttgcacaggactgatgggtgtaactgacccccacagggaggcaggaaaacagccagaagccaccttgacacttttgaacatttccagttctgtagagtttattgtcaattgcttctcaagtctaaccagcctcagcagtgtgcatagaccatttccaggagggtctgtccccagatgctctgcctcccgttccaaaacccactcatcctcagcttgcacaaactggttgaacggcaggaatgaaaaataaagagagatggcttttgtgnnnnnnnnnnnnnnnnnnnnnnnnnnnnnnnnnnncctgagcagcggccgcaagcttattccctttagttgagggttaattttagcttggcac

SEQ ID NO: 75211 - DNA, 488 bp, Homo Sapiens
gcggccgcctactactactactatacggctgcgagaagacgacagaagggcggacatagagacaggatgaagacatgcttgaggagccacggagtttgggggccacagcacctgggcacacacccgagcacctgtccattggcatgcttctgctgggtgagcaggacagctcctgtccccagcgaagaatccggctgcccctgggccagtcccaggacctttgcacaggactgatgggtgtaactgacccccacagggaggcaggaaaacagccagaagccaccttgacacttttgaacatttccagttctgtagagtttattgtcaattgcttctcaagtctaaccagcctcagcagtgtgcatagaccatttccaggagggtctgtccccagatgctctgcctcccgttccaaaacccactcatcctcagcttgcacaaactggttgaacggcaggaatgaaaaataaagagagatggcttttgtg

SEQ ID NO: 75212 - DNA, 491 bp, Homo Sapiens
gttgttgtttttgctttgtttccttttttagaaagttctagaaaataggaaaacgaaaaatttcattgagatgagtagtgcatttaattattttttaaaaaactttttaagtacttgaattttatatcaggaaaacaaagttgttgagccttgcttcttccgttttgccctttgtctcgctccttattctttttttggggggagggttatttgcttttttatcttcctggcataatttccattttattcttctgagtgtctatgttaacttccctctatcccgcttataaaaaaattctccaacaaaaatacttgttgacttgatgttttatcacttctctaagtaaggttgaaatatccttattgtagctactgtttttaatgtaaaggttaaacttgaaaagaaattcttaatcacggtgccaaaattcattttctaacaccatgtgttagaaaattataaaaaataaaataatttttgaaagtttaac

SEQ ID NO: 75213 - DNA, 1864 bp, Homo Sapiens
  misc_feature (1524)..(1561): n is a, c, g, or t
  misc_feature (1724)..(1770): n is a, c, g, or t
tctttgccgaaatgctagagaaatgggtgtatttatgtacatttctaatagacatgaatttggaaggctattatccactgctaattacaatacttcccattataacaatgacctctggcagatttttgaaaatcctgtggactggaaggaaaagtatataaaccgtgattattcaaagattttcactgaaaatatagttgaacagccctgtccagatgtcttttggttccccatattttctgaaaaagcctgtgatgaattggtagaagaaatggaacattacggcaaatggtctgggggaaaacatcatgatagccgtatatctggtggttatgaaaatgtcccaactgatgatatccacatgaagcaagttgatctggagaatgtatggcttcattttatccgggagttcattgcaccagttacactgaaggtctttgcaggctattatacgaagggatttgcactactgaattttgtagtaaaatactcccctgaacgacagcgttctcttcgtcctcatcatgatgcttctacatttaccataaacattgcacttaataacgtgggagaagactttcagggaggtggttgcaaatttctaaggtacaattgctctattgagtcaccacgaaaaggctggagcttcatgcatcctgggagactcacacatttgcatgaaggacttcctgttaaaaatggaacaagatacattgcagtgtcatttatagatccctaagttatttacttttcattgaattgaaatttattttgggtgaatgactggcatgaacacgtctttgaagttgtggctgagaagatgagaggaatatttaaataacatcaacagaacaacttcactttgggccaaacatttgaaaaactttttataaaaaattgtttgatatttcttaatgtctgctctgagccttaaaacacagattgaagaagaaaagaaagaaaaaacttaaatatttatttctatgcttgttgcctctgagaataatgacaatttatgaatttgtgtttcaaattgataaaatatttaggtacaaataacaaggactaataatattttcttatttaaaaaaagcatgggaagatttttatttatcaaaatatagaggaaatgtagacaaaatggatataaatgaaaattaccatgttgtaaaaccttgaaaatcagattctaactggatttgtatgcaactaagtatttttctgaacacctatgcaggtcttatttacagtagttactaagggaacacacaaagaattacacaacgttttcctcaagaaaatggtacaaaacacaaccgaggagcgtatacagttgaaaacatttttgttttgattggaaggcagattattttatattagtattaaaaatcaaaccctatgtttctttcagatgaatcttccaaagtggattatattaagcaggtattagatttaggaaaacctttccatttcttaaagtattatcaagtgtcaagatcagcaagtgtccttaagtcaaacagnnnnnnnnnnnnnnnnnnnnnnnnnnnnnnnnnnnnnnagaaagttctagaaaataggaaaacgaaaaatttcattgagatgagtagtgcatttaattattttttaaaaaactttttaagtacttggaattttatatcaggaaaacaaaagttgttgaggccttggcttctttccgtttttgccctttggtctcgcctccnnnnnnnnnnnnnnnnnnnnnnnnnnnnnnnnnnnnnnnnnnnnnnnattcttccctgggcaataatttccccattttaattccctccggaaggggccctaaggttataacttttccccttcctatacccccgcttttaat

SEQ ID NO: 75214 - DNA, 1253 bp, Homo Sapiens
ggtccggaattcccgggatatcgtcgacccacgcgtccgcccacgcgtccggaaagaggaatctcttaaatctcccttgaagccagagtcacagctagatcttcgggtacaggagttaataaagttgatctgtaatgttcaggccatggaagaaatgatgatggaaatgaagtataataccaagaaagccccacttgggaagctgacagtggcacaaatcaaggcaggttaccagtctcttaagaagattgaggattgtattcgggctggccagcatggacgagctctcatggaagcatgcaatgaattctacaccaggattccgcatgactttggactccgtactcctccactaatccggacacagaaggaactgtcagaaaaaatacaattactagaggctttgggagacattgaaattgctattaagctggtgaaaacagagctacaaagcccagaacacccattggaccaacactatagaaacctacattgtgccttgcgcccccttgaccatgaaagttatgagttcaaagtgatttcccagtacctacaatctacccatgctcccacacacagcgactataccatgaccttgctggatttgtttgaagtggagaaggatggtgagaaagaagccttcagagaggaccttcataacaggatgcttctatggcatggttccaggatgagtaactgggtgggaatcttgagccatgggcttcgaattgccccacctgaagctcccatcacaggttacatgtttgggaaaggaatctactttgctgacatgtcttccaagagtgccaattactgctttgcctctcgcctaaagaatacaggactgctgctcttatcagaggtagctctaggtcagtgtaatgaactactagaggccaatcctaaggccgaaggattgcttcaaggtaaacatagcaccaaggggctgggcaagatggctcccagttctgcccacttcgtcaccctgaatgggagtacagtgccattaggaccagcaagtgacacaggaattctgaatccagatggttataccctcaactacaatgaatatattgtatataaccccaaccaggtccgtatgcggtaccttttaaaggttcagtttaatttccttcagctgtggtgaatgttgatattaaataaaccagagatctgatcttcaagcaagaaaataagcagtgttgtacttgtgaattttgtgatattttatgtaataaaaactgtacaggtct

SEQ ID NO: 75215 - DNA, 562 bp, Homo Sapiens
  misc_feature (19)..(19): n is a, c, g, or t
tactgcttgccctctcgcntaaagaatacaggactgctgctctactcagcaggtagctctaggtcagtgtaatgaactactagaggccaatcctaaggccgaaggattgcttcaaggtaaacatagcaccaaggggctgggcaagatggctcccagttctgcccacttcgtcaccctgtaagtactcagaaccaggaggactagaagactccttttggccagataagactacgttctctattgcagcttctgaaccagagactgatgttgacacactttttttccatttggcaggaatgggagtacagtgccattaggaccagcaagtgacacaggaattctgaatccagatggttataccctcaactacaatgaatatattgtatataaccccaaccaggtccgtatgcggtaccttttaaaggttcagtttaatttccttcagctgtggtgaatgttgatattaaataaaccagagatctgatcttcaagcaagaaaataagcagtgttgtacttgtgaattttgtgatattttatgtaataaaaactgtacaggtctaa

SEQ ID NO: 75216 - DNA, 1288 bp, Homo Sapiens
gaggcctgggtggcgaattcggcacgaggaagcgcgctgcggttccggtggcgccatgtcgttctgcagcttcttcgggggcgaggttttccagaatcactttgaacctggcgtttacgtgtgtgccaagtgtggctatgagctgttctccagccgctcgaagtatgcacactcgtctccatggccggcgttcaccgagaccattcacgccgacagcgtggccaagcgtccggagcacaatagatctgaagccttgaaggtgtcctgtggcaagtgtggcaatgggttgggccacgagttcctgaacgacggccccaagccggggcagtcccgattctgaatattcagcagctcgctgaagtttgtccctaaaggcaaagaaacttctgcctcccagggtcactaggcgggcagcccacacccaccccagacggccaccacactgaggccacacgttggccattccaccttggagttggaaccctgggcgtcgagacaggaaggcagggcgcagtggttgaaacatcaggacactcccaaggccccggctctgaacaagaccttttcgtttcttggaaaagagactcatttgctgatggttcatgccttctgctgggacaggcctgggctgtgcagccacactgtcggctgacttagccccctgctcactctaggtgcctccaggaggtgagccctgggtgcagctggtctctgaatgacgttacaccctcaccttcttttcctggccctgtctctggactctcccctgtgaggcccaattccaagacagactctcgtcctcaccgaagcttaggcccacatctcccaggctgcttaggagacagaatggaaacggaggccgcccctgccagccgccctggccctggtcactgcatgatccgctctggtcaaacccttccaggccagccagagtggggatggtctgtgacctgctgggaaggcaggctgatggggcacacccttggcctctcgtccacgaggggagaaacctaaaccctgtttcacaatctgtgcggaagtagcttgcctcacttctgcttaggaaagcggctgttgctccataactctaaccagcacagggctgaggcctgcagtgcacacctgcagggaggcccttcccaaggtgtggtgactgtgccttactgtacatgctcggaggcctggccatataggagggtgggtgatgctgaaatcaccccccatcttaagtaattactttctggagtaatcaggtggaaatccatagacaaatgaaacattcagatgt

SEQ ID NO: 75217 - DNA, 1036 bp, Homo Sapiens
gccacaaaggggttgtgcccccccataaagcccctgccttttccccaggccagggtccaccagagccattccccccacttttgggttgggcctgggaaggggttttgacccagagcgggatccatgcagttgaccaggggccaggggcggctggccagggggcgcccctcccgtttcccattctgtctcctaaacagcctgggagatgtgggcctaagcttcggtgaggacgagagtctgtcttggaattggccctcacaggggagagtccagagacaggggccaggaaaagaaggtgagggtgtaacgtcattcagagaccagctgcacccagggctcacctcctggaggcacctagagtgagcagggggctaagtcagccgacagtgtggctgcacagcccaggcctgtcccagcagaaggcatgaaccatcagcaaatgagtctcttttccaagaaacgaaaaggtcttgttcagagccggggccttgggagtgtcctgatgtttcaaccactgcgccctgccttcctgtctcgacgcccagggttccaactccaaggtggaatggccaacgtgtggcctcagtgtggtggccgtctggggtgggtgtgggctgcccgcctagtgaccctgggaggcagaagtttctttgcctttagggacaaacttcagcgagctgctgaatattcagaatcgggactgccccggcttggggccgtcgttcaggaactcgtggcccaacccattgccacacttgccacaggacaccttcaaggcttcagatctattgtgctccggacgcttggccacgctgtcggcgtgaatggtctcggtgaacgccggccatggagacgagtgtgcatacttcgagcggctggagaacagctcatagccacacttggcacacacgtaaacgccaggttcaaagtgattctggaaaacctcgcccccgaagaagctgcagaacgacatggcgccaccggaaccgcagcgcgcttcctcgtgccgaattcgccacccaggcctcgctacctt

SEQ ID NO: 75218 - DNA, 512 bp, Homo Sapiens
agttacatagacttcctgcagtcagctgctgtgccccagtgccttactggtcctttgtagatttgccttaatgatttgtacaaatgactgggaggcggggatgctgcctgtgtcctggtgaaccttaatgaaggggccgtcttaggcacagtgcaaaacaagcatttgtcctgtactgttagagccaaaattgtgatgagcaatactgataattgtccagtttatgtcatctttcccagattttaaaatctgttctagatattcttagcttgaaccacttttgattgtgaaatgtattaggtgttgtcccattattactgtaaaatgaagttttgaatcttcttgttaataaactgtggatttcccctctcaatttcttaaacaacaacaaaaaaatgcttgaagattgtctttgagtgtaagatctgccttttcagaaagggagtgttagtttgtaatgttaaaaaataaagacctcattcaataaaagttgaagtcatctttaaaaaaaa

SEQ ID NO: 75219 - DNA, 721 bp, Homo Sapiens
acatgaaaacatgtttattgcctgaataataaaacttagctaaggaggtattagaattaggattccccctacttgaagtacaagtttccaataaacagacagacagaagcaaaaccccaaatgagaaagaatacattggtaacctaaatcataggcatttgtgggtatgttcatacaatctacctatttctttgtaatttactatagcactgatgacaaagcatagacatacaatgagaaagagcaaatcagcatatcagtgtgactgtgcaaccactacaaagcttggccttcttaaatgtggccactttaacttacacacacccacagaggcatcagaaatctccctgcaaacacgatttgcctatagttttgtggcaatactgttacatagaacaaaaacaactctcagaccatggttaataaataagagagaaaagaagtaagaaacaacttccatgggttggcaggcatgcaaagcagcaccttgaacctcatttgaaaaacaggcaactgggatagcttttggagcccaggagtgaaggctagaggctgaaaggagctatgcactattatctttgggtatttccacataatctgcaggatggggaagtttaattccgcaccacataaactgtgctcttttagatgtggctgaaacgggtgtctctgcagaattagaaacccatctagaaatgacattgcttaaaatgttctttcc

SEQ ID NO: 75220 - DNA, 1311 bp, Homo Sapiens
  misc_feature (467)..(495): n is a, c, g, or t
ccaccacacccacaccacgcaccccccgcaagctatagtgacactatagacagcttttaaaaaaagcaggctggtaccggtccggatttcccgggatatcgtcgacccacgcgtccggattacaggcatgagccactgcacctggccttaacccctctttagattggaaaaaataattacaactttaaaaatagcttagtgttgaaccctttggtaaactaaagacccttttataatgcacatattcccaacaaaattaatatattttgtgagattaaacaatgcttgtatatgcttgaactttcttaaaatatgtccatgtcatactattatgaatgtacatttttatgagtcataaatattattttcaaaagcactacaggcccatgaattacttcctcacttttgcagttgattactgaaatgtaaatcacaagaatttgtcaattaaatcattttaaactgcnnnnnnnnnnnnnnnnnnnnnnnnnnnnngggggggacgcgcctctctaagaatttatccctctccgagaggggccccaagttttacagcgcgcttaaccaagttttatttgtgtccacaagggggctccccataataagggagagctccgtatattatataaagctctagaggaatgggccgcgacacgttttcacaacaagcgctgcgggaagcgggggcaaacagcggtctaactgtggggaatccttggtcacaaggggaacctcttcaactccgcggggggggtagccccataattgggggacacatatacctacacggaacgaatccaacggagcctccaaacggggtacaacttctaccaccactttccccacgcgtgtacaacactctcgctcaacaccataactgcgcaaataatacgcgtagcctgctctcgcagcacagttcacgacacccggagccgacaataactccccgcgaccactttttcccagagatcgccacacactaacaccgggcaagggtgagagctgccgaccgggtcagcgcccgactaagggagcagcaggagacgggaggcgaggaggagagagtagcggacgagcgctcaacaagcgccatgggccgtcgacgggcggagctcgggaaagcgcacgggggaagcggcagaacagcgtacgcacagacgcaaggaggcagagggccagaccgaacacgccgcacccgctagcacgagagcgcgggaggaaaagcgaaacccggcgtcggcggagaggaggaaggagcagcaagccaaggacgccggtgagggagagctggggcgagcgtgggcgaggcgc

SEQ ID NO: 75221 - DNA, 1245 bp, Homo Sapiens
  misc_feature (1165)..(1184): n is a, c, g, or t
cagtcgacggtaccggacatatgcccgggaattcggccattacggccggggaatggcaaaggatcagtgcttcctaactcagataagaaggctgactgcacaatcacaatggctgactcagacttcctggctttaatgactggtaaaatgaatcctcagtcggccttctttcaaggcaaatcgaaaatcactggcaacatgggtctcgctatgaagttacaaaatcttcagcttcagccaggcaacgctaagctctgaagaactccctttggctacttttgaaaatcaagatgagatatatagatatatatccatacattttattgtcagaatttagactgaaactacacattggcaaatagcgtgggatagatttgtttcttaatgggtgtgaccaatcctgtttttcctatgctctgggtgaatagagcctgatggtatactactgctttgcggaattgcatacaactgtgcattacaaagttaatatggtaattatggtctggggtaaaattgagtttcagaataaaattaggaacagtaaaatccaaagaactatgtaaacaaaaaagcttttgttttgcttacaaagtatatttaaggattattctgctgaagattcagtttaagagttttccttgggagaactaagtaagaaacacaatgccaacagctggccagtaattagtgttgtgcacttcatgtcattaatcaatttctcaatagttcttaaaattagtgagattaaaaatctaaaaattttgcatttcatgctatcagaaacagtattttcttcccaaatcaaaataaaagaaatatgatcagagcttgaacacaggcttatttttaaaataaaaatatttttaacatgggtttccttattgaaaaatcagtgtattagtcataaaacaccatcattaagaataattgaacaataaagtttgctttcagatgcagttttcaaattataatctcatttcaatttataacgttctcagtcctttgttataattttcctttttcatgtaagtttaattatctgcatttatcttttttcctagtttttctaatactaatgttatttcttaaaattcagtgagatataggataaaataatgctttgagaagaatgtttaatagaaaattaaaataactttttctggcnnnnnnnnnnnnnnnnnnnngctgtcgcggccgccactttttttatttattgattgttcttttagaagaagtggaggggtt

SEQ ID NO: 75222 - DNA, 1154 bp, Homo Sapiens
  misc_feature (79)..(113): n is a, c, g, or t
aaagattaagatcacttataggcgctactcgtctcaacgaacgacgagcgcagcgaagtagtgagcgaggaagcggcgnnnnnnnnnnnnnnnnnnnnnnnnnnnnnnnnnnncagtcgacggtaccggacatatgcccgggaattcggccattacggccgggggaggcaagttcctggtgcaaaggtggctctgcagcataatttaggcattggaggagctgtggttgtaacactctacaagatgggttttccggaagccgccagttcttttagaactcatcaaattgaagctgttccaaccagctctgcaagtgatggatttaaggcaaatcttgtttttaaggagattgagaagaaacttgaagaggaaggggaacagtttgtgaagaaaatcggtggtatttttgccttcaaggtgaaagatggccctgggggtaaagaggccacctgggtggtggatgtgaagaatggcaaaggatcagtgcttcctaactcagataagaaggctgactgcacaatcacaatggctgactcagacttcctggctttaatgactggtaaaatgaatcctcagtcggccttctttcaaggcaaattgaaaatcactggcaacatgggtctcgctatgaagttacaaaatcttcagcttcagccaggcaacgctaagctctgaagaactccctttggctacttttgaaaatcaagatgagatatatagatatatatccatacattttattgtcagaatttagactgaaactacacattggcaaatagcgtgggatagatttgtttcttaatgggtgtgaccaatcctgtttttcctatgctctgggtgaatagagcctgatggtatactactgctttgcggaattgcatacaactgtgcattacaaagttaatatgggtaattatgggtctgggggtaaaattgagtttcagaataaaattaggaacagttaaaatcaaaagaactatgtaaaaaaaaaagctttttggtttggcttacaaagtatatttaaagaattattctgcctgaagaattcagtttaagaagtttccttggggagaactaaagtaaggaaacccaatggccaacagctggccagtacttagtggttgtgcacctgctggtccttaatcagttctcct

SEQ ID NO: 75223 - DNA, 1501 bp, Homo Sapiens
  misc_feature (117)..(117): n is a, c, g, or t
  misc_feature (172)..(172): n is a, c, g, or t
  misc_feature (698)..(721): n is a, c, g, or t
ctccgtcttatgctcaccagatagcacctgtctatgtcactgaaccctgtgtatgtccctcgctggcataccaaatcatccgttatgtgtgcatcaagagtttaagatccacgtctnagggcataggaggaaaccaaatacgcgtatattcatagattctaggtgacgagtnatttcttggaccctcatacaacccagacctttgttgacactgaagagaatggaacggttaatgaccagactttccattgcctgcagtccccacagcgaatgaacatcctaaacctggatccttcagttgcattgggatttttctgcaaagaagaaaaagactttgataactggtgtagccttgttcagaaggaaattctaaaggagaatttaaggatgtttgaattagttcagaaacatccatcacactggcctccctttgtacctccagccaagccagaagtgacaaccactggggcagaattcattgactctactgagcaactggaggagtttgatctggaggaagattttgagattctgagtgtgtagaatcctgggaactcaacttgaaggtctgtcttccatctggcaccataaaaacatgaacttattgcataaaacttttctagtcagcaagtgcctgatatgccaatagcatacaaactcaatagcaatcatgactgagccaatcactgtttctcagnnnnnnnnnnnnnnnnnnnnnnnntgacagtaacccttccccggaaagaaatagaacaatcatggagcctaggagcagagagatgaggaggagttcattgcttcccagcttgtgttatatggctacagcaagtcttcagctgctgcaatgaggaaatgggcatctggaagacaaacagcaactctcagcttgcttcaagaaccagcagataagagatggttaagctgttcttcaccctttcagatgtgacctcttttggactaagcagcaatctgttctcttgctcaaataataaagtgactgaatcagggaggaaaaggttcttgttaaattatttgattgtgtagttgaagtaattataatttatatcaaaacgtttgtcaaagaaacgatgtcaaatatacacttcttgatctcccttctgtttgcggggatcttactatttgatgggtcactgtccccattcttactgatacttttgtcagatatcaccctgtccttaaatcatgatcacttaaatcaggggtcagcaaactttttctgtaaagggccagacgggaaatattttgggctttgcaggccatgcggcctctgtcacatctactcaactctgctgttgacatgcaaaagcagcaatagacaatatgcgtgtaaatgagtgtggctgtaatccaagaaaactttatttacaaaagcaggtggagggctgggtttggcctgcaggctgtagcttgccaatcagtgacttaaattgttgatttttgtttgataaattaaaaataaattgtgtttgaagtataccct

SEQ ID NO: 75224 - DNA, 716 bp, Homo Sapiens
cagtatgttagcattttatttgggatttctgcatttatattaaaatgtgcatttaatagctcaataactcaatttgtcttatcagttagcaatatacaaatgcaattatttttaaatcaacaaaaggtaactaaaattaaatctttcagtgatgaatttgagcagagtaagagatctaataacaggttgacataagaaatatttgtctcaaaaatcaatgtatttaatagttgacagttacaaatctcatcattattgttccttcagtaaaatttaaatattcccacagttctcaatcaaatatgctttttcagttttccaacagctgtgatttttcttcttttggtctattcagtagaaagtgaactatctgaagtagaacatcatcattaaaacctttcacatcattatcctcaattgtttcataaagaggcttactttgtgtaccccaacatatatttttacgagggttattttgatcagcttgtgtagtcagtgccaaagtatttagctggtagcagaaaaaggaaaagtattttccatctgtgatcacagcctgggagacaaaaggtcgagtaacatctgcttcactccagaatccttgatacatagcttgtgctccagtccaagcaaaaaggcttgcaatagcattagctctaaaaacaacttctatctgatcagcacagttttgtctcaaaagcctttccccctcgtgc

SEQ ID NO: 75225 - DNA, 768 bp, Homo Sapiens
  misc_feature (48)..(48): n is a, c, g, or t
ccgacgtgtgatgtgactcagcagagcagtgacggctggctgggaggncgtgaggctctcagacggggagcgaggctggtttcctgtgcagcaggtggagttcatttccaacccagaggtccgtgcacagaacctgaaggaagctcatcgagtcaagactgccaaactacagctggtggaacagcaagcctaagtcttctctgagaggagtttcgtgagctgaagaacaagctgctcatggcaagggctggccccagaaccctgcaagagaggccttctgtggatggagaactaggccttctcaaagctcaaggacaaaatccagctaacccagtccctcggcccaggcctcctttcgtgctttgtgcttggtgggggggatttcgagggactttgcactggactctgggaacctttcatcattaaaaaaagggggaccattggggcctgagccaaggaactttccttctactgccttatagtgcttaaacattctccgcctccagggtgcagattcagagctggccagagtttcagtgatagccgtatgttaaacagaatctcacctcagtctcctggagggagatgtttaagaggggttaacacatcagatgggagggtcagcccggtgacctctaaggtatcttctaacctagaaactcaccataattatggtgcaaggtcagtgtgtctctgagatctatgtctgttggtggcaatgtgagggtgatactctctcactctaataaacttggcacttctccgagt

SEQ ID NO: 75226 - DNA, 1134 bp, Homo Sapiens
  misc_feature (69)..(104): n is a, c, g, or t
agtcactataggggtagctcgtctgtagcgaacgacgagcgcagcgaagtagtgagcgaggaagcggcnnnnnnnnnnnnnnnnnnnnnnnnnnnnnnnnnnnncagtcgacggtaccggacatatgcccgggaattcggccattacggccggggggtccgccggatctccagcgctcagtccgcgccgcaggtggtgcttgtctgcagagtcatgacctctttccgcttggccctcatccagcttcagatttcttccatcaaatcagataacgtcactcgcgcttgtagcttcatccgggaggcagcaacgcaaggagccaaaatagtttctttgccggaatgctttaattctccatatggagcgaaatattttcctgaatatgcagagaaaattcctggtgaatccacacagaagctttctgaagtagcaaaggaatgcagcatatatctcattggaggctctatccctgaagaggatgctgggaaattatataacacctgtgctgtgtttgggcctgatggaactttactagcaaagtatagaaagatccatctgtttgacattgatgttcctggaaaaattacatttcaagaatctaaaacattgagtccgggtgatagtttctccacatttgatactccttactgcagagtgggtctgggcatctgctacgacatgcggtttgcagagcttgcacaaatctacgcacagagaggctgccagctgttggtatatccaggagcttttaatctgaccactggaccagcccattgggagttacttcagcgaagccgggctgttgataatcaggtgtatgtggccacagcctctcctgcccgggatgacaaagcctcctatgttgcctggggacacagcaccgtggtgaacccttggggggaggttctagccaaagctggcacagaagaagcaatcgtgtattcagacatagacctgaagaagctggctgaaatacgccagcaaatccccgtttttagacagaagcgatcagacctctatgctgtggagatgaaaaagccctaaagtttatgtttctaatgtgtcacagaataggacgatatgattctacaacataatcaactccctattaaattctttaatgaagaaaaaaaa

SEQ ID NO: 75227 - DNA, 721 bp, Homo Sapiens
gggtatgtgtgtgttggtgttttaaccctagcatccatgaagaaggtaaaatccctacgtgatccttctgccaaaatgtcgaaatcagaccctgacaaactggccaccgtccgaataacagacagcccagaggagatagtgcagaaattcccgcaaggctgtgacagacttcacctcggaggtcacctatgacccggctggccgcgctggcgtgtccaacatagtggcggtgcatgccgcggtgacggggctctccgtggaggaagtggtgcgccgcagcgcgggcatgaacactgctcgctacaagctggccgtggcagatgctgtgattgagaagtttgccccaattaagcgtgaaattgaaaaactgaagctggacaaggaccatttagagaaggttttacaaattggatcagcaaaagccaaagaattagcatacactgtgtgccaggaggtgaagaaattggtgggttttctataggaagtttcaacgaatcacagcaaggcttttgtgccttgcactccatgcattctgataacggcagctttcctaaaaagaaaaagttatagttttgggacatttaatttggtatagctgattattggctttatttgatgaatattgctttgtagctttgaaatacgacagtgttccaaatcccatcaacaaaatgctgtgaacaacaacaacaaaaaataaatcaagaaggcatagcaaaaa

SEQ ID NO: 75228 - DNA, 1810 bp, Homo Sapiens
  misc_feature (1602)..(1621): n is a, c, g, or t
aatgtattaaaaataggatcccatgagaacattatactggaagttacatgtgatacccagctaaagaatacatatcagaatatatccagttgtaaatagccatacccagttgtactacaatgagctttttaaaatcttgaatgaattgagtattctagacagcagcataagaaatatacaaacagtatcctatgaatttagtggttttatgtggatatgccacaaaacacaagtggtatgctttagatctgcacatgtgaatttagcataatcactgggaatttgaaattcttgtcctctgtgataattaggacataacaagattttccatactaaacatcacatgtgtttttcagtatctctgcaatccagtatgcattccaaatgaaatgtgtaacatttaaagtagcatggaacctacgtctttccctactgcttgctggcatatatcagttggtatgaacattgttcttgagctgcctcttaggaaacagaagacagtgtttgaagttttccctgcttctggtttgctgaagattttctagactgcttctggtttgctgaagattttctagaagcactatttacacaaatatgcaaatgtgaaataaccgatctataacgtgaaggaggcagacatgagctgtactactcagtatgcaccacagaataagagtttgccgtgtaaagacaatatccccattcgtcatgctcttattttcccgtgggatatttgcatacaaatgcatgtctgttaccaaaatattgtgtaacacagacagaaaccacctgtttttgtctttccttgtttcccttaatatttcatgaattgtctagcaaaaatggtaggatgcttctgtagttcacaaatgttacatttcagagactttagaggaaaaattattttaaataactgtcaactgtttcattgctttttaaatttttcacgtgcataaccccctttagaagtaaatttttacactattttgttgtttaaaggaggcatttctacttccttgagttttgctgttgccaacctaaaacatttccctttggaacatgagttataagttattacttttcctttacatgtttacacttttataaaaatcagatttttcagtggtctctccagatattaacaagaattgttgtgtaactcaaagatttgcttttatagacttgatttcaaattcttaagttcagcctttccctatcaatcacaaatcatgtattggaaattataaatggcaaccaaaaactggcttttaaaaaatatttttggatatcattgatgtgctgtcacactatatattgagtgactttctgaacaaatttatccagaacatccatagcccaataagcttttgtctaagttgtcatcttacttactcacaaaggaggggaaaacgttattttcatagctgcttttagaaatgtagattgtaacagcctccttggacaacattgtgagtctgttttaacattaatatactcttacaacctaggaatctcctgggaatctatccctaaggaataaaaagcgccagcacttaagattatatgtttactaatgtatattgtattttttggtaaggaccnnnnnnnnnnnnnnnnnnnngaccatcagtaagggaatggatgaataaattgtggtaaaaacataccatggctgaatggtatttccttgaaaagaatgtgtgggaacaaactccaaacttctctaggtcaaatgaggaaagcaagaggggagagagagagtgtatgtgtgtgtgtagcagtttttataaaataaagataaaaccttaaa

SEQ ID NO: 75229 - DNA, 600 bp, Homo Sapiens
  misc_feature (461)..(511): n is a, c, g, or t
atcagagcctcctaagaaatatccagaagtcaagccatggatccacctgcacgtaaagaaaaaaccaaagttaaagaatctgtcagcagagttgagaaggccaaacagaaatcagcccagcaggagctgaagcagagacaaagagcagagatctatgccctcaacagagtcatgacagaactggagcagcagcagtttgatgagttctgtaaacagatgcagcctcctggagaatgaggccccaggttcaaaccagatgggatcctgagagctttgagagggtgttgccagttttaagctgagatggcccatttggagccttacagaactagaccagaagacatttgtggataaatctgaactcacttcctgtgtgtaacttctaacttcactggttcctcccatctgaattggccacatgcttgctgaagagacttgttttcttcttctaagacagtggnnnnnnnnnnnnnnnnnnnnnnnnnnnnnnnnnnnnnnnnnnnnnnnnnnncactttttctattgtttgagaaaaatcagtgtttctcatgaaactctatatcttctccaaaaatacaaataaaatactaataaaatgtt

SEQ ID NO: 75230 - DNA, 317 bp, Homo Sapiens
  misc_feature (105)..(142): n is a, c, g, or t
ttaacattttattagtattttatttgtatttttggagaagatatagagtttcatgagaaacactgatttttctcaaacaatagaaaaagtgttttttgtgtgtgnnnnnnnnnnnnnnnnnnnnnnnnnnnnnnnnnnnnnnccactgtcttagaagaagaaaacaagtctcttcagcaagcatgtggccaattcagatgggaggaaccagtgaagttagaagttacacacaggaagtgagttcagatttatccacaaatgtcttctggtctagttctgtaaggctccaaatgggccatctcagcttaaaactggca

SEQ ID NO: 75231 - DNA, 975 bp, Homo Sapiens
  misc_feature (372)..(372): n is a, c, g, or t
caaaaaaagtagagatgggatctctagcctcctaagttaatttagcctcccaaatgccagacaaagaatctaacataaaatttaccttgaataagatatatgatattgattctgagctgcttggtattttttctgactttggcatctgtatcttggtgctttctgttagactggtagagttctaagaacctaaggagtatgcattgtacttcagtgctaactttttccttcatttactttctgtgtatataggcagcatattttttgtgtagaacattaacccagattgctaatagcttcatgttacggcattcttccacacagtccagagtgatttaaggaaaagcagaaatggaagtcaaagtgtgttantaatttgagactgaaaaacatgctttaaaaaatagatttaatttcttacactgtgaatagccattgtattgttttgtttctgataaatcagttgttttgggcccctatttgtgaactgttaaaaaattttgatgcttttcgtggataaaagtagtgcctctctttatacaactgatggggttttaaaaagtgtaaattgccttttttgttaaacttattttaaatgctttagtatttaaaaggtgtatgttattaattaatctgcatatttgtaacgcaaataactacttcctgatttacatctcaatatattcttctttcatttgcccaatttaaaaaatacgtagtctctattgttgctgtttactaatagttttagatcccaatgtgtattagaattatagctacaaaaagttgcaagtaaaatttagcaatttcctattcaaacaggatctcattagtatgttttttaatgtgtagaattaacactttaaaataaacaggtgtgaaaattataaaggaatatatatgacaattattttctgtacattaatgtctaaacattatacttactttttcataataaaggaaattttggaacca

SEQ ID NO: 75232 - DNA, 813 bp, Homo Sapiens
  misc_feature (742)..(761): n is a, c, g, or t
  misc_feature (786)..(799): n is a, c, g, or t
actatcggcttagtgtacgaggcatgggttgtgaattcggcacgagggtcgggagcacagtcgggagagggacaggtagagagagagagaaagggagcgggacagggggaccgagatcgggatagggaaaggaccgagaacgaggcagggaaagggatcgcagggacaccaagcgccacagcagaagccggagtcggagcacacctgtgcgggaccggggtgggcgccgctagctgggaaaacactagagctgcaggtaccagccactcggccccagggggttatggccacagagggataggcacagtctccaccaccctggagccaagggtctttcacatcacctatccctacatacataccaaatggaaaagtggccatccttttccccccaaacacacccccttaacctatctcttgggacttagcccgaccctccctctcatttcccattaagtctgagaggcaagagctaggttaggcaaggaggtggttggccagagatggggaacagccaggtgccccagtcctctgatttttcctccatcctgcttaccacctccctgggtacttacagccttctcttgggaacagccggggccaggactgggtcacctatgagctgaatcagcatctcctcctgagtcccagggcccctgcagttcccagtctcttctgtcctgcagcccttgcctctttcccacaggttccactttatatccaccttttccttttgttcaannnnnnnnnnnnnnnnnnnnattattaaatgatgtggtctatggnnnnnnnnnnnnnntctgacttagtttt

SEQ ID NO: 75233 - DNA, 886 bp, Homo Sapiens
ccccatcggtcctaagtagcgaggcctgggtggcgaaaccggcacgagggccatgctggtcttggtggtttcgccgtggtctgcggcccggggagtgcttcgaaactactgggagcgactgctacggaagcttccgcagagccggccgggctttcccagtcctccgtggggaccagcattagcagtacagggcccagccatgtttacagagccagcaaatgataccagtggaagtaaagagaattccagccttttggacagtatcttttggatggcagctcccaaaaatagacgcaccattgaagttaaccggtgtaggagaagaaatccgcagaagcttattaaagttaagaacaacatagacgtttgtcctgaatgtggtcacctgaaacagaaacatgtcctttgtgcctactgctatgaaaaggtgtgcaaggagactgcagaaatcagacgacagatagggaagcaagaagggggcccttttaaggctcccaccatagagactgtggtgctgtacacaggagagacaccgtctgaacaagatcagggcaagaggatcattgaacgagacagaaagcgaccatcctggttcacccagaattgacaccaaagatgttaaaaggataacttcacagtaaatcatttctcctgaaatagaggaagattctttacgttgttgtgcttgtttttaaatcatcagtatagtttaacacattctttctaagcagttttgtgtgggataatttgaagaatatattatgagtaaactccgaaaattttgtttatccaaaggctcaatggattatgtttctattatatacaaggttttaagtaaacataaaatttccagaacaaaaataaaaaatttaaaattcatagcaaa

SEQ ID NO: 75234 - DNA, 819 bp, Homo Sapiens
gggtttccagcagggaaaatggcgctggccatgctggtcttggtggtttcgccgtggtctgcggcccggggagtgcttcgaaactactgggagcgactgctacggaagcttccgcagagccggccgggctttcccagtcctccgtggggaccagcattagcagtacagggcccagccatgtttacagagccagcaaatgataccagtggaagtaaagagaattccagccttttggacagtatcttttggatggcagctcccaaaaatagacgcaccattgaagttaaccggtgtaggagaagaaatccgcagaagcttattaaagttaagaacaacatagacgtttgtcctgaatgtggtcacctgaaacagaaacatgtcctttgtgcctactgctatgaaaaggtgtgcaaggagactgcagaaatcagacgacagatagggaagcaagaagggggcccttttaacgctcccaccatagagactgtggtgctgtacacagggagagacacccgtctgaacaagatcagggcaagaggatcatttgaacgagacagaaagcgaccatcctgggtcaccccagaattgacaccaaagatgttaaaaaggataacttcacagtaaattcattttctcctggaaatagaggaaaaattcctttacggtgcctgcggcttggtttttaaatcatcacccataaggttaacccctttctttcctagccagttttggtgtggggataattttgaaaaaattatattattgagttaaactcccgagaaattttggttttatcccacaaggttccattggaattat

SEQ ID NO: 75235 - DNA, 730 bp, Homo Sapiens
aaatttggctgtatgctgaatatataccacatttatttaaagcaataatattagaagtgcaaagatgtatcattataaaacatcattttttataatggtttactattttcacagtggtttcttatctgttagactacatattgacaataatactgtgcaagtatgttgaatagtgctatgcaggtacgttgaatttatcttagagctacataatatatttttcagcattatatgactagatggctagtaagtgacaaaggcagaactagaacctggactacattatcccagaacatcctgaaaaataaacaaaatatatgaaatagaggccaaagcccaacccaggaaaatataataaataaatatattaattaaatttgtctatatttatttttgattcagtgagttgcctaaatgttttctatttctaaattaaaatctaaatttcatttatatttattatcataaagtacttctacatcactctatccacatatataggaatctgggtttcagcccaaaccctaattaacctcatcagagaagggcgtaggtctaaagcttagaaacctggagaattgcctctcacagctgggaatagggcaaagaagttcacccaacagtcataccctgaatgaatggttagtaaagcctaacaagagatgtctaagagatactgaaatctattaagtatatatttatttccttcaacttgaaggaatacaagcat

SEQ ID NO: 75236 - DNA, 700 bp, Homo Sapiens
tgttgagcatcgccctatacctcctctcagggagcatcattgctgtagccatgcagagaggggcacggctgccagcggaggttgcaggcattctgtggacaccctcctgcggctctgtgcctggggcttggcctcatggcccctggcgaggggcatacatgtggcgggaatcctgagcctgctcctgggaactgcctacagcttctacctcttccaccctctggcttacgggatggttggtcccctggcccaggacccccaaagtccaatggcaggactaaggtggctggactcatgggacttttgaggccactgcaaagattccagcctgggtccaggaacttcccaggagagccagctgggaagcagtactggaccatccggccatgaggaagctgcctaaggagcccgaagaattctgctgctcaccaggacccagctctgggagtgcagctggaatggaacccagcattggagagagccgggagagagccgcagctccgtccacagcaccacggagaggacagcgcctcttgggctgctccctcgtgcacagcgcaggggaggatgggtgccagagggtgggagtgggtgcgcgtgtgtgtatgtgagggcatgttgtccatatccctgtggaatacagaccgtgtaactggacagctgagtgtcataaactctaaaatagtccaggctataaaaa

SEQ ID NO: 75237 - DNA, 1305 bp, Homo Sapiens
gctagaaggacggggattatatcggcacgaggcgtaaccggaaattaggaaaccggatcaaagtgctgagaagtcgaattcgcttcatccatttggtcacaggttgtgtcctgggctcctcgggaaaggttctgcccaagtggggctgggagcagttggaagttacttgcaccccatacctgaaagaaaccctcaactccatctggaatgtggaggaccatatcaatcccaagctgccaaacatcagcctggtatgtgctacagcccagtttgcctgagatcttgctggaatcccacatggtcatgatccgggggcaacagctggcctcaaacccaaggacaattgagttcacgtccaaaccctggcactggcctatcaactatcagggtcctacgcttctcaggggtcaatgacacagatttccgagtctatctgcttggcaacccggtggtttggtggctgaatctgttgagcatcgccctctacctcctctcagggagcatcattgctgtagccatgcagagaggggcacggctgccagcggaggttgcagggttgtcccaggtcctgcttcgaggaggcggccaggtcctgctcggctggacactccattacttcccgtttttcctgatgggccgggtcctctactcccaccactacttccaagccatgctcttctcaagcatgttgacaggcatcatgtcggacaccctcttcaggctctgtgcctggtgcttggcctcatggccataggcgaggggcatacatgtgtcggaaatcctgagcctgctcctgggaactgcatacagcttctacctcttccaccatctggattacgggatggttggtcccctggcccaggacccccaaagtccaatggcaggactaaggtggctgtactcatgggacttttgaggccactgcaaagattccagcgtgggtccaggaacttcccaggagagccagctgggaagcagtactggaccatccggccatgaggaagctgcctaaggagcccgaagaattctgctgctcaccaggacccagctctgggagtgcagctggaatggaacccagcattggagagagccggtagagagccgcagctccgtccacagcaccacggagaggacagcgcctcttgggctgctccctcgtgcacagcgcaggggaggatgggtgccagagggtgggagtgggtgcgcgtgtgtgtatgtgagggcatgttgtccatatccctgtggaatacagaccgtgtaaatggacacctgagtgtcataaactctaaaatagtactggctaat

SEQ ID NO: 75238 - DNA, 384 bp, Homo Sapiens
  misc_feature (41)..(41): n is a, c, g, or t
  misc_feature (71)..(71): n is a, c, g, or t
ttaaccctgcggattgaggtcgtaaacagaaaatttggaanccgatcaaagtgctgagaagtcgattcgcnttcatccatttggtcacaggttgtgtcctgggctcctcgggaaaggttctgcccaagtggggctgggagcagttggaagttacttgcaccccatacctgaaagaaaccctcaactccatctggaatgtggaggcgagatcccggcgccgtgctcagaaccctgtgaaggtgtcctggcttgacgggagcgagaatccgccgcctgtccagcctcccagccctacacactgtctccccgtctgcctcccagctggtcttggacccctgacacggcccccagcctgcgtggccctgctgcagttttcttccccag

SEQ ID NO: 75239 - DNA, 976 bp, Homo Sapiens
  misc_feature (127)..(127): n is a, c, g, or t
  misc_feature (655)..(664): n is a, c, g, or t
tccccttcaggcccagcgatctcatcgttgcgcctggacggcgatgagcacatcagccggaacaacggctgtctggttgtgctcccaggcacacacaagggctccctgaagccccacgattaccccnaagtgggaggggggagttaacaaaatgttccacgggatccaggactacgaggaaaacaaggcccgggtgcacctggtgatggagaagggcgacactgttttcttccatcctttgctcatccacggatctggtcagaataaaacccagggattccggaaggcaatttcctgccatttcgccagtgccgattgccactacattgacgtgaagggcaccagtcaagaaaacatcgagaaggaagttgtaggaatagcacataaattctttggagctgaaaatagcgtgaacttgaaggatatttggatgtttcgagctcgacttgtgaaaggagaaagaaccaatctttgaaatagccatctgctataactctttcaacagaaaaccaaaaccaaacgaaatgtctaaggaaaatgttttcttaatgagatgatgtaaccttttctatcacttgttaaaagcagaaaacatgtatcaggtacttaattgcatagagttagttttgcagcacaatggtgttgctttaatggnnnnnnnnnncagtaaaagtgaaatattactgttttaaggaaaactaatttagggtggcagccaataaaggtggttggtgtctaatttaagtgttaaatcaatttctttcattcagttagctctttacccaagaagaagtgaatgatttggagcttagggtatgttttgtatcccctttctgataaacccattccctaccaattttatgtcataagagatttttttcccccaaatctagaacaatgtataatacattcacatctagtcaagggcataggaacggtgtcatggagtccaaataaagtggatattcctgctcgg

SEQ ID NO: 75240 - DNA, 1012 bp, Homo Sapiens
agcaatattgtgcaactggtgcagtggtgattttgttttcaaatgctccttgtgaaaacacctagtgttgtagaaaggaaagtggccagaaagaacaacttgggaccatgagtaggtcattaaatagcttagtgatttatcctcatatagggcttataaaccctgtatgtgtttatatgtgcttcacagagttcgtgtcaggctcaaaggagatatgtataagaaagtggtttgtaaattatgttccatttcataaatagacactattcacaaactaaaatctaataaaaaaccacagttgtaatttaaactgcttgatataaaaagaggtatcatagcagggaaaacacactaattttcatacagtagaggtattgaaaactgaaaatgggaaggcaacttgaagtcattgtatttgattgaaaatgtttaatacatctcattattgacaaaatatgtcatcttgtatttatttcaaggaaaccaatgaattctaggtagtatattacaagttggtcaaaatattccatgtacaaatagggcttctgtgtccatagccttgtaagagatactgattgtatctgaaattattttttaaaaaaataaattatcctgctttagtgtgttaaaagtagacgatgttctaatataacactgaagtgcttcattgtatcccaacagtttaccttcaagtaatattatctttatttttaggctaagcacgtttgattattttgtctgtctcctatatagatctgttttgtctagtgctatgaatgtaacttaaaactataaacttgaagtttttattctatatgccccttaatagactgtggttcctgacgcacactgttaggtcattattttgttgtaccaaagttctagtggcttcagaaatcatagcatccaatgattttttggtgtctggctatgaatactatggttgagaattgtattcagtgattgtttctgcacacttttcaaataaaaaatgaatttttatcaattaaaa

SEQ ID NO: 75241 - DNA, 873 bp, Homo Sapiens
gaaggattccacttcagcccccagcacagactcaatggagctcagctagtcccctcagcaccaaggtgggccctcgcttaagagaaaggagcccacccaagtccgaggcctccccatcccaccatcgcaggtctctacttttgcccttccaccatctcactgggggccctgtcgctcctggtcagggcttacagtgccttctccagggacccaactcaaaggcccccagcccaagctgtgaggctgccaacagttgggccccttccttaactcaggacagtcatccaaagaaatagggtgaggaagttttccagtgacttcacactgtacccctccatagtctgtctggttccttcagagggtgtctctgcctcacaaactagtagtatttagaaataggctgtgctgtcagctgtaaaagatcaggaggcagcagacaccactctggtttcttcactgcattcagcaatgcctgaagttagtgctcaggccgggcatctcaaaagaaaagatacttgagttattcacattttaaaattcaaaacggttcatttttaagtggcagtgatgaatcagaaatttggaagatgatacgggtttcttttttccagggaggaggaatgggttgggtagggaactggacaggcttggacctcatgtttcatttctaatttcaaaatacttattagcaaattgggcaacaatgggcatcttccatgccaccacccaggcataaccagttggtttgtttccttctgaggaaggtttcaaatgtgtctagtgttcagtattgaggacaaagaaatacaagtggcaggcccaagtattttctgtgatatcccaggttaataaagattagattctaagttaaaa

SEQ ID NO: 75242 - DNA, 1351 bp, Homo Sapiens
  misc_feature (85)..(85): n is a, c, g, or t
  misc_feature (94)..(94): n is a, c, g, or t
aaggagcgaggcctgggtggcgaattcggcacgaggctattcttgttgcctgtcagatgccaaactctgtgttgctgcagggttntgaactttntggaaaccaattaaaatgtgcctttggtgggcggggtcaagagcccctggatgtcgacctctcccgctgtgtggcgtccccctcccacctgttgaatacatagggatggctctctcagggccctgggaatgggaatggacagcactgctgtgggctgttcccctcccctaaagttaatctcttggtctggccaagttgctgctccctcaaccttcctgctgtcttcccctccctcaaccccaataggaggatcccaggataaacactgctgggcaggcgggcaggcaggcctggggctgccctgctcactctcattgtctggcctcaggacttagccatactagaccagtcagcttgcctggaagagggaggtcccactatgcctttgggagacacctatacttaggaaaaagcctttgttgtcctcccatccatccattaagctgctatctcagcctgtcccttctgccccaggggcttgcctggcttggctgcagtgcactttgaaatgaagtatctgtcctttggcccagcccctggtttgcttgtagaaaacatggtaggcttccccaaggcatctgcagggaactttggcagcttggggcaccctgaattagcaaaaatggggggtgatgaggtgctgaagaaggatacttaacagcttagtgaggaggcaagagctcctctgggaccaccacttcttcaggagagggcctgtgggcttgcttttggaaggcctcaggcagacacgtgccctctgggtgatgtctgtctgctgccaggatggagcagaggagcgccacacatggaggaaagcccctgtaacgttacctaccttaaactccactcatcaaatctgagaaaagtatccactggtccccagggtttcagtcatgcttttgggggtcattgggtattagagaagtaagtatcttttctgagagagggggagtcaccccccctactggggattcctctgggctttattcactcccagccctggccctgacctttgtgggcctccctaatgcccagggcatggatggcttcagaggagtttttgaatcgaagcccagggtccttgttgatgtttcttctcctagccacacttggaggaaagttgcaggtgggttgggcagggagcaggcatggttctgctttgctgtttgtcttcctagttaaggctctttataaagagcttgttcttcatgttttaagcactttatgaagaataaaacattcatgtactgccaaaaa

SEQ ID NO: 75243 - DNA, 1174 bp, Homo Sapiens
ccaggctggtaccggtccggaattcccgggatatcgtcgaccccgcgtccgggcgaagaggggcgcaagctcattgcgttttgagtctcgggacccctgttggagagactatggcgctcaacaagaatcactcggagggcggcggagtgatcgtcaataacaccgagagcatcctaatgtcctatgatcacgtggaactcacattcaatgacatgaagaacgtgccagaagccttcaaagggaccaagaaaggcactgtctaccttaccccttaccgggtcatctttctgtccaagggcaaggatgccatgcagtccttcatgatgccattttatctcatgaaagactgtgagatcaagcagcccgtatttggtgcaaactacatcaagggaacagtgaaggcggaagcgggaggtggctgggaaggctctgcttcctacaagttgactttcacggcagggggcgccattgagttcggacagcggatgctccaggtggcatctcaagcctccagaggtgaagtccccagtggagcctatggctactcttacatgcccagcggggcctatgtctatcccccgccagtcgccaatggaatgtacccctgccctcctggctacccctatccaccgcccccacctgagttctatccaggaccccccatgatggacggggccatgggatacgtgcagcccccaccaccgccctaccctgggcccatggaacctccggtcagcggccccgatgtcccctccactcctgcagccgaagccaaggccgcagaagcagccgccagcgcctattacaacccaggcaatcctcacaacgtctacatgcccacgagccagccgccgccacctccctactacccaccggaagataagaagacccagtaggccctcctgcctccctgcctcccaccctcatctctctaccctacccctccccatcggggcctgtgctggggcttggggggaaggggaaaggggccccccttggttctcccttcccaggtcttggatcctaaaccaaattaaccaggaaacctagcctttgggggggaacattaaggcgccccccgggccctccggggagaagggtggccggcccccaagtttttcccatggggccagccccggggaagcccacacaggtggcgttggccccaaggggc

SEQ ID NO: 75244 - DNA, 2117 bp, Homo Sapiens
  misc_feature (836)..(836): n is a, c, g, or t
  misc_feature (1891)..(1985): n is a, c, g, or t
tactaatacgccggccctttaagggccgcacaggtcctaagtagcgaggcctgggtggcgaattcggcacgaggaatactcggagggcggcggagtgatcgtcaataacaccgagagcatcctaatgtcctatgatcacgtggaactcacattcaatgacatgaagaacgtgccagaagccttcaaagggaccaagaaaggcactgtctaccttaccccttaccgggtcatctttctgtccaagggcaaggatgccatgcagtccttcatgatgccattttatctcatgaaagactgtgagatcaagcagcccgtatttggtgcaaactacatcaagggaacagtgaaggcggaagcgggaggtggctgggaaggctctgcttcctacaagttgactttcacggcagggggcgccattgagttcggacagcggatgctccaggtggcatctcaagcctccagaggtgaagtccccagtggagcctatggctactcttacatgcccagcggggcctatgtctatcccccgccagtcgccaatggaatgtacccctgccctcctggctacccctatccaccgcccccacctgagttctatccaggaccccccatgatggacggggccatgggatacgtgcagcccccaccaccgccctaccctgggcccatggaacctccgggcagcgggcccccgatgtcccctccactcctgcagccgaagccaaggcagcagaagcagccgccagcgcctattacaacccagtgcaatcctcacaacgtctacatgcccacgagccagccgccgccacctccctactaaccaccgggaagataangaagacccagtaaggccctcctgcctccctgcctcccaccctcatctctctaccctacccctcccatcggggctgtgctggggcttggggaggggagggggcgccttgttctccctccaggtctgatcataaacaattaccaggaactagcattgtgggacattagggcccccggcctcgggagaggtgccgcccagcttcccatgccagcccggagcccacagtgctgcccagcgtacctccctcaccgtctggggctcttctgggagcacggagcatcccctgttcctgtttcactctcagcttctcccctcgaagggactctctggccacctcctccaccgcagtccagctccctcagtctggcacccactgctacactcagcctcatgagccacttcagaccagccaggtgtcttcccgggccctgccagaccctgctcacattccctctgctggtctgtgctggtctcagaaggccaccgcgcccgcattccactcagccagggtccagctgcagcccccgccacccttccttcccttccctgtcctgggtcatgttgttgccaccctgtgtgacttttgaagctgtaaaatgagcttccagggcttgggtggcgtcggggcagggccgccgaggctgggaggaagcccttctgccttttgctggtgtttctggaatttgctttccctcacctctcacttccttctagaaggagcttcctgactggaaccagagaatgcatgtctgtccacttggtggctgctgggtggggccgggaacaagggcccctgaccctgtgtgctggccgggacctgccaccagccccccagcctgcttcttccccttaagctttgtgcccctggatgcgctaacattcactcttgtttgtccctggactggccatgaagtgaggagatggttatttaaagagaattccctatttatttgacaaaaaatccagttaatatattaatgtgaaataaaccctgtttgcacctcgatttgtttgctgaaaatgtgaaatagtaaaaatgaaataactggacccttnnnnnnnnnnnnnnnnnnnnnnnnnnnnnnnnnnnnnnnnnnnnnnnnnnnnnnnnnnnnnnnnnnnnnnnnnnnnnnnnnnnnnnnnnnnnnnntttgggggcccccccggcccccaaaaaattttctaaaccattcttttggccccggggcccaaaaggaaagggaacagggccaaacttgttcccaagaaaacccgggccagaaaaagggctggaattcccccc

SEQ ID NO: 75245 - DNA, 800 bp, Homo Sapiens
gaaaatattgtaaacctagtggcttataaacaacagaaatcagtttcagttttggaggctggaagcccaagatgaaagcaccagtagatgcaacctcttttgtaagggtgatggtcccatgatgaggctgtgcccctgccctgtgaccggatgacctcccaaatgccccacctaataccatccccttgcaggtgaggacttaagcaggtgggttttggggggacgtgctcaggccacagcagggtgcatgaagagccagtgagcctcattgagcccctctggtcagccagatctgacattgagcccagcattgaagatcaaagcaggtggggctttgggatgtgaagtgggttctgacgcggggccccacagacctgtctccgcgtgagctgcctgcaggcccctgcgtcattcctcagctgcgtgcgaggcctctggcttggagagcctccccgctgtgcacagttctctctttgccagggcagggcttggggcagcaccaggctggggcagaggaggaaagcaagaggacagacctccagaagagcagcggagggcgggtgaggatttccccatataccagtgtgtgttcatctacccatgaggaataaaaccatgcagcagcatgcaaatggtgtcctggtgttcgcagcagaactgctcatggtaatggataagttgttttcatacagtgggttgtcaatatgtttaataattgttggtatctattaataagggcaatatattcatatggtggattatttggctattaaaatggaatgaagttattttaaaaaaaa

SEQ ID NO: 75246 - DNA, 455 bp, Homo Sapiens
aagctcgagtccatcgatggtgcccggtccatgccctcctgatcccaagctgtcctggggccctgaccgacctggccagcagtggctccctggcccgtatcctgcagcacttcactctgaagagcaaacccatctgcgccgtcggccacggtgtcgctgccctgtgctgtgccaccaacgaggacagatcctgggtgttcgacagctacagcctgacagggccctctgtgtgtgagctcgtcagggcccccggcttcgcccgcctgccgctcgtggtggaggacttcgtgaaggattcgggcgcctgcttcagtgggcttggggcagcaccaggctggggcagaggaggaaagcaagaggacagacctccagaagagcagcgcagggcgggtgaggatttccccatataccagtgtgtgttcatctacccatgaggaataaaaccatgcagcagc

SEQ ID NO: 75247 - DNA, 1207 bp, Homo Sapiens
  misc_feature (714)..(731): n is a, c, g, or t
  misc_feature (749)..(1151): n is a, c, g, or t
  misc_feature (1156)..(1156): n is a, c, g, or t
  misc_feature (1159)..(1159): n is a, c, g, or t
cttttgaagaacaggtttctctctgtccttgactcttgggtctgtgggccatggcatgagtgttttctagtagtagattggagggaaagctttgtgacacttagtactgtgtttttaagaagaaataatttggttccagatgtgttagaggatcttttgtactgaggtttttaacactttacttgggtttaccaagcctcaactggacagaccataaacagtccacaggcaccgttcctgccaggccccaacccacagggagtctctccgcagagccttcttggtgttgccctaacttgccagtggcctttgctcagagcctcctcctgtgacatgtgaacaatgaagaggcctgcgcctcctgccttgccgcctgcaaagcaaagaaactgccttttattttttaaccttaaaaagtagccagatagtaacaagactggctggctgatgagcaaagcctttgctctcacgcagaggaaggcttggatgtacaatgaaactgcctggaactaaaagcagtgaagcaagggaggcaatcacactgaagcgggtcttcctccaggaacggggtcccacaggcgtgttgttttaaataacctgatgctgtgtgcatgatgctggtgcttgaccatgaaaggaaagtctcatccttaaaatgtgttgtacttcacaatcctggactgttgcttcaagtaaacaatatccacattttgnnnnnnnnnnnnnnnnnncctcgtgccgaattcttnnnnnnnnnnnnnnnnnnnnnnnnnnnnnnnnnnnnnnnnnnnnnnnnnnnnnnnnnnnnnnnnnnnnnnnnnnnnnnnnnnnnnnnnnnnnnnnnnnnnnnnnnnnnnnnnnnnnnnnnnnnnnnnnnnnnnnnnnnnnnnnnnnnnnnnnnnnnnnnnnnnnnnnnnnnnnnnnnnnnnnnnnnnnnnnnnnnnnnnnnnnnnnnnnnnnnnnnnnnnnnnnnnnnnnnnnnnnnnnnnnnnnnnnnnnnnnnnnnnnnnnnnnnnnnnnnnnnnnnnnnnnnnnnnnnnnnnnnnnnnnnnnnnnnnnnnnnnnnnnnnnnnnnnnnnnnnnnnnnnnnnnnnnnnnnnnnnnnnnnnnnnnnnnnnnnnnnnnnnnnnnnnnnnnnnnnnnnnnnnnnnggcancanaggggcagacgtaaaggcccgtgctgggttttcataagctcgcccctg

SEQ ID NO: 75248 - DNA, 610 bp, Homo Sapiens
gggtgcacccacaggacctccacacttgggagtaccatcatcacagtcagccctgggggtggggggtggtgggcagggatgggacgcaaccacacagaactgtgattgtggatcaggaggggaatgtcaggattcgcaaaaatggacttttcatttgtcaagtattgggacttgtgatttttaattatccagcatatagaatgagagggagggcagccttctgccacctgtgtcgcctccactggcagtcacgccaccagagccaccctggctccctctcctccctgagcacctgctgctgcgattttaaagggaactgtactactcgcagtgataggtttgcagagtgtgtgcttggctgtggcagcctagcttggagaagctgctgttggtgcaagggagatggtctcaagtcagagggaagcagagacgcgcgtctcaagcctgcccttcctagacggccacctgcaggaccccacactcactgcactggcagcgtgcactggcgtatttgtaacaggcttctcggtgctcctcacccgtgtgctgttttccaaacaccacctttttgcctcaaggtctctgtaaatgaaataaactgtaatttact

SEQ ID NO: 75249 - DNA, 653 bp, Homo Sapiens
cacagtaccagcccggggatcagacatagcctgtccgggcatcaaccctctctggcggtgaccaccagtccttgccaatccccagagctgttcttccaaagcccccaggctggcttagaaccccatagagtcctagcatcaccgaggacgtggctgctctgacaccacctagggcaacctacttgttttacagatggggcaaaaggaggcccagagctgatctctcatccgctctggccccaagcactatttcttccttttccacttaggcccctacatgcctgtagcctttctcactccatccccacccaaagtgctcagaccttgtctagttatttataaaactgtatgtacctccctcacttctctcctatcactgctttcctactctccttttatctcactctagtccaggtgccaagaatttcccttctaccctctattctcttgtgtctgtaagttacaaagtcaggaaaagtcttggctggacccctttcctgctgggtggatgcagtggtccaggactggggtctgggcccaggtttgagggagaaggttgcagagcacttcccacctctctgaatagtgtgtatgtgttggtttattgattctgtaaataagtaaaatgacaatatgaatcctcaaaccatgaa

SEQ ID NO: 75250 - DNA, 1051 bp, Homo Sapiens
  misc_feature (38)..(38): n is a, c, g, or t
  misc_feature (125)..(126): n is a, c, g, or t
  misc_feature (143)..(143): n is a, c, g, or t
  misc_feature (149)..(149): n is a, c, g, or t
  misc_feature (174)..(174): n is a, c, g, or t
  misc_feature (179)..(179): n is a, c, g, or t
  misc_feature (274)..(274): n is a, c, g, or t
ggcaagatcgcagaggatctcaattttcaagatctttncaggcgtctgcccaggatgacacagcagacagacatgtgagcgacagagcggggcagccacagaggcatgtctccgcagcagtggcnntgtggagttgagagccngtcacntgcctcgctgtgcctgtgatggctncaggntagatgcggacattcacaccaacacgtgccggtagcctcccatgcatcttgctccacgggctagaggacaggaactacgccgacagcttcctgcncaggctgaaggtgtacaagctgaagcacaagcatggccttgtggagcgggcgatggatgactacagtgtgatcggccgctccctgttcaaaaaggaaaccaacatccagctcttcgtggggctcaaggtgcacttgtccactggggaactgggcatcatcgacagtccttcggccagagcggcaagttcaagatccacatcccaggtgcctcagccccgagtccaagaagatcctgacacccgccctcaagaagcgggcccgggctggccgtggggaggccaccaggcaggaggagagcgccgagcggagcgagccctcacagcatgtggtgctcagcctgactttcaagcgttatgtcttcgacacccacaagcgcatggttcagtctccctgagtgtccggtgacctcccccagggcctccttgcccagcccagtccaggctgctgtgccaaatcccaaccagccacgcctcagcctctcccagtctctccctgcagtcctgcagcagcagcccccacccccaagcttggtgctgagccctggtgaggagctgagggggatgggttgctggggccaggagggtctctcctccagcccctgcacactcccacccaggacagcccccagcccaactaggaaagggccatgggcagagggctggtagccagtatcttccactgccccatctgttggccacctgcaggccagtctcaaccctcccccaaggtgggcaggcacttgatggctacaaataaatgtcccgtggccccagccc

SEQ ID NO: 75251 - DNA, 1086 bp, Homo Sapiens
  misc_feature (890)..(890): n is a, c, g, or t
cgccaaacctctatggatatataaagggaagcttgaggaggaatttcacagttacagtgcagaagcagaggcaaaagaattaaccagctcttcagtcaagcaaatcctctactcaccatgcttcctcctgccattcatttctatctccttccccttgcatgcatcctaatgaaaagctgtttggcttttaaaaatgatgccacagaaatcctttattcacatgtggttaaacctgttccagcacaccccagcagcaacagcacgttgaatcaagccagaaatggaggcaggcatttcagtaacactggactggatcggaacactcgggttcaagtgggttgccgggaactgcgttccaccaaatacatctctgatggccagtgcaccagcatcagccctctgaaggagctggtgtgtgctggcgagtgcttgcccctgccagtgctccctaactggattggaggaggctatggaacaaagtactggagcaggaggagctcccaggagtggcggtgtgtcaatgacaaaacccgtacccagagaatccagctgcagtgccaagatggcagcacacgcacctacaaaatcacagtagtcactgcctgcaagtgcaagaggtacacccggcagcacaacgagtccagtcacaactttgagagcatgtcacctgccaagccagtccagcatcacagagagcggaaaagagccagcaaatccagcaagcacagcatgagttagaactcagactcccataactagacttactagtaaccatctgctttacagatttgattgcttgggaagactcaagcctgccactgctgttttctcacttgaaagtatatgctttctgctttgatcaaaacccagcaagctgtccttaagtatcnaggaaccttctttgggaatagttttttccttttccaggttttgtcaagaatgtccgtatatccctgaattgcaattggcgtttaaattccaggtatcctgtagattaagtcctcattggtcttacagactggtggctctataaacgtcagtgaacacctatactttaaacaacaaaggggttctaagagaacgctg

SEQ ID NO: 75252 - DNA, 514 bp, Homo Sapiens
gggggagcagtcagaacaacccaacgtttattgactaagtttacctcttacatgggtgcagttcatggtgtcccaaaacaatgacaatagtaacatccaagatcactgatcacaaatcaccataacagatatgataatgaaaatgtttgaaacattgtgagaattaccaaaatgtgacacagagacataaagtgagcacatgctgttggaaaaatggcattgatagacttgacagggttgccacaaaccttccatttgtacaaaggcaatattcgtgaagcgtaataaagcgaagcatgataaagtgagatatgcctgcaactgaaaaacattccttctcctttcgagtctatagctcatggtaaggagagggtatgggagccaagggtgagtttcatcttagctcagtgttaggctctggtctgaatcgcagcttcatcactgtgatgctactcaccctatggctctgagaagctaaggttcctgagtactaaaagtaaaataaaaataacaa

SEQ ID NO: 75253 - DNA, 1556 bp, Homo Sapiens
gagtatgaagtcgacgggcgcgccgattcggcacgaggcgagaaccgcgcttccgcttctggtcgcagagacctcggagaccgcgccggggagacggaggtgctgtgggtgggggggacctgtggctgctcgtaccgccccccaccctcctcttctgcactgccgtcctccggaagaccttttcccctgctctgtttccttcaccgagtctgtgcatcgccccggacctggccgggaggaggcttggccggcgggagatgctctaggggcggcgcgggaggagcggccggcgggacggagggcccggcaggaagatgggctcccgtggacagggactcttgctggcgtactgcctgctccttgcctttgcctctggcctggtcctgagtcgcgtgccccatgtccagggggaacagcaggagtgggaggggactgaggagctgccgtcccctccggaccatgccgagagggctgaagaacaacatgaaaaatacaggcccagtcaggaccaggggctccctgcttcccggtgcttgcgctgctgtgaccccggtacctccatgtacccggcgaccgccgtgccccagatcaacatcactatcttgaaaggggagaagggtgaccgcggagatcgaggcctccaagggaaatatggcaaaacaggctcagcaggggccaggggccacactggacccaaagggcagaagggctccatgggggcccctggggagcggtgcaagagccactacgccgccttttcggtgggccggaagaagcccatgcacagcaaccactactaccagacggtgatcttcgacacggagttcgtgaacctctacgaccacttcaacatgttcaccggcaagttctactgctacgtgcccggcctctacttcttcagcctcaacgtgcacacctggaaccagaaggagacctacctgcacatcatgaagaacgaggaggaggtggtgatcttgttcgcgcaggtgggcgaccgcagcatcatgcaaagccagagcctgatgctggagctgcgagagcaggaccaggtgtgggtacgcctctacaagggcgaacgtgagaacgccatcttcagcgaggagctggacacctacatcaccttcagtggctacctggtcaagcacgccaccgagccctagctggccggccacctcctttcctctcgccaccttccacccctgcgctgtgctgaccccaccgcctcttccccgatccctggactccgactccctggctttggcattcagtgagacgccctgcacacacagaaagccaaagcgatcggtgctcccagatcccgcagcctctggagagagctgacggcagatgaaatcaccagggcggggcacccgcgagaaccctctgggaccttccgcggccctctctgcacacatcctcaagtgaccccgcacggcgagacgcgggtggcggcagggcgtcccagggtgcggcaccgcggctccagtccttggaaataattaggcaaattctaaaggtctcaaaaggagcaaagtaaaccgtggaggacaaagaaa

SEQ ID NO: 75254 - DNA, 901 bp, Homo Sapiens
  misc_feature (221)..(266): n is a, c, g, or t
cagtcgacggtaccggcacatatgcccgggaattcggccattacggccgggggactcaagacctacctgttgacagttttagtcaaaacgatagtatctatgaggaccagcaagacaaatatacctctaggacttctctggaaaccttaccccctggttccgttctactaaagtgtccaaagcctatggaagaaaaccattcaatgtctcacaaaaagtcnnnnnnnnnnnnnnnnnnnnnnnnnnnnnnnnnnnnnnnnnnnnnncacgacattgagactattgaggaaaaggaggaagatcttaagagagaagaggaaattgccaagctaaataactccagtccaaattccagtggaggagttaaagaggattgcactgcctccatggaaccttcagcaattgaactcccagattatttgataaaatatatcgctatcgtctcctatgagcaacgccagaattataaggatgacttcaatgcagagtatgatgagtacagagctttgcatgccaggatggagactgtagctagaagatttatcaaactagatgcacaaagaaagcgcctttctccaggctcaaaagagtatcagaatgttcatgaagaagtcttacaagaatatcagaagataaagcagtctagtcccaattaccatgaagaaaaatacagatgtgaatatcttcataacaagctggctcacatcaaaaggctaataggtgaatttgaccaacagcaagcagagtcatggtcctagaactctgcttggaccagaagatgtgaataaacttaagcttatttatttaaaattccaaatgagttgctctagattctaaaaaggtgaaactttggctgttgaaagtttcagtattagtaaacttgagttactttttcttttcc

SEQ ID NO: 75255 - DNA, 1165 bp, Homo Sapiens
aaggtctttattgagagaaactttgttttctgatatgaactattgcagatgtttttataaatactttcattaaaatgatgtaaacagtagtacccaacactgtaaactcagtgaaaatagtaaatgattcttttattactaagactgtcatgcattctgaagcagttggcttttttttaaccataggaagtaatttccctctagctcctttccttctactctcctgctcagaccattagtaggtactttgttaaataaaaaactagattaacatcaatattactccaatttggtatcttttacactatgtattatacctactttctttttatttcatttacaaatagtttaaattactttatcaaccagctgtattgtttccctcttgtaaaagtaccatcaagtggggaaaatgtatgtggaagtggagagtgaatttgtatgactaaaggataatctgtacatggggaagtgggcaaaagtggataggatgaatttaaagaaaatgactacctttggaaaaaagaaattaaattttgttcacatatcctaccctttcccattgtgcatatcccaagtgtcatatttaaaactaaggttacttaaaacagaatccaggaatatcaaggctctgtggcttggaattttagaggataggactaataaaaggacttttgcaaagaaggcttttttccacgttcactttgttttgtgttctttgaaagtaactgatacttttcgggtagttaattcagcagtccataaatatgatccagtaacttgcttatattttattgaagtctcgacagctcttcagaagtaaatttagaacgatgctgtcagttcatatttatagatattagtgttttagcagataaaacaaaatcaacaaaaattaagttcattttgtgattaaacctgcaaccatttttccattactttttttctatagttaatggttattgccatgatttcttctgtttggttctactaagctagaaagccagggtgaagttaatgataattcccattattttatttctgtaccatgagattgctgttgatgactgaaataccaggtgcaaaaattaatgatttgatttttgtacagtttcaatgagtattttttacttattaaaaataaattaagaaatgtaagaataaa

SEQ ID NO: 75256 - DNA, 669 bp, Homo Sapiens
  misc_feature (408)..(421): n is a, c, g, or t
  misc_feature (433)..(523): n is a, c, g, or t
gtcattcctgtcccaatcagctgctctactactgatgacattaaagatccttcattacccaggcacaggagcagcagatagagctgttggaaatcccagagcactctgacatcaagcagattgcacagccaggagcagcatatttttatgttgaacttgacacaggagaaaacttttccacagaattaaaaagaattttcctttgcagtttggaagggaggtcctggccagtgaagccatccttaatgttcctgataagtctgactggaggcagtgtcagatcagcaaggaagacgaggagaccctggctcgccgcttccggaaagactttgagccctatgactttactctggatgactaaaacaaagggaagaactttttatgaactccacaggaagtagtaaagcnnnnnnnnnnnnnnaattaaaagaannnnnnnnnnnnnnnnnnnnnnnnnnnnnnnnnnnnnnnnnnnnnnnnnnnnnnnnnnnnnnnnnnnnnnnnnnnnnnnnnnnnnnnnnnnaactccatctcaaaaataaaagaataaaagtatgtctgtcatccagctcctatgtctgttatccagctccaagtacagcttgtgtatatcaacattttcaaaaacctttaaactaccaaatgaaatccagatgtttttccatggtt

SEQ ID NO: 75257 - DNA, 649 bp, Homo Sapiens
  misc_feature (546)..(586): n is a, c, g, or t
gacagtgaggaggactccgagttctatgagaacgactccaaccttgggcaggaccagctctcccaggatggcagcggctacgagaaccctgaggatgagcccctgggtcctgaggatgaagatccttctccaacgctgagtcttatgagaacgaggatgaagagctgacccagccggtcgccaggacaatggacttcctgagccctcatgggtcagcctgggaccccagccgggaagcaacctccctggggtcccagtcctatgaggatatgagaggaatcctgtatgcagccccccagctccgctccattcggggccagcctggacccaatcatgaggaagatgcagactcttatgagaacagggataatcacgatgggccagaccaagcctggggaggagggggccgaatgggcaccgggagcaccaggtgatcctcagggggccagcagggatctcctcaagtccccaagattcacacctgactcggaaatctgaagacctcgagcagatgatgccaacctatggagaaatgtggcttaggannnnnnnnnnnnnnnnnnnnnnnnnnnnnnnnnnnnnnnnnatacatgccagtgacacttccagtcccctttgtattccttaaataaactcaatgagctcttcc

SEQ ID NO: 75258 - DNA, 1194 bp, Homo Sapiens
cactgaatttgtgatagcagatctagaggtatcacctcggacgtgttatccccgggaatactggatgctgtcgctgtctactcgcctcgaacacaactggattcacattctttaagggagacaaggtgtggcgctacattaatttcaagatgtctcctggcttccccaagaagctgaatagggtagaacctaacctggatgcagctctctattggcctctcaaccaaaaggtgttcctctttaagggctccgggtactggcagtgggacaagctagcccgaactgacttcagcagctaccccaaaccaatcaagggttcgtttaccgggagtgccaaaccagccctcggctgctatgagttggcaagatggccgagtctacttcttcaagggcaaagtctaccggcgcctcaaccagcagcttcgagtagagaaacggctatcccagaaatatttcccacaactggatgcaccgtcgtccccggactatagacactaccccatcacgtaggaataccactccctcaggtacgggcataaccttggataccactctctcagccacagaaaccacgtttgaatactgactgctcacccacagacacaatcttggacattaacccctgaggctccaccacccaccctttcatttcccccccagaagcctaaggcctaatagctgaatgaaatacctgtctgctcagtagaaccttgcaggtgctgtagcaggcgcaagaccgtagatctcaggcctctaacacttccaactccagccaccactttcctgtgcattttcactcctgagaagtgctcccctaactcagatcccctaacttagatttggcccccaactccatttcctgtctgtcttagacagcccttccaactgtgtcatctcttctctggaggtcaatggtggagggagatgcctgggtcctgttcttcctacataaaatgcaagaaaacagcatggccagtaaactgagcaagggccttggaatccttgagaatcacatttatgtgcttatgattacgggcaagctaattaaccttgttgaatctcagattccccatttgcaacattaggttaagaccagtactgcaggattgttgcactaaatgaaatactgtatgtgaagtgcctggcacagtgtctggtacatttgtgtttaataaaagctaactccatgttcat

SEQ ID NO: 75259 - DNA, 659 bp, Homo Sapiens
  misc_feature (182)..(232): n is a, c, g, or t
gaaatatgaatgggaaaaacccaccttaaaaaaccagaccttttaatcaggaatgtggaattgaaaatgttccccaagtcccctttccacagtgtttggccagccctaacggaggcgccgggacgctggtgagccagggcctggtgagtaaacggccctgcctgccccaaacagggagcatnnnnnnnnnnnnnnnnnnnnnnnnnnnnnnnnnnnnnnnnnnnnnnnnnnnacatcatggcgacttccttgggctttctgtacgaggccagtgctctggtcacatctgaggtcttcctgacaaggggacacagctgttgacacggtgagtatcctgggtctgataggaaacccagctgggatggctgagccacactcacccccggccttcaaagtgcgatcagcagaggggcatcaggccaaaacgttctgttgctggtacttgcgtcagcgagcacagcgggggcagcccttcttcaccacagcctggaagctctggtggaagacggtcttgcacttggcacacctgactgtggtgtcaaactcaaaggggaagtttcttccgtggtgtctcctgatctgtgcagatatgtttcccccgtgtgcaccggtctcagggctacacttgctgggaggctcttaccctcatgcccttgaag

SEQ ID NO: 75260 - DNA, 1168 bp, Homo Sapiens
  misc_feature (801)..(801): n is a, c, g, or t
  misc_feature (1027)..(1027): n is a, c, g, or t
  misc_feature (1114)..(1114): n is a, c, g, or t
ttgctgacctccaacagatcgcagacggggtgtatgaaggattcctcaaggccctgattgaattgcctcccagcatgtctaccactgcgacctgtgcacccagcgcggcttcatctgccagatctgccagcaccacgacatcatcttcccctttgagtttgacaccacagtcaggtgtgccgagtgcaagaccgtcttccaccagagctgccaggctgtggtgaagaagggctgcccccgctgtgcccgccgacgcaagtaccagcaacagaacgttttcgcctgatgcccctctgctgatcccactctgaaggccgggggtgagtgtggctcagccatcccagctgggtttcctatcagcccaggatactcaccgtgtcacagctgtgtccccttgtcaggaagaccctcagatgtgaccagagcaccggcctcccagagaaagcccaggaagtccccatgatgtcccctggccctccccccacccctctgctgcaggaggcgtggccaccaccagatgctccctgtctggggcaggcagggccgtttactcaccaggccctggctcaccagcgtcccggcgcctccgttagggctgcccaaacactgtggaaaggggacttggggaacattttcaattccacattcctgattaaaaggtctagttttttaaggtgggtttttcccattcatatttcaacagaaagtatttttttattcttgaccctacgtgagtcacccatgaaatccagacattctcacccccagcggatgcacaggagccactcaggcctggcttanaggtagcgggtggctggtgggcaggccactgctgggacagggtctatgggcccacccagtgcctttccttggccctcactgccagtgccaaaccgcccctcagcagggcagggccagtcctggcgacccggttcctctgtgtcctctttactccccaccccagtgcgtctcgcctgctgagcccaccgctttctcagcgtcagagcccctagctcttctctagccntggggccttggcccccatttaggagaagggagaaatgacctggaaaaccagccactggtcaggcacttttgaagccctccctggggnttttaatgggaagggttcgccccgttctttgccccaacccccccgaattccccc

SEQ ID NO: 75261 - DNA, 535 bp, Homo Sapiens
tttctgtaggaggccagtgctctggtcacatctgaggtcttcctgacaaggggacacagctgtgacacggtgagtatcctgggctgataggaaacccagctgggatggctgagccacactcacccccggccttcagagtgggatcagcagaggggcatcaggcgaaaacgttctgttgctggtacttgcgtcagcgagcacagcgggggcagcccttcttcaccacagcctggcagctctggtggaagacggtcttgcacttggcacacctggggagagagcagcacacctgctggtgccggctgggctggaggttgacctgtggccacgctggccagcacttttgaccagaacccacgatatggctgtgacatactgtgtaacccatgcacgcacgctgtgcctttccatcccggaacaggagattctcgaaacagtgcttacccatacgtcacacaatgcacactgatattctctgtcctactgcattttttataaatgctgcttgagattcattaaagatttcttacctgta

SEQ ID NO: 75262 - DNA, 1636 bp, Homo Sapiens
  misc_feature (233)..(282): n is a, c, g, or t
  misc_feature (294)..(302): n is a, c, g, or t
  misc_feature (862)..(871): n is a, c, g, or t
  misc_feature (1617)..(1617): n is a, c, g, or t
cccaagtttcaacatggtaatgatgtgacctttagctatggtaaaactatttgactaagtgggtaaatggaaattaatatcctggtatctgcaattaatccaagctttctgaggactaaatccatttatttctctatcctttctaaggagaaaatcctaacagtgtggacttagtgtgccattccaggtggtagttgctgtttcagtatttttgtatcaaagttgttgtaacnnnnnnnnnnnnnnnnnnnnnnnnnnnnnnnnnnnnnnnnnnnnnnnnnnggaaaaagaaannnnnnnnnaattagaaaccaagtttacatacggttaaatggttactaaaagctcagttgtaaccactcctaacaccactagcagaacctcaagggagccaagagctcttcccttttcccctgttaatttccagtataatgtagcagcacaattatttcatgtcacatttaagaagaacaagaaccaatttatataaagtacaattgtatatccttaaacattccacataaacacactgtcaaaactcactggatatgctggaattggaggacttaaatttctacatattatttattgcacccagagtactggttaaaatgcactttctgtgaagatcaaatgcaataacgtatgagggtatttttaacactgtgaagtacacacataatattataaaatgccatttaattggaaggagttttctatcattgcaagtcataaatgtaacttttaaaagaatactagcagcttttacctaggctcctaaatgcttgtaaatctgagactgactggacccacccagacccagggcaaagatacatgttaccatatcatctttataaagaannnnnnnnnngtcgtcagtttggcctttcctactgcagccaggtgagagcttaagatgtcagtccccaatatcttcacagagtgcctttatgaccagtttggagaattacgatggtaaggggaagaggcagatatgaagaggaatggttaggggaattgtcattcataactctgtgctatattacttgaggggctaagaaaaatgtatggtcagtgaaacacagtagtgtacccttaaatgccttataaaagaccatccatccagtctgcgcttttgactgtgtgcaagtatcagtaataatgcttttgggggctcagatgaacagcgaacaccaatcagccaggactctggaaggaaagctccaaaaatgagaagtccttcaacaccattttccattactgttctcaccaaatcaatgactataaaacagttttgattatttatctccatcaaagtgatttgatttgagataatcacacaatctcaggctcggtatgtaaaaatgtcagaagtggctgaagtaaaagcagcagctttgtgctgaagacacccatttcctctgactccagagctccaccatctggtctcaagatttttccctctgaggaaacagctgtagagaggtagcccagttcaactttgctgagacagtgaactttgcaaccatactaacacctactgacttgcagagaacgctgagaaagacagtgtgctttgcaatggttaagtccacagctcctgagattgcctcgcangtcatcttgggcatgaagc

SEQ ID NO: 75263 - DNA, 955 bp, Homo Sapiens
gcgcccggggcgcaatataaagataagatcttctgcgtggggcccattaaatcaccagggagattatgggggggcctcgggccaccgaggcccagggcctttcctgcaggggtcccccgaaggttctcttcctctttggcagatcacccccctgggggtcctcagggggtgcctgcgcagctgcccgcgtggcgcacgccggatggagcggcccaggaaaccaggtgccctggcgcatgtgccacgaggagatgtaggtgacgttgttgtggccgcaaagctcctggctcggggctggagggcacagggcagggcgccgctcgacacaccacgcagtgggcgctgcccgtctggtccacgacgcacgactgtggccgcgggcacaccacgtgctcacaggacttgcggcagcggccccggtacatgacgctcaggtccgggtggccgcggcagcgcgcggcgcgcagctcgcactcgtcgcggtaggtggcgccgtctgagccgcagacctgcaaccgcgccgggagccccgagcagtcgggcgcgcactcgcagcgcgggcggccccccagcatgcggcacgccttgcccgggccgcactccacgccgtcgcacgaatctttgcagggaaggcagtggacaaggcccaagaagccgaggaggttgatcttgttccccgggtgggtgaggttggaccaggcggtgtcaatgttgccggaggcacagcactcggcccgggtgacatcagtctggagcaccaggctgcaggtggcctcctggccctgctggagccagcaaacaccaccgggcgcggggttccccgagcccatggagctcacgaagcccacggcccaagccagggccccccagggcagaggccagagtggccctggcgccccgggacgcatggcgaaccctcgtgccgaaatcgccacccaggcctcgctacctagac

SEQ ID NO: 75264 - DNA, 868 bp, Homo Sapiens
ctggcggctcctcaggggtgccctgcgcatgctgtccccgcgtggcgcacgccgatggagcggcccaggaagcagtgtggcctgggcagcatgtggcacgaggagaatgtaaggtgacgattgtcgttgccgcaaagctccctggccgggcctggaggccacagggcagggccccgctcgacacaccacgcagtgggcgcttgcccgtctggtccacgacgcacgactggtgcccgcgggcacaccaacgtgctcacaggacttgcggcaagcggccccaggtacatgacgctcaggtccgggtgccagcggcagcgcagaggcgcgcagctcgcactcgtcgcggtaggtggcgccgtctgagccgcagacctgcagccgcgccgggagccccgagcagtcgggcgcgcactcgcagcgcgggcggccccccagcatgcggcacgccttgcccggaccgcactccacgccgtcgcacgaatctttgcagggaaggcagtggacaaggcccaagaagccgaggaggttgatcttgttccccgggtgggtgaggttggaccaggcggtgtcaatgttgccggaggcacagcactcggcccgggtgacatcagtctggagcaccaggctgcaggtggcctcctggccctgctggagccagcaaacaccaccgggcgcggggttccccgagcccatggagctcacgaagcccacggcccaagccagggccccccagggcagaggccagagtggccctggcgccccgggacgcatggcgaacgcagagacggcagcgatcccgggaatcccggaccggtaccagcctgttgtttaggaataaagagaagggggggaggttggaaggtggggg

SEQ ID NO: 75265 - DNA, 722 bp, Homo Sapiens
ccctcttgatagtagcaataattaataggtttatccccaaaggagcggaagtgtggaatcctccccggcaataggtcttagggtaggggctggggcatcctagagaagggccctaaatcaggcgctcagtgtccggaacgcaggtctatcccacccaccagccggcccccaggcctcccttcctcagtccttccaggatatcgtcagggaggttctgggatccccaagtggtccgaatccgggctctaaggagtgtccgtggcatataaattagactctgctgtggcaataaataacaggggatgatggggggcctcgggcaccaggcccaggcctgtcctgcaggctcacacgaagttctcttcctcttctgcagactcaccacctggcggctcctcaggggtgcctgcgcagctgcccgcgtggcgcacgccgatggagcggcccaggaagcaggtggcctggcgcatgtggcacgaggagatgtaggtgacgttgttgttgccgcaaagctcctggccggggctggagggcacagggcagggcgccgctcgacacaccacgcagtgggcgctgcccgtctggtccacgacgcaccagactgtggcacgacgggcacaccacgtagctcacaggactctcttacccagtgtgagcccccagaggcccactattttccaaatcccaaccctacaaaagaccctaccccgtgatactccctc

SEQ ID NO: 75266 - DNA, 676 bp, Homo Sapiens
gggatcctcctgccgagctgatgtcgctcctgccctctgccggggtccggaagcgacatctcaggagtagctctcagcagagtgaggatcctgcctttcgtagagtttgtgtgatttttaattattcatgttcccttaaaagttcactacgtggagaaattccagcaccaagtgttgtggcaacagctgagagagtgcaggcaccactgtgttgtggcttgttgaccgggaatgtgtcacccctgccagggaactcttctcctcgcgggggacttgggatggccatcagaccttctagggtctggctggggtcatcctaggtatgggtgaccgtccctgagacataagcgaggtagattcagccatcctcaccctcagacttgaggtccccacccaggccaagccggccccccgtaccccttgcctgggagcaaaccgccaggacgcagcctccacgccgcacctgccacattcagccctgcccaggaaggaacacatgacccttctgtctgtgactgttgctgagtctctgtctcatgtcgtagaattgtggataattgtctagtgaccctctcatcactgtaaccatcgcgcctggcctagatgtcgtgttttggatgctgtgttttcaataaatgcctctggggccctgcttttacccgctggcgtcaaaaaa

SEQ ID NO: 75267 - DNA, 816 bp, Homo Sapiens
  misc_feature (726)..(744): n is a, c, g, or t
agtaatagagttctactaatgggaataatgggattttttggcaggggacgggaggtaacattttgctcaatttgggctgaaagttggtatcccctcattggaataaatagaaaatgttaatctgctaatgctgatgtgtaatgggatttcacgtatttcatctttgaaaatgtcttttcacacaaacaaacaggtcaaggtactgctaaatactgacacatccacccatgagcatgtgattttagttaagcatattcatcacttgtaaggcatttgtaggattcatctttttggtatttgccctttagcatgtcattcattcaagatgattcatttccaacagaagattaagaggaaactttaaaagcatttaattgcagttaaatgcttttaaaatttaaaaattttctttgcactgcatcaaggtccaaaaaactgctacaggaaaatatatccactaaaaatggatttggcaatacagcgctgttttgacttctcatagcacagaaagtatataaagcagcttgacaatcttaagttttagtttttattgaaatgaatttaccatattatgttgttgtaccttgtaatttcaggtcaaattcattaagaaacattttcaagtctgtggcaaaagttaatttccaaagttactcagtgttaaaaaacagtggttgaggatggtttttctcattcagaaaaatttcaatgtcagcccagagcccnnnnnnnnnnnnnnnnnnntctttagcactgctaagccattgaacgcctgtgtggcaaatcaaatcaggatattcagcttctgtttctcac

SEQ ID NO: 75268 - DNA, 1123 bp, Homo Sapiens
  misc_feature (778)..(836): n is a, c, g, or t
  misc_feature (954)..(1002): n is a, c, g, or t
cagtcgacggtaccggacatatgcccgggaattcggccattacggccggggtgagagacagagaaagagagagaattctttcaagtgaatctaaaagcttttgcttttcctttgtttttatgaagaaaaaatacattttatattagaagtgttaacttagcttgaaggatctgtttttaaaaatcataaactgtgtgcagactcaataaaatcatgtacatttctgaaatgacctcaagatgtcctccttgttctactcatatatatctatcttatatagtttactattttacttctagagatagtacataaaggtggtatgtgtgtgtatgctactacaaaaaagttgttaactaaattaacattgggaaatcttatattccatatattagcatttagtccaatgtctttttaagcttatttaattaaaaaatttccagtgagcttatcatgctgtctttacatggggttttcaattttgcatgctcgattattccctgtacaatatttaaaatttattgcttgatacttttgacaacaaattaggttttgtacaattgaacttaaataaatgtcattaaaataaataaatgcaatatgtattaatattcattgtataaaaatagaagaatacaaacatatttgttaaatatttacatatgaaatttaatatagctatttttatggaatttttcattgatatgaaaaatatgatattgcatatgcatagttcccatgttaaatcccattcataactttcattaaagcatttactttnnnnnnnnnnnnnnnnnnnnnnnnnnnnnnnnnnnnnnnnnnnnnnnnnnnnnnnnnnnaacacctatcccaaaccaccttattttggccccccgcccccgaacggtaaagcgcaaaagggccctaaccagcctacccccgggtaatcccgggccctcgcctacgggggcttggaannnnnnnnnnnnnnnnnnnnnnnnnnnnnnnnnnnnnnnnnnnnnnnnntttctctccctgaaagttctttttccaaaccccctcctttctcctgaagccgcgcaaccccccccaatggtggggggccccaaaccgggcccctccaaagggttttggtgttaaaacggca

SEQ ID NO: 75269 - DNA, 1717 bp, Homo Sapiens
gcggagagggcggcctgggccgaagtgaggcgacgcggggcggcggagtctgagggccggagcggagcggaggcgacgcggggaggggcgagggatcgcggccggtggctgggggccacctgcaacccgagcaacgagcccccgctccgggaattcggcacgaggcccgagggaggtgacgcgcgctgccggggcgaggttgcgaggggcggtgttgaagaatgtgtgggcgaacatcctgtcacttacctagagatgttctcacgagagcttgcgcctaccaggatcggcggggccagcagcggctcccggagtggagggaccctgataagtactgcccctcttacaacaagagtcctcaatccaacagcccagtgcttctgtctcgactgcactttgagaaggatgcagactcatctgagcgtatcattgctcccatgcgctggggcttggtcccttcttggttcaaagaaagtgatccttccaagctgcagttcaatactaccaactgtcgtagtgataccgtaatggagaaacggtcatttaaggtgcctctgggaaagggaagacgctgtgtcgttttagcagatggattctatgagtggcagcgatgtcagggaacaaaccagaggcagccatacttcatctattttcctcaaatcaagacagagaagtcaggtagcattggtgctgcagatagtcctgagaactgggagaaagtctgggacaactggaggctgctgacaatggccgggatctttgactgctgggagcccccagagggaggagatgtcctgtattcctataccatcatcacagtggattcctgcaaaggcttgagtgacatccaccacaggatgcctgccatattagatggagaggaggcagtttctaaatggcttgactttggtgaagtctcaactcaggaagctctgaaattaatccacccaacagagaacatcaccttccatgcagtctcttctgtggtgaacaactcgcgaaacaacactcctgagtgtctggctcctgtcgacttgggggtcaaaaaggagctcagggcaagtggcagtagccagaggatgttgcagtggttggccacaaagtcacccaaaaaggaagactcaaaaacacctcaaaaggaagagtcagatgttccccagtggtccagtcagttcctgcagaagagtccactccccaccaagagaggcactgcaggactcctagagcaatggctgaagcgggagaaggaggaggaacctgtggccaagcgtccttacagccagtgacacaggactttcagagaccaaggccagggtctgctgcactgctgttctgataataggttcttaacattgtatgtatatgtgtttgctttgggaggaggtggcactgtgttagttgacagttgtgggctcatgtagtcttttttgccatgagtaggagcccctagtggggctggtggacagctttggaagaggtgtcctgctgctgttaccagccatgtgggccccataggggcactgcgcctgctgccctttcctggcagggctggtggagtcttccctcaaagcatgccttacccagctgggaagtctctgccctgatctggtactccttgtagtaagctgttttctgctcagccactgggctctttcacttttttagttcttaaaaatttatttttaagttctaaaataaaataaaaataagttcaaaa

SEQ ID NO: 75270 - DNA, 708 bp, Homo Sapiens
acatttatgtgaagaagagacgtacttcagttggtgggcactccatgcaagatgaatttatacgccagtataagcactttgaaggtttgatagctcgctgttatcctggatctggtgttacaatggaattcactattcaggacattctggattattgttccagcattgcacagtcccactaaaccttgtgaaagaagaaaagataactgaatgaagcatttgagtataacagacactataccaaaataccaagcaactgttttgagaacccagacttaaaattttatgtattattaaatgttagataaatgggtagtaccatactacaaatatttaaatgcaaaattaccaacctatatagcagttttatttgccctataggttgcatactaacttaagcattcatgtcaccataaaatgcctttagcatttctcaatgactggatgggaaattttcctttattgcctagctgcttgtgtttgagtggttgtcctatgagcaatgcatttggagttcttcagctttcactacttctctgttgcttgctaatcatgtaactactaaaatactgtacaaaattgttttttcacactaacaaatgtgtatatggagaagagggctcatgtgatgatcatttgtgaacttagatttttgaggattatgtgactagtaataaatgtgaaataaattttcaaaaaagttgaaaa

SEQ ID NO: 75271 - DNA, 649 bp, Homo Sapiens
catggcaagaaacagacaaagccccatgaaaaataaaacaaaacaaaagtcatttcaaacaaagctgttgttttgaaaactcttgctttcttttggtgtccattttgtgttctattttaaagaatctttcatttatattggtgttattgtagtgaagagaatgtgataggctgatctgtaatggtttctgtcaggagcttagcaaatgcctctgcccctcttcccctacccctgtccttcctcagttcccagctgggattgctatgcactgggcagacccgtcactgtctcccctgaacccccacacagtggcttcccttagaaccagtctttgtactctccctaaacagcagcaggcttaggatttttgtcaggctggttcttgcgtgctctgtgcccccaccagtttgctcacctcttggggcattttgtaatgtgttttctctgtcttgtaaaaccttttgattgtaccgaaatggtatctgcagtcgcctttggaaataaatggtcattaatttgtgtacttagcattctgaattttagtctcaggtgtttctgttgttgaagatccttgaatgaaaaggaaccctcaccatggggcttactgttataatgtttcttcatttactgttattaaaagatttatgag

SEQ ID NO: 75272 - DNA, 1649 bp, Homo Sapiens
ttgagcagaagccagagaagggcaagattaaccctagtgaggatagagaagagagtctcatatgtggggacttagggaaagtgtcacaaagtagatggcagtggagcagaaggaaggataggttgccaggaggagacaggcattccaggcacaggtgacatcctctaaaaactgggaggccggcaaagcacctgtgtggggaaggaggcctggaggatgagaccaggcacaacacctccagtgtgcttagtaggcaccaagcactgtctcaagtgcttttattcatagaaactcatccagcccttatagcagtcctctaaggctccagggagcagtgtcagggccagggagacgatggtctccgtgactatggccacttccgagtggatccagttctttaaggaagccggcattcctccaggacctgccgtcaattatgccgtgatgtttgtggataataggattcagaagagcatgctgctggatctcaataaggagataatgaatgagctgggcgtgaccgtggtgggtgacatcatcgccattctcaagcatgccaaagtggtgcaccgtcaggacatgtgcaaagctgccactgagtcagtaccctgcagccctagcccccttgcaggcgaaattcgccgtggcaccagtgctgcctcccgaatgatcaccaacagcctgaaccatgactctccacccagcacaccccccaggcgcccggacaccagcacctccaagatctcggtcactgtgtccaacaagatggcagcaaagagtgccaaggccactgcactggcccgccgggaggaggagagcctggctgttcctgccaagcggcgccgggtcactgctgagatggcaggggaagtacgtcatcaacatgcccaaaggcaccacaccccgcacccgcaagatcctggagcagcagcaggctgcaaaaggtctccataggacgtctgtgtttgaccgcctcggcgccgagaccaaggcagacaccacgacagggagtaaacccacaggagtcttcagccgcctgggggccaccccagaaacggacgaggatctggcttgggacagcgacaatgacagcagcagctctgtcttgcagtatgccggggtcctgaagaagctaggacggggcccagccaaggccagtccccagccagcactgactgtcaaagccaaggccacaagctcagcgacaacggctgctgccccgacactgcggcgcctggcgctttcctcacggtctgggcttgagaggaagccggagtccttgtctaaagtcagcatcatcaagagactgggcgcagctgcccttgtgcccgaggcccaggacagccaggtcaccagcaccaagagcccgactgtccgctgcgtcctgcccgaccctcctgtacctccggcctcccagcggccccctcgtcggcggtggcgtcgagcctgttgagactgttagccgccctctactcccaggctggagggacctctccagaccctgggctgcggctgaggcgcatccgttttcctgccctgggcatctgtctctgaaagtgtatggcgggtggtgggcaaggggcactgggaagggaggccagtgcctagagtgaagacagctgctgttttaatatatttttgtgactttc

SEQ ID NO: 75273 - DNA, 859 bp, Homo Sapiens
gttccatctaaaatatcatgcccaggaaagcacatgggatcaaaagtaaaatagcatcatgtgtgatctcgtctccagcgtgccgctcagttcccggaatccgtgtgcacacgtgtgatctcgtcttcagtgtgccgctcagttccctgaatccgtgtgcacactgcgtatgtgtacgcgcagcatgctatactgaactcaacaagatcttggctgtacataaatatttgtaaaagagaccctttgcacctttttactgtaatgttgagacttcattacttaaatgttctacggaaggttctggtgtggttgttggagccggagggagcgtgtcagcacgtgctgagggcatggggcctgccccctgggcacccatccacaagctgggccacggagctccagcttctcaggacaaagccccggggctggcgcatcctgagggtctctgggggtgtttgccaggctcctgggatgggccgctttcagaagccctgcagtgcctccagatggaaaggcgggcccggcctccggttgggtctgcattttggagagtccacaccacggaccaggttttcccccaaggcttggctttgtgtagctactaacttcttggggcattctgagagtgtgggcagagagaattatgtggcctcatcctcccccaaggctgtgcttgcagcccgggcaccttcccactttctagctctggagaggttggattttgcttttgtaaacacatgaatccttatgataaaagtctgtcagtcaaaaatacatttataaattatttaatgccagtcctcatgtaacctcaggtatcttcagcttgtggagaataaatctggtttaataaacagtg

SEQ ID NO: 75274 - DNA, 1051 bp, Homo Sapiens
cattacaaatcagtagtattccactttataaaaagaaagaacttaaccaactagaagacaaatatgacaaagactacctcagtggtgaactgggtgataatctgaagatgaaaatccaggttttgcttcattaattcaccatccagagaccaaataattaaaagaaaaacaaatatagataggtagaactatattttcccccaatcagaatcatcatatcataggtacaatctttcaccaagtaaatttgtataaataagcactattctttgtattaccaaagcaaggtacaggtgactaccctagttcaaaacaaccactttctcaggcttctcatgtgtgtagctaagctaccttgtcatatgtgttgattcttgaaaactgggacgtgtatttccattgggggttggccatttatgctgacatgccatccttccagcaaacgtacgggaatgtgctttcaattgatggactactctattttttgcaaatttgtaaactttgcttctccaaatacaagtactaggttgtccatttatggtacctatttggtgctagtaaatttcaaactagatttataaatgcactgtaatatgtacacaacttagaaaccaaattacaagtattcagttccaatacttcattaatttcaatcaaccaaagttagttcagtagcttatctcagttatgagtataatacattacatgtaaattaagtgtgtgtatactgtaatcgtgctattttttatcattgaaacatttataaactagaataataatgcccttaatgtgagggtttgtaatggtgcttattaagaccaaagacttgttaaatgtatacaccaagtggtaatgaaatttctgtgactggcccacacgtgcatagaggtctgggaggaccaggaaacagcctcagtggccagaggatcaccagtgcatccttcatcacagcatgtgcaatatgccaagattaccctcggtcattcctgtcaacaaggggtcaatgtcataaatgtcacaataaaacaatctcttcttttttttagtttaa

SEQ ID NO: 75275 - DNA, 649 bp, Homo Sapiens
  misc_feature (303)..(323): n is a, c, g, or t
  misc_feature (330)..(330): n is a, c, g, or t
  misc_feature (564)..(564): n is a, c, g, or t
atgtaataaaaagtaaaagtccttgtccagccatcctcgtggggcatctgtctgtctctcacacaggtcactcaagttaatgggaaagaaagaacagggggcccaagtctgaagttataaataatagaaaataaaagatcttccgtctccagcgggggaatagatgagaggatgggagggcaagactgggtggggacgggcaggggcagagcaggaaccccccacccctgctggaccctggccctgccctctgtgaggcccctcccattcaaggtgcttggcaggaattccccagctcccctnnnnnnnnnnnnnnnnnnnnnctggaanttggtccgagctgctgggggaagagacatagatcactcttccctccactcatggaggtctcaggtcgcggccaggacaatcttcagttccccggggggtggaaggggagctgctgggagggatgagattgaactggttggaggggaaagaaaagagagcaggagcattagaacccaagcagctgtcccttcctccaatgccgtccaatgggggcgtgggggtgtgtctgggaangagcggcctcctcaaggtgtctcgggggctgtcagaagcacaggtcaatcgctgtttcccagtaagccagagccctcactcatgt

SEQ ID NO: 75276 - DNA, 632 bp, Homo Sapiens
  misc_feature (284)..(331): n is a, c, g, or t
atcacagcagccccgccccctcaccctgggctccccacccgccccaggtgatgctgctgcacccaccccagagtcatggggggcccccccaaggcgcggtgccccagagtggggtgcctgcactctcagcttccacaccctcaccctacccctacatcggacacccccaagttcaatctcatccctcccagcagctccccttccaccccccggggaactgaagattgtcctggccgcgacctgagacctccatgagtggagggaagagtgatctatgtctcttnnnnnnnnnnnnnnnnnnnnnnnnnnnnnnnnnnnnnnnnnnnnnnnnggggagctggggaattcctgccaagcaccttgaatgggaggggcctcacagagggcagggccagggtccagcaggggtggggggttcctgctctgcccctgcccgtccccacccagtcttgccctcccatcctctcatctattcccccgctggagacggaagatcttttattttctattatttataacttcagacttgggccccctgttctttctttcccattaacttgagtgacctgtgtgagagacagacagatgccccacgaggatggctggacaaggacttttactttttattacat

SEQ ID NO: 75277 - DNA, 340 bp, Homo Sapiens
ccacggcctgttgcgtggggggcggctgctggggctgggagggctgttgtagcggctgaggcttcaacatgatggcagcgtccggaaggggaattagagagaagggagggagagagggggccggggctggtacagattctgctgtggctgtccactgcccaagtgtggggcctgccccgcctgatgctggacaggactgggggccgcatgctgggactgcggctggcttccagtaggcgtggtagccggctgcggctggtgggcatggagctgtgtggcatggtgtgggtaggactggtgaacagtggcataaagggcttggggggtatgctgctctgca

SEQ ID NO: 75278 - DNA, 1819 bp, Homo Sapiens
  misc_feature (1350)..(1350): n is a, c, g, or t
  misc_feature (1462)..(1511): n is a, c, g, or t
aatgaggagcccaaaggaaaggagaaagaggttgatggtctgttgacttcagagcccatggggtctcccgtctcctccaagacagagtccgtatcggataaggaggacaaaccacccctggcaccatcaggaggcactgaggggccagagcagcccccaccaccttgtccaagccaaactggcagccccccggtgggcctcatcaagggagaagacaaagatgagggccctgttgctgaacaagtaaagaaatcaacgttgaaccctaatgctaaggagttcaatcctacaaagcctctgctgtctgtgaataaatccaccagtaccccaacttctccggggccccggactcattcaactccctccatcccggtgctgacagcaggccagagtgggctatacagcccccagtacatctcctacatacctcagatccacatgggaccagctgtgcaggcacctcagatgtatccatatcctgtatccaattcagtgcctgggcagcagggcaagtaccggggagcaaaaggctcccttcctccgcagcgctcggaccaacaccagccagcctcagccccgccgatgatgcaggccgccgcggctgctggcccgcctctggtggctgccacgccctattcttcctacatcccctacaaccctcagcagttcccaggccagccagccatgatgcagcccatggcccactacccctcacagccggtgtttgcccccatgcttcagagcaacccacgcatgctgacgtcgggcagccatccccaggccatcgtgtcatcctctacccctcagtacccttctgcagagcagcctaccccccaagccctttatgccactgttcaccagtcctacccacaccatgccacacagctccatgcccaccagccgcagccggctaccacgcctactggaagccagccgcagtcccagcatgcggcccccagtcctgtccagcatcaggcggggcaggccccacacttgggcagtggacagccacagcagaatctgtaccacccaggggccctgacaggcacgccgccctctctgccaccgggaccttctgcccagtcccctcagagcagcttcccccagccagccgctgtgtatgccatccaccaccagcagctgccccacggcttcaccaacatggcccatgttacccaggcccatgtccaaactggaatcacagcagccccgccccctcaccctggggctccccacccgccccaggtgatgctgctgcacccaccccagagtcatggggggcccccccaaggcgcggtgccccaaagtggggtgcctgcactctcagcttccacaccctcaccctacccntacatcggacacccccaagcagctccccttccaccccccggggaactgaagattgtcctggccgcgacctgagacctccatgagtggagggaagagtgatctatgtctcttnnnnnnnnnnnnnnnnnnnnnnnnnnnnnnnnnnnnnnnnnnnnnnnnnnggagctggggaattcctgccaagcaccttgaatgggaggggcctcacagagggcagggccagggtccagcaggggtggggggttcctgctctgcccctgcccgtccccacccagtcttgccctcccatcctctcatctattcccccgctggagacggaagatcttttattttctattatttataacttcagacttgggccccctgttctttctttcccattaacttgagtgacctgtgtgagagacagacagatgccccacgaggatggctggacaaggacttttactttttattacgtaaaaatatt

SEQ ID NO: 75279 - DNA, 791 bp, Homo Sapiens
gcaccaactgtactgcatcttactggatttaggacttctgagatgcttgtgaagtatagatgtggttgtggtcttagattgacagcattagagaagactggttagaacatctggtctcgctggttagtgcctcgttggctgaggactaggtgtgcatttctcctagcttttcatcaggaaatcccaaagtttccaaagctttttgtttacagaataaaacttcaaataaaaccaattcattatttgtccagaaggaagcttggctgacgctggccttttaacataggaatgtatttcgttggaaacattctgaaaaatctcagagaactgaacccttacaaactttgttttccctcataaccaaagcttcaggttagaagtttagaaaaatagaatggttgggtacatgatctaaatgtttaatgctaaaggtatatcgtaagggtagtgtttgtttttgaacgataatttagaagttctcatagaaagcgtataacataggtcttcagaaactataaaagaattttcatatagtattaaaatccatagactaaaatctgagaattttttaacatatgcaagtcagccaaacataagctaccaaaataaagagcaatgtgttctggctgttttatacttcaacaattttttccctaagtggtaagcaattactttaaaacatatttttaaaaacatcggtatcgggagctgcggtggctccggccggttgtcctggcacacaaggaggcgaggctatgcgttcgaggccaacctaggcaaaattggaaaaa

SEQ ID NO: 75280 - DNA, 1018 bp, Homo Sapiens
ggaggcgagtggaggacgcgtagacgcgccgcggtccccgcctgccgctgctccgccgcagtcgccgctccagtctatccggcactaggaacagccccgagcggcgagacggtccccgccatgtctgcggccatgagggagaggttcgaccggttcctgcacgagaagaactgcatgactgaccttctggccaagctcgaggccaaaaccggcgtgaacaggagcttcatcgctcttggtgtcatcggactggtggccttgtacctggtgttcggttatggagcctctctcctctgcaacctgataggatttggctacccagcctacatctcaattaaagctatagagagtcccaacaaagaagatgatacccagtggctgacctactgggtagtgtatggtgtgttcagcattgctgaattcttctctgatatcttcctgtcatggttccccttctactacatgctgaagtgtggcttcctgttgtggtgcatggccccgagcccttctaatggggctgaactgctctacaagcgcatcatccgtcctttcttcctgaagcacgagtcccagatggacagtgtggtcaaggaccttaaagacaaggccaaagagactgcagatgccatcactaaagaagcgaagaaagctaccgtgaatttactgggtgaagaaaagaagagcacctaaaccagactggatggaaacttcctgccctctctgtaccttcctactggagcttgatgttatattagggactgtggtataattattttaataatgttgccttggaaacatttttgagatattaaagattggaatgtgttgtaagtttctttgcttacttttactgtctatatatatagggagcactttaaacttaatgcagtgggcagtgtccacgtttttggaaaatgtattttgcctctgggtaggaaaagatgtatgttgctatcctgcaggaaatataaacttaaaataaaatttatatcccccccgggcacacaacagtccgcat

SEQ ID NO: 75281 - DNA, 630 bp, Homo Sapiens
aatgtaaaccccaccctccctgctgtcagtggctctccctccaggctgctgctgggcatgtcatagatgggatgaatgaccatctggggtatggtgggctgaactccacaaggtcgttggaatgaattttgaaacttctcagaaattaatctgaaatggcaggcagtaagtgcagcagaatctggcaggactgatatttgtgcagtgggcctgccacacaccctctgcctaggaggctgtatgccagagctcatctctagcaaggaatttatcttcaggtgaagaagagaggaagcaggatcccactgagcacctcttgcagaaggcaaggaccaatgtttgaacgtgtttcagatgtcatgtgtttagtttttatatgtgtgtacataattatatatagagatagacttgtgtatacaccttccacaaacacatcctcacggagatacatgtgctcaatgtatattcttgtttctcctgctctcaagttggaacttgcattgtgataagttttggaaattcaaaagtactgcaacgtgttgaaataagaaatacttaatattgtcaaataacttgtgattgtcttgccatcaataaaataatgcatagttgtgttaaactacaggcaaa

SEQ ID NO: 75282 - DNA, 1413 bp, Homo Sapiens
gggaagcgccgccgcggtctgcggaatgtcaactattcaacatggaggcggaggtcgataagctggaactgatgttccagaaagctgagtctgatctggattacattcaatacaggctggaatatgaaatcaagactaatcatcctgattcagcaagtgagaaaaatccagttacactcttaaaggaattgtcagtgataaagtctcgatatcaaactttgtatgcccgctttaaaccagttgctgttgagcagaaagagagtaagagccgcatttgtgctactgtgaaaaagactatgaatatgatacaaaaactacagaagcaaacagacctggagctgtcaccactgactaaagaagagaaaactgcggcagagcaattcaaatttcacatgccagatttatgaagaaatggacttggaaaggaaattctaacagagaagagcttaattccggagaaatttaggaagatgtcttgttaacccttgatgtctagagattgggggctggtgaagggggtttggcttcaatgactggataatgatatctttcatgagagagattataagaagaagggcagataatatatgaataaagttcagccaaaaggatcaaatgagaataaaacgatttaaatatatgtacacacgcatgcacacacacacttagtcttgtaatttcaggccagaaattctcaacactattttgcatctgttttctttttctaagtcatgataatatagatgttctggtctatcataaaagaatgtttatgtacatttcagtcattcggtatgtggctttgtaaattaaagtataggcaaaacatttgtgttatacatgatatataatttcattttgtaaatgttgattgcacatgtggtcacattattgttgagactgcttttatgtgacctgtagtctcccacagaacctaaagtaataagctggcttttctgtgatagccacgtttgcgtatttctttccctatttcccttgcctgctaatgttgaacagcatgaacttgctttctgatgctgttttagactgtccctgttgtatctcaataatatctttgttttccttcagcctttattactataattgttcattctacatgaaagctaggaaactgaaattagaagagcacttatctgctacttgccagttttgcgtgagtgtgttatatgtatgtgtcaatttccctttaaaataactatttattttaaaataactattggcaataaggaaactgttcaaagtagaggcagatcttgatagaaagatgttaatcacagggttgtttataatagcaatatacatacacatttggctagtactaggtgaataggaaaataaatcatgctgtatgtatacaataagaggtcaagttgccaataaattattactgtt

SEQ ID NO: 75283 - DNA, 372 bp, Homo Sapiens
cctctctaagtgttccttccctttcttctcctgctctccatcatgttatggagaccagtgaggaaccagtgttaacttggtgacaatgtgacagctggtgctttatctaagctccgttttctatttcttgggaatgctttattgtggaaactgcttcagatacttaaattgaatcataacttgcttctgtaaattgcgtaaagacaacaaactgattttagtttgaaaagtttatcttttacttgtaaaccttgtttgccagttaccttccgaaagctgtgtaaagagttatttttaacaaagtcttaacaatatatgttactttttagatactatagaaaataataaatataacctgtaacccacaaaaaa

SEQ ID NO: 75284 - DNA, 478 bp, Homo Sapiens
  misc_feature (420)..(428): n is a, c, g, or t
ggttattttaccatcacagtttaaatgtatatcttttatgtctctactcagaccatatttttaaaggggtgcctcattatggggcagagaacttttcaataagtctcattaagatctgaatcttggttctaagcattctgtataatatgtgattgcttgtcctagctgcagaaggccttttgtttggtcaaatgcatattttagcagagtttcaaggaaatgattgtcacacatgtcactgtagcctcttggtgtagcaagctcacatacaaaatacttttgtatatgcataatataaatcatctcatgtggatatgaaacttcttttttaaaacttaaaaaggtagaatgttattgattaccttgattagggcagttttatttccagatcctaataattcctaaaaaatatggaaaagnnnnnnnnncaatcattgtaccttgatattaaaacaaatatacaataagtatttctaaa

SEQ ID NO: 75285 - DNA, 553 bp, Homo Sapiens
  misc_feature (73)..(73): n is a, c, g, or t
aacgtgtcatagttgactgttctatgatgtttttcaaagattgtccttttttgaactataattctcttttttnggtattttaccatcacagtttaaatgtatatcttttatgtctctactcagaccatatttttaaaggggtgcctcattatggggcagagaacttttcaataagtctcattaagatctgaatcttggttctaagcattctgtataatatgtgattgcttgtcctagctgcagaaggccttttgtttggtcaaatgcatattttagcagagtttcaaggaaatgattgtcacacatgtcactgtagcctcttggtgtagcaagctcacatacaaaatacttttgtatatgcataatataaatcatctcatgtggatatgaaacttcttttttaaaacttaaaaaggtagaatgttattgattaccttgattagggcagttttatttccagatcctaataattcctaaaaaatatggaaaagttttttttcaatcattgtaccttgatattaaaacaaatatcctttaagtatttctaatcaaa

SEQ ID NO: 75286 - DNA, 781 bp, Homo Sapiens
  misc_feature (724)..(724): n is a, c, g, or t
aggttgcaaagttatcaacactgggccagagggtggagaggccaatgcgggtagaaggaggcagttatgtttatagtgaaggtgaaatttttctttcatttagaatggaaaacatccccaaatgtatcattataaactagtcagccttgactacacaaaattgacctttaagttgcttgagaaaaacacaatgcaaatcgttcagaagggtcaacatcctttggtgctaaaatcttgtgtatgttttcagaatggctttttctgtatgttatagaataatcactaaaggaaaggtagttgaatttaaagtcatgaagcaagactctttaattcagttattttaaacaagaattaaaaccccaaacatccttggcaggctttgaagcacacagaattttctagtatttcttattaaatacaccaataataaacatatacttagtttacctgatgagtttagacataattctatataatgttcgcttatattcatttattaactagcaacacttgtgcaagaacaaggtattctgcttgaaaacactgatttttaagttcctgttgcccgattgtaaagaaaatcatctgacacagaagcctggattttgctctccgtaacactggtgttttccttgagcctctaattcaaataaaacaaactgatacaccttacagccttattcatctgtgtctggataactcacttttcatctattgaataagnaaaagtgtttaaacttaataaaataaaaaattgtgcaccaattactacaggtccttg

SEQ ID NO: 75287 - DNA, 1700 bp, Homo Sapiens
ggtgccagtctcttttcaaattccatggaataccaggaggcctgggatgtctaataagaaaatcccacaaagacccctgacctcactaataagagtgagaaaacatattaatgaatatctggcagggaggctttacacaccttgacccactggatcaaatcacgatcataagtggacacagctgcatctgcggcagtgcaggcctcagagcacaatggctttatttgtcactgaatggcggaccaggcctacagcccgagggaggaccccagtcacagggttgaaaggggtgcttgagccctttgtttccagaagagcagagaaaatctcatgatggcaggagagcaggcagcacttttccagcacactggccaaagccgatgcggtaaccatccccctggcagtaccctgttatgatgacttcatccccgtccagcagaaacttcctggtctgaccattccccaggtctatgggcttcgttcccttccacgacagttccaacatggagccgaagttttctggctccggcccgctgatggtcccagaagccaggaggtcccccggccgcaggttgcagccgttgacagagtggtgagtgagctgctgcagcatcgtccagtacatgtacttaaaattggacttgcatatggtagccgcctggctcattccttctcctttcaggttaacagagaggttgatgtcaaatgtgtagggctcgtcatggcacagatacggcaggggcctggggtcctgcttcgggttgggcacagcaaagggcatgagagcatccatgggcaccacccacggagagacagtggtcccaaaactcttcccaaggaatggcccgagagggacatactcccacttctgaatgtctcgtgcactccagtcgttcataaggaccattccaaaaatgtgctcatgggccttggaaatggggatcggctctcccaatctgtttccagggcctacaaaaaaagccatttccagctccatgtccaagagcttgcaggcaccatatacgggaggcttagagtcatcaggtttcatctgtcccatgggccttcggattggggtgccagacaccacgacagaggaggcacggccatggtagcccactggtaagtgcagccaatttggcatcaacgcattctccttgtccctgaacatgattccgacgttggtagcatgctgccgagaggaatagaagtctgtgtagtctcctatggtggctggaaggtgcatcgtggcagaagcctgggagatgaatgcacacttccgaagttcggtgtcatctctgagcctggcttggctcacagacagcaagttctgcaagaacactctcgcctccttccaggcagcctgacccaggcccatgaagctgttgagtgtaggctgattgaagacatcctggtgtttggagaggacaggaccagtaaagaggtgcttgatgatgctgaggtccaggatctggtcgccaatggccacacctatcctcggtcttgggtcgcctctggtcgagaagacgccgtagggcaggttgtggatggggaagtcggaatcctcggccaccgggatgaaggacatgctgaagagcacccggcacggctgcgggcctgacttttggtctcaccgtgaacaccctcgtgccgaattcgccacccaggcctcgctaccttaataaccgttatagttactg

SEQ ID NO: 75288 - DNA, 415 bp, Homo Sapiens
cgctgtatgtcccaaacacgacagttcaacagtggagacgaagtttctggctccggccgctgatggtcccagaagccaggaggtcccccgggcgcaggttgcagccgttgacagagtggtgagtgaagctgctgcagcatcgtccagtacattgtacttaaaatttggacttgcatatggtagccgcctggctcattccttctcctttcaggttaacagagaggttgatgtcaaatgtgtagggctcgtcatggcacagatacgggcaggggcctggggtcctgcttcgggttgggcacagcaaagggcatgagagcatacatgggcaccacccacggagagacagtggtcccaaaactcttcccaaggaatggcccgagagggacatactcccacttctgaatgtctcgtgcac

SEQ ID NO: 75289 - DNA, 700 bp, Homo Sapiens
  misc_feature (39)..(39): n is a, c, g, or t
  misc_feature (44)..(44): n is a, c, g, or t
  misc_feature (567)..(579): n is a, c, g, or t
ctcctgccagcagtgaaggctggggctgagtcttcactntgttntgctgtgggtagtcaaaagggccccacagcagtgggtgctggggtcctgacttttcaagagtcgaggggtagagtggggttagggagaacctgccgcccatggtatctgtgttccagttctatttgtctttctcagtgatttagctttcaatttgcatactgcaaagttttgtttgccttaattaactttcttttataatgatgatcattttacaggaaataaactggttaaaactacatgatgacagaattatatcagagttgaaacaaacgccatacctaagcatttttttcaaaatcctttgttccatagacacttgattgagtacttaagttgaacatctaggtctatgaatgacgttggtcaaatgttttattgttctctgtttcggttttagcaggagagatttgctgtttcataaaagaaattgggagagtatatcattttatgcctgtaacttattatagcattggaataagctgttctttggaggtttgagagactttaccagtacaatcattnnnnnnnnnnnnnaaatataaaaagataaaataaaaagccggtcagtgtctgttgcacaaaattacaaccgctctctgcttgtatttgcctagttctccagaatgtagggaaaaataaaaattcaatgaattag

SEQ ID NO: 75290 - DNA, 740 bp, Homo Sapiens
cagccacctttggggcttgatttgcggccatttaaaaaagctttaactgatgcaggatgcaaccttaatcctttacaatatatcaaacagtggaaggcttttaccaagatggcctcagctccggccagctatggcagcactaccactaaaccaatgggtcttttatcacgagtcatgaatacaggatcacagtttgtgatggaaggagtgaagaacctggttttgaaacagcaaaatctacctgttactcgtattttggacaatcttatggagatgaagtcaaaccccgaaactgatgactatagatattttgatcccaaaatgctgcggggcaatgacagctcagttcccagaaataaaaatccattccaagaggccattgtttttgtggtgggaggaggcaactacattgaatatcagaatcttgttgactacataaaggggaaacaaggcaaacacattttatatggctgcagtgagctttttaatgctacacagttcataaaacagttgtcacaacttggacaaaagtaacacagaagaaccttactatgataatctacttggaatgtggataaatgtaaaaagaagaaaagttagaagagcaatatgtttccttctctgtaacagtgtcctaacagtgaaaatcagagttatttgttaatttttaaggaaattatatacttaatatgtattgattaaaagaaacatttcagaaataaaatttcaacattgttcaa

SEQ ID NO: 75291 - DNA, 1722 bp, Homo Sapiens
  misc_feature (385)..(385): n is a, c, g, or t
  misc_feature (691)..(738): n is a, c, g, or t
  misc_feature (1486)..(1494): n is a, c, g, or t
ggggatctgcgggagcagacccacacccggcactatgagctgtatcgccgctgtaagctggaggagatgggcttcaaggacaccgaccctgacagcaaacccttcagtttacaggagacatatgaggccaaaaggaacgagttcctaggggaactccagaaaaaagaagaggagatgagacagatgttcgtccagcgagtcaaagagaaagaagcggagctcaaagaggcagagaaagagctgcacgagaagtttgaccgtctgaagaaactgcaccaggacgagaagaagaaactggaggataagaagaaatccctggatgatgaagtgaatgctttcaagcaaagaaagacggcggctgagctgctccagtcccagggctcancaggctggaggctcacagactctgaagagagacaaagagaagaaaaattaactctgctgtttgctgcatgctgcatgagacacagggtcctgtttgggcttcctgtagacacccttttcctgcgcaacagagctgggcctccctttctctaatttcccccttaacatgcctggggggcatacaatccaacccgcgccctctcctctcttcctgccaaggtttatagaaacctgagaatctgagggtgatgtctggccgctggtcaagaagccaacagtcatgtggctcgcagatgcatcctgcatnnnnnnnnnnnnnnnnnnnnnnnnnnnnnnnnnnnnnnnnnnnnnnnncatctttgccagaggtgtgacatggtcagggggcccatctgctactctttcccaccagctcccctgttccagttctggttgctgttagtttccctgaggtatttgcaaccaccatggctgggtaaccaccgatcagcacagctgtccccttggtctcctgtatcccagtcactagtcctccctggtccaccccaccctcatcctcaggagccacagccatttcttagagggtttcaaaaggacagcctttggcgccttttccttctaacctttgagtccagccctttccagttttcattcactcgaagtaactgcactcaagctgtgctcaaaatcggcaacgcatttatttacaccaagcccttcccataaaacacaactgctgaagaaaatagcagacgtttcccctctctctaactctgggtatcccacagatgcaaaagggagaataaacctgaatattattacccccccgcgaaaaccgcggcgtcaagtgtccacgaaaaagacaaggcgtagcccccgcagaactgactgtgcaccgcggtgagacagatttttggtggggccggccctcggccccctcgaaaaaattttttctaaaccccatttcccttttggggcgcccgcgggcccccccggaggggggaagagtgggacaaaagggggcacctataaatttgtttttccccaaagggaaaaacccttgtgggcaccaatgaaatagagggggcttcgggagattttnnnnnnnnnaacataaaaaaagaacacgcccccccgcggggggcgaaaacgcccaagggcggctttttctcagtaaaacaaaactccccccaaaacgtgggaagttttctctctcgggagggcccttatttgacccgggggcgttctctatccccaaccacgtgggcggaggctcccctaaggagagcgcgcgtcctctcgataaatattgcgcgacgacgtgtttcagcgcccccc

SEQ ID NO: 75292 - DNA, 636 bp, Homo Sapiens
  misc_feature (367)..(405): n is a, c, g, or t
cccaaaatcagtctggacatttactactttttagactttttgacggtgaactttctgtataaaaattggctgggttttgagcttttggtaagaaataaaagccgattaagcactggccgccccgcggctggtacccaatgcccgagtcactgtggcagcattcgcactggtgtggggagtcctttcaactcaaggaggctgggtttctgggcacccttgaagttttctggatgtctttttatctttctcgtgtgaactgcactacaaaagagaccagcccacttcccaagccagccagacacctgggtcttgagccataaactggcgtagttaagctttgcagcttccagtgtattttatttattcnnnnnnnnnnnnnnnnnnnnnnnnnnnnnnnnnnnnnnnacagaaactttttaaaagaaattggattcgaaactggatgtgtattcgtaacctcataatttttatttgtgtattgtttcttttattatttcagttaaatttttacattattttgcatgtatatttctttgtacagagaccttacatgtttacacagtatgatgtgatgtaaatattttattttgccatcagttattttaaaaaattaaacatatttgcctgtacatatgc

SEQ ID NO: 75293 - DNA, 1557 bp, Homo Sapiens
  misc_feature (147)..(147): n is a, c, g, or t
  misc_feature (876)..(876): n is a, c, g, or t
  misc_feature (1299)..(1300): n is a, c, g, or t
  misc_feature (1306)..(1455): n is a, c, g, or t
  misc_feature (1465)..(1480): n is a, c, g, or t
gtgcatctcacgcccgacgtggcttctgaaacgtgcattcaacctcaaacttttgcataaaatagaatgaatcgttttgctctgatgaaatgtaggccttacttgtatataagactgttcctgccttcggtctgtcattttcccacntgcctcccctccacccccccacccaccacctggggcttcctctgggggtccgagggtcttcccatcacatgaagacatcaggttgggtcctgccccactgcccctccccctgttcctgccccaagccgtcaatcagattgtggagcagtacacagtcagatgaaaatactgtaaatgcactcattgggggttttttggttttacttcatatcatgtgcaatgttgtggctttaacattttatgcaactatttatgaagacctctgttgtacctgtaataaatatatagaaaaagcacatacttcgtatggtgagctttatggttttgtgtgtgtgttggggttggcgggtgggtgggtagggtcgtagccctgtgccatcggttcaaagagacttttcgtgaaatttgttggttttgaggactgtaaaagtgatttcatactctgaatataaaactggataatagggtaatgttttaaaatttattatgctattattcagaatgccaaagtattattttttttcccaaaatcagtctggacatttactactttttagactttttgacgttgaactttctgtataaaaattggctgggttttgagcttttggtaagaaataaaagccgattaagcactggccgccccgcggctggtacccaatgcccgagtcactgtggcagcattcgcactggtgtggggagtcctttcaactcaaggaggctgggttntgggcaccttgaagtttctggatgtctttttacctttctcgtgtgaactgcactacaaaagagaccagcccacttcccaagccagccagacacctgggtcttgagccataaactggcgtagttaagctttgcagcttccagtgtattttatttattcttttgttgggtttttgtttgtttcttcttgtaaaattgtacagaaactttttaaaagaaattggattcgaaactggatgtgtattcgtaacctcataatttttatttgtgtattgtttcttttattatttcagttaaatttttacattattttgcatgtatatttctttgtacagagaccttacatgtttacacagtatgatgtgatgtaaatattttattttgccatcagttattttaaaaaattaaacatatttgcctgaaaanntaaaannnnnnnnnnnnnnnnnnnnnnnnnnnnnnnnnnnnnnnnnnnnnnnnnnnnnnnnnnnnnnnnnnnnnnnnnnnnnnnnnnnnnnnnnnnnnnnnnnnnnnnnnnnnnnnnnnnnnnnnnnnnnnnnnnnnnnnnnnnnnnnnnnnnnntttttgtcgnnnnnnnnnnnnnnnnaaaaatttttcctaaaacccttttggggcgggggcggcccccatgtggaaagaggaaggggggtcaaattgtgtccc

SEQ ID NO: 75294 - DNA, 1265 bp, Homo Sapiens
ttacggctaggtacgaggcctgggtgttgaattcggcacgagggcggcgggtgtgggaggtggcgacggccggggccggggtcctgcccggctgcggaggcgggcgcgacgggcgcgggggtcgctgctcctgaggcgatgatgggcaaggaagaggagattgcgcggatcgcccggaggctggacaagatggtgaccaagaagagcgcgcgtttgtcaccctccgtctcccatagcatttgtcgccggcaacagtttggagtctgaggagggagccatggatttgctgcgggagctgaaggccatgcctatcacgctgcacctgctccagtccacccgagtcgggatgtctgtcaacgcccttcggaagcagagctcggatgaggaggtcattgcactggccaagtctctcatcaagtcctggaagaagctcctggatgcttccgatgccaaagccagggagcgggggaggggcatgcctctgcccacgtcctcgagggatgcctcagaggccccggatcccagccgcaagaggccggagctgcccagggcaccgtcgactccgaggatcaccacatttcctccggtgcctgtcacctgtgatgccgtgcgcaacaagtgccgcgagatgctgaccgctgccctgcagacggaccatgaccacgtggccatcggtgcggactgcgagcgcctgtcggctcagatcgaggaatgcatcttccgggacgttggaaacacagacatgaagtataagaaccgtgtacggagtcgtatctccaacctgaaggatgccaagaaccctgacctgcggcggaatgtgctgtgtggggccataacaccccagcagatcgctgtgatgacctcagaggagatggccagtgatgagctgaaggagatccgtaaggccatgaccaaggaggccatccgagagcaccagatggcccgcactggcggcacgcagacagacctgttcacctgcggcaagtgcaggaaaaagaactgcacctacacacaggtgcagacccgcagctctgatgagcccatgaccacctttgttgtctgcaacgagtgtggaaaccgctggaagttctgctgacccctcgtgtagatgtgctgcagccttgggccctccccggcccacgtcctccgttgacacagcttctctggagaccctagaaggcggcatgtcctgccctcaacctgcctgcctggattgcacctttctgccctttccccctcattattaaatgtttctttttgccaaa

SEQ ID NO: 75295 - DNA, 319 bp, Homo Sapiens
gcaaaaagaaacatttaataatgagggggaaagggcagaaaggtgcaatccaggcaggcaggttgagggcaggacatgccgccttctagggtctccagagaagctgtgtcaacggaggacgtgggccggggagggcccaaggctgcagcacatctacacgaggggtcagcagaactgcgagaaagggggtgaggcctccagccttgtggccacatgagatcccccagagtggaaggccgcacaggctcacccaaggctgggctctccacccaccatgcccaagactcccaggaggctggttgggcagggccatccccag

SEQ ID NO: 75296 - DNA, 539 bp, Homo Sapiens
  misc_feature (100)..(100): n is a, c, g, or t
cccttttattatttcattataactatcctaaaacttacatacattgcctatgtttggcattccataacataataattataataatcccccccaatgtcangaaatgtatgtgtgagttcccatgtttattggccaatttataagctttttaatattgtactattttaaactaaaatgtagaaagaatattatgtttatatacagtcagataaattattaactgttgtaatttaagctgaaaatgaaactattttagtatcagtatagaagaaaagtatagtttctaatcatctataattttaaaatgcaaagcctataaaactttcaagatgttttgcctgtttgtttttaagatttataataattttctatctttagcaagtagctatttttaagccaggtaacttctttatttgaactgtattatactctcagaccctcatcctgcctagaaatgaataagtaataaataattactctgtattatttacttcttttattttatagtaaaatattcatttggatggacattaatttga

SEQ ID NO: 75297 - DNA, 735 bp, Homo Sapiens
aagtcctgatgatccttggagatgggagaaaaagataccagggataattaaaatccacagccagtttcatcagtttcctcatccatcctgcaaataaaaatgttaacaaggagccaaacttattcgttctggttttacaatttattttgaccgttttttgggtgaaaattgcaaacagccaagcaagtggctggaatgccccagtctaagaaattcaaaaacaatcactgagtaagccctaattacattttactcttgactccaggaaaagaaagcaagcttttatctaatctagagggaagtattcgtgagcaataaaaatcacttttttgagttgaataataatcagttaagaatatttaccgcatagcaacacaacatataaagatttgttacaagttgtttacagatgtttgactatttttgctgaagtattttagagtattgaatgtcttctctcttcaagtttctttcatgttcctaatttcagctcctgtagccagagatcacaggtcttccctgtgaaactttggtttctttctataaatgtgtgtggttttcagcgctcaactcctgtcttcaaatggtagtaagttctacttctacttctgtcattcagaacattttatgtcaaatgatgtaatgcagaaattcttgtgcatatttgtaactgaaggaagctttttagatttatttttgtttttaataaaattcagattcctattctaaaaaaaa

SEQ ID NO: 75298 - DNA, 1568 bp, Homo Sapiens
ccatgcaaagcggtttttcgaggcagtactatacggtcctaaggtagcgaggctgggtggcgcgcccgcgggaaacccgggcccgttgcatccgctgggtgtagccgtggggatggcaggttcggggaggctggtcctacggccctggattcgggagctgattctggggtcagagacaccctccagtccacgagccgggcagctgcttgaggtactacaggacgccgaggccgcggtcgcgggcccatcccacgcccctgatacgtccgacgtcggggccacgctgcttgtgtctgacgggacccacagtgtccgatgcctggtgacgcgggaggccctggacacctcggactgggaggagaaggagttcggcttccgcgggacagagggccggctgctgctgctgcaggactgcggggttcatgtccaggtcgctgagggcggcgcgcccgcagagttctatctccaggtggaccgcttcagccctgctgcccacggagcagccccggctacgggtgcctggttgcaaccaaagacttagatgttcagaaaaagctctatgactgccttgaggagcacctttcagagtccacctcgtccaatgcaggcctatcactgtcccagcttctggatgaaatgcgggaggaccaggagcatcagggggcactcgtgtgcctggctgaaagctgcctgacacttggagggcccttgcacagcaccccctgtcacccactgggctgcctcacgatgcaaggccacgggagaagctgtgtacactgtccccagctcaatgctgtgcatctctgagaatgaccagctaattctgagctctctaggcccctgtcagaggacacagggccctgagctgcccccaccagacccggctctgcaggacctatctctgaccctcatagcctctcctccttcctcacccagttcctcaggaaccccggccttacccggccacatgtcatccgaggaaagtggtaccagcatcagccttctgcctgccctgtccttggctgctccagacccagggcagagaagcagctcccagccctcaccagccatctgctcagcccctgccaccctgacccccaggtccccacacgccagccgtacccccagctccccactccagagctgcactcccagtctctcaccccgtagccatgtccccagtccacaccaggctcttgtgaccaggccccagaaacctagcctggagttcaaggagtttgtagggttgccctgcaagaatcggccgccttttcccaggaccggagctaccaggggagcccaggagccctgctctgtctgggaacccccaaagaggcatcgtgatggttctgccttccagtatgagtatgagccaccctgcacgtccctctgtgctcgggtccaagctgtcaggcttcctccccagctcatggcctgggccttgcactttctgatggatgcacagccagggtctgagccaactccgatgtgagacgtcacgcaggacagataccgctccacactctgcttcctttgagttttttaataaaataatctcatgcggcaaa

SEQ ID NO: 75299 - DNA, 983 bp, Homo Sapiens
cgactggtagcaggagaaagtattaaggtcaaataggtccgcaaaccggtcttgttgggcacttcaggccctgtgtcctctgacagggcctagagaggctcagaattagctggtcattctcagagatgcacagcattgagctggggacagttgtacacagcttctcccgtggccttgcatcgtgagcagcccagtgggtgacaagggggtgctgtgcaagggccctccagtgttcaggcagctttcagccaggcacacgagtgccccctgatgctcctggtcctcccgcatttcatccagaagctgggacagtgataggcctgcattggacgaggtggactctgaaaggtgctcctcaaggcagtcatagagctttttctgaacatctaagtcttggttgcaaccaggcacccgtagccaggggctgctccgtgggcagcaggcttgaagcaggtccacctggagatagaactctgcagggcgcgccgcccatcagctgacctggacatgaaccccgcagtcctgcagcagcagcagccggccctctgtcccgcggaagccgaactccttctcctcccagtccgaggtgtccagggcctcccgcgtcaccaggcatcggacactgtgggtcccgtcagacacaagcagcgtggccccgacgtcaggacgtatcaggggcgtgggatgggcccgcagaccgcaggcctcggcgtcactgtagtacctgacggcggcgagcaggcgtcaatcccaccaccccgggcctccgcctcggtctccgggccctgaatgggggctcacactcaagcagctgcccggctcgtggactggagggtgtctctgaccccagaatcagctccacgaatccagggccgtaggaccagcctccccgaacctgccatccccacggctacacccagcggatgcaacgggcccgggtttcccgcggcgcccagccatcccaaaaattccggccgtacagc

SEQ ID NO: 75300 - DNA, 718 bp, Homo Sapiens
ggaagcagagtgtggacggtatctgtcctgcgtgacgtctcacatcggagttggctcagaccctggctgtgcaatccatcagaaagtgcaaggcccaggccatgagtctggggaggaatgcctgacagcttggacccgagcacagagggacgtgcagggtggctcatactcatacatggaaggcagaaccatcacgatgcctcatttaggggtgttcctgaaaggggtattggtgtctggggaagaggctaacaacggaccccagaccccactccaaaggctacaccagtcgcatccactcgccagctcgtacctcatggccttcacttgttcgtacccgtccagcctgcagaaggggactatgctcacccagacagagcagggctcaatgggatcccctggtagctccggtcactgggaaaaggcgacagattcatgcagggcaaaccactacaaactccttgaactacaggctaggtttctggggcctgatcacaagagcctggtgtgagtactggggacatgtgctacggggtgagagactgaggagtgcagctctggagtggggagctgggcggtacggctggcagtgtggggacctgggggtcagggtggcaggggctgagcagatggctgatgagggctgggagctgcttctctgccctgggtctggagcagccaaggacagggcaggcagaagactgaccggtgctacgaa

SEQ ID NO: 75301 - DNA, 1280 bp, Homo Sapiens
  misc_feature (65)..(65): n is a, c, g, or t
  misc_feature (76)..(76): n is a, c, g, or t
  misc_feature (123)..(124): n is a, c, g, or t
  misc_feature (145)..(145): n is a, c, g, or t
  misc_feature (170)..(171): n is a, c, g, or t
  misc_feature (181)..(181): n is a, c, g, or t
  misc_feature (205)..(205): n is a, c, g, or t
  misc_feature (213)..(213): n is a, c, g, or t
  misc_feature (225)..(225): n is a, c, g, or t
  misc_feature (241)..(241): n is a, c, g, or t
  misc_feature (390)..(390): n is a, c, g, or t
  misc_feature (1112)..(1112): n is a, c, g, or t
  misc_feature (1160)..(1160): n is a, c, g, or t
  misc_feature (1177)..(1177): n is a, c, g, or t
  misc_feature (1223)..(1223): n is a, c, g, or t
  misc_feature (1235)..(1235): n is a, c, g, or t
  misc_feature (1256)..(1256): n is a, c, g, or t
cccgtgtctgactgaccctcctgtcccaggattagggctcttaccgggattcgtgtcatatgccntcacatttggntcccactttggagttactgagcttgagccgtcttgcatcgccgcccnntgggcccctcagtctgtttcntcgtgactcgctcgcctctgcccanntgatgcctcntgctgagacttgcagaggtgcccncagcctgntgcccctgcccnagattcgggtgccccnaccccagcgctgcagctggagcactgcccagccagagctgagcgcgcttctcccggtccaagaggtcgtgcagtgctaaggctctccgagccacgtaccagctcaccaaagcccggccccgagtgctgctgcagagctcagagcctggngacccagggcctcttcgaggccttcttggagcccctgggcaccctgggctactgtggggctgtgggcctgttacccccaggcgcagcagctccctccggctgggcccaggctccactcagtgacacggctcaagtctacatggagctgcagggcctggtggacccgcagatccagctacctctgttagccgcccgaaggtacaagttgcagaagcagcttgatagcctcacagccaggaccccatcagaaggggaggcagggactcagaggcaacaaaagctttcttccctccagctggaattgtcaaaactggacaaggcagcctctcacctccggcagctgatggatgagcctccagccccagggagcccggagctctaactcatcatccccatcagttttcctccctctcagacctgtctttgaggacaaacagatttgtcagctgtcagggtgcagtgggacgtcagagactatgtggtccatcgccttcattgtgtaaatgaggacacagactggcttggtcgcagtgactgtggtgtccttgagatgctcacattactgcccggcctgcctcccacctggaagtctgggaatgaggagattgagataaacttttgaaatcccaaacatgtctgtttatggctctttggtcccctttgctcccagtggtgacttttgtgcttctgagttgtcccctgagagcttggtctgggaaaanaggaaggaaggggtcctcactggaggaagaggaacctttctaagtcangggtaaggggaatgggnacagttggttcccggttctaacctccttttctggactgacaagtgncctggctttttncagggtcctttctcctccaantttcactaaatggaagccttcccc

SEQ ID NO: 75302 - DNA, 687 bp, Homo Sapiens
  misc_feature (44)..(44): n is a, c, g, or t
  misc_feature (280)..(346): n is a, c, g, or t
tcatatcatgccttatggaatgtctttttctgtatttctctctntgctggtattcacctgattaaatagtgctctaaaaatcaccatggcatatggaaagtctcaaaattataccaaaagtgataacttatgtcgttcttaagtggagtgaaaggatagcatcagtgagagccagtgttgcccaccaggtctccctttcttggagggcttgttggggctgaggaatctgctagtaatcgttacctgcctctagtgctgtggtgaacttgcgacagggtcnnnnnnnnnnnnnnnnnnnnnnnnnnnnnnnnnnnnnnnnnnnnnnnnnnnnnnnnnnnnnnnnnnnggggtacagcctagttattgggaatttctttaaaagagttcctgggattctgataagaagccaggttgagaaccactacattagaagactgaatggtttaatttacatcctatgttatgattggtctaagggataagatttggggtctaacctttcctttcactctagttagtcatagtccttgacttatgcctatatctttgtaagaaatagtatgtttcatttgtgatagtattggtagggctgaatatggatggcatctactgtaaaacaagtctaccttgtcagatgtgcaaaagctttcactcttgttctcaaataaacttttgtgggttttaaaa

SEQ ID NO: 75303 - DNA, 1010 bp, Homo Sapiens
ctaattttgttaatttcccatagcaccttggcgatgttgaaaacaaatacaaatacaaggatgtactcattttaacattttatgcatgagcatgtgtcacaccaattttgggggtaacagttttgacaacaggaacaaatctaagcaatcgacaaaacagaagccggataactggctctgacccccacccccaacatttaagagatgcaaaggacacctgaattaggttaaaaaaatcaagttgatatggatatttcaacagtgttctgtgctgcaaaactgaaaataaaaccatttaatacacagcccattaatatctgagttacgcttttaggaactgtcaactcgaagattcataaaaagttgtcagcttttaaaaataaactttaagttatctaataatcaggtgaatttcaaaggaggatttactcacaacttgaaaataaattctctttcaacttcttaaaatatcctcattcagctaatgaaaagggaaacatatatgtatcttttcggaagctcagactagcatatgcccaaaagcctaaagttaaattaatggccaccaaaattgtaaggaaatataaaaaattaggaaaaaatccatcatatattatagttaataatttataaaagcccctcagaaggaatacactgttctcttttgagttttatcttttctgtaaaaacaaaattggtacttttaaaatatggttaatatatatattgccagcctaaataccagagacttaaccccagtgttgttcaactgtgtcaaagtaaaaccagtggacatttaagccaagagactaattattaaggccataactaagaaaactagagaagtgttcattaacttttaaatactattttacgttccagcaacattctttttgttcttctttaccctagtgaagatgctaacattccatcattaagcctttccaaagcaaacctgtttatttaaaaaagaaaaaggaatgtgaaataatattcaaacaatcttaatt

SEQ ID NO: 75304 - DNA, 989 bp, Homo Sapiens
  misc_feature (211)..(419): n is a, c, g, or t
ccttatgaaggatttgatttcgggcggccttgaaacccgcaccggctttaagtctgcttatggcttgtcaatttttcctggttccctgtttgggtaacgttaccccttgatgagtgtcccgtcgcgcagcgaagaccggccaggagtagtggcgggagcggagacgccaataccaaaccctctcccgcgcgtgccgattcataatgcactnnnnnnnnnnnnnnnnnnnnnnnnnnnnnnnnnnnnnnnnnnnnnnnnnnnnnnnnnnnnnnnnnnnnnnnnnnnnnnnnnnnnnnnnnnnnnnnnnnnnnnnnnnnnnnnnnnnnnnnnnnnnnnnnnnnnnnnnnnnnnnnnnnnnnnnnnnnnnnnnnnnnnnnnnnnnnnnnnnnnnnnnnnnnnnnnnnnnnnnnnnnnnnnnnaagaattcggcaagaggtaactttaggcttttgggcatatgctagtctgagcttccgaaaagatacatatatgtttcccttttcattagctgaatgaggatattttaagaagttgaaagagaatttattttcaagttgtgagtaaatcctcctttgaaattcacctgattattagataacttaaagtttatttttaaaagctgacaactttttatgaatcttcgagttgacagttcctaaaagcgtaactcagatattaatgggctgtgtattaaatggttttattttcagttttgcagcacagaacactgttgaaatatccatatcaacttgatttttttaacctaattcaggtgtcctttgcatctcttaaatgttgggggtgggggtcagagccagttatccggcttctgttttgtcgattgcttagatttgttcctgttgtcaaaactgttacccccaaaattggtgtgacacatgctcatgcataaaatgttaaaatgagtacatccttgtatttgtatttgttttcaacatcgccaaggtgctatgggaaattaacaaaattag

SEQ ID NO: 75305 - DNA, 1096 bp, Homo Sapiens
  misc_feature (325)..(333): n is a, c, g, or t
  misc_feature (865)..(892): n is a, c, g, or t
  misc_feature (1021)..(1039): n is a, c, g, or t
agcgtacaatcaaaagaacagttgatggtagaattagaagaccttataggattgcctcgagcaagatcgcagaggtaatatgcctcccctcatccgccgcataaagtcagtgagaagcagatgcactcagacaaggtatatgttctgactcatggatgtggcacgggaatagatagcattagcctgttccctcccagtcccagatgagccatcagaccacttgtgtcccacataacaatgtgcatccatttccgaggaacatccgtgcgtagagaatgaaatatgctgcaatcatgtgtgcatccttactcctcacccccaaagnnnnnnnnnggcctagcagggaagcagcatgcaggcttcacagcttaatgccaaggacagcgagtgaggctgagagcttctcttgggcctgctgggtctgtcagctctcggaatagggacagtccttactggtgccccaaggtgagacttggagaatattttgcttggcatatgtttggtctgaatggtgtagttgctggttccctagagaggaaaaggtggcaggcccagctttgctgggaaatggctcttaatttccagttgaaaccctagtagaattgtgaatgaaaacctcaaggttgagcccctctgccaagcagcagagctagtagaaggggatgcaggggcaaagcactcagttgccaagcaaggaggagagatgtacgtgggctgtgtggcagtccccacaccctgccctggcttcttcaggttatcgcaccactatggaatcctttgcagaatggtactcatataatggtttaaaacaacacattcataattgactctgtgcaggatgtcactcaatcagtttgggtttgcnnnnnnnnnnnnnnnnnnnnnnnnnnnnggtatcctgtacattgcagtgggtgtgaagatagtattttaatatttgtacaaagtttaatttaattttaattgttctatgtatataactgcatttctaaataattaaaaaaaagttcttatgaaggcnnnnnnnnnnnnnnnnnnncctgagcaggcggccgcaagcttattccctttagtgagggtaattttagcttggcac

SEQ ID NO: 75306 - DNA, 934 bp, Homo Sapiens
  misc_feature (710)..(836): n is a, c, g, or t
  misc_feature (886)..(886): n is a, c, g, or t
ccatgggacactatgaacagtggtaaaaaaagcaggctggtacggtcggaatcccgggatatcgtcgaaccacgcgtccgatatccctgtacgctgcttcacttgtggcaagatcgtcggtcaacaagtgggaggcttacctggggctgctgcaggccgagtacaccgagggggatgcgctggatgccctgggcctgaagcgctactgctgccgccggatgctgctggcccacgtggacctgatcgagaagctgctcaattatgcacccctggagaagtgaccacgctggaacccacccacccgctgtgctgaccatgggccctgagcgtcctgccccgaattcacgaggctgaggcatccgggagctggcgtaatgcctggccgcagtgtgtgtgtatcccataccccactctggaaggaaccatccagtaaaggtctttcagaaccactaaggtcccagccctcactaggatgtcaggagccaggtctaggcccagctttcacactgtggcagcccagtgaagcagactgggccatgaactctcctagccctggggccagcctgttccacaggcacccctgcaggaggcgctgccaggagagccttccatctcggggctctttgaggttccctccttctgggtgttcttcaggctgagcagagaggctcctgtaccctctctctcggaatctgaagagccagatttannnnnnnnnnnnnnnnnnnnnnnnnnnnnnnnnnnnnnnnnnnnnnnnnnnnnnnnnnnnnnnnnnnnnnnnnnnnnnnnnnnnnnnnnnnnnnnnnnnnnnnnnnnnnnnnnnnnnnnnnnnnnnnttaataaattagctgggcacagtgttcacacctgtagtcccggccactcnagggggctgaggcaggaggatcactggaacctgggaggttgccactgc

SEQ ID NO: 75307 - DNA, 727 bp, Homo Sapiens
  misc_feature (443)..(449): n is a, c, g, or t
  misc_feature (454)..(454): n is a, c, g, or t
  misc_feature (456)..(540): n is a, c, g, or t
  misc_feature (569)..(569): n is a, c, g, or t
acgcgggactcccccggggagggggaaggacggcgagcggggcagtctgggacgcgccgccgccatgatcatccctgtacgctgcttcacttgtggcaagatcgtcggcaacaagtgggaggcttacctggggctgctgcaggccgagtacaccgagggggacgcgctggatgccctgggcctgaagcgctactgctgccgccggatgctgctggcccacgtggacctgatcgagaagctgctcaattatgcacccctggagaagtgaccacgctgaaacccacccacccgctgtgctgaccatgggccctgagcgtcctaccccgaattcacgaggctgaggcatccgggagctggcgtaatgcctggccgcagtgtgtgtgtatcccataccccactctggaaggaaccatccagtaaaggtctttcagaaccaaaagaannnnnnnaaaanannnnnnnnnnnnnnnnnnnnnnnnnnnnnnnnnnnnnnnnnnnnnnnnnnnnnnnnnnnnnnnnnnnnnnnnnnnnnnnnnnnnncatttcccccctaacctaaacaaaataanaaaattctttggcgggccccctccgcccctcaaaaaaatttttcaaaaacaatttctgtggggcccccgggccccccaaaggggaaaggaaaatggggtaaaacttggttctccagggaaaaccggggcccaaaccaagggggtgggaattccccccc

SEQ ID NO: 75308 - DNA, 699 bp, Homo Sapiens
ctcggtcacatcaggcccgctaggtccagagagcgagcccccaatgcccggccagggtaagccgcagagaccctctcagcccccacctcaggttagggctctgcccgcagcctgacctctagccctggtggcagaggtccctcagctgcgaggctaattgggtgaccaccgattccagctgcggttaatccagcttgggcctgtctgcactgcgatcctcttgggctctcctaggatccccccatgccccgtaagaggtggaagacgcttccttccaggacagcaggctttgagtccagcacccccagcctgcctttgccaccagccccaccctgcagagtatatgaggcttgacagagtctgccccctcccccactgcaccccaagagagagagccccagccagcggaacagtttctattaccccctccctgcccccagacccatgtgatttctgctttcttctttagcaagatattctggtttctagataaggaagagtctctaatgagcccccgagccccagtctcttcagactcatggattggtctgaggggtctgaacgtctcctagccaatcagaactggctgtggaccaccctagcacggccacctctcagggccactggcaggccttcctgagttagatttgtagttgcatatttagctttgcacatttgaaataaaccacggttgcagcc

SEQ ID NO: 75309 - DNA, 1328 bp, Homo Sapiens
  misc_feature (1197)..(1245): n is a, c, g, or t
gcgccatcagccgcccgggagatatccgccgggggagaatagggttgcaccatcccagaagctgctgttagctcgccggtcctcggcacgccgcccgttcgcccctgcgctgtccgcccttcccctagcgttacttccggtccctcgctgagggggttcgtgcggctcccaggaggcgtgaaccgcggaccatgagcgtgggcttcatcggggccggccagctggcctatgctctggcgcggggcttcacggccgcaggcatcctgtcggctcacaagataatagccagctccccagaaatgaacctgcccacggtgtccgcgctcaggaagatgggtgtgaacctgacacgcagcaacaaggagacggtgaagcacagcgacgtcctgtttctggctgtgaagccacatatcatccccttcatcctggatgagattggggccgacgtgcaagccagacacatcgtggtctcctgtgcggctggtgtcaccatcagctctgtggagaagaagctgatggcattccagccagcccccaaagtgattcgctgcatgaccaacacacctgtggtagtgcaggaaggcgctacagtgtacgccacgggcacccatgccctggtggaggatgggcagctcctggagcagctcatgagcagcgtgggcttctgcactgaggtggaagaggacctcatcgatgccgtcacggggctcagtggcagcgggcctgcctatgcattcatggctctggacgcattggctgatggtggggtgaagatgggtttgccacggcgcctggcaatccaactcggggcccaggctttgctgggagctgccaagatgctgctggactcggagcagcatccatgccagcttaaggacaatgtctgctcccctgggggagccaccatccacgccctgcactttctagagagtgggggcttccgctctctgctcatcaatgcagttgaggcctcctgtatccgaacacgagagctacagtccatggccgaccaagaaaagatctccccagctgcccttaagaagacctcttagacagagtgaagctggaatcccccacagtctccacactgaccccctccagcccagggaagctcctcacaagaagcctggccctgggaggcaagaaggactaaggcagcatctgtcccctctgtgattcagagcccttagttgagannnnnnnnnnnnnnnnnnnnnnnnnnnnnnnnnnnnnnnnnnnnnnnnncctcagctgtgcaaggagaaagcatgcttaggaagttttcaggtccttgtgataaaacctccttaaatctgttcagaccaagc

SEQ ID NO: 75310 - DNA, 777 bp, Homo Sapiens
  misc_feature (268)..(268): n is a, c, g, or t
tgcagttgaggcctcctgtatccgaacacgagagctacagtccatggccgaccaagaaaagatctccccagctgcccttaagaagaccctcttagacagagtgaagctgaaatcccccacagtctccacactgaccccctccagcccagggaagctcctcacaagaagcctggccctgggaggcaagaaggactaaggcagcatctgtcccctctgtgattcagagcccttagttgagagcccctgccgcccctgccacccccttgcnccgctcccaccattgcccctcctcagctgtgcaaggagaaagcatgcttaggaagttttcaggtccttgtgataaaacctccttaaatctgttcagaccaagcaatgcgagcttcctctcctgtcccatgttggaagttgctctgaaggggtggtagatgctggaagccagacacaaccctgcgtacgctgctcagttggtggagactggggctgggactggagtcagcccagctgggaggaggggctggggaggatctgcagctgaagcccgaggcagggttggtgtgatgccaaggcaaagtggtgaggagaaaacaggaaacgggctttctctgaattggtaaatgggaaagaagtgagcaacttaagattgtcacaattaatcacaagtgtacaggattagactgggtttatatttaactcttgcttcataggtgtaccatttaaagagtgttatttaatgctaagtttaactgctttaataaagtttatttttaaatatcaaaa

SEQ ID NO: 75311 - DNA, 1080 bp, Homo Sapiens
ccacgcgtccggaatagggttgcaccatcccggaagctgctgttagctcgccggtcctcggcacgccgcccgttcgcccctgcgctgtccgcccttcccctagcgttacttccggtccctcgctgagggggttcgtgcggctcccaggaggcgtgaaccgcggaccatgagcgtgggcttcatcggggccggccagctggcctatgctctggcgcggggcttcacggccgcaggcatcctgtcggctcacaagataatagccagctccccagaaatgaacctgcccacggtgtccgcgctcaggaagatgggtgtgaacctgacacgcagcaacaaggagacggtgaagcacagcgacgtcctgtttctggctgtgaagccacatatcatccccttcatcctggatgagattggggccgacgtgcaagccagacacatcgtggtctcctgtgcggctggtgtcaccatcagctctgtggagaagaagctgatggcattccagccagcccccaaagtgattcgctgcatgaccaacacacctgtggtagtgcaggaaggcgctacagtgtacgccacgggcacccatgccctggtggaggatgggcagctcctggaacaactcatgaacagcgggggcttctgcactgaggtggaaaaggacctcatcgatgcccgtcacggggctcaatggcagcgggccctgcctatgcattcatgggctctggacccattggctgatggtggggtgaaaaaagggtttgccacggccacctggcaaacccaaccccggggcccaaggcttttgctggggaacctgcccaagatgcttcttggaattccgaaacaagcatccaggccaccctttaagggaaaatggtcctggctccccctggggggagaccaaccaatttcaaggcgcctggaacttttcttataaaaaaggggggggctttcccggttcttttggtgcgatccaatggcagttggaaggggccctctgtgattccgaagacctaaaaaccttctcgttcccatgggccccgcccacaaaaaagagattttctcccaatatgtccctta

SEQ ID NO: 75312 - DNA, 1077 bp, Homo Sapiens
gctggaccggtccggaattcctgggattagggttgcaccatcccagaagctgctgttagctcgccggtcctcggcacgccgcccgttcgcccctgcgctgtccgcccttcccctagcgttacttccggtccctcgctgagggggttcgtgcggctcccaggaggcgtgaaccgcggaccatgagcgtgggcttcatcggggccggccagctggcctatgctctggcgcggggcttcacggccgcaggcatcctgtcggctcacaagataatagccagctccccagaaatgaacctgcccacggtgtccgcgctcaggaagatgggtgtgaacctgacacgcagcaacaaggagacggtgaagcacagcgacgtcctgtttctggctgtgaagccacatatcatccccttcatcctggatgagattggggccgacgtgcaagccagacacatcgtggtctcctgtgcggctggtgtcaccatcagctctgtggagaagaagctgatggcattccagccagcccccaaagtgattcgctgcatgaccaacacacctgtggtagtgcaggaaggcgctacagtgtacgccacgggcacccatgccctggtggaagatgggcagctcctggagcagctcatgagcagcgtgggcttctgcacctgaggtggaagaagacctcatcgatggccgccacgggcctcaagggcagcggggcctgcctatgcattcatggctctgaacgcattggctgatggtggggtgaagatggggttgccacggcgccctggcaatccaactcgggggccccagctttttctggggactggccaaaggcttgctggactccggaaccagcatccctgtccaacttagggaccaaggtctgctccccctggggggagccaacaatcccaggcccctggaacttttcctagaaaagtggggggcttttccgcttctctggctcgtccatgccggttggagggccttccctgttatccgaaaaaccgcagaactttcccgttccttgggccccgacccccgaaaaaggatgttcccccagacttgccccttttag

SEQ ID NO: 75313 - DNA, 1471 bp, Homo Sapiens
  misc_feature (745)..(745): n is a, c, g, or t
  misc_feature (747)..(747): n is a, c, g, or t
  misc_feature (894)..(894): n is a, c, g, or t
  misc_feature (896)..(897): n is a, c, g, or t
  misc_feature (912)..(931): n is a, c, g, or t
  misc_feature (1265)..(1273): n is a, c, g, or t
  misc_feature (1312)..(1343): n is a, c, g, or t
ctggtaccggtccggataattcccgggatatcgtcgaccacgcgtcggcgcgggtggagcggaagcgcacgcctgctaggatcagcggtggtggttccgcgatggtaggcggcggcggggtcggcggcggcctcctggagaatgccaaccccctcatctaccagcgctctggggagcggcctgtgacggcaggcgaggaggacgagcaggttcccgacagcatcgacgcacgcgagatcttcgatctgattcgctccatcaatgacccggagcatccactgacgctagaggagttgaacgtagtagagcaggtgcgggttcaggttagcgaccccgagagtacagtggctgtggctttcacaccaaccattccgcactgcagcatggccacccttattggtctgtccatcaaggtcaagcttctgcgctcccttcctcagcgtttcaagatggacgtgcacattactccggggacccatgcctcagagcatgcagtgaacaagcaacttgcagataaggagcgggtggcagctgccctggagaacacccacctcttggaggttgtgaatcagtgcctgtcagcccgctcctgagcctggcctttgacccctcagcctgcatactggtatcctggtcccagctcctgccagggctgttaccgttgttttcttgaatcactcacaatgagaaactaacattttgctttttgtaataaagttaatttatattcagttcccagcaaaananaaaaacaacacaacccggaacaaaaagccccgacagaaaaagcggatacgcaacacgcacgaccaaaataaaagcgaaacacaccacggacaagcgtaacagatcgcgcgcccgatgcccccttgatacagaaatcccgtccatacngnncttttttggtggcgnnnnnnnnnnnnnnnnnnnnaaaaacaagttttctcaaaaccacctctttttgcgggggcggcgcggggccccgcaacaaaagaacgaagagaaaaacagcgcccgattataggcgtcctccccaaaaggaaaacccactctccggccgtaagcaaaaacggcgtttcgcggcggttcctccccccccacaaaaaacaaagaacgcccccgcgggggagcaaaacccgccgatcggtgccgccaaacaaaaccccccaaggggcggggtttttgggggcgcccctttatgggggatccccacaaaagcgggggttcccccaagcgggggtgcccttatatcatataatattctnnnnnnnnnggtcgcggctttttttcccgaagaaagaaggtgttgcgnnnnnnnnnnnnnnnnnnnnnnnnnnnnnnnngcggtgagaacccctcctccaaaccgggggttgtgtgagagaccactatcccgccccggggggtataccccgcccctgggtcgccgtcccataaaaaatacccccctccgcgtgggcagaaacacgtg

SEQ ID NO: 75314 - DNA, 482 bp, Homo Sapiens
aacgggggaaaagtcatattttccttctgtttaaacttcaattccaaaggtgcacagatgtattcataaaggaagacattagatcaagccattgtggccaccaggctctgtggacccatctcagtggagaattcgttttggacccgtggctccgtgcagctgtggactcgagtgccatccactggtgtgagtcttgcggggaggccacaggaaaacgttctgtgccaagtgccgcctcgctgtgtccggcatgggactgcgctggagggtccggcgtggaaggcagacctcctgtacctctatcgttcccatttgtggcatccaaaggcggaaggctcatggcttccccactagaggcggcgtcttgggctttcccattggattgtgaaaggcattaagactgtttggagatgttggctccatttcctgtcacaacaggttcaataatgacgaataaaaggtgctgagacccgtgttttcaa

SEQ ID NO: 75315 - DNA, 907 bp, Homo Sapiens
  misc_feature (699)..(707): n is a, c, g, or t
gggcatgccatgaaggtaagccacgctcccttcagaattcagaggcagggagaaattccagtttcacctaagtctcataattttagttccctttgaaaaaccctgaaaactacatcaccatggaatgaaaaatattgttagacaatacattgatctgtcaaacttccagaaccatggtagccttcagtgagatttccatcttggctggtcactccctgactgtagctgtaggtgaatgtgtttttttgtgtgtgtgtctggttttagtgtcagaagggaaataaaagtgtaaggaggacactttaaaccctttgggtggagtttcgtaatttcccagactattttcaagcaacctggtccacccaggattagtgaccaggttttcaggaaaggatttgcttctctctagaaaatgtctgaaaggattttattttctgatgaaaggctgtatgaaaataccctcctcaaataacttgcttaactacatatagattcaagtgtgtcaatattctattttgtatattaaatgctatataatggggacaaatctatattatactgtgtatggcattattaagaagctttttcattattttttatcacagtaattttaaaatgtgtaaaaattaaaaccagtgactcctgtttaaaaataaaagttgtagttttttattcatgctgaataataatctgtagttnnnnnnnnngtgtctttttacctacgcagtgaaatgtcagactgtaaaaccttgtgtggaaatgtttaacttttattttttcatttaaatttgctgttctggtattaccaaaccacacatttgtaccgaattggcagtaaatgttagccatttacagcaatgccaaatatggagaaacatcataataaaaaaatctgctttttcataaa

SEQ ID NO: 75316 - DNA, 2049 bp, Homo Sapiens
  misc_feature (1436)..(1447): n is a, c, g, or t
cagtcgacggtaccggacatatgcccgggaattcggccattacggccgggcattccttttggttctctgtgtaataatagcaggctacatagtgacattccagttccaagaaggtacatcctgtccattcattaattgctttgattactaggagggtttctgttcagttttgtttttaaatgtcttgctgatctagttctttcagatggaataaccttccagtcccttagagagtggaactagtccatataacccagcttcagtagcaaaagtagaagccgccacatcttttcatttctccaagaggagagtggggaaggttcccatgaccagctgggcagtcaggatttctctaggcattctaatgtgaaataagtgtagactgctgtcaaggaggcttcatcagaagatgtatagcatttgaatgtctaatgataatgcatatcattagaatccaagctttgaaaatttctgattaatgctcatgtatttctttatctttgtttttccttgtgaagaaagactttcaccactgtctgagtgatgatgctgttgataaggatgatgtcgatgactactatattgcatctctcaggaacagctgatgggaagggaggggctgctgagttcccttgttctagctagcagcacgctcctcagagagggggccgagttacagacagcagccgcattctcatgcaaaattagttttaaactgctagtgtgggcatcggtaccttttgcctgggtgataccgaagaattgttgaggatttagtatgctccgtagagacagttcagccagtcatttctgcattggagagacttctcatactttctttgaagactcatagaaagctggatctagagcttttgaatccttaattagcacagtagaaattagctttctatgggaatgctttagtgttagcagttgacaattaggcccatattcaatctgaatgggaacaaaagtaaatgcaatgataatatactgctagttagagaaacatgttagttgattatacctgaaatggattatttatctcatcagcaagtattatttgaataaaatgagaaatgcttaagaaaaattgttgctctatagtaatttggtttcgaagaatggaatggtaactattttttcccatcgttcttttgagagaaggaagtgtgatgactgatgatcttgaaaagcccatttctgattgcacgttgactggaattctttctttgtgtctgtggactagcgatgctgtttgtaaaatgaagattcgggactggctcatatctttttatctaactagatgtcagatcttgaaatctgtattctcgaagcaattctgccacttgatcgtattcacaggggccctggtaggctcctttagaaggaccatttctgttcctagagcttaactagaattcattcttcactgnnnnnnnnnnnngttacttaagaaagcatttctttcctaatctcactcaaatctgcagaattatttgtaattagtaatacaaaatctggccaaaaggagacttgtaaatagcgtaaagtggtgtcttatgctaaacggtggaatgtataggcagagaagctctttgaagttgtcagatgagctgggctcacaagcctgattcaaacaggctgtcggtctcctctcaccccttaatactgtgcagcccaaactcctaggactcttgaacatctgagcagttttgtgctttgagccactttttgacaaaaatggctccatttttccacagcgtggttttcttaaaatagtttaatgttttatagtctcatagtagtagtgttgctttctaagctataacagtcgactttattcttctactctgaaaaatcttgacttgtttgagtgtatataatatatataaagggagccttaatggattggttttcataatttaatattttttgtatttgctcttgtataattgtttttaacggaaagtattaaagaattgagggtggaattcttagaaccaaagttattcttaataaaaatcaccacatgcttggaccatgaaa

SEQ ID NO: 75317 - DNA, 481 bp, Homo Sapiens
ctggaaaggatggaatcaaacaatatgcaaatacttcagtgcctgctatcaaaactgctttactcagtgattccttcctaggcctccaaccatatggccgacagccaacctggtgctactcaaagtatatagaagccttagaacaggagagaattcttcttaagatccaagaagaactagaaaaaaagttgtttgcaggcttgcaacctctcacaaattttaaggctagctcttcaactatgtctttgaaaaagaatatgtctgcccacagcagccagaagtgacagcattcttgtgaatgtttacatcctgctgctgataggttcaaggaattctttaaaccagattctgctgacatgagaagctccagtgatttgtttttttgaaggtctgtatcagagcaagcctaacatctaaataaagtttgattctggattttccaggtgggaaataaataaagaaaatttggcttgtcttaaaa

SEQ ID NO: 75318 - DNA, 1119 bp, Homo Sapiens
ggacacatgaacaggttgttcaaaaagcaggctggtaccggtccggaatcccgggatatcgtcgacccacgcgtccgcaaattttcaggaaacaaaccactctagctatttgaagaggaatgcagatttatatgggagttttgaaactacatagtttcttacaaaatcatggaaggttggaggagcggtttcaagcttaagtctccagagattactcccatccaaacatacagtatggtgtacctagggaactgctcacttttgcaacagtcagggagttcactgttggaactattaatgttagaacatgttgcagtagttgtgttcaaggaatgaggaacctgctgtaacacttaatgactgtgcactggaatgcagaaaagttaaaccttctatgcctaaatgcctaaaacagacaaactggatagttatatttttagaatgatactgcgttttttagagtagtatgaattcctagatcagtcaaacatgcatgttatttagtttgttctttagtatattgttaactggcctaaatccaatgactgacatggtaaagattcaccacttctagcatactgggcactttttatttttgacttgattacattaactttttgaaaactattcagtgatttattcagccaatcttatgaggtacatctgagttgttctagatgctagaggatagtataacaggaaaaagcccctgctctcatggtgagacagataataagtatgtaatacaacttttcaaatagtagtatgaatggtaaaaaaaatagggaaaaggggtgggaggagctgaggtttgatagaatggtcatggaagatcccattaatgagatgtactttaagtagagacctaaatgaagataattttttctctagtactgaactagcactgtacaagtggattgcatataggcatataggcagaacttctctagtactgaactaacactgtacaagtggattgcatataggcatataggcagaaccaatgtgcaataattaagaatattaatttgcaatcatgtttgatggttaaatggtttattaatgttggagtgtcaatatgaaaatgggttgaataaaagatatatggaaatgccttgg

SEQ ID NO: 75319 - DNA, 1414 bp, Homo Sapiens
  misc_feature (71)..(105): n is a, c, g, or t
  misc_feature (1185)..(1207): n is a, c, g, or t
tagatcatatagggcgctagtcgtcgagccgaacgacgagcgcaggagtcagtgagcgaggaagcggccgnnnnnnnnnnnnnnnnnnnnnnnnnnnnnnnnnnncagtcgacggtaccggacatatgcccgggaattcggccattacggccgggtgtaaaattctgtaggacctattcacacttcttccttcttccatatacttctctggttttccccatagttcccctataatttcaagtttgttgaaacctgttaattttagtgggggattagaagaaaaacttggtggtttcttagcatgatggtgtatgtatgtggtaatggaaagtctgtaaaagtaaatatagtgtagcaaaaaagatttcactgagtattttagatactagtgcaaataaagatagaaaatcttgatcataatgtcttaagtttgggaactgtgatattaagaaaagaaattcccttctagaggtgctggccaaaaagccttttgggctaacttaagtattaaatttatatatttaaataattatattttaagttgtagaggattttcccaaggattttatgcttacttgaatgttctttgaatgttcagatgcatatcctaactggatgcttctcaaggccttactgcatatttgtgttgcatatttatgttagttgcaccagggccatttgtagtttgggcaaccgaatgccttaattggaaaaaaggcattgtggtttcccctatgatctaaattgttacattttaccatttcattccgaagttggttttactttattaaatgaagatttagttttcatatcgtatacatagctgtatagatttcaaaattaggttgttaatttgtgtcacttactatttttgtgttggtaatgctttaaatgcatacttaaaaatgaagtactgttatctaagctactgtgtttagaaaatgttaagaatgagcagaaatttttatagaaaagtataaacggaagaagagataagatactgcgaataggccctcaaacttaaaaacagaaaaactttgccagttttaaggacatattttgattctttcagtattcttaacacctttttaaacaaagttcttgatagtacccactattattgggtttgttttatgccattattgattcttgatattcaagcatttacaatgtagcatatttgannnnnnnnnnnnnnnnnnnnnnnggcatcattaacatttcatttgaaatgcatattgttcttgaagtactttgtttttagcataaatgttgtgcattttatcttagtgtttggatgaaaacatttgtgttgtttagctttcatttgctttgtatatttaataatgtacctttattttccagtatgcctacattttgtattgcacaataaatttattttaagctgaaaaaa

SEQ ID NO: 75320 - DNA, 700 bp, Homo Sapiens
  misc_feature (12)..(12): n is a, c, g, or t
  misc_feature (83)..(83): n is a, c, g, or t
  misc_feature (89)..(89): n is a, c, g, or t
  misc_feature (103)..(103): n is a, c, g, or t
ttggtttccggngccaaccaatgtgggagctgtaatagtaagagctttcttaccaaggcttggtattactgtggggtttggtntttttngtggtggtttattngattttggatttttttctcttttatgtgatctttgggaaaacacattcagaattatatctcgtttctacttaaatgtagtgcttagggttaattttttgtactgaagtctttattggtgggtgcatgctactgggaacaagtttttgtacaaaagcttcaatcagaatcactgtgcattactgagactctgtttatcactagccttctgtccctcccgcagaagactgttggattgaacaaaataatatgtattttgatttacttaaagtgcttgtaaatttcttagggacctgccacttttgactgtggatcagttgatgtacacttgtattattaaagcactcaataaatcactgtggctgataactgcacttctggtaacccgacatttgctttgtgtcctggtgaccgctgtagccctacgtgcagtgaggcttgtctaattcaattacaggttcaagtgtatttttcatctcaaacctctaatatttctttggagttgagttgcttagcatgtggaatttctccagctgtcagtagcctgatgattttatggttgttatagtaaattgctatcattttacatattgactggg

SEQ ID NO: 75321 - DNA, 713 bp, Homo Sapiens
cgctcactttcacgagcccccgaagaaaaagcggtctgtggtgttggacgagatcctggagcagctggaaggcagtgacagcgacagcgaggagcagacccttcagctgtgagctggcaccgagaggggctgctgagctagaattcccacctatgtctttccaagggactgttcacggcttgggacttggtctctgtcctgccccatcctcgtcacttgggaccacgagccctggttcagtcacccagggaagcctcccagcggctcatgaagcatcgagctccaagcccagatgccaagctccctggctgagctgaatgatgtcactcatggtggacgcgttctgctcacgggcccagagccctgtgaaatgcatcaaggtcctctccgctggccagcagcatccccaggcttctctcaggcgcccgtgttcacattttctccagcctgagacgcagcctcccacctggaagggcctgtgccagcaccaggcagagggcaagacggagagggcagagcaagaactgcactgcatctcactgcagtctgaatctagacatcgccattccccgaggtgcgacctcagactaatgacatcctggctgagcctctgtttttctctctaggaaatgggggtgataattgtgcctacctcagatagacagtgccagaattaagtgagtcaagccaagtaaagcccagagaagattctc

SEQ ID NO: 75322 - DNA, 996 bp, Homo Sapiens
  misc_feature (143)..(143): n is a, c, g, or t
  misc_feature (168)..(168): n is a, c, g, or t
  misc_feature (191)..(191): n is a, c, g, or t
  misc_feature (215)..(586): n is a, c, g, or t
gaaacccatcttccggaggagagcgaaagttccgtagcgcaggtcgaacagagacccagagggactccaggggaaccttgttcttatgtctgtcggttcccacctctgattagctcgatttgtgtgctgtaagggggcggacntatgaaaacgccacacggcgccttntacgttctgccctttgctgcctntgctcacatgtcttctgcgtatcnnnnnnnnnnnnnnnnnnnnnnnnnnnnnnnnnnnnnnnnnnnnnnnnnnnnnnnnnnnnnnnnnnnnnnnnnnnnnnnnnnnnnnnnnnnnnnnnnnnnnnnnnnnnnnnnnnnnnnnnnnnnnnnnnnnnnnnnnnnnnnnnnnnnnnnnnnnnnnnnnnnnnnnnnnnnnnnnnnnnnnnnnnnnnnnnnnnnnnnnnnnnnnnnnnnnnnnnnnnnnnnnnnnnnnnnnnnnnnnnnnnnnnnnnnnnnnnnnnnnnnnnnnnnnnnnnnnnnnnnnnnnnnnnnnnnnnnnnnnnnnnnnnnnnnnnnnnnnnnnnnnnnnnnnnnnnnnnnnnnnnnnnnnnnnnnnnnnnnnnnnnnnnnnnnnnaagaattcggcacgaggctcatggtggacgcgttctgctcacgggcccagagccctgtgaaatgcatcaaggtcctctccgctggccagcagcatccccaggcttctctcaggcgcccgtgttcacattttctccagcctgagacgcagcctcccacctggaagggcctgtgccagcaccaggcagagggcaagacggagagggcagagcaagaactgcactgcatctcactgcagtctgaatctagacatcgccattccccgaggtgcgacctcagactaatgacatcctggctgagcctctgtttttctctctaggaaatgggggtgataattgtgcctacctcagatagacagtgccagaattaagtgagtcaagccaagtaaagcccagagaagattctcatcagc

SEQ ID NO: 75323 - DNA, 562 bp, Homo Sapiens
  misc_feature (435)..(458): n is a, c, g, or t
gacaggaaaattcagttctaaccagatgttccagctatgttactcaaccagcagtgttaggagcagagagcacttgcactaagagctgatcaccatttgagatacgcggcttaacgcacatgtgagtgtagcttgctacatgaaaatgctaggctctagggcatgtaaaacatgaatacagaatactagattgttctaagtaatgtcatttcggtttgtgaatttgatttttcccttcatttcatgtcatattgaaaatgcaaacaaactgctctcaagaacacccagaagctatctgtgttaccagatgtgttgtgaacactctactatttttcataggtgcttccttgaaatatatgtccattgtagtggtggagagggactggactctctcaggctctttacttgccagttgtctcccgcagttaatggaannnnnnnnnnnnnnnnnnnnnnnntttatttagaatataatttaaacatgaaggtctattctttgcactttttattaatatatatatagataatctttaaaaaaattaaaattcaagtccattttaaa

SEQ ID NO: 75324 - DNA, 589 bp, Homo Sapiens
cctgttgggaccaaatgcagagcctccaactgaagaaagtcaaacggaaactgccctgcaagagagagacaggcggggtctcgctgaggtggtgtctgacagcgccgggttccctctgcagcccccagcactggactcggtggtggtttttctagactgcccttccatctggtgacttcggtacattgacttactcatcctgagagttcacctgcagatccacttgtggggcttacgtgggagacgtgctgagaaaagagcaacgcgcttctttcctcccagcgtcctgcccttcccatctctcctctgcctcctcccagggtgggcaggcagctgtgtcttggccctgacttgagggtccctccaccctctccaagggtgaagctgtggcagttccaggtggctccttccagaccacggaggagccctttgctgaaatccctgcttgttgctgcttctctccttttcctcagtcccggcagaggtgcaggaatgttgttcgcctttgcaaagaattaactttggatttttggactttcttgatccttgctatttttatatataaaacatacgcaatttctcttcactc

SEQ ID NO: 75325 - DNA, 653 bp, Homo Sapiens
caggggtcgtaatatatgtaaactcgcgtccgtgctgcgtgcccagagtagtggccgaataccttaacggggctgtgcgcgaggagagcatccactgcaagtcggtcgaggagatctcgacgctggtgcagaagctggccgaccagtcgggcttggacgtgatccgcatccgcaagcccttccacaccgacaaccctagcatccagggccagtggcaccccttcaccaacaagccgaccacgttccgcgggctacgcccccgagaggttcaggatcctgccccagcccaggatgcggctgagttcctcggcgaaggagcagggccctgctggtactccattgttgctctgcctcagaagcacatagctattgccattcatcctccgcagccggctgggcagtgccaccaagccattggacactggcctgagactgtctgcagttgcaccgcagatcctcctgcccggctggcccgacccaatatcagttcagtcatccgatcttccttggggaaatacccattaccgtcctgaacccttgtcatccactacttggctataagctccagaagtgacaagacacttcacatcttaaatatgtttcctagtttataattcatttgggcagtaaatgtttgttgagcacttaaaaaa

SEQ ID NO: 75326 - DNA, 1029 bp, Homo Sapiens
gggaaccggaagcctcgaggtttagtcccgcccccctctcctcgctgcttaggctccgcggcctccaagctgtagctatgacggcgcgcgggactccgagccgcttcttggccagcgttctccacaacggactgggtcgctatgtgcagcagctgcagcgtctgagcttcagcgtcagccgcgacggcgcctcgtctcgcggcgccagggagttcgtggagcgggaggtgatcgacttcgcccgacggaatccaggggtcgtaatatatgtaaactcgcgtccgtgctgcgtgcccagagtagtggccgaataccttaacggggctgtgcgcgaggagagcatccactgcaagtcggtcgaggagatctcgacgctggtgcagaagctggccgaccagtcgggcttggacgtgatccgcatccgcaagcccttccacaccgacaaccctagcatccagggccagtggcaccccttcaccaacaagccgaccacgttccgcgggctacgcccccgagaggttcaggatcctgccccagcccaggtgcaagcacagtgaagagttgccccaccaactgcagccccaggctttggactgttactccggtaaaggtggttcttcccctttgggattccaagcccaggcaaatggaacccatcaatgggcaagttgacagaggttctgcttgggataatgaagagctgcctgtttctttccagtgcctgcttctgggggcagtgaccttgtgaaccactcatttttatgcaagtggcatccctaaaacctgagatgaggaagacttcaagggttttacagggcccttgttttttaaatccaaattgataataatgatctcaaaacacagtgagaggtctgaaggctggcttctgaagaatccctgatgtcttattggaacaaccactgagctacggagagctctgctgtgatgggctaggcactttatatctgtgtgaatacagatttataaaacaggttaataaacttatccaaggtcacatttcagaaaaac

SEQ ID NO: 75327 - DNA, 831 bp, Homo Sapiens
gtcaagcagcccggagaggactgacggtccctgggaccctgaaggtcacccgggcggccccctcactgaccctccaaacgcccctgtcctcgccctgcctcctgccattcccggcctgagtctcagcatggcggatgggagcagcgatgcgcctagggaacctcgccctgcaccagccccaatcagacgccgctcctccaactaccgcgcttatgccacggagccgcacgccaagaaaaaatctaagatctccgcctcgagaaaattgcagctgaagactctgctgctgcagattgcaaagcaagaagctggagcgagaggcggaggagcggcgcggagagaaggggcgcgctctgagcacccgctgccagccgctggagttggccgggctgggcttcgcggagctgcaggacttgtgccgacagctccacgcccgtgtggacaaggtggatgaagagagatacgacatagaggcaaaagtcaccaagaacatcacggagattgcagatctgactcagaagatctttgaccttcgaggcaagtttaagcggcccaccctgcggagagtgaggatctctgcagatgccatgatgcaggcgctgctgggggcccgggctaaggagtccctggacctgcgggcccacctcaagcaggtgaagaaggaggacaccgagaaggaaaaccgggaggtgggagactggcgcaagaacatcgatgcactgagtggaatggagggccgcaagaaaaagtttgagagctgagccttcctgcctactgcccctgccctgaggagggccctgaggaataaagcttctctctgagctgaaaaaa

SEQ ID NO: 75328 - DNA, 623 bp, Homo Sapiens
gcgcaagatgtggtatctgggctgcccctcccagccatctgagctctttcagcagccaggagactttaaggacgtggccgcctccctttcctctggggaaagcaagaagaaggggagggattccctcctgctacagctgtgatgcattattgaagcactttagctgaagcaatggaccacaaacacttctccttggaagtgtgagagtttaaagtgggcaggacatactagggtttagcattttagccaatgtcttcctaggtggggctaggaatattgttacagtagagaggaagggaactccactgtgtgacagtcctttcaatctgccccttttcagccctacttttggcattccttgggagcctcagttgttgttcaaggccaaagttatctccgtgctgcaaggtcaccctcttcctcccccagcccctgagatcagatcttatttgctctgcaaagatgaatccctgcctcaggttagggtgagacaaaatcggtctggtaaaagggcctgttttcagggacaaagggaatgaggatgatctttggctgttgctgctctttatgaagaatcttatttgtaactttttattcatattaaagttgtttttaataaaaaa

SEQ ID NO: 75329 - DNA, 1413 bp, Homo Sapiens
aacgagcgaggcctgggtggcgaattcggcacgaggggcccattgactaaaaccaaaggcattgaggtggggcacacattttacctgggtaccaagtactcatccattttcaatgcccagtttaccaatgtctgtggcaaaccaaccctggctgaaatggggtgctatggcttgggtgtgacacggatcttggctgctgccattgaagtcctctctacagaagactgtgtccgctggcccagcctactggccccttaccaagcctgcctcatcccccctaagaagggcagtaaggagcaggcggcctccgagctcatagggcagctgtacgaccacatcacagaggcagtgcctcagcttcacggggaggtgctcctggacgacaggacccatctgaccatcggaaacagactgaaagatgccaacaagtttggctacccctttgtgataatcgctggcaagagggccctggaggaccctgcacattttgaggtttggtgtcagaacactggtgaggtggccttcctcaccaaagatggagtcatggatttactgaccccagtgcagactgtctaaatgcccccagcccacccctgcccccatttgcagccttggtgttcgttctaacactgcattttcctacacccctttcctggactgctctctccagaaacagcacagctcatggagggtgagatcatgttagggaaatcaatttttatctagtcatttgttcagattatttgtatttaaagtcattaacttgatccctttctccaaactggccatgccgccatatacctttccttttgtattccattgtggaagcttctaggaggctgagaagcaggagatccaagctccagtcctgggtgttaccctgaggggggaagtcacttcccttctctcagctgagtttttcacgtgtaagatgagaatggctgatggctgagagcccaccaaccttccccaccccgtatcagtttgaccacgggccttttgctacattctatccagagagcaggcctgccagcccctctccactgagaagttgggctgagagtatggggaaaagaatcaagagacctgactgccgccaactcactagtgacttagatacatcccctccccctgctggggcctcagtttccccatctgtaacttgagaaaatagaactagatctgtaaagtctggaactagatctgtaacgtccttataggtgtcactagggggttccatgagaggtgtgtgacaggcagtctgattcctctcattctccatagtctgtttcctggaaagtcgatgtaattaactgatggcccaaaaactacctcaagagacctggccctgttaagacggcttaaccactgagatcccgttctattgatttaataaagtcaaactattggaaa

SEQ ID NO: 75330 - DNA, 892 bp, Homo Sapiens
cgtctgcaagccaagaagagcccttatcaggaacagacttggctagcaccttcatcgtggacctccagcctccagaattgcaagaaaatacatttccgtcgttgaaaccacccagtctgtggtattttgttatggcagcccaggcagactaatacgtgaagcctgctctaaatagataaaataagaaattactacagagggctctttagaaattgtatttaaaaacaagacaatccatatgtacctaagatttacagaatgtatgtctataaaaggagcgatttctggactagatgatgatgaaaaatgttcatataaaggcacctccagcttcgagttgccaacacaggaggaagaatgctccctgctgttcagatgctgatatgtgtcctgtgcttcctggatggccagtgggatcataagctggtagaagcaagaccttcatccactgacttcatatttcttccacatcctgaactgtggtgtttgactttaaaaataaaataaagcaaatagaaatgtttccattgagattttggcaaaaacccacatgacatttgcgtctgcagagtagacttggaaggcatgcacctggaggccaagtggtattctctggactctctgtccttgcatttgcgtggctgccccgaggactcgcttcttcctggatgtgaagcagaggcacgatggggctgactgagaggctgaaatgtgcttctcttcacagttacatagttttcttctaattaaaaataaattttaagtggtagattatgaaaattccatttgaatcaagattttaaaaattcaatatcaaaccagttgttactgtcttcactctccgttgtttacgattgtgtgcttttcctgaataaagaatgactggagagac

SEQ ID NO: 75331 - DNA, 1276 bp, Homo Sapiens
  misc_feature (271)..(283): n is a, c, g, or t
agtagtccagatggcacgctgaaaaccaggtttgcccaatgcttttaacatccctaacagaatctgacattctataaagattggggttttatttttatatacatttcagttaaaaggcacactacagtcatcactaggcaattctgctttctaagcagttgtattgaaaacagagaatctctgtgtagaatttgaatatgacccaagctgagtattatctaaacaggttggtggaatgaatgcgcatgtaccttattatgctgacatactnnnnnnnnnnnnncctagtattgtatgaaggatagctattctttacagcatttagcaaacctgattcagaaaacatttgagattagcaaattagtaacttgaaataatgaaaaggacgtttataccaaattaaggaagaaaatgttgctgatttgggtttttcttcctgttcttaccactgactgaagcatgcctgcagtctcctcctctgttgaatgaaggataatcataaggtgtttgttaggagcgctagaccacctggaaaactttcttagctgtggagcagtgcgcagtgaccagttctctgctgtgagaggccgtttccattctttcctgctgaatatttttcctgttagtgtttatactgagctagtactgtaacttgcaaatgagtgcaaatttaaatgcaatgttttactcacaatttgcacattcacattttttggactgctagtttttctatttaaatatttgccttcatgttaggaatgtactatgtgaacatgacatatttgtagttaaccaaacacaccttcttagtccagtttagtactttttcttttcgtgtattcaaggttaaacacccaaacatttaaggatatgttgaaactacaccaatagagcatttcatatcataattaaaatgaatgttaggcttcttgtggccagttaatagttgatgagattggtgacattatttattgccacagcctattgtataaactatgcagagttaaatatttgcttgtaaaatattagccaatgttgtcattattttgatgtatttccttggttatgaccaaaaatatgttgagatactgaaactaatgtctgtgtgtttaaatgtttaccagcaaattgtcttatcatgttaatgagaatgttcaatgcctgtgtggtaaatagtaaatacaatggcataaaagtaactttctctgaagatgtgatgttcaggctgtgaaatatatatgtaaaagaaaaataaatgttatttgttagaaaaaaa

SEQ ID NO: 75332 - DNA, 980 bp, Homo Sapiens
  misc_feature (42)..(42): n is a, c, g, or t
  misc_feature (75)..(75): n is a, c, g, or t
aatttcagcaatatgcagcaagcccttcaaagctggaatggnaattggctggttgaacctgtgataggttctcantatccattggagaaggtggccgaggctcatgaaaaatatcattcatggtagtggggctactggtaaaatgattcttctcttatgatgattaattctttcatggatttcctatgtaattagaggtactgtctttcccccaagttgtacttaccctatcttttctttaattaaacattcagattccaatgagcttcttactgtgaaaaaactaagatttttctttagagagcacgaagcagaagagtaaaatttattgtatagctagcaatatttttttatgccatctgtctcaaatcaaagagtcatcatagtaggaaataacatgttagttgtcatttggcatgagtgtgcattccagtaattcttaattgatatttgattaattccatacctttgattaaaacatgctagttcaaaataagactgctcagtttccaagggttttcaagcctacttacctttataaaggttctctagtctctgattagccatgactgtattggactttgaacattttctgaactaaaaacctctattctaaactaatctcatttggatgtgtaagtcttttgtaaaggcaagaataaataatatccaggacaatttattagttttctcagtattttcccaaatattagaatatttacttcattattggttggctgccaatgaccccatatgttctgtgagaatagtagctttatctttgatataatacatagtctccaaataggtaatacttcgcaattgattagattttcagagtagatttagagttatctgtttttctggtgagggtcaaatatttttgttaattaagctcacaaatttgataaattaagaattatctgcatttgtctcgtaacataataatgtgtaataaagtctatagaaaattaaaaaaa

SEQ ID NO: 75333 - DNA, 642 bp, Homo Sapiens
cccatatggttttagccattccccatcactatattgtgaagctgtaaaaatatatatatatactttacaagagtttactaatggatttcaaaactggtctcaacgtttataatacatatctgtgtttggcagttgtcataacccaatcctacattcagccatcgggacaagtctgtcggggaggtagttcatggtttacaagcctttgctttttaactgtccaatttcctttaaagcacaactagctatttgtttacaaatgatatttttatgtatattttgtatagtgtatcatcatttttgccaaatatgtttttcattataaatgagtaaagagtacttaaggttgcattcatgtattacatgtttgttgttgtaaacctctccaatcagctggtagaaattctcctcattgtgttctatttggtcagtctctgtgtgattgtaggatgtgctccttggtagtactcccagctgtagatttaccagcttaaaagtttgttaggatctgtgcaataaagtgtttgcagtcttattttctctaagaaattccttatggacgtcataattgttgtatattgaacaaaatatttatacttatgcagttgcataacattgaaataaaaatttagcatgaaaaga

SEQ ID NO: 75334 - DNA, 780 bp, Homo Sapiens
caaactatcctcatatatatatatacagtgtcaacattttcagagcacttacattaggaaacattgtttctcttcaactgtatgacaatactgtatatgccacaataaaatttacaaaaacaatcgcatcagcagtcataacaaacatcatgattttacatttcaatacacaagaaaaaaaatagacatcttcccggcacttggctcccgcctgacggcaacgtctcctccacactttgagagacctcagcttttaaaacccagcagcggctatttcagaagtcatgtcctttccagatccaaacttaaataatgagaaatttgccatttcaaaataactgagagtttattcatggatgtggtgaagtttactccaccaaaagatgtgtaaaaaaattgcatgaaagtaaaaataaataaagctgttgtaaagcagcctcgttgacacggtagcccagaacaaaacacttacgtgtaaaagtgtcattaaaattttaaagtaattatttatattcaaattacaactttttgacaaatctaaagaaaacaaactgatttggtaaaaggttcaaagacttccacattcaagctcggtgttgtttcacacgcgtgcgccccggctgcggcggtgacatattgctgtattcggacataaggcactgtgatctgaacataccgtgcactcaccttatgccacatcacctgttccataccagtgaatttctttgaaatgaaaataatgaaaacttcaggacacagtgcacttttatgacatacagc

SEQ ID NO: 75335 - DNA, 537 bp, Homo Sapiens
aaagtctcctagcctctctgtgccttagagtcctcgcctgcagagtggcttagaacagtaacctccgtgtagggctgtgctgagtatcagatgaacagatctatacgaagcacagaaaacccggcctgttgcgcaacaaacacttgagacttgttgctgccattatcattactgatgttgctgtcgttttattattattattatttagagtgctcagagcaccatatggagcccaggaaaagaaggggaggagagtgaggacaactccatggaggaggcccccgtggaggacctcagggcactggggcagggaccccataagagagaactgcccacaacagtcagaagaacttagctggccttggatcctcaggtgggctctgctgtgtgccctcaggcaagccacgtgtcctctgagcctcagtttcctcatctgtacaacagggccaatatcactcacttcacaggttgctctgggggatcgctgtgcctggcatatagtaggtgttcaataaatgccctgtgactctcagcttg

SEQ ID NO: 75336 - DNA, 689 bp, Homo Sapiens
  misc_feature (100)..(100): n is a, c, g, or t
aaactgaggcagaagtcaccctcggatcagcaaatgatctcccaggcagagaccagagtgcagagggccgctgtggactccagccgcaccaccctccagntggaggagactgtggatggcttccagaggcagaagctcaaggacctgcagaaatttttttgtgactttgtaactattgagatggttttccatgccaaagcggtggaggtgtattctagcgccttccagaccctggagaagtatgacctggagagggatctactggattttagagccaagatgcaaggagtttatgggcattatgacactcggctgcttgccaacaccagcccccctccatctgttcttcagtctctcgccagccagagtgctcagagcaccatatggagcccaggaaaagaaggggaggagagtgaggacaactccatggaggaggcccccgtggaggacctcagggcactggggcagggaccccataagagagaactgcccacaacagtcagaagaacttagctggccttggatcctcaggtgggctctgctgtgtgccctcaggcaagccacgtgtcctctgagcctcagtttcctcatctgtacaacagggccaatatcactcacttcacaggttgctctgggggatcgctgtgcctggcatatagtaggtgttcaataaatgccctgtgactctc

SEQ ID NO: 75337 - DNA, 836 bp, Homo Sapiens
  misc_feature (193)..(252): n is a, c, g, or t
  misc_feature (700)..(702): n is a, c, g, or t
  misc_feature (712)..(712): n is a, c, g, or t
ggcacgaggatagtgatgaagaagaggaggaagatgaggagagctcctcggagggcttggaggctgaggactgggcccagggagtagtggaggccggtggcagcttcggggcttatggtgcccaggaggaagcccagtgccctactctgcatttcctggaaggtggggaggactctgattcagacagtgaggnnnnnnnnnnnnnnnnnnnnnnnnnnnnnnnnnnnnnnnnnnnnnnnnnnnnnnnnnnnngtgatgaggtgcctgtacccagctttggggaggccatggcttactttgccatggtcaagaggtacctgacctccttccccattgatgaccgcgtgcagagccacatcctccacttggaacacgatctggttcatgtgaccaggaagaaccacgccaggcaggcgggagttcgaggtcttggacatcaaagctgagtcactggacctagctgtgcccccaacctagattggcagcaccaccccagggcagaggactctctgggcacccgctgtgcatggagccagagtgcagagccccagatcctttagtaatgcttcccctgggcctgcaacaggcccggtcacctcggccgggcccccggggctgaggtcagcctcactgcctgcttattgcctctttctcagaatcctctttcctccccatttggccctgggctcagggggacaannnggggggcggntggggaaacctgtcccggggctaccacaccgtggccctcagtggactaaccacagcagcagcccaggatggggcccctggaagttccccggccggagaatgccctctcccctctgccatccagg

SEQ ID NO: 75338 - DNA, 1303 bp, Homo Sapiens
  misc_feature (859)..(876): n is a, c, g, or t
  misc_feature (1227)..(1245): n is a, c, g, or t
aacggctaggtacgaggctgggtttgaatcggccgaggggaggcggtggctgcttcggggcttatggtgcccaggaggaagcccagtgccctactctgcatttcctggaaggtggggaggactctgattcagacagtgaggaagaggacgatgaggaagaggatgatgaagatgaagacgacgatgatgatgaggaggatggtgatgaggtgcctgtacccagctttggggaggccatggcttactttgccatggtcaagaggtacctgacctccttccccattgatgaccgcgtgcagagccacatcctccacttggaacacgatctggttcatgtgaccaggaagaaccacgccaggcaggcgggagttcgaggtcttggacatcaaagctgagtcactggacctagctgtgcccccaacctagattggcagcaccaccccagggcagaggactctctgggcacccgctgtgcatggagccagagtgcagagccccagatcctttagtaatgcttcccctggtcctgcaacaggcccggtcacctcggccgggcccggggctgaggtcagcctcactgcctgcttattgcctctttctcagaatcctctttcctccccatttggccctgggctcaggggaccaggtggggcgggtggggagctgtccggtgctaccacaccgtgccctcagtggactaaccacagcagcagccagggatgggccctggaggttcccggccggagagtgcctctcccctctgccatccacgtcaggtctttggtggggggaccccaaagccattctgggaagggctccagaagaaggtccagcctaggccccctgcaaggctggcagnnnnnnnnnnnnnnnnnnaggccgccttgagaagcacagtttaactcactgcgggctcctgagcctgcttctgcctgctttccacctccccagtccctttctctggccctgtccatgtgactttggcccttggttttctttccagattggaggtttccaagaggccccccaccgtggaagtaaccaagggcgcttccttgtgggcagctgcaggccccatgcctctcctccctctctggcagggccccatcctgggcagaggggcctggggctgggcccagagtccagccgtccagctgctcctttcccagtttgatttcaataaatctgtccactccccttttgtgggggtgaacgttttaacagccnnnnnnnnnnnnnnnnnnnccgcgtatgcggccgcaagcttattcccttgtagtgagggttaattttagcttagcac

SEQ ID NO: 75339 - DNA, 880 bp, Homo Sapiens
ttcatcctccacaaaaggtgtgattgtggactcgattttattgtgataatctgatctttgtatatggtagctgtgtcgtactgtctttgtcttcttggtgctcctagccccctaggctctcttttgctcccatgtagtgtggttccctttgtccagagttggtgaatgtattagtgctatttggggcctgcagcgttgcttctacatatggcgtttcttccccctttgcttacatttctcctctgtttgttgggtgcccttctcttggtcatacccttcccattgtttgggataaagctgtttatcccatatggcctccaaatgttcacattggtatcaggggtcccagtgataacgtggcacctgtggggagtctccgcaatcctctagtccattctactcagtgctcactggatgccccgccaactgcatgttaatactgttcttctccacatcgcgccccctgggcgctgccgtctcgccggtctgcccaagccttgcactgcggcctaggctggaccttcttctggagcccttcccagaatggctttggggtccccccaccaaagacctgacgtggatggcagaggggagaggcactctccggccgggaacctccagggcccatccctggctgctgctgtggttagtccactgagggcacggtgtggtagcaccggacagctccccacccgccccacctggtcgcctgagcccagggccaaatggggaggaaagaggattctgagaaagaggcaataagcaggcagtgaggctgacctcagccccgggcccggccgaggtgaccgggcctgttgccctcgtgccgaattcaccacccaggcctcgctacctagaccgtatagtgccgtgtgtactg

SEQ ID NO: 75340 - DNA, 1259 bp, Homo Sapiens
gtatgtatcactttgttactccaggtgccattcttggtgatgacagaatgtttatcactatcgttgttagcaagaggaagctttcaatataggaacttaacatcttcccatgagtataaatgaatttaagacatttgaatcaaaacttcagtagagggaggttttagaattcataaaactggtttaaggaaattctttttacttttcccaaggttaatctttttaaatatctctagacatcaaatactttctgtatgtattagctgtgtctgtctatgatgcaagtaactctcctcctatttgggggatagttcagagaggtaggagcattatctcccatttttctggtgacttcttggagtatagaattcaccattttatccgtaagtcttcaaaggattatggtggactagaacttacatagtgcaaaatagtcttctatttttaataggaacttagaaaaaacttagaattatatatagagttgtttcctttagaaaccagagctatttatttgtatttaaagcactgtttattatttgtactgattcttatccctctgtgtgaataaatgtaagacggtgtccgtgtggttatatcttctctcgttcacttactggcatagattgcagttctctgacaggcttgtttccactcaggactctggccagcatgtccacgtggggtgcttcttctaagtgccttctctgcagagggttctggctagagagtcaaactgagaggcaactctctttaccctttatgcctgcctacctctgttgttagagatgagaatagagaccagctgtttccattgcaaatgtcactatttgaaaagaagttgttaatggaaatctctgcaagtatcgtactgtgtttagtctctcatggtagagatttcaaaagaagaaatgtatgtatcctaaatatgctgaaagcagtctgatgaaaggtttttaaatttcaggtgttaacttggtcaactctttgttaggaggttgtctgtactttaagtaaaattattctttggtttactggttattttggtttgctaaaattatgtcacttataattttgatttatatacaagagtgaagaattgaaggaaatactgaggagagacgtatgaactattttcttcatctcaattcctattttatcaaatgcaaaatgtaatcctaaccagttgattttctataattggtatcttagtactggggaggagtatcacatgaggaaagatttttcaaagcatgtca

SEQ ID NO: 75341 - DNA, 1226 bp, Homo Sapiens
  misc_feature (13)..(13): n is a, c, g, or t
  misc_feature (76)..(76): n is a, c, g, or t
  misc_feature (122)..(122): n is a, c, g, or t
  misc_feature (143)..(143): n is a, c, g, or t
  misc_feature (210)..(210): n is a, c, g, or t
  misc_feature (412)..(412): n is a, c, g, or t
  misc_feature (1042)..(1135): n is a, c, g, or t
cggggaccacccnttgatagatggtaggggtggtgacgtagtagctctttagagttgtgagatgatactgcactcngctttggagagggagatatgagtagaacttgactgcgagagattcntgaaagagagtgagtaaagtntgagacagtgggaaactgaggaagatatcagagagaaaaggaatccagatcagacagagagtgcctntccaagagcacaccatcttcactgtcacagagagtaggacaaacgatggtgtcaaggattggttgtagcacaatattaaactatgtccttaaaaagtgtctccacagacactacccaaagcagtccttcactacagtggcagacagacctgaaaatttcatctgaagcagcagagtgaactgcagagtcaggtcaccaaccnagtgtggaggctaaaagcgggcctctttggggattccaggtggaagtgttggacatctgtagtattcctggtctcaaatcatcctgatattcttcattttgttattcacattggactagggcaaggaaatgagttctggtcagagtcaatgtttcccaacaatgttgatttatttggtcctaaatatttaaacacattttataaatagcttttccacaccacatatatagggaaaaacagggaattaacttggcccagcagcactgtttgtggggctaacaccctgtgtatctcacaccaaccctaagctttgtttccctcctgtcactttgctcctatttctttcatatgaaagaatgttcattttctttgaaaatgagctcatttcctcattttctttccatctttcagcaggaacaaagatcaccacaactggctccccttaaactatgttagatggcaacttgccttcagtatggtgaaacacatcagttaagaccggggttgtgcatggcaggactttctacaaggacacccagtctccttaataaacatgagatgctctctttccagaatttctcttgcctgacacagcataggaagatgctgaacggccacacagtgatccannnnnnnnnnnnnnnnnnnnnnnnnnnnnnnnnnnnnnnnnnnnnnnnnnnnnnnnnnnnnnnnnnnnnnnnnnnnnnnnnnnnnnnnnnnnnntgaagaatatttcattgtaattactttttatactttataggtcaagagctctgttttaaatacaaaatttattgaatatactttttcaaac

SEQ ID NO: 75342 - DNA, 547 bp, Homo Sapiens
  misc_feature (154)..(229): n is a, c, g, or t
  misc_feature (533)..(533): n is a, c, g, or t
ttttttctttactgggtttcatttaatgctgaaatcagacaatgattagaacatgaaactttgtttgaaaaagtatattcaataaattttgtatttaaaacagagctcttgacctataaagtataaaaagtaattacaatgaaatattcttcannnnnnnnnnnnnnnnnnnnnnnnnnnnnnnnnnnnnnnnnnnnnnnnnnnnnnnnnnnnnnnnnnnnnnnnnnnnatgaagaatatctatctcctagtccaatgtgaataacaaaatgaagaatatcaggatgattcgagaccaggaatactacagatgtccaacacttccacctggaatccccaaagaggcccgcttttagcctccacactggttggtgacctgcctctgcagttcactctgctgcttcagatgaaaattttcaggtctgtctgccactgtagtgaagcactgctttgggtagtgtctgtggagaaactttttaaaggacatagttaaaatattgtgctacaaaccaattcttgaacaccactcattntgtcctacctctct

SEQ ID NO: 75343 - DNA, 546 bp, Homo Sapiens
cctctctgatgtgcacttaagagtgggttgctttctcacaaagatggggttctgtgcagtcacaggtcacttccttgacaacacaatcatttctgatctttatcactgtaaccacgtcttctattccataggagtttcttttgattctctcagttgcgggggcatctcttaatcctggggtaaaaggagagattgccatacttagactcactgtgagtctccccggccatttcacgaggagaccacagtgctgccaccagtgcctaaacaggtggctggcattcgagacttcctcctgttccctgggtcagaggatagcggtttccatcataaaccaagatgatgagttcagcctttatccctcgtggttccgctagatgtaacttataggagttaacatttgaggactttgttctgcatcagatcttactatttgaatgtttactgttggattttgggcatcttattactgttactcaaaaacattgactctgcatcaagaaagaaacaagaaagcaataaaacaagaaataattcatgctcacg

SEQ ID NO: 75344 - DNA, 1221 bp, Homo Sapiens
  misc_feature (108)..(108): n is a, c, g, or t
  misc_feature (257)..(257): n is a, c, g, or t
  misc_feature (1160)..(1160): n is a, c, g, or t
ccattgctatggtatgaatgaccgggaggcaagataatccctacatagaattttccgtatactcagggcggtagccatcactgattggcaagcaaaaccaaatgcatntactcacatgttatgtagaattgaacatattatgacatacagcacacaatagcacacagacacataacttgtacaccatttcctgaaaagcctgacacatggagttcaaacatgagtgccacccaccagtggcagcaccaagatggctntagtctggatcctttgtctcacccccatgcctgtgctcggagtgtgctcatcattattctgccactttgaccctgtctctgatgtggtcctgtctgacatcactgctatatgctttgctcctctcaatttcctctgccctcatgccagcaggagtcatgccagagatcatatctgagaaagcaagacaattttgtgtgtgtgtctgtgcccatagaggagtgctggttgtgttgatatagttgtagattggttgtgtttacacagttgtatatattgacacccttgagtgttatgacttcttttgggggtggtcgccttttaaatcataacttttaatgggattccattttagtctttgtgaagacataaggttgttggcaggcatctgtccctgggagcatccaagcagaaaagactaagactcccttgtagacagatcactggccgccactgaagtgtgtctgcatggcaccacagggctggaagacccttgaaggcaggaattcaaggaaatgtatgatgaattttggcattgccatcaaaagcagaacaggcatggaaaacttgggtgagtgggcgagacaacctcctcaccacagcagagttccatccatgcctggataatgagggagggatttgtgtccactgcagtggggaaccatgaaggacacatcaagggtgtggttggcctgtggtgctctttggaggaatgaataaaaatgaatagaaatcctattgcgtgtctgttcttttggagtttgagggaaaagaaagtccttgagattttgactgggctggaaacctagactccagcgtctggggataggagggatggtggggaatccgctgggaaaaactgggctgtgatcaagagaattatcagtatctgagtttttccaccnctggaaggagtgcgggcagacttactgtttacacattgggagcttatgatggtaaagcgct

SEQ ID NO: 75345 - DNA, 1059 bp, Homo Sapiens
  misc_feature (700)..(700): n is a, c, g, or t
  misc_feature (736)..(736): n is a, c, g, or t
  misc_feature (754)..(754): n is a, c, g, or t
  misc_feature (768)..(770): n is a, c, g, or t
  misc_feature (854)..(854): n is a, c, g, or t
  misc_feature (961)..(961): n is a, c, g, or t
  misc_feature (1006)..(1006): n is a, c, g, or t
  misc_feature (1028)..(1028): n is a, c, g, or t
gaagtcaagaaaagggtggacttgaatgtttatttacaggatgctgcaaaataggaaattccacatagaaattaaaaacctagtcagaggacaagcttcatacagtatgtacagttggaactgttcaagtatagtttcagtgtaaaaagtgctacaataacaaaccacatttaagaaagagttcttagtagagaaacaataagacaaaataccaaacatagtacacaacaaatttatgcctcagctacatgatctaaaagttaagaggtcccaggagccccatcctgaacttggaaagtgtagccttcagaggtagtttctggcacaacgttttgatcttcctcttcctggaaatatattaaaaaataagtataaaaataataagtattccaagcagcagcctacctgaagtctgtatttaatctctaggtcttgatctgcatattacacctttaatcctgtatggtattgtagtatctgacataggggagggagggtctctgaaactttgccaattcataagtgctagctactacagtaacagaaacaggccgagattttttttcttccccaaccgtcacttttcaataggaaaagactgtattaggcccagagcatggtggtgggtttggcctacttctctatcacctcctacaatgacacccgttaacttaccctcaagatattctaagattctcanggctgttcatttgaaactaatctggtgactttttanatctcacctcaacgccangacaaggtggtgannnttgatgtatagtaggcggcgatcatgcctaggttcagaggcgcacgtcatctcgtcctcgatgctgatgcactggactgctcangtcactcagggtctgctccacagctctgacagtggtccgacagtgacgatgggagatgcctgcaggttgtatattggggtctgtgtcatgcggcgtacagaggtcangtgagggatcacagatctgctggtcccatggtctgggacattcancatgaatgcagcaacatgtcangtgaatcaatggcatgtcaatagactctgaa

SEQ ID NO: 75346 - DNA, 3336 bp, Homo Sapiens
taagatcaacgttcttctgcaagccttcatctcacagctgaaattggagggctttgcactgatggctgacatggtgtatgtcacacagtcggctggccggttgatgcgagcgatatttgaaattgtcctgaaccgaggttgggcacagcttacagacaagaccctgaacctctgcaagatgatcgacaaacgcatgtggcagtccatgtgtcctctgcgccagttccggaaactccctgaggaagtagtgaagaagattgagaagaagaatttcccctttgagcgtctgtacgacctgaatcataatgagattggggagcttatccgcatgccaaagatggggaagaccatccacaaatatgtccatctgtttcccaagttggagttgtcagtgcacctgcagcctatcacacgctccaccctgaaggtggagctgaccatcacgccagacttccagtgggatgaaaaggtgcatggttcatccgaggcttttgggattctggtggaagaatgtggacagcgaggtgattcggcaccatgagtagttgctcctcaaggccaagtacgcccaggacgagcacctcaggacatgcgtcgtgccggtctttgaaccgctgccccctcagtacttcatccgagtgctgtctgaccgctggctctcttgtgagacccagctgcctgtcacccttccggcacctgatcttgccagagaagtacccccctccaaccgaacttttggacctgcagcccttgcccgtgtctgctctgagaaacagtgcctttgagagtctttaccaagataaatttcctttcttcaatcccatccagacccaggtgtttaacactgtatacaacagtgacgacaacgtgtttgtgggggcccccacggggcagcgggaagactatttgtgcaaagtttgccatcctgcgaatgctgctgcaaagctcggaggggcgctgtgtgtacatcacccccatggaggccctggcagaacaggtatacatggactggtacaagaagttccaagacaggctcaacaaaaaggtggaactcctgacaggcgagaccagcacagacctgaaactgctgggcaaagggaacattatcatcagcacccctgaaaaaggggacataactttcccggcgatggaagcagcgcaagaacgtgcagaacatcaacctcttcgtggtggatgaggtccaccttatcgggggcgagaatgggcctgtcttagaagtgatctgctcccgaatgcgctacatctcctcccagattgagcggcccattcgcattgtggcactcagctcttcgctctccaatgccaaggatgtggcccactggctgggctgcagtgccacctccaccttcaacttccatcccaatgtgcgtcccgtccccttggagctgcacatccagggcttcaacatcagccatacacaaacccgcctgctctccatggccaagcctgtgtaccatgctatcaccaagcactcgcccaagaagcctgtcattgtctttgtgccgtctcgcaagcagacccgcctcactgccattgacatcctcaccacctgtgcagcagacatccaacggcagaggttcttgcactgcaccgagaaggatctgattccgtacctggagaagctaagtgacagcacgctcaaggaaacgctgctaaatggggtgggctacctgcatgaggggctcagccccatggagcgacgcctggtggagcagctcttcagctcaggggctatccaggtggtggtggcttctcggagtctctgctggggcatgaacgtggctgcccacctggtaatcatcatggatacccagtactacaatggcaagatccacgcctatgtggattaccccatctatgacgtgcttcagatggtgggccacgccaaccgccctttgcaggacgatgaggggcgctgtgtcatcatgtgtcagggctccaagaaggatttcttcaagaagttcttatatgagccattgccagtagaatctcacctggaccactgtatgcatgaccacttcaatgctgagatcgtcaccaagaccattgagaacaagcaggatgctgtggactacctcacctggacctttctgtaccgccgcatgacacagaaccccaattactacaacctgcagggcatctcccatcgtcacttgtcggaccacttgtcagagctggtggagcagaccctgagtgacctggagcagtccaagtgcatcagcatcgaggacgagatggacgtggcgcctctgaacctaggcatgatcgccgcctactattacatcaactacaccaccattgagctcttcagcatgtccctcaatgccaagaccaaggtgcgagggcttatcgagatcatctccaatgcagcagagtatgagaacattcccatccggcaccatgaagacaatctcctgaggcagttggctcagaaggtcccccacaagctgaataaccctaagttcaatgatccgcacgtcaagaccaacctgctcctgcaggctcacttgtctcgcatgcagctgagtgctgagttgcagtcagatacggaggaaatccttagtaaggcaatccggctcatccaggcctgcgtggatgtcctttccagcaatgggtggctcagccctgctctggcagctatggaactggcccagatggtcacccaagccatgcgggtccaaggactcatacctgaaagcagctcgccccccacttttcctcttgagaatatgcaaaagcctcgcccccaggaccaagggaagcgggacaagtgggtttctcccaccatccgggggcagatgggcagggatcgcaagaaaccgggaaaacgccgcgtggccattaccgccctgcgaacttggacccaggcacacgaaatcggcgcaaacaaatgcacgacggaccttcggccccccattttggaagaaacacgagggcgttaacgactatattaaacacagttcccgaaaagcctaaatctccctataattggagacggagtgcggggcaaacccattaagaaggggcaccccggtgcgcaatcaccctaacaaagcaggcggctgtggggcgcccacactattttgctggggccgcccacctccaggacggccctatacatttgggcccagccccccacgctaaaggcccaaggataacgagttacacgcggggggcgcccccttggttccccatctggggcgcgccgcgctcttcacattcgcccgtcgcgaagaaaaaaacaggcgcgcgacaaacacagcggccctttcgctaggagcactggaactcgaaatttttggaaaagactatgtc

SEQ ID NO: 75347 - DNA, 1471 bp, Homo Sapiens
aacggctaggtacgaggcctgggtggcgaattcggcacgagggagctgagtcgaggtggaccctttgaacgcagtcgccctacagccgctgattccccccgcatcgcctcccgtggaagcccaggcccgcttcgcagctttctccctttgtctcataaccatgtccaccaacgagaatgctaatacaccagctgcccgtcttcacagattcaagaacaagggaaaagacagtacagaaatgaggcgtcgcagaatagaggtcaatgtggagctgaggaaagctaagaaggatgaccagatgctgaagaggagaaatgtaagctcatttcctgatgatgctacttctccgctgcaggaaaaccgcaacaaccagggcactgtaaattggtctgttgatgacattgtcaaaggcataaatagcagcaatgtggaaaatcagctccaagctactcaagctgccaggaaactactttccagagaaaaacagccccccatagacaacataatccgggctggtttgattccgaaatttgtgtccttcttgggcagaactgattgtagtcccattcagtttgaatctgcttgggcactcactaacattgcttctgggacatcagaacaaaccaaggctgtggtagatggaggtgccatcccagcattcatttctctgttggcatctccccatgctcacatcagtgaacaagctgtctgggctctaggaaacattgcaggtgatggctcagtgttccgagacttggttattaagtacggtgcagttgacccactgttggctctccttgcagttcctgatatgtcatctttagcatgtggctacttacgtaatcttacctggaacactttctaatctttgccgcaacaagaatcctgcacccccgatagatgctgttgagcagattcttcctaccttagttcggctcctgcatcatgatgatccagaagtgttagcagatacctgctgggctatttcctaccttactgatggtccaaatgaacgaattggcatggtggtgaaaacaggagttgtgccccaacttgtgaagcttctaggagcttctgaattgccaattgtgactcctgccctaagagccatagggaatattgtcactggtacagatgaacagactcaggttgtgattgatgcaagagcactcgccgtctttcccagcctgctcaccaaccccaaaactaacattcagaaggaagctacgtggacaatgtcaaacatcacagcccggccgccaggaccagatacagcaagtttgtgaaatcatgcattagtccccattccttggtcagtggttctcctccaaaagccaaaatttttaaggacaccaaaaagggaagcttgtgggggggcccgttggacccaaacctattaccccaggggggtggggaaaacagcttgggaacccagaaatttgggggttaaccccttgggtttcaaacgtga

SEQ ID NO: 75348 - DNA, 2521 bp, Homo Sapiens
  misc_feature (1507)..(1530): n is a, c, g, or t
  misc_feature (1787)..(1787): n is a, c, g, or t
  misc_feature (1906)..(1941): n is a, c, g, or t
  misc_feature (2003)..(2087): n is a, c, g, or t
  misc_feature (2272)..(2272): n is a, c, g, or t
  misc_feature (2277)..(2285): n is a, c, g, or t
  misc_feature (2373)..(2373): n is a, c, g, or t
  misc_feature (2486)..(2486): n is a, c, g, or t
aaggtagcgaggcctgggtggcgatttcggcacgaggcaggaaactactttccagagaaaaacagccccccatagacaacataatccgggctggtttgattccgaaatttgtgtccttcttgggcagaactgattgtagtcccattcagtttgaatctgcttgggcactcactaacattgcttctgggacatcagaacaaaccaaggctgtggtagatggaggtgccatcccagcattcatttctctgttggcatctccccatgctcacatcagtgaacaagctgtctgggctctaggaaacattgcaggtgatggctcagtgttccgagacttggttattaagtacggtgcagttgacccactgttgagcagattcttcctaccttagttcggctcctgcatcatgatgatccagaagtgttagcagatacctgctgggctatttcctaccttactgatggtccaaatgaacgaattggcatggtggtgaaaacaggagttgtgccccaacttgtgaagcttctaggagcttctgaattgccaattgtgactcctgccctaagagccatagggaatattgtcactggtacagatgaacagactcaggttgtgattgatgcaggagcactcgccgtctttcccagcctgctcaccaaccccaaaactaacattcagaaggaagctacgtggacaatgtcaaacatcacagccggccgccaggaccagatacagcaagttgtgaatcatggattagtcccattccttgtcagtgttctctctaaggcagattttaagacacaaaaggaagctgtgtgggccgtgaccaactataccagtggtggaacagttgaacagattgtgtaccttgttcactgtggcataatagaaccgttgatgaacctcttaactgcaaaagataccaagattattctggttatcctggatgccatttcaaatatctttcaggctgctgagaaactaggtgaaactgagaaacttagtataatgattgaagaatgtggaggcttagacaaaattgaagctctacaaaaccatgaaaatgagtctgtgtataaggcttcgttaagcttaattgagaagtatttctctgtagaggaagaggaagatcaaaacgttgtaccagaaactacctctgaaggctacactttccaagttcaggatggggctcctgggacctttaacttttagatcatgtagctgagacataaatttgttgtgtactacgtttggtattttgtcttattgtttctctactaagaactctttcttaaatgtggtttgttactgtagcactttttacactgaaactatacttgaacagttccaactgtacatacatactgtatgaagcttgtcctctgactaggtttctaatttctatgtggaatttcctatcttgcagcatcctgtaaataaacattcaagtccacccttaaaaccaccccattaatttacccctctatcccatcctccgccctcttattnnnnnnnnnnnnnnnnnnnnnnnnttcgttacgcctctttccccttcccttccgcccgcgctccgcatccgggctttcccgccgccttgcccccattttgtgcccccccacgaaatttcgcacccaaaccttcctgttccggggcggcgccgcgccctctgcgtccgccccgcgaccctattgccccgtcgtacccgtcgtgttttccctgaggcgaacacccctgcgggacccacggctgtaaccatttgtcgccttcccataattccccccggttctcncccatcttagacgcccacacgcgtgtctccgcgcggctgcgagcgaatacccttccacgccatgtttctgttttcctctcgtcgcgccccccacacatccgactcacctttttctcgtnnnnnnnnnnnnnnnnnnnnnnnnnnnnnnnnnnnnttttagtccggcttataataccccctccttcccagccaacctcctcccctttctttgtgtcnnnnnnnnnnnnnnnnnnnnnnnnnnnnnnnnnnnnnnnnnnnnnnnnnnnnnnnnnnnnnnnnnnnnnnnnnnnnnnnnnnnnnactagctatctccccacgttaccggccgctggtgcccataatggcgtcgcgccctttacacccccgccaaatatggcgcgctccgcgttctatcgcacacccccacctgttcctctccccggcctctccgagaagacgtgcgcaggtttagaactccgtaccctcttctcacccctactccgttncttgnnnnnnnnnaccgccgcgaccctccctgcagacccctccctcctccgttcgaccacgcgccgagcggcgtgtactacgagaccgctcagaactttcnttcgcccacacccgccccagccgtggtggaatgcccctcatcacgcctctcgtcccaccccgctctcgttatttatttatatacacacccctaccgtttcgatcccgcctccnccacatattgtgcgcacacacgagtgcgcctttct

SEQ ID NO: 75349 - DNA, 559 bp, Homo Sapiens
gtgaatcatggattagtcccattccttgtcagcgatctctctaagattttgagacacaaaaggaagctgtatgggccgtggaacagttgaacagattgtgtaccttgttcactgtggcataatagaaccgttgatgaacctcttacctgcaaaagataccaagattattctggttatcctggatgccatttcaaatatctttcaggctgctgagaaactaggtgaaactgagaaacttagtataatgattgaagaatgtggaggcgtagacaaaattgaagctctacaaaaccatgaaaatgagtctgtatataaggcttcattaagcttaactgagaagtatttctctgtagaggtgagtaatggatggtaatattaataacaacttggaaaaatgtaaagccaaggccatgagcccttttttccctcatacttttaaaaatgagcctcatatctttgttaaatatagtaaaatatcagtgtgcataggacgtaatgtacttattgcccctctgatgtttggcttgatggtaataaaatccaattatttatttatttt

SEQ ID NO: 75350 - DNA, 687 bp, Homo Sapiens
  misc_feature (71)..(71): n is a, c, g, or t
agataaacataagttgcaaaagtggcttcgtgcagcccattttccagggttgggaaactgaggcatgggcntaaggtcccacagccacaccgaggaaagcagcccccactgaatgtcaccatgcaccaaagtgcatggtcctcgtgacacaaagaggggagatgacagtggctggagttgtcagagctgctttgaggaagctccaggcctgataggcttgacagggccaaggggaactattgtggaatgtcttggccttgaatgacaggctgctgattttggatctggagaaagctcacactgactcttcctgctcccccagtctgtttttctcctgctactccatccatgtatccctgagtttgggccacagtccctccacttggtttgcatgtcccaccttctttgtttggcaagctcctattcatccttcaaagccctagcttcaatacctgctacttcatgcagccattgcttatccttcaaggagagcctacttccctcaaggaccctgctgcttccagtctcaccttctgactcactcgggatccactgaactgggaggtctgtgtctcctcccagcagagtcatcactacctttggggccgcaggatcacccagcttggaactagatacagaaatgctgttttgagagtgtactgaataaaagattacatgtttgaaaac

SEQ ID NO: 75351 - DNA, 1144 bp, Homo Sapiens
gactgcctttttttgtagaaataaaaattgaccttagaatttatcgtcagataaacttgtaaagatttgaatattaatgtcttttcaaggcaaatgggattgtccccgcactagtagagaatccatgtcgctctgacaccccaaggaagccgacgatccaaatgccgtgtgtcaccaaccccgcttctgccactggcggcttcccttcttggctcttgggggggactagatcctgtggagaagatgacttaaactttgctttttgttttaattttaattctataacttgagatctttccggggcctacaggcgtgtaagacagcttggtctggtctgtgcagaagtggggagtgatgggcaggttcggcagcctaacattgttcaggcgcatggcccctgcggtgtgtacacgaactcggcttcttttgtcctaggtacgccaagggcaggtttctggagactcccttgtgcccgggatggcaagggcaccgggctggcgtttccacatctgtcttcattagcagaaaagtgatgatggattttatttcactcacactccagtttgtaataaaatgccaaattctgtcagctatccaaacaagccaccatttgttcttgttgcttctctggatccagaaatgttgccattcttggaaactgtcccattgcttcgtatttctgccaacgtagctctgcctgcctgtcaacccctcactgcactctgctcatcacgggaggatacctgtgtgccggcagcccctcagggactctcagccctggcactggcaccccagggttggccccgtcagcagaggcttggctttcgagccagtgggtgtctctcctttgggcctgggcggcttgctcctgccagccatgccttcagggtaggctctgagcaagctggcgaacagccctggctgctccaaaaccaaaaagctgggtcctctggaggaggggcgagctgtggagcagccacccactgctgccccaagctcactcaggaattcacacccgcctggtttcttgaagtgtgctgggtccttccctctgctccctactccccaccacggcagagaataggctttctaagatgctgcgatcccgttctgctgcccgtaataaaaatgctctcagacactg

SEQ ID NO: 75352 - DNA, 614 bp, Homo Sapiens
aattttttaagttctcatcattattacatagactgtgatgtatctttactggaaatgagcccaagcacacatgcatggcatttgttccacaggagggcatccctggggatgtggctggagcatgagccagctctgtcccaggatggtcccagcggatgctgccaggggcagtgaagtgtttaggtgaaggacaagtaggtaagaggacgccttcaggcaccacagataagcctgaaacagcctctccaagggttttcaccttagcaacaatgggagctgtgggagtgattttggccacactgtcaacatttgttagaaccagtcttttgaaagaaaagtatttccaacttgtcacttgccagtcactccgttttgcaaaaggtggcccttcactgtccattccaaatagcccacacgtgctctctgctggattctaaattatgtgaattttgccatattaaatcttcctcatttatactattatttgttacgttcaatcagaatccccgaaacctcctataaagcttagctgccccttctgaggatgctgagaacggtgtctttctttataaatgcaaatggctaccgttttacaataaaattttgcatgtgcc

SEQ ID NO: 75353 - DNA, 687 bp, Homo Sapiens
  misc_feature (29)..(29): n is a, c, g, or t
aaattcatgttacccagacttgtttctcntgcgtcccttggactgcctgttgattgatggaaagtgtctgcactgacacttttcgtcagtagtctgtagtatcgtggcctcttttgattataactggggtcaccaagaaggtttacttaattaaataccgcatttctaacacaaaataccttctataagaaaagatgccacatttagtggtttaacttttgtaacttcacttgatagtttttaagcaattagaatggagttagggaaagaacatatcatactgaacaaatgtcattctagtttagatagcatttctaagataactgatactaatacttgttttcttccctataacataaaaaacttcactgttaagtcatgtcccttgaaacatgatagttacatacacagttttctctccacacataaataacaccactaaagttgttttgtaaggttccaaactaatatggcatatatcaactctacagtttcaaataaatgactttttaattgtaaaagattagttgaaaaactgtatgaatgtgaagatcacatgcttagtcatttttatgttcattccactttgtatatcttttctatttattgacttctcatgttctagagagtaggacttttattccgtgtacctgatatatatacaattaaaatatctgtataattaaa

SEQ ID NO: 75354 - DNA, 644 bp, Homo Sapiens
attcggcacgaggcgtaaaagctgcctgaaatcaaacttgatttaactcagtaagaatgtgaattatgtgttctacttgggtggtttaatttaatcgttctgaatatgaacaaaaggttttggattttctaaagatgcagtgttgtttctgttcatcagggttaatatttctaactatattgcttgtaggtgaccccattctggatttgtttggtttggtttggttccagttaaaagagaggacaggaactaaatggggctaaccacttcaggtgcagcttgtgcgagggtagatggttcctgcacacagaagttaccacaggggtcaggttactttcttcaaatagcagatttcagtactttatcctcattgtggaaacaagccaaaccaaatgaactctggaaaacctaaaacaaatgtacattttcctttgtgtatgtttccgtggtccaaatggcaatataaatccagtctttattctccctttgttgtatttatgctgaatcttccctttgccttttcaggatttaggcctgtaagaaactatgcctgattctgtaaaataagtgtaaagaattatatgtacatctctggattttgtgatgaaatattaaaaatattgagcaagttgttgaaaatgcaa

SEQ ID NO: 75355 - DNA, 1309 bp, Homo Sapiens
atgaaagttgtacaaaaagcaggctggtacggtccggaatcccgggatatcgtcacccacgcgtcgccacgcgtcgctttgaacagtctgaagaaggtggaaatgatcctttcaggtatttgcatcagaaataataggttttttatcagcaatggacaccctttccccaaaatgatttttaatcatggaaggaaaaagagaacttggaattaccttgaatttgaagaagaagaaaataaacagttagcagactcaatggcttctctggcatatctagtatttgtacagggcatccatattgatcagcttccaatggtcttaagcccattgtaccttttgcagtttaatatggggcacattgaagtctttttgcaaagaacagaagagtctgttatctccaaaggattggagctgctggagaatagtttattgagaatagaagacaatagtctactttaccagtacttagaaatcaagagttttcttactgtacctcagggcttagtgaaagtaatgacactttgccccattgagacactgaggaaaaagagtttagctatgcttcagctgtatattaacaagttggattcacaaggcaaatatacattatttaggtgcttattgaatacaagtaatcactcaggtgtggagcctttattattcaaaatatcaaaaatcaaattgacatgtcattaaagagaacacgtaacaacaaatggtttacaggaccacaggtgatttcccttcttgatttggtatttttctcccagagggtgcagaaacagatttactgcaaaactcagataggattatggcttcattaaatttattgaggtatttggttatcaaagataatgaaaatgacaatcaaactggattatggacagaacttggaaatattgagaataatttcttaaagccacttcatataggacttaatatgtcaaaagcacattatgaagcagaaattaaaaatagccaagaggcccagaaatctaaagatctttgttctataactgtaagtggagaagagatccctaatatgcctcctgaaatgcagcttaaggtcctgcattcagctcttttcacatttgatttgattgaaagtgttctagctcgagtggaagaactcattgaaataaaaacaaagtctacctctgaagaaaatattgggataaagtgaaagttccatttcctaaataaaaactaataaaatatagtactttccattatgattcatttaatacctttataaaaaattttctgtaaaaatttactgcttgaaaaataaatgtaccttttctcattt

SEQ ID NO: 75356 - DNA, 1394 bp, Homo Sapiens
  misc_feature (43)..(81): n is a, c, g, or t
  misc_feature (84)..(118): n is a, c, g, or t
  misc_feature (928)..(944): n is a, c, g, or t
aaaacttgtatcgatcactatagggcgctactcgctgctagtnnnnnnnnnnnnnnnnnnnnnnnnnnnnnnnnnnnnnnncgnnnnnnnnnnnnnnnnnnnnnnnnnnnnnnnnnnncagtcgacggtaccggacatatgcccgggaattcggccattacggccggggagcgtcctacagtgtagcctccgcctcccgattgactggcctgcttggcaaggcaagtagcggcggcgcttcaagatgcgctgcctgaccacgcctatgctgctgcgggccctggcccaggctgcacgtgcaggacctcctggtggccggagcctccacagcagtgcagtggcagccacctacaagtatgtgaacatgcaggatcccgagatggacatgaagtcagtgactgaccgggcagcccgcaccctgctgtggactgagctcttccgaggcctgggcatgaccctgagctacctgttccgggaaccggccaccatcaactacccgttcgagaagggcccgctgagccctcgcttccgtggggagcatgcgctgcgccggtacccatccggggaggagcgttgcattgcctgcaagctctgcgaggccatctgccccgcccaggccatcaccatcgaggctgagccaagagctgatggcagccgccggaccacccgctatgacatcgacatgaccaagtgcatctactgcggcttctgccaggaggcctgtcccgtggatgccatcgtcgagggccccaactttgagttctccacggagacccatgaggagctgctgtacaacaaggagaagttgctcaacaacggggacaagtgggaggccgagatcgccgccaacatccaggctgactacttgtatcggtgacgccccaccggcccgcagcccctgctgcccaataaaaccactccgaccccnnnnnnnnnnnnnnnnncgggcggccgctctaggagtatccctcgaggggcccaagcctattacgcgtccccagctttcttgtcacaaagtggtccctatagtgagtccgtatcataagctaggcactggccgtcgttcacaccacagtcgagactggggaaaactgctagctggagatacttcgcgaccggacacctaacttctgctgggaggtgcaaccattatttgggaccagcacctaccctaccagaagactcacaaagcctccaacgggctacactagtgacaactgtctcaaagtgctaatacacggtgtcccaaacatacgcgtgcttattccttgcctgctggacacgtcctggcaacaccatgaagtactccattccacgtgacaacgcttcttcttcacccaggacgcctagtcggatcacaccacacgccacaacgaagaagaacagaagagaac

SEQ ID NO: 75357 - DNA, 800 bp, Homo Sapiens
gcctatacgctaggtacgaggctgggttttgaagtcggcacgagggcctcccgattgactggcctgcttggcaaggcaagtagcggcggcgcttcaagatgcgctgcctgaccacgcctatgctgctgcgggccctggcccaggctgcacgtgcaggacctcctggtggccggagcctccacagcagtgcagtggcagccacctacaagtatgtgaacatgcaggatcccgagatggacatgaagtcagtgactgaccgggcagcccgcaccctgctgtggactgagctcttccgaggcctgggcatgaccctgagctacctgttccgggaaccggccaccatcaactacccgttcgagaagggcccgctgagccctcgcttccgtggggagcatgcgctgcgccggtacccatccggggaggagcgttgcattgcctgcaagctctgcgaggccatctgccccgcccaggccatcaccatcgaggctgagccaagagctgatggcagccgccggaccacccgctatgacatcgacatgaccaagtgcatctactgcggcttctgccaggaggcctgtcccgtggatgccatcgtcgagggccccaactttgagttctccacggagacccatgaggagctgctgtacaacaaggagaagttgctcaacaacgggggacaagtggggaggcccgagatccccccccaacatccaaggctgaactaccttgtatcgggtgaacgcccccaccgggcccgcagccccctgccgccccaataaaaaccacttccgaccccaaaa

SEQ ID NO: 75358 - DNA, 819 bp, Homo Sapiens
  misc_feature (579)..(579): n is a, c, g, or t
gactggcctgcttggcaaggcaagtagcggcggcgcttcaagatgcgctgcctgaccacgcctatgctgctgcgggccctggcccaggctgcacgtgcaggacctcctggtggccggagcctccacagcagtgcagtggcagccacctacaagtatgtgaacatgcaggatcccgagatggacatgaagtcagtgactgaccgggcagcccgcaccctgctgtggactgagcttcttccgaggcctgggcatgaccctgagctacctgttccgggaaccggccaccatcaactacccgttcgagaagggcccgctgagccctcgcttccgtggggagcatgcgctgcgccggtacccatccggggaggagcgttgcattgcctgcaagctctgcgaggccatctgccccgcccaggccatcaccatcgaggctgagccaagagctgatggcagccgccggaccacccgctatgacatcgacatgaccaagtgcatctactgcggcttctgccaggaggcctgtcccgtggatgccatcgtcgaggcgcgtgaggcccccgggttgggagggggcctgangctcctcagcagggcctaaccaccgtccctgcacctcaacctgcagggccccaactttgagttctccacggagacccatgaggagctgctgtacaacaaggagaagttgctcaacaacgggggacaagtgggaggcccgagatcgccggccaacatccaggctgactactttgtatcgggtgacgcccccacccggcctgccagccccctgctggcccattaaaaccactcccgaccccc

SEQ ID NO: 75359 - DNA, 1070 bp, Homo Sapiens
  misc_feature (986)..(1003): n is a, c, g, or t
ttgtttgggggcaccctggttccaggttagggggaccggggatccacccaaggtttctttccgtcttttcctaaaggtcagaattgcaacctgggggggcctttcccaacaagaaaggttctgccggggagccctgaggggccccagggcactgaattgactttcccgggatttgggccctaacctgtgggtctccgtggagccatcctaaccttaggaaaaatcccccagggctgtgatctaccctagaggagggctcgctccttgcctagtggctcacaaatgaggaccagtgagccacgtcctggtccttgtttgagactgggctgcaggccccaggaaagactttctatccacccaccatccccctaacctcggcagggcttctgtcctgtggagttccctggacaccttggtctggctcttgtgccaagggctgaaggaggtaccctcttggcagatgggggcatcacttgcttcctttgggaagctctaaggttgctgcagtcaccttcctcatcttgcaggtgctgaaccaacatcatcagtttctattctaatcaggccccttcccaatctccatttctctgccaagcccatttacccccacctcatgcatcccaaggctctactgggtccctggacctaaccctgctttcatcctggtggccttaactacagtggaggtggaacttcccaggaggggaagggacagaccagccccagccgctgggccaacttccaatcattccagctagaagagcttccccctgacaccctgtgactgagcctgtgtcctgtctgcctgcccagccatgctccatcggctgtgagggcagtgcccggagaggccagagggttggagctgcagggacccgtttggacccacagcctctgttctagagatgcttgtataggctgttaattgtgatgaataaacgttcaaccctcggcctgcagccagagtagccaggccgcgcaccccnnnnnnnnnnnnnnnnnngcatacagccgcggccgcaagctttttccctttagtgagggttaattcgagcaatggcacgtggccg

SEQ ID NO: 75360 - DNA, 815 bp, Homo Sapiens
cactgttggttgccttactttaatgctgacctagcagccccgacaggaagctttaacataaagccttgaccctgagaagcatgggtgcgtcttgtcgtgagcaggttcatggctgtgctccatcctcagcccgctgatttttggtcttttgtcctttgatccagcagttcccacgtggatgttgtactgcttctgtccttgatgttgatgccgtgggcagtcaggccccggcgcagggtgtcgcatgcttccagcaggggctgcctttctaggagctgctgccgccgggcgtcccccgtggcctcgggcatggccagcgcaaactgccggaccttctgccggaaccgcaccagctcgtccaccacaccatgcaaggtagcctcgctgccgtctcctgaaacgtactgttgatttgccagagaaattccaacagtttcaaaaaactgttcaaagtaagagatgatggcaccaaacacagcaggacttctcggcccttcaggttccttcagggacgccctgagctgtccattcccgtggtgtgcaaggcccaggatggcatcaaccaccctgggtgtgtcaaaatcatctgccaaggccgccttcacggccctcttggtgctggagagcctgagggaagaggagagaacagtcacagcagagggagctccactctccccaggcggcccccacaccagtccttccccagggagagacgctgggggctctaatctggggactttctctaggtcatattcccaaagacttgagttcctgagtagcagaaaattatgtaacatcaactgcaaactgtcatg

SEQ ID NO: 75361 - DNA, 761 bp, Homo Sapiens
  misc_feature (75)..(75): n is a, c, g, or t
agcgatgctgtggagagctctccagcaccaagagggccgtgaaggcggccttggcagatgattttgacacacccnagggtggttgatgccatcctgggccttgcacaccacgggaatggacagctcagggcgtccctgaaggaacctgaagggccgagaagtcctgctgtgtttggtgccatcatctcttactttgaacagttttttgaaactgttggaatttctctggcaaatcaacagttggcaaactctcgtgcgcagaaccagagatgagtccatctcagcaacagaatgtcgccagctctgcacacacgtttatgttcaaagactctcagaatgtgcagaagtcacaggcacatacgtttcaggagacggcagcgaggctaccttgcatggtgtggtggacgagctggtgcggttccggcagaaggtccggcagtttgcgctggccatgcccgaggccacgggggacgcccggcggcagcagctcctagaaaggcagcccctgctggaagcatgcgacaccctgcgccggggcctgactgcccacggcatcaacatcaaggacagaagcagtacaacatccacgtgggaactgctggatcaaaggacaaaagaccaaaaatcagcgggctgaggatggagcacagccatgaacctgctcacgacaagacgcacccatgcttctcagggtcaaggctttatgttaaagcttcctgtcggggctgctaggtcagcattaaagtaaggcaaccaaaaaa

SEQ ID NO: 75362 - DNA, 993 bp, Homo Sapiens
  misc_feature (41)..(41): n is a, c, g, or t
  misc_feature (71)..(71): n is a, c, g, or t
  misc_feature (102)..(102): n is a, c, g, or t
  misc_feature (136)..(136): n is a, c, g, or t
  misc_feature (160)..(160): n is a, c, g, or t
  misc_feature (262)..(262): n is a, c, g, or t
  misc_feature (290)..(290): n is a, c, g, or t
  misc_feature (299)..(300): n is a, c, g, or t
ttgactgtacgattatcgactcatataggattgcctcgagnccagatcggcacgagtgtctggattttctngggtacatgacgttgcagtgatgtacatatntctgctactcagaactcagtcttgggatatgacntagagaagtcccagatagagcccnagcgttctccctgggaaagactgtgtggggccgcctgggagagtgagctccctctgctgtgactgtctctcctcttccctcagctctccagcaccaagaggnccgtgaaggcggccttggcagatgattntgacacacnncaggttgttgatgccatcctgggccttgcacaccacgggaatggacagctcagggcgtccctgaagaagccaggagaaaggccagactgaagtgacctgctgaagcctttgtcttttgacattgaattccgtttgcccactgccatcaagactgcttttaaggagcttctgcgacatgatctcttacaggaacctgaagggccgagaagtcctgctgtgtttggtcccatcatctcttactttgaacagttttttgaaactgttggaatttctctggcaaatcaacagtacgtttcaggagacggcagcgaggctaccttgcatggtgtggtggacgagctggtgcggttccggcagaaggtccggcagtttgcgctggccatgcccgaggccacgggggacgcccggcggcagcagctcctagaaaggcagcccctgctggaagcatgcgacaccctgcgccggggcctgactgcccacggcatcaacatcaaggacagaagcagtacaacatccacgtgggaactgctggatcaaaggacaaaagaccaaaaatcagcgggctgaggatggagcacagccatgaacctgctcacgacaagacgcacccatgcttctcagggtcaaggctttatgttaaagcttcctgtcggggctgctaggtcagcattaaagtaaggcaaccaacagtga

SEQ ID NO: 75363 - DNA, 970 bp, Homo Sapiens
  misc_feature (145)..(145): n is a, c, g, or t
  misc_feature (213)..(213): n is a, c, g, or t
  misc_feature (281)..(281): n is a, c, g, or t
cttgctatttttaaacaaacttttttatgagcatatagggtgtgagttagtgtacccaagcaatgtggttgtcttttacaccatgataacaatagtaagtcccctccacacgcccagattgtctcagtggagacaggcgagcctntgcgcattccgtcccagccctgagcttgatctcagccattcccgaacacacgttgcagcgctcgtcgntcccccagcctatcctcaggtgctcctgtacctcgccacaatgcgtgagtctggaagccaggagcgtntggttcagggcgggcgacatgcagccccccagccttttgtccaactcccgagtgaggatcactcagccttgcttggacgacagatgctcagagttgagtggagccttgcccagagcccagcgctcgcgggctgtacccatccctgccagacccagaaagaggcccagctgcagggaatcagggaagcccagggctgggtgggtgtcggcccagagcccaaccacggggtggggaggggggcatccacaatccacagtctccgggggacgtaaccgcgccctgctggcttcagtacgtttcaggagacggcagcgaggctaccttgcatggtgtggtggacgagctggtgcggttccggcagaaggtccggcagtttgcgctggccatgcccgaggccacgggggacgcccggcggcagcagctcctagaaaggcagcccctgctggaagcatgcgacaccctgcgccggggcctgactgcccacggcatcaacatcaaggacagaagcagtacaacatccacgtgggaactgctggatcaaaggacaaaagaccaaaaatcagcgggctgaggatggagcacagccatgaacctgctcacgacaagacgcacccatgcttctcagggtcaaggctttatgttaaagcttcctgtcggggctgctaggtcagcattaaagtaaggcaacc

SEQ ID NO: 75364 - DNA, 980 bp, Homo Sapiens
  misc_feature (44)..(44): n is a, c, g, or t
  misc_feature (95)..(95): n is a, c, g, or t
  misc_feature (124)..(124): n is a, c, g, or t
  misc_feature (160)..(161): n is a, c, g, or t
  misc_feature (164)..(164): n is a, c, g, or t
  misc_feature (239)..(239): n is a, c, g, or t
  misc_feature (279)..(279): n is a, c, g, or t
gattgccctggagccaaggatcgcaccggagtgggtgagatctntccagcttaaaaggaagtgacttcaaaaactgactgcaaatatgacgatgntttgctggagggaaaagaacagcttgatnacagacagctttttatacgggtactgatatatgacnnctnaacttgctgaggaactgaactaacgtcctccagtgaccgtggattccatctcagctccaggaacatgcagatacntgcaaagagacacgcatatatgctggcatacatgtgcatntggtgttgggaagttgaccatctggtctatcttaataaaatggtaaaaagcacaccaagacaatgatgggggcaggaggatgtttttgaaaacagcgcttctcaaccagtgctcgattttgccccccaggagacatttggcaatgcaatggcaacttttggttgtcgcagccggggaagggaagctaccagcatctagtgcgtagaggtcatggacgccgttaaacatcctacagtgcaagcgcagcccccgaccacgaagagttgtcttgctcaaatatcaacagtgctgcagtgtagaaacttgatcgttggttttcttttaatgcaaaactctcataaaaacctttcacttttcctgtcattgattatatgcttgatacacccaaaaagaaaaggggaggggcaccaattcacctacactccagtggctccatcacctttaaaaatatttataaaatagttccaaaaatctgatatctgaaaagcaatccaagcctgtgtaaatgggaatcactgataagtatcatcatctgtatcagcttggcttggacatgaaaaattgattctctttatgtcactccttgcacctggacaaattcaatccccggtacttaagtcacactgccaagccctcggccctgactattgtcttgattgctgttcctttctggttcaaaataaaatcatttttgtggcacc

SEQ ID NO: 75365 - DNA, 1001 bp, Homo Sapiens
  misc_feature (298)..(298): n is a, c, g, or t
gtttgagggtaccattcaccccgaacaccttacctggtacgattataagactcctcttaggaatgtgccctggagccaagaatcggcacgagctgactgccaaaatgacgatgttgctgctgaggacaagaaacagcagggtacagacagcttttttattacggtaatgatatagtgaccataaacatgctgaggaactgaactaacgtcctccagtgaccgtgaattccatctcagctccaggaacatgcaggtacctgcaaagagacacgggtgtatgctggcatacatgtgcatntagtgatggaaggtgaccatctggtctatcttaataaaatggtaaaaagcacaccaagacaatgatgggggcaggaggatgtttttgaaaacagcgcttctcaaccagtgctcgattttgccccccaggagacatttggcaatgcaatggcaacttttggttgtcgcagccggggaagggaagctaccagcatctagtgcgtagaggtcatggacgccgttaaacatcctacagtgcaagcgcagcccccgaccacgaagagttgtcttgctcaaatatcaacagtgctgcagtgtagaaacttgatcgttggttttcttttaatgcaaaactctcataaaaacctttcacttttcctgtcattgattatatgcttgatacacccaaaaagaaaaggggaggggcaccaattcacctacactccagtggctccatcacctttaaaaatatttataaaatagttccaaaaatctgatatctgaaaagcaatccaagcctgtgtaaatgggaatcactgataagtatcatcatctgtatcagcttggcttggacatgaaaaattgattctctttatgtcactccttgcacctggacaaattcaatccccggtacttaagtcacactgccaagccctcggccctgactattgtcttgattgctgttcctttctggttcaaaataaaatcatttttgtggccccaag

SEQ ID NO: 75366 - DNA, 1362 bp, Homo Sapiens
  misc_feature (135)..(135): n is a, c, g, or t
  misc_feature (362)..(558): n is a, c, g, or t
gccaaagtttttgcgaagacacatcaggcatatcagccgaggctgcaggtactagtacgggatgaatgtcagtgcaggagtacataggagatcaattttcatgtcaagccaagctgatacagatgatgatactantcagtgattcccatttacacaggcttggattcttttcagatatcagattttggaactattttataaatattttaaaggtgatggagccactggagtgtaggtgaattggtgcccctccccttttcttttgggcgtatcaagcatataatcaatgacaggaaaagtgaaaggtttttatgagagttttgcattaaaagaaaaccaacgatcaagtttctacactgcannnnnnnnnnnnnnnnnnnnnnnnnnnnnnnnnnnnnnnnnnnnnnnnnnnnnnnnnnnnnnnnnnnnnnnnnnnnnnnnnnnnnnnnnnnnnnnnnnnnnnnnnnnnnnnnnnnnnnnnnnnnnnnnnnnnnnnnnnnnnnnnnnnnnnnnnnnnnnnnnnnnnnnnnnnnnnnnnnnnnnnnnnnnnnnnnnnnnttttcaaaaacatcctcctgcccccatcattgtcttggtgtgctttttaccattttattaagatagaccagatagtcaacttcccaacaccaaatgcacatgtatgccagcatatatgcgtgtctctttgcaggtatctgcatgttcctggagctgagatggaattccacggtcactggaggacgttagttcagttcctcagcaagtttaaggtcaatatatcagtaccgtaataaaaaagcctgtctgtattcaagctgtttcttttcctccagcagaaaccatcgtcaatatttgcagtcagtttttgaagtcactttcttttaaagctggaaagaatcttcacccaggcccaccctcatcttaatccactatttagagtcctacttgaatgatatcgccagcaactttcaactttggatccagatttctttatttgtatccaccaggaagagaggtaccacgtttctgagttcttttatgagcactcgctatgtaatttgcaaggcccagtgcgaagtgaaaacgcaggccccttgttcaaaaattgttaagaatttcaagacatcaacagcagagcattaaatcaggcttagggcccttctgaactcctgggctctgggcatacccatgacaccagacctggcagtcttggttggtgctgcattgattttgttgtattaatttaattggcactgccatctcttttgcccctgtatcgcagtgtttcctgtggtgaggaccccaaataataaaatactgtgacctcaatcagtttaaagagaatgcaaaattacactgcag

SEQ ID NO: 75367 - DNA, 923 bp, Homo Sapiens
  misc_feature (474)..(488): n is a, c, g, or t
ttttcttgagactccgcctcaaaaagatttaggttgcaaatgtttcaagcatgtgcagttttgtgtgtgtgtatacatatatatggtcagcatatatattgtgcagctagggcgagccagcagaggtgtgtgtatgtctttatgaaatgtttgaaaagagataagctgactgcttgataatcactctcaggtgtaaagctccaagtgtaaataaaagtggcatttaacaaatctttcagaacaaagtacagctgactatatataccaagagctaagctaaaggaacagctgagagctccgatctccacgagagactaatctaaaagctctgctttgtacttcctcaccctgctttcgtacaaggaagggggacgatgggaaatcatggacttgtaagttgtatttaaacataaaaatgaacttggtaacttctgggtttagtagagcctcagtgtcgctttaacttagtttacnnnnnnnnnnnnnnnaaagcagcaatggatggttttaaaggagtattatgattgtaaaattgctaaatatgactgtaacacagctttgtggtagctgtgacacagttcacttgggcaaaggagtggtgatggactcgttaaaatcatatatacttgaatagtccattgaccgaaactctttatagactattgtgtaaatgtggaatcacagactgttaacattgcctggacttcagcagagtcctggagctgctgggacctctcctatcatgatgaacttggacttttcttcttgatttctggttttaaaaaacataaaattatagaatccagataattcgctggagtcattctgatccaccatgtagatctgtatttagtatcatttggatttggagaagtgttgattacattatggctgtgtaataaaatttttattaaaactgcaaa

SEQ ID NO: 75368 - DNA, 653 bp, Homo Sapiens
aagaaatgtttcaaacctacaaacagatgtacctggagaagagaagcagaagccttggtagcagtcctgtaaaataattacaagatgtggttttgtaattgccactgggaaatttctttccttttctgttcaaaatatttcgctgaaactaatgagaaatgccatgataaagatttctcagagtttggttcccactttcattgtatttcattgaaagtgcttaattaaaatggcttgagaactttgggtagccatgtgtaagaaatggatggtattcaccggggaaacaaggtatttgaatttctactttattgaaccagatttaccattattttaaaaggaatgcttatacaaatcaatttgaaattctacccatcttgagggaggaccgttcctcagttaaggacttgtttatttaaatgggactgtaaatatgttttggtttctaagctatattagcaaaatttatttttcaaaaatgcccactgtgatgtgaatgtcaaaatatattcttaagtgttttataactaattgtaaactttttttcagaagtcttattttatacttgtgaaactgaacacaattttgggacaacgtttaaacattacttttcatacttgaaataaacatttattttttaaaaaactaaaaaa

SEQ ID NO: 75369 - DNA, 2280 bp, Homo Sapiens
  misc_feature (52)..(52): n is a, c, g, or t
  misc_feature (79)..(79): n is a, c, g, or t
  misc_feature (81)..(81): n is a, c, g, or t
  misc_feature (180)..(180): n is a, c, g, or t
  misc_feature (183)..(183): n is a, c, g, or t
  misc_feature (194)..(858): n is a, c, g, or t
  misc_feature (880)..(897): n is a, c, g, or t
  misc_feature (1040)..(1051): n is a, c, g, or t
gccagtccaatttgtttttgttccgtgtagccccattcagattgagcccgcnactactcgtttgtaacgtgtacagtgntntccaggcgatagtgttctaccgggtgactcagacgaagtacggataagcgcagcgtcggctaacgggggttctgcacacagccagctggagcgacgacntanaccgattgagnnnnnnnnnnnnnnnnnnnnnnnnnnnnnnnnnnnnnnnnnnnnnnnnnnnnnnnnnnnnnnnnnnnnnnnnnnnnnnnnnnnnnnnnnnnnnnnnnnnnnnnnnnnnnnnnnnnnnnnnnnnnnnnnnnnnnnnnnnnnnnnnnnnnnnnnnnnnnnnnnnnnnnnnnnnnnnnnnnnnnnnnnnnnnnnnnnnnnnnnnnnnnnnnnnnnnnnnnnnnnnnnnnnnnnnnnnnnnnnnnnnnnnnnnnnnnnnnnnnnnnnnnnnnnnnnnnnnnnnnnnnnnnnnnnnnnnnnnnnnnnnnnnnnnnnnnnnnnnnnnnnnnnnnnnnnnnnnnnnnnnnnnnnnnnnnnnnnnnnnnnnnnnnnnnnnnnnnnnnnnnnnnnnnnnnnnnnnnnnnnnnnnnnnnnnnnnnnnnnnnnnnnnnnnnnnnnnnnnnnnnnnnnnnnnnnnnnnnnnnnnnnnnnnnnnnnnnnnnnnnnnnnnnnnnnnnnnnnnnnnnnnnnnnnnnnnnnnnnnnnnnnnnnnnnnnnnnnnnnnnnnnnnnnnnnnnnnnnnnnnnnnnnnnnnnnnnnnnnnnnnnnnnnnnnnnnnnnnnnnnnnnnnnnnnnnnnnnnnnnnnnnnnnnnnnnnnnnnnnnnnnnnnnnnnnnnnnnnnnnnnnnnaagaattcggcacgaggaggcnnnnnnnnnnnnnnnnnnagaaaaaagcgagccataagtcaaggccagaaaaaggctgcctttgccgttgacaaaaggtgagaaggtgcgcgaagtgtacggagggagagatgtacatcccctgataactgtgaaataaaaaccatttgttaaaaatatgnnnnnnnnnnnntctcctcccgcgggcagaggccccggcccggactcggcagcgccacccgcccggcagccgcaggctccgtggaaggaaggtcctgccccgtgtctccatcccgtctccctgggcctgggcgctcagaccaggttgtactccttgaggttgagctgcaggatggtgtccttcacggccgcgaacacgaagcggatgttctccgtgtcggtggcacacgtgaagtgtgagtagatgatcttgtcgctgtcggggttcaggtccacgaacatcttcaggatgaactcccgcgccgcctgggcgtcccgctggggaccatcgaactcggggaagtagtccaccaggtgcgagtacaggatcttgtcctccagcaggtccttcttgttgaggaagaggatgacggaggagttctggaaccaggggtaggtgatgatggtccggaacagggctttgctctcctccatccggttctcgttgtccgactccaccaggacttggtcgtattcgctgagggcgacgagaaacatgatggatgtcacgttctcaaagcagtggatccacttcctccgctccgaccgctggccccccacatccaccatccggaagatgatgttctccaggtcgaaagggtactcgatgatgccggtggtgggcacgcggacccgcagcacgtcctgctgggtgggcaggtagcccaaggtggcgatgcggtcaacgtcggtcaggtagtacttggcagagtcggagagctggtactcgcgcctgcggtcgtagcattcctggatgcccgggtcctcccacagggtcttgatggcactgacgtactgatgctcgaaggtggtcaccttctccacgtccacctcccggatcaggagcgcattggccttgttctgctcgtacttgtagaggatcttgagcgtctccatggcccggatcatggcctgcatggcggtgaagatgttctggtagacgagcttggtgaagccgcgcttgtcctcctccgagtagccggcgccgtggatgatgcgcatctgcttgatgaacgtgctcttcccgctctcgcccgtgccgagcagcagcagcttgagctcgcgccgggcgtcgcgcttgtcccgccgcagctgcttctcgatctcggcgttgatccgcttggactccttcacctcatcgctcaggcaacacgccatcatggactccagagtcatcgtcccggccccggccgacgcggccgc

SEQ ID NO: 75370 - DNA, 835 bp, Homo Sapiens
  misc_feature (112)..(112): n is a, c, g, or t
gtgcaaataccggaccttctatgaggacgagatggccagccatcttgacagcaagttccacaaggaacacttaaagtacgtaggcaccaagctccctaagcagacggctganctttctgcaggagtacgtcactaacaagaccaagaagacagaggagctccgaaaaaccgtggaggaccttgatggcctcatccagcaaatctacagagaccaggatctgacccaggaaattgccatggagcattttgtgaagaaggtggaggcagcccattgtgcagcctgcgacctcttcattcccatgcagtttgggatcatccagaagcatctgaagaccatggatcacaaccggaaccgcaggctcatgatggagcagtccaagaagtcctccctcatggtggcccgcagtattctcaacaacaagctcatcagcaagaagctggagcgctacctgaagggcgagaaccctttcaccgacagccccgaggaggagaaggagcaggaggaggctgagggcggtgccctggacgagggggcgcagggcgaagcggcagggatctcggagggcgcagagggcgtgccggcgcagcctcccgtgcccccagagccagcccccggggccgtgtcgccgccaccgccgccgcccccagaggaggaggaggagggcgccgtgcccttgctgggaggggcgctgcaacgccagatccgcggcatcccgggcctcgacgtggaggacgacgaggagggcggcgggggcgccccgtgacccgagctcggggcgggcggagcccgcgtggccgaagctggaaaccaaacctaataaagttttcccatccc

SEQ ID NO: 75371 - DNA, 432 bp, Homo Sapiens
catacctggaccttctatgagacgagatggccagccatcttgacagcagttccacaaggaacactttaagtacgtggcaccaagctccctaagcagacggctgactttctgcaggagtacgtcactaacaagaccaagaagacagaggagctccgaaaaaccgtggaggaccttgatggcctcatccagcaaatctacagagaccaggatctgacccaggtatgccagaaggtccaggtatgccagaaggtccaggtatgccagaaggtccaggtatgccagaaggtccaggtatgccagaaggtccaggtatgccagaaggtccaggtatgccagaaggtccaggtatgccagaaggtccaggtatgccagaaggtccaggtatgccagaaggccagatatgccagaaggtccagtagacagaagctccac

SEQ ID NO: 75372 - DNA, 362 bp, Homo Sapiens
caccggtttactggacttctggcatacctggaccttctggcatacctggaccttctggcatacctggaccttcggtatgtgtcctgctttgtgccagtactggagatatggtgaacaagtaggccgagtttagagtttaacaggctaggcagccaacggcatggagcaggaaacatacagaagggttcgggcttggttttctggaagtcgtgagtattcagaagaaacctgaaagattcatgcgggttaagacagacggttgctagacagcatgcgtgactaggaagaatgagacaagagcagtcgatctcccaggaactgaacctcagtgaggtcagatcatggaatagaaggtccaggta

SEQ ID NO: 75373 - DNA, 364 bp, Homo Sapiens
catacatggaccttctccagctccttcagcttgccggctgcgtccctgcagcgggccagctccttgtccagcgcgcggctctccttctcaacggcggacagtttggcagtgctatcgtccaagactgcatccttgagctccacctgctgccacagccgcttggcctccttctccagcagcttcttatccttctcgagctgggccacctcctgctccagggccttcctgtccttctcggccccctccaactgtgcattggccagccagagggggccgagaaggtccaggtatgccagaaggtccaggtatgccagaaggtccaggtatgccagaaggtccaggtatgccagaaggtccaggtatg

SEQ ID NO: 75374 - DNA, 942 bp, Homo Sapiens
  misc_feature (31)..(31): n is a, c, g, or t
  misc_feature (693)..(712): n is a, c, g, or t
taatatcctagaacttactgagtcttccctntcaataaatacacttctcacatacctctaatcctatgcttccttgaaacaataatgctagctgagttgtttactaaggattattataagggcctgaaggtgtgggagtggagattaattaaaacctttatgttctccaatataagggaaaagcaggttggtactacttctgattaggcagaaaacaccaggattccttaagtgatccttgaaatggttattgttttctgccttgtcacatttgccactgtgccctttaaaacgatgtggaaacctcaggtttgtggacagcacaggtggaatgacatcttgtgcttcctgaggctcccctctaccaggcacattagcttagtgcttcagatgtcagcccaagtccttgttacctccttttcctgctgcccagggaagagtgtgtgtgctggagctggagcgcttgcactcttcaggtgactattctcacctccatttcctccacatgcattaggtgaaactgaggtctaagcctcctgcaaggtctacattttaaggactcacacatcaggctctcagaaatgtacacaggtattagttctgtttgttctaaaggaaatgtgggtatctctcaggccaggacttagtgactagttttcgctagacagcaggttaatacctagatctcatttnnnnnnnnnnnnnnnnnnnncaggattaaagggaactgatcaggtttgttgagttttttagcctaattccaaagcatggaagagtgctctaggtaggaaagaaagctttttcttacgatttgtagctacctactgtgcctgacttggtgcctgtgtgaggattaagcccttagtctgctcttgcaattattcaaatgacaaattaaatttgcttttgtaataacaataaaagttgtcatcttcccttttg

SEQ ID NO: 75375 - DNA, 185 bp, Homo Sapiens
tcctctagagcggccgcctactactactatacggctgcgagaagacgacagaaggggacacactctgcacccccccaccccacgaccttggcccgagcccctccgtgaggaacacaatctcaatcgttgctgaatcctttcatatcctaataggaattaacctccaaataaaacatgactggtaa

SEQ ID NO: 75376 - DNA, 449 bp, Homo Sapiens
ggggccctcgcgcggtccggcacagcggacaccaggactccaaaatggcgtcagttgtaccagtgaaggacaagaaacttctggaggtcaaactgggggagctgccaagctggatcttgatgcgggacttcagtcctagtggcattttcggagcgtttcaaagaggttactaccggtactacaacaagtacatcaatgtgaagaaggggagcatctcggggattaccatggtgctggcatgctacgtgctctttagctactccttttcctacaagcatctcaagcacgagcggctccgcaaataccactgaagaggacacactctgcacccccccaccccacgaccttggcccgagcccctccgtgaggaacacaatctcaatcgttgctgaatcctttcatatcctaataggaattaacctccaaataaaacatgactggtacgtgta

SEQ ID NO: 75377 - DNA, 462 bp, Homo Sapiens
gggctcgcgcggtccggcacagcggacaccaggactccaaaatggcgtcagttggtgagtgtccggccccagtaccagtgaaggacaagaaacttctggaggtcaaactgggggagctgccaagctggatcttgatgcgggacttcagtcctagtggcattttcggagcgtttcaaagaggttactaccggtactacaacaagtacatcaatgtgaagaaggggagcatctcggggattaccatggtgctggcatgctacgtgctctttagctactccttttcctacaagcatctcaagcacgagcggctccgcaaataccactgaagaggacacactctgcacccccccaccccacgaccttggcccgagcccctccgtgaggaacacaatctcaatcgttgctgaatcctttcatatcctaataggaattaacctccaaataaaacatgactggtacgtg

SEQ ID NO: 75378 - DNA, 747 bp, Homo Sapiens
  misc_feature (80)..(80): n is a, c, g, or t
  misc_feature (261)..(261): n is a, c, g, or t
aacacaggaaaatcaagatgaagccagggtaaagagagtacttagaagcattctttaaaatacagcacactgtgaaaatnggctcgattttcctagtagccaatgcagaaagagaaatgagttgagtgggataatctggtaccccagaaaagcatggctgttccggctctgaggcttgagaggagcttgtctggtgggagattggcgggaggtgtcggtggcagcctctgactaggctgtttctgacagtgtagtgtacanccccctacccccacctcactcccattctgtggcaccagggcggtcctgcctctgaaggacgggttctctggggctgtttgtctgagcgtgtgttccctctgttccttctggaaagaaagtggttggccaggtggcaggttggctcctgaggtgtctttgtgccccccgggtctgctgattctgcagagacaccggcaggcgggtcatgggtcatctctgaagggaattctcaggaaggctttgtgtgatctcagcctgcttcctgccatgctgtgccttcactgtaaccttttaagatacttaccatcttgccttcctgacttcagagcacgagcggctccgcaaataccactgaagaggacacactctgcacccccccaccccacgaccttggcccgagcccctccgtgaggaacacaatctcaatcgttgctgaatcctttcatatcctaataggaattaacctccaaataaaacatgactggt

SEQ ID NO: 75379 - DNA, 744 bp, Homo Sapiens
gtcctctgtgtcacgatgtgtctcaatttcggacgatatcccacatactgtactctgataggtccctccgattcttttaggtggaaacataaggaactttaacctaaaggtccctcagcctcagaagaaggtgggctgctgtatcttaatgaaatcagtcaccaccaccctctcatgggaactaaaggcaagacgccgcagaggcactcactgagatgcttgtaggaaaaggagtagctaaagagcacgtagcatgccagcaccatggtaatccccgagatgctccccttcttcacattgatgtacttgttgtagtaccggtagtaacctctttgaaacgctccgaaaatgccactaggactgaagtcccgcatcaagatccagcttggcagctcccccagtttgacctccagaagtttcttgtccttcactggtactgaaacggaagagtgagaaaaaatacccactgaataatctcccagtaacacatatggcatcctttcctgccactgcttcaactatgcaataaaggtgcataatgcaattacacagaggctgcacatacacaatattatgaagaaatatgtcacatcaagcccactattttaagactgagtctatacaatagcagaactgctgcagggacagctttattaaccaacaggacgtctgagtaacagcttcctcgcgagtaactccagaaaagggtctcgaaaaaagcagtaaccgtggcggacaggaaag

SEQ ID NO: 75380 - DNA, 1646 bp, Homo Sapiens
  misc_feature (820)..(820): n is a, c, g, or t
  misc_feature (1169)..(1218): n is a, c, g, or t
aaattacggctaggtacgaggcctgggtgttgaatcggcacgaggggttctccggtcccgccgctcccgcagcagccatgtcgttcttcccggagctttactttaacgtggacaatggctacttggagggactggtgcgcggcctgaaggccggggtgctcagccaggccgactacctcaacctggtgcagtgcgagacgctagaggacttgaaactgcatctgcagagcactgattatggtaacttcctggccaacgaggcatcacctctgacggtgtcagtcatcgatgaccggctcaaggagaagatggtggtggagttccgccacatgaggaaccatgcctatgagccactcgccagcttcctagacttcattacttacagttacatgatcgacaacgtgatcctgctcatcacaggcacgctgcaccagcgctccatcgctgagctcgtgcccaagtgccacccactaggcagcttcgagcagatggaggccgtgaacattgctcagacacctgctgagctctacaatgccattctggtggacacgcctcttgcggcttttttccaggactgcatttcagagcaggaccttgacgagatgaacatcgagatcatccgcaacaccctctacaaggcctacctggagtccttctacaagttctgcaccctactgggcgggactacgggtgatgccatgttgccccatcctggaagttgaagcagaacgccgcgccttcatcatcaccatcaattctttcggcacagagctgtccaaagaggaccgtgccaagctcttcccacactgtgggcggctcntacccttgagggcctggcgcagctggctcggggctgacgactatgaacaggtcaagaacgtgcccgatactacccggagtacaagctgctcttcgagggtgcaggtagcaaccctggagacaagacgctggaggaccgattctttgagcacgaggtaaagctgaacaagttggccttcctgaaccagttccactttggtgtcttctatgccttcgtgaagctcaaggagcaggagtgtcgcaacatcgtgtggatcgctgaatgtatcgcccagcgccaccgcgccaaaatcgacaactacatccctatcttctagcgtcctggcccaaggctctcaattgcactcttnnnnnnnnnnnnnnnnnnnnnnnnnnnnnnnnnnnnnnnnnnnnnnnnnngtctgtgacaagcctgtggctcacctgcctgtccggggtgtagtacgctgtcctagcggctgcccagttctcctgaccctcttagagactgttcttaggcctgaaaaggggctgggcacccccccccaccaaggatggacgaagaccccctccagagcaaggaggccccctcagccctgtggttacagccgctgatgtatctaagaagcatgtcactttcatgttcctccctaactccctgacctgagaaccctggggcctgggggcagtttgagcctcctctcccttctgtgggtcgctcccagagccatggcccatgggaaggacagagtgtgtgtgtccttggggcctggggggatgttgctcctcagctccctccctcagccctgcccctctgagacaataaaactgccctctctaaggccaaa

SEQ ID NO: 75381 - DNA, 1163 bp, Homo Sapiens
caacttaggctaggtagcgaggctgggtgttgaattcggcacgagggtcagctgacctggggagtcgcgattcgtgccggccggtcctggttctccggtcccgccgctcccgcagcagccatgtcgttcttcccggagctttactttaacgtggacaatggctacttggagggactggtgcgcggcctgaaggccggggtgctcagccaggccgactacctcaacctggtgcagtgcgagacgctagaggacttgaaactgcatctgcagagcactgattatggtaacttcctggccaacgaggcatcacctctgacggtgtcagtcatcgatgaccggctcaaggagaagatggtggtggagttccgccacatgaggaaccatgcctatgagccactcgccagcttcctagacttcattacttacagttacatgatcgacaacgtgatcctgctcatcacaggcacgctgcaccagcgctccatcgctgagctcgtgcccaagtgccacccactaggcagcttcgagcagatggaggccgtgaacattgctcagacacctgctgagctctacaatgccattctggtggacacgcctcttgcggcttttttccaggactgcatttcagagcaggaccttgacgagatgaacatcgagatcatccgcaacaccctctacaaggcctacctggagtccttctacaagttctgcaccctactgggcgggactacggctgatgccatgtgccccatcctggagtttgaagcagaccgccgcgccttcatcatcaccatcaattctttcggcacagagctgtccaaagaggaccgtgccaagctctttccacactgtgggcggctctaccctgagggcctggcgcagctggctcgggctgacgactatgaacaggtcaagaacgtggccgattactacccggagtacaagctgctcttcgagggtgcaggtagcaacccctggagacaagacgctggaggaccagattcctttgagcaccgagggtaaagctgaaacaagttggcccttcctgaaaacaggttccactttgggtggtctttctaaggccttccgggaaagttcaaggaaccagggagggtccccaacaatcctggggggaatcccctggaaatggaatcccccccagg

SEQ ID NO: 75382 - DNA, 910 bp, Homo Sapiens
acggggcgaagatggcggcggagcgacaggaggcgctgagggagttcgtggcggtgacgggcgccgaggaggaccgggcccgcttctttctcgagtcggccggctgggacttgcagatcgcgctagcgagcttttatgaggacggaggggatgaagacattgtgaccatttcgcaggcaacccccagttcagtgtccagaggcacagcccccagtgataatagagtgacatccttcagagacctcattcatgaccaagatgaagatgaggaggaagaggaaggccagagatttgaacctcacggctctgacttaaggagcaggttttatgctgggggctcagagagaagtggacagcagattgttggccctcccaggaagaaaagtcccaacgagctggtggatgatctctttaaaggtgccaaagagcatggagctgtagctgtggagcgagtgaccaagagccctggagagaccagtaaaccgagaccatttgcaggaggtggctaccgccttggggcagcaccagaggaagagtctgcctatgtggcaggagaaaagaggcagcattccagccaagatgttcatgtagtattgaaactctggaagagtggattcagcctggataatggagaactcagaagctaccaagacccatccaatgcccagtttctggagtctatccgcagaggggaggtgccagcagagcttcggaggctagctcacggtggacaggtggacttggatatggaaggaccatcggggacgaggacttttgtgaagcccaaaggagcccttcaaaggctttcactgggcgaagggtcagaaactggggcagcactgccccccccgggggttggagtaaccagcttctccaggcccaacagggcagaaaaatgaagcccaaagcc

SEQ ID NO: 75383 - DNA, 2532 bp, Homo Sapiens
  misc_feature (1378)..(1515): n is a, c, g, or t
  misc_feature (1517)..(1517): n is a, c, g, or t
  misc_feature (1521)..(1522): n is a, c, g, or t
  misc_feature (1558)..(1567): n is a, c, g, or t
  misc_feature (1624)..(1650): n is a, c, g, or t
  misc_feature (1911)..(1921): n is a, c, g, or t
  misc_feature (1944)..(1944): n is a, c, g, or t
  misc_feature (2237)..(2237): n is a, c, g, or t
  misc_feature (2259)..(2259): n is a, c, g, or t
  misc_feature (2267)..(2267): n is a, c, g, or t
accatcggtagtacgaggctggtgtggaatcggcacgaggcgcacggggcgaagatggcggcggagcgacaggaggcgctgagggagttcgtggcggtgacgggcgccgaggaggaccgggcccgcttctttctcgagtcggccggctgggacttgcagatcgcgctagcgagcttttatgaggacggaggggatgaagacattgtgaccatttcgcaggcaacccccagttcagtgtccagaggcacagcccccagtgataatagagtgacatccttcagagacctcattcatgaccaagatgaagatgaggaggaagaggaaggccagaggttttatgctgggggctcagagagaagtggacagcagattgttggccctcccaggaagaaaagtcccaacgagctggtggatgatctctttaaaggtgccaaagagcatggagctgtagctgtggagcgagtgaccaagagccctggagagaccagtaaaccgagaccatttgcaggaggtggctaccgccttggggcagcaccagaggaagagtctgcctatgtggcaggagaaaagaggcagcattccagccaagatgttcatgtagtattgaaactctggaagagtggattcagcctggataatggagaactcagaagctaccaagacccatccaatgcccagtttctggagtctatccgcagaggggaggtgccagcagagcttcggaggctagctcacggtggacaggtgaacttggatatggaggaccatcgggacgaggactttgtgaagcccaaaggagccttcaaagccttcactggcgagggtcagaaactgggcagcactgccccccaggtgttgagtaccagctctccagcccaacaggcagaaaatgaagccaaagccagctcttccatcttaatcaacgaatcagagcctaccacaaacatccaaattcggcttgcagacggcgggaggctggtgcagaaatttaaccacagccacaggatcagcgacatccgactcttcatcgtggatgcccggccagccatggctgccaccagctttatcctcatgactactttcccgaacaaagagctggctgatgagagccagaccctgaaggaagccaacctgctcaatgctgtcatcgtgcagcggttaacataaccgcccagccagctgcctggcctccctcctgtgtttcccatggccagtggccatgccccatggggatcgcccctcctgcccccttgtgcacacccagcagtccagtgcaacgtctcctccatagctctgggttcttagatcttggttggacgtttgttttctccttagttgcatttcctgggtttttgtgatgatcaatggactttaatgnnnnnnnnnnnnnnnnnnnnnnnnnnnnnnnnnnnnnnnnnnnnnnnnnnnnnnnnnnnnnnnnnnnnnnnnnnnnnnnnnnnnnnnnnnnnnnnnnnnnnnnnnnnnnnnnnnnnnnnnnnnnnnnnnnnnnnnnnnangccnnggggggccaaacattaggcgaagccggtcttttttnnnnnnnnnncccttttaaggggcccccttggggacataaaatccggcccccgttttttcaatggtnnnnnnnnnnnnnnnnnnnnnnnnnnnaaattcttttgggtgagacacccttttttttggggaggagaaatctaagggaggaaaaaacttccttcaaaaaatttataaccgccttaagataaaaaattttataaaggggttagaaagaaaaataaggggtgactataccacacgggtcaaatttgttccgccccccaccgagacacttagctctctaccgtggggcattatgtactgcggggaaaaattcattcctcaagacgggcccctgtgtgtcctcccaaaacnnnnnnnnnnnccctacatataaaaccacccggngtcccacaaaattttttaattttattaaggcgccccccggaggcgcctctcacccaccggggagggggttcccgaaaacctctttaaaagaccaaacggacgacccaacccaactgtttgctataaaagcagcggtctccccacctggggcgcgcctataaaaaagacgcgccgcttttagagaacgccgcccccacataaacaaactcgccgaccacatttttttccgcgggagagagccaacacctggcggtgtggtgtatataacagttggcggttgccttgtccgccgnccttcctctttatagggggggnatactccnaaaataggtgtgtataaagaccgccgcacctcgcttgtttgtcttcgcaacaaccaaaagatattttatccgtttttttaccacaggtaataatatttcttctatctgtggggggacgggcgggatacaccacacgcgcccgccttgatggtgagcgggcgacactcttaatttacaacccgtgcgctggtgagtagtccatccaagacccctggcgccagcacatataaagagacggagccactggtgcaggatttctcccccc

SEQ ID NO: 75384 - DNA, 1044 bp, Homo Sapiens
ctcatagtctaggtacgaggcctggctgttaattcggcacgaggcgcacggcggcgaagttggcggcggagcgacaggaggcgctgagggagttcgtggcggtgacgggcgccgaggaggaccgggcccgcttctttctcgagtcggccggctgggacttgcagatcgcgctagcgagcttttatgaggacggaggggatgaagacattgtgaccatttcgcaggcaacccccagttcagtgtccagaggcacagcccccagtgataatagagtgacatccttcagagacctcattcatgaccaagatgaagatgaggaggaagaggaaggccagaggttttatgctgggggctcagagagaagtggacagcagattgttggccctcccaggaagaaaagtcccaacgagctggtggatgatctctttaaaggtgccaaagagcatggagctgtagctgtggagcgagtgaccaagagccctggagagaccagtaaaccgagaccatttgcaggaggtggctaccgccttggggcagcaccagaggaagagtctgcctatgtggcaggagaaaagaggcagcattccagccaagatgttcatgtagtattgaaactctggaagagtggattcagcctggataatggagaactcagaagctaccaagacccatccaatgcccagtttctggagtctatccgcagaggggaggtgccagcagagcttcggaggctagctcacggtggacaggtgaacttggatatggaggaccatcgcggacgaggactttgtgaagccaaggagcttcaagccttcatggccagggtcaaaactggcgcactgccccaaggtgttggtacacgtcctccgccacagggaaaatgacaagcagttctcctctttataagatagagctacaaaatcaattcgtggcaggggagtgtggcaatttacccgccggacgcgctcttgggccgcccgtcctttcttttccaaagtgtggccgaacctctgtggaaccctcctctggcgccccacaagtttg

SEQ ID NO: 75385 - DNA, 591 bp, Homo Sapiens
  misc_feature (166)..(235): n is a, c, g, or t
acagaaaagaaggaagaggaaacacatttaatactggtactgttttcaataacaaattaaaccagtgattctgaatccttcctgcacattcaaattacctggagaactttaaaaaaaatactgatgaccaggtcttgtctcaaattacatgaaaattcgaatcaannnnnnnnnnnnnnnnnnnnnnnnnnnnnnnnnnnnnnnnnnnnnnnnnnnnnnnnnnnnnnnnnnnnnnattgaaacctacatatttcttactgttccttgactgagaagaatgtcctataaatatagaaatagaactttttcctttacaggttgggcatacaagggtatctccagttagcagtaacttatggaggggtaagtcaagctattaaattatacttcatttccattaaaatatctacttatacctctcttcattccccgtaattctgtactctcaaactccaagaccaagaagagtcgaactaaacttttataataaatttgttacactgaaaatacattattcattcatgcatgtaagtatttactgaatggctactatgtgcaaggcactgtgttaagtactgctatataggacca

SEQ ID NO: 75386 - DNA, 1285 bp, Homo Sapiens
aattccttggatatcgtcgacccacgcgtccggttgaggccgggtctccgctcctgtgcccgggaagatggtgctaggtggttgcccggttagttacttacttctgtgcggccaggcggctttgctgctggggaatttacttctgctgcattgtgtgtctcggagccactcgcaaaatgcgaccgctgagcctgagctcacatccgctggcgccgcccagccggagggccccgggggtgctgcgagctgggaatatggcgacccccactctccggtcatcctctgctcttacctacctgatgaatttatagaatgtgaagacccagtggatcatgttggaaatgcaactgcatcccaggaacttggttatggttgtctcaagttcggcggtcaggcctacagcgacgtggaacacacttcagtccagtgccatgccttagatggaattgagtgtgccagtcctaggacctttctacgagaaaataaaccttgtataaagtataccggacactacttcataaccactttactctactccttcttcctgggatgttttggtgtggatcgattctgtttgggacacactggcactgcagtagggaagctgttgacgcttggaggacttgggatttggtggtttgttgaccttattttgctaattactggagggctgatgccaagtgatggcagcaactggtgcactgtttactaaaaagagctgccatcatggcccagggaggcgggtgaaagctccgtcttctgaattcatctctacaggctcaaaactcctctttgatatcagacctgatgttattttccttcttttggagggcatttgtttggttaagaaggcttctttggactttggaatttcaacccagattttaccttgcagacggaatgacaagcaaaaagtgttgtggggaatcaaatttgttcctttcctcatgcacaaaacataaaggatagtggcgagtttacaagctgtggatgggtttccatagtcttcctttctgtacattgctatatcttcagtcctttggagcaagtggacctaacaagttgagcaaaatgaatatttggatccatgttcctcttgtgaccctgagtcttcatgcaaggagatctgaagctgaacaatgaaaatcttcagcagaaatagaaatggccgtggattgtaatacacactgaaattctgactttctgaatttaaatgtagaataaattttaccaacttggagtactgtatgagtattttcagaagggggaataaactcaaaattat

SEQ ID NO: 75387 - DNA, 846 bp, Homo Sapiens
ctccggtcatcctctgctcttacctaatcacgccattttttaacatctctttttgatcaaacaagaaaaagcatttgggaaatgcaaagaggactgagaatactttggcttaaattttgcccccagaatcttgtgtttgcctactgaagagatgaaaccatggcagaagtagaatccttatagaaacaggaccagaaacacctcccttctccaacaaaaggttcattttggtggctgtccgtttgacctgctgtgcttcagtttaattggcttggaaaggggtcagcagggtgaaaccgaaccccagaaaacttgatgaagaaatgtcttttgcccgttttgattacgtgcatgcaaacagcgatttgcaaagaccgtatgatgatgatcatgatcttactggtgaattacagacctgatgaatttatagaatgtgaagacccagtggatcatgttggaaatgcaactgcatcccaggaacttggttatggttgtctcaagttcggcggtcaggcctacagcgacgtggaacacacttcagtccagtgccatgccttagatggaattgagtgtgccagtcctaggacctttctacgagaaaataaaccttgtataaagtataccggacactacttcataaccactttacctctactccttcttcctgggatgtctggtgtggatcgattctgttgggacacactggcactgcagtagggaagctgttgacgcttggaggacttgggattcggtggttgtgaccttatttgctaatactggaggggctgattgcagtgaatggcagacaacggtgcactgttaataaaagagcgccatatggcccag

SEQ ID NO: 75388 - DNA, 621 bp, Homo Sapiens
cacgtttgctgccgttgggggctcaggctgcactccccgggtcacctgacctgctgcccaggggcttccagtcctgtctgtgtggactggcacctgggctgctggagaagtctcctcccgttcggaccagcctcagggctgcacgttacctcaggaatgggccccaccatgaaggggcccatctgtcagcagcgtcttctaggtccccagctcagggagccatccccagctccagttttctcatgcgaatatgcacagttttaattcacgttgttacactagcctgccgatgagacccagacacaggcagacctggcgctcttgacccctgattccagtgaggactggccctgaggagtccttgcagacctgctgcctgccccacgacaggcccaaagatggaccccccctggccttgtgacagctccccaagtgttctccggtggagaaactgcagaggactggtgggcggggctccccagccatcaccatcctgtgtacaatggctgtagacttgtatatggctcctttaatattgtaaagatgctgatgtacaattgtcgtgcatttgtgtgaacacattgcgttcccagtccatgccataaatgatgctctcaagca

SEQ ID NO: 75389 - DNA, 756 bp, Homo Sapiens
ttacttacagttttcaaaaagcaggctggtacggtcggaatcccgggatatgtcgaccacgcgtcggtgagttatgtctggtcccaaaaacccttgagtaaacgtagctgagccattgcaaatgaaggtacagatggattgaaacataaaattgtagcttttggtgtccttctgaagggtcagaatatgtaattatttgataaccaaggaagtcaagtcagatggctaagtagtaactttccaatatgatttctccgtggtacttcacctggtggcacttttggggggcaatgttaacaactatcacattttactcatcaagtctctttcatttcggcagtttaaagacacaactgtgggctttctgaggcgatgcccgttgggcaaacttaggtttatgtgtttggtttttcagctgacgtggaagccctgggtgggcgtcccctggctggcctggcttttgggttcaagtctgtatgtatggagtgggttggggccccaaagctttgctgctattgatttgtccccgacagcaggcaaagcctcacattgccctcaattttccccctttcatttgaaggaccagtttttcatggtacttgtcttgatctttttcatagtgttcaaatctgtatttttgtatgtagagggaaataattttctcaacactaatcgttaataactattgtattaaattgtcatgaaggaacttgtttaataaatggacgtgtagcgacaacaacacacccacaccac

SEQ ID NO: 75390 - DNA, 1148 bp, Homo Sapiens
cttgtcttccccgggtaaagccagcttgactgttatttgtgacatggcaaccaagtcctgcaagggggttggcgtactcccaggacaacaggtgcccgccctctgcccgttctcccagaagctcatagatgctgttgctgtaaacccgatccttgatgccagcacggtcaccggtctgctggggccagtttatccaggaaggccgaatgttggggccaagccatactcagggtatccagccaccccaccagtcccaatgggaggagaatatacagccgctgggctcactgcaccccgtaagcaggttgttgtaatgctgattgtaagttcgaatccgggcctggagctctggcaggatcagccgcagatatccgatgtaatatgaccatgccagcccatgggccacgttgaaattccctttttcacacactgcagagatctcagctggggccaggcccttgaggcccaggaggatgttcagtgcctgcgagaggcccaggagggcaagcatccaagtgaagggcgggccgaccgcatttgggagggagtagtagaaatagatggacagcagcaacagggccccacggcggagggggcagcccaggcaggcccgcacagtcctccagtagctgccccggtacctggagtggatgtggcgcagctcctcagccaggctgcagaccccgtttaacagcagtcccagctgcagggaggctaggtggaggaccaggtaccggagagtgtgctctggtggctctcctagcccccaaagggtcaccaggcaggcactcagcagaaccaaggctgccttctgggccccgtgacccctgggacacgggatggatggatgcaggctggagtggggcatcttctgcctcccggacactggctgctctggatgatgacgaggagagaaggcccggcgctacgagcagccaagggcagcttctctgagtgcagccgcagtcacagctctgaacagcgggttcccctcaagccaccacgatcaaacacactgtacctaacacctgagcaggactccacacactcagccaaaggcagcacacacatcacacgatgattccccgtctcatatttttcttctggtttccaggatgcagattctttttctgaaaagtgtgacctag

SEQ ID NO: 75391 - DNA, 977 bp, Homo Sapiens
gggctgtaccgcccggagtaacgggatgtcacacttttcagaaaaagaatctgcatcctggaaaccagaagaaaaatatgagacggggaatcatcgtgtgatgtgtgtgctgcctttggctgagtgtgtggagtcctgctcaggtgttaggtacagtgtgtttgatcgtggtggcttgaggggaacccgctgttcagagctgtgactgcggctgcactcagagaagctgcccttggctgctcgtagcgccgggccttctctcctcgtcatcatccagagcagccagtgtcctgggaggcagaagatgccccactccagcctgcatccatccatcccgtgtcccagggtcacggggcccatgcaaggcagccttggttctgctgatgtgcctgcctggtgaccctttgggggctatggagagccacctagagcacactctccggtacctggtcctccacctagcctccctgcagctgggactgctgttaaacggggtctgcagcctggctgaggaggctgcgccacatccactccaggtgactcactgcagtacccagggacggggtatccaacgtgtgtcactcccttgatgcctagccctgcccctccttgaacctctctggctgagctgggctgccgggctggggtctggggtctggctgtcactcacaggtaccggggcagctactggaggactcgtgcgggactgcctgggctgccccctcagccgttggcggcccctgtctgctcgctcgtccatctatcttctactactccctcccaacatgcgcgtcggaccgccattcactttgagatgcttgccctcctggggcctctcgcaggcactgaacatcctcctgggcctcaagggtcctggcccagctgagatctctgcagtgtgtgacaacgggcaattcacgtggccatgggctggcatggtatatttacatcggatatctgggtggatcttgccaagc

SEQ ID NO: 75392 - DNA, 2549 bp, Homo Sapiens
  misc_feature (684)..(809): n is a, c, g, or t
ctccttcggggttaaatcttcttgtgtgtcgtccctctttgctctattgtgggttttttgcatcctgtttcgctgtgcctatcgctatctgcgctttttcttgcgacgtccccttcggtttgcccattatcgagtctagcccctcggtgcaatttgggttcggtcgatcgaactgctcccccacgagagtcggtctccggctcttggtgaccttgtcaatttggcttctctcctctctcaggtgtcggctgtcggagaccgcgtgtgccttaggtttacctctatggtgattgcgtggctctgtttggtgtctccgctccctcgatttgtattactctctctcctcctcacctcgttaagtgagctatcttagcgattgtgcccgttcctgttcccgctcgttctcttcgcgttcggtcccttaccgggtccgttgtttgttccgcttctctatgcattcctccccttgctctggcctatgtatgaccgcggactgctacgggactccgctcgtcctcctactcgttccctattgggtcactcgtctctctctggcacgttggagggcccccccactgttggtgttgcacacatgcagtgtcttgcggtggtcccgggatgctgacggcttcggagtcccctcacggggccgtccatgactctgcacggcgcccccgcgcacgnnnnnnnnnnnnnnnnnnnnnnnnnnnnnnnnnnnnnnnnnnnnnnnnnnnnnnnnnnnnnnnnnnnnnnnnnnnnnnnnnnnnnnnnnnnnnnnnnnnnnnnnnnnnnnnnnnnnnnnnnnnnnnttctctcttgttaatctgagatgtgctttaaaaaaggaccgttgagaaaggggtggagtataaggaaaccgcaagtgagagggagtactctagtggggtgggggtgccgatacacagctaggcttaaggggccagggaaggaagtggtgccagaatcctagagatagtcatgattacgcaagagttgcccggcaggagagtccatagcaaccttgatgctgcagggtgggagccgggggattcaataccccaaactcagcctcctcctcctctccattcttctgctggggctccccaataatggaacatgaccaggagccagagggcgaaggagcctgttgataccattgagagagttcggcgtccccgggcaaaggaaggggagaagggtggggagtgggtctggaaggccccatgaaagacacctggcacaccccctaagtacactagcatccaaagtttatgaaaaacttccacacactcagtcctcacaacaaccgtgagggaggtaaggcagtgattatgatcccatttcacaggttgaagacaccgaggctcagagaggggaaatgactggcccaaggggacaagacgcatcttaagatgtcaagtcctggacccttccctgcaaggccccctgtggaaggaaatagctctgctggacattcagccactgaagagagcccccagtccagaggcttggagaccactggaggctctggcctggtgaccctgggtctcaagagaaatccgtgcggagagggaggggcttttccattccactgatgaggagctcaggctcttgggacatcgtggaggtactgggcaccgctgaggtcttcaagctgcccacagtaacctcttccttttcctcctgccgcaggtgccggagaacctcctgggacagcgagaagctgctgtcatctgcaggttcctggtaggcaatgaggcggcagttgttctgagactcaggggcatctgccaggatgtcctcaagtgtccggcagaagagtttggcctgctcaagcctatcctcccggctaaagccagcttgactgtattgtgacatggcaaacaaagtctgcaagggggtggcgtactccaggacacaggtgcccgcccgctgcccgttctccagaagctcatagatgctgttgctgtaaacccgatccttgatgccagcacggtcaccggtctgctggggcagtttatccaggaagcgaatgttggggtcagccatactcaggttatcaggcaccccacagtccaatgggaggagaatatacagccgctggctcactgcaccccgtagcaggttgttgtaatgctgattgtaagttcgaatccgggcctggagctctggcaggatcagccgcagatatccgatgtaatatgaccatgccagcccatgggccacgttgaaattccctttttcacacactgcagagatctcagctggggccaggcccttgaggcccaggaggatgttcagtgcctgcgagaggcccaggagggcaagcatccaagtgaagggcgggccgaccgcatttgggagggagtagtagaaatagatggacagcagcaacagggccccacggcggagggggcagcccaggcaggcccgcacagtcctccagtagctgccccggtaccttctgcctcccggacactggctgctctggatgatgacgaggagagaaggcccggcgctacgagcagccaagggcagcttctctgagt

SEQ ID NO: 75393 - DNA, 983 bp, Homo Sapiens
  misc_feature (66)..(66): n is a, c, g, or t
  misc_feature (155)..(155): n is a, c, g, or t
  misc_feature (172)..(172): n is a, c, g, or t
  misc_feature (206)..(206): n is a, c, g, or t
  misc_feature (212)..(212): n is a, c, g, or t
  misc_feature (246)..(246): n is a, c, g, or t
  misc_feature (256)..(256): n is a, c, g, or t
  misc_feature (309)..(309): n is a, c, g, or t
ccgattagccgccccttaggattgcctgggccagattcgccgggtaatgcacggaccagagccccncgacgcttctgccggcttgagccgcgcctgaagtgtcccaataataccgagggggctcccccttctccttccgcggccgtcgcccgacnatcgatcatcctccagntcccagagaggcgcggagtccccaggccggcgcnggtctnccgccgtgcgtccgcgctttgtcccgctgcgccngggtttccgnggcgccgccacagccagtgtgaatagagaccccggaggcgcgtcctagccctnatctggggaagcgcacctgcatacagacgggtgcaccggggaggaggcgatctgccgcgtgttcctgcaaagcaggaaaaggagttaactagtgtcacatttgaagacgagcactgaggatgaggaaccaactgaagaatatgaaaatgttggaaatgcagcatctaagtggccaaaaagtggaggatcctatccctgaatctaagtttcagatgaactcccataatgaatgatgaatttgtgatgagggataacctggaagtggtattcacacattatgctacaataaaaggttctaccgtggagaggattttgacacattcagtaactaatggaacacaccgtcaacatgaattcgcaccttacatgacagaagtgattcagggattcctatgaatagaaatgctgagaaggaacgcattttattgcagaagctaaaaagctaaagtaccagtcatctagagagaaggaaattaatgtttcttaataatcctgttaaatgtttgattgtttttggaatgtgttattgtaaagatgtcatgcaggacatgtatatgttgtctgttgtaaaatgttaacgaatactttgttcagggctcactctctctttgtcatgaaagccagctccttgtggcgaggtaaagtggaattccaataaagaaattccttaaatc

SEQ ID NO: 75394 - DNA, 823 bp, Homo Sapiens
gtaaattctgttactagaaatgtaggaaattcaggtatagctttgaatcccaattacacattggtcagtgggaaaactaagggcctccaacaggcaaattcagggaggataggtttcagggaatataaatttatttaatattagtggtctttaagtataaacttgatgtaattgggtttgggagggggcagtgatgatgacttctgaaacaaaatttggatttccttttaggaaaagtagaaagcatagacttacaagtctaacaggagataggagagagtcactcataaaaaatgcaaattgatgaacgtactattgtgatacattagttgaatggatgaaacttttttaaagtttcagatgaactcccataatgaatgatgaatttgtgatgagggataacctggaagtggtattcacacattatgctacaataaaaggttctaccgtggagaggattttgacacattcagtaactaatggaacacaccgtcaacatgaattcgcaccttacatgacagaagtgattcagggattcctatgaatagaaatgctgagaaggaacgcattttattgcagaagctaaaaagctaaagtaccagtcatctagagagaaggaaattaatgtttcttaataatcctgttaaatgtttgattgtttttggaatgtgttattgtaaagatgtcatgcaggacatgtatatgttgtctgttgtaaaatgttaacgaatactttgttcagggctcactctctctttgtcatgaaagccagctccttgtggcgaggtaaagtggaattccaataaagaaattccttaaatca

SEQ ID NO: 75395 - DNA, 1216 bp, Homo Sapiens
ggggcaacctcctggttccaagtgggagacatggtgctgtcggagctagcggcgcgcctcaactgcgccgagtacaagaactgggtgaaggcgggccactgcctgctactgctgcgcagctgcctgcagggtttcgtcggccgcgaggtgctctccttccaccgcggcctactcgccgcagcccccggcctggggccccgcgccgtctgccgcggcggctcacggtgcagccctcgcgcccgccagtttcagcctcagtgtcaggtgtgcgctgaatggaaaagggagattttgagacatcatgtcaacagaaatggagatgtgcactggggaaactgccggccgggccgctggcccgtggacgcctgggaggtggccaaggccttcatgccccgaggactagcagacaaacaaggacctgaggaatgtgatgcagttgctcttttaagtctcatcaactcctgcgatcacttcgtggttgatcgaaagaaagtcacagaggtaattaaatgtcgtaatgagatcatgcactcttcagagatgaaagtatcttctacgtggcttcgagattttcagatgaagatccaaaattttctgaatgaattcaagaacatcccagagattgtggcagtatactccagaatagaacagctgttgacgtctgactgggctgttcacatccccgaggaagatcagcgagatgggtgtgaatgtgaaatgggaacttacctgagtgagagccaagtcaatgaaatagaaatgcagttactaaaggagaaacttcaagagatatatcttcaagcagaagaacaagaggtgttgcctgaagagctctcaaatcgactggaagtggtgaaggaatttctgagaaacaatgaggatcttagaaatggccttacagaagatatgcagaagctagacagcctctgtctacatcaaaaactggattcacaggaacctgggagacaaacacctgacaggaaggcctgaggttgcccgtcaacaaaaatcaggcatgttctgtgaaagtcagcatggcttccatctcagacatccttttctgtgcaaaaggaaaaagttaccagagtattgtacccaaacaaaaaggaatttttgttgttttgtcctggactttcctctaactctttggaactattttaatatttataaacttggggttgtataatctattgcaataaaaaatattagatactct

SEQ ID NO: 75396 - DNA, 849 bp, Homo Sapiens
ggccattccccgggatggaatccccaggtaaaccccttggatccccaccactgggactcagaagtggacaggggagtgcctgcccccgggagaggaaggaagtgggcacttgctcccagggcccccactgcagagcacggccactgtgagctgacgacagaatcacagtacagcaataatgtccctatcctcttccagaaccccagtggggccctcaggtcacgcaggacggagccagctgggtgggtcccaccaactcggcatgaatgagacgacggatgaaccgcagccccagcatcaggaggggcgcctgtgtcaacacccacgtgggctgggaccccgtgaatgccagtctggggccgacggacccccagggaaagcctgggtgcaggccaccttgtgcgctgcccaagcctgcaggccccgagaggtcagcctgaggaggcagcctcggctgccggtaatgctgcctgcttcatctgggccacctcccgctccaggtcctcgccggctcgctgcaggagctcacacctctgcctcagcacgttgcccgcctgctgcagccgctggttggcagccacgtaggcccggctttgctggtagagctgctctcccggggcctccgcatcctccatcatcctgaagggaactggggggtcttccggggccaggatggtgaacactggatcctctgccggcgcaccccgcacatcctccaggatctgctccaccgtggggggcgctgggcgggtgggcagcagcacgcgcttctttgccttggagcccatctctgggcgcgggacccgaaagcccagcgtcgacgacgcagccacttccgattccggtccc

SEQ ID NO: 75397 - DNA, 1380 bp, Homo Sapiens
cttcagggaataagaaacatcttccacattcaagaaacaaagctggctgtgggtctggagagagggtgaggcagccccaggtctctgggtcaggcggacggtccctgcatgcagtgcccggcaggactgagcagggttcccggggtcgccggtacccatccctccccagcttccggggccccgggacggagccgctcacagaggcaccattcagacggccagacacacacgaaagctttatgtgcagggcccagcctctgggccgccttgcccaggtttccactcaagttgctatttaggatgaaaagcctttggcaagaccctccgccgcactaacgccccctcccccagggccagaacccgcagggaagcaggcccaggacctgctgcagctggcagggtggctatgagactcaggacaccctgggctcctggccagtgactcacagcggtcctccagcaagggcagtggctgggagacacccgtgccgtggagctaggcccagcctggctgggtctcagggctgcttctcttgggtgaccccagcggcccagggtcgttgtgaagatcaacgtggcttgtgggaggagcccggggcccagaaggaagtggggtcaggggctcaggctggccctcgggctgctctgacattgggtgggcactcgctggatggaatcacagttaacacctcgatcccaacacctggactcagaagtggacaggcgagtgcctgccccgggagaggaaggaggtggcacctgctcccaggggccccactgcagagcacggccactgtgagctgacgacagaatcacagtacagcaataatgtccctatcctcttccagaaccccagtggggccctcaggtcacgcaggacggagccagctgggtgggtcccaccaactcggcatgaatgagacgacggatgaaccgcagccccagcatcaggaggggcgcctgtgtcaacacccacgtgggctgggaccccgtgaatgccagtctggggccgacggacccccagggaaagcctgggtgcaggccaccttgtgcgctgcccaagcctgcaggccccgagaggtcagcctgaggaggcagcctcggctgccggtaatgctgcctgcttcatctgggccacctcccgctccaggtcctcgccggctcgctgcaggagctcacacctctgcctcagcacgttgcccgcctgctgcagccgctggttggcagccacgtaggcccggctttgctggtagagctgctctcccggggcctccgcatcctccatcatcctgaagggaactggggggtcttccggggccaggatggtgaacactggatcctctcctcgtgccgaattcgccacccaggcctcgctaccta

SEQ ID NO: 75398 - DNA, 1151 bp, Homo Sapiens
gagaccgtcagcgccacaagggacggtattctctttgcctgaagaaacaaggcattgaatctctaaaatgctgttctcaatcattgtcagagatgttttcaagttgcagtcagaagatctttcttaatagaaagtcagatgactaccgtgttggttgtgacttccccttaagtataactaatttgctctgtggtaagagatatgctcattattaccacttagaagatgttgttaaaaacatgtgaaagataggtatggaaaaagcatacacccccaaacagaaaggagttattaaagtaatttacaaacctctcagcactaattagtgtccaactccaagtgggtcaattccttagtataatattaaggcttactagtatcactgctttttccttagcttaatgacttacttagaatttatcctttattttaaatgatctgtactatctagtgtctaaaacactattctccagaaaaatcaatcattttctagccctctccctcagtcctttattgtccattccaatacattgaacacatttcctttaccctccacacacttcttccaaaaggaagcacccgttgagtccttttgagggtgatttgtcttacaactgactgacttagcaggaatttaattaggtcatatttggtgatgagacttatggagtgtgcctctctctcccaactgctgcttaaaatgcaaggacaagcaattagaagccatcctaaggtgcttacctcacacgccacccatgaggcttgtggccacagtggcacttgggtgtggctcctctgttatttgtcctcatgtgagaaagcagatcatctccaaatcttgccatttgtatacttttggtggagacttggatgtcatatcttctttgttttgggttttcttccctagcttattttgtggcttttaaagaagtggattgtattgtgagatcctgtgattcctggtggccagtatcctggattcctctaagatcttgcctctttcctcctcatgaaagcagcacacattgtgttaacttatgtctcttgttaaatgagcttaatgtctttgtgttttgtccaaaactgtattgaaaaaatattgtttaatgcaaatgaaggaatgcaataaagagtaaatatacttgaaaaaa

SEQ ID NO: 75399 - DNA, 2629 bp, Homo Sapiens
  misc_feature (2134)..(2274): n is a, c, g, or t
  misc_feature (2284)..(2298): n is a, c, g, or t
  misc_feature (2409)..(2417): n is a, c, g, or t
tgctggtccggtctggaattatgggcttccagttctggcctttggggttcaagatcactgggaccaggccgtgatctctatgcccgagtctcaaccctcaactgtcaccccaaggcacttgggacgtcctggacagaccgagtcccgggaagccccagcactgccgctgccacactgccctgagcccaaatgggggagtgagaggccatagctgtctggcatgggcctctccaccgtgcctgacctgctgctgccactggtgctcctggagctgttggtgggaatatacccctcaggggttattggactggtccctcacctaggggacagggagaagagagatagtgtgtgtccccaaggaaaatatatccaccctcaaaataattcgatttgctgtaccaagtgccacaaaggaacctacttgtacaatgactgtccaggcccggggcaggatacggactgcagggagtgtgagagcggctccttcaccgcttcagaaaaccacctcagacactgcctcagctgctccaaatgccgaaaggaaatgggtcaggtggagatctcttcttgcacagtggaccgggacaccgtgtgtggctgcaggaagaaccagtaccggcattattggagtgaaaaccttttccagtgcttcaattgcagcctctgcctcaatgggaccgtgcacctctcctgccaggagaaacagaacaccgtgtgcacctgccatgcaggtttctttctaagagaaaacgagtgtgtctcctgtagtaactgtaagaaaagcctggagtgcacgaagttgtgcctaccccagattgagaatgttaagggcactgaggactcaggcaccacagtgctgttgcccctggtcattttctttggtctttgccttttatccctcctcttcattggtttaatgtatcgctaccaacggtggaagtccaagctctactccattgtttgtgggaaatcgacacctgaaaaagagggggagcttgaaggaactactactaagcccctggccccaaacccaagcttcagtcccactccaggcttcacccccaccctgggcttcagtcccgtgcccagttccaccttcacctccagctccacctatacccccggtgactgtcccaactttgcggctccccgcagagaggtggcaccaccctatcagggggctgaccccatccttgcgacagccctcgcctccgaccccatccccaacccccttcagaagtgggaggacagcgcccacaagccacagagcctagacactgatgaccccgcgacgctgtacgccgtggtggagaacgtgcccccgttgcgctggaaggaattcgtgcggcgcctagggctgagcgaccacgagatcgatcggctggagctgcagaacgggcgctgcctgcgcgaggcgcaatacagcatgctggcgacctggaggcggcgcacgccgcggcgcgaggccacgctggagctgctgggacgcgtgctccgcgacatggacctgctgggctgcctggaggacatcgaggaggcgctttgcggccccgccgccctcccgcccgcgcccagtcttctcagatgaggctgcgcccctgcgggcagctctaaggaccgtcctgcgagatcgccttccaaccccacttttttctggaaaggaggggtcctgcaggggcaagcaggagctagcagccgcctacttggtgctaacccctcgatgtacatagcttttctcagctgcctgcgcgccgccgacagtcagcgctgtgcgcgcggagagaggtgcgccgtgggctcaagagcctgagtgggtggtttgcgaggatgagggacgctatgcctcatgcccgttttgggtgtcctcaccagcaaggctgctcgggggcccctggttcgtccctgagcctttttcacagtgcataagcagtttttctggtactcgttcggtctcgtatcgttttcaaatcaatcatgttacactaatagaaacttggcactcctgtgccctctgcctggacaagcacatagcaagctgaactgtcctaaggcaggggcgagcacggaacaatggggccttcagctggagctgtggacttttgtacatacactaaaattctgaagttaaagctcnnnnnnnnnnnnnnnnnnnnnnnnnnnnnnnnnnnnnnnnnnnnnnnnnnnnnnnnnnnnnnnnnnnnnnnnnnnnnnnnnnnnnnnnnnnnnnnnnnnnnnnnnnnnnnnnnnnnnnnnnnnnnnnnnnnnnnnnnnnnnccttggccgnnnnnnnnnnnnnnnaaaaactttttaaaacctttttttgggcccggggccccaaaaggaaaggaaacggggccaaccctgttcccaagaaaacccgggccagaccaagggttggatccccccccnnnnnnnnnccccggggggcacccgagggtttgaacacaccccagaggggttccgggggtctttatgggtttttttaaggggggcccagggagcctcaaattaaatttaccccccgcctggccattatcggagaaggggggagaatttataaagccatccgcgcccacggggaaaccttcctaaagggggggtgaggaccccggaacccgcttcgcgggat

SEQ ID NO: 75400 - DNA, 836 bp, Homo Sapiens
gggtgggagggccgcccaccctccttccctggtggaaggcagcagaagggtgggacggatctgtgtgggagggtctaggtgtggcctgcctgggggtaggagagggaccagatgacctttcaggtctccttgggtcaaagactccctgataaatggctgtcgctgaaggcaggagcgaggccctgggaggtgattgacttcgaaaaaccacaggctgcagctctgagggcctcaaaggttaagtacggagtcccccaaaatgaggctttcctcagctttaatccacccacgccctttaggtggccccagacaccccgccagggcctctctggcagctctccgtcctcgattctggagacagagaaacgtgatgctggctcctggtctgctcatagccccctcgtccccaccacagggtcgccagccacctcctcagcctaccgcgtgcccctccttcccctctacttccgaccctccaacaacagcagactcttccccaaacactcctttgcccagaccccgggcttcacacatgctgctcttagaaatgcatcccagctccctgcgaggagccagcaaggctgctcggtgcttcttcccatggatgggaagctctgccggggaccaggacccggacctggagaccctgaggagcgtgttggtcagtgtctgttctgaggcccgggacagagctagccaggcacaggcagcatcggtgtgagggtccagcctcccggacaagctctcccttgtctgttcccagacctgtcactgcacacacaggcggtgcattcctatctgcctgggcagagaagccagacaagtagaccgaggta

SEQ ID NO: 75401 - DNA, 3392 bp, Homo Sapiens
attcccgggatctggggcggaacgccgcccggccgcgggtcgggctctgtgtcagcagccgggcgggcgctcgggcgggacatggcagcctgtacagcccggcgggccctggccgtgggcagccgctggtggtcccggtcgctgactggggcccggtggccaaggccgctctgtgcggcggccggagctggagccttctcgccagcgtcgaccacgacgacgcggaggcacctctcgtcccgaaaccgaccagagggcaaagtgttggagacagttggtgtgtttgaggtgccaaaacagaatggaaaatatgagaccgggcagcttttccttcatagcatttttggctaccgaggtgtcgtcctgtttccctggcaggccagactgtatgaccgggatgtggcttctgcagctccagaaaaagcagagaaccctgctggccatggctccaaggaggtgaaaggcaaaactcacacttactatcaggtgctgattgatgctcgtgactgcccacatatatctcagagatctcagacagaagctgtgaccttcttggctaaccatgatgacagtcgggccctctatgccatcccaggcttggactatgtcagccatgaagacatcctcccctacacctccactgatcaggttcccatccaacatgaactctttgaaagatttcttctgtatgaccagacaaaagcacctccttttgtggctcgggagacgctaagggcctggcaagagaagaatcacccctggctggagctctccgatgttcatcgggaaacaactgagaacatacgtgtcactgtcatccccttctacatgggcatgagggaagcccagaattcccacgtgtactggtggcgctactgtatccgtttggagaaccttgacagtgatgtggtacagctccgggagcggcactggaggatattcagtctctctggcaccttggagacagtgcgaggccgaggggtagtgggcagggaaccagtgttatccaaggagcagcctgcgttccagtatagcagccacgtctcgctgcaggcttccagtgggcacatgtggggcacgttccgctttgaaagacctgatggctcccactttgatgttcggattcctcccttctccctggaaagcaataaagatgagaagacaccaccctcaggccttcactggtaggccagctgaggccccaagtgcccaggcttggtcaccgggaagaacaactctcatcccacaattgctgcagaactcttctctccccatcatgggccacagtgggtctcttaatttgattgtggggttctttttgtggggaggggtggtataacttttcttcagaagacccatgtgggacacctccaaggctggcctcctcataagccctgcctacaccatgttccagtaaacctctccaccaaggaactgtgttcagctgccacaggcctggaggagtttcctggcctgtcacgtgaggtttgatcagtaaaccagtgcacgcttggccacccttgccatttctgctcccagagtctcaggctccccttctgacccagtgtgcgcccttgactgctttctttgctgcccttccagggagctgcccccctggtagggcatgtgcctgtttccctctcagcctggaggctggctggacatctcctagggtcactgtgcctctcagctagttggcgggggtgctggactggactcttgttcactttaccttctgccaaatgcagagagggaggccagtgtcagggtcggagtggcctggctcttagcactgaccgaccattgccatttctggcctcgctaggcccaggagaggagggaggcaagccagtcgggtttcctggagcaatgggtgtgccagccctcagcatgactctgccaagcatccagaccacaaatgcaggaatttggctgaggagcagctttaggtatggattgatgactaagtcaagctacttcctgagcttctctcagatttccaagagccagagatgaattgtgctgcatcttgccccaattcttaggatttcttttcctccgccactgcagtgattgttagaggtagttttcttgaattaatattaaatcacagttccagcccttgttattcttgtccttagtcctccagggggagctggggttgcagggcaacagtacagtcgcgcttacgacctggctagaacacaaggtcagatgataaacagaagcacaggaactcagcccatggccgcaagctggtcaaggcctgctcactgtaaacatggctctgtaccattgagtttaacacaattttattagaaattagtgtttgcttccatcacttatgctgagcaaccaaatattacagttatgtgataaaggaaaaattctttcctgcccaggacctgcgccatcctttaggccgaccttggtcacataccaaattcaataaaacccaatactggcctgtgttgttaacagcaggctgccaggtttctcagaaactgacaagaaaatctgaccttcatccatactttgtttacttacccctgggctgcttggagttgaaaaatgcacacagccaagagttgctttctgaatagggctggaaactttcaaagaaaacccccaaacttttaagtcacaaagtctgattaaagaagctaagatcatgtcagtgagttcaatgttagtattttccttaagaccaaggagagattttcagtcagagaagataaatgcccagtcccagactactgtgctttctcggcaaaaaagactgagacactgaggatgtgaatgtcaaagtagtaagcagggactaaaggggatggggaggtcaaaaggcaagcatcacaacacctcagtggggagctgggaatttgagtgttaaaggacctcaagagggcagctgagaaaataggccagtggtctcaggctgacgcattccagtctctgtgggaaagtcataaagccaaagcctgaatttggccaaagaagtggatttgtctttatcttgttacctcaatgagggctggaagaactagtagctgatcaccaaggtacctgacctgagagtcttagtgctgtttatacattcaagactgtgactaacataaaatgcctaattagaaagtcacatttcccctgtcccgccgtcatgtcacttcaggtccttgtgtctaaccctgggtctggcatttgcccataggctctgtggcatcagctatcataagagtagtcaagagagatgaacttgataacctgtgttctctccaaagagcagaaagtgggtactatacgtggctacgttgctttattaggctggcagaacagtccctccctgacagcattcctttggaaaataattcagataagctgaattctggttt

SEQ ID NO: 75402 - DNA, 529 bp, Homo Sapiens
  misc_feature (62)..(62): n is a, c, g, or t
gcatgtgcccatcttctccggggtggtatttatttcagccaacaccgctcagccctgatctntgccagcacggaggcccctcgctgcctgtgagatcaaggtctgaggctgccctggccggtgggttccccacccctggcaccctacaagcgacaggccctgtggctccttcctcagcccgaggccccgtgcccacttgctgtagaggatgttgtaagataaaacctcatctccagggtcacagccgggcctcggcctcctgtgagcagcgggaacctggaaagcagcacccagagcgccagcccgttccacagatggggccagactccggcccctcagagacatagtggccgggtggtgggggcccacaggccagggcttctgagccctgtcttcgtctacagcccagcctttcagagtggtggggaggagggtttatggatgtcaaacacctgcaccttgagataatcctacaaccacatgcagttgtgggaccgcagtttggtcctggggaccattcatacccaca

SEQ ID NO: 75403 - DNA, 707 bp, Homo Sapiens
  misc_feature (342)..(395): n is a, c, g, or t
  misc_feature (460)..(507): n is a, c, g, or t
gcaccggatgtaatttaatagggtggggaagatactcaagagcgggcatgggacggggcgcagagtccgggttaagggccttacgtagccaaaaggggggatccaggaccctcgggcccccccagccgcatctgcaggttgatgcggtagcactgaagactacagagtgcctggcctgtgcgggagcaagcgtagcggcgcggatggggacagccggggacagagcagcgcggcggagggcctgagggggatggccgctgacacactgccgtgggggcggggacgccaggtgggaaggaaagggtggaaccctgtgctccgctgcagtagcgcaccatgggnnnnnnnnnnnnnnnnnnnnnnnnnnnnnnnnnnnnnnnnnnnnnnnnnnnnnntccccgcccactggtcgccgcagtcttggtgaggcgctcgatagtctggttcttgtgctcttctnnnnnnnnnnnnnnnnnnnnnnnnnnnnnnnnnnnnnnnnnnnnnnnnttcagcagcatctcctctgtgagggcgggaggtgggcagccctcagctacaggcagcggcagcataggggaaggttgactccgcgccttctggagcagagctcgctgtcgagcagtaagcagccgctcattgatctccttcttgaggtctccattgtcatccagctcccccttctccagggcatccagccacctctgttc

SEQ ID NO: 75404 - DNA, 1029 bp, Homo Sapiens
  misc_feature (59)..(59): n is a, c, g, or t
  misc_feature (61)..(61): n is a, c, g, or t
  misc_feature (102)..(102): n is a, c, g, or t
  misc_feature (140)..(140): n is a, c, g, or t
  misc_feature (174)..(174): n is a, c, g, or t
  misc_feature (176)..(176): n is a, c, g, or t
  misc_feature (179)..(179): n is a, c, g, or t
  misc_feature (183)..(183): n is a, c, g, or t
  misc_feature (187)..(188): n is a, c, g, or t
  misc_feature (196)..(196): n is a, c, g, or t
  misc_feature (207)..(207): n is a, c, g, or t
  misc_feature (275)..(276): n is a, c, g, or t
  misc_feature (283)..(284): n is a, c, g, or t
  misc_feature (519)..(566): n is a, c, g, or t
  misc_feature (622)..(671): n is a, c, g, or t
aacctgatgactgcgtccatgcatggtccagaaaaccagagcccagagaccagagaccncntcagagagacccgccagcacgtccctgccagctcagtcaantcaaatcagctggggacagtcctgggaccagagtgtcntacctcactgtatcccagagggcctcgctcaccntntcncctnatgnntgtgatantgagagggacntatggaaggagtccccttgagcagtaccgtgcctgctggatgaagacagtatctctctccctctccanntcggacnntatcaggagggtaggggggtcaggaggaagaggaggaacagaggtggctggatgccctggagaaggggagctggatgacaatggagacctcaagaaggagatcaatgagcggctgcttactgctcgacagcgagctctgctccagaaggcgcggagtcaaccttcccctatgctgccgctgcctgtagctgagggctgcccacctcccgccctcacagaggagatgctgctgaannnnnnnnnnnnnnnnnnnnnnnnnnnnnnnnnnnnnnnnnnnnnnnnagaagagcacaagaaccagactatcgagcgcctcaccaagactgcggcgaccagtnnnnnnnnnnnnnnnnnnnnnnnnnnnnnnnnnnnnnnnnnnnnnnnnnntgcggctccggcccccatggtgcgctactgcagcggagcacagggttccaccctttccttcccacctggcgtccccgcccccacggcagtgtctcagcggccatccccctcaggcccgccgccgcgctgctctgtccccggctgtccccatccgcgccgctacgcttgctcccgcacaggccaggcactctgtagtcttcagtgctaccgcatcaacctgcagatgcggctgggggggcccgagggtcctggatccccccttttggctacgtaaggcccttaacccggactctgcgccccgtcccatgcccgctcttgagtatcttccccaccctattaaattacatccggtgcaaaa

SEQ ID NO: 75405 - DNA, 1245 bp, Homo Sapiens
  misc_feature (768)..(821): n is a, c, g, or t
  misc_feature (1164)..(1183): n is a, c, g, or t
caggacctcatgagtaagctgtggcggcgtgggagcacctctggggctatggaggcccctgagccgggagaagccctggagttgagcctggcgggtgcccatggccatggagtgcacaagaaaaaacacaagaagcacaagaagaaacacaatgaagaaacaccatcaggaagaagacgccgggcccacgcagccgtcccctgccaagcctcagctcaaactcaaaatcaagcttgggggacaagtcctggggaccaagagtgttcctaccttcactgtgatcccagaggggcctcgctcaccctctccccttatggttgtggataatgaagaggaacctatggaaggagtcccccttgagcagtaccgtgcctggctggatgaagacagtaatctctctccctctccacttcgggacctatcaggagggttagggggtcaggaggaagaggaggaacagaggtggctggatgccctggagaagggggagctggatgacaatggagacctcaagaaggagatcaatgagcggctgcttactgctcgacagcgagctctgctccagaaggcgcggagtcaaccttcccctatgctgccgctgcctgtagctgagggctgcccacctcccgccctcacagaggagatgctgctgaagcgcgaggagcgggcgcggaagcggcggctccaggcggcgcggcgggcagaagagccacaagaaccagactatcgagcgcctcaccaagactgcggcgaccagtgggcggggannnnnnnnnnnnnnnnnnnnnnnnnnnnnnnnnnnnnnnnnnnnnnnnnnnnnncccatggtgcgctactgcagcggagcacagggttccaccctttccttcccacctggcgtccccgcccccacgaacaatgtctcagcggccatccccctcaggcccgccgccgcgctgctctgtccccggctgtccccatccgcgccgctacgcttgctcccgcaaaggccaggcactctgtagtcttcagtgctaccgcatcaacctgcagatgcggctgggggggcccgagggtcctggatccccccttttggctacgtaaggcccttaacccggactctgcgccccgtcccatgcccgctcttgagtatcttccccaccctattaaattacatccggtgcnnnnnnnnnnnnnnnnnnnncctgagcaggcggccgcaagcttattccctttagtgagggtaattttagcatggcactggcc

SEQ ID NO: 75406 - DNA, 1187 bp, Homo Sapiens
  misc_feature (282)..(282): n is a, c, g, or t
  misc_feature (390)..(390): n is a, c, g, or t
  misc_feature (462)..(511): n is a, c, g, or t
  misc_feature (1001)..(1049): n is a, c, g, or t
gcaccggatgtaatttaatagggtggggaagatactcaagagcgggcatgggacggggcgcaaagtccgggttaagggccttacgtagccaaaaggggggatccaggaccctcgggcccccccagccgcatctgcaggttgatgcggtagcactgaaaactacagagtgcctggcctgtgcgggaacaagcgtagcggcgcggatggggacagccggggacagagcagcgcggcggcgggcctgagggggatggccgctgaaacactgccgtgggggcggcnaccccactcggcaaagaaaggggggaaccctgtgctcccctgcagtagcgcaccatgggggccgaagccgcagcccgaccttccccgccgctcgccgcgagcgccccncccggcctccccgcccactggtcgccgcagtcttggtgaggcgctcgatagtctgtttcttgtgctcttctnnnnnnnnnnnnnnnnnnnnnnnnnnnnnnnnnnnnnnnnnnnnnnnnnncagcagcatctcctctgtgagggcgggaggtgggcagccctcagctacaggcagcggcagcataggggaaggttgactccgcgccttctggagcagagctcgctgtcgagcagtaagcagccgctcattgatctccttcttgaggtctccattgtcatccagctcccccttctccagggcatccagccacctctgttcctcctcttcctcctgaccccctaaccctcctgataggtcccgaagtggagagggagagagattactgtcttcatccagccaggcacggtactgctcaagggggactccttccataggttcctcttcattatccacaaccataaggggagagggtgagcgaggcccctctgggatcacagtgaaggtaggaacactcttggtccccaggacttgtcccccaagcttgattttgagtttgagctgaggcttggcaggggacggctgcgtgggcccggcgtcttcttcctgatgnnnnnnnnnnnnnnnnnnnnnnnnnnnnnnnnnnnnnnnnnnnnnnnnnactccatggccatgggcacccgccaggctcaactccagggcttctcccggctcaggggcctccatagccccagaggtgctcccacgccgccacagcttactcatgaggtcctgatcccgggaattccggaccggtcca

SEQ ID NO: 75407 - DNA, 441 bp, Homo Sapiens
tgactcatggatttccatagagttaagaagtaaatttttttaggaacttaaagaatgctgcattttgttttcaccttgagttagatgtgaatttgctttagttattccatctgcaaagtatttgccatttcattgcaaagatttctgaattcattgtacaaacttgaaagtgtccatgttatttatacttctgctagagatctagcaattctgctagaatcaataggttttgaagggttttgtgatttatttcactctgctatcagccagctttttctatgaggcttaggtcacagaacctctttagaggtgaagtaagtaaacctctggttatcatccagtttgatctcaactctcaatgttcgaatgagtaaatgtatacagcttttattaaagtttttatatgtgtatgcactaaataaacagtgacaggaaaattta

SEQ ID NO: 75408 - DNA, 929 bp, Homo Sapiens
  misc_feature (13)..(13): n is a, c, g, or t
  misc_feature (158)..(158): n is a, c, g, or t
  misc_feature (210)..(210): n is a, c, g, or t
  misc_feature (287)..(327): n is a, c, g, or t
  misc_feature (437)..(524): n is a, c, g, or t
atgtaatttattngaagaaaatgtttttataatgttttcccagcctaaacagggagagtcctaacagtgttgtgcttgtatgattctgagactttatttgcgtaagtgatactactatactttatttttgacccatgcctttttaagctgtttcatantgaaaggtggaatattgtaaaaattttgtcaaagatgtactgtagtgctatntgaagtacctgtaacaaaacagttggccctctgtatccatgtactctgcatctgtggattaaaccaattgcagatcnnnnnnnnnnnnnnnnnnnnnnnnnnnnnnnnnnnnnnnnnagtataacagttatttaaatagcatttacattgcattaggtattagtctagggataaagtatacaggcggatgtgcgttggttatatacaaatatgtcattttatgtaannnnnnnnnnnnnnnnnnnnnnnnnnnnnnnnnnnnnnnnnnnnnnnnnnnnnnnnnnnnnnnnnnnnnnnnnnnnnnnnnnnnnnnntacttatttacctttattgtcattgcaagcttcttatggaaactttataggaatgaaaatatacatgttaagaagattaaacattagatagtagatggtttgttgcatgctagaactgttagtattgttgaatcaattactttggtttcatgaaaaaataaacgataaatatctttaaagagaactagaagaattttttgtttgagtgattccaggctgtagtatgatcatttactgaagtagtttgattggctggctaacttagaattattgtttcttgttttgtactgcaataggggttataattgtaagataaaaatgtgtgtgtgtttaagggaagtaggtggtggttaaaattcttggaaaattttcagaatactttaaaaataaagttccaagttacac

SEQ ID NO: 75409 - DNA, 845 bp, Homo Sapiens
  misc_feature (428)..(468): n is a, c, g, or t
  misc_feature (578)..(665): n is a, c, g, or t
tttgctttacacaaaacttgtcaagaactcatctgttaaaagcaaggaataactagtttatattttccgaataatgttcaaggttttctccttaatatgtttgaaattattgattttggcaatttttctaagcaatttatgtaattttatttgaagaaaatgttttgtataatgtttttcccagcctaaacagggagagtcctaacagtgttgtgcttgtatgattctgagactttatttgcgtaagtgatactactatactttatttttgacccatgcctttttaagctgtttcatattgaaaggtggaatattgtaaaaattttgtcaaagatgtactgtagtgctatttgaagtacctgtaacaaaacagttggccctctgtatccatgtactctgcatctgtggattaaaccaattgcagatcnnnnnnnnnnnnnnnnnnnnnnnnnnnnnnnnnnnnnnnnnagtataacagttatttaaatagcatttacattgcattaggtattagtctagggataaagtatacaggcggatgtgcgttggttatatacaaatatgtcattttatgtaannnnnnnnnnnnnnnnnnnnnnnnnnnnnnnnnnnnnnnnnnnnnnnnnnnnnnnnnnnnnnnnnnnnnnnnnnnnnnnnnnnnnnnntacttatttacctttattgtcattgcaagcttcttatggaaactttataggaatgaaaatatacatgttaagaagattaaacattagatagtagatggtttgttgcatgctagaactgttagtattgttgaatcaattactttggtttcatgaaaaaataaacgataaatatctttaaag

SEQ ID NO: 75410 - DNA, 602 bp, Homo Sapiens
cagcggcgggggtcgagagccggtgtttgcaagaggtgttcttttttcaaagtgtcacgaaacggggttgaagcatcttaagttttttccttttgttatttaattaccgattggaaagagggagggtttctgagcagaaaccaagttgggattgcagaacagagaagattcacagtgctttaccgttgtgagttgtttgggtaatcgtgcctggttttaaaccgaaaggattgtcctttaaaaatggaacatggactttattataaatgggacttagattggaaaagacattggtccccatattttaagccatgtgaagctgttttaggtaacaggatccccagtaaagtctttctagactaacatggttaggacacgtaattaagtacatcataagcaatgtaggtaggagcgcagatctaatctggattcgtattcacgtttgaaacgtgagctctctacttggggctcggaatccaaacagaatttgtatttagttaccttttttgtgtcatgcaaacttaccttaactgtcatgcatttttctagtaatagctcttcaagtctgcaataaaaaatggcctccaacaaaactacattgc

SEQ ID NO: 75411 - DNA, 580 bp, Homo Sapiens
  misc_feature (506)..(506): n is a, c, g, or t
gcgggcgtcgtcgtctcggccctgcagccgcgccaggagtccgcgctgcacaaagctctggcgggcggcgcggccccggccgccgctcagctccaccgcgcgttccagatcctccagggcgcctgcgggaccgacgagacgggcggggcgggggtcagcggaggccagggcggccttgcccgagccccagcccacctgcggccgcgcggatcaccgtggttcttgcggctcccgggcgtggccatttacaacccgcctcgcacctgctagagaaaagaccccggccatggatgggagacctaggacaaagatggaaaagagtgcttggcaccagacagctgctcaatgaggaacacaactgcatcatggagaatccccagcatcctcaaaccgttaacacctagaagaatcagaagcaccagggaagtgaggagcgcagtcaacaggaaacagcatggtcctacagaaatgcctatgctatagtcactctgccagaggctgctccnagggtgaattatagtacatattagctcgaaattagcatcagatagccattaaaatgatgctgatacagatctgt

SEQ ID NO: 75412 - DNA, 785 bp, Homo Sapiens
ggggaatcacgtggctgccacccaggtaagaagaggccgctcttcctggggttgtttctccgtgtgacgtgtggcctttgagatcaactctcctgtaccagcgtaggccgcatgagtggggggcgggctcccgcggtcctgctcggcggagtggcctctctgctcctgtcttttgtttggatgccggcgctgctgcctgtggcctcccgccttttgttgctaccccgagtcttgctgaccatggcctctggaagccctccgacccagccctcgccggcctcggattccggctctggctacgttccgggctcggtctctgcagcctttgttacttgccccaacgagaaggtcgccaaggagatcgccagggccgtggtggagaagcgcctagcagcctgcgtcaacctcatccctcagattacatccatctatgagtggaaagggaagatcgaggaagacagtgaggtgctgatgatgattaaaacccaaagttccttggccccagctttgacagattttgtacggtctgtgcacccttacgaagtggccgaggtaattgcattgccctgctggaacagggggaactttcccgtacctgcagtgggggcgcccaggtcaacagagtcagtttctgactctatcacagtcctgccatgatgagccctgtacctgctcatcatgaagatccccggcgaaacttcaaacgccttctggacttcaaggtggatgacttgggaccccaaattaatcccggtcattaggggtctctcgtaaaaacaacaaaa

SEQ ID NO: 75413 - DNA, 880 bp, Homo Sapiens
  misc_feature (46)..(80): n is a, c, g, or t
gccgaacgaccgagcgcagcgaagtagtgagcgaggaagcggccgnnnnnnnnnnnnnnnnnnnnnnnnnnnnnnnnnnncagtcgacggtaccggacatatgcccgggaattcggccattacggccgggggtggctgccacccaggtaagaagaggccgctcttcctggggttgtttctccgtgtgacgtgtggcctttgagatcaactctcctgtaccagcgtaggccgcatgagtggggggcgggctcccgcggtcctgctcggcggagtggcctctctgctcctgtcttttgtttggatgccggcgctgctgcctgtggcctcccgccttttgttgctaccccgagtcttgctgaccatggcctctggaagccctccgacccagccctcgccggcctcggattccggctctggctacgttccgggctcggtctctgcagcctttgttacttgccccaacgagaaggtcgccaaggagatcgccagggccgtggtggagaagcgcctagcagcctgcgtcaacctcatccctcagattacatccatctatgagtggaaagggaagatcgaggaagacagtgaggtgctgatgatgattaaaacccaaagttccttggtcccagctttgacagattttgttcgttctgtgcacccttacgaagtggccgaggtaattgcattgcctgtggaacaggggaactttccgtacctgcagtgggtgcgccaggtcacagagtcagtttctgactctatcacagtcctgccatgatgagccctgttcctgctcatcatgaagatccccgcgatacttcaacgccttctgacttccaggtgatgactgggccccccaataaaatcccgtcttgaggtctctctg

SEQ ID NO: 75414 - DNA, 1003 bp, Homo Sapiens
cccaggtaagaagaggccgctcttcctggggttgtttctccgtgtgacgtgtggcctttgagatcaactctcctgtaccagcgtaggccgcatgagtggggggcgggctcccgcggtcctgctcggcggagtggtgagtgaccggccccgccccgccccttccggtcctcgaagcctcgaccgctacccgcaccctaaatcccagaggttggccccctgaggtgtgagtgaaatgagcttttgctttattttccaagtttctctctcaccttcaggggcattcttcgggggtgcatcagagggagggcagagcctgaggatctaagcgaaggcttccccgggtgtaatttcctgggctgtttgtgaggagagatcgaattcgcctcctgctctcaggcctctctgctcctgtcttttgtttggatgccggcgctgctgcctgtggcctcccgccttttgttgctaccccgagtcttgctgaccatggcctctggaagccctccgacccagccctcgccggcctcggattccggctctggctacgttccgggctcggtctctgcagcctttgttacttgccccaacgagaaggtcgccaaggagatcgccagggccgtggtggagaagcgcctagcagcctgcgtcaacctcatccctcagattacatccatctatgagtggaaagggaagatcgaggaagacagtgaggtgctgatgatgattaaaacccaaagttccttggtcccagctttgacagattttgttcgttctgtgcacccttacgaagtggccgaggtaattgcattgcctgtggaacaggggaactttccgtacctgcagtgggtgcgccaggtcacagagtcagtttctgactctatcacagtcctgccatgatgagccctgttcctgctcatcatgaagatccccgcgatacttcaacgccttctgacttccaggtgatgactgggcccccaataaatcccgtctttgggtctctctgaaa

SEQ ID NO: 75415 - DNA, 689 bp, Homo Sapiens
  misc_feature (307)..(307): n is a, c, g, or t
aacataggctaggtacgaggctggggtgttgaatcggcacgagggtcacatggtgcgcgctgttttctaatcacgtggctgccacccaggcctctctgctcctgtcttttgtttggatgccggcgctgctgcctgtggcctcccgccttttgttgctaccccgagtcttgctgaccatggcctctggaagccctccgacccagccctcgccggcctcggattccggctctggctacgttccgggctcggtctctgcagcctttgttacttgccccaacgagaaggtcgccaaggagatcgccagggnccgtggtggagaagcgcctagcagcctgcgtcaacctcatccctcaagattacatccatctatgagtggaaagggaagatcgaggaagacagtgaggtgctgatgatgattaaaacccaaagttccttggtcccagctttgacagattttgttcgttctgtgcacccttacgaagtggccgaggtaattgcattgcctgtggaacaggggaactttccgtacctgcagtgggtgcgccaggtcacagagtcagtttctgactctatcacagtcctgccatgatgagccctgttccttgctcatcatgaagatccccgcgatacttcaacgccttctgacttccaggtgatgactgggccccaataaatcccgtctttgggtc

SEQ ID NO: 75416 - DNA, 800 bp, Homo Sapiens
  misc_feature (677)..(677): n is a, c, g, or t
  misc_feature (681)..(687): n is a, c, g, or t
  misc_feature (689)..(693): n is a, c, g, or t
  misc_feature (695)..(700): n is a, c, g, or t
  misc_feature (703)..(704): n is a, c, g, or t
  misc_feature (706)..(711): n is a, c, g, or t
gggccttccggtcctcgaagcctcgaccgctacccgcaccctaaatcccagaggttggccccctgaggtgcctctctgctcctgtcttttgtttggatgccggcgctgctgcctgtggcctcccgccttttgttgctaccccgagtcttgctgaccatggcctctggaagccctccgacccagccctcgccggcctcggattccggctctggctacgttccgggctcggtctctgcagcctttgttacttgccccaacgagaaggtcgccaaggagatcgccagggccgtggtggagaagcgcctagcagcctgcgtcaacctcatccctcagattacatccatctatgagtggaaagggaagatcgaggaagacagtgaggtgctgatgatgattaaaacccaaagttccttggtcccagctttgacagattttgttcgttctgtgcacccttacgaagtggccgaggtaattgcattgcctgtggaacaggggaactttccgtacctgcagtgggtgcgccaggtcacagagtcagtttctgactctatcacagtcctgccatgatgagcccctgttcctgctcatcatgaagatccccgcgatacttcaacgcccttctgacttccagggtgatgacctgggccccccaataaaatcccggtctttggggtccncccnnnnnnnannnnnannnnnnaannannnnnncccttggtcgggccgccctcgcgccccttccaaggaaactttttctaaaaaccatttcctttttgggggggcggcgcgggcccccagtt

SEQ ID NO: 75417 - DNA, 695 bp, Homo Sapiens
  misc_feature (429)..(454): n is a, c, g, or t
tatttaatgtaaggaacttgggtgttaatagttgagagctgtttagtaataacccagttttcttgaggtctgtttactttatactttttaaaaacttctgtagttcttttggccagtgtgtttgtattatctgtgcattaatggtcctcatctgactcctgcattgtgtcttatttttctgcatggattggcataagaccattactaaaatttggcacctgtgagatgtttgatattatgaacaggaaacataatttaatgtatgaatagatgtgaatttgggatttcaaaatagatgaataacaactattttatagtaaagttattgaaatggaaatgaaaacagccagtaacttatgtttcagaatgtttgtaacacacttcatggtgttcccataggctttgctgtctagtcttatagtttgaggnnnnnnnnnnnnnnnnnnnnnnnnnngattacaaaatttataatttaataaatactagagtttatcaaaaacagtttgtctcttgtttgagggtggaaagggtgtggaaacattttgacatgtgtgaccaaaggtcacttaaaaagtggtggttttaattggttgttttcagcttaatcacctgctcagaaaagtttgatttttttcttagagattatttaaacagaatctataggcagtgtgtatataataaatatgtatggaaat

SEQ ID NO: 75418 - DNA, 3322 bp, Homo Sapiens
cctgcgcaggatgtctgtgatcgaggagggggactgcaagcggatcaacatggcccacctgtgtgtgattgggtcccatgctgtcaatggtgtggcgaggatccactcggagatcgtgaaacagtcggtctttaaggatttttatgaactggagccagagaagttccagaataagaccaatggcatcaccccccgccggtggctgctgctgtgcaacccggggctggccgataccatcgtggagaaaattggggaggagttcctgactgacctgagccagctgaagaagctgctgccgctggtcagtgacgaggtgttcatcagggacgtggccaaggtcaaacaggagaacaagctcaagttctcggccttcctggagaaggagtacaaggtgaagatcaacccctcctccatgttcgatgtgcatgtgaagaggatccacgagtacaagcggcagctgctcaactgcctgcacgtcgtcaccctgtacaatcgaatcaagagagacccggccaaggcttttgtgcccaggactgttatgattgggggcaaggcagcgcccggttaccacatggccaagctgatcatcaagttggtcacctccatcggcgacgtcgtcaatcatgacccagttgtgggtgacaggttgaaagtgatcttcctggagaactaccgtgtgtccttggctgagaaagtgatcccggccgctgatctgtcgcagcagatctccactgcaggcaccgaggcctcaggcacaggcaacatgaagttcatgctcaacggggccctcaccatcggcaccatggacggcgccaacgtggagatggccgaggaggccggggccgagaacctcttcatcttcggcctgcgggtggaggatgtcgaggccttggaccggaaagggtacaatgccagggagtactacgaccacctgcccgagctgaagcaggccgtggaccagatcagcagtggctttttttctcccaaggagccagactgcttcaaggacatcgtgaacatgctgatgcaccatgacaggttcaaggtgtttgcagactatgaagcctacatgcagtgccaggcacaggtggaccagctgtaccggaaccccaaggagtggaccaagaaggtcatcaggaacatcgcctgctcgggcaagttctccagtgaccggaccatcacggagtatgcacgggagatctggggtgtggagccctccgacctgcagatcccgccccccaacatcccccgggactaggcacaccctgccttggcgggaccagcgggcatttgttttcttgctgactttgcacctccttttttccccaaacactttgccagccactggtggtccctgcttttctgagtaccatgtttccaggaggggccatgggggtcagggtgggttttgagagagcagggtaaggaaggaatgtgctagaagtgctcctagtttcttgtaaaggaagccagagttgacagtacaaagggtcgtggccagccctgcagcttcagcacctgccccacccagagtggggagtcaggtggagccacctgctgggcatcccccagaactttgcacaccatcttggctatgtattagccggcatttgtcttctagctgactttgaacctccggatttccccaaacactgggccagccggcctagtgaaagcctgggaatgagtgttactgcagaatctgggctgatcgcctgctcgggcaagttctccagtgaccggaccatcacggagtatgcacgggagatctggggtgtggagccctccgacctgcagatcccgccccccaacatcccccgggactaggcacaccctgccttggcgggaccagcgggcatttgttttcttgctgactttgcacctccttttttccccaaacactttgccagccgctggtggtccctgcttttctgagtaccatgtttccaggaggggccatgggggtcagggtggttttgagagagcagggtaaggaaggaatgtgctagaagtgctcctagtttcttgtaaaggaagccagagttgacagtacaaagggtcgtggccagccctgcagcttcagcacctgccccacccagagtgggagtcaggtggagccacctgctgggctcccccagaactttgcacacatcttgctatgtattagccgatgtctttagtgttgagcctctggattctggggtctgggccagtggccatagtgaagcctgggaatgagtgttactgcagcatctgggctgccagccacagggaagggccaagccccatgtagccccagtcatcctgcccagccctgcctcctggccatgccgggaggggtcggatcctctaggcatcgccttcacagccccctgccccctgccctctgtcctggctctgcacctggtatatgggtcatggacccagatggggctttccctttgtagccatccaatgggcattgtgtgggtgcttggaacccgggatgactgagggggacactggagtgggtgcttgtgtctgctgtctcagaggccttggtcaggatgaagttggctgacacagcttagcttggttttgcttattcaaaagagaaaataactacacatggaaatgaaactagctgaagccttttcttgttttagcaactgaaaattgtacttggtcacttttgtgcttgaggaggcccattttctgcctggcagggggcaggtctgtgccctcccgctgactcctgctgtgtcctgaggtgcatttcctgttgtacacacaagggccaggctccattctccctccctttccaccagtgccacagcctcgtctggaaaaaggaccaggggtcccggaggaacccatttgtgctctgcttggacagcaggcctggcactgggaggtgggggtgagcccctcacagccttgcccctccccaaggctggcaacctgcctcccattgcccaagagagagggcagggaacaggctactgtccttccctgtggaattgccgagaaatctagcaccttgcatgctggatctgggctgcggggaggctctttttctccctggcctccagtgcccaccaggaggatctgcgcacggtgcacagcccaccagagcactacagccttttattgagtggggcaagtgctgggctgtggtcgtgccctgacagcatcttccccaggcagcggctctgtggaggaggccatactcccctagttggccactggggccaccaccctgaccaccactgtgcccctcattgttactgccttgtgagataaaaactgattaaacctttgtggctgtggttggctgaaaaaa

SEQ ID NO: 75419 - DNA, 735 bp, Homo Sapiens
  misc_feature (33)..(33): n is a, c, g, or t
agcagctcgttccaggaggtggtgctgtattgngagtttcaccaactgtgctgtgaagtggtggaggccccattgtgtgcccagtgcggtaaagtctttcctgcttttgattgtgcccagggattgccatggaaagcataactgtgtatcagacagttgcacacccaggaatccaagggaacctgaacagctactattcccagcagggggttccagccagcatcacattttttagtccctctggcctcacatacagtctcaagcacattcaggagttatctggtgacaatatcgatcaaattaagtttgcagccatcggccccactacggctcgcgcgctggccgcccagggccttcctgtaagctgcactgcagagagccccacgccacaagccctggccactggcatcaggaaggctctccagccccatggctgctgctgagtcagccacctagcgctggccccatgcagcctccctgggctgggctggctctggatggagccaggcatcggcaagggctctcgggagctgctgccgtcagactcctgcctcaagcctgagtggaagcacctgaggaccggggatcgggacctgacctggggctggcctcaggcccacgtgcacgtgactgccctctgtggaagccagcttaaaccctagccctgtgagagcttcctgtgcccagcaggaaggaagtcaaataaaccacactgactacctgtgcttactgaaa

SEQ ID NO: 75420 - DNA, 1209 bp, Homo Sapiens
  misc_feature (1052)..(1052): n is a, c, g, or t
atagggctaggtacgaggcctgggtgttgaattcggcacgaggcatgcgcgagcgcctagctgcgcgcagcacccacgcgacccagtctgaggtgcggggtcctggggcccggcgcgggtggccgccgcggcccctcgggctgcgtggggagggggcttccgcccctgttgtcattgctcctgcagccttttcgctgggactgcgcgacaccgccccccgaccgggtgcccgctgtgtgccaggccgggtgctgggcacggtcccgcgagtgccctataaggactgccaggcaataatgaaggttcttttactgaaggatgcgaaggaagatgactgtggccaggatccgtatatcaggcaattaggattatatggacttgaagccactttgatccctgttttatcgtttgagtttttgtctcttcccagtttctctgagaagctttctcatcctgaagattacgggggactcatttttaccagccccagagcagtggaagcagcagagttatgtttggagcaaaacaataaaactgaagtctgggaaaggtctctgaaagaaaaatggaatgccaagtcagtgtatgtggttggaaatgctactgcttctctagtgagtaaaattggcctggatacagaaggagaaacctgtggaaatgcagaaaagcttgcagaatatatttgttccagggagtcctcagcactgcctcttctatttccctgtggaaaacctcaaaagagaaatcctgccaaaagcgctcaaggacaaagggattgccatggaaagcataactgtgtatcagacagttgcacacccaggaatccaagggaacctgaacagctactattcccagcagggggttccagccagcatcacattttttagtccctctggcctcacatacagtctcaagcacattcaggagttatctggtgacaatatcgatcaaattaagtttgcagccatcggccccactacggctcgcgcgctggccgcccagggccttcctgtaagctgcactgcagagagccccacgccacaagccctggnccacttggcatcaggaaaggctctccagccccatggctgcttgctgagtcagccaccttagcgctggccccatgcagcctccctggggctggggctggctctgggatggagccaggcatcggcagggtctcgggagctgtgccgtcggattctgctc

SEQ ID NO: 75421 - DNA, 1107 bp, Homo Sapiens
  misc_feature (907)..(907): n is a, c, g, or t
  misc_feature (990)..(990): n is a, c, g, or t
gggctaggtacgaggcctgggtggttgaatcggcacgaggtggcggtgcgcatgcgcgagcgcctagctgcgcgcagccacccacgcgaccccagtctgaggtgcggggtcctggggcccggcgcgggtggccgccgcggcccctcgggctgcgtggggagggggcttccgcccctgttgtcattgctcctgcagccttttcgctgggactgcgcgacaccgccccccgaccgggtgcccgctgtgtgccaggccgggtgctgggcacggtcccgccagtgccctataaggactgccaggcaataatgaaggttcttttactgaaggatgcgaaggaagatgactgtggccaggatccgtatatcaggctttctcatcctgaagattacgggggactcatttttaccagccccagagcagtggaagcagcagagttatgtttggagcaaaacaataaaactgaagtctgggaaaggtctctgaaagaaaaatggaatgccaagtcagtgtatgtggttggaaatgctactgcttctctagtgagtaaaattggcctggatacagaaggagaaacctgtggaaatgcagaaaagcttgcagaatatatttgttccagggagtcctcagcactgcctcttctatttccctgtggaaacctcaaaagagaaatcctgccaaaagcgctcaaggacaaagggattgccatggaaagcataactgtgtatcagacagttgcacacccaggaatccaagggaacctgaacagctactattcccagcagggggtttccagccagcatcacattttttagtcccccctggcctcaaatacagtctcaagcacattcaggagttatctggtgacaatatcgatcaaattaagtttgcagccatcggccccactacngctcgcgcgctggccgcccagggccttcctgtaagctgcactgcagagagccccacgccacaagccctggccactggcatcangaaggctctccagccccatggctgctgctgagtcagccacctagcgctggccccatgcagcctacctggggctggcatgctctggatggagccaagcattcggcaatgctctcggga

SEQ ID NO: 75422 - DNA, 969 bp, Homo Sapiens
  misc_feature (916)..(916): n is a, c, g, or t
  misc_feature (927)..(927): n is a, c, g, or t
  misc_feature (959)..(959): n is a, c, g, or t
agcatggtgggcatctggatcaataacaacctcaacagtgtccgcaggtttaacaatttcaaggatgtttaactttggttcaattccttggtaagaaattacctgtacactaagctgtacagttccatctgtttttactccttggtcaaataaacttcgttctggatccagctggatatcttgcagacaaatttcatgagcatccaaagaacactgtagtcttggttctagcagtttctttaaattgcctattggttcattgatgtctatggcctggcttacacattcagctggcgcgtaggtttgttctacaatgctttcttctgtgcactctgctttctctgttccatcaatctcaatttctatcagctcctctgcttctctttttgtcatggctggagtatttcaaaggatcagtcccactccggaatcggccctgtcgcccccgcccgcactccagagccggctgagaacggcagcggcgagggctccacgtgcagcgtctctccggggaagacctgcagctcccgcgactagaagtgtgaggtcccagggcccttcccgcggaatcggcgctgagaagccccaacccccctcccgcctcccaggcaccttcgggtccaggactacaactcccggcagggtgcgcaaaacgaccgcccaaggcaacggaggctcacgagaatcagcatgattcttcagaggctcttcaggttctcctctgtcattcggtcagccgtctcagtccatttgcggaggaacattgtgttacagcagtggcatttaataaggaacttgatcctatacagaaactctttgtggacaagattagagaatacaaatctaagcgacagacatctggaggacctgttgatgctagttcagagtatcagcaagagctggagagggagctttntaagctcaagncaatggttgtaatgcagacatgaatacatttnccaccttcaa

SEQ ID NO: 75423 - DNA, 702 bp, Homo Sapiens
gggagtagagcggaggtggtggcggcggaggctttggcagctcgggactgagtgcaagaatcagcatgattcttcagaggctcttcaggttctcctctgtcattcggtcagccgtctcagtccatttgcggaggaacattggtgttacagcagtggcatttaataaggaacttgatcctatacagaaactctttgtggacaagattagagaatacaaatctaagcgacagacatctggaggacctgttgatgctagttcagagtatcagcaagagctggagagggagctttttaagctcaagcaaatgtttggtaatgcagacatgaatacatttcccaccttcaaatttgaagatcccaaatttgaagtcatcgaaaaaccccaggcctgaagaaataaagtacaattaatctggtaatttgtcacggattagttgtacaactagttagaagtttcacaataaacatgcatttcataactggcaaatggtctttttattcctgagtccaaataaattaatttggggatggtggaaaaaagccacgggaaatgaaacacaaaacaatggtcggcccgccttcggccccctcaaaaaagcttttctaagaccatttccgttttggggcgcgccggggcccccagtaagggtaaagtgggaaaccttgggggccataaggcctggctttttccctaaagggaac

SEQ ID NO: 75424 - DNA, 899 bp, Homo Sapiens
  misc_feature (655)..(657): n is a, c, g, or t
  misc_feature (659)..(665): n is a, c, g, or t
  misc_feature (667)..(680): n is a, c, g, or t
  misc_feature (682)..(689): n is a, c, g, or t
  misc_feature (691)..(725): n is a, c, g, or t
  misc_feature (729)..(730): n is a, c, g, or t
  misc_feature (735)..(736): n is a, c, g, or t
  misc_feature (738)..(738): n is a, c, g, or t
  misc_feature (745)..(745): n is a, c, g, or t
  misc_feature (750)..(762): n is a, c, g, or t
  misc_feature (772)..(789): n is a, c, g, or t
  misc_feature (819)..(855): n is a, c, g, or t
ggggtgtgggggcggagccagggccggaagtagagcggaggtggtggcggcggaggctttggcagctcgggactgagtgcaagaatcagcatgattcttcagaggctcttcaggttctcctctgtcattcggtcagccgtctcagtccatttgcggaggaacattggtgttacagcagtggcatttaataaggaacttgatcctatacagaaactctttgtggacaagattagagaatacaaatctaagcgacagacatctggaggacctgttgatgctagttcagagtatcagcaagagctggagagggagctttttaagctcaagcaaatgtttggtaatgcagacatgaatacatttcccaccttcaaatttgaagatcccaaatttgaagtcatcgaaaaaccccaggcctgaagaaataaagtaaaattaatctggtaatttgtcacggattagttgtacaactagttagaagtttcagaataaacatgcatttcataactgtcaaatgttcttttaattctgagtccaaataaattatttggtgatgttgaaaacacacccttctgcctccgccccgggaacccttcgagaaaacacaaaaaataaaaatggccgcgcgcctcggcccccccagaaaacctcttttaannncnnnnnnnannnnnnnnnnnnnncnnnnnnnncnnnnnnnnnnnnnnnnnnnnnnnnnnnnnnnnnnncccnncctcnncnccccaanccccnnnnnnnnnnnnnaaaatttttnnnnnnnnnnnnnnnnnnaaaaaatacctttttaacacctcttctttnnnnnnnnnnnnnnnnnnnnnnnnnnnnnnnnnnnnnccctaattgtttctcccaaaaaaaccccgcggtacaaaaaaagg

SEQ ID NO: 75425 - DNA, 1077 bp, Homo Sapiens
  misc_feature (161)..(181): n is a, c, g, or t
gtactttggatgccgaagtataaaggtccggggcggccaggacgtgtaccacaggggcggtaagggtggtacgagcgataggtaccgccgcgggaccgtggagaggattttgttgaaatagacgtgggcgaaaatggtgacgggtcggttggagaattttnnnnnnnnnnnnnnnnnnnnnagtacaagtgggcgcattgccaggggcattttgctctgagcgcgggaaaaagcttccctccgcgcaacttccggctaaatgttcgtgaactaggcatcaaccaggtccttcaggaggtcgtgtgacatggggggtgtgtggtgtgatctgggtccacaaagaggttgtgtatagggtccaagtcccttaggaaatgccgtcgcggtaaccccaatgttcctccgcaaatggactgagacggctgcccgaatgacagaggagagcctgaagagcccatgaagaatcatgctgattcggacaggaagcgtctcggagacagtctgcgaccggacgggtctaggtgagacagaagccaaacaggaggaggaagtggagggtaagtgcttccggggtcccctggcacagcctccgccatcttttgttcgcctaatttgacccgttctttttcccctccttgaaaccttgctctgtacgcatgcgctctttgagtggcctttcccctagttcaagctcccctccgagtcagcgtcctgttcgttagggttatcgaagtgtataaaggtgcagggaaagtgagactgtgtaaaacaaagcggattggggcgttgtgcttccttgtacctcgtgagcctccgttgccttgggcggtcgttttgcgcacactgccgggagttgtagtcctggacccgaaggtgcctgggaggcgggaggggggttggggcttctcagcgccgattccgcgggaagggccctgggacctcacacttctagtcgcgggagctgcaggtcttacccggagagacgctgcacgtggagccctcgccgctccgttctcagccggctctggagtgcgggcgggggcgacagggccgattccggagtgggtgagtcggtcc

SEQ ID NO: 75426 - DNA, 765 bp, Homo Sapiens
  misc_feature (38)..(38): n is a, c, g, or t
tatagaacaaattagaccctgtatcttttagcaatacnttgaagaaataccataatactatatgtggaagacatcccattggggtgtattaaatgctatcacagagctccagaagaatggaatgaatatgagtttttcgtttttgaattatgcccagtcgagccagtgtagaaactggcaagacagttcagtgagttatgcagctggagcactcacggtccactgaagctctgaatcctcagggatgccacctgcacattctcatactctgtccggggtcccagcctagcctttaccacgatactggtcctggtttggggggattctgaaacctcaaactaatagaactttcttctctttttttctagtaggtgtagtccttccttaatttcaactcattaaaaaatgctttatagtttagggcagtggaaggaaggctggcatcaaaatattttgatcaaaaaagatgacaatgtaaaggctcagttgtggcagacagttttttgaaagtaacttgtaaagcatttaccatatcctaaatttgcactctttgcagacttgtgcacatatattccgctttcagaatagttttgcaaattgtacacaaacaaacaaaaaggtggaagctttttaataaagaaattgcatttataaatgatctgtattagaatataataaatctccagttatagtcaattactacccatgttgtacaacagataccttctattttagttgctaataaagggctcacaactcaaaaaa

SEQ ID NO: 75427 - DNA, 571 bp, Homo Sapiens
gaaataattataaattatcagaaagttgcaaacaaagcccagtcaggtcccatgtaccagtttcactgccaccatctttaaaggaggattagacgaatctgactgctaaaagtggcccagggattctggagaaaatccaacaggtttgctatcaggaaagcaatttcacttacaattcaggtttgactgcaagtgaaagtggttgaaacaagtgagaagttgattgcttcctcatataatagtctaaatgtaggtgtccaagcctggaatagaggtcctggtcctctaagttctcaggaacacaggcttcttttagccactccacatctctagggtgttgtcctcatggtccaaaatggtgactggaattccagccatcacatctgctttccaggcagcaaaatggaagaaggggcacagaagaacagagatgacaataggtataaacaagctctctgtttaaaggagattcccaggagctgctacatgacacttactgttgactacagtttagtcacaaaatttatttgcgaaggagtctgagaactgtagtctttattcttgggctcaa

SEQ ID NO: 75428 - DNA, 2323 bp, Homo Sapiens
  misc_feature (2228)..(2271): n is a, c, g, or t
aggagcagtactactacggtctaaggtagcgaggcctgggtggcgaattcggcacgagggcacgggcggagccggggccatggagccgccgctgccgggctaggcaggtcgtgccccgccgggccggcggcgatgtcgggctaccagcgccgcccgggcgccaccccgctgtcccgagcccggagcctcgccattcccgacggtgagcggggcaggggccgagtccagcggtccaggtgggcggcggccgccccggcacgcagtaaagtcgctgttgtcgttgcttccagctccagcgttctatgagcgccggtcttgtctcccccagctaaattgtgagcgcccccatggcagggacctggactcccccttcttcggcattcggccggcctttatgtgctatgtgcccagcccggtgctggcttccgtgggagacacagatgacagatttgaagatctggaagaggcaaatccattctcttttagagagtttctgaagaccaagaacctcggcctctcgaacgaggatccggccagcagaatttatgcaaaggaagcctcgaggcattccctgggacttgaccacaactccccaccctcccaaaccggcgggtatggcctggagtatcagcagccatttttcgaggatccgacaggggctggtgacctcctggatgaggaggaggatgaggacaccggatggagtggggcctacctgccgtccgccatcgagcagactcaccccgagagggtccctgccggcacgtcgccctgcagcacatacctttcctttttctccaccccgtcggagctggcagggcctgagtctctgccctcgtgggcgttgagtgacactgattctcgcgtgtctccggcctctccggcagggagtcctagcgcagactttgcggttcatggagagtctctgggagacaggcacctgcggacgctgcagataagttacgacgcactgaaagatgaaaattctaagctgagaagaaagctgaatgaggttcagagcttctctgaagctcaaacagaaatggtgaggacgcttgagcggaagttagaagcaaaaatgatcaaggaggaaagcgactaccacgacctggagtcggtggttcagcaggtggagcagaacctggagctgatgaccaaacgggctgtaaaggcagaaaaccacgtcgtgaaactaaaacaggaaatcagtttgctccaggcgcaggtctccaacttccagcgagagaatgaagccctgcggtgcggccagggtgccagcctgaccgtggtgaagcagaacgccgacgtggccctgcagaacctccgggtggtcatgaacagtgcacaggcttccatcaagcaactggtttccggagctgagacactgaatcttgttgccgaaatccttaaatctatagacagaatttctgaagttaaagacgaggaggaagactcttgaggacccctgggtgttctcagcatgaagctccgtgtataccctgaggtcaccaccgctcgatctaaatgtgcagttgtgtccttaaatatgcagtcttcacccagagtaaagtgttgatcgcaagagtccagtgtcgtgccctcagccagttcttggccaccacaatgggagcagccctggccgagttgtctctgtggtttctatgcagcccttcttggcgaaattcctgcgatcttatagattctaatgagctcttggaagacattgtcataaaagccagtgattttaagaaaaagagtggttctggaatcaatgttttccagtcccatcccagaacatcagttgtaagataagtacaattggttgtccttgatttcataagtagaacaaacactaaatgtgcctctgagatggccaccccgggcagggacctgtgccttccgccgatgctcagggctccctctggctcccgggtcactcttgtggccccagtgggtggtccctgcagtcatggcctgagtgcgcaggggccaccgcgtggctgctgctgtcctcctccgggacccacggggaccaaggtcacacgttccgtgctgtgaagctgtccagatgtgcctctttggctgggggttctggtggacgtttcaagtggcattttgtacaatgcaggttagaattcaggaatttcaagtatgtgcccgggtctgtcaggtcccagttgcctttctgacggcccccctcagagggacggcgatgagcactaaatgcnnnnnnnnnnnnnnnnnnnnnnnnnnnnnnnnnnnnnnnnnnnnctcctgttccaattgatagctttcttatttaataaattctgtagttcaccgc

SEQ ID NO: 75429 - DNA, 1551 bp, Homo Sapiens
  misc_feature (567)..(567): n is a, c, g, or t
  misc_feature (793)..(809): n is a, c, g, or t
  misc_feature (811)..(844): n is a, c, g, or t
  misc_feature (920)..(968): n is a, c, g, or t
  misc_feature (1247)..(1442): n is a, c, g, or t
tcaaactaatagaggaaaaactaggtatgactcccatacgtaagtgtaatgactcattgcgtcattcaccaaaggttgagacgacagattgtccagttcctcctaaaagaatgagacgagaagctacaagacaaaataggattataaccaaaacagatgtatgagaggtgacagagagaagaggccattggtctcagtaagaatgccctgctttctgcatctctgtttcagaagaccaagagggtgacttaccagactgagtatttctggggacaatacaagtacctgggcatgaatttccatttcgattcagatgggactggaaacaaccattcaattttatgaatcttactggacattatggatttactggaattattccagacattatgccctttggttgtcactaccttgcaaatgtgtaagaggaaaatgtgctaatgtggcagtgactgtaaaactggcacatggcatttattaatcctgaagaaaagtacatgtactatttttcagtataaatataatgaacatgtcagaactatttcttgaaaacccttttaatacttntgcgtgaatttatttaacaaagatgttttgtcttttgtgtaagggaggttctagaggctagatgtttaattgtaaatatgtgaggaaactcaatgcagaattcaggataaaaattttaaaagcacaggtatttgggaattgaaatgttaagatacccagaacaacattaaatcaatgagtgaacttgtgacagtggtagcatttcaaatttcaaaagacttatccnnnnnnnnnnnnnnnnngnnnnnnnnnnnnnnnnnnnnnnnnnnnnnnnnnnaaatattcagcagcaccaagttttataactattgtttgtttgactttattaatactagaatatgtagtctcagccnnnnnnnnnnnnnnnnnnnnnnnnnnnnnnnnnnnnnnnnnnnnnnnnngggttaaagagaacatacattctcacattagtgtactttctggtagaaagttgctgcaaaaacatttgaaatgtatattaacctaatgtatgtcatatatatgtctttgtgtaagttcaagactattgatctgtgaagttattttgtaaggacatacatttggtaagtaagtttgtgtcccaggaaatgtatgtgtttttaaaccctttctaaatatgcaggccattaataaataagattgtttcttccctactgaaaaaaactcgtgccgaattcttnnnnnnnnnnnnnnnnnnnnnnnnnnnnnnnnnnnnnnnnnnnnnnnnnnnnnnnnnnnnnnnnnnnnnnnnnnnnnnnnnnnnnnnnnnnnnnnnnnnnnnnnnnnnnnnnnnnnnnnnnnnnnnnnnnnnnnnnnnnnnnnnnnnnnnnnnnnnnnnnnnnnnnnnnnnnnnnnnnnnnnnnnnnnnnnnnnnnactgtcgtgcagctgcataatgaatcgcaacgcgcgggaaagcggtttgcgtatggcgctctccgctcctcgctcatgatcgctggctcgtcgttcgctgcgggaacga

SEQ ID NO: 75430 - DNA, 763 bp, Homo Sapiens
  misc_feature (706)..(722): n is a, c, g, or t
ggggatgtcttcaatctctgtgtaaatacccacatgcttatgcattgtaaaccaagtgtgtattcctgtgtatgaatttgtagaactgatttctgcttcaagagaagctgcacctttaattttataaggtcccctccacctgtaaccctataaatgtctgtaaataaaacactaaaatttgtagtgataggatcaatttgggaatatctgctgagagaccaaaaagttcatttttttaagtaccttggttaaagagtaaagattattcctcttattttttaaagaagaatgcactttaacaaacatagagctgcatgggcaattcaaacaaatctgtgaagtgcagtacccattcagaaatcacacttcctgaaaaccgttcaaaagcagagtccagacgggctgttgatctcactgcctgtaggttgaagctcagattctgatcaattttgagaggagcagggctgcttcaaaagagcaatgtgaatacagtcagaagcttcagactggtctgtaaaaatggcgggtcccgtatttaccactaactagcaaaactgacagaaaaactcacagagaaaaaatgtaagaatccttcctgctggtgtgcactccttacaatagacttttgcaaatggagttttacagtctatatttaaaaaaaattgtatgtttgtaacaaataaagtatgcagaaaagtgaatgacnnnnnnnnnnnnnnnnngcctacagccgcggccgcaagcttattccctttagtgaggt

SEQ ID NO: 75431 - DNA, 2118 bp, Homo Sapiens
  misc_feature (507)..(568): n is a, c, g, or t
  misc_feature (649)..(714): n is a, c, g, or t
  misc_feature (1970)..(2010): n is a, c, g, or t
gcggccgcggcccttcccagctggctcgtggcggaaggctggccatgctccgacgcgtgcacggatgaggtgcggcgtgggtgtggccagtcctgctgtggccgcctggtatagggctgagccgaggggaggtttcagcttgcaaggctggacctccctaaaggggaagggccttgtccagggcaccaagccttgctcacagagcagctggtgtaagtgaagctgcgacttcacccccggggcctgctctgcaaagcccagacattctgccaggagggggactcttcatcccagggaggcatgggctgggggccagggagcccatcttcccatgcccatccagaggcctctcacaggggcccctcagcaaggaggcaggatgcagtgcaggacaccaggacagtgtgcatgtgtttgtggtgcgtacatgtgcatgtgtacatgtgtgggagctcacgtgtgggagacgtgtgtttacatgtctgggagctcgtttgtggtgtacannnnnnnnnnnnnnnnnnnnnnnnnnnnnnnnnnnnnnnnnnnnnnnnnnnnnnnnnnnnnnacgtgtgggagctcacatgtgtacgatgtgtgcacgtgtgtttacacgtctgggaactcatttgtggtgtacacatgaatnnnnnnnnnnnnnnnnnnnnnnnnnnnnnnnnnnnnnnnnnnnnnnnnnnnnnnnnnnnnnnnnnncagtaaaagctcatacgtctctctgctgtgcatacacgtgtgtgagagcaagcctgtaggagcttgtacatgtgtgcttacctgtacatgcatgtgtgtatcacacgtccgtgtgtaggaacttacgctgttcatgatatgtgcatatgtattgtgtaggagcatgcacacgcgtgtctgtggtatgtgtacacgtgcatgttctgcatgtctgtaggtcacacatgctttggtgcatgtacacgtgtgtgtgtgtatgcgtgtaggagctcacacttgtgtacacgtttgtgtgcatgcatgtgtgcaggagcttgcacgtttgtggtgggtacatgtacatatgtgagtgatcctgtgtgcaagcccccatgtggacatggctatgagtgagcgtggagccaaaagcccaggttaacacgcatgcagcaggccccactgtgcgtgtctgagacggtctggtggcagggactgggtgtgaatcatgcagcaggcccactgtgcgtgtctgagacggtctgtggcagggactgggtgtgaatcatgcagcaggcccactgtgcgtgtctgagacggtctgtggcagggactgggtgtgaatcagtgaccgtgtctctgaccaacatgctgaattacaaattgataatttattaacctgtgcagcaacaaataagatttttcaaaactcaacaaagtgctcaaagttgacattacttgcttcaaagttagtttaaggcaagtaaatactaactactgcgaggtggaaaattgcatgaagaccctgcaacgtcattcactgaggatcttctcatccttttcttttttatctcgtgccccttgtctatttcaaatcatcaggcacattcatttaataatttcccaagcaatttttaaaaagacgtttgggagtgtgtaaaagtttagtgactttcacactaaaacttgttgtcagaggtacatggtgactatctccacacaggcagagctgggacccaacttactaaaccttcacgtgagaatcttctatttttaaggctgaaggatggcaattaacaatgaaacatagaaagcagatgaaattgcaacaaattgtaaagaaaaagtgtagcaaattatcgtgccttaaatgtgctgttcaactaatcactgccaccagaaataccaagaaaagaagaggtgtgtgtagagaataaaatcaaatctgaaaattcgcattcatcagagattggaacattcagtcaaaactctcaccagannnnnnnnnnnnnnnnnnnnnnnnnnnnnnnnnnnnnnnnngaaagctttaaaaacctatttttaaaattagacagtatgttaaataaatgaataaaagagatataaacagctatgaaaatacttcagtgcaaaggcaattttaagatt

SEQ ID NO: 75432 - DNA, 1098 bp, Homo Sapiens
tccgcggcgccgccatggccgacgtggaagacggagaggaaacctgcgccctggcctctcactccgggagctcaggctcaaagtcgggaggcgacaagatgttctccctcaagaagtggaacgcggtggccatgtggagctgggacgtggagtgcgatacgtgcgccatctgcagggtccaggtgatggatgcctgtcttagatgtcaagctgaaaacaaacaagaggactgtgttgtggtctggggagaatgtaatcattccttccacaactgctgcatgtccctgtgggtgaaacagaacaatcgctgccctctctgccagcaggactgggtggtccaaagaatcggcaaatgagagtggttagaaggcttcttagcgcagttgttcagagccctggtggatcttgtaatccagtgccctacaaaggctagaacactacaggggatgaattcttcaaataggagccgatggatctgtggtcctttgggactcatcaaagccttggtttagcattttgtcagttttatcttcagaaattctctgcgattaagaagataatttattaaaggtggtccttcctacctctgtggtgtgtgtcgcgcacacagcttagaagtgctataaaaaaggaaagagctccaaattgaatcacctttataatttacccatttctatacaacaggcagtggaagcagtttcagagaactttttgcatgcttatggttgatcagttaaaaaagaatgttacagtaacaaataaagtgcagtttaaaacccaactcttactcttaatttgttcctaatacgtatttttggcagggagagggaacggtccatgaaatctttatgtgatataaggattttaagtttgggccagtgaacagggtaaataaaatttaacttttgagcatatggaattttggatgccctttaaaggtactaattctggaaccttggattccttcaagaaaaaacctagaaatctggaactcccccttccctgggttcaaatccattggaaggggggaaaagggggcccggaaaggtatttttttcttaaaatctccgggggccccccaaggggattttaaaaaaa

SEQ ID NO: 75433 - DNA, 1836 bp, Homo Sapiens
  misc_feature (85)..(132): n is a, c, g, or t
  misc_feature (138)..(138): n is a, c, g, or t
  misc_feature (144)..(144): n is a, c, g, or t
  misc_feature (146)..(148): n is a, c, g, or t
  misc_feature (150)..(150): n is a, c, g, or t
  misc_feature (154)..(154): n is a, c, g, or t
  misc_feature (156)..(265): n is a, c, g, or t
  misc_feature (1323)..(1326): n is a, c, g, or t
gcggaagatctcaaaccccagggatgttaccccgggtctgtttttgatagggtgccaattctccggggggaattggctactaggnnnnnnnnnnnnnnnnnnnnnnnnnnnnnnnnnnnnnnnnnnnnnnnncctttntttttngnnntngttntnnnnnnnnnnnnnnnnnnnnnnnnnnnnnnnnnnnnnnnnnnnnnnnnnnnnnnnnnnnnnnnnnnnnnnnnnnnnnnnnnnnnnnnnnnnnnnnnnnnnnnnnnnnnnntattgttcacattttttattgaattccaaatgtagcaaaatcattaaaacaaattataaaagggacagaaaaattaagaatcaaacatcactctggaccatgggaaccttgaaaaggcatggcagtggagaccagtaactagtatacagcttgcctgagaaggcttagtaacaaatgaattcaagtcgtattagatattctaaaccttccttaatataagatgaagtgtcatatgttaggaggtaaaaacgtaacacaaaattctgggaataagaataaagtctggaccctgagctcagaatgatccatagcatctactgtgcaaatatattacagcagacattatagcatattacctcctgctgtacacacatgcacaggcctgaaactctccaagagcaccataagaatgattccctttacctcatctagataaaggctgaaaaaaatgtattctgttgcagatgggagggaaaaaaatagacaattacgttgaaaatttattaaaacagaccagcttgaagtgagtttattcttgtctgtataatcaccaatgttatttccaaatgtccgtgaaattatctataatcctatctccttgcttgctttggtaggagtatagctaacaatatagccatcttttgccctcagtaagggctatcagcagttccaagctctgtgagattatttttgcccttcttttattcaactctagttgaataaagttacttccaatttgaaagctttagaagacccccccaaaactgttttggaagattgtctccctagagagtaagaacaaatggatagctctattccatttaaacctaatctctgacatcagaatagggatcatgctcagcaaatccaagagcaaggtcatttgtatccattgctctgacttcttcctagggtactcagtgccctactgccagctcagggtagagtggcagactttcctcctttctttcactctcagcagcattgaaactttgttcctgtagcattgcctgtgctaaaaagtgctacaaaaagggaagcttctgggagcccacagnnnntttgcacttcaaaaaagaactggccagagagcgaaaaccactgctttcgacatcaagtgagctacagaagtacttctaactggcaagataatgtctgttcctgccaggattctgtcagttggcctctgaaggtaattatacaagctgtccctatggagctgttgccatctgtagaaacaagaagagctgaggtccttggaacagacgtgctgttctttacatggaggtaagccttaatttaagatgggtctaacaatgtgctggcttgagagtagccaactatggcgtgacagaagacaagttgagtggagaaactctgcgtgtgggggtattgttagcagagagtgaagcaggtaggaaaaagggagcaggcacctcggtggtaggagtctcgccttggttccgaagctgtaggatttgccggagtaaggccttaccttcttcccgggtatcattaaatgcacaaaacttttgtgcacaagttgaagcttcatcccacagtttgcactt

SEQ ID NO: 75434 - DNA, 511 bp, Homo Sapiens
ttttttttaaaaacaggttctcactctgttgtcctggctgcagtgcactggctattcataggcaagatcccattactgatcagcctgggagttttggcctgctccatttccaacctgggctgggttcacccgtcctgatgcaagtttgtggtttcctgcttcagggacatcaccatattgatgccaaacttacacccaactggcatagtgtaccacagcccagaactcctgggctctagggatcctcctgcttcagcctcctaagtagctggggctgtacgcatgtgccaccaaacctagcaattattatttttaatcttagaaaataaattgtgtatagaaaggaatagttagcacatttatgtctaaagaggaataaaaaaggacaactgggtttacacaaaatgcattgaagtgactgatttgaagcagcctatcaagtacattcaaaccaaatggcacaggagattgtcatctcagtaactcaacccattacagacatcatttaccc

SEQ ID NO: 75435 - DNA, 665 bp, Homo Sapiens
tgcaccaaaagtggcaactaggtcagtgttgggggatcaagctggcctcggggtggggggcccccacctgcctctccctggttcccacagtgttagcgtccctgaaaagacaatattctctctaaagcaataaggggtgacgggccggggggagtgtttgctgctgctggcccccagctccccttccctcttgccaggtgtgggggagactcctgttgtgactgaatgtaacccccccacccctgccgcagccaatgcaggggaagggggacactcttcctgtctcttctccccagctaaagagactttggacttagggggcccatgagcctggagaggccttaaccctgtgaggaagtatagggggagccctctcccacccccatccccttctgagagtggtcaatgtttacaagcccctgagcccccctgcccagggactcagaccctgttgctgtccttccccggccccggtcttcctgggccctcgctgctcccctgcccttcctggggttggggtgggtgcaggggtcaccgtgttccctgtctgccttgtacccacagtctccccgccccctctcccaccctgtgtgacttccctctcttttacctgctcctgtaaatactcccttctcccaataaaacttggtgtgtgttctcccaaa

SEQ ID NO: 75436 - DNA, 1271 bp, Homo Sapiens
  misc_feature (62)..(62): n is a, c, g, or t
acaggcccacgcagcgaggggggcccctcttctgtgtgcgtctggaaggtcgctgcccaggngaggaaatgcctttaaccggcgtggggccgggcagctgcaggaggcagatcatccgggctctgtgcctcttgctacttctcctccacgccggctctgccaagaatatctggaaacgggcattgcctgcgaggctggccgagaaatcccgtgccgaggaggcgggcgcgcccggcggcccccggcagccccgagcagaccgctgcccgccgcctccgcggacgctgccccccggcgcctgccaggccgcgcgctgtcaggcggactccgagtgcccgcggcaccggcgctgctgctacaacggatgcgcctacgcctgcctagaagctgtgccgcccccgccagtcttagactggctggtgcagccgaaacctcgatggcttggtggcaatggctggctcctggatggccctgaggaggtgttacaagcagaggcgtgcagcaccacggaggatggggccgaacccctgctctgtccctcgggctatgagtgccacatcctgagcccaggtgacgtggccgaaggtatccccaaccgtgggcagtgcgtcaagcagcgccggcaagcagatgggcgaatcctacgacacaaactttacaaagaatatccagaaggtgactcaaagaatgtggcagaacctggaaggggacaacagaagcactttcagtaaagcaacggcaagcagctaggttgcaagaacattcctctactttctgctaagccttggaaacagttgggaaaagtagtttgaccctcacagttcacattcagctcagcagagcaagaccccagagatgcttagagacaggacacctggccatcaaacccagtttggcccagcctggttgggtgactttgtgggagccacttaacagctctgggtccctgttttaccatcctgggagcaaggccctgcagctccacgagacctttaccccgggaagaagccgccgcccatgaaagcatttctgaagcccctttctaagacaaggctcagcatcttgatatttttgacagattcctcccaagtctggctctgggaggtatgtacccatctcaaatgttcccaagataaattcatccttcaggaaatggaaatgaacttgcttactaatgtgtgattcctagttgtagccaccggatgtgctgaggcctaaatgttagcaggtgggaggaggccacagaacaataaaaacaaccaaataagaaa

SEQ ID NO: 75437 - DNA, 2343 bp, Homo Sapiens
  misc_feature (1255)..(1255): n is a, c, g, or t
ggcagtactataccggtcttaggtagcgaggcctgggtggcgaattcggcacgaggcgccgagtggtctgtgcaggttcgcgggtcgctggcgggggtcgtgagggagtgcgccgggagcggagatatggagggagatggttcagacccagagcctccagatgccggggaggacagcaagtccgagaatggggagaatgcgcccatctactgcatctgccgcaaaccggacatcaactgcttcatgatcgggtgtgacaactgcaatgagtggttccatggggactgcatccggatcactgagaagatggccaaggccatccgggagtggtactgtcgggagtgcagagagaaagaccccaagctagagattcgctatcggcacaagaagtcacgggagcgggatggcaatgagcgggacagcagtgagccccgggatgagggtggagggcgcaagaggcctgtccctgatccagacctgcagcgccgggcagggtcagggacaggggttggggccatgcttgctcggggctctgcttcgccccacaaatcctctccgcagcccttggtggccacacccagccagcatcaccagcagcagcagcagcagatcaaacggtcagcccgcatgtgtggtgagtgtgaggcatgtcggcgcactgaggactgtggtcactgtgatttctgtcgggacatgaagaagttcgggggccccaacaagatccggcagaagtgccggctgcgccagtgccagctgcgggcccgggaatcgtacaagtacttcccttcctcgctctcaccagtgacgccctcagagtccctgccaaggccccgccggccactgcccacccaacagcagccacagccatcacagaagttagggcgcatccgtgaagatgagggggcagtggcgtcatcaacagtcaaggagcctcctgaggctacagccacacctgagccactctcagatgaggacctacctctggatcctgacctgtatcaggacttctgtgcaggggcctttgatgaccatggcctgccctggatgagcgacacagaagagtccccattcctggaccccgcgctgcggaagagggcagtgaaagtgaagcatgtgaagcgtcgggagaagaagtctgagaagaagaaggaggagcgatacaagcggcatcggcagaagcagaagcacaaggataaatggaaacacccagagagggctgatgccaaggaccctgcgtcactgccccagtgcctgngggcccggctgtgtgcgccccgcccagcccagctccaagtattgctcagatgactgtggcatgaagctggcagccaaccgcatctacgagatcctcccccagcgcatccagcagtggcagcagagcccttgcattgctgaagagcacggcaagaagctgctcgaacgcattcgccgagagcagcagagtgcccgcacccgccttcaggaaatggaacgccgattccatgagcttgaggccatcattctacgtgccaagcagcaggctgtgcgcgaggatgaggagagcaacgagggtgacagtgaatgacacagacctgcagatcttctgtgtttccttgggcaccccatcaacccacgtgttgccttgcgccacatggagcgctgctacgccaagtatgagagccagacgtcctttgggtccatgtaccccacacgcattgaaggggccacacgactcttctgtgatgtgtataatcctcagagcaaaacatactgtaagcggctccaggtgctgtgccccgagcactcacgggaccccaaagtgccagctgacgaggtatgcgggtgcccccttgtacgtgatgtctttgagctcacgggtgacttctgccgcctgcccaagcgccagtgcaatcgccattactgctgggagaagctgcggcgtgcggaagtggacttggagcgcgtgcgtgtgtggtacaagctggacgagctgtttgagcaggagcgcaatgtgcgcacagccatgacaaaccgcgcgggattgctggccctgatgctgcaccagacgatccagcacgatcccctcactaccgacctgcgctccagtgccgaccgctgagcctcctggcccggaccccttacaccctgcattccagatgggggagccgcccggtgcccgtgtgtccgttcctccactcatctgtttctccggttctccctgtgcccatccaccggttgaccgcccatctgcctttatcagagggactgtccccgtcgacatgttcagtgcctggtggggctgcggagtccactcatccttgcctcctctccctgggttttgttaataaaattttgaagaaacca

SEQ ID NO: 75438 - DNA, 1074 bp, Homo Sapiens
  misc_feature (252)..(291): n is a, c, g, or t
tagggctaggtgcgaggctgggtggtcgaattcggcacgaggcagagatgctcaccttgttctctgcagccctggagccccctgtccctggccgtcctcccagcctgtttggaaacatttaagtggatacccctctcctctgtctccagaagcttctagctctggggtctggctaccgctagggaggctgagcaagccaggaagggaaggagtctgtgtggtgtgtatgtgcatgcagcctacacccacacnnnnnnnnnnnnnnnnnnnnnnnnnnnnnnnnnnnnnnnncatgtaccggggaatgaaggtgaacatacacctctgtgtgtgcactgcagacacgccccagtgtgtccacatgtgtgtgcatgagtccatgtgtgcgcgtgggggggctctaactgcactttcggcccttttgctctgggggtcccacaaggcccagggcagtgcctgctcccagaatctggtgctctgaccaggccaggtggggaggctttggctggctgggcgtgtaggacggtgagagcacttctgtcttaaaggttttttctgattgaagctttaatggagcgttatttatttatcgaggcctctttggtgagcctggggaatcagcaaaggggaggaggggtgtggggttgataccccaactccctctacccttgagcaagggcaggggtccctgagctgttcttctgccccatactgaaggaactgaggcctgggtgatttatttattgggaaagtgagggagggagacagactgactgacagccatgggtggtcagatggtggggtgggccctctccagggggccagttcagggccccagctgccccccaggatggatatgagatgggagaggtgagtgggggaccttcactgatgtgggcaggaggggtggtgaaggcctcccccagcccagaccctgtggtccctcctgcagtgtctgaagcgcctgcctccccactgctctgccccaccctccaatctgcactttgatttgcttcctaacagctctgttccctcctgctttggttttaataaatattttgatgacgttaaaaa

SEQ ID NO: 75439 - DNA, 975 bp, Homo Sapiens
  misc_feature (452)..(497): n is a, c, g, or t
  misc_feature (824)..(868): n is a, c, g, or t
tagcgaggcctgggtggcgaattcggcacgaggcccaggggtctctccaggggcagggggattttaggagatggggtgggggccagcccctactggacccttgtaatctgatttggagaccatccccccgatgggaccagcagccccgccggcccactgggggtccctcttaacatctgcttgttgcgggggtcagtcatgagtgccagacccctgaaaggaaggtgctcccccacttccaggccttagttggggtgggggggccagctcctgggcctggggtcttctcacccccacccccttgtcctgggtaggcccctgcctgcccctctctgccttttcctcgggtgtccctcctcgagcccctgtggcattggcttgggtggcagagcccacttgtttcagggaccccaggaggtgccccctggctcccaggactgtgtgtgggtccnnnnnnnnnnnnnnnnnnnnnnnnnnnnnnnnnnnnnnnnnnnnnnaggaaactcctcaccaggagagccaaagacagggttgtgccttaccccaggagccacccctgtaccccccttgccctgccattcaccctccacccctacccctgggcggcctgctgctttttccttctcttcctcccctgccctgagctgcatggttcccccaccctgggcagccaggaaggaatctgaatggagaatcaccaaccaccagagaaaaaagactgtggggccctcccctgccaactccccttccctggccgcccactcaacccacacctctttcacgcaggacaggctgcccaccctgtccacgtgaagtgccaacgnnnnnnnnnnnnnnnnnnnnnnnnnnnnnnnnnnnnnnnnnnnnnagtgagattgcacatttaactactgtaaggagaggagcggcgttggcaaatgtgaaccatgagaatatcagtgatactgatgagaataaactaaacgcctttgtaac

SEQ ID NO: 75440 - DNA, 748 bp, Homo Sapiens
tcggctaggtacgaggctgggtgttgaatcggcacgaggcccacggaggagaccctcccctgcctccgtaggcctacctgctcccctcaaaagcttcgtgccaacagatgaggttcctgtttgaacccaggagagtggaagagagattgggactgagtgctgaggttgggaaggcacctgctcccacagaagggggaacgcaagaggcatcccaagacctcatctgcctgcagtgtcaaatcgatggcctggccttggcttctgattatttgcagctgcgatggatgtttacaggaacccagccagagtttgcctccctgcacttcatcccggagcgcacctgcttcccccacttcaccttcggagaggacacttcaaactgcggacacacgcaaaagcgactcccagctccgtttgatgtgagttgagccttcaggccagctgggtttagcccgaggctggtcttagatgcagcgactgtttcaggggtgactcagaagaaaaagaagctgaggaagctgttggggggctgagggtgggattctcgctccttcatttcaggttactcgttcttcagcaagttggcaaaacagacatcatgctggtgagtgccacgttactcccctggctggaaatgcttttctgaaagtatgagtgttgtgcctacttaattctgataaacctgtctaagcaatacttaggaggcttacttctttggattaaaaaaaactgtatgcaactccaaaaa

SEQ ID NO: 75441 - DNA, 1139 bp, Homo Sapiens
gggaatatccaaagagtggtttgaaggagaaagaagcattgtggctttatatcctctgggcctgggtttcctgaagtcaccacacatagaggagagagaaaatggctgagttaaagtacatttctggatttgggaatgagtgttcttcagaggatcctcgctgcccaggttccctgccagaaggacagaataatcctcaggtctgcccctacaatctctatgctgagcagctctcaggatcggctttcacttgtccacggagcaccaataagagaagctggctgtataggattctaccttcagtttctcacaagccctttgaatccattgacgaaggccatgtcactcacaactgggatgaagttgatcctgatcctaaccagcttagatggaaaccatttgagattccaaaagcatctcagaagaaagtagactttgtgagtggcctgcataccttgtgtggagctggagacataaagtctaacaatgggcttgctatccacattttcctctgcaatacctccatggagaacagatgcttttacaattcagatggggacttcttgattgttccgcagaaagggaaccttctcatttacaccgagtttggcaagatgcttgtacagcccaatgagatctgcgtcattcagagaggaatgcggttcaccatagatgtctttgaaggagaccaaggggctacatctgggaagcgcctatggtgcccactttgagttacctgaccttggaccaattgattccttgggtcttcctaaaaggatgtctccccgttcaatgttgtggcctggcacgggaattatacaccctacaagtacaacctgaagaatttcatggttatcaactcagtggcctttgaccatgcaatctagcctgattcctgtcagagagtggaactcgagacctctgataatccacatggccatggagtagagctgtgcctgccaagaatgccaatatgaatgttttatgattgttcttctgtcaatccatattctttattaatcctatacaatttactagtttctcctgtgttcttggaattctgcagaaataatgtttaaggggctttgtgttttactggtcttgccttggataataaaaataatactgcttcaaccttc

SEQ ID NO: 75442 - DNA, 756 bp, Homo Sapiens
  misc_feature (603)..(656): n is a, c, g, or t
cattctcttcaaggttcagcctggagaaggaaataaagctgctttcaatgacatgagagccttgtctggaggtgaacgttctttctccacagtgtgttttattctttccctgtggtccatcgcagaatctcctttcagatgcctggatgaatttgatgtctacatggatatggttaataggagaattgccatggacttgatactgaagatggcagattcccagcgttttagacagtttatcttgctcacacctcaaagcatgagttcacttccatccagtaaactgataagaattctccgaatgtctgatcctgaaagaggacaaactacattgcctttcagacctgtgactcaagaagaagatgatgaccaaaggtgatttgtaacttaacatgccttgtcctgatgttgaaggatttgtgaagggaaaaaaaattctggactctttgatataataaaatgagactggaggcattctgaaatgaaagaaactcctttatatatccaaccacaatcaaacatataaataagcctggaaaaccaactacaaccagcaatttaagattactattactttaagaaaatcaatttcatagtattggnnnnnnnnnnnnnnnnnnnnnnnnnnnnnnnnnnnnnnnnnnnnnnnnnnnnnnagaagtaaaattttgtacatatatacatgtacatatctgtttagtttgggttcatttctataacattttgtaagaaaataaaagtttgagcacctgaaaa

SEQ ID NO: 75443 - DNA, 595 bp, Homo Sapiens
tgagtcaggtgcacgtgaaacccatgggttgtgaagaggcgaatctgttgaaaagtcccaagggtctgaatgaaagcatctttaatcaacactcaacactcgcaatattctagaaaaccatatactgtgctggttgaggccaaaggttaacattgctccactgttcaccaaggaagggggcagtggccatccgccgcggcctcacgtgcgttgtaacaagccctcatcacatgtgtgagtcttacgtgcacaaaaagagaaggctttggtactgaaactggacaccttgtgtactcgataccttcacagcttctattggacatattttctttttaggaatgaaggaaaattctcccatttttgagccattcttttgtcaattctacaaaattgcatgtaactttataaatatttttaaaagatatagttttgtaaatatttaatattccgctaatttgattttgaattgtaaatgtcaagtattctgtttttggggtttttatgttttattatactttgttaaaaaggacaaattgtacatttttagaatgtttttatgagtaaatttaatgtactgaaaataaaaattttaaaa

SEQ ID NO: 75444 - DNA, 1099 bp, Homo Sapiens
atgagccactgcgtctggccttctataattttctggtagtcacgatggaaacaaacaaaacaccttagaaccagagatcgaccccctcaagcaatacatcaattcccttcacaagaaacgtcggggctacatgagtatctgtgttgaatgcggtctgaaatgatcctatggattttcccggctggttgccactactgtacaacattcagtgcccacatccatctgtgccattaagcttttttgagacatgagagatgcctcttccctgctgtatgacatgcatttgggaagttggaaagaaatgacaaaatcagggagaaaacatccaagcttcttacctgtagatagaatcagccctcacttggtgcttattaccagttattcaagaacaataacaacaacaaaattagtagacatccaagaagcacatattaggaccaaagatagcatcaactgtatttgaaggaactgtagtttgcgcattttatgacatttttataaagtactgtaattctttcattgaggggctatgtgatggagacagactaactcattttgttatttgcattaaaattattttgggtctctgttcaaatgagtttggagaatgcttgacttgttggtctgtgtaaatgtgtatatatatatacctgaatacaggaacatcggagacctattcactcccacacactctgctatagtttgcgtgcttttgtggacacccctcatgaacaggctggcgctctaggacgctctgtgttcactgatgatgaagaaacctagaactccaagcctgtttgtaaacacactaaacacagtggcctagatagaaactgtatcgtagtttaaaatctgcctcgcgggatgttactaaactcgctaatagtttaaaggttacttacaatagagcaagttggacaattttgtggtgttggggaaatgttagggcaaggcctagaggttcattttgaatcttggtttgtgactttagggtagttagaaactttctacttaatgtacctttaaaatagtccattttctatgttttgtataatctgaaactgtacatggaaaataaagtttaaaaccagaaaaaaaa

SEQ ID NO: 75445 - DNA, 262 bp, Homo Sapiens
gcggccgctccaacatcagaatggtaacagccaggtccccagccacggcattcaggcaggagtggaagagccagtagaagaagatgagccagatgaggtgattggggacctggcagggaggtgggggtgggcaccaagttctagaaccttcccccacatgccactgtcccctcctgtcctgtgcatgcgccacctgtccgcactcaccgccagcttcaggaggcgctcgatgatgcgtgagtagtccatgtcccctcgtgcc

SEQ ID NO: 75446 - DNA, 1991 bp, Homo Sapiens
  misc_feature (547)..(547): n is a, c, g, or t
atttcctgctcacctagggctgggctctgggtgtgagctcctttcttccggccccgtggcaggtgccatcgcctgcaggattctttattcagctctgacagtggcttcagcaactaccgtggcatcctgaactggtgtgtggtgatgctgatcttgagcaatgcccggttatttctggagaacctcatcaagttatggcatcctggtggaccccatccaggtggtttctctgttcctgaaggatccctatagctggcccgccccatgcctggttattgcggccaatgtctttgctgtggctgcattccaggttgagaagcgcctggcggtgggtgccctgacggagcaggcgggactgctgctgcacgtggccaacctggccaccattctgtgtttcccagcggctgtggtcttactggttgagtctatcactccagtgggctccctgctggcgctgatggcgcacaccatcctcttcctcaagctcttctcctaccgcgacgtcaactcatggtgccgcagggccagggccaaggctgcctctgcnagggaagaaggccagcagtgctgctgccccgcacaccgtgagctacccggacaatctgacctaccgcgatctctactacttcctcttcgcccccaccttgtgctacgagctcaactttccccgctctccccgcatccggaagcgctttctgctgcgacggatccttgagatgctgttcttcacccagctccaggtggggctgatccagcagtggatggtccccaccatccagaactccatgaagcccttcaaggacatggactactcacgcatcatcgagcgcctcctgaagctggcggtccccaatcacctcatctggctcatcttcttctactggctcttccactcctgcctgaatgccgtggctgagctcatgcagtttggagaccgggagttctaccgggactggtggaactccgagtctgtcacctacttctggcagaactggaacatccctgtgcacaagtggtgcatcagacacttctacaagcccatgcttcgacggggcagcagcaagtggatggccaggacaggggtgttcctggcctcggccttcttccacgagtacctggtgagcgtccctctgcgaatgttccgcctctgggcgttcacgggcatgatggctcagatcccactggcctggttcgtgggccgctttttccagggcaactatggcaacgcagctgtgtggctgtcgctcatcatcggacagccaatagccgtcctcatgtacgtccacgactactacgtgctcaactatgaggccccagcggcagaggcctgagctgcacctgagggcctggcttctcactgccacctcacacccgctgccagagcccacctctcctcctaggcctcgagtgctggggatgggcctggctgcacagcatcctcctctggtcccagggaggcctctctgcccctatggggctctgtcctgcacccctcagggatggcgacagcaggccagacacagtctgatgccagctgggagtcttgctgaccctgccccgggtccgagggtgtcaataaagtgctgtccagtgacctcttcagcctgccaggcgcctggggcctggtggggggtatggccacacccacaagggcgagtgccagagctgtgtggacagctgtccaggactgccggggagcagcagctccactgcagcagggcgggcatggccggtagggggagtgcaaggccaggcagacgcccccattccccacactcccctacctagaaaagctcagctcaggcgtctctcctggtgctactcctgctgggtgtgcgggaatcggcactctggccctcagtgcaggatggtcaacttgcacccaccgtgctcagcttcagcttgggaagaggtcggccctgggtttgcgggaagtgggctccagccaggatggcccagggatgggcagtccacagggcctttctggtgtg

SEQ ID NO: 75447 - DNA, 645 bp, Homo Sapiens
  misc_feature (150)..(168): n is a, c, g, or t
ggcaggctggtaccggtccggatatcccgggatatcgtcgaccacgcgtccgctaaccttgtaaaaaagcaaagattcttcaaaatgacattgaaataaaaagtaagccatacgtattttcttagaagtatagatgtatgtgcgtgtatnnnnnnnnnnnnnnnnnnngagataaacacaatattccttatttcaaattagtatgattcctatttaaagtgatttatatttgagtaaaaagttcaattcttttttgctttttaaaaaatctgatgcttcataattttcattatattattccacatatttttccttgaagttcttagcataatgtatccattacttagtatatatctaggcaacaacacttagaagtttatcagtgtttaaactaaaaaaataaagattcctgtgtactggtttacatttgtgtgagtggcatactcaagtctgctgtgcctgtcgtcgtgactgtcagtattctcgctattttatagtcgtgccatgttgttactcacagcgctctgacatactttcatgtggtaggttctttctcaggaactcagtttaactattatttattgatatatcattacctttgaaaagcttctactggcacaatttattattaaaattttgaatcca

SEQ ID NO: 75448 - DNA, 1500 bp, Homo Sapiens
tggcaaacctagctaggtagaggcctggggtgaaatcggcacgaggggaacaggtctgccatcccgatgaagattcgaaatgtcagtgccacacttgtcaacataagccccgacacgtctctgctactggactgtggtgagggcacgtttgggcagctgtgccgtcattacggagaccaggtggacagggtcctgggcaccctggctgctgtgtttgtgtcccacctgcacgcagatcaccacacgggcttgccaagtatcttgctgcagagagaacgcgccttggcatctttgggaaagccgcttcaccctttgctggtggttgcccccaaccagctcaaagcctggctccagcagtaccacaaccagtgccaggaggtcctgcaccacatcagtatgattcctgccaaatgccttcaggaaggggctgagatctccagtcctgcagtggaaagattgatcagttcgctgttgcgaacatgtgatttggaagagtttcagacctgtctggtgcggcactgcaagcatgcgtttggctgtgcgctggtgcacacctctggctggaaagtggtctattccggggacaccatgccctgcgaggctctggtccggatggggaaagatgccaccctcctgatacatgaagccaccctggaagatggtttggaagaggaagcagtggaaaagacacacagcacaacgtcccaagccatcagcgtggggatgcggatgaacgcggagttcattatgctgaaccacttcagccagcgctatgccaaggtccccctcttcagccccaacttcagcgagaaagtgggagttgcctttgaccacatgaaggtctgctttggagactttccaacaatgcccaagctgattcccccactgaaagccctgtttgctggcgacatcgaggagatggaggagcgcagggagaagcgggagctgcggcaggtgcgggcggccctcctgtccagggagctggcaggcggcctggaggatggggagcctcagcagaagcgggcccacacagaggagccacaggccaagaaggtcagagcccagtgaagatctgggagaccctgaactcagaaggctgtgtgtcttctgccccacgcacgcacccgtatctgccctccttgctggtagaagctgaagagcacggtcccccaggaggcagctcaggataggtggtatggagctgtgccgaggcttgggctcccacataagcactagtctatagatgcctcttaggactggtgcctggcacagccgcgggccaggaggctgccacacggaagcaagcagatgaactaatttcatttcaaggcagtttttaaagaagtcatggaaacagacggcggcacctttcctctaatccagcaaagtgattccctgcacaccagagacaagcagagtaacaggatcagtgggtctaagtgtccgagacttaacgaaaatagtatttcagctgcaataaagattgagtttgcaattgtg

SEQ ID NO: 75449 - DNA, 354 bp, Homo Sapiens
agcagcaagaaccaaccggtgagccctctcctaagagacccaggggaagacccaaaggcagcaaaaacaagagtccctctaaagcagctcaaaagaaagcagaagccactggagaaaaacggccaagaggcagacctaggaaatggccacaacaagttgttcagaagaagcctgctcaggaggaaactgaagagacatcctcacaagagtctgccgaagaggactagggggcgccaacgttcgatttctacctcagcagcagttggatcttttgaagggagaagacactgcagtgaccacttattctgtattgccatggtctttccactttcatctggggtggggtgggggtgg

SEQ ID NO: 75450 - DNA, 1074 bp, Homo Sapiens
  misc_feature (732)..(751): n is a, c, g, or t
ggtttaaatgaaaccccccttaatttatagacaacattatttaaccttatactgctaaacacacaaaccctaagttccttcttttgtattagctagggctaacacatcaaacaagcattaataaaactgaaggccaaagatgataacaagatacactgctggtgctctgtgacacagtttcagttctctgcaaaagcttttgctagcttccagaccatttcctaggtctgcctcttggccgtgttttctccagtggcttctgctttcttttgagctgctttagaggggactcttgtttttgctgcctttgggtcttcccctgggtctcttaggagagggctcaccggttggttccttttgagctgctttagagggactcttgtttttgctgcctttgggtcttcccctgggtctcttaggagagggctcaccggttggttcctgcgcctctaccgtgccgagccaacactttgcaggaagcgtctaggctgcacctcaggcagcgcaccggttcactgtgagtgggaagggactgcagtggagtgggagaggtcccctgacagacgtactccgcctcggaatgccctcaccacagagccttgcgggcgggcgagcgcgcacatacacggagacatgcatgcagatacacacgaacacgcgtgtaagcacatgcacgcagatacacgtggacacgggggcattcatgcgctggtaaacaccacggcatttagnnnnnnnnnnnnnnnnnnnnggcacgcagatgacatgcacattcgcagacacatgcaaacaatgtgcacaaaaccaacgcgtcagagacgcgtgggtcgacgatatccgggatcccggacggaaccacctgagttttgtacaactagtacataatagtgcacccaaaatagggcaaagggcaagcagaacccgagttagaggagaaacacacccaaggacatggcaaaagccggaggcgagatcggccgggactcacatgagggcaacaaggggaaggcaccaggacaggagcacaaagcgatgaagacgagacagcaacagagaagaaaagacgcgaaaccg

SEQ ID NO: 75451 - DNA, 1892 bp, Homo Sapiens
agggcgaagagtatgaagtcgacggcgcgccgaattcggcacgaggcgggaaacgcgggcgtaggtgaccggcggctttctcagttttggtggagacgggcgcatgtgggcgctttgctcgctgctgcggtccgcggccggacgcaccatgtcgcagggacgcaccatatcgcaggcacccgcccgccgcgagcggccgcgcaaggacccgctgcggcacctgcgcacgcgagagaagcgcggaccgtcggggtgctccggcggcccaaacaccgtgtacctgcaggtggtggcagcgggtagccgggactcgggcgccgcgctctacgtcttctccgagttcaaccggtatctcttcaactgtggagaaggcgttcagagactcatgcaggagcacaagttaaaggttgctcgcctggacaacatattcctgacacgaatgcactggtctaatgttgggggcttaagtggaatgattcttactttaaaggaaaccgggcttccaaagtgtgtactttctggacctccacaactggaaaaatacctcgaagcaatcaaaatattttctggtccattgaaaggaatagaactggctgtgcggccccactctgccccagaatacgaggatgaaaccatgacagtttaccagatccccatacacagtgaacagaggaggggaaagcaccaaccatggcagagtccagaaaggcctctcagcaggctcagtccagagcgatcttcagactccgagtcgaatgaaaatgagccacaccttccacatggtgttagccagagaagaggggtcagggactcttccctggtcgtagctttcatctgtaagcttcacttaaagagaggaaacttcttggtgctcaaagcaaaggagatgggcctcccagttgggacagctgccatcgctcccatcattgctgctgtcaaggacgggaaaagcatcactcatgaaggaagagagattttggctgaagagctgtgtactcctccagatcctggtgctgcttttgtggtggtagaatgtccagatgaaagcttcattcaacccatctgtgagaatgccacctttcagaggtaccaaggaaaggcagatgcccccgtggccttggtggttcacatggccccagcatctgtgcttgtggacagcaggtaccagcagtggatggagaggtttgggcctgacacccagcacttggtcctgaatgagaactgtgcctcagttcacaaccttcgcagccacaagattcaaacccagctcaacctcatccacccggacatcttccccctgctcaccagtttccgctgtaagaaggagggccccaccctcagtgtgcccatggttcagggtgaatgcctcctcaagtaccagctccgtcccaggagggagtggcagagggatgccattattacttgcaatcctgaggaattcatagttgaggcgctgcagcttcccaacttccagcagagcgtgcaggagtacaggaggagtgcgcaggacggcccagccccagcagagaaaagaagtcagtacccagaaatcatcttccttggaacagggtctgccatcccgatgaagattcgaaatgtcagtgccacacttgtcaacataagccccgacacgtctctgctactggactgtggtgagggcacatttgggcagctgtgccgtcattacggagaccaggtggacagggtcctgggcaccctggctgctgtgtttgtgtcccacctgcacgcagatcaccacaccgggcttgccaagtatcttgctgcagagagaacgcgccttggcatcctttgggaagccgcttcacccttttgctggtggttgcccccaaaccagctcaaagccctggctccagcagtaccacaaaccagtg

SEQ ID NO: 75452 - DNA, 956 bp, Homo Sapiens
  misc_feature (828)..(860): n is a, c, g, or t
gttcggtgggcgacgacctaaacgtactaagtagcgaggcctgggtggcgaattcggcacgaggcagcagccctcgcagcccgccagctcgcgctcgccccgccggcgtccccagccctatcacctcatctcccgaaaggtgctgggcagctccggggcggtcgaggcgaagcggctgcagcggcggtagcggcggcgggaggcaggatgagcgcacgcggtgagggcgcggggcagccgtccacttcagcccagggacaacctgccgccccagcgcctcagaagagaggacgcggccgccccaggaagcagcagcaagaaccaaccggtgagccctctcctaagagacccaggggaagacccaaaggcagcaaaaacaagagtccctctaaagcagctcaaaagggcttgccaagtatcttgctgcagagagaacgcgccttggcatctttgggaaagccgcttcaccctttgctggtggttgcccccaaccagctcaaagcctggctccagcagtaccacaaccagtgccaggaggtcctgcaccacatcagtatgattcctgccaaatgccttcaggaaggggatgagatctccagtcctgcaagggaaagattgatcagttcgctgttgcgaacatgtgatttggaagagtttcagacctgtctggtgcggcactgcaagcatgcgtttggctgtgcgctggtgcacacctctggctggaaagtggtctattccggggacaccatgcccctgcgagctctggtccggatggggaaagatgcccaccctcctgatacatgaagcccaccctggaaagatggtttnnnnnnnnnnnnnnnnnnnnnnnnnnnnnnnnnccaacgttccaaagccatcagcgtgggggatgccggatgaaacccgggatttcattatggctggacccactttcagcccaacggctatggcccaag

SEQ ID NO: 75453 - DNA, 3397 bp, Homo Sapiens
tggggagagatgaatcgaggcgcgccgattcggcacgagggacaaaccagtgttactgctgccactccaccaccatccccgacctcaggagaaagtggtgacttactgagtaacctgttgcagagtcccagttcagccaaactgttgaatcagccaattcccatccttgatgtggagagtgagtatatctgttccctggctttggagtgcctggcccatctcttcagttggattcctctgtctgccagcatcaccccatccctccttaccaccatcttccactttgcacgatttggctgtgacatccgggccagaaagatggcgtcagttaacggcagcagccagaactgtgtctcgggtcaggagcgcggccggctgggggtcctggccatgtcctgcatcaatgaactcatgtccaagaactgtgtgcctatggaatttgaggagtatttactgcgtatgttccagcagactttctacctcctgcagaaaatcaccaaggataacaatgcccacacagtgaagagcaggctagaagagctcgatgagagctatatcgagaagtttactgactttcttcggctctttgtgagtgttcacctaagaagaatcgagtcttactcccagttccctgtggtggagtttttgacacttttgttcaagtacacatttcatcagcctactcatgaaggttacttctcttgtttggatatctggacgctgtttttggactatctgacaagtaaaattaaaagtcgtcttggagacaaggaagcagttctcaacaggtacgaagatgccctggtgctcctgctcacagaggtgttgaatcgaatccagttcagatacaaccaagcccagctggaggagttggatgatgagactctggatgacgatcagcagacggagtggcagcggtacttacggcagagcttggaggtggtggccaaagtgatggagctcctgcccacgcacgccttctccacactgttccctgttcttcaggacaatttagaagtttatttgggattacaacagtttatagtcacttcagggtcaggacacaggttgaacatcacggcggagaacgactgccggcggctgcactgctccctgagagacttgagctccctgctgcaggccgtgggccgcctggccgagtactttatcggggatgtgtttgctgcacggttcaatgatgccctcacagtcgtggaaaggttggtcaaagtcactctgtacggatctcagataaaattgtacaacattgaaactgctgtgccatcagtattgaaacctgacctcattgatgtgcatgctcagtccctggctgcgctgcaggcttactctcactggttagcacagtattgcagtgaagttcaccggcagaacacgcagcagttcgtgacactcatctctactaccatggatgcaatcacacctctaatcagcaccaaggtccaagacaagctgctgctatctgcgtgccacttactggtctcactggccaccaccgtgcggcccgtctttctgatcagcatccctgcagtgcagaaagtattcaacagaatcactgatgcctctgccctgcgacttgtcgataaggcccaggtgttggtgtgccgagccctctctaacatcttgctgcttccgtggccaaaccttccagagaatgagcagcagtggcccgtgcgctccatcaaccacgccagcctcatctctgcactctcccgggactatcgcaacctgaagcccagtgctgttgccccacagagaaagatgccactggatgacaccaaactgattatccaccagacactcagcgtcttagaagatattgtggagaatatctcgggggagtccaccaagtctcgacagatttgctaccagtcgctgcaggaatctgttcaggtctccctggccctctttccagcttttatccatcagtcagatgtgactgatgagatgctgagcttcttcctcactctgtttcgaggccttagagtacagatgggtgtgcctttcactgagcaaatcatacagactttcctcaacatgtttaccagagagcagttagccgagagcatcctccacgagggcagcacaggctgccgggtggtggagaagtttctgaagatcctgcaggtggtggtccaggagccaggccaggtgttcaagcccttcctccccagcatcatcgccctgtgcatggagcaagtgtatcccatcattgccgagcgtccctcccctgatgtgaaggccgagctgtttgagctccttttccggacgctccatcacaactggaggtacttcttcaagtccaccgtgctggccagtgtccagagggggatcgctgaggagcagatggagaatgagccccagttcagtgccatcatgcaggctttcggacagtcctttctccagcccgacatccacctttttaaacaaaatctcttctacttggagactctcaacaccaagcagaagctgtaccacaagaagatcttccggactgccatgctgttccagtttgtgaacgtgctgctccaggtcctggtccacaagtcccatgatcttctgcaggaggagattggcatcgccatctacaacatggcctcagtcgactttgatggcttctttgccgccttcctcccagagttcctgaccagctgtgatggtgtggatgccaaccagaaaagtgtgctggggcggaatttcaagatggatcgggacctgccctcattcacccagaatgtgcacaggctggtcaacgacctgcgctactacagactctgcaacgacagcctgccccctggcactgtgaagctctaggcctgctactgcctggggacacggacttctgctgctgccacctgcgccagccctaccttccaccacagatgtctcccagatgggccttggtcacactccttggcttctcccaccgcaagcaacgctgcctgcctctgccgctcctccacatcttgccgctgcccagcagagctggcttctgggtccacctgagcactggacggtgctcccagggcgttggagcaggcggaggggtgtgtggccaggtactaggaggcaccaggaaatcccgcggggtggcccatgcagaccaggcgcacgtggctcatggggcagaattgccaaggacagctcacgacagtgccaccttctcaccattccagccaaggagagatgtgacgttggaactgctctggcacttctgtcaagcctcccccgccccaattgccttgagatctctgctctttgtcagagatttgcaaagactcacgtttttgttgttttctcatcattccattgtgatactaagaaactaagaagcttaatgaaaagaaataaaatgcctatgttgttgttctagaaaaaa

SEQ ID NO: 75454 - DNA, 872 bp, Homo Sapiens
catcaaagtagaaagcatagaggatgtcagaaatcagtgtactgaccatggagcggacatgataagcatacataaggaagaagaaaatgcttttatactggatactttgaaaaagcaatggaaaggcccagatgatatcctactaggcatgttttatgacacagatgatgcgagtttcaagtggtttgataattcaaatatgacatttgataagtggacagaccaagatgatgatgaggatttagttgacacctgtgcttttctgcacatcaagacaggtgaatggaaaaaaggaaattgtgaagtttcttctgtggaaggaacactatgcaaaacagctatcccatacaaaaggaaatatttatcagataaccacattttaatatcagcattggtgattgctagcacggtaattttgacagttttgggagcaatcatttggttcctgtacaaaaaacattctgattctcgtttcaccacagttttttcaaccgcaccccaatcaccttataatgaagactgtgttttggtagttggagaagaaaatgaatatcctgttcaatttgactaagtttttggtaatcttgcactaagacatcaacaaaatgccctggcagagataacttgggaaagattttaatataaaacttgacattggatattagagctttaatggtattccttattccagtaacatttttatgtactcatctgctgtgaagtctttaggttcattaaaaaaacaggttttagaaatgatcttagatctaatatagtgattttaagcatcccgtcaaaggcagaatctgtcacttgaatgaaggaaagcttaaagcccaagcagataaaaataaaagcccagcctatttgtc

SEQ ID NO: 75455 - DNA, 1556 bp, Homo Sapiens
  misc_feature (1539)..(1539): n is a, c, g, or t
ctccatgatgaagcagaaagaacgctttgccgccctagccaagttcaagtccagcatctaccggatcctgatcgcaacagacgtggcctcccggggcctggacatccctacggtacaggtggtcatcaaccacaacacccccgggctccccaagatctacatccaccgagtcgcccggacggcccgtgcaggccggcagggtcaggccatcacgctggtgacacagtacgacatccacctggtgcacgccatcgaggagcagatcaagaagaagctggaggagttctccgtggaagaggccgaggtgctacagatcctcacacaggtcaacgtggtgcgaagagagtgtgagatcaaactggaggcggcccactttgacgaaaagaaggagatcaacaaacggaagcagctgatcctggaggggaaggaccctgacctggaggccaagcgcaaggctgagctggccaagatcaagcagaagaaccggcgcttcaaggagaaggtggaggagacgctgaagcgacagaaggctggcagggctggccacaaggggcgtccacccaggacaccgtctgggtcccactcaggcccagtcccctcccagggcctggtctgagccccacacggccatctgcccagtccttgactcgtccatggagctgagggtcggaggaaccttccttgggggcagcagcccttcccgggggcctacccagtgccccacagcagaacccgtgggcgctcgtgttgtgcgggccctgctcctctgccccgaaaccactggctggtcccttccctgagccctggccaagattcaggctgcaggggaagaaagaacatgaccgggaggttgtgaccccaacccaaggtcaccccccaggggtgccgcatacaggaggtgcttaataaacgggtcttttgaccttcctcgggcgggcgcgccggggaaaaacgatcgccgggggcgtggtcggggcccgcctcgggcccctgcgagaaaggcttttctacaacccatttcccttttgggcccgctccggccccccccgtatagggtaaaaattggaaaccagtgggccccactaagaaatgggctctttcccccaaccggaaagaacccccccctggggtctcccattgtgaccctcacacgggcttttgttgggaaatcctctctccgacccccacatgtagaaaccagacgtgtgctgcccggggggccggatccaaacacccgaaaggcgggttctcttgcacacacacaacattccccgtaagaggggggaaacttcccccctgaaggagtcgccatctaagcctgggggtacccgcattggcacccccggggggggtgtgcaaacaagagtgaagaggctctcgcgaacaaatccccagaaatttgtaggggacccgccggctctctctggggcaaacctttcatgtcgggatagggaagcgcggggaagagaacatatgttcattttcagaactatgtgtccctctgctgccaatatgtggggtgcggcatacccccccggnaagtgcgcgcgcccgct

SEQ ID NO: 75456 - DNA, 861 bp, Homo Sapiens
gcggccgcattgccatcatcggaaacctcagtgctgagcccactacccgaagacacatggcggcctgtgaggaatttggggatggctgcttgagcctcctggccaggtgtgaggaggatgtggacctgttcagagaggttatctacacactcctgggactcatgatgaacctgtgtcttcaggctccctttgtctctgaggtttgggctgtggaggtgagcagaaggtgcctgtctttactaaacagccaggatggaggaatcctgacaagagctgctggtgttctgagccggaccctttcttcctctctgaaaattgttgaggaggccttgcgagcaggagtggtaaagaaaatgatgaaattcctgaagacaggaggtgagactgcatcacgttatgctataaagatactagctatctgcacgaatagttatcatgaagctcgggaagaagtaataagactggataaaaagttgagcgttatgatgaagctgctcagctcggaggatgaggttctggtgggcaacgctgccctctgccttggtaactgcatggaggtgcccaacgttgcgtcttccctgctaaagacggaccttttgcaggtcttgttaaagcttgcaggcagtgacacacagaagacggccgtgcaggtgaacgcaggcattgctctggggaagctgtgcacagctgagcccagatttgctgctcaactgagaaagcttcatggcctagaaattctcaactctacgatgaaatacatcagtgattcttgagagagacagggtttgtgtgcatttggggaacacacagatgcacaccgtgtgttgttcctatgctaataaagacctttgatgtatccac

SEQ ID NO: 75457 - DNA, 1046 bp, Homo Sapiens
gtggaccggtccggaattcccgggatatcgtcgacccacgcgtccggacataatcactttgaacttccatgaaacctgtcttccaccacaacaaccctgggagagaaaaacatgctaaaggaggtatcttggcttaataattccttatagccaatatcaacagtggcaatcagcacacagaggaaaggacccaaatcactatgtagcttaaagatttctgttaatttgaaagaacaaaaacaagacagaacttctggtactctaatcaggatgattcctaacaagtcagtcatttgtgaacttagtggactttttggttactttaatttgcatatattctccagttacatcggactctatctgtggccttgttcttcatttcagtgttaatcagctaaacagaagttgttgcttatgatgtgtgagtgaacatatgccactgcctggcctttttttcttcagagcttgttgtctttttcgctatattagactttgcagtatgcccagaagctttccttcataaaatagaaagaaaaaaacatttggcttatttttcactgtagctagtcttttatacaataatcttgtaagaaaatttcttgaattctaaatattactctttctagatttttgaaatcaaaaagttttcagtaaaaagtttcttactttattttattatattaggtagtaaaaaatgtagggttatttaccataacctgttcattaatatcagaaatttacaatagcattttaagaccatagtaggattctagcataccgtgtagtacctatggagtattgtaagagctaattgttggagatgaattgcttctcatcttgttctccagtttccattgttggtttattgcagatttgtatcctgtgtcaaattcaaggtattattgataaaccttttcaaccagcagcaagaagttcaaatttttttctgtcactgtaacagaaaacacaatatgtatataacatttatgtagcaataaatgtgccatcttttttttaacacagtaaaatagtgagttttttaaaaa

SEQ ID NO: 75458 - DNA, 519 bp, Homo Sapiens
gaaagaaaggaagcaggaggagagggaggatgacaaagacagtgaccaggaaactgttgatgaagaagttgatgaaaacagctcaggcatgtttgctgcagaagagacaggggaggcactgtctgaggagactacagcaggtgaacagtctacagaaaagcaggcttgagttttgggatgaaatgattggggagtgtaaattgcagcaaaagagttccctgaatttgcaacctcttcccattaaacaatattgtaggaagaggggtgtttggtaagcaatttacctggtttcctgctccacggatgacaactttagtagaggctgaatcacaatcttctgaaaatgcagctgcatgtcctggcttcagtgctgtattgtaaagggcaagaatatcacctgaaatagacaagatgttaagatttacatttccgttgccttgagagttccctgttactcccacttctccctatggtgaccttttatagaagaccataaataaaccaaaaaagcccactgta

SEQ ID NO: 75459 - DNA, 510 bp, Homo Sapiens
  misc_feature (53)..(53): n is a, c, g, or t
gcggccgccaagcgatccctgctccgcgcgacactgcgtgcccgcgcacagangaggcggtgacgcactttacggcggcaccgtaagtgcgtgacgctcgtcagtggcttcagttcacacgtggcgccagcggaggcaggttgctgtgtttgtgcttccttctacagccaatatgaaaaggcctaataagtggggtcgagacgcgggcgtggagggacccacgtctggaagttgctgcagccaccacgacgctcttctacggctacggctttgtctctgctggtatgggggtgggagcctacgcgtaggccttggccctatttcctggtagaaccgagagttggaagtccctacggcgatcatgttaaccgcgcgggctcattctgcggaacgaagccgggcagagggtggggaagactaggctagattttcgtaaggaagcagcgtctgagccaggtttgaggcccaatattttctttccgtgggcacgtgcagactggcccaggtgag

SEQ ID NO: 75460 - DNA, 2018 bp, Homo Sapiens
  misc_feature (1814)..(1822): n is a, c, g, or t
ggcagtaactctaacggttctaaggtagcgaggcctgggtggcgaattcggcacgaggcgctcgtcagtggcttcagttcacacgtggcgccagcggaggcaggttgctgtgtttgtgcttccttctacagccaatatgaaaaggcctaagttaaagaaagcaagtaaacgcatgacctgccataagcggtataaaatccaaaaaaaggttcgagaacatcatcgaaaattaagaaaggaggctaaaaagcagggtcacaagaagcctaggaaagacccaggagttccaaacagtgctccctttaaggaggctcttcttagggaagctgagctaaggaaacagaggcttgaagaactaaaacagcagcagaaacttgacaggcagaaggaactagaaaagaaaagaaaacttgaaactaatcctgatattaagccatcaaatgtggaacctatggaaaaggagtttgggctttgcaaaactgagaacaaagccaagtcgggcaaacagaattcaaagaagctgtactgccaagaacttaaaaaggtgattgaagcctccgatgttgtcctagaggtgttggatgccagagatcctcttggttgcagatgtcctcaggtagaagaggccattgtccagagtggacagaaaaagctggtacttatattaaataaatcagatctggtaccaaaggagaatttggagagctggctaaattatttgaagaaagaattgccaacagtggtgttcagagcctcaacaaaaaccaaaggataaagggaagataaccaagcgtgtgaaggcaaagaagaatgctgctccattcagaagtgaagtctgctttgggaaagagggcctttggaaacttcttggaggttttcaggaaacttgcagcaaagccattcgggttggagtaattggtttcccaaatgtggggaaaagcagcattatcaatagcttaaaacaagaacagatgtgtaatgttggtgtatccatggggcttacaaggagcatgcaagttgtccccttggacaaacagatcacaatcatagatagtccgagcttcatcgtatctccacttaattcctcctctgcgcttgctctgcgaagtccagcaagtattgaagtagtaaaacccgatggaggctgccagtgccatcctttcccaggctgatgctcgacaggtagtactgaaatatactgtccccaggctacaggaaattctctgggaattttttactagggcttgctcagagaagaggtatgcaccaaaaaggtggaatcccaaatgttgaaggtgctgccaaactgctgtggtctgagtggacaggtgcctcattagcttactattgccatccccctacatcttggactcctcctccatattttaatgagagtattgtggtagacatgaaaagcggcttcaatctggaagaactggaaaagaacaatgcacagagcataagagccatcaagggccctcatttggccaatagcatccttttccagtcttccggtctgacaaatggaataatagaagaaaaggacatacatgaagaattgccaaaacggaaagaaaggaagcaggaggagagggaggatgacaaagacagtgaccaggaaactgttgatgaagaagttgatgaaaacagctcaggcatgtttgctgcagaagagacaggggaggcactgtctgaggagactacagcaggtgaacagtctacaaggtcttttatcttggataaaatcattgaagaggatgatgcttatgacttcagtacagattatgtgtaacagaacaatggctttttatgannnnnnnnnttaacattttaagcagactgctaaactgttctctgtataagttatggtatgcatgagctgtgtaaattttgtgaatatgtattatattaaaaccaggcaacttggaatccctaaattctgtaaaaagacaattcatctcattgtgagtggaagtagttatctggaataaaaaaagaagatacctattgaaaaaaaa

SEQ ID NO: 75461 - DNA, 1046 bp, Homo Sapiens
gcggccgcggcgagcctttgaggggaacgacttgtcggagccctaaccaggggtatctctgagcctggtgggatccccggagcgtcacatcactttccgatcacttcaaagtggttaaaaactaatatttatatgacagaagaaaaagatgtcattccgtaaagtaaacatcatcatcttggtcctggctgttgctctcttcttactggttttgcaccataacttcctcagcttgagcagtttgttaaggaatgaggttacagattcaggaattgtagggcctcaacctatagactttgtcccaaatgctctccgacatgcagtagatgggagacaagaggagattcctgtggtcatcgctgcatctgaagacaggcttgggggggccattgcagctataaacagcattcagcacaacactcgctccaatgtgattttctacattgttactctcaacaatacagcagaccatctccggtcctggctcaacagtgattccctgaaaagcatcagatacaaaattgtcaattttgaccctaaacttttggaaggaaaagtaaaggaggatcctgaccagggggaatccatgaaacctttaacctttgcaaggttctacttgccaattctggttcccagcgcaaagaaggccatatacatggatgatgatgtaattgtgcaaggtgatattcttgccctttacaatacagcactgaagccaggacatgcagctgcattttcagaagattgtgattcagcctctactaaagttgtcatccgtggagcaggaaaccagtacaattacattggctatcttgactataaaaaggaaagaattcgtaagctttccatgaaaaccagcacttgctcatttaatccctggaagtttttggtggcaaacctgacgggatgggaaacgacggaatataacctaaccaactggaaaaaaatggaatgaaaactcaatggtaaaaagaaggggactggtataaacagaaacccctgggcttggaaggcattcacaaacaccctcccttctggccttaata

SEQ ID NO: 75462 - DNA, 420 bp, Homo Sapiens
gagagcctttgaggggaacgacttgtcggagccctaaccaggggtatctctgagcctggtgggatccccggagcgtcacatcactttccgatcacttcaaagtacagcagaccgaggacacggttggtaccaagaccaggctgttgccttggaagagcccacagcgcgccaagggagacatgccacatcacgccagaaatacatgacagcgcgattagccctgggagagggaggcccagatgtggaagctcaagggacgcgcacctcaacgcggagtttggaggaggctaccttgacctttgaatgccaagtgggagccagccagatgaaaggggttaaaaactaatatttatatgacagaagaaaaagatgtcattccgtaaagtaaacatcatcatcttggtcctggctgttgctctc

SEQ ID NO: 75463 - DNA, 368 bp, Homo Sapiens
gcggccgccaagcgatccctgctccgcgaatactgcgtgcccgcgcacgcagagaggcggtgacgcactttacggcggcagcgtaagtgcgtgacgctcgtcagtggcttcagttcacacgtggcgccagcggagagttaaagaaagcaagtaaacgcatgacctgccataagcggtataaaatccaaaaaaaggttcgagaacatcatcgaaaattaagaaaggaggctaaaaagcagggtcacaagaagcctaggaaagacccaggagttccaaacagtgctccctttaaggaggctcttcttagggaagctgagctaaggaaacagaggcttgaagaactaaaacagcagcagaaacttgacagg

SEQ ID NO: 75464 - DNA, 570 bp, Homo Sapiens
tgacaaggggcagtggtggttttctgttctttctggctatgcatttgaaaattttgatgttttaaggatgcttgtacataatgcgtgcataccacttttgttcttggtttgtaaattaacttttataaactttaccttttttatacataaacaagaccacgtttctaaaggctacctttgtattctctcctgtacctcttgagccttgaactttgacctctgcagcaataaagcagcgtttctatgacacatgcaaggtcattttttttaagaaaaaggatgcacagagttgttacatttttaagtgctgcatttaaaagatacagttactcagaattctctagtttgattaaattcttgcaaagtatccctactgtaatttgtgatacaatgctgtgccctaaagtgtatttttttactaatagacaatttattatggcacatcagcacgatttctgtttagataatacaccactacattctgttaatcattaggtgtgactgaatttcttttgccgttattaaaaatctcaaatttctaaatctccaaaataaaactttttaaaataa

SEQ ID NO: 75465 - DNA, 682 bp, Homo Sapiens
  misc_feature (200)..(239): n is a, c, g, or t
gcgtgtgcagtaacagctttaatctgtggtggcccctgccctcctgcatccaggcaggaagagccgtttctcggggaattaaagcaggagcgtttcccacactgtctcctgggagtccatgcttacagtgacagcactgctgagtggtgccatgtcaccagggctgggcctgggcacagagaggcagggtgccagtcttnnnnnnnnnnnnnnnnnnnnnnnnnnnnnnnnnnnnnnnnttcatgtgtatacacagttttctcttgaaagtattaaaaaattgatcaaccttcaatctataaaaaatacctactctacatgatagaaaaatctctcctccaagtttacactgatttacacccaaggctttccccaaatgtacaataggaggcgacctcttacatcctagcgtggaaggcggcggatgtggggccacacgtacacgcgcgcgcacacacacgcagcgggtggccagtcttggtgatggggtctgggcccacccgggaatgctgggggttggggcaggcccgcggtcctgcggggtgacaccgctgtgcctggggtgcagaccccgagaagcacaggccccctcctgctctgctgtgagtcttccctgccctctccctcctgcaacatgcaccctcgcctcgtgccgaattcgccacccaggcctcgctacctt

SEQ ID NO: 75466 - DNA, 2675 bp, Homo Sapiens
  misc_feature (2605)..(2605): n is a, c, g, or t
gccactggggcagaggactgggaaccgcggcagcgggataagtggcccagccagagagcgcagctcccgcgcccggtcctgccctgcgaaccagcgcggccccctggcgctgaggctgctccggccatggcccctcggccccgcgcccgcccaggggtcgctgtcgcctgctgctggctcctcactgggatggaagagaaaacttatgaagttgaagtttggcattaaaataaaggactcgccaccactctgtgcaccttcttgagggagttcattcgtccggagcgcctcacagcttagtgcgcctgcgcacgcgcgaactgcggccccgcctctcctttggggacgggagacgtgcgtcgggtcgcgggacgggggctgcgcatgcgccttcatttcgtcagcccgctgttgcgtgctgccagcgggaactgtgtaggggtagattttcgctgcagtgttccccgagcctgttagacgcagcgcgccgggagactgagagaggaaaggatagaggaagtgctgccctaggctgcatgagtcgaagcaagcgtgtttccttcccgccaggcaagtgcccttagaaaccgggccccgcccccttcctggcctgcattcccatcccctctcccggggcggaggtgaggacctccttggttcctttggttctgtcagtgagccccttccttggccatgaagctcgtgaggaagaacatcgagaaggacaatgcgggccaggtgaccctggtccccgaggagcctgaggacatgtggcacacttacaacctcgtgcaggtgggcgacagcctgcgcgcctccaccatccgcaaggtacagacagagtcctccacgggcagcgtgggcagcaaccgggtccgcactaccctcactctctgcgtggaggccatcgacttcgactctcaagcctgccagctgcgggttaaggggaccaacatccaagagaatgagtatgtcaagatgggggcttaccacaccatcgagctggagcccaaccgccagttcaccctggccaagaagcagtgggatagtgtggtactggagcgcatcgagcaggcctgtgacccagcctggagcgctgatgtggcggctgtggtcatgcaggaaggcctcgcccatatctgcttagtcactcccagcatgaccctcactcgggccaaggtggcaggtgaacatccctaggaaaaaggaaaggcaattgctctcagcatgaccgggccttggcagcggttctatgaacaggtgggtccaggctatccagcgccacatacactctgaggtggtaaagtgcatcctggtgggcagcccaggatttgtgagggagcagttctgcgactacatgtttcaacaagcagtgaagaccgacaacaaactgctcctggaaaaccggtccaaatttcttcaggtacatgcctcctccggacacaagtactccctgaaagaggccctttgtgaccctactgtggctagccgcctttcagacactaaagctgctggggaagtcaaagccttggatgacttctataaaatgttacagcatgaaccggatcgagctttctatggactcaagcaggtggagaaggccaatgaagccatggcaattgacacattgctcatcagcgatgagctcttcaggcatcaggatgtagccacacggagccggtatgtgaggctggtggacagtgtgaaagagaatgcaggcaccgttaggatattctctagtcttcacgtttctggggaacagctcagccagttgactggggtagctgccattctccgcttccctgttcccgaactttctgaccaagagggtgattccagttctgaagaggattaatgattgaaacttaaaattgagacaatcttgtgtttcctaaactgttacagtacatttctcagcatccttgtgacagaaagctgcaagaagggcactttttgattcatacagggatttcttatgtctttggctacactagatattttgtgattggcaagacatgtatttaaacaataaactaaaaggaaataatctccacgtactaccatcttgattaaattgtgtaattttttataggaattatgagttatctgtagtacttggaaacagaaaatgtgtgtatttaaagacgatgcctatgcagtatattgtttgggatagattgcaaaatttcacactgcatgctttgaaacagttttccttagaaaaagcttttgctatcttatcctgtttacattatttctttattttaattctgcttggtgttcttgcattgcatttaatgatcccttttctccccacctccacacactacattttttttagatttaaatagttttactattttaaatgattgccgtacaattagtagacttgaagacaagttttaaatatttttcttcaaaggcttgttaaaccaatcatgttaaaaggaaattcttggttttggtttgttgttgttagcattagtcatatttgatttagagggtaacttaaatcagttatttttagctttttagaactttgatctgctaaggattgtcaaaataatctccttgaggcatcttttatttttaaaatgagaattanagaatgtgattttgccttgttatgtgggctaattaagtgggcaaagcttgggaagtcatttcccagtcct

SEQ ID NO: 75467 - DNA, 595 bp, Homo Sapiens
ctgactggggcaacagccgcatccaggtattcgacagctctggctccttcctgtcctatatcaacacatctgcagaaccactgtatggtccacagggcctggcactgacctcggatggccatgtggtggtggctgatgctggcaaccactgctttaaagcctatcgctacctccagtagctgtacagaggccctgcctggcttgtggagggacagacattggggtgattggacaagagggtctggctgggaggtgggccagacctggcagcactgaatgtgggctgtgggcatgggtgcacccggtgccccttccctctcctacccccacccccacggttgcactttatttattcggttcttgctttggtgactgggtgagcctggactgtggtcccaaggatgtgtgcagagcttcaccctacccttcttacacacctccccacccctgtcagtctgctccccatcccccagcctggggccagaacagcctaccccaggacaggagtccctctagttgtctccctaccaccctatacacactgacagagacagcaataccccaccccccatattaaataaatgtcttcaccaag

SEQ ID NO: 75468 - DNA, 935 bp, Homo Sapiens
tgaagctctgggacatggcagcggatgggcagcagttcggcgagataaaggccagctcaggccgtgctgtgcctctcctacctgcctgacatcctggtgactggcacctatgacaagaaggtgaccatctacgaccccagagccggcccagccctgttgaagcaccagcaactacactccagacccgtgctgaccctgctggcggatgaccggcacatcatctcaggcagcgaggaccacaccctggtggtggtggaccgccgagccaacagcgtcctgcagcgtctgcagctggactcctacctgctctgcatgtcctaccaggaaccccagctctgggctggtgacaaccagggcctgctgcacgtcttcgccaaccgcaacggctgcttccagcttatccggtcctttgatgtgggccacagctttcccatcactgggatccagtactccgtgggagccttgtacaccacatccactgacaagaccatccgggtgcacgtgcccacagacccaccaaggaccatttgcacccgaaggcatgacaatgggctcaatagggtctgtgctgagggcaacctggtggtggccggctctggagacctgtcgctagaggtctggaggctgcaggcctgagcaggtgggcgtggatgtggatactgcctgccggaggctgggcttcctcctctgttcttgggggaccatccccaatgttggtgctgcctccgccccgtgggcctagggcacaaggagtcccagccacattcgggtgagcgtcctggcctgggccctatgcccgggggaagggtgaaattggggttcaggcccacccagggggccgcttcccactcttgggccctggttttgttatgatttggatgccccgctctcagttgagagcgaaggagaaataaacctgacatgttggtgcttgg

SEQ ID NO: 75469 - DNA, 757 bp, Homo Sapiens
  misc_feature (465)..(473): n is a, c, g, or t
  misc_feature (624)..(635): n is a, c, g, or t
acctgtattgtgtagagatgtgaaatctctatatttcaagagcagaagagttctttctagacaccttacatcaagggacactggtccaattattatcgcttatataagcactcctataaattctgaaaaattttatacatgcaacaaaacattcctacatttgaagacattaagaaaaatcacaggtgactcatctgatcattctatatattaataaatattatgacatatatgtgaacacatcacaaatcatattggtgtaccaagaggcaatttatgcctctcttaagtatgtactgacataacctaatatactaaaatgggaaggggcttttagtcactgaaatatgcatcgtgtaacaaagatgaagaaaatacatggcttgtgcccatcataaaaaaagattcagactgaaggcttagctttggttttttcaattaaattgttaaactgtgcacagtgannnnnnnnnagaacttgagacatttgtgatgttggctgtttaaatctttgttaccttcgctgtgaattgaaattgtacatatttagtaaatcatgcagacaaaacaaactttttagacaatatttttattggagagttttcttttcctgtatccatgttnnnnnnnnnnnngacctcctttcccaaaataaaaatgtcaatactaaatttaaagaagtataaaggaatgattgcttcctttagagcaaaatatttaaataaacatggagataattggcaacatgttaaaaaaa

SEQ ID NO: 75470 - DNA, 3010 bp, Homo Sapiens
  misc_feature (2277)..(2359): n is a, c, g, or t
  misc_feature (2394)..(2403): n is a, c, g, or t
  misc_feature (2521)..(2522): n is a, c, g, or t
aagccatagggctaggtacgaggcctgggtgttaaattcggcacgagggtgcggtggcggcgtgacggcggtggcggcggcgactgctgcggtgaaggaggaggaggagccgagcgggcgctggcaccgaggcctgaccatggacgaggaatacgatgtgatcgtgctggggaccggtctcaccgaatgcatcctgtcgggcatcatgtctgtgaacgggaagaaggtgctgcacatggaccggaacccctactacgggggcgagagctcctccatcacacccctggaggagctgtataagcgttttcagttgctggaggggccccctgagtcgatgggccgaggccgagactggaatgttgacctgattcccaaattcctcatggctaacgggcagctggtaaagatgctactgtatacagaggtgactcgctacctggacttcaaggtggtggagggcagctttgtctacaaggggggcaagatctacaaagtgccgtccactgagactgaggccttggcttccaatctgatgggcatgtttgagaaacggcgcttccgcaagttcctggtgtttgtggcaaacttcgatgagaatgaccccaagacctttgagggcgttgacccccagactaccagcatgcgtgacgtctaccggaagtttgatctgggccaggatgtcatcgatttcactggccatgccctggcgctctaccgcactgatgactacctggaccagccctgccttgagaccgtcaaccgcatcaagttgtacagtgagtccctggcccggtatggcaagagcccatatttatacccgctctacggcttgggcgagctgccccagggttttgcaagattgagtgccatctatggggggacatatatgctgaacaaacctgtggatgacatcatcatggagaacggcaaggtggtgggcgtgaagtctgagggagaggtggcccgctgcaagcagctgatctgtgaccccagctacatcccggaccgtgtgcggaaggctggccaggttatccgcatcatctgtatccttagccaccccatcaagaacaccaacgacgccaactcctgccaaataatcatcccccagaaccaggtcaacaggaagtcagacatctacgtgtgcatgatctcctatgcacacaacgtggcggcccagggcaagtacatagctattgccagcactactgtggagaccacggaccctgaaaaggaggtggagccggctctggagctgttggagcccattgaccagaagtttgtggctatcagtgacttgtatgagcccattgatgatggttgtgagagccaggtgttctgttcctgctcctacgatgccaccacacactttgagacaacctgcaacgacatcaaagacatctacaaacgcatggctggcacggcctttgactttgagaacatgaagcgcaaacagaacgacgtctttggagaagctgagcagtgattgtggccgcccccagcccctgctgccccagcctgtgtctgttctcctcgagggctccagcatcctctgcttcccccaccacgttcccatcacccacctcattgatccactgaccaaatccttaaccctagcgatggcttgggagatggggggttggatagcatcctctttcttggcccttccttatcctaggaaaagagggttcctctccttgtgtgtgtctcttccccccacccctaattcttctgctctgtttgggaagacgtggaggaaaaggtgacttctgcccccaccgctcttacccccactgtagtggcctttggagatgcccccacctcccccccaccaactctcgcgtgttggagagaaggggccctcccagcacaaagttgcattcctcccccctaatttattctaatttattaactttgacccaccctttctgagcctgcagccttcccgtgtggcctgagggctgtcgagtgagctgccccagcccctcccagcccttgcccagcctgggggagtggggaaggcttgggcatggccccgttggaggttgatttgctgttttgtttcttgtctttgtgttctgtggtacttgctgagagaaaagaaaagtgagccaagcagaaggaggtgggaaaacggacccaaaccccagtgtgccctgccccatgcctttcctttagtggtgggaaacccttatcttgcaaagtgaatgtgtccccttccccaccctctagtgtatttcacagaaaacaaaacctcccaataaaacggttgaaacctgnnnnnnnnnnnnnnnnnnnnnnnnnnnnnnnnnnnnnnnnnnnnnnnnnnnnnnnnnnnnnnnnnnnnnnnnnnnnnnnnnnntttgaaggggcccggtggcgttgttcctggccccnnnnnnnnnnaccaacggggggaacgtctcagccgcgggccccccataattaggggagcgtcgattttaaatttccgaataaaagcgcaggtgttactctcggttttatatagctcccgcgggagaanncgggctatatataccagacgactatcagacgagtcgtctctatagggcctcaaagagagtacatctcacaaattcatctagtcgcgagagaacagtgagacgagtaagcagaacgccaccagcaacagacgagctacggaggcgggcaaacaacagcacagaacaatctgacgaccgaacgataacgggcctaccaggcggacatacatgaagggtgctctaaaggagcccgtatcacgcccgactttagaaacgtgagccagctaaacagcaggagaaaggggtcacagtgaggagccgggcgacacatgatcagggaagcgacaaaaaaacgttgcgcaaggaccgcgcaatgaggggattatagagacagtgcgagcgctaccggagatagatggcagacacacagcgagaacggagagtaggagaagccgacagaagcctatgggactgaaggtgcgcacacaccgatatcaacgcaatcgagt

SEQ ID NO: 75471 - DNA, 338 bp, Homo Sapiens
gggcagtcgggccagacttgtgtccagccactggaacccctctctgcgtatggccagcgcctctggcctgagttaacggagctcttcctgtggccagacatctacgtgtgcatgatctcctatgcacacaacgtggcggcccagggcaagtacatagctattgccagcactactgtggagaccacggacccctgaaaaggaggtggagccggctctggagctgttggagcccattgaccagaagtttgtggctatcagtgacttgtatgagcccattgatgatggttgtgagagccaggtgttctgttactgctcctacgatgctacccacaaccact

SEQ ID NO: 75472 - DNA, 412 bp, Homo Sapiens
ctttgtctacgaggggggcaagatctacaaagtgccgtccactgagactgaggccttggtttccaggcctccactgaatccccgagacatcgccaagtgtctgagccaggaaggcccttagagcccatccaggccaatcccctcttcatccagatctgatgggcatgtttgagaaacggcgcttccgcaagttcctggtgtttgtggcaaacttcgatgagaatgaccccaagacctttgagggcgttgacccccagactaacagcatgcgtgacgtctaccggaagtttgatctgcgccaggatgtcatcgatttcactggccatgccctggcgctctaccgcactgatgagtaaggggaagctgggtggtggcagccccctcgcccggccgtgccccatcctaaccacaa

SEQ ID NO: 75473 - DNA, 3206 bp, Homo Sapiens
gcggccgccagcgtcctcaccaccagcatggtcaccatggagcccgggtacctgttcctgggttctcgcctgggcaattccctcctcctcaagtacacggagaagctgcaggagcccccggccagtgctgtccgtgaggctgccgacaaggaagagcctccctcaaagaagaagcgagtggatgcgacggccggctggtcagctgcgggtaagtcggtgccgcaggatgaggtggacgagattgaagtgtacggcagcgaggcccagtcgggaacacagctggccacctactcctttgaggtgtgtgacagcatcctgaacattggaccctgtgccaatgccgacgtgggcgagcctgccttcctctctgaagagtttcagaacagccccgagccggacctggagattgtggtttgctccggccacgggaagaacggggctttgtcggtgctgcagaagagcatccggccccaggtggtgacaacctttgagcttcccggctgctatgacatgtggacagtcatcgccccggtgcgtaaggaggaggaggacaatcccaagggggagggcacagagcaggaacccagcaccacccctgaagcagacgacgacggccgcagacacggattcctgattctgagcccggaagactccaccatgatcctgcagacggggcaggagatcatggagctggacaccagtggcttcgccactcagggccccacggtctttgctgggaacatcggggacaaccgctacattgtccaagtgtcaccactgggcatccgcctgctggaaggagtgaatcagctgcacttcatccccgtggacctgggcgcccccatcgtgcaatgcgccgtggccgacccctatgtggtcatcatgagtgccgagggccacgtcaccatgttcctgctgaagagtgactcctacggtggccgccaccaccgcctggcgctgcacaagcccccgctgcaccatcagtccaagccccacagtggatgacgaggaggagatgctgtatggggattcgggctccctcttcagccccagcaaggaggaggcccgaagaagcagccagccccctgctgaccgggaccctgcacccttccgggcagagcctacccactggtgcctgctggtgcgggagaatggcaccatggagatctaccagcttcccgactggcggctggtgttcctggtgaagaacttccctgtggggcagcgggtccttgtggacagctcctttggacagcccactacacagggcgaggcccgcagggaggaggccacgcgccagggggagctgcccctcgtcaaggaggtgctgctggtggcgctgggcagccgccagagcaggccctacctgctggtgcatgtggaccaagagctgcttatctacgaggccttcccccacgactctcagctcggccagggcaatctcaaagtccgctttaagaaggtccctcacaacatcaacttccgtgagaagaagccaaagccatccaagaagaaagcagaaggtggcggcgcagaggagggggctggggcccggggccgcgtggcgcgtttccgctacttcgaggatatttatggctactcaggggtcttcatctgcggcccctcccctcactggctcttggtgaccggccgaggggctctgcggctacaccccatggccatcgacggcccggtcgactctttcgctccattccacaatgtcaactgtccccgcggcttcctgtacttcaacagacagggcgagctgaggatcagtgtcctgcctgcctacctgtcctatgatgccccatggcctgtcaggaagatcccgctgcgctgcacggcccactatgtggcttaccacgtggagtctaaggtgtatgctgtggccaccagcaccaacacgccgtgtgcccgcatcccacgcatgactggcgaggagaaggagtttgagaccatcgagagagatgagcggtacatccacccccagcaggaggccttctccatccagctcatctccccggtcagctgggaggctattcccaatgccaggatcgagctgcaggagtgggagcatgtgacctgcatgaagacagtgtctctgcgcagtgaggagaccgtgtcgggcctcaaaggctacgtggccgccgggacctgcctcatgcagggggaggaggtcacgtgccgagggcggatcttgatcatggatgtgattgaggtggtgcccgagcctggccagcccttgaccaagaacaagttcaaagtcctttacgagaaggagcagaaggggcccgtgaccgccctgtgccactgcaatggccacctggtgtcggccatcggccagaagattttcctgtggagcctgcgggccagcgagctgacgggcatggccttcatcgacacgcagctctacatacaccagatgatcagcgtcaagaacttcatcctggcagccgacgtcatgaagagcatttcgctgctgcgctaccaggaggaaagcaagacgctgagcctggtgtcgcgggatgccaagcccctggaggtgtacagcgtggacttcatggtggacaatgcccagctgggttttctggtgtctgaccgcgaccgcaacctcatggtgtacatgtacctgcccgaagccaaggagagtttcgggggcatgcgcctgctgcgtcgggcagacttccacgtgggtgcccacgtgaacacgttctggaggaccccgtgccggggggccactgaagggctcagcaaaaagtcggtcgtgtgggagaataagcacatcacgtggtttgccaccctggacggcggcatcgggctgctgctgcccatgcaggagaagacctaccggcggctgctgatgctgcagaacgcgctgaccaccatgctgccacaccacgccggcctcaacccccgcgccttccggatgctgcacgtggaccgccgcaccctccagaatgccgtgcgcaacgtgctggatggggagctgctcaaccgctacctgtacctgagcaccatggagcgcagcgagctagccaagaagatcggcaccacaccagacataatcctggacgacttgctggagacggaccgcgtcaccgcccacttctagccccgtggatgccgtcaccaccagcacacggaactacctcccaccccctttttgtacaaaacacaaggaaaaacattttttgcttgaaaaaaaa

SEQ ID NO: 75474 - DNA, 1441 bp, Homo Sapiens
gtcggctccaactgccagcccgggttggcgccatgtacgccgtgtacaaacaggcgcatccgcccaccggtctggagttctccatgtactgcaacttcttcaacaacagcgagcgcaacctggtagtggccgggacctcgcagctctacgtgtaccgcctcaaccgcgacgccgaggctctgaccaagaatgacaggagcacagaggggaaggcccaccgggagaagctcgagcttgctgcctccttctccttctttggcaacgtcatgtccatggccagcgtgcagctggcaggagccaagcgggatgccctgctcctaagcttcaaggatgccaagctgtctgtggtggagtacgacccgggcacccatgacctgaagaccctgtcactgcactactttgaggagcctgagcttcgggacgggtttgtgcagaatgtacacacgccgcgagtgcgggtggaccccgacgggcgctgtgcagccatgcttgtctacggcacgcggctggtggtcctgcccttccgcagggagagcctggctgaggagcacgaggggctcgtgggtgaggggcagaggtccagcttcctgcccagctacatcatcgacgtgcgggccctagacgagaagctgctcaacatcatcgacctgcagttcctgcatggctactacgagcctaccctcctcatcctgtttgagcccaaccagacctggcctgggcgcgtggccgtgcggcaggacacgtgctccattgtggccatctcactgaacatcacgcagaaaggtgcaccccgtcatctggtccctcaccagcctgccctttgactgcacccaggctcctggctgtgcccaagcccataggtggggtggtggtgtttgccgtcaactcgctgttgtacctgaaccagagcgtccccccgtatggcgtggctctcaacagcctcaccacaggaaccacggctttcccgcttcgcacccaggagggtgtgcggatcaccctggactgcgcccaggccaccttcatctcctacgacaagatggtcatctccctcaagggcggcgagatctacgtgctgaccctcatcaccgacggcatgcgcagtgtccgagcgttccactttgacaaggcggccgccagcgtcctcaccaccagcgtgagttgggactaggggttgggtctgggtccagacccggcccagccatcacacatctgcccttcctcagatggtcacctattgagcaccgaggtacgtgttcgtgggttgtaccctgggcaattccctcttcaccgacggcatgcgcagtgtccgagcgttccacttttacaaggcggccgccagcgtcctcaccaccagcgtgagttgggactaggggttgggtctgggtccagacccggcccagccatcacacacctgccctccctcagatgtcaccaagccaca

SEQ ID NO: 75475 - DNA, 596 bp, Homo Sapiens
  misc_feature (579)..(579): n is a, c, g, or t
tttggtacattaacagaactgtgcaaccattgccattaatttcagaacattttcatcacccaaaaagaaactcctggctgctctgcctatggagtagcccttctttattcctttactttcttaataaacttgctttcacttttctcaatggactctccccaacttctttcttgtgtgaggtccaacaaccctctcttggggtctggatcaggacccctttccagtaacatcttcctggcaaaccatgaagcaactaaactgaggagacccccaacccaaaggaaatagaccgaagcaccacaattggctgactttggaatcaagaaaacttttcctttgagctatttatagcttttaaaaattgagtaaagtatattcctgtgaacaaactttggagcatattagtctctctctacctgttttctctagaatttggaaactatatcaccttttgtcagaactcaagagttatgagtggccctcaccatactgatgctttctgactaagctcctctctactctgaatacaagagcccctcatagttaggcaggaatataattgcccctattcatcctganaaagtgacagaaaatgg

SEQ ID NO: 75476 - DNA, 975 bp, Homo Sapiens
  misc_feature (400)..(441): n is a, c, g, or t
  misc_feature (729)..(821): n is a, c, g, or t
ggcacgaggcgaaggcagacatatgaacaagcaaataagatctatggaaatgaaccgaaggcagacatatgaacaagcaaataagatctatgacaaagccatgaaactggagcaggaatttggagagtactttacagccattgtacagggtgactcactggaagagatttataacaaaatcaaacaaatcattgaggaccagtctgggcactacatttgggtcccatcccctgaaaaactctgaagaatcccctccaaccattctcttgtgaacagaagaaatcaagtccctcttccctcctccctcttcattcctgtccccatggggagaacaaatgctactgttcttgtccccttttttagatatgtcaaaaaaaattaagttttctagtcctgttcnnnnnnnnnnnnnnnnnnnnnnnnnnnnnnnnnnnnnnnnnngggatgatgccatctcattcatcatgtgactgtgcccattcctgcatggacctttcccaagcgctagcacaggtgcaaaatccatcagagccattgttttcataaaaaccaagcagaagtgaagagaaaagaggaggactgatggaaagacagactctggacagctgcacggcttgtgaagtgagctaaatgcaccacatgatgagatgctcctgggcatttctccctatctgtactgctgtcttgcagctctgaacggtgcaacgtaatggcgacagaaagtatctnnnnnnnnnnnnnnnnnnnnnnnnnnnnnnnnnnnnnnnnnnnnnnnnnnnnnnnnnnnnnnnnnnnnnnnnnnnnnnnnnnnnnnnnnnnnntcacacacatttgggttagaaaatctatggagacttcatcaatggtactatgttattagagaaatgctttaattttcatattccaatcagatggcatcttctatcccacctggttggggaaaggattggaagatggtagcaagtgctgcactaa

SEQ ID NO: 75477 - DNA, 1794 bp, Homo Sapiens
  misc_feature (721)..(733): n is a, c, g, or t
  misc_feature (1629)..(1715): n is a, c, g, or t
aggcaatagtgaactatagaaccgctgtgttaaaaacaagcaggctggtaccggtccggatttcccgggatatcgtcgacccacgcgttcgcccacgcgtcgagcaagtgctgcactaagggcactcgcatttggtcattctcttgagagctaggaggggtcagcctgaggccggagaggaagggcttttgcctggggtgagagggtgagagacttgacctgaaatgcagctgctgcccctgaggtgcagccagagtcctgtgtgcggacagagagaatggctaatgatgctccgcgtggaattgcctattgttttatgccacctgatgtgtctgcatgagaggtttcctttttgttcctttttaagctgctgttaaaccaaaaccatgttgtgctactgtgtcagccttttcattattgcaaattttacttttactatttaagtgaatgcatagaatccaatttgccaaggttctaaaggcttatgaggtcctgaaggagccaggccttgtgatggagtaggtgacacaggcctggttgtcctgtcagcagaagggaaagcaggggctgggctgagaggaggacacggagggctctgctgaggttccttcctgggttccaccaacagggacagggagtcacttgccttccagttctgtgctgggatggcgggacagcacttggcttgcttggcccagctgcgtcatgagtctgatttggnnnnnnnnnnnnngcagctgcttcatatgctctgctccagcccctccccaacagctggtagcttatggtttcttcaagaggaaagtagactttatgctgtacatttgagctgtagagctaagattcgcttactggtgagctgtgaaaccttgttgctttttcccagagtctgatggcagtgactgtgatcaagggaatcttcaccgccacaagtgcaggcagcaggtgtggttcaggtccccccccacaccactgtgctcctttgaagccaacgtgcctccctcgcctccatactggagggacgacgcaggggagaacagagaagtgcttggccctaggattgaggcacttgtttcctagcccgctgggttagggctggtgcaagcgaggcaatgttgaggatgctttaagcactaccagccgaatccgggaactctgttaacagttgtccaaccagcagaatgaggctaactgtataaagcatgggacccaggatgaggataaggaaaggacagcggctttccctgggcagtacaatggcttgaaggcaaaaagggataaagtgacagccgactgtgactctggtgaggaggggtgagcagggaggttgattctctgatgttaactaagtggcaaagtctcaaccgtgctcagccctccccctcccagggaagagaaacaaagattcaaagtaagcatgatactagtgggtttaccagtgtttcttccaaggagacatatattttttaataaacgatagttgcaatgaactgtgggctcagagacctttcttaaagtagttggagaagggagggcgtggggcaaagcagtggggaagaacatccccaaacttttggggggccagaggggctctcttccttaatggatgatcaagctagcccgagctgnnnnnnnnnnnnnnnnnnnnnnnnnnnnnnnnnnnnnnnnnnnnnnnnnnnnnnnnnnnnnnnnnnnnnnnnnnnnnnnnnnnnnnntccttccacccccaagcccccaggaacactgggtttccaaatagcccaccaacccaagatggggaggtccccacatcct

SEQ ID NO: 75478 - DNA, 402 bp, Homo Sapiens
  misc_feature (61)..(73): n is a, c, g, or t
cttacaaagaactcctaaatcctgagtaagtgccattcattacaataagtctctaaatttnnnnnnnnnnnnntcatatgaggaaatctagctttcccctttacgctgcgtttgatctttgtctaaatagtgttaaaattcctttcattccaattacagaactgagcccactcgcaagttggagccatcagtgggatacgccacattttggaagccccagcatcgtgtacttaccagtgtgttcacaaaatgaaatttgtgtgagagctgtacattaaaaaaaatcatcattattattattatttgcagtcatggagaaccacctacccctgacttctgtttagtctcctttttaaataaaaattactgtgttagagaagaaggctattaaatgtagtagtt

SEQ ID NO: 75479 - DNA, 685 bp, Homo Sapiens
gaatgtgtcgacgccttccgtgtgatgaaacacactaccccgtcggacttcgaatttctacgtggatgtgcatgaagctcttgttttcgatgtgtgtttgtaaagggaaaattagtactctgctcgactcttggtaacatgaaattctgaatgttactttatcatgattgcactgcaactttttccttaaaataactgcttttgtaagaacggtgatattggagtgattagtataaattcaatggaatttgagaagcaatggcagcgggataatttagagtcactgatattacgagaggggtctttttgtaaacctccttttcaatgtcaaagcaccaatttataaaacgctgcagatgtagaggttatgtgcaactgatctgtccagtttgtgtatgaaatggatttgataaagtttttgctagttatttactacattttgggattaataagtgatttatatgcatatttttctgtaaatctacagttttttgtacaagatattctacaagttatgaagctaagggaagaaaatgccaaagatacctctagttatgttgaacacagccagcacagtttcgacaggtcaaggaagagctgtttcagtaaagaatgaagtgaaaacacttatttaggaaaatgtttctcaacaataaaatgtatagttgtttctgggcttggtaga

SEQ ID NO: 75480 - DNA, 953 bp, Homo Sapiens
cggcaattacaggacgtatgattgttcagaagcactgcctgccggctgtttcctaagcaccacatttcacgggagcaccaggttgagatgatggaattatttacttttaaatgtaacatctcgtacagtgctcaaatgcagacgtgaacgtggactgtaaccttaaaaacaaaggcagtacatgccacactactacccttcctgctcttgtgcgcacacctaccctgatgatgcagccttcactggatatcaaaccatttatgtcttttccagctggacagtagttctgctgttgggctctttccaaattttaacacaatggatcctgtgcaaaaagcggttattaagccatacatttggagtatccattcccccaaagaagaaacaagttatttcttgtaatgtctgtcagcttcgctttaactcagatagccaggccgaggcccactacaaaggaagtaaacatgccaagaaggtcaaagcactagacgcaacgaaaaataaacccaaaatggctccttccaaggacagcgcaaaggctaatcccagctgctccatcacctccaatcacaggcaacaactctgacaaatcagaagatacaagggaagctaaaaagccagcagttccagtcagcccatcaagcctctgaaagctggctcatttctcctcaaaatctggcaaaacaacccatgccacctggagcagccacttctcgcctccaagagcacaaatggagctcccggtactgtgttgaatcagaagaagaaaaagccaaaaaattactttattgttcactatgcaaagtggctgtgaactccctgtcacagctagaggcacacaacacaggatctaaacacaagaccatggttgaagctcgtaatggggctggtccaattaaatcctatcctagacctggatcaagattaaagatgcagaatggcagtaagggggt

SEQ ID NO: 75481 - DNA, 1687 bp, Homo Sapiens
  misc_feature (1122)..(1122): n is a, c, g, or t
agtcattaacagttaggagttgatggcagtttcaataacaggtcattgccgagaaaaggatagcactataatatgcagaaatctacaaattctgatacttccgtggaaacactgaattctacccgccaaggcacaggagctgtgcaaatgagaatcaaaaatgccaacagccaccatgacaggctcagccaaagtaaatccatgatcctcaccgatgtcgggaaggtcactgaacctatatccagacacagaaggaatcattcacagcatatcttgaaagatgtcattcctccattggaacaactgatggttgaaaaagaaggttatctgcaaaaagctaaaattgcagatggaggaaagaaactaaggaaaaactggtctacttcctggattgttctttctagtcgaagaattgaattttacaaagaatccaagcaacaggctctgtccaatatgaaaactgggcacaaaccagaaagtgtggatttgtgtggagcacacattgaatgggccaaggaaaaatcgagcagaaagaatgtctttcagatcacaacagtatcaggaaatgagttccttctacagtcagatattgacttcatcatattggattggttccacgctatcaaaaatgcaattgacagattgccaaaggattcaagttgtccatcaagaaacctggaattattcaaaatccaaagatcctctagcactgaattgctaagtcactacgacagtgatataaaagaacagaaaccaggagcacagaaaatctttaatgttcagactgcatcacagttgcttcccgatacaagcgacaaaaatcgagttaaaagcagattaaagaagtttattacccgaagaccttccctgaaaactctgcaagaaaaaggacttattaaagatcaaatttttggctctcatctgcacaaagtgtgtgaacgtgaaaattccacagttccgtggtttgtaaagcaatgcattgaagctgttgagaaaagaggtctagatgttgatggaatatatcgagttagtggcaatctggcaacaatacagaagttaagattaattgtcaacaagaagagaagctgaatttggacgacagccagtgggaggacatcacgnttgtcaccggagcactgaagatgtttttccgggagctgcctgagccgctcttcccttacagtttctttgagcagtttgtggaagcgatcaaaaagcaagacaacaacacaagaattgaagctgtaaaatctcttgtacaaaaactccctccgccaaatcgtgacaccatgaaagtcctctttggacatctaactaagatagtggccaaagcctccaagaacctcatgtccacgcaaagcttggggattgtatttggacctacccttctgcgagctgaaaatgaaacaggaaacatggcgatccacatggtctaccagaaccagatagctgagctcatgctgagtgagtacagtaagatcttcggctcagaggaagactgacagacaagacaagctactgaatacgttcacatctgtcttgatgcctaatatttttacatttctgtaaacatatttctgaaatattttttgcctttcaagcgacagatgcctcattttgtgaaaacttaatgatgattttgtgtttaagttccaaacatttgaataaaataattgacaataaaaaa

SEQ ID NO: 75482 - DNA, 1626 bp, Homo Sapiens
  misc_feature (86)..(120): n is a, c, g, or t
aaatgtaatagatcactatagggcgctaggcgggtattagtccgaacgaccgagcgcagcgaagtagtgagcgaggaagcggccgnnnnnnnnnnnnnnnnnnnnnnnnnnnnnnnnnnncagtcgacggtaccggacatatgcccgggaattcggccattacggccggggagtggataaaagacctagagaatgtgtatcccagaagaagctggccaaggatatgggagcaaccaccatggaccagaagtctctctgggcaggtgtagtggtcttgctgcttctccagggaggatctgcctacaaactggtttgctactttaccaactggtcccaggaccggcaggaaccaggaaaattcacccctgagaatattgaccccttcctatgctctcatctcatctattcattcgccagcatcgaaaacaacaaggttatcatcaaggacaagagtgaagtgatgctctaccagaccatcaacagtctcaaaaccaagaatcccaaactgaaaattctcttgtccattggagggtacctgtttggttccaaagggttccaccctatggtggattcttctacatcacgcttggaattcattaactccataatcctgtttctgaggaaccataactttgatggactggatgtaagctggatctacccagatcagaaagaaaacactcatttcactgtgctgattcatgagttagcagaagcctttcagaaggacttcacaaaatccaccaaggaaaggcttctcttgactgcgggcgtatctgcagggaggcaaatgattgataacagctatcaagttgagaaactggcaaaagatctggatttcatcaacctcctgtcctttgacttccatgggtcttgggaaaagccccttatcactggccacaacagccctctgagcaaggggtggcaggacagagggccaagctcctactacaatgtggaatatgctgtggggtactggatacataagggaatgccatcagagaaggtggtcatgggcatccccacatatgggcactccttcacactggcctctgcagaaaccaccgtgggggcccctgcctctggccctggagctgctggacccatcacagagtcttcaggcttcctggcctattatgagatctgccagttcctgaaaggagccaagatcacgcggctccaggatcagcaggttccctacgcagtcaaggggaaccagtgggtgggctatgatgatgtgaagagtatggagaccaaggttcagttcttaaagaatttaaacctgggaggagccatgatctggtctattgacatggatgacttcactggcaaatcctgcaaccagggcccttaccctcttgtccaagcagtcaagagaagccttggctccctgtgaaggattaacttacagagaagcaggcaagatgaccttgctgcctggggcctgctctctcccaggaattctcatgtgggattccccttgccaggccggcctttggatctctcttccaagcctttcctgacttcctcttagatcatagattggacctggttttgttttcctgcagctgttgacttgttgccctgaagtacaataaaaaaaattcattttgctccagtaaaaaa

SEQ ID NO: 75483 - DNA, 820 bp, Homo Sapiens
gggagatgaagtgtggctctatcttgtatgtgagcacacccacattttcactgccattatctgggacagcagaaccaggtttggctcaacagatttctctttccacccatctattgcaggtgtagtggtcttgctgcttctccagggaggatctgcctacaaactggtttgctactttaccaactggtcccaggaccggcaggaaccaggaaaattcacccctgagaatattgaccccttcctatgctctcatctcatctattcattcgccagcatcgaaaacaacaaggttatcatcaaggacaagagtgaagtgatgctctaccagaccatcaacagtctcaaaaccaagaatcccaaactgaaaattctcttgtccattggagggtacctgtttggttccaaagggttccaccctatggtggattcttctacatcacgcttggaattcattaactccataatcctgtttctgaggaaccataactttgatggactggatgtaagctggatctacccagatcagaaagaaaacactcatttcactgtgctgattcatgagttagcagaaagcctttcagaaggacttcacaaaatccacccaaggaaaggctttctcttgactgcgggcgtatctgcaggagaggcaaatgaattgataacagctatcaagtttgagaaactggcaaaaaaatctggattttctccaacctcttgttcctttgacttccatggggtcttggggaaaaagccccttaatccttggccacaacagcccctctgaaccaagggggtggccagggacagaagggcccagcct

SEQ ID NO: 75484 - DNA, 269 bp, Homo Sapiens
ggctcgcgagcagatacaggcacaaggcatccccatgtggggtggggaggaaagggttgatcctttccatctaatgtggttctagaaacctcatggattccaggcaagaagcttagcactgtactctgggaaggggaatattgcaccttgtttctttgtttttcctaggagttagcagaagcctttcagaaggacttcacaaaatccaccaaggaaaggcttctcttgactgcgggcgtatctgctcgcgagccgggatcctctagatc

SEQ ID NO: 75485 - DNA, 714 bp, Homo Sapiens
gcgcacagagcccccaggcctcatggcgcagaaacctctcagcaccgcggcggctgaacgcatgaaccttgtgggtcaggatgagatctggaaataccgtctgaaggctgaatcggaagcacggcagaactggccccagaactgggggtttttaacaaccccttttgaggagttgatcaagtgtgaagaagatctccccaccccaaagcccaaaatcgagcttcctgagcgtttccgcatccggccggtgaccccagtggagaagtacatcaaggtctttccatcccccccagtcccacagaccacccagggcttcatcggctggagatctgcagtgccaggcctgaacaagtgcctagagctcgacgatgcgatcagaagctgcaaaggtgcttttgcacgagagctgtgctggcccaagcagggcgtgcactgaatccagacggagttctgcccaggggtgctgcatatcggtcaccaggcacccagggccatgccagggaaaggaagagctcccctgaatcccgaggacacagtcccctgcgtacttgctcatgggatgttgcaaagaacacaaagtgtgccttagacattctcaagtcatcagcgtcacccttccagaatgttcacgtccacacccattcttggctaatgtaatgaataaggcttctctcatttgtttttgataccttgggaatttctatgcagggcttt

SEQ ID NO: 75486 - DNA, 673 bp, Homo Sapiens
tcggctaggtacgaggctgggttgagaattcggcacgaggcgccgcgggctttcttccactgcccgtctgagggaacgctaagtagtgtgtccggcgccgtgttccagctccgcggtgttccgcgagaaagcgagaggccgagcccgggctggtgcgatggccgcggtggtggccaagcgggaagggccgccgttcatcagcgaggcggccgtgcggggcaacgccgccgtcctggattattgccggacctcggtgtcagcgctgtcgggggccacggccggcatcctcggcctcaccggcctctacggcttcatcttctacctgctcgcctccgtcctgctctccctgctcctcattctcaaggcgggaaggaggtggaacaaatatttcaaatcacggagacctctctttacaggaggcctcatcgggggcctcttcacctacgtcctgttctggacgttcctctacggcatggtgcacgtctactgaaatgggggcccgggggacttttttaaaaaaccagatcgggaggactgtggccagcaattaacaccatgtagacttccttagttcttaagtggttgaattcgctgcttgttctgtaacgttataaataatttatatctgaagacggagagcctgtaatattcttcagattacatgaagcgtgag

SEQ ID NO: 75487 - DNA, 943 bp, Homo Sapiens
actagctaggtcaggctggttggaatcggccgaggagcaagatggcgcctgcgggcatttcttccactgcccgtctgagggaacgctaagtagtgtgtccggcgccgtgttccagctccgcgttgttccgcgagaaagcgagaggccgagcccgggctggtgcgatggccgcggtggtggccaagcgggaagggccgccgttcatcagcgaggcggccgtgcggggcaacgccgccgtcctggattattgccggacctcggtgtcagcgctgtcgggggccacggccggcatcctcggcctcaccggcctctacggcttcatcttctacctgctcgcctccgtcctgctctccctgctcctcattctcaaggcgggaaggaggtggaacaaatatttcaaatcacggagacctctctttacaggaggcctcatcgggggcctcttcacctacgtcctgttctggacgttcctctacggcatggtgcacgtctactgaaatgggggcccgggggacttttttaaaaaaccagatcgggaggactgtggccagcaattaacaccatgtagacttccttagttcttaagtggttgaattcgctgcttgttctgtaacgttataaataatttatatctgaagacggagagcctgtaatattcttcagattaaatgaagcgtgagacaaaaaaaatacaaagaaaacaaaggggcggcgggtaaaagatatccgtgcgggggcccaagtttaggcgtatccccgttttttgttcacagtggcccaataggggggcgtattataggcaggccggggcgggttacaaaggctgtcgtggaaactcttccttggctttgggaggaccttcttggcgggcctactggcccccagagttaagccaggaatttaattaagttagttaacaggtttgtggtgattttgttgtatc

SEQ ID NO: 75488 - DNA, 792 bp, Homo Sapiens
accataatgtctgaaccgcggttcctctcgtactgagcagtgtcgaccctggaggaagaatgcctgctgttctaccaacaccagccaggaagcccataaggatgtttcctacctatatagattcaactggaaccactgtggagagatggcacctgcctgcaaacggcatttcatccaggacacctgcctctacgagtgctcccccaacttggggccctggatccagcaggtggatcagagctggcgcaaagagcgggtactgaacgtgcccctgtgcaaagaggactgtgagcaatggtgggaagattgtcgcacctcctacacctgcaagagcaactggcacaagggctggaactggacttcagggtttaacaagtgcgcagtgggagctgcctgccaacctttccatttctacttccccacacccactgttctgtgcaatgaaatctggactcactcctacaaggtcagcaactacagccgagggagtggccgctgcatccagatgtggttcgacccagcccagggcaaccccaatgaggaggtggcgaggttctatgctgcagccatgagtggggctgggccctgggcagcctggcctttcctgcttagcctggccctaatgctgctgtggctgctcagctgacctccttttaccttctgatacctggaaatccctgccctgttcagccccacagctcccaactatttggttcctgctccatggtcgggcctctgacagccactttgaataaaccagacaccgcacatgtgtcttgagaattatttgga

SEQ ID NO: 75489 - DNA, 1009 bp, Homo Sapiens
attcggcacgattgaaggcaagggggagtgtagagcagagcagaagcctgagccagacggagagccacctcctctcccaggaactgaacccaaaggatcacctggtattccctgagagtacagatttctccggcgtggcctcaagggacagacatggctcagcggatgacaacacagctgctgctccttctagtgtgggtggctgtagtaggggaggctcagacaaggattgcatgggccaggactgagcttctcaatgtctgcatgaacgccaagcaccacaaggaaaagccaggccccgaggacaagttgcatgagcagtgtcgaccctggaggaagaatgcctgctgttctaccaacaccagccaggaagcccataaggatgtttcctacctatatagattcaactggaaccactgtggagagatggcacctgcctgcaaacggcatttcatccaggacacctgcctctacgagtgctcccccaacttggggccctggatccagcaggtggatcagagctggcgcaaagagcgggtactgaacgtgcccctgtgcaaagaggactgtgagcaatggtgggaagattgtcgcacctcctacacctgcaagagcaactggcacaagggctggaactggacttcagggtttaacaagtgcgcagtgggagctgcctgccaacctttccatttctacttccccacacccactgttctgtgcaatgaaatcttggactcactcctacaaaggtcagcaactacagccgagggagttggccgtgcatccagatgtggttcgaccagcccaggcagccccaatgaggaggtggcgaggtctatgctgcagcatgagtgggggtgggcctgggcaggccgggtttgctgcttagctgggcctaatggtgttggggttgtcaggtgacttcttgtacttctgtacctggaatcctgcctgttacgccaaggtccactattggtccggccatgggcggggcttggagccctctgca

SEQ ID NO: 75490 - DNA, 923 bp, Homo Sapiens
gccgtttgactggaattgccagaatggcggaccgagccccacgacaacctacctccctgggctcctcgccgcagcgctgcggctcgcctccctctgctcctcctcctccgccggatcgcggcgagcggatcgaggactgcctagcgcccctctgcccaccggtggttggaggccgcggcggctgcgcgttgagtcgtttcctgccggttgacctgagcctacttcgcagtagcaggaccgctgctgtggagctggtcgcaggcggtgtgtgccggtcgcctagtcaggagaactagtcctcgactcacggtgagggaatggaccgacacgggtattgtaccgctgagggaaaggagcgggactccggacctccaggaggtagggagtgaggccagtaggaccggcgcgcctccggggggattcctcccgggcgttgagttgccaacctgggacccgaggaagatcggcgtggtggtgtgctttttgttgttgttaaccctcctcggatttctcgaatttcacaccactgtccatatgcgatgatgtttgtttgcccttgacgcacttactcatggatggtacttcttcagcctcgttagacagcctggtgatggaggatgaagaaaccatgtgcttttcattcagttctggacttagtctcccttttcttccttcagcaagttatttttgttagttccttatcaaaaagtgtacataaaaattaggcaactccaaacatgcctccagggttaatgtgtgaaataataagataatatatgtaaagtggaattagctcctaggcatagggaaagtgcagaatattgccgtgttgtcatttacagttctgttgatgtcgataacgtttgtgggtgtaattggtagtgttctgtccctccaaggagttaataaaacaaagcaaacat

SEQ ID NO: 75491 - DNA, 893 bp, Homo Sapiens
  misc_feature (101)..(101): n is a, c, g, or t
ggaaaacataccccaaagaacctttgcctcttttagctcttttcagccccaattccaaactgcatcctgtggcgttcccttacgccgtgtttatgccctgnttcaaccacttcttcccagaggactccctttcctcagtgctttctctcttatcccagacatacttctcttgaaacttttatctggttcaggaagcgctcatttgtagttttgaaattcttcagccaggttgaagcctctaaaggttggatcaaaagcgctgtttgttgtagctggactgcagaagatcccgacaatttttcacccaaagatgagcatctggaatatgtagtatcagccagtcctgttttgcacagaaatgaataacatggcaaagacttagggtttttcctgttcccttctctccatacagaagatatcgtatagctggataagcaaaactggtgtttttcaggtaatgcagaagttctagggctggtttccttaccatcaggcaagcttcactgaatgtcttcacctgcatcacaaagcgaggaggaaggccatggggaaatacagtctccaaatcctggggggagatgttgtagtgctgaccctcgtgctgatccccatgcttggccgggtcattctcattggtgcgggaaatagctctcggactctcaactggaacctggttatctaggtgagcagcaatgctttggcgagcctgggtccccatgtgtaaaaaaacgcccagggtccaacttatggatcctagagataagccttgttattcctttcagcatcatccttgcacgtgagtcgaggactagttctccagactaggcgaccgacacacgctgcctggggccggctccaaagcgcccgtcctgagactgcaaaaaagggtcccc

SEQ ID NO: 75492 - DNA, 975 bp, Homo Sapiens
aagcaaggctggtaccggtccggaatacccgggatatcgtcgacccacgcgtccggcgctttggagccggccccaggcagcgtgtgtcggtcgcctagtctggagaactagtcctcgactcacggtgagggaatggaccgacacgggtattgtaccgctgagggaaaggagcgggactccggacctccaggagtgcaaggatgatgctgaaaggaataacaaggcttatctctaggatccataagttggaccctgggcgttttttacacatggggacccaggctcgccaaagcattgctgctcacctagataaccaggttccagttgagagtccgagagctatttcccgcaccaatgagaatgacccggccaagcatggggatcagcacgagggtcagcactacaacatctccccccaggatttggagactgtatttccccatggccttcctcctcgctttgtgatgcaggtgaagacattcagtgaagcttgcctgatggtaaggaaaccagccctagaacttctgcattacctgaaaaacaccagttttgcttatccagctatacgatatcttctgtatggagagaagggaacaggaaaaaccctaagtctttgccatgttattcatttctgtgcaaaacaggactggctgatactacatattccagatgctcatctttgggtgaaaaattgtcgggatcttctgcagtccagctacaacaaacagcgctttgatcaacctttagaggcttcaacctggctgaagaatttcaaaactacaaatgagcggcttcctgaaccagaataaaagttcaagagaaatatgtctgggaataagagagaaagcactggagaaaggggagtccctctgggaagaatgggttgaaccagggcataacaccgggtggagggaacgccccaaatgccatttggaaattggggctgaaagagactaagaagggcaaaagtccttt

SEQ ID NO: 75493 - DNA, 1631 bp, Homo Sapiens
ctggaccggtccggaattcccgggatatcgtcgacccacgcgtccgcggacgcgtgggttttttgcagtctcaggacgggcgctttggagccggccccaggcagcgtgtgtcggtcgcctagtctggagaactagtcctcgactcacgtgcaaggatgatgctgaaaggaataacaaggcttatctctaggatccataaggccaagcatggggatcagcacgagggtcagcactacaacatctccccccaggatttggagactgtatttccccatggccttcctcctcgctttgtgatgcaggtgaagacattcagtgaagcttgcctgatggtaaggaaaccagccctagaacttctgcattacctgaaaaacaccagttttgcttatccagctatacgatatcttctgtatggagagaagggaacaggaaaaaccctaagtctttgccatgttattcatttctgtgcaaaacaggactggctgatactacatattccagatgctcatctttgggtgaaaaattgtcgggatcttctgcagtccagctacaacaaacagcgctttgatcaacctttagaggcttcaacctggctgaagaatttcaaaactacaaatgagcgcttcctgaaccagataaaagttcaagagaagtatgtctggaataagagagaaagcactgagaaagggagtcctctgggagaagtggttgaacagggcataacacgggtgaggaacgccacagatgcagttggaattgtgctgaaagagctaaagaggcaaagttctttgggtatgtttcacctcctagtggccgtggatggaatcaatgctctttggggaagaaccactctgaaaagagaagataaaagcccgattgcccccgaggaattagcacttgttcacaacttgaggaaaatgatgaaaaatgattggcatggaggcgccattgtgtcggctttgagccagactgggtctctctttaagccccggaaagcctatctgccccaggagttgctgggaaaggaaggatttgatgccctggatccctttattcccatcctggtttccaactataacccaaaggaatttgaaagttgtattcagtattatttggaaaacaattggcttcaacatgagaaagctcctacagaagaagggaaaaaagagctgctgttcctaagtaacgcgaacccctcgctgctggagcggcactgtgcctacctctaagccaagatcacagcatgtgaggaagacagtggacatctgctttatgctggacccagtaagatgaggaagtcgggcagtacacaggaagaggagccaggcccttgtacctatgggattggacaggactgcagttggctctggacctgcattaaaatgggtttcactgtgaatgcgtgacaataagatattcccttgttcctaaaactttatatcagtttattggatgtggtttttcacatttaagataattatggctcttttcctaaaaaataaaatatctttcttcgccaagaccccctaacagcccccccattccctccctcatccacccactccacccaaccttttcctataccggccccccattcaatatattttttggtggggccgtccttggccccc

SEQ ID NO: 75494 - DNA, 752 bp, Homo Sapiens
gctgctcacctagataaccaggttccagttgagagtccgagagctatttcccgcaccaatgagaatgacccggtgaagacattcagtgaagcttgcctgatggtaaggaaaccagccctagaacttctgcattacctgaaaaacaccagttttgcttatccagctatacgatatcttctgtatggagagaagggaacaggaaaaaccctaagtctttgccatgttattcatttctgtgcaaaacaggactggctgatactacatattccagatgctcatctttgggtgaaaaattgtcgggatcttctgcagtccagctacaacaaacagcgctttgatcaacctttagaggcttcaacctggctgaagaatttcaaaactacaaatgagcgcttcctgaaccagataaaagttcaagagaagtatgtctggaataagagagaaagcactgagaaagggagtcctctgggagaagtggttgaacagggcataacacgggtgaggaacgccacagatgcagttggaattgtgctgaaagagctaaagaggcaaagttctttgggtatgtttcacctcctagtggccgtggatggaatcaatgctctttggggaagaacactctgaaaagagaagataaaagcccgattgcccccgaggaattagcacttgttcacaacttgaggaaaatgatgaaaaatgattggcatggaggcgccattgtgtcggctttgagccagactgggtctctcttt

SEQ ID NO: 75495 - DNA, 939 bp, Homo Sapiens
cagtcgacggtaccggacatatgcccgggaattcggccattacggccgggggacccgacccttttttgcagtctcaggacgggcgctttggagccggccccaggcagcgtgtgtcggtcgcctagtctggagaactagtcctcgactcacgtgcaaggatgatgctgaaaggaataacaaggcttatctctaggatccataagttggaccctgggcgttttttacacatggggacccaggctcgccaaagcattgctgctcacctagataaccaggttccagttgagagtccgagagctatttcccgcaccaatgagaatgacccggccaagcatggggatcagcacgagggtcagcactacaacatctccccccaggatttggagactgtatttccccatggccttcctcctcgctttgtgatgcaggtgaagacattcagtgaagcttgcctgatggtaaggaaaccagccctagaacttctgcattacctgaaaaacaccagttttgcttatccagctatacgatatcttctgtatggagagaagggaacaggaaaaaccctaagtctttgccatgttattcatttctgtgcaaaacaggactggctgatactacatattccagatgctcatctttgggtgaaaaattgtcgggatcttctgcagtccagctacaacaaacagcgctttgatcaacctttagaggcttcaacctggctgaagaatttcaaaactacaaatgagcgcttcctgaaccagataaaagttcaagagaagtatgtctggaataagagagaaagcactgagaaagggagtcctctgggagaaggtggttgaacaggccataacacgggtgaggaacgccacagatgcagttggaattgtgctgaaagagctaaagaggcaaaagttcttgggtatgtttcactcctagtgg

SEQ ID NO: 75496 - DNA, 789 bp, Homo Sapiens
cagtcgacggtaccggacatatgcccgggaattcggccattacggccgggggcagtctcaggacgggcgctttggagccggccccaggcagcgtgtgtcggtcgcctagtctggagaactagtcctcgactcacgtgcaaggatgatgctgaaaggaataacaaggcttatctctaggatccataagttggaccctgggcgttttttacacatggggacccaggctcgccaaagcattgctgctcacctagataaccaggttccagttgagagtccgagagctatttcccgcaccaatgagaatgacccggccaagcatggggatcagcacgagggtcagcactacaacatctccccccaggatttggagactgtatttccccatggccttcctcctcgctttgtgatgcaggtgaagacattcagtgaagcttgcctgatggtaaggaaaccagccctagaacttctgcattacctgaaaaacaccagttttgcttatccagctatacgatatcttctgtatggagagaagggaacaggaaaaaccctaagtctttgccatgttattcatttctgtgcaaaacaggactggctgatactacatattccagatgctcatctttgggtggaaaaattgtcgggatcttctgccatccagctacaacaaaccacccctttgatcaacctttagagggtttcaaccttggctgaagaattttcaaacctccaaatgaagcgcttccctgaacccaaaataaaaagttccaaaagaacgtatgtcttgggaat

SEQ ID NO: 75497 - DNA, 794 bp, Homo Sapiens
  misc_feature (96)..(127): n is a, c, g, or t
  misc_feature (178)..(276): n is a, c, g, or t
tataggtttgagccatcgtgactggcaaaggcttttcctttagctatcagatccctgttaggaaagtaaagctgaggccgggtgcaatggctcatnnnnnnnnnnnnnnnnnnnnnnnnnnnnnnnntgaatgctttctaatccatttctgcttggagccttgaataaacatacatannnnnnnnnnnnnnnnnnnnnnnnnnnnnnnnnnnnnnnnnnnnnnnnnnnnnnnnnnnnnnnnnnnnnnnnnnnnnnnnnnnnnnnnnnnnnnnnnnngtctagacagggtatctaagaatcaccagggtaaagaagaatttttccaatacatttctggttccctaaaaagatattgtctggagaaaatcatgtagttggaaatgtgcttgcgagggattggaggctgtaccttgaaaagtcaatgaatcaactggatttcactttgctacccacaaaatggcaacaacttactgttgcctatttatttcacatggataaatgagtttcaagttatgagtccactgtgagcaaaacgtatgaaaaaaattaaaaatgatacagttattccaactccagtatcagttctccatagtctattggtactcagggcacaaagaatccatgtaaggactacctagcactcaacttctgggagtctagtcacctggttcaggaagcgctcatttgtagttttgaaattcttcagccaggttgaagcctctaaaggttgatcaaagcgctgtttgttgtagctggactgcagaagatcccgacaatttttcacccaaagatga

SEQ ID NO: 75498 - DNA, 611 bp, Homo Sapiens
  misc_feature (594)..(594): n is a, c, g, or t
caggttaataaatgtcctttatttaaaatttaaatacattacattcactaaaacaactgcagaagaaatgtacttaaaattcgtgcctaagttatttcaaagtatttttccataaaaaatataattcagactggcctcctctcaatatgattcacgtgttgttgcaaataggggctatacattttctaccaatgtgacagaaatagtaagcagaatcagttccttatctcacaaaaactatagaattgtactgaacaaaaaagaggttacttactgtaaggtattatgtttcaatgaccatttgtcacttaacaacaataataaatacaaatgaaaataaacagacaattgagccttaaagagaaaaatgagagaaagcaaaacaagaaaactgaactgctgcacacaggaatattaaattgttcttaaacggcttgtaaagcaattcaggaaggataaaggtggggaggggggaatgtgtggttataacactctcatgttattctgtaagctgtcaaatatgagccatctttacctgaagtcatgaacagtgccaaatctacatttaattggtgtacctgaaaaaaacagggngaatggaaccaagttgg

SEQ ID NO: 75499 - DNA, 1240 bp, Homo Sapiens
  misc_feature (22)..(22): n is a, c, g, or t
ctcgcttacattttcacgagcntggtcagcagctctgccatcaggcagctgtgtggacaccttgttaaaggacttgtgcaaaatgtacaccacacttacagcccttgtcagatattatctccaggtgtgtcagagctccggaggaattccaaaaaatatggaaaagctggtgaagctgtctggttctcatctgacccccctgtgttattctttcatttcttacgtacagaataagagtaagagcctgaactatacgggagagaaaaaggagaaacctgctgccgttgccacagccatggccagagttcttcgggaaaccaagccaatccctaacctcatctttgccatagaacagtatgaaaaatttctcatccacctttctaagaagtccaaggtgaacctgatgcagcacatgaagctcagcacctcacgagacttcaagatcaaaggaaacatcctagacatggttcttcgagaggatggtgaagatgaaaatgaagagggcactgcatcagagcatgggggacagaacaaagaaccagccaagaagaaaaggaaaaaataaatgaaatgcctgagttaatgtgaactttggggcttctgcttcatttttacccaacaagcaacaatgccccttgtcctgtagtccacaccgatgttggcatcttggttctgaacccactgaattcaactgcaccttcagttagaaggaatcttcttggcaggtcctgctactgaaaaatggctggccttaggcaagcccttttgcaaaagcacagctgaaagcctgagtttgggagcctgcacccaccccgatgaagctccacgggagcaaatacagagccctcaggcagtgctatggtccaggctgggcttcgtttttccaaggagcctttggggaggtcaattatctgggaaatatccagcgcttcacctgaaagatagtgcaaattggttaggatgccacctcaagaactgtaactgagagctcagaagtgagcaaaggagcttaatgctaaggtcaaaaggagagtgataaggttgagaacaattgccacgaacggtaatgttacatgttaggagggtctgttttctttttatataagtgtgtcttagatatattttaaatagaaaataagctttctgatttacttgtttggtatttaaagcacagtctgtttttctgtcacctatagagtgcaagaatgcactctatagaataaattctctttaaacaaaa

SEQ ID NO: 75500 - DNA, 813 bp, Homo Sapiens
  misc_feature (779)..(779): n is a, c, g, or t
  misc_feature (781)..(781): n is a, c, g, or t
ggtgccatagatgggcgcttctgcatcagcatccatgacgaggttcgctacctggtgcgggaggaggaccgctaccgcgctgccctggccttgcagatcaccaacctcttgaccaggtgcatgtttgcctacaagctgggtctgaatgacttgccccagtcagtcgcctttttcagtgcagtcgatattgaccggtgcctcaggaaggaagtgaccatggattgtaaaaccccttccaacccaactgggatggaaaggagatacgggattccccagggtgaagcgctggatatttaccagataattgaactcaccaaaggctccttggaaaaacgaagccagcctggaccatagcactgcctggaggctctgtatttgctcccgtggagcttcatcggggtggtgcaggctcccaaactcaggctttcagctgtgctttttgcaaaagggcttgcctaaggccagccatttttcagtagcaggacctgccaagaagattccttctaactgaaggtgcagttgaattcagtgggttcagaaccaagatgccaacatcggtgtggactacaggacaaggggcattgttgcttgttgggtaaaaatgaagcagaagccccaaagttcacattaactcaggcatttcatttattttttccttttcttcttggctggttctttgttctgtcccccatgctctgatgcagtgccctagaaggggaaagaattaatgctctaacgtgataaacctgctccaaggcagtggaaataaaaagaagccncnccccaaaaaacaaacaaaccaaacaaccctgt

SEQ ID NO: 75501 - DNA, 1026 bp, Homo Sapiens
gttagggatcttcagaaaggcacatgaggaccacggtttgcctcagtttctggtaaaacacaaggtctggagtgcccctgcaaagggtattgatggacttcctgccagtgacagagcatgtctatgcaaacaattctctcagttacgttcagcacttaagaacggctaatggcaataggatctttagcaactttttcacatcatagaaggtgcaatcgctcacttgggaacactactgagagtgacttctcttttaaaattgagtagcagatgaaaaattaaaatttgaacttgattattaatatcaattaaaatgttttatttattttattaaaagctcaatattttctatgaattcaaaaatacttcagagccaaagccaacttcaaataccgtgaccaaatttacatgattcatattcattatgcattacttggtatacagacttattttcataatgcaaattaataaaatgacacttttactgcactatagaaatattcatgtatgttaaacttttctgattgaggctaactggaaaaagctggggtcgtattctaagtgctaaagaaggctgcttctactgtatagaacccagggctctgaaacagctctagccgcctaatgcacttcacaggtaactccccaaggtaaaactagactctcttgttggttcgcaaagaaaagttaggacttaacacttttttctaaaattttataattcaatttccaaaagtctactctattttatactgtttctacaaaatattccttataaaaacaaagaacaaaaattgaatatttaatgaattgacattttataaccaacctgtttttatctacggtgggaatctttgatgccagaaatttataaagaggttctgtatcttcacaccttgaataagcataataccataaaaaatgacacttgacatgtcaatgtatttgtcatttcattttaaactcgtatttgtggtttttttcccagataaaaatgaaattaaaccatttctttttaagaaaaaa

SEQ ID NO: 75502 - DNA, 1187 bp, Homo Sapiens
  misc_feature (21)..(21): n is a, c, g, or t
  misc_feature (41)..(41): n is a, c, g, or t
  misc_feature (132)..(132): n is a, c, g, or t
ctatcttctccaatcagattntcaacaattttagacatggnacacacgtgtgtgaagtctttattttaatgtaataatctcattacccccacccttactcccttaacttccatgtacttagactcctttatntgttaaataaactagagtattgtcttcttcattagaaggacctaggatgacaatgcggagagtcttggtctgaatctagtgcgactaccacctgccagcttttggggggtatggaaatactatctaaaagttggactgcatgggtcaaatcattatgagacttataaactaaaactttagatacccatatagaaatgtctttgaggcaaaaacaaacctaaagaatgaaggctctttcccttctctgaaaaaaacaaaacactgctcttcacacaaccggaagtcaagaccagagatttggagcaattgtctactaatttggcacaaagatcgtttctttagaaaagtggcattggcttttgaatatgaaatcttctcatagctgcctaaaaaagactagaatgtatatggatatcagaaacctttaataatacataatttatgcaaagataagataaagcaacataacactaattataaaactatttttaaatccccatttttaatgaaaaatatacatttgtatttaatttcctttgaataaaacaattgtaaagtaaatatttgaaatatttctttttgtttatacatgcattttttttgaataatgagataggtgttcttatacagaattgttgagtgttttgctggatacaaacagaaaagcagtgagaccagaaggtctctgggggaggtgacaacccaacagaggaggtggaacatcacagacactggatggcaccatctacaagggcacgtggaaaaacaagtccacatcgtgtcctatggactttggaataaaatacgaataacctatcgcctggcggttcagatgacgtggcatgtggagagacgtgagaacttcttacaggcatggatgaaatacagggagagaagaatcgagactcatccctgaaacatggcaccttccatgtggctactctactccttggggcccgcttctgttatggaccgcatcttaaaaagctccacaggggtagatctgatggctctcataccctcatactttaagttccgagataatcacagaagcc

SEQ ID NO: 75503 - DNA, 418 bp, Homo Sapiens
  misc_feature (297)..(305): n is a, c, g, or t
atacaaatacaagttaattagctctattaagttgcaattttatttttataaagctttgtaaagttatgaacatggaaaccctaagaatcacctaagctttttacataagtaaatttcaagttgacagtctgtccattttgaactatttataattaacaggacacttaacacagtaatatcttagacaaggaagagggcattaattctgcaggcaggtagcaatgaaaatgccaaacctgaacaatcagtcactatttccttatacagtttgagtaaaagaggtagactacagaaagnnnnnnnnngtgaatataaaatgtatcttccccaaatacaactctacttcaataagtcttgaagattaccgatgacatcaacaaaaatgaatgaactcagggaatgagttctttctcccagc

SEQ ID NO: 75504 - DNA, 921 bp, Homo Sapiens
  misc_feature (687)..(687): n is a, c, g, or t
  misc_feature (728)..(728): n is a, c, g, or t
  misc_feature (782)..(782): n is a, c, g, or t
  misc_feature (822)..(822): n is a, c, g, or t
  misc_feature (868)..(868): n is a, c, g, or t
  misc_feature (885)..(885): n is a, c, g, or t
  misc_feature (887)..(887): n is a, c, g, or t
tctgtacacacaacattaatacttaagtgatgtcctgatttaaaatacagcatgattcatgtacagaatactcccattcatctggccatagtgagaacagtgccttcagtccagataattgagagtctttgaaatatacacactttccaatgaattttttatatccttagaaaggagttaaactgttctatcagaattcaaacaaaagataacttctctcacactcataagtcagtgagaatttgacagtgggaattctacaaaagtcagggatttcttaatttttgttgttgcagattatctgagagtataaagtttttaaggaaaaacaatgctcttaagatcctgcttttattaaagtgtctcagctttcattagctaagtagcttcttccttctaggctgcttaaaataagcttaaaaggacccaatttgaacagtttttcccaaaataagtccaaaattaaacacataacattaataaaatagattgatgatttcccacaaaataattttgataaacttggattttggaaatattcttaatggccattctgtctagctgtaaagttaggctgtgctatccaaaagagctttactttagagtcatgagaagcagcactgatctttgcaaaacttaccccaaaaaatggggagagagaaaacaggaagaaaatctcttttctangctacagtcagttacaagtatctagattagatttggaacanagatgcatattaggagtgtacatatcatgcaagtctatgaatacaaataggtanacagttatcatttaagacgatgagcaatctcctatctacngctatctcatcacggacgaggtggttttgcctcgtgccgatctggnctcgaggcaatccctanangagtcgataattctatcatgtcaactgttctgtg

SEQ ID NO: 75505 - DNA, 660 bp, Homo Sapiens
tttggcagaaatctgagactgccaccagacacaaattttagacatgggtatcttccctccagtaattcactgctcagagtaatttagaagacaaaaacagaaaaaattgtaatgattttttaagtgttagaatatgtttgttaacatactctgcaaaataaatttcaactaatgcaatagacttaaaatatagcctatggaatactgtgattgaagtttgaaggcttgctggttcttattttgcatgcaagtttagacagggtaaagaatgtataaatttatttgagatgagatacagtattgtaaaaatataacctcatctagaattgcttttaaaacaagcaaaagcctattttagtacaaatgtagggtgggtagttgttttaaggtagcaaaatacttcaagattttctatctttttaatttttcatgaagacagaagaaatactttcaccccaaccaatgactgtaagatcttgagagtatgttcttactcatttctgtaattgcagtagtgtagtcatctgcatataaatttaataaatgcatgttaaaatttaagttgatgccttttagtcctctcagagtctgtcacagtttctttgtgtaaatgataaaaaagtttgaatttaatcaataaaacttaaaaatcacaatatc

SEQ ID NO: 75506 - DNA, 2833 bp, Homo Sapiens
  misc_feature (2773)..(2790): n is a, c, g, or t
agcggagtaggggctgcgcttggggtttgctgaagctggctgcctctcccagctcccacttttgtggtgcaaatgcgccgtctaggcgggaagacgggggccgggcggggacaggggcacctgcgtagctggactgagagcctgcgcccagcttacatcgacgcccacccggacccggcccgacccgacgcgacccgatccgagtccgatcccattccatccgttcctcgtctcctcccgtctgacccgttgcccggccgtggttcgccacaccaggcatccaaagctgaggtcgctcctacggcctgggctcgccttcgctttagagatgtttggcctcttccctcccaaacagcccatcttcaaaacctggactcttggactggcacctggccacctttccctctaccaagactccacttccgtcttacccacttcttcctcagattcttggtaccccctgggttggagactgctcatttaccttccaaattaatcccagaccccctaaaatattgacaaccttgacaaccccccaaccgaggagccagacttcgtttcggactaacttccatagccctatcatggaggcagtgtacctggtagtgaatgggtgggcctggtgctggacgtgctgaccttggtgttggacctcaacttcctgctggtgtcctccctcctggcttccctggcctggctcctggccttcgtctacaacctgccgcacacggtactgactagtcttctgcacttgggccgcggagtcttgctttcattgctggccttgatcgaagccgtggtccggttcacatgtgggggcttgcaggccttgtgtactctgctgtatagctgctgctctggcctagagagcctaaagctcctggggcacctggcctctcatggggcactgcggagcagggagatactgcaccggggcgtcctcaatgtggtctccagtggccatgctttgctgcgccaggcctgtgacatctgtgccattgccatgagcctggtggcttatgtgatcaacagcctggtcaacatctgcctcatcggcactcagaacctcttttccctggtgctggccctgtgggatgcagtgaccgggcctctgtggaggatgacagacgtagtggctgccttcctagcccacatttccagcagtgctgtggccatggccatcctcctttggacaccctgccaactagccctggagctgctggcctcagctgcccgcctcctggccagctttgtgcttgtcaatctcactggcttggtgttgctagcttgtgtgctggcagtgacggtgactgtgttgcatccggacttcaccctgaggctggctacccaggcactcagccagctccatgcccggccatcctaccaccgtcttcgagaggatgtcatgcggctctctcgcctagcactgggctcagaggcctggcgccgagtctggagccgcagtctgcagctggcgagttggccaaaccggggaggggcacctggagctccccagggtgaccctatgagggtattctcagttaggacccggagacaggacactcttcctgaagcggggcgcagatcagaggcagaagaggaggaggccaggaccatcagagtgacacctgtcaggggccgagagaggctcaatgaggaggagcctccaggtgggcaagacccttggaaattgctgaaggagcaagaggagcggaagaagtgtgtcatctgccaggaccagagcaagacagtgttgctcctgccctgccggcatctgtgcctgtgccaggcctgcactgaaatcctgatgcgccaccccgtctaccaccgcaattgcccgctctgccgccggggcatcctgcagaccctcaatgtctacctctgaagcctccttccctgcctgcccacccctccatgctccacgcaggcactcacgctaggacagcattaacacctcatctccgggtcctggtctgaatcccctcctacccctgtggccatcctgccatacatccaggacattgagttggaagactatgatctgggtgggggcaggataacatggcttctctttacccagtgggtcccttcgatgctgagggtggtgagtatgtcactatgcaagggccctgagactatttgctgtgggctctcctccagcctgcccagggcccacccagatgcctctggggttacccctgtctgcttctggtttttctgttggagatctataggtccttttcctgcctccttcacatttcctccccagcttttgcggccacaacacatcagtgtcatttgggtgttttggcaactcaggggccttcggatgatcttaaacctttgtgttcagccagagcccctgtgccctggtaggcgttggggttagtatctctcgggtgccctcagagccacctctgcctgtgatcgtctgatgaggctccctcccaacctgatccaaaagccagtctcaggagtttacccctgggatgggggatgcatctgcacctgactttggggccacgtgccctgtggcaccccagctcactgggagtctcaggagggataaccggatttctgctctttcccctgtcactcccacatcacacagaaaaatggcattcctctctgtctctccctggcatggagagggcagactgtgcacatttcactagggtccaaatacagaagggcccagggcccaggggcttgcagcttcgtgaggggtctctggcccagtttccaatgaataaagttctcttgacagctctgnnnnnnnnnnnnnnnnnnctcgagactagttctccctcgtgccggaatcgccacccaggcc

SEQ ID NO: 75507 - DNA, 1036 bp, Homo Sapiens
acgtgctgcacgagaggaacgagctcaagtccaaggtgttcttgctgcaggaggagctggcttactataagagtgaagaaatggaagacgaaaaccgaataccccaacccccacccatcgcccacccgaggacgtccccccagccggagtcgggcatcaagcgactgtttagcttcttctcccgagataagaagcgcctggccaacacacagagaaacgtgcacatccaggagtcctttggacagtgggcaaacacccaccgcgatgacggttacacagagcaaggacaggaagccctgcagcatctgtgaccttggcccatctccaccctccaacctggactgcccgccaccagcgcctgcaaccgaactgcagcccaggggtcattgctgcctcaagcctctcggtgcagatgcaccctgaaaactgacccctcaaacagactgtctgatttgaggatggacattgaaaaactgacgccaaactctaaagaaatgtttatttatacccagggctatcactgtttctaatagatgactctgatcccgtaggatatatatttaataatcccacaaacggaggccagacttctgcgttaacttcagtaacacaagcttctttaagccaaatacatcacttgccactatcattgctgtttgacttgctttgtataaaatgctatgtgtagaggttttattatcacaggtgacatagttcagcaggaggcatggaagggctagatcttcattagttacattcatgaaattgtgatggtaacgtattatacagaatgtatccatcaggcagacaaggggtctgaagtcacaggctcagtagcccaactcagacacaaagccacagacaatatggatgatggtcctcttacccagaaactggagacaactttgcaggcaccctggctgcgttcctgataatgcctagagcatgtagcaatgttcaaggcaggtgccttggaatctgctgtgagttatgcagtactaaccaaacaaagttgctaaggatgagatgttgcaac

SEQ ID NO: 75508 - DNA, 760 bp, Homo Sapiens
tgagccccagaccctgaaaattgttcggacagcagaactttcgcctttcattggtgtccattgcacctactgaccagggcactcagacagaagccctgcagcagctgcagaaggactctgaggccatccgcagccagtacgctcactactttgacctctcactggtcaataatggtgttgatgaaacccttaagaaattacaagaagccttcgaccaagcgtgcagttctccacagtgggtgcctgtctcctgggtttactaagcttgtagaatgggggaacccactgtatgcccctctccagcatttggaattccacccgccttgctttaagacaaacagggctgctccaactagttttgtgtcagcttccagctctctgcagctatcctaattcagccagtaaggttcagtcttcttgctcaggctcctgaagggttgattctcctgatagatggggccccactgatctggatttgaaaaggatttctagaaattgggggtaagaagtactaccaaaatgtaactgctaatcaagggtgatgcacagcaaaagcaatggaccccatccctctaaagcctgccctcctttgccttcaactgtatatgctgggtatttcatttgtctttttattttggagaaagcgtttttaactgcaactttctataatgccaaaatgacacatctgtgcaatagaatgatgtctgctctagggaaaccttcaaaagcaataaaaatgctgtgttgaaatgccaaaaaa

SEQ ID NO: 75509 - DNA, 1020 bp, Homo Sapiens
ggcctcacttccctctggctagcccacccctgcactctctctcattgccgctgccactatcacctgtctctctgccagctgatgtgccctgttgccccccaccccatcccgcacagaaccatccctgcattccacaggggactcgggcaagggtgccgaagatagacaagaggcacacagagacagaccaactggcagccaggcagccccagaggagagagacattcagacagaggaaagtctccctgcccctcattccttccaagatgagaaaaacttgccgccaccccccgacactgatgccagggaggtgggaggaagaagtgggaaatttcccttcccagtacccccaagaacgtctgagccttcaatgttgaattttttctttattaaaattacttttatcttataaaatcaactaatcaaaaatgatatagacgacagcactggctctgtgaaggtggcatctttctgggcaggcaggccatggggcatggaggagggtgcaaagatatgggttgctgtcttctggcctccagctgcatggaggccggcccagggtctagggtgtgcactgggcaagggcagggcggcaggtgtcaggccggcttggacaatgaaaccctgaccttgctgcattccttttgcttccaccaccactagcttctttggaatcttggggtgggggtcatctttggggattatggctgccacccgggatttgagtgtagggagtgtgggagcagccttggcagatggggcacccgtgccctgcaggtgttgacaagatccgccatctgtaatgtccttggcacaataaaaccaaatgtcagtttccctgagcgactctgttctgtgtggggcaggggttgggcgggcctctgggcagaggatgcaatggcacggaccttggcttgacctcagaggtgtgaatgctctccagcagggtctgtctgggggcctggagtttgtatttgatttgctgcttattaaacctccttctggacctattgccactgg

SEQ ID NO: 75510 - DNA, 985 bp, Homo Sapiens
tatagctagtacgagcctgggtgtttaatcggcacgagggctgacagaacatgatggaccacggacaccaccaggccttccagatctgaaatgcaaacaaggaaacagaagcttctaggcatcagaaggtgtggggagcagcacagtactcagaggagtgaggagcgtggcgcctgctgggaggaagggctggccatggtatgttcttggatttctggcagcagccctcattggtccacgtgcgtccccactacagactccttgacttgagccagcttgagtgggtctctactcttttctattgtgttttggcacttggctgcttcctggccaagtcgcacctgactgcattgaacacctgttcaaacgtgtgttctctgttctctaagatgggtgaaagtcgatgccttctagtctcagtgaatttaacctggtgattttatgtctacgtatattgttcctttactgaacccaccacatgcgggccataaaatgagtgaaatcacagtgcaccctgttctattatttttgaagtgtttcacgatttccagcatgtccatcagatggggggattgctaacttctctcttactcatgtacttacattctgtagttctcattgcatcactttggatgtttactttgaaaagcagaaactgtctctttaaacttggccctcaatgtcatttgcgtatctctgagaacaatagctatgtcccaacccagtttgtatttccgttggtttgttggcacttttttctcattcccccatctcattaccttgtctgttttctggcactcactataatcagccttgcactagagctgtttgtggacttggcttcaccccctcctcctcagccctcccccacccattaaattgtgagctcttagaagacaggggtggcctttcatgtctgatcccctaccaaatctagcacagtgccttgcatcaagtagatttcaataaatatatgttaaatggc

SEQ ID NO: 75511 - DNA, 629 bp, Homo Sapiens
tctacccagatttaggatcgtggcgcctgctgggaggaaggcctggccatggtatgttcttggatttctggcagcagccctcattggtccacgtgcggccccactacagactccttgactagagccagcaggagagcggctctactctttgctattgacgtgttgccacttggatgcttcctggccaagtcgcacctgactgcatgaacacctgttcaaacgtgtgttctctgttctctaagatgggtgaaagtcgatgccttctagtctcagtgaatttaacctgtgattttatgtctacgtatattgttcctttactgaacccaccacatgcgggccataaaatgagtgaaatcacagtgcaccctgttctcttatttttgaagtgtttcacgatttccagcatgtccatctcattaccttgtctgttttctggcactcactataatcagccttgcactagagctgtttgtggacttggcttcaccccctcctcctcagccctcccccacccattaaattgtgagctcttagaagacaggggtggcctttcatgtctgatcccctaccaaatctagcacagtgccttgcatcaagtagatttcaataaatatatgttaaatggcaaa

SEQ ID NO: 75512 - DNA, 2480 bp, Homo Sapiens
  misc_feature (2196)..(2196): n is a, c, g, or t
  misc_feature (2200)..(2222): n is a, c, g, or t
caggaacttgcacggtgacgtgcgccgctgccaggaccttgcaggtggagagcatagttgcccaaatcaaggcggaggagcgcaccgccgctaggatccaggcggagaagcccaccgcggccaggacctaaggatgcagtacactgctgccaggatcttgtctgtggagcgcagcgcgggccaggacctccggctgcagcacaccgctgccaggatcttatcggcagagcgctccgcggtccggaccccgccccgtgcgcgtccccgaccccgccccgtgcgcgtccccggcgttggcgtcttcgtcctgttgctggtctccgtccggtcgccggccgtctaggtctccggccctccccagccgctcctgcgcccttgccggccccgccgcccgcagccctggcgctccctgcgggccccgccgaggccgcctgcgccctgtgccagcgcgcgccccgggaaccggtgcgcgccgactgcggccaccgcttctgtcgggcgtgcgtggtgcgcttctgggccgaggaggacgggcccttcccgtgccccgagtgcgccgacgactgctggcagcgcgccgtggagcccggcaggcccccgctcagccgccgccttctggcgctcgaggaggcggccgcggcgcccgcgcgcgacggcccggccagcgaggccgcgctgcagctgctgtgccgcgccgacgccggcccgctctgcgccgcctgccgtatggctgcgggccccgagccgcccgagtgggaaccgcgctggaggaaggcgctgcgcggcaaggagaacaaggggtctgtggaaatcatgagaaaggacttgaatgacgcccgggacctgcatggccaggcagagtcagcagctgcagtgtggaagggacacgtgatggaccgtaggaagaaggcactgaccgactacaagaagctgcgggccttctttgtggaggaggaggagcatttcctgcaggaggctgagaaggaggaggggctccctgaggacgagctggctgacccccactgagcggttcaggtcactgctgcaggcggtctcggagctggagaagaagcatcgcaacctgggcctcagcatgctgctgcagtgatggcgccaacccgtggcagtcacagagctggaggcaggaggatggatcctcatctccatgggaagtgtcagcgtgtggctgccagggaagcgtggcaggcgcctggcctagggtccatctacatagttgcgtgtttcaacaatgtccatttatccttcaccccgaggcgtgttttgggggctgcaaacacctcccggtagaggctggacctgaggacccttcccacctgtgcccgtccattcctgaagtcctagccacagcccatcctccatgagtcccggcagctctgggtcatgcccttccatggtcaaccatctgcccctcaccttgtcatccagggacccagaccctgcaccttccatgtgggcccacagatccttggcaggtacctgaggtgcaccattgagtgtcggatttggggttagcatccagaaagaagaatgcgcatgacgctctgtgaaggctggaactcaggtcttcagggagagaaaggaagactggattgcaccttgatgcctcctgaggaggcggcccccctcttgaggtgggcgtgggcccggcccagccttatccaagtcgctctgtccacctcccccttcctggcccccaccccactcctgtgcctcccaggagccctccctgtgctccacctgcctccgcagaaggaagcctctttctctgtttccctgggtgagggggctggcaggtggctaaccccatttagcatctccaggccctgccatggtgtctcatcttgctgttatctctagctctttccctcctcccatttcctttagtagttgaattttgcaaagcttgtagcagtagctcagttgcctgcagcatccttgtgtgtagataaattagtcgacagaaactcagcactggggacaggattgcaaagtcggggacatagatgcagacagttgttgagatttggggatagccgggcttgtgagcggtgcccatttccagatgaagcctttcagcccttctgagtccccggcccttggtgcgatgtctgtgagtttgacctgcccagcgtgtgggctggctcaatgctgaataaagtgggtttgtgtcaaaancccnnnnnnnnnnnnnnnnnnnnnnnaaaaagggcgggccgctctagagtatcccctcgaggggccccaagcttacgcggtacccagctttctttgtacaaagtgggcccctataggggagcccgaattataagctaaggcactgggccggtcttttttaaacgccctggactggggaaaactggctaccttgggaaatctttgggaaaggaacccttacttcttggggggtggaccttaattgggaacaacttcccttcacgaaattttaaagcctcttaggg

SEQ ID NO: 75513 - DNA, 986 bp, Homo Sapiens
  misc_feature (484)..(503): n is a, c, g, or t
  misc_feature (505)..(509): n is a, c, g, or t
  misc_feature (511)..(529): n is a, c, g, or t
  misc_feature (546)..(550): n is a, c, g, or t
  misc_feature (817)..(817): n is a, c, g, or t
ttttgcaagttaaattacatttattatataaagagatcctataacttgatacgaaaaacaaagcaactccaacagataacagaagggcaaaaggacaggaacatctgatcaaagaaacacagctaccgatagcacacaaatattcaacctcattaataatcaaaggattaggatgcacttcttgcttattcaataaagttaataatttctaatttttctacttttcaaatgtactcaaatgtgctatttttagtaataaaaaactgagtaattaaaaaaacatagaaagtatgaaaatttctgccaatgcagaaatcataaacagcattaaaatgaatcaacacttgtatgggcagtaaggttcagacccctagaagccaattcattttgccttggttcctgagttttattatgggattgtcaataaggagaaagttgttcctgatttacatgctgacaatcttccaggtaagggtggtgtgtnnnnnnnnnnnnnnnnnnnnannnnnannnnnnnnnnnnnnnnnnntttttttcctcaaggtnnnnntttattccaagaaaagtacctctttcagaatcactcattacagagaaatcctggtaactccatttgctgataaaagtcccattaaaaattaccatgttggttctcaaccaatagggatacctttggcattgaaaaagctgagggttgattttagtactgcttggaagaccatagtgttccaaaggctctgtagctggcttctttgggaatctgaagttggtcctgtccttgagacatggccaaaagacattttcctcactgaggcanaaaaatgtatctctgcttgccaatcaagctccaggaatacaagtcaggtcacatggcggacagacaggcagacccaatacctctgctcatctggcctcaggcattcccaaggagcgataatccaacaggcaactttctgggatttttcgtcaatccacaaaaaacgaga

SEQ ID NO: 75514 - DNA, 1555 bp, Homo Sapiens
  misc_feature (970)..(1019): n is a, c, g, or t
  misc_feature (1244)..(1256): n is a, c, g, or t
cacatacccagctgacatgggcaccgcaggagccatgcagctgtgctgggtgatcctgggcttcctcctgttccgaggccacaactcccagcccacaatgacccagacctctagctctcagggaggccttggcggtctaagtctgaccacagagccagtttcttccaacccaggatacatcccttcctcagaggctaacaggccaagccatctgtccagcactggtaccccaggcgcaggtgtccccagcagtgggaagagacggaggcacaagcagagacacatttcaaactgttccccccaattcaaccaccatgagcctgagcatgagggaagatgcgaccatcctgcccagccccacgtcagagactgtgctcactgtggctgcatttggtgttatcagcttcattgtcatcctggtggttgtggtgatcatcctagttggtgtggtcagcctgaggttcaagtgtcggaagagcaaggagtctgaagatccccagaaacctgggagttcagggctgtctgaaagctgctccacagccaatggagagaaagacagcatcacccttatctccatgaagaacatcaacatgaataatggcaaacaaagtctctcagcagagaaggttctttaaaagcaactttgggtccccatgagtccaaggatgatgcagctgccctgtgactacaaggaggaagagatggaattagtagaggcaatgaaccacatgtaaattattttattgtttcatgtctgcttctagatctaaaggacactagcattgccccagatctgggagcaagctaccaacaggggagactctttcctgtatggacagctgctgtggaaatactgcctgcttctcccacctcctcagagccacaggaaagaggaggtgacagagagagagcaaggaaagtgatgaggtggattgatactttctactttgcattaaaattattttctagnnnnnnnnnnnnnnnnnnnnnnnnnnnnnnnnnnnnnnnnnnnnnnnnnncaaaatttcccctgcggaagggccccaagcttataaggccgatcacccgactttttgtgtgtacaaaggggggccccctatgaggggagaggcgcgtttattaataacgccagaggccaggggccgcgcgcgttataaacagcgttgtgctgacgtgggaccaaaaccggtgctaagacgtcggggagaaccttgtgggggaagaggacaccttataattgcgcnnnnnnnnnnnnnacaacaatatatgtgggggagacaaaacttacactcttagctagagagagattttaaaaggcgcgcctccgatagggggagaacaattatataaacaagttttttacaaggggttggtatattacgtggggtgggtgaaaaaaacatcaagtagtgcggagaaattatttgagctgcgggcgccggaggtcttgagaaaaaggtatttggggaatcagaccgacaaggaatcatgagtctttatgatggagacacatctttttattaacaacagagggaggctatggttgtatataacc

SEQ ID NO: 75515 - DNA, 1094 bp, Homo Sapiens
  misc_feature (677)..(677): n is a, c, g, or t
ggtagggacctgtgactccttaataaggacctgtgacatgcccagcatcaagggataagaccgtaaattcacatatatgccatctgtcctcaagtgttatctacataggaaataaaatggaattgatgtaaagttccatttctgacagctgacatttattaaactttggatcaaagataatgtgattcttatgattgatttctcaaactagcttttccctcccaagtccaggacccattaatttcctgagccaatcagaaatatatttttcaataatgctaaaattagctacaattctgctgaccctactattaaagaatctggatgctggactcactgacaagctttccagaagcaattttataacagatttcattttaacaaaatactgatccaattttcattattcttgagaaatgtcagctgtgccttaatgagtatttgctttaaatttctaagaatttatatcataactagagacccaaatatctttcacagaattgtgttccataaatgtttttcttaattattaagaagtgttaccttattaaaatgaccaccattctaaaccatttttcagtggtctggatacgaagtttacagtttcataccaactatctaaaacctaattgcaaaattgaccacagacctctaacctccctacttttatagacttngaatacttaagtaatttaaattagggttggtatttcatttttttcttatctaaatcttagtttcctggaataataaagtttgatgttcagcaagagaactgcttgagtttaagccattttcaaaagaaacttgccttttacattattgtgttccagaacattaagtgactgtaggtactgggtattagtgatggtaaactttgtgttgctctttatgaaatgatccatataactgttgggtgcatcagtgcttttcaaaggggctgcttactatagggttaactatgtatattcattgttaagagttaacttgtggtttggctgtttcctggattttataacatacatgtgcagaaatgtattcaaatgaaaggaagcatacctttatcaagatgctattaaaattgaacatcaagt

SEQ ID NO: 75516 - DNA, 719 bp, Homo Sapiens
tactctagagcggccgcctggtgcagtaccgcggcgaggtgcaggccatgctcggccagagcaccgaggagctgcgggtgcgcctcgcctcccacctgcgcaagctgcgtaagcggctcctccgcgatgccgatgacctgcagaagcgcctggcagtgtaccaggccggggcccgcgagggcgccgagcgcggcctcagcgccatccgcgagcgcctggggcccctggtggaacagggccgcgtgcgggccgccactgtgggctccctggccggccagccgctacaggagcgggcccaggcctggggcgagcggctgcgcgcgcggatggaggagatgggcagccggacccgcgaccgcctggacgaggtgaaggagcaggtggcggaggtgcgcgccaagctggaggagcaggcccagcagatacgcctgcaggccgaggccttccaggcccgcctcaagagctggttcgagcccctggtggaagacatgcagcgccagtgggccgggctggtggagaaggtgcaggctgccgtgggcaccagcgccgcccctgtgcccagcgacaatcactgaacgccgaagcctgcagccatgcgaccccacgccaccccgtgcctcctgcctccgcgcagcctgcagcgggagaccctgtccccgccccagccgtcctcctggggtggaccctagtttaataaagattcaccaagtttcacgcaa

SEQ ID NO: 75517 - DNA, 1088 bp, Homo Sapiens
cgcctcgggagctggatggtctcgcctctccctccccccaccccgtgccgggtgcgcggcctgggagtcagcggcccgagcgggaagcgccgggcgagcccactgtgcggccgtcgtgggggaagcgaaggttcctgattccacctacctcctaagtgaaggcttccgtccctggagaggaggcggcgccctgtatcggccttcgtcctccgcgggtgtgctagcgttgggacggtcctttgttgccgcgaggggtaggagtgggcgtggcggagccagctccgttcggaacactcccgggccgacccgactcgctcatcctgcaggagctgcggcgccaagatgagtggagaggagaacccagccagcaagcccacgccggtgcaggacgtacagggcgacgggcgctggatgtccctgcaccatcggttcgtggctgacagcaaagataaggaacccgaagtcgtcttcatcggggactccttggtccagctcatgcaccagtgcgagatctggcgcgagctcttctctcctctgcatgcacttaactttggcattggtggtgacggcacacagcatgtactgtggcggctggagaatggggagctggaacacatccggcccaagattgtggtggtctgggtgggcaccaacaaccacggacacacagcagagcaggtgactggtggcatcaaggccattgtgcaactggtgaatgagcgacagccccaggcccgggttgtggtgctgggcctgcttccgcgaggccaacatcccaacccacttcgggagaagaaccgacaggtgaacgagctggtacgggcggcactggctggccaccctcgggcccacttcctagatgccgaccctggctttgtgcactcagatggcaccatcagccatcatgacatgtatgattacctgcatctgagccgcctgggctacacacctgtttgccgggctctgcactccctgcttctgcgtctgctggcccaagaccagggccaaggtgctcccctgctggagcccgcaccctaagcatcctgctgccttcccacaacattaaactctccttcctcagaaaaaaa

SEQ ID NO: 75518 - DNA, 859 bp, Homo Sapiens
  misc_feature (21)..(21): n is a, c, g, or t
cggctaggtacgaggctgggngttgaattcggcacgagggcgggaagcgccgtgcgagcccactgtgcggccgtcgtgggggaagcgaaggttcctgattccacctacctcctaagtgaaggcttccgtccctggagaggaggcggcgccctgtatcggccttcgtcctccgcgggagctgcggcgccaagatgagtggagaggagaacccagccagcaagcccacgccggtgcaggacgtacagggcgacgggcgctggatgtccctgcaccatcggttcgtggctgacagcaaagataaggaacccgaagtcgtcttcatcggggactccttggtccagctcatgcaccagtgcgagatctggcgcgagctcttctctcctctgcatgcacttaactttggcattggtggtgacggcacacagcatgtactgtggcggctggagaatggggagctggaacacatccggcccaagattgtggtggtctgggtgggcaccaacaaccacggacacacagcagagcaggtgactggtggcatcaaggccattgtgcaactgggcctgcttccgcgaggccaacatcccaacccacttcgggagaagaaccgacaggtgaacgagctggtacgggcggcactggctggccaccctcgggcccacttcctagatgccgacctggctttgtgcactcagatggcaccatcagccatcatgacatgtatgattacctgcatctgagccgctgggctacacacctgtttgccgggctctgactccctggttctgcgtctggtggcccaagaccatgccaagtggtcccctggtggagccggacctaagcatcctgtgcttccaca

SEQ ID NO: 75519 - DNA, 674 bp, Homo Sapiens
ccacccaggtccacctgccacctggtgaccaccttgagtacagaagtgaaagtggcgagagtattttattcaagtcacagcagaactggaaaaaaactcttctgttttaccaacttcttgtgtttcagaaacatattctgttcaaaacttttgaagccctttcggtgtctagtctgcagatgtttttgtatgtgtgcacctctgaccatgtgtgtacatatgtgtcttgctggaaaggacatattcgctgtccccgtgctgctgggagggccgcctcacagcctcacggttcccagccccagcacagtggaggcaggcgtggctgcattcccctcacgctaccctcccagcggcttgtagccgtcactggccagacctccagggtgcggaatcaaataggaagcatgcagagactcggcagcttttcctctgatgtgtaagttatttggaacgcgtgctgtgtcccgcgatgtccctgatgtactgtgcaggcgcggtgcctccgtctcgtcgcacagctgcgcgcccttgtgtgaccctccccataaaggcactttacagcttcatgtttcatccactgtcacttttttttaactgctgatgtaaatggaattttaaaagcagagttctttattgtatggatgacgtttgaataaatatcagcaactcctgcc

SEQ ID NO: 75520 - DNA, 648 bp, Homo Sapiens
agtcttacatgtcaaaagaattaacaggattgtagcaggtgtttagtaagtagaggttaaaccattctatttcaggaactagcatttaggaagcatagcacttactgtgcaacaagagccctctggccatccctgttttacaggtcttagagaatggagggcagctaggaaggagccaaatgggactcctctcagatctgctggaaggcagagccctgctccccggcacagaccacactgccttcctccctggagtgtgcagttggaagcaccagatgctctagcagcatccagagagatgccatctgtgagggaaacctattcttagagagcagagacagtcggtagcggagttggccaacccccagcagcagtggcgggacttcaggagggcaggcggccaaggtttcaccttcagctgggggcaggacaggctaaaagcagggtgtgctcagtcctcaggggcacacttcctctacatttggatgctcttagaaataacagcatttattggggactcactttaactgtgtcatattctttaaccctccacaccactcgatgaggtgtgtgctacgacaacgcctactttatcaatgaggaaatagaggcacagaatggctcagtcacttgcccaaggaaactgtg

SEQ ID NO: 75521 - DNA, 1125 bp, Homo Sapiens
gatgacccatctgttgcatcccggctgctgataaaaaagaccctcggagccaagaaacaacactgagttccagatttcggaaggttcacgagtgttgccgacacgccctcccaactgcagacatcctccctggaggacctgctgtgctcacatgcccccctgtccagcgaggacgacacctccccgggctgtgcagccccctcccaggcacccttcaaggccttcctcagtcccccagagccacatagccaccgaggcaccgacaggaagctgtccccgctcctgagccccttgcaagactcactggtggacaagaccctgctggagcccagggagatggtccggcctaagaaggtgtgtttctcggagagcagcctgcccaccggggacaggaccaggaggagctactacctcaatgagatccagagcttcgcgggcgccgagaaggacacgcgcgtggtgggcgagatcgccttccagctggaccgccgcatcctggcctacgtgttcccgggcgtgacgcggctctacggcttcacggtggccaacatccccgagaagatcgagcagacctccaccaagtctctggacggctccgtggacgagaggaagctgcgcgagctgacgcagcgctacctggccctgagcgcgcgcctggagaagctgggctacagccgcgacgtgcacccggcgttcagcgagttcctcatcaacacctacggaatcctgaagcagcggcccgacctgcgcgccaaccccctgcacagcagcccggccgcgctgcgcaagctggtcatcgacgtggtgccccccaagttcctgggcgactcgctgctgctgctcaactgcctgtgcgagctctccaaggaggacggcaagcccctcttcgcctggtgagccgccccgcgcccgccgccttgcctgcagtaaacgcgtttgttccaacccggggccgcggtgcctcctgcgcgtccccccggaggggaaagggccgcgtcccccgcgcgcgaggccagagaaggccccgctcccaccggtgctgggccccgaccgcagcccgccgctgcccgcacctgcggagtgcttctcacccctcattaaaatcatccgtttgcttgtcaaaaa

SEQ ID NO: 75522 - DNA, 895 bp, Homo Sapiens
tggtacggccggaatcgtaggatcaagggcgggcagaagttggaaacatgcggctgtcggtcgctgcagcgatctcccatggccgcgtatttcgccgtatgggcctcggtcccgagtcccgcatccatctgttgcggaacttgctcacagggctggtgcggcacgaacgcatcgaggcaccatgggcgcgtgtggacgaaatgaggggctacgcggagaagctcatcgactatgggaagctgggagacactaacgaacgagccatgcgcatggctgacttctggctcacagagaaggatttgatcccaaagctgtttcaagtactggcccctcggtacaaagatcaaactgggggctacacaagaatgctgcagatcccaaatcggagtttggatcgggccaagatggcagtgatcgagtataaagggaattgcctcccacccctgcctctgcctcgcagagacagccaccttacactcctaaaccagctgctgcagggtttgcggcaggacctcaggcaaagccaggaagcaagcaaccacagctcccacacagctcaaacaccagggatttaactggatctgaagagtctgcagcccttaatcagtacccatgatcacaggcctttggagcacttttactctctgagaagaactggagctagagatgtaaaatggacagtcttgatggggttgagaaccttctggggagccagatgaccctctctttgcacaatagataaaagtctttatatgaatatatataaatttatttattttttccttcctgtgggatttctggagaatgagaattatccaaatgctcagtctacctgagatagtaaattcatggcttatgcttctggtccttaaatttgggttatttttggttagtg

SEQ ID NO: 75523 - DNA, 1455 bp, Homo Sapiens
  misc_feature (647)..(702): n is a, c, g, or t
  misc_feature (815)..(826): n is a, c, g, or t
  misc_feature (866)..(874): n is a, c, g, or t
  misc_feature (905)..(917): n is a, c, g, or t
  misc_feature (945)..(954): n is a, c, g, or t
  misc_feature (965)..(1004): n is a, c, g, or t
tgcagccgctcatggattggagcagtgtgatctggcgggaagggcccatcccgttggtcgaggcctgacaggcgcttagcgggcgactccctccccattggccgagttatggagcgctccgaccagacagcgtatcattgaccaaagatgggagggttccgcttaaagaccgcctcttactggccaggagtggacttggttagggctaccttctcattggttgcagccagaggcacttctgcccgggctgcctctcccccgctagggcctggtgcctctggctggaggctccctcccttggccgtcccaatagagcccggggctacttccactggccaggctcccgggcatctggttgaccccagcctggggaggagggctggtctccgctcctcaggggcttagtccgtcccaccccttcccttccctggcgccccgggcccaggcccctcagctgtcagctggttttgatggcctcccactgccccacacgccgcgggacctccaggggcgactctagtggcctgaggagatgtatttataggcccccagcagggctgctcccccctcggccggtgccccaggatgggctcctcccggcgggggcttggccaaagctttcttaataaaatgcctttcccctcatnnnnnnnnnnnnnnnnnnnnnnnnnnnnnnnnnnnnnnnnnnnnnnnnnnnnnnnngacccgcacaaaaaatcccacaaacgccaacgcccaaacaccgataatatacggaccccgaaagaccccttttccaacccccccgatctgggcgccgcgtttttgtgtggggnnnnnnnnnnnntaagaaaatttccccgaaccttcttttttgggcgcccggnnnnnnnnnagaaccagacaaatggggatacctttccttnnnnnnnnnnnnngtaccacgagaacaaggtccttagtttnnnnnnnnnnacaaaaacctnnnnnnnnnnnnnnnnnnnnnnnnnnnnnnnnnnnnnnnngaggggttcccggacccgttcctctttgtcgcccccctcttcacgcggggggcccgtttccgccgggccgcttaccccttctcatttccgcgcccccgcccggcctttccccgcttgcgcccgcaggggaagagaggtgtggcgcgtcccccatccaaatgccccccacgcggccccgggtatggcgcgccccttcctatacgcgcgggggcgcagagaaccgcaccagggccgcgggaacgcgcggtttttccatattgtggggaggccaccccgcgttaattaaattttcctccaccgccggtgggtaaaaaacacggcgccccctcaccgataacattccccctccacttttcccgccgcattaatatatcaaccccgaagtgcgccggccacaccctcccgcccgcccgtttgttttctgcgaaccaatatacccgcctttcttgcc

SEQ ID NO: 75524 - DNA, 667 bp, Homo Sapiens
  misc_feature (169)..(185): n is a, c, g, or t
ttcttccccccaattcatatgttgaacctttaatgcctaatacttcagaaagagactgtgtttgaagatatggtctttacagagggaataaagttaaaataaggtcattagggtgagccctaatccaaaggatgggtgtcctaatcagaggaggagattaggacccagnnnnnnnnnnnnnnnnngagccaggtgaggacacagggagaaaatggccacgtacaagccaagatgagaggactcaggaagaaccagccgactccacccttcaaaactgtgagaacatagatgtctgctgtttgagccaccctgtctgcaagcagtcagcaagcattcattgagtgcttgcagtattcaaggcaccacagatacaatgttgaataaggcaaagcacctgccctcaggtagcttgcagtcagggaggtaagggtagtgggcagagagacctggaaacagatattagacctgcactaagcatgtgtggttattgaacagtaaaaatgccaccacaaattgcgatatgatgtaagtaaaatgcgtactggctattgaagacttggcacagaaaaataatgtaaaatctcattagtaatggttttatattgattacgcattgaaataatactattttggacagattgggttaaataaaatattaaatttgaaa

SEQ ID NO: 75525 - DNA, 1031 bp, Homo Sapiens
  misc_feature (114)..(114): n is a, c, g, or t
atcgccgaggaagttgtatgcgtgcatatgcgcaagtcattcattttgtcattagattgaaatagtcattagttgaaatgctgatttatgtttgggagattttttcctacatgntatataacacttaaatacctccggttctggatttgagagcctatctgtatgtggtgttgttgtgttgtatatcatattgttgtattacacgttagtctactgatgtcaaatgcattttgtaagtgctcaacccaactggtaacactgtgtgctgggagcattatacgtaactttgattcaccatggttgatgccactgccatgatcgctgggtcttaaagagctttccctagccactgacagccccgtggagatcataatcagggccccaggctggttccaggatcaggcagcctatagagtgtgagcatctatgtgtagctacccttgttgggtgggctcttagactgatggggtaggatatgaagtgaaagacttcaaatgcaagtaaggtagtttgggctccttaattccaaacatcccatgagtatatcaagatgaataaggaccaagggacctctgtgactcatagaagggctggctgaatcctgaagtagcatagtgggacctggtctacaatttatgcacatgcactgacagccttgctgtgccacgtgtctcaccaagacccagttgggaaagagcgtcatattgccaacaggttgggtttctctggcctacacctgattaatgggccctttatctttggtgtcccctaggagtgtccagttgttttattgctgtattttgttattgcagtacttaataaaaattgttgatagggcccaaaaccctacagaaattctatgtctgtaaaaaccaacaaaggcattggacttgtgtgaatgtacagggtttttttagtagtaattttaaatttaaatgttttaagtgatcatcagtgttcctttttacttataaagttggattcttttttagaatttgtaataaataaaaactgctgctttaccactgtaa

SEQ ID NO: 75526 - DNA, 2337 bp, Homo Sapiens
  misc_feature (1833)..(1930): n is a, c, g, or t
aaggtagcgaggcctggggtggcgaaattccgcacgaggggaaggagatcaccaaatgtttggagtttaagtcaaagcatgaagaaattgatctggtcagtttagaggagttttataaggaggctccaccagatatcagcaaggccgaagtcaccatgggagaccctcaccagcaaacactggcacgtctggactgggagctggagcagcggaaaaggctggcaaagaaagtaccgagagtgcctatctaacaaggagaagattctcaaggagattgaggtgaagaaggagtacctgagcagcctccagccccgcctcaacagcatcatgcaggcttcccttccggtgcaggagtacctgtttatgccattcgaccaggctcacaagcagtatgagacagccagacacctgccgcctcccctctatgtcctctttgttcaggccactgcgtatgggcaggcctgtgctcatatgaaatcctcccagccccctagacaggataagacgttatctgtggcaatcgaaggcagtgtggatgaagccaaggctctgttcaaacctccagaggactcccaagatgacgagagtgactcagatgccgaggaggagcagactacgaagcgccggagacccacactgggggttcagttggacgacaaacgcaaggagatgctgaagaggcacccactgtctgtcatgctcgacctgaagtgcaaagatgacagtgtgcttcacctgactttctactacctcatgaacctcaacatcatgacagtaaaagccaaagtgacaactgccatggagctgatcacccccatcagtgcaggggactggctggctcctgacttcactcctgagttgcttgtatcctggggatcatggaaagaaaactccgaatccagccaatcagtatcagtttgataaagttggcatcctgactttgagcgactatgtacttgagctaggtcacccctatttgtgggtgcagaagctgggtggcctccacttccccaaagagcagccccagcaaacagtgattgctgaccactcgctgagcgccagccacatggagaccaccatgaaacttctgaagaccagggtgcagtcccgcctggccctccacaaacagtttgcatccctagaacatggcattgtgccagttaccagtgattgccagtacctcttccctgccaaggttgtctctcgcctggtgaaatgggtgacagttgcccatgaggattacatggagctgcacttcaccaaagacattgtggatgcgggactggctggggacaccaatctctactacatggcgctcatcgaaaggggcacagccaaactgcaggccgctgtggtgttgaaccctggctactcctccatcccacctgttttccagctctgtttgaactggaaaggggagaaaaccaacagcaacgatgacaacattcgggccatggagggcgaagtcaatgtgtgctacaaggagctgtgtggcccttggcccagccaccagctgttgaccaaccagctgcagcggctgtgtgtgctgctggatgtttacctggagaccgagagccatgacgacagtgtggaggggcccaaggaatttccccaggagaagatgtgtctgcggctcttcaggggtcctagcaggatgaagccatttaaatacaaccatcctcagggattcttcagccatcgctgatctcccgcgcagaccgttgtttcccccaaggcctcaccctgagcactgggcttctgctttctgctctggcccacatgtgactcttgatattctccaaagacaccagccaattaaaaagcgtcacctgnnnnnnnnnnnnnnnnnnnnnnnnnnnnnnnnnnnnnnnnnnnnnnnnnnnnnnnnnnnnnnnnnnnnnnnnnnnnnnnnnnnnnnnnnnnnnnnnnnttgtcggccccctcgcccctcaaaaagttttttaaacctttctttgggcccggggccccattaggaaagggaacttggccaaacttgttcccaaggaaacccgggccaggactagggttggaattcccacaaataaaaaccgcccgggggaaaccaagcgttctaaaaaaacccagagggagtccggaggcctttacgggatctatcaaggggattccaggggagtccaaatataatttaccccccgccctgccactcttcgaagaatggttgaaattcctttaaacattccgcccaacttgggaagcctcccaaaccggtttgatgaaccttggaatccccaggggaatccgccccttggccccctttgcgaataaaatttgcccctgggtggaaaacgggggggg

SEQ ID NO: 75527 - DNA, 1537 bp, Homo Sapiens
tgggagatggggcggggctgggcgctccgggactgaggtgctgatcgcccaaagggcgcccctgggctggggtctgacccggcttctcctccctcactacccgcggtccccggcctctcggcgctgcgctgttacctcatccgaaaagtgttcgctgcagcatcctcaggcttcacgttggagcctcttgattgtggtgttcagcattatttaagatcacctatgcatcatctgaagccacagtcccaggtcatcttcatcaccttccccagtggaatgcctcctgtgttaaagcccacaacaacccctgtggaggaacaaccatgtcatcagaatcgagcaaaaaacggaagcccaaagtgatccgaagcgatggagccccagctgaaggaaagcggaatcgatctgacaccgagcaggaaggtaaatactacagtgaggaggccgaggtggatctgcgggaccctggcagagactatgagttatacaagtacacctgccaggagctacagaggctgatggctgagatccaagacctgaagagcaggggtggcaaggatgtggcaatagaaatagaagaacggaggatccagagctgtgtgcatttcatgactctaaagaagcttaaccgattagcccacatcaggttgaagaaaggaagagatcagacccacgaggctaagcagaaagtagatgcctatcatctgcagctccagaacctgttgtatgaggtgatgcacctacagaaggagatcaccaaatgtttggagtttaagtcaaagcatgaagaaattgatctggtcagtttagaggagttttataaggaggctccaccagatatcagcaaggccgaagtcaccatgggagaccctcaccagcaaacactggcacgtctggactgggagctggagcagcggaaaaggctggcagagaagtaccgagagtgcctatctaacaaggagaagattctcaaggagattgaggtgaagaaggagtacctgagcagcctccagccccgcctcaacagcatcatgcaggcttcccttccggtgcaggagtacctgtttatgccattcgaccaggctcacaagcagtatgagacagccagacacctgccgcctcccctctatgtcctctttgttcaggccactgcgtatgggcaggcctgtgataagacattatctgtggcaatcgaaggcagtgtggatgaagccaaggctctgttcaaacctccagaggactcccaagatgacgagagtgactcagatgccgaggaggagcagactacgaagcgccggagacccacactgggggttcagttggacgacaaacgcaaggagatgctgaagaggcacccactgtctgtcatgctcgacctgaagtgcaaagatgacagtgtgcttcacctgactttctactacctcatgaacctcaacatcatgacagtaaaagccacagtgacaacgtgccatggagctgatcaccccatcagtgcaggtgacttgctgtctcctgactcagtctgagtgttgtatct

SEQ ID NO: 75528 - DNA, 885 bp, Homo Sapiens
agatgatgttcatcagaaagaggatcataaagagataataactaatatccaaagagctgtattgagagtggaaagaaagaccacatgctagaagagaaaaataagaagctaatgaatgaatgtgatcatgtaaaagaaagtctctttcaatatgagagagagaaagcagaaagagtagtggttgtgagacaacttcagcaagaagcagctgacagcctaaaaaaattaactatgttagagtctccactggaagtatatcacattatcacattaatttggatgagacacaggtcccaaagaagaaattatttcaagtggaaagtcaagtatgtatggaacttagcatgtcaacggttattctgtagctagttgaattacataacatgttttaggatactaattatggcagaagcttgattttttattttcattacaatgaattatttccattttactatctctataatgtacttatttttttatatagtgactttcattctaccattttgaaaaaccattgcataccttttctcttacaatatgtacccttggaaaagttgagaattatacatcattcctcatagaaaactgacttttgtcctgttaaaacagtattttcaagtaactttttgtattgctctgatgaggcaggccagattaaatcagagaagaatgtttcatggaatgttccagaaaattgtcttatttcttcactttagtgagtggacacagaatctgtgtctatttatttcacagattctaggttaacttgtacagaaaggccattatactattctttcaaaagtgcatgattcaggttaataacaaactatatgaaatgtaggcatgactatatcttagatttaaaatatactataaaactgg

SEQ ID NO: 75529 - DNA, 1251 bp, Homo Sapiens
  misc_feature (27)..(27): n is a, c, g, or t
  misc_feature (41)..(41): n is a, c, g, or t
  misc_feature (53)..(453): n is a, c, g, or t
ctatgaaaaacgccgcacgccgctttntacgtacatgcctnttggtgccatannnnnnnnnnnnnnnnnnnnnnnnnnnnnnnnnnnnnnnnnnnnnnnnnnnnnnnnnnnnnnnnnnnnnnnnnnnnnnnnnnnnnnnnnnnnnnnnnnnnnnnnnnnnnnnnnnnnnnnnnnnnnnnnnnnnnnnnnnnnnnnnnnnnnnnnnnnnnnnnnnnnnnnnnnnnnnnnnnnnnnnnnnnnnnnnnnnnnnnnnnnnnnnnnnnnnnnnnnnnnnnnnnnnnnnnnnnnnnnnnnnnnnnnnnnnnnnnnnnnnnnnnnnnnnnnnnnnnnnnnnnnnnnnnnnnnnnnnnnnnnnnnnnnnnnnnnnnnnnnnnnnnnnnnnnnnnnnnnnnnnnnnnnnnnnnnnnnnnnnnnnnnnnnnnnnnnnnnnnnnnnnnnnnnnnnnnnnnnnnnaagaattcggcacgagggatactctcagaaaaaagtcattagctttagaaactgtacaaaacgacctaagccaaacacagcagcaaataaaggaaatgaaagagatgtatcaaagtgcagaagctaaagtcagtaaatctactggaaagtggaactgtgtggaagagaggatatgtcaactccaacgtgaaaatccatggcttgaacagcaactaattgatgttcatcagaaagaggatcataaagagacagtaattaatatccaaagagcctttattgagagtagaaagaaagacctcatactagaagagaaaaataagaagctaatgaatgaatatgatcatttaaaagaaagtctctttcaatatgagagacagaaaacagaaacagtagtaagaatcaaggaagataaatattttcaaacttctagaaagaaaatttaaacatttggttctggatacatgttgaacctagttgaatataaaaatcagtagataaaaactgtgtttaccatactgtacaattccatttacatgaagcatccagaaaagagaaatatatagggacaaaaagtagattcatgtttgcaaggggctggggctggaagctggtagtgactgctaatgggcatgaggaatcttacagtgatggaaatgctctaaagttggattgtagagatggctgcacaactcagtaaatgtactaaaaatcttttaacttaaaacagatacattctatagtatgtaaattatatttcaacaaacctgttttaataaaaaaaggaaaaatgtgtttact

SEQ ID NO: 75530 - DNA, 821 bp, Homo Sapiens
aagcgatatccatctgtgatagaccctggcagtgtgtcactcaacctgtggttcagtctgtcctgagcttctgctctcattcatttagtgctacgctgcacagttctacactgtcaagggaaaagggagactaatgaggcttaactcaaaacctgggcatggttttggttgccattccataggtttggagagctctagatctcttttgtgctgggttcagtggtcttcaggggacaggaaatgcctgtgtctggccagtgtggttctggagctttggggtaacagcaggatccatcagttagtagggtgcatgtcagatgatcatatccaattcatatggaagtcccgggtctgtcttccttatcatcggggtggcagctggttctcaatgtgccagcagggactcagtacctgagcctcaatcaagccttatccaccaaatacacagggaagggtgatgcagggaagggtgacatcaggagtcagggcatggactggtaagatgaatactttgctgggctgaagcaggctgcagggcattccagccaagggcacagcaggggacagtgcagggaggtgtggggtaagggagggaagtcacatcagaaaagggaaagccacggaatgtgtgtgaagcccagaaatggcatttgcagttaattagcacatgtgagggttagacaggtaggtgaatgcaagctcaaggtttggaaaaatgacttttcagttatgtctttggtatcagacatacgaaaggtctctttgtagttcgtgttaatgtaacattaataaatttattgattccattgctttaacatttg

SEQ ID NO: 75531 - DNA, 2460 bp, Homo Sapiens
gggcggccgggcggggcagagcctgggcggggcgcggcaccgcagctggatggctggggccgcccggatcgccgccgccgccgccgcacgtacgtggcatgcctggatgtccctgccctggctgtggcatggcgggcccaaggctcctcttcctcactgcccttgccctggagctcttgggaagggctgggggttcccagccggccctccggagccgggggactgcgacggcctgtcgcctggacaacaaggaaagcgagtcctggggggctctgctgagcggagagcggctggacacctggatctgctccctcctgggttccctcatggtggggctcagtggggtcttcccgttgcttgtcattcccctagagatggggaccatgctgcgctcagaagctggggcctggcgcctgaagcagctgctcagcttcgccctggggggactcttgggcaatgtgtttctgcatctgctgcccgaagcctgggcctacacgtgcagcgccagccctggtggtgaggggcagagcctgcagcagcagcaacagctggggctgtgggtcattgctggcatcctgaccttcctggcgttggagaagatgttcctggacagcaaggaggaggggaccagccaggcccccaacaaagaccccactgctgctgccgccgcactcaatggaggccactgtctggcccagccggctgcagagcccggcctcggtgccgtggtccggagcatcaaagtcagcggctacctcaacctgctggccaacaccatcgaataacttcacccacgggctggctgtggctgccagcttccttgtgagcaagaagatcgggctcctgacaaccatggccatcctcctgcatgagatcccccatgaggtgggcgactttgccatcctgctccgggccggctttgaccgatggagcgcagccaagctgcaactctcaacagcgctggggggcctactgggcgctggcttcgccatctgtacccagtcccccaagggagtagaggagacggcagcctgggtcctgcccttcaactctggcggctttctctacatcgccttggtgaacgtgctccctgacctcttggaagaagaggacccgtggcgagtgacctgcagcagcaagaggactgccactcacagggcccttaggggctcaggagggaagggctcctggccgctgcctgctccccctgcccatgcctccaccgtgagccgttccctccccacaggcgctccctgcagcagctgcttctgctctgtgcgggcatcgtggtaatggtgctgttctcgctcttcgtggattaactttccctgatgccgacgcccctgccccctgcagcaataagatgctcggattcactctgtgaccgcatatgtgagaggcagagagggcgagtggctgcgagagagaatgagcctcccgccagacaggagggaggtgcgtgtggatgtatgtggtgtgcacatgtggccagaggtgtgtgcgcgagaccgacactgtgatccctgtgctgggtccggggcccagtgtagcgcctgtccccagccatgctgtggttacctctccttgccgccctgtcaccttcacctcctggagtaagcagcgaggaagagcagcactggtcccaagcagaggccttgccctgctgggaccccgggagtgagagcagcccaaggatcccagggtgcagggaactccagagctgcccacctcccactgccccctcagcacacacacagtccccaggcggcctaggggccaaggctggggcggctttggtcccttttcctggcccttccttccccacttctaagccaaagaaaggagaggcaggtgctcctgtaccccagccccactcagcactgacagtccccagctcctagtagtgagctgggaggcgcttcctaagaccctttcctcagggctgccctgggagctcattcctggccaacacgccctggcagcaccagcagctcttgccacctccagctgccaaacagcagcctgccgggcagggagcagccccaggccagagaggcctcccggtccagctcagggatgctcctgccagcacaggggccagggactcctggagcaggcacatagtgagcccgggcagccctgcccagctcaggcccctttccttccccattgaggttggggtaggtgggggcggtgagggctccacgttgtcagcgctcaggaatgtgctccggcagagtgctgaagccataatccccaaccatttcccttggctgacgcccaggtactcagctggcccactccacagccaggcctggccctgcccttcaccgtggatgttttcagaagtggccatcgagaggtctggatggttttatagcaactttgctgtgattccgtttgtatctgtaaatatttgttctatagataagatacaaataaatattatccacataaaaa

SEQ ID NO: 75532 - DNA, 836 bp, Homo Sapiens
gccgccgccgcgccgcacgtacgtggcatgcctggatgtccctgccctggctgtggcatggcgggcccaaggctcctcttcctcactgcccttgccctggagctcttgggaagggctgggggttcccagccggccctccggagccgggggactgcgacggcctgtcgcctggacaacaaggaaagcgagtcctggggggctctgctgagcggagagcggctggacacctggatctgctccctcctgggttccctcatggtggggctcagtggggtcttcccgttgcttgtcattcccctagagatggggaccatgctgcgctcagaagctggggcctggcgcctgaagcagctgctcagcttcgccctggggggactcttgggcaatgtgtttctgcatctgctgcccgaagcctgggcctacacgtgcagcgccagccctggtggtgaggggcagagcctgcagcagcagcaacagctggggctgtgggtcattgctggcatcctgaccttcctggcgttggagaagatgttcctggacagcaaggaggaggggaccagccaggtcagcggctacctcaacctgctggccaacaccatcgataacttcacccacgggctggctgtggctgccagcttccttgtgagcaagaagatcgggctcctgacaaccatggccatcctcctgcatgagatcccccatgaggtgggcgactttgccatcctgctcccgggccggctttgacccgatggacgcgcagccaagctgaaactctcaacagcgctggggggcctactgggccgctggcttcgcccatctggtacccagtaccccaa

SEQ ID NO: 75533 - DNA, 1042 bp, Homo Sapiens
  misc_feature (15)..(15): n is a, c, g, or t
  misc_feature (55)..(55): n is a, c, g, or t
  misc_feature (145)..(145): n is a, c, g, or t
  misc_feature (169)..(169): n is a, c, g, or t
  misc_feature (209)..(209): n is a, c, g, or t
  misc_feature (223)..(223): n is a, c, g, or t
  misc_feature (976)..(986): n is a, c, g, or t
gtgactgtcgattancgatcttagattgctggagccagatcgcagggtatggacngcccctcatcccatgctggtctggggtttctgataatgtgccatgattaatattccccagctgggagagaggatggaacgttctgactgntgagagagaccagtgcttcacttnttgagagatcgcctgtacccaaaccccttccagtataccntaatgcttgagacntaaagctgtatcctggcgaacacccctaccttctattgcggtccccacatgcacacagaactctgacacaggatcagctgcacttaagaaatcatcccagctaagttcattattcctcatggggtggggagatgctgaaaggggtattgtatatcccactgcactgagagggctcaatcagctggatttgagttctggaacacacatcatccccacccctcccccagcgtgggctcaccattcttagtcctttctcaagtgggaccttcaactttctgtgaacacccagtctgcgtcctgggtctgctaggttcgatgatggcgaactcgtatctgcatccggtgcaagttttagctggcagaggtgagaccggtggtgctggtctgcctttgccaactatagccagtctggagacttgataaaatacttcagtgagaccagcttctcatcaacttgggcccggcgtgctgggcctgaaagtcacactacatgcactgcctttgggagtcagctcactccctgctcccacctggaaccttgccagcgtgaaggaggcttccaggtacttcaccctgtcaaccacctctgaatccccaccaggcgccttcctgggtggattcaacaagatgattttgccctttcccagttctctccttcactttggcatcagttgttttctatgaaaacagtggattggttgggttttgtgcagggtcttgggttagagccaaaatggatttgaggatgagtannnnnnnnnnnggttttgtatattttgtacattaataataaacagtggaaagagaagcagcttattt

SEQ ID NO: 75534 - DNA, 1048 bp, Homo Sapiens
gagactgggtgtttcacagaaaagctgaaggtccccacttgagaaaggactaaagaatggtgagcccacgctgggggaggggtggggatgatgtgtgttccagaactcaaatccagctgattgagccctctcagtgcagtgggatatacaatacccctttcagcatctccccaccccatgaggaataatgaacttagctgggatgatttcttaagtgcagctgatcctgtgtcagagttctgtgtgcatgtggggacccgcaatagaagggtaggggtgttcgccaggataaccagctttaggttctcaagcattaagggtaatactggaaaggggtttggggtacagggcgaatcttctcaaaaagtgaagccaactgggtctcctcttcagcagtccaggaacgtttccagtctctctcctccccagactggaggaaaatatgtacatcaatgcgcaccagtgatcagaaaacccccaggaacccaagcaagtgggaactgagggggccggctcctcatcagctggggaaaagggaaaatgggcctcacagaagccataacagggtggaaagagcgaggctgcagtccacaggggttgtgtgaacagggcaggcaaatggtccctagggcagggggggcccattgacacccgggtggtagaaggcacagttgttctcatagcggcagttgcccttcatcatgaaatgtcggcagacagggcggtttgacatgtctcctccatggctgtggcctccatcgtgccctcggtggccccctcccccgtggccaggaccatcatggccacggtgctcatgaggtggcggccctcgatggtcatggcctcggtgaccagggacatcatgaggccggtggccatggggccccccgtgtccagggccttcatggggacgatgtccaccacttccacccatgcttccgccagggccttcgtgggggcgatgtccaccaccggcacccattcctccgacagggccttcatggggacgatggccactgccaccactgatgcaaccgcatcacccgtt

SEQ ID NO: 75535 - DNA, 1169 bp, Homo Sapiens
  misc_feature (1090)..(1102): n is a, c, g, or t
gcgaccgcaaggagaaggtgaagcgggaggaggtggaccgccgggtcctggagacggaggaggtgtactcccacaagttctccgaggaggccaagtccatctgcaagatgctgctcacgaaagatgcgaagcagaggctgggctgccaggaggagggggctgcagaggtcaagagacaccccttcttcaggaacatgaacttcaagcgcttagaagccgggatgttggaccctcccttcgttccagacccccgcgctgtgtactgtaaggacgtgctggacatcgagcagttctccactgtgaagggcgtcaatctggaccacacagacgacgacttctactccaagttctccacgggctctgtgtccatcccatggcaaaacgagatgatagaaacagaatgctttaaggagctgaacgtgtttggacctaatggtaccctcccgccagatctgaacagaaaccaccctccggaaccgcccaagaaagggctgctccagagactcttcaagcggcagcatcagaacaattccaagagttcgcccagctccaagaccagttttaaccaccacataaactcaaaccatgtcagctcgaactccaccggaagcagctagtttcggctctggcctccaagtccacagtggaaccagcccagacccttctccttagaagtggaagtagtggagcccctgctctggtggggctgccaggggagaccccgggagccggggaaggaggccgtccatcccgtcgacgtagaacctcgaggtttctcaaagaaatttccactcaggtctgttttccgaggcggccccggccggggtggattggatttgtctttggtgaacattgcaatagaaatccaattggatacgacaacttgcacgtattttaatagcgtcataactagaactgaattttgtctttatgatttttaaagaaaagttttgtaaatttctctactgtctcagtttacattttgtatatttgtatttaaatgaaagtgagactttgagggtgtatattttctgtgcagccactgttaagccatgtgttccaaggcattttagcggggagggggttatcnnnnnnnnnnnnntgtgactcaagacttccagagcctcaaatgagaaaatgtctttattaaatgtagaaagtgatccata

SEQ ID NO: 75536 - DNA, 992 bp, Homo Sapiens
  misc_feature (833)..(842): n is a, c, g, or t
gcgggagcgcattcattcgacagacacatatgaagcacctactgtgtaaagctgcctttgcaagcacttcacatgattcactgaacagagcagacagaaacccctgcccttcttgggggcttccatcctaaacaagtgccagcggccccagttgatgccacgggcaggcaatgtgcatagccatggcacgtgccgtccctgtggattcggatgcctcctcccctgctggggtgaggcagccaaccaggggccaactgaaaaaatgctggactctcggtcaaggacagggctgggaaagtgccagtctccacaaactgtggatccactagagggttcaggcctggggcatcctctgcaagaggatcccacgagagtccattccccaccacaggcctccgctgctcactgctgtgccttgatcggcctggacgagcccgcccacacctccatcatacccagtgtgaagaggggctggggacccaccactcctgagaacagcatccttgggaagacccagctgtgagtgcacagcaggcacagtccctcaggcccaggtgaggattcagcagcagatgggattccaccccatctgtggcctctccagctgtccacaggccctgcaaaggcagggaagggggcaaagggccagcccaacccagccctccactctgggtacccagaggaaagggcaggggcgctgggttccacaggccatcagctggggagggggagggagggccaaccccaggccctgccttggagggccctgggggaggttggccccagcattggttccagcgccttccttggaacccccaggggaaaagggccannnnnnnnnnccaattggccctggaaaaccagggggaacaggggcttggccctgttacggaaggggcccccgccgagaagggggaccgcgggagccggggcccccgtgcgaccgttagggcgggcccgggggcgccaaggggggggaggcggcgccccaa

SEQ ID NO: 75537 - DNA, 1233 bp, Homo Sapiens
tgttagcccgagagacggaatggaggaggtgcctcacgactgtccaggggccgacagcgcccatgcgggcagaggggcttcatgtcagggatgccccaaccagcggctgtgcgcttctggagcgggggccactccggacacggctatagaggaaatcaaagagaaaatgaagactgtaaaacacaaaatcttggtattgtctgggaaaggcggtgttgggaaaagcacattcagcgcccaccttgcccatggtctatcagaggatgaaaacacacagattgctcttctagacatcgatatatgtgggccatcgattcccaagataatgggattggaaggagagcaggttcaccagagtggctcaggctggtctccagtgtacgtggaagacaacctgggggtgatgtcagtgggcttcctgctcagcagtcctgatgatgctgttatctggaggggacccaagaaaaacggcatgatcaagcagttcctccgagatgtggactggggagaggtcgactacctcattgtggacaccccacctgggacgtcggatgaacacctctcggtcgtccggtacctggccacagcacacatcgatggagcagtgatcatcaccactccccaggaggtgtcactccaggatgtccggaaagaaatcaacttctgccgcaaggtgaagctgcccatcatcggggtggtggagaacatgagtggcttcatctgtcctaagtgcaagaaagaatctcagatattccctcccacaaccgggggcgcggagctcatgtgccaggacttggaggtccctctcctcggcagagtgcccctggatccgctcataggtaagaattgtgacaaaggccagtcttttttcattgacgccccagattccccagccacgttagcctacagaagtataattcagagaatccaagagttttgtaatctccatcagtcaaaagaagagaacctcatcagttcctgaaacgagagaatgttcaggaccaagcagttaccgagcgaggcactcactgggcagcacatccagccagacccgaccagctccgggatggggtgggtcacagcaaaaggaccagatgctggtgtggtccgaagccactttctcagagacactttaatcattgagtatttgtacacttttctttagaacatatataaagggcattctctacaaatgtgccgttttaagaataaaaccccctcaaatctctcaaa

SEQ ID NO: 75538 - DNA, 568 bp, Homo Sapiens
ttaccattctgattatttagccacgctgaaatgctggctggggaccctgctggaaggaaggtccctgagaccccactggtcttttctactttgttcttcattacgagtgaagcgggctcaagatcttcccattgtcaccagcacggaaagagccccaagatcttgtggccattctgttttcctcttggactgaattgtcttccgtttgtttcttttttaaggtaagaattgtgacaaaggccagtcttttttcattgacgccccagattccccagccacgttagcctacagaagtataattcagagtaagtatttccatgagtactaaatgcagatgcctgtggggcaggaagcaacataaaggagccaggggtgtggaaggacaggtgggtggtggggtctgtgatgaccacagagtggcccccatagccgaggaagccaggagtccatgagaaatctctcaatgtgtgagtattgtgaattaattcatagtttaaaaaacatggtgagggtgaaatttatggcttaggaaatacatcccaataaagggataaagtaattcattttt

SEQ ID NO: 75539 - DNA, 1336 bp, Homo Sapiens
ggtagactctagaggattctccgtagcacagatcaccggcacaacatgagaccctcttagcaagactatgcccactctcaagatatggctcccttccatgccccagagctggtctaaaagcacattggcaagacctgggcacagctggagtgggtgcctgagccccctgagctggggaagagcccccttacccactacaccatcttctggaccaacgctcagaaccagtccttctccgccatcctgaatgcctcctcccgtggctttgtcctccatggcctggagcccgccagtctgtatcacatccacctcatggctgccagccaggctggggccaccaacagtacagtcctcaccctgatgaccttgaccccagaggggtcggagctacacatcatcctgggcctgttcggcctcctgctgttgctcacctgcctctgtggaactgcctggctctgttgcagccccaacaggaagaatcccctctggccaagtgtcccagacccagctcacagcagcctgggctcctgggtgcccacaatcatggaggaggatgccttccagctgcccggccttggcacgccacccatcaccaagctcacagtgctggaggaggatgacaagaagccggtgccctgggagtcccataacagctcagagacctgtggcctccccactctggtccagacctatgtgctccagggggacccaagagcagtttccacccagccccaatcccagtctggcaccagcgatcaggtcctttatgggcagctgctgggcagccccacaagcccagggccagggcactatctccgctgtgactccactcagcccctcttggcgggcctcacccccagccccaagtcctatgagaacctctggttccaggccagccccttggggaccctggtaaccccagccccaagccaggaggacgactgtgtctttgggccactgctcaacttccccctcctgcaggggatccgggtccatgggatggaggcgctggggagcttctagggcttcctggggttcccttcttgggcctgcctcttaaaggcctgagctagctggagaagaggggagggtccataagcccatgactaaaaactaccccagcccaggctttcaccatctccagtcaccagcatctccctctcctcccaatctccataggctgggcctcccaggcgatctgcatactttaaggaccagatcatgctccatccagccccacccaatggccttttgtgcttgtttcctataacttcagtattgtaaactagtttttggtttgcagtttttgttgttgtttatagacactcttgggtgt

SEQ ID NO: 75540 - DNA, 1246 bp, Homo Sapiens
  misc_feature (49)..(49): n is a, c, g, or t
  misc_feature (672)..(754): n is a, c, g, or t
ttagtgtcccttacctggcttagcgttctgtttcaccagtttccaagtntattgccctcaaaatctttagaatagttaaattggcttgtttaaggttcttgctgccccacaacacaccttgcccatgcacaaggaatgaattttttcctaccattatggctttgtgcttgttcttcctcttacctgtaatagcctcaccttccctagttctttgcattcgtccttagaatactgtattgttacagctgaaagacagtaaagaccatttagtcctcaccttctgttttagagttgagcaaactgaagcccacagaggtggaacttaattacctaagagccacaataagccactggtatctgggggactagaacacaaatccaacgcttttcccacctctttggatgttttccccaattatcctccttcactccctgtcatagttaccgatggtgtcccgttgtgtgggtttactctgtgctaagttgtcttacacttctcaaatgctactcagtatatagccttaagtcttactgttttgtgcggtgtgtctccagctgattttaacttttttgatggtagaaattttatctcttcttccttttgtatcctccattgtatcttcatacaaaggacagtacacacttgggtaattaaaaataaaagttgattgnnnnnnnnnnnnnnnnnnnnnnnnnnnnnnnnnnnnnnnnnnnnnnnnnnnnnnnnnnnnnnnnnnnnnnnnnnnnnnnnnnncggcgagacgacaaagacctcccacgaggggagggggagcaccagaagataggaagccgccacaccgtcgttattagataccacaaggagggcgacgacaaaagaaggaggagagatacatataacaagagcaagcgcgagcagggcggcgaagagaaaacaaaaagccatcagagagagaaaacaacacgtgacaccaaaaggagaaataaagcgaaggagggacgaaacaacaacacaggggagggaggagaaagcacacacaaaatacaggagggagaaacacacaacagcagacaaaaaagaagcataaaataccgcacccacacgaggggggaacaaaaactaacaacacaaagagcagaagaagagtgaacaactgggagacgacaacaaacacacacacgacgagacgtcaatcgaaagaaggacggacgagaaagaaagagaaaagtacatagctgccgaaagcgaagaaagaaatcagtacac

SEQ ID NO: 75541 - DNA, 1563 bp, Homo Sapiens
tacggtaggtacgaggcctggtgtgttaattcggcacgagggacagctgcagagcctggtgctgtcagaatatgcatccacagagatgagcctgcatgccctctatatgcaccagctccgcgagcagcaggcccaggctgaacctgagcggcatgtatggcaccgccgggagagtgatgagagtggagaaagcgcccctgatgaagggggagagggcgcccgggccccccagtctatccctcgctctgctagctatccctgtggagcaccccggcctggagctcctgagaccaccgccctgcatgggggcttccagaggcgctacggtggcatcacagatcctggcacagtgcccagggttccctctcatttctctcggctgcctcttggagggtgggcagaagatgggcagtcggcatcaaggcaccctgagcccgtgcccgaagagggctcggaggatgagctaccccctcaggtgcacaaggtatagacaaggctgagcagggttcctgtggcccaggatggaggccaccgctgccctgccatcccgtctgcctgccatgggacggctcctctgagtgttccctggccccacgtgtgtggtgtttgtgtgtctgtgcctggccaagggaggtgccaacactgggcttgccacagccccaggagaggaatttggggcctaggaaccgagggcacacgggactctagcctcatccccaggaaccccttggctcagagtgtggtgctagaaactggtccccagcccagccccagtactgccacctttacacctacccctgcaagtccccagagggctgcccacgatagaagctgccaagcagggagaacctgtgccaactgtggagtggggaggttgggcctggaccctcaacccctgcaaccttccctagccccctcaatagatgagcaggtcaggctgtggcccttacctcacccgcagttctcgcccagtgctgcagccggctcacctctctccgcttcttgcacatcactggcctgtgtgtgctgcttgctcctgttctgttcgcttgctcccgttccgttcggcttttgctttgcgttagggtgaagaccctagcgtccagctcccctcaacgctatattttgacactaaaaaagaaggtttctaaattgtaggagcaggatggaaatactttgctgcccttgccatcttttaggatgggcccccaggagactgaggtcttcctgggccctcattgctgcttatcgtaccccccatcacctgcacatgggacagaccgggctggagggtgaccttggctgtgtacgtcccagcaaaagagctctggcccgcatctcgctgtgccctgaagggggatgaagggcgatgcctcgcccgaggctttgggctgctgcactgcatgctgggactgctcctactctctgtcccacccctcacccagctgtggtccggctttgggagagtggtgaattgcgctgcccgaactcggagcggagcagggtagggaccgtgtacagcttgataacccttaataaaaagggagtttgaccagaaaaaaa

SEQ ID NO: 75542 - DNA, 1741 bp, Homo Sapiens
tggcaaaatgtgtgtttgacacgtactcacctcatgaggatgaggccatggtgctattcctcaacatggtagcgcccggccgagtgctcatctgcactgtcaaggatgagggctccttccacctcaaggacacagccaaggctctgctgaggagcctggacagccaggctggccctgccctgggctggagggacacatgggccttcgtgggacgaaaaggaggtcctgtcttcggggagaaacattctaaatcacctgccctctcttcctggggggacccagtcctgctgaagacagatgtgccattgagctcagcagaagaggcagagtgccactgggcagacacagagctgaaccgtcgccgccggcgcttctgcagcaaagttgagggctatggaagtgtatgcagctgcaaggaccccacacccatcgagttcagccctgacccactcccagacaacaaggtcctcaatgtgcctgtggctgtcattgcagggaaccgacccaattacctgtacaggatgctgcgctctctgctttcagcccagggggtgtctcctcagatgataacagttttcattgacggctactatgaggaacccatggatgtggtggcactgtttggtctgaggggcatccagcatactcccatcagcatcaagaatgcccgcgtgtctcagcactacaaggccagcctcactgccactttcaacctgtttccggaggccaagtttgctgtggttctggaagaggacctggacattgctgtggattttttcagtttcctgagccaatccatccacctactggaggaggatgacagcctgtactgcatctctgcctggaatgaccaggggtatgaacacacggctgaggacccagcactactgtaccgtgtggagaccatgcctgggctgggctgggtgctcaggaggtccttgtacaaggaggagcttgagcccaagtggcctacaccggaaaagctctgggattgggacatgtggatgcggatgcctgaacaacgccggggccgagagtgcatcatccctgacgtttcccgatcctaccactttggcatcgtcggcctcaacatgaatggctactttcacgaggcctacttcaagaagcacaagttcaacacggttccaggtgtccagctcaggaatgtggacagtctgaagaaagaagcttatgaagtggaagttcacaggctgctcagtgaggctgaggttctggaccacagaaagaacccttgtgaagactctttcctgccagacacagagggccacacctacgtggcctttattcgaatggagaaagatgatgacttcaccacctggacccagcttgccaagtgcctccatatctgggacctggatgtgcgtggcaaccatcggggcctgtggagattgtttcggaagaagaaccacttcctggtggtgggggtcccggcttccccctactcgcctggctcagaatctaacctatttattgactgtcctgagggccttgaaaacaggccgaacctggagggcctggatttctttttgggctggaatgctgccctgagggtggggctggctcttactcaggaaactgctgtgcccaacccatggacaggcccagctggggcccacatgctgacacagactcactcagagacccttagacactggaccaggcctcctctcagccttctctttgtccagatttccaaagctggataagttggtcattgatt

SEQ ID NO: 75543 - DNA, 1358 bp, Homo Sapiens
  misc_feature (16)..(16): n is a, c, g, or t
  misc_feature (1260)..(1260): n is a, c, g, or t
agccagaattcgcacngaggatgttcggaagaagaccacttctggtggtggggtcccgcttccccctactcagtgaagaagccaccctcagtcaccccaattttcctggagccacccccaaaggaggaggagccccaggagccccagaacagacatgagacctcctccaggaccctgcggggctgggtactgtgtacccccaggctggctagcccttccctccatcctgtaggattttgtagatgctggtaggggctggggctaccttgtttttaacatgagacttaattactaactccaaggggagggttcccctgctccaacaccccgttcctgagttaaaagtctatttatttacttccttgttggagaagggcaggagagtacctgggaatcattacgatccctagcagctcatcctgccctttgaataccctcactttccaggcctggctcagaatctaacctatttattgactgtcctgagggccttgaaaacaggccgaacctggagggcctggatttctttttgggctggaatgctgccctgagggtggggctggctcttactcaggaaactgctgtgcccaacccatggacaggcccagctggggcccacatgctgacacagactcactcagagacccttagacactggaccaggcctcctctcagccttctctttgtccagatttccaaagctggataagttggtcattgattaaaaaaggagaagccctctgggaaaacaaaaacccccagaacccagagacacagagataaaaaacatgtccggccgccttcgggccctcgaagcaaactttcttagaccctttcggttttggccgccgccggggccccccgacaggttaaaggtggaaccctgggacccattaagctgcttttcccctaagggaaaattcccctggggtccaatggaacataaggcgctttttgggaactttcctcccaccccacaataatacaaaaacacccgcgcccgcgcggggcgggggcacacacccgcgaaggggggttctctttgcaaaacaaaaaattccccacaaattggggaagttctccctcgaagcgcccccctttacaccgggggaactctcaatccccacccggggaagggcccccacggccgggaggcttccaaattatccaaaattttacgcccgcccggacccttgggccagttctttcccccagatcacccggccggcagaaattccatttaagcgcctttctcgggcncgagaatgtggaacgcctcttcccaaacaccgggcttgggatggaaaccctgaaatccgccccgggggtaatccaacaccccttgggcggcccttggg

SEQ ID NO: 75544 - DNA, 677 bp, Homo Sapiens
  misc_feature (574)..(574): n is a, c, g, or t
ctagtgcctccatatctgggacctggatgtgcgtggcaaccatcggggcctgtggagattgtttcggaagaagaaccacttcctggtggtgggggtcccggcttccccctactcagtgaagaagccaccctcagtcaccccaattttcctggagccacccccaaaggaggagggagccccaggagccccagaacagacatgagacctcctccaggaccctgcggggctgggtactgtgtacccccaggctggctagcccttccctccatcctgtaggattttgtagatgctggtaggggctggggctaccttgtttttaacatgagacttaattactaactccaaggggagggttcccctgctccaacaccccgttcctgagttaaaagtctatttatttacttccttgttggagaagggcaggagagtacctgggaatcattacgatccctagcagctcatcctgccctttgaataccctcactttccaggcctggctcagaatctaacctatttattgactgtcctgagggccttgaaaacaggccgaacctggagggcctggatttctttntgggctggaatgctgccctgagggtggggctggctcttactcaggaaactgctgtgccccaacccatggacaggcccagctggggcccacatgctgacacaga

SEQ ID NO: 75545 - DNA, 1858 bp, Homo Sapiens
agagagtatgaagtcgacggcgcgccgaattcggcacgaggcggcatggaggaggcggaggccgcggcgagccgggccgagcagtgagggccctagcggggcccgagcggggcccggggcccctaagccattcctgaagtcatgggctggccaggacattggtgacccgccaatccggtatggacgactggaagcccagccccctcatcaagccctttggggctcggaagaagcggagctggtaccttacctggaagtataaactgacaaaccagcgggccctgcggagattctgtcagacaggggccgtgcttttcctgctggtgactgtcattgtcaatatcaagttgatcctggacactcggcgagccatcagtgaagccaatgaagacccagagccagagcaagactatgatgaggccctaggccgcctggagcccccacggcgcagaggcagtggtccccggcgggtcctggacgtagaggtgtattcaagtcgcagcaaagtatatgtggcagtggatggcaccacggtgctggaggatgaggcccgggagcagggccggggcatccatgtcattgtcctcaaccaggccacgggccacgtgatggcaaaacgtgtgtttgacacgtactcacctcatgaggatgaggccatggtgctattcctcaacatggtagcgcccggccgagtgctcatctgcactgtcaaggatgagggctccttccacctcaaggacacagccaaggctctgctgaggagcctgggcagccaggctggccctgccctggggctggagggacacatgggccttcgtgggacgaaaaggaggtcctgtcctccggggaaaaacattctaaatcacctgccctctctttcctggggggacccagtcctgctgaagacagatgtgccattgagctcagcagaagaggcagagtgccactgggcagacacagagctgaaccgtcgccgccggcgcttctgcagcaaagttgagggctatggaagtgtatgcagctgcaaggaccccacacccatcgagttcagccctgacccactcccagacaacaaggtcctcaatgtgcctgtggctgtcattgcagggaaccgacccaattacctgtacaggtaagcctgggaatgggctatacccagcacgtgaacaggagggtgcttaggtcatctacctccaggaggaactcttgaggtgggcagaaaggcaatagattctagacgcattcacctctgtgggtaagcatagggactctgggcccagctgtaaacacaggggaacctgagttgagggggtgatgaaatgaccctaacctatccctggggctccccaggatgctggcgctctctgctttccagccccaggggggtgttcttcttccagattgttaccggtttcaccatggacgggtaatcatagtaagtggtagacgcagagactgtggggggtgtgcctcggtgtggagtacaacatggagcagcagtgattgccagggacggggcaaagggagaccgcccaggcaagggctgtgaaatgtgaaggccttggattgcagaggttgggcacgagggaaaagtgacctcacaatggtgagcagtggccatgtccccccaggaacccatgggatgtggtggctgttggtctgaggggcatccagcatacatcccatcaagcatccaagaattgaccggcgtgtcatcagcactacaaggccagcctcaactgccactttcaaccctgtttccggaggccaagttggtgtggtcctggaagaggactggacattggttgtggatttacggcaagttcctgagccaagcaatcacctactggagaggata

SEQ ID NO: 75546 - DNA, 700 bp, Homo Sapiens
  misc_feature (558)..(569): n is a, c, g, or t
atcctcttcctgctgctcgtgtaccccacagatcaaaccctcaattctagttggggatgctgtctagccccacaccatgactgaagccttaagcactgttgcgcctccatgtgctttggatcagcaaccccagtggtattctaccagagcattgtgggaaagcagatgtatagtcaggtcccaacagcaaattgttgggtgtgagagttctaaagtataggggtgagggaagagaaggatatgaactcctctgaccttaagccagcattcatttaacttttatgtctacttaacaagagaacctggagaaaactaccgtattcaagagattaatcaaaatcagtgttttagccaggcgatgacagagaagcaccattcctcaccctccattcttgtaatgtctgtaataaatttcagtgcgtcaggatggatgaacccaagatccagtgaatgattcagctgttccaagccttacattttccatcattcatcatccattctcattcagtgtaacctcttgcactattgtggttaattttatgtaaaaccagtttatgnnnnnnnnnnnnaatatgtgcctatgtaataaagtctacacactggctatctctgtagaggtgaggttttgtttttagttgttctactgattatatccttttctgagctatgaaaatgaattattaataaaaaatttttgaac

SEQ ID NO: 75547 - DNA, 1023 bp, Homo Sapiens
  misc_feature (115)..(115): n is a, c, g, or t
  misc_feature (186)..(186): n is a, c, g, or t
  misc_feature (193)..(193): n is a, c, g, or t
  misc_feature (196)..(196): n is a, c, g, or t
  misc_feature (206)..(206): n is a, c, g, or t
  misc_feature (220)..(220): n is a, c, g, or t
  misc_feature (247)..(247): n is a, c, g, or t
  misc_feature (378)..(433): n is a, c, g, or t
tggagattgaatgattcattgaatatgtgttgatgccgagacatgctgctgggatggacgagcatttggcagcgtgacagagttgaggagatgcatgcagagtttgccagtactnggctcaacagcaagctgcacaaagacagctgcggagctgctcggtactggtacctggagagtagtattgcntattccnccntcatccatcntgagccaattcttntgctgaacaggaaagagctaggaaccntggaggtaaacaaagactttgatccatgtatgagtgtatgtgtttatgtaacttccttggatgcaaatagattcagagaatttagagctaaaaagccccttagagggaatctagcccaacctacattccannnnnnnnnnnnnnnnnnnnnnnnnnnnnnnnnnnnnnnnnnnnnnnnnnnnnnnnggtgagcaagcaccaacctccagactcagcagagtgagggggtaaagcagttcctgtcccacatggccatcttctttcttccacccacaaactccaggctggaagtacttggcccccttcaggagcctggccaggcagggagagagtagctgcagccttcatcagaactcttcctcctcccaaggcattctcccagctctagcctctggactggaaagcacaagactggcccagtgccagcaagtccttaggctactgtaatgctgcctcaggacccatccctgcctggaggctcctctaggccctgtgagcacaaagaagaaagctgatttttgtcttttaatccatttcaggactctctccaggagggctcggggtgtgtcatttctatattcctccagctgggattggggggtgggctttgttgtgagaatggcctggagcaggcccaatgctgcttttgggggtcagcatccagtgtgagatactgtgtatataaactatatataatgtatataaactgggatgtaagtttgtgtaaattaatggtttattctttgcaaataaaacgctttccccgtctgttcttg

SEQ ID NO: 75548 - DNA, 1803 bp, Homo Sapiens
  misc_feature (175)..(218): n is a, c, g, or t
ggcacgagggagaggtcaggggtcagcaggagtgaggctggggcgtccaggtccgagaggtcaggggtcagctggagaggggctggggcgccggtttcccggaggtcaggggtcagaaggaacagggctgcagcgtcagggtccgagaggttaggggtcggcagaggcggagctnnnnnnnnnnnnnnnnnnnnnnnnnnnnnnnnnnnnnnnnnnnngcactggtagcctgctgcatgggcctccagcttcgcgcgctgttgggagccttcggacggtggaccctgcgcctgggaccgcgtccgtcctgctcgccgcgcatggccgggaacgcggagccgccgcccgccggagccgcatgcccccaggaccggaggtcctgcagcggccgggccgggggcgaccgcgtctgggaggacggagaacatccggcgaagaagctcaagagcggtggcgacgaggagcggcgcgagaagccgcccaagcggaagatcgtgctgctcatggcctattcgggcaagggctaccacggcatgcagaggaatgtcgggtcctcacaattcaaaacaattgaagatgacttggtgtccgccctcgtccggtcaggctgtattcctgaaaatcatggtgaggacatgaggaaaatgtccttccagcgctgcgcccggacagacaagggtgtgtccgcagccggccaggtggtatccctgaaggtgtggctgattgacgacattctagaaaagatcaacagcaccttccctctcacattcggattctgggactgaagcgggtcacgggcgggtttaactccaagaacagatgtgatgccaggacctattgctacctgctgcccacgtttgcctttgcgcacaaggaccgggacgttcaggatgagacctaccgcctgagcgccgagacgctgcagcaggtcaacaggctcctggcctgctacaagggcacgcacaacttccacaatttcacctcgcagaaggggccgcaggatcccagtgcctgccgctacatcctggagatgtactgcgaggaaccctttgtgcgggagggcctggagtttgcggtgatcagggtgaagggccagagcttcatgatgcatcagatccggaagatggtcggcctggtggtggccattgtgaagggttatgcccctgagagcgtgctggagcgcagctggggcacagagaaggtggacgtgcccaaggcgcccggactcggcctggtcctggagagggtgcacttcgagaagtacaaccagcgctttggcaacgatgggctgcatgagccgctggactgggcgcaggaggaaggaaaggtcgcagccttcaaggaggagcacatctaccccaccatcatcggcaccgagcgggacgaacgctccatggcccagtggctgagcaccttgcccatccacaacttcagtgccaccgctctcacggcaggtggcacgggcgccaaggtgcccagtcccctggaaggcagtgaaggggacggagacactgactgaggcgatgggagctgcccaccagagtgcctctgagcagctcacagtgtgtgcccagatgtgccacccctgtgggcagcaagaagctgggatcgctgcagccatgttttcccggccatgccggcgttgtaacctcaggaccttcccttgtaggaacagcctttctcgaatctgttttcagctcttgcattgcatagatgaacctcagcatgtaaagaactatttttttaaagaagtgattttcttattaaacaagtacaaattttgcttagtcaaaaagtcgacgc

SEQ ID NO: 75549 - DNA, 985 bp, Homo Sapiens
tcatgtgtcccagcataaggcatcaggttgttagatgctggcatctctgcagctcaaagatgtgggttctttttcttgtcattaacacattgttatttctgtaggagcaacttctctgatcaaaattacttttctgggtatgtgctgattaagggggtggacttatcaacactataattgttccctatgaaagattccacagagatgtttatggtgaggtttaaaggatatgaaactctacatttaaacaagtattttatatttgggtacagaggaagaaagagagggctttttccatggggctatagtagagagttagtggaatatagacaggactctgaaaacacaacttccagccatttttttagttagtaaaaatcctattaatgtgaaccagccaggaataacagtgttatttctattggatatggtttgggcttctcttgtcaaatctgtgtcggctgccccctgatccttccattatcaagttttgaagggtgttggggaaattatggcagctgctagggagatcagggaaacactgatgtaacctcaaagcctctcaccattcctcttggcttggaaaggctttattttttcatatacatttctagaaatattgctattctaccttagtatttcacatttgtagttcaaacaagcgattgtccatctgttgcctagagctatagtacatgtgtgttatgaatgaaatatgacagcatgttccatacccctgctttagccatctgtgggaaaccagcaaactgaaaaagacacctctgcaaaatgtgcctcaagtccatttcttgggatcgctcgtttggtgcactctcgtgggagacaatcagagaacaacatatacttgtgccttattttcaaagaatctatttacactactatgaatattccactgaagagtcaatgatgtaaatgataaccaccaaatctcaaaaatatactcaccaaaaagtaaaaaagtaaa

SEQ ID NO: 75550 - DNA, 898 bp, Homo Sapiens
  misc_feature (25)..(25): n is a, c, g, or t
  misc_feature (35)..(35): n is a, c, g, or t
  misc_feature (45)..(45): n is a, c, g, or t
  misc_feature (154)..(154): n is a, c, g, or t
  misc_feature (669)..(678): n is a, c, g, or t
  misc_feature (814)..(826): n is a, c, g, or t
gcgtttgttcgtacgtgtaagcctnaggatgaaanccagaaaagnccccagagtgggggtgaacctgcgtcacagcagagaaggaaaccagtggcgtggctaaaatactccccctccacagggaatgctcccaacacagaggaagacagacgtntgagataacggatatgcttacaagaaaaaagacccccttcatagcacagagaattgggctcaacttgtgcccaacttgtgcccttgcctcttagtgccactatgagccaagtaaaggcatcttcacattcagtcttcatttcctccacatgaaatggagatgaatgcctattctacagcacaagtgtgatgaatgaagacgggaagtcatgcaaaacgctcagcacgggcccctgctcaggcgagcactcaagagaagaagtcaactgaagcctcacagtaagaacctccacggtttcttgtggtcaacaagggaaaacattttggtccccaaaaagaaacaatcctttgtcagtcctattccgtgattatgctcttttaaagcagacacagacaaagccaggagtgatgccccttaaaaatttaactatatatcatattcatttattatcaatccacaggaaaatctgattgctacatgagctcataaaagcttttttcacctttacaaaattnnnnnnnnnntgtgccacaaggatgtaataacaactgctgataaacaagaaaaggaatcttaaaattataaatttgctgtagaaaagataaaaaacaattatattttatttagaattttaccttgaataaaatattcccctgtatnnnnnnnnnnnnngcttgctctggttagaattagagtatttttgtcttcaaatctgggaatttgcataatatttccatgatcttt

SEQ ID NO: 75551 - DNA, 2400 bp, Homo Sapiens
  misc_feature (244)..(254): n is a, c, g, or t
cagtcgacggtaccggacatatgcccgggaattcggccattacggccggggcgcttacacagtatggccggcgacattagctagcgctcgctctactctctctaacgggaaagcagcggaatacaagagactgaactgtatctgcctctatttccaaaagactcacgttcaactttcgctcacacaaagccgggaaaattttattagtcctttttttaaaaaaagttaatataaaattatagcnnnnnnnnnnnggaacctgaactttagtaacacagctggaacaatccgcagcggcggcggcagcggcgggagaagaggtttaatttagttgattttctgtggttgttggttgttcgctagtctcacggtgatggaagctgcacattttttcgaagggaccgagaagctgctggaggtttggttctcccggcagcagcccgacgcaaaccaaggatctggggatcttcgcactatcccaagatctgagtgggacatacttttgaaggatgtgcaatgttcaatcataagtgtgacaaaaactgacaagcaggaagcttatgtactcagtgagagtagcatgtttgtctccaagagacgtttcattttgaagacatgtggtaccaccctcttgctgaaagcactggttcccctgttgaagcttgctagggattacagtgggtttgactcaattcaaagcttcttttattctcgtaagaatttcatgaagccttctcaccaagggtacccacaccggaatttccaggaagaaatagagtttcttaatgcaattttcccaaatggagcagcatattgtatgggacgtatgaattctgactgttggtacttatatactctggatttcccagagagtcgggtaatcagtcagccagatcaaaccttggaaattctgatgagtgagcttgacccagcagttatggaccagttctacatgaaagatggtgttactgcaaaggatgtcactcgtgagagtggaattcgtgacctgataccaggttctgtcattgatgccacaatgttcaatccttgtgggtattcgatgaatggaatgaaatcggatggaacttattggactattcacatcactccagaaccagaattttcttatgttagctttgaaacaaacttaagtcagacctcctatgatgacctgatcaggaaagttgtagaagtcttcaagccaggaaaatttgtgaccaccttgtttgttaatcagagttctaaatgtcgcacagtgcttgcttcgccccagaagattgaaggttttaagcgtcttgattgccagagtgctatgttcaatgattacaattttgtttttaccagttttgctaagaagcagcaacaacagcagagttgattaagaaaaatgaagaaaaaacgcaaaaagagaacacatgtagaaggtggtggatgctttctagatgtcgatgctgggggcagtgctttccataaccaccactgtgtagttgcagaaagccctagatgtaatgatagtgtaatcattttgaattgtatgcattattatatcaaggagttagatatcttgcatgaatgctctcttctgtgtttaggtattctctgccactcttgctgtgaaattgaagtgcatgtagaaaaaaccttttactatatgaaactttacaacacttgtgaaagcaactcaatttggtttatgcacagtgtaatatttctccaagtatcatccaaaattccccacagacaaggctttcgtcctcattaggtgttggcctcagcctaaccctctaggactgttctattaaattgctgccagaattttacatccagttacctccactttctagaacatattctttactaatgttattgaaaccaatttctacttcatactgatgtttttggaaacagcaattaaagtttttcttccatgagttgagtccttaagaaaatgattccagttactcattttgcatatttgctattttaacattattggaccctgcatttatagtcctttgatttcttccctctccctggtgtctcccccaagaccccaaataaagcaatacactgttaacactgtgggtttatatactaattctataccccagatggggaatgggggagatggtccctgggcttaatattctttaaagggcatgggaatttagcctctcttttattgtaatgtgctcttattggaaaatagttggttagcagggaagacccagagttgtagatcgagattagggtgtactggctgaactgtggaaaaacatacaattctgtgttcctcagtcaaatgagattagcgtctaatgaggtagcagccctttactacacttagtagtagtataaaaatcattcttatttagttacttagcagagagattaggcata

SEQ ID NO: 75552 - DNA, 1927 bp, Homo Sapiens
gggtgaccccacactccacaggccgtctagcttatgtgaagacaggcatccagggggtcagcactgttgaccccctccttgtcatatggacagggctctgtccctcttgctgccacaaaggttgagaatctagggagaaccagaagcacctgcccttctgccaggccccttccccaccccccgtgcatccctgggtgtggtgttcacatgcctgctgcctcactcagaaggcccttctgtccccagaccccaccctctgttgttttgcacagcagaggccacttcgtctcatgagcctttccagctctgcagaggcttagcgggctctcagcctccgaagcctggcttgccatctgcacacagtcccacaggccactgcgcgggctcctgatgactgtgccctggcgagcgtggtcagggcaagtcggaatcttccttaacagagccccacggactacatccagcacctgggctctgcactagccagcctgagcccctgctccattccgcacagagtctaccgccaggcccacagcctgctctgcagcttcctgccatggtcgggcatctcttccaagagtggcatcgagtacagccggaccatgtgatgtcggctgggcagcctgggggaggctttcctcgcaagcacagagctctgaggctcagccccctggcacaggcggtcacgcatcaggacggttcctactcctcagcaccttccgtgcagttaccagtgccctgggaggtcacactgcccgtcggaccttggcatgctccattcagcttgacctgctgaggacaggcatcgccgagactccttgggtcctccccgccctccctcatgctgccacaagctgctgctccaaggcctggccacatgcagacaggaggaagctgagctcgacattaggcctcaaggctgccatctgtcttgtagggcctggccttgtgggcagggggcagtcctgtgccttgtgggccctcagcctctgagggcagagatgctgtcagtgccgcaggtgcatcacatacttctagcatcctctccaccctgcattccaaatgctgcttgctgcctgccctgccctccgatgcaggggtggggtggggggcggagtcccgcccagcatagctgcagtgtcacaaagccatggcagagggtcctagcggcgccaccctgccccagcctgaggaggagggagagggaggaacaaccctgggcagacggggcctcagggacctgtgtccttccgcctccagagctgcccagccacgggctctcagggtgctggggcagccccaggtcccctcttgaactcagctggggccaggggccctcagaatgaaggcaggcaccaggcaggagcagcatccccctccttgacggtgctggcaggagggccgcgccatgctgactgcttgaacctctgctgacctgacagtgctggcgggagggccgcaccatgctgactgcctgaatctctgctgaggctgcctgcctgccgggcccagctcagcgccctctccactgcgaatcagtggcgatcatgtgatttctatttctgccccacagggtaagggacgagtcttctggaaggctctgccatggacatttgtcctcgggctcagaggccccaccctgccccacacctgcccctaatcactgcagtgtccagcccagtgttgaacagattgtagcgttctgtctcattacgagcaaataaatagactttcattggaccccccccagggaacacaccacccccaaatcttgtgcggccgcctccggccctccaaaaaagctttctaaaccattccgtttggcgcgccggccccaataaggtaagtggaaccatggcccctaacctggtttcctaaggaaaatcctgggtcaaggaactaagggcgttggaattccccccccaat

SEQ ID NO: 75553 - DNA, 1116 bp, Homo Sapiens
ggcctgggtggcgaattcggcacgagggctcccttcgcctccaggatgcgctgagccctacaacacccccagctgccgccggctcccccacgaggtgtgaatgacagaggtggtgccatccagcgcgctcagcgaggtcagcctgcgcctcctctgccacgatgacatagacactgtgaagcacctgtgtggcgactggttccccatcgagtacccagactcatggtatcgtgatatcacatccaacaagaagttcttttcccttgctgcaacctacagaggtgccattgtgggaatgatagtagctgaaattaagaacaggaccaaaatacataaagaggatggagatattctagcatccaacttctctgttgacacacaagtcgcgtacatcctaagtctgggcgtcgtgaaagagttcaggaagcacggcataggttccctcttacttgaaagtttaaaggatcacatatcaaccaccgcccaggaccactgcaaagccatttacctgcatgtcctcaccaccaacaacacagcaataaacttctatgaaaacagagacttcaagcagcaccactatctcccctattactactccattcgaggggtcctcaaagatggcttcacctatgtcctctacatcaacggcgggcaccctccctggacgattttggactacatccagcacctgggctctgcactagccagcctgagcccctgctccattccgcacagagtctaccgccaggcccacagcctgctctgcagcttcctgccatggtcgggcatctcttccaagagtggcatcgagtacagccggaccatgtgatgtcggctgggcagccgccaccaggccccacccttcagccgcccgcagagcccgccttcctgtcatctgacccttctgtttctgcaagagctgccagccatctactgggctctcggcctgcccagctgcagcccggtgtaccgggctcggacagaaatcgtggcagccaaagctgccatcgtgcagtatcccataaccaaggaaggacttgtgcccatccaaacgtaggcttatgtaaaaaagtaacggaggcggggataaatctctttatatatcatgttatttca

SEQ ID NO: 75554 - DNA, 1329 bp, Homo Sapiens
  misc_feature (124)..(124): n is a, c, g, or t
  misc_feature (139)..(140): n is a, c, g, or t
  misc_feature (220)..(220): n is a, c, g, or t
  misc_feature (905)..(944): n is a, c, g, or t
  misc_feature (1177)..(1207): n is a, c, g, or t
gagtgtatcctagagattgccatgtttctctgcatgtgttgcgagatctcattctttttggatgcgttgattgaccatggacatcctatatgtgtgtggattaccagcatgatgatagttgttntagtgtgtgtgtttnntaaagagtgatcaagtaccggtgtaagctgtcaacatgccaagctggtgaaaaaatgaccatttcttcagaaagtaatcntcagcctgtggaataatagcaggtgaagacttcatagaaggcgacagattgatagggaggctattgaagcagtttttctgaagcctgcattttgagttagtttatagtgctaatagattctatataactgtgagagtttggtagtaaaccagtagggattgttttctctcctaaaaatttgcacactacttcattgtctaccaactttttacatattggaaaatagaaattgcaaatacatacatgtatggaaacatattcagattgggaaaaacaatggacattagtttttaaaaagttacgtggaagcaagatttctatatttgtttttttaaaggaagcagtcattctttctactaaatccatttcaagctagttctctgaaaattttgccatttatctacagaaatttgattataaatatgttcctttttcaaagaaactttattctagaacaaaatagtctatatggtacttgatctacatttaagtggaaaaattagcagtatttgaaagctcagtttatgtcattgtcttaacttcagatacaaataactgaacagaaagttttaacctttaatatctcatgttctgttttttattcagtattttcctttatgttaattcaattatatacttctgaatggcaccttactttttggaaacaaatcttctgttatttacnnnnnnnnnnnnnnnnnnnnnnnnnnnnnnnnnnnnnnnngctgctctcgataatagtcaacatttgcatatatatggaatttcttactttttttctcccaaactctatttaataaacttattttaatgtttgtgtatttcatgtataattgtgatctcaattataaaagtttaattcagcatgtctttgagccaatataattactgcacacccactaaattgggatcagccattataaataatgtagttttagaataataaaacatgacacnnnnnnnnnnnnnnnnnnnnnnnnnnnnnnntggcacatcggtgaaagtttatatgtgcagaagtttttttctttctcaagttaaaaattattttttgccatatgtaattttgtgttgcaggctgtcgagagataaaaatgattttaaatctg

SEQ ID NO: 75555 - DNA, 719 bp, Homo Sapiens
  misc_feature (45)..(45): n is a, c, g, or t
gtacatcagcgaacccatgcaggaaagaaagcccatggaagagcncacactcggaagtcaaagttcatggcacattagagagctaatcagcagtatctattatggacactgaaagaaagttgtgtcaattttactcacattttaaaagtatattttgacttgtggtttaaatatgggagtaaattcagcctttcttcttttcatctcagtcataacccaaaagctacgggagaaaaagcagaagtgtaatctctgtatctgacaaaattaggagacagctgcaaccctaatgagagggctgccacaggcagaggaaatgaagcactggtgcaggagatttcagagtgagagtgctcaaggctgcaggtgcaagacagcactggtaaggactcttagctgaggttcgggatataccccgaggcgcggaaccatagatataacagtggtaacagtgcgtgggcaggtaggaggtaggatgtttcctagaccatttggggtctgaggagaaacaggctggggcctcgagaaggagtcactcagacaagccatatttttagaaagtagtctactgatgggagcaacagttatggcatgctgggggaagagaagggacttttccttgtgaagagccctacagctgcccctatttactgacttgggagaagtaaagtcagaaagaacgaacagccgtggggggaaaaaattctcagttgtcaaaa

SEQ ID NO: 75556 - DNA, 670 bp, Homo Sapiens
tcctgcttgccatgggccaaaaggcacggggtggttttttctctccctaccctcaggattggacctcttggcttctgctggattggggatctgggaatagggactggagcaagtgtgcagatagcatgatgtctacactgccagagagaccgtgaggatgaaattaatagtggggcctttgtgagctagaggctgggagtgtctattccgggttttgttcttggaggactatgaaagtgaaggacaagacatgagcgatggagataagaaaagcccagcttgatgtgaatggacatcttgaccctccctggaatgacgccagctctgggggcagagggaggaggagaggggaaggggctcctcacagcctagtctccccatcttaagatagcatctttcacagagtcacctcctctgcccagagctgtcctcaaagcatccagtgaacactggaagaggcttctagaagggaagaaattgtccctctgaggccgccgtgggtgacctgcagagacttcctgcctggaactcatctgtgaactgggacagaagcagaggaggctgcctgctgtgatacccccttacctcccccagtgccttcttcagaatatctgcactgtcttctgatcctgttagtcactgtggttcatcaaataaaactgtttgtgca

SEQ ID NO: 75557 - DNA, 645 bp, Homo Sapiens
  misc_feature (65)..(65): n is a, c, g, or t
  misc_feature (72)..(72): n is a, c, g, or t
  misc_feature (409)..(409): n is a, c, g, or t
tgattaattagcaattctcattcctctcagccaaaggcctgcactgggctttatttgtctttttntattttntaagcactgcctgccagagatgggcctggggcctgatgaggaccttagcgctgctcgttctccttttctgttcatgcacacattcctccatggggtggggaaggcaggcatggggtgtggccctcggagaagttaggagtcccccagctcaagatacagtggcaaagacctagtggtcccctacccccacttctctcagttcctggcatgaggagagaagaccctgctctggtggagctgacaacctttgaggctgggaggagagcagcctctgggcatcgttcccagtgtccctcacactaaaacggcgtagatggcaacccccacccccaccccngctgctcaactcttgtgtttgttgttctgtttgccccatttatctgttgctgtttttgtgttgtcttcccctgctccgcattttgtaaaatggcccctgggggagtgtttttgctggatctgctccctctcgctctctcactccactactttttggaacaaagtgatggcagaatgcggtggtggtgggggtcttttgtactgttggattaataaaatgattttaaaatcccaaaa

SEQ ID NO: 75558 - DNA, 4330 bp, Homo Sapiens
  misc_feature (81)..(115): n is a, c, g, or t
aaaactgtatagatactatagggcgcccctcttcatagcgaacgacgagcgcagcgagtcattgagcgaggaagcggccgnnnnnnnnnnnnnnnnnnnnnnnnnnnnnnnnnnncagtcgacggtaccggacatatgcccgggaattcggccattacggccgggggggcgtcggtcgtcggtggggtcggagctgggcgcggagcccctcacagtgcagacgcccagcggcagcaggatgagtgcggaggcaagcgcccggcctctgcgggtgggctcccgtgtagaggtgattggaaaaggccaccgaggcactgtggcctatgttggagccacactgtttgccactggcaaatgggtaggcgtgattctggatgaagcaaagggcaaaaatgatggaactgttcaaggcaggaagtacttcacttgtgatgaagggcatggcatctttgtgcgccagtcccagatccaggtatttgaagatggagcagatactacttccccagagacacctgattcttctgcttcaaaagtcctcaaaagagagggaactgatacaactgcaaagactagcaaactgcccacgcgcccagccagtactggggtggctggggccagtagctccctgggcccctctggctcagcgtcagcaggtgagctgagcagcagtgagcccagcaccccggctcagactccgctggcagcacccatcatccccacgccggtcctcacctctcctggagcagtccccccgcttccttccccatccaaggaggaggagggactaagggctcaggtgcgggacctggaggagaaactagagaccctgagactgaaacgggcagaagacaaagcaaagctaaaagagctggagaaacacaaaatccagctggagcaggtgcaggaatggaagagcaaaatgcaggagcagcaggccgacctgcagcggcgcctcaaggaggcgagaaaggaagccaaggaggcgctggaggcaaaggaacgctatatggaggagatggctgatactgctgatgccattgagatggccactttggacaaggagatggctgaagagcgggctgagtccctgcagcaggaggtggaggcactgaaggagcgggtggacgagctcactactgacttagagatcctcaaggctgagattgaagagaagggctcagatggcgctgcatccagttatcagctcaagcagcttgaggagcagaatgcccgcctgaaggatgccctggtgaggatgcgggatctttcttcctcagagaagcaggagcatgtgaagctccagaagctcatggaaaagaagaaccaagagctggaagttgtgaggcaacagcgggagcgtctgcaggaggagctaagccaggcagagagcaccattgatgagctcaaggagcaggtggatgctgctctgggtgctgaggagatggtggagatgctgacagatcggaacctgaatctggaagagaaagtgcgcgagttgagggagactgtgggagacttggaagcgatgaatgagatgaacgatgagctgcaggagaatgcacgtgagacagaactggagctgcgggagcagctggacatggcaggcgcgcgggttcgtgaggcccagaagcgtgtggaggcagcccaggagacggttgcagactaccagcagaccatcaagaagtaccgccagctgaccgcccatctacaggatgtgaatcgggaactgacaaaccagcaggaagcatctgtggagaggcaacagcagccacctccagagacctttgacttcaaaatcaagtttgctgagactaaggcccatgccaaggcaattgagatggaattgaggcagatggaggtggcccaggccaatcgacacatgtccctgctgacagccttcatgcctgacagcttccttcggccaggtggggaccatgactgcgttctggtgctgttgctcatgcctcgtctcatttgcaaggcagagctgatccggaagcaggcccaggagaagtttgaactaagtgagaactgttcagagcggcctgggctgcgaggagctgctggggagcaactcagctttgctgctggactggtgtactcgctgagcctgctgcaggccacgctacaccgctatgagcatgccctctctcagtgcagtgtggatgtgtataagaaagtgggcagcctgtaccctgagatgagtgcccatgagcgctccttggatttcctcattgaactgctgcacaaggatcagctggatgagactgtcaatgtggagcctctcaccaaggccatcaagtactatcagcatctgtacagcatccaccttgccgaacagcctgaggactgtactatgcagctggctgaccacattaagttcacgcagagtgctctggactgcatgagtgtggaggtaggacggctgcgtgccttcttgcagggtgggcaggaggctacagatattgccctcctgctccgggatctggaaacttcatgcagtgacatccgccagttctgcaagaagatccgaaggcgaatgccagggacagatgctcctgggatcccagctgcactggcctttggaccacaggtatctgacacgctcctagactgcaggaaacacttgacgtgggtcgtggctgtgctgcaggaggtggcagctgctgctgcccagctcattgccccactggcagagaatgaggggctacttgtggctgctctggaggaactggctttcaaagcaagcgagcagatctatgggaccccctccagcagcccctatgagtgtctgcgccagtcatgcaacatcctcatcagtaccatgaacaagctggccacagccatgcaggagggggagtatgatgcagagcggccccccagcaagcctccaccggttgaactgcgggctgctgcccttcgtgcagagatcacagatgctgaaggcctgggtttgaagctcgaagatcgagagacagttattaaggagttgaagaagtcactcaagattaagggagaggagctaagtgaggccaatgtgcggctgagcctcctggagaagaagttggacagtgctgccaaggatgcagatgagcgcatcgagaaagtccagactcggctggaggagacccaggcactgctgcgaaagaaggagaaagagtttgaggagacaatggatgcactccaggctgacatcgaccagctggaggcagagaaggcagaactaaagcagcgtctgaacagccagtccaaacgcacgattgagggactccggggccctcctccttcaggcattgctactctggtctctggcattgctggtgaagaacagcagcgaggagccatccctgggcaggctccagggtctgtgccaggcccaaggctggtgaaggactcaccactgctgcttcagcagatctctgccatgaggctgcacatctcccagctccagcatgagaacagcatcctcaagggagcccagatgaaggcatccttggcatccctgccccctctgcatgttgcaaagctatcccatgagggccctggcagtgagttaccagctggagcgctgtatcgtaagaccagccagctgctggagacattgaatcaattgagcacacacacgcacgtagtagacatcactcgcaccagccctgctgccaagagcccgtcggcccaacttatggagcaagtggctcagcttaagtccctgagtgacaccgtcgagaagctcaaggatgaggtcctcaaggagacagtatctcagcgccctggagccacagtacccactgactttgccaccttcccttcatcagccttcctcagggccaaggaggagcagcaggatgacacagtctacatgggcaaagtgaccttctcatgtgcggctggttttggacagcgacaccggctggtgctgacccaggagcagctgcaccagcttcacagtcgcctcatctcctaagcactcctttcccctgctgtccccttcgaccctcagccctctggtgccgctctgcccgatgcacagccacctcagccagcccccaggtagaaacgtgggttaagctcttcctgccccgttcagcttcactcccaccctttcagcgtcctgccccttcaccttgacccgggttcccccactcccattccctggcctctgccataatttgttgttcaactgctccctccttcctgaggggcctcagggcttgtggggggtaggctgagaccccaccaccaaaggttaagtgaggtccccttgattgaggacttcaccccttgattaaagcaacttctgcttcagtaaaacacacacacaacacaaacc

SEQ ID NO: 75559 - DNA, 1208 bp, Homo Sapiens
tgtcgctgctgtcgtcggtgttcgtcgtattagctgttgacgcgctggatacctcgcgcacgttgtttttagtgcttgtggttcatcaggctcaatgctgtgggttccgccccccgctcgtgccctagtggtgctgtacacttgtgcggcgcgggatgtgtggggcccgtgttaatgtatcgggccgatccctatacgtgtgggtgttacttttcgggcccatgtgggttaacccccgtttctacctggggcctgctaaggtgctcttgcatcggccagaccggcaccagaggctaaggttcaaaggggacaccagggaaaggattgcttagagatgagcgactgttgaactggtgcagctgctcctggtcaagcaccaccggtgtcgctgtccaaaccaccgcacatgagaaggtcactttgccccatgtagactgtgtcatcctgctgctcctccttggcctgaggaaggctgatgaagggaaggtggcaaagtcagtgggtactgtggctccagggcgctgagatactgtctccttgaggacctcatccttgagcttctcgacggtgtcactcagggacttaagctgagccacttgctccataagttgggccgacgggctcttggcagcagggctggtgcgagtgatgtctactacgtgcgtgtgtgtgctcaattgattcaatgtctccagcagctggctggtcttacgatacagcgctccagctggtaactcactgccagggccctcatgggatagctttgcaacatgcagagggggcagggatgccaaggatgccttcatctgggctcccttgaggatgctgttctcatgctggagctgggagatgtgcagcctcatggcagagatctgctgaagcagcagtggtgagtccttcaccagccctgggcctggcacagaccctggagcctgcccagggatggctccaccagcaatgccagagaccagagtagcaatgcctgaaggaggagggccccggagtccctcaatcgtgcgtttggactggctgttcagacgctgctttagttctgccttctctgcctccagctggtcgatgtcagcctggagtgcatccattgtctcctcaaactctttctccttctttcgcagcagtgcctgggtctcctccagccgagtctggactttctccctcgggccgattcaaacccagcctcgtactagccg

SEQ ID NO: 75560 - DNA, 935 bp, Homo Sapiens
caggacaatcttataagtaatcccaaccaggcccactaacttggtgtggtctagctaaccccacacctgagcccttcagaagaggagcattgaacacaattatgcagagccaggaatggagtggggaacccggtcaagtgaagggcagacgctgaaaggtgggagtgaagctgaacgggcaggaaagagcttaacccacgtttctacctgggggctggctgaggtggctgtgcatcgggcagagcggcaccagagggctgagggtcgaaggggacagcaggggaaaggagtgcttaggagatgaggcgactgtgaagctggtgcagctgctcctgggtcagcaccagccggtgtcgctgtccaaaaccagccgcacatgagaaggtcactttgcccatgtagactgtgtcatcctgctgctcctccttggccctgaggaaggctgatgaagggaaggtggcaaagtcagtgggtactgtggctccagggcgctgagatactgtctccttgaggacctcatccttgagcttctcgacggtgtcactcagggacttaagctgagccacttgctccataagttgggccgacgggctcttggcagcagggctggtgcgagtgatgtctactacgtgcgtgtgtgtgctcaattgattcaatgtctccagcagctggctggtcttacgatacagcgctccagctggtaactcactgccagggccctcatgggatagctttgcaacatgcagagggggcagggatgccaaggatgccttcatctgggctcccttgaggatgctgttctcatgctggagctgggagatgtgcagcctcatggcagagatctgctgaagcagcagtggtgagtccttcaccagcctgggcctggcataccctcgtgccgaattccacacccaggcctcgtactagctaagttt

SEQ ID NO: 75561 - DNA, 637 bp, Homo Sapiens
tcccggatgagctccctaacagttgtctgcttgcagccctgagtgatcgagagactcggctgcaggaggtgcgctcagccttcttggctgcgtacagcagcacagtggggcttcgggcagtagcccccagtccttccggtgccatcgggggcctgctggagcaatttgcccgtggtgttggactccggagcatcagcagcaatgccttgtgaagaagccagcccatgacattttcctgctcctctatcagctgagcccttagcagagaatcaaagccatgcctggccgaaggggtacttccaggtcaggggaaatttcagtcccccatctccatcatgaacatggcagccccaaagctgagcaaggccaaagacagggttttccaacccccagcctcttgactggtgaccaccaccccttcttgtcactgtctcccacccaccccatctttgctgggattcccatcaactctcagaactgtgtggggtttccctggggccttgtggaagccatgacttcacaaagaccctacctgtcagttcttgtttctggggaggagggatcacctgcactgagaatgaggcagtttgacacagatcacaaaataaaatcaaagtctttttgaatagccaaaaaa

SEQ ID NO: 75562 - DNA, 665 bp, Homo Sapiens
ctcttcaatgacttgttccctttcaacaaattgcacttcagtccactgtgtacagaagtaatacatttcccatcgttagttgaataaatttacacactgtgtttaagagatgaaaccacgacttcgtcaagccacatttggttgccataagattccaaaggattctatcctcttaatgtgaaccacatgtaacccaaggttcttctatcaaggttagaactgatattcaaatcctcggctcattccacttagtaagtcagctccaagacacaggttcaccataaatggccagttttacctcctggtccccaacatgcttttgagaacaggtggcccctctttggagctcactggaatgactgaacctcatgccagcctctcctcaccccctcactgcccacaagacacccccttggtctcaggtcccagggctggtgacaaagtgatctttgcagtcttagaaaataaactgggaatctacaaaaggaaaagaaagcatacaaaatgtatctctttcttccaaaatacatgctttcagttctacgttttggtggagcctgaaagtattttcaagggagatataggttgagttaatttataggtttgtccttttctttcataaaaatactcttgtttggtaataaactttttcttctacagtaaga

SEQ ID NO: 75563 - DNA, 807 bp, Homo Sapiens
  misc_feature (534)..(551): n is a, c, g, or t
gctacaagcagaagaatgcttacattggcacacaaggtccttttggagaatacctatcgtgatttctggctcatggtatgggagcaaaaagtcttggtgattgtcatgaccacccgctttgaggaaggcggcaggagaaagtgtggccagtactggcctttagaaaaagactctcggatccgatttggcttcctcacagtgaccaatctaggcgtggagaacatgaatcattataagaaaacaacgctagaaattcacaacacagaggaacggcagaaacgccaggtgacccacttccagttcttgagctggccagactatggtgtcccttcctcagcagcttccctcattgacttctttttctgaggtctcctgtctcccactccttccctttcctaggattttatggggaggtttgatgagcatttgcctttctccccagagagcttgaccaagttacatattctagagatcgtcctgagtgccaagcacgtttataagtagggcgtgtattccagtcctttctgtcattcnnnnnnnnnnnnnnnnnncacttatgtgtatgggtccatatgtacgtgtgtatataatatatattgtatgtgataatatgatcgtattctataaatacatatacacacgatactcctttccagaagttcctgggggctccgtgttgcagttcaggactccttgcttctttggaccctactatttatcctggactagcttgggttggtgatcatgtctcctcttgtcaggctacagagtggtggaagaggaccacacacatctcctccatgttcc

SEQ ID NO: 75564 - DNA, 1549 bp, Homo Sapiens
  misc_feature (1071)..(1137): n is a, c, g, or t
ttttgatcatgtcggtatatttatatgtaaatacaaaactgtatcactgtaagatattgaatatgaacattacaattattttctgaatcagactcagtccattgatattaaatacaaaatgaaatgattgtaaaaaataataatatacacattcaaagagcttattacagtataaaattattgaggtctgatcagctgccaacctcatcttctgtcacaggggaaggtttaggagttcctgggattttttgggaatgtggagtgctgaggactcttgatttatccctagcacataaggatgagtgggctgggagcaggcagggacaggttgggtgggtaggggacaaacagtgattgcaggggaccacctcactcagccagggggtgaagctttttattgacacagaacccacccagtttgagggtctagcaggctagcaggcaggaagagatgggcatctcggtagacagggccaagctgcataaaggaaccatccagcaaaagaaaaagggccccagctcatcctcccagggaggtattttcttagtggttttttctttctcatacctgggctccccctccttccttctaagattcgtaccgattgcatttggctctggctgctcagtgagttcatctctaccctccgcctcccatccctgggatagtgaaagcaaagagagagtatggaatcacagtggaggtctgttccccaaattggccaagtaaatgtagaaaaatcatcggataagggaaatccatgctgagctaacccagtgtcaccacaactaatacattcttggctccaacaggtggcaactggaaggagataagtcattacttaaggaaggggccctgtggcaggaacatggaggagatgtgtgtgtgtcctcttccaccactctgtagcctgacaagaggagacatgatcaccaacccaagctagtccaggataaatagtagggtccaagaagcaaggagtcctgaactgcaacacggagccccaggaacttctggaaaggagtatcgtgtgtatatgtatttatagaatacgatcatattatcacatnnnnnnnnnnnnnnnnnnnnnnnnnnnnnnnnnnnnnnnnnnnnnnnnnnnnnnnnnnnnnnnnnnngaatgacagaaaggactggaatacacgccctacttataaacgtgcttggcactcaggacgatctctagaatatgtaacttggtcaagctctctggggagaaaggcaaatgctcatcaacctccccataaaatcctaggaaagggaaggagtgggagacaggagacctcagaaaaagaatggcgggagaaaggaggagggaggttccttccccacttacctcggggaccctagcaaaatcatagccacatttggttttaataaggcacagtttgatagcagatgctaggaattaagaacacattgctactggccctttctagtggcaatttcaccgacgcgtgggtcgacgatatcccggattccgaccgtaccagcctgctttttgcacaacttgttctatattcacatgcc

SEQ ID NO: 75565 - DNA, 711 bp, Homo Sapiens
ttttttgaaatggaagtgtgtttaataatttgaaaccacaggagaggtctgctcatttattacagggccatgttttagctcttcctggatcgtctcagatctgccattcctctggatatgaacctgtggccgtggcagaaacccagaaatcagtaggggcttgttgtgttcttgtttgatcttcacgttaagatgctattgagcttttttatccatggatggtcttccaacaactgcatccctcacagtggcctgagtggaattaccgatatgagaagaagcctgctccaacacatatgcggcaccaaaatcaatagctccgcccagctcacgatattgaccagaatacctgatgtagccccaggtgaggagtgctattaacagtagtccaaccatacagttgaacaactgggctacaacctcaagacctatgaagccagtgaggcctgaggctatgtacaaagctacaatgcccgtgaacagcactgcaggggttcggaaggtgctgaagacgttcttgctaccattgtgcttgcagaagttctcatataattccttgatttcctcctccagctcctgctggtaacgaaagctgaaatccttcccacccatcttcttggtcttcttaaaatggtccagagcaagttgtttgaattcacagtgcttctcctctagaatgtctggagacaaataaggtttctctcccccacc

SEQ ID NO: 75566 - DNA, 686 bp, Homo Sapiens
caacaccgactacttagaatttgtgaagggtattttaagcctggaatattgtgtgggtattatggggtggcaaacctaaacagtcatattactttgctggatttcaagatgacagtttgatttacatggatcctcattactgccaatcttttgtagatgtcagcataaaggatttccctcttgagacattccactgcccttctcccaaaaagatgtcttttcgaaaaatggatcccagctgtacaataggattttactgtcgaaatgttcaggacttcaaacgagcttctgaagaaatcaccaagatgctgaaattttcttctaaggagaaatatcccttatttacttttgtaaatggtcattccagagactatgattttacatctactacaaccaatgaagaagaccttttttcagaggatgaaaagaaacaattaaaaagatttagcacggaagagtttgtcttgctttaaagattagcacatttgtgcttgataagaagaattccattgaaaggggaaaaatgaagagaaacaagtatatctgaaatgtttattttcacaaatatcttaattttatatgttctttaaaaaagaacatttgaaaatataacagttaaagatatttttctaaaagagaaatgatttaatgaatcttgctttctaataaataaattgagtgataaa

SEQ ID NO: 75567 - DNA, 466 bp, Homo Sapiens
tttgatttaagttattttattctgtaaaattactttagtctgtaaaagcaccaactgggaaaacaatcaaaaccatgtaataattacatgtttcatttatgtattctcaaatttttctgaattaaaatactggatcacaaaatgacctcaagagggaaatcctttatgctgacatctacaaaagattggcagtaatgaggatccatgtaaatcaaactgtcatcttgaaatccagcaaagtaatatgactgtttaggtttgccaccaataatacccacacaatattccaggcttaaaatacccttcacaaattctaagtagtcggtgttggttctttctccaccaagtctaacaggaactagaataataacagctttgtcatctgcattatcagaagtcatggaagcactctgtttatcaattacatcagaattgtaaactgtacaatcttgtgcaacataaatag

SEQ ID NO: 75568 - DNA, 880 bp, Homo Sapiens
  misc_feature (41)..(82): n is a, c, g, or t
  misc_feature (86)..(120): n is a, c, g, or t
ccccttggaatagatcactatagggcgcttagctcgtcgtnnnnnnnnnnnnnnnnnnnnnnnnnnnnnnnnnnnnnnnnnnccgnnnnnnnnnnnnnnnnnnnnnnnnnnnnnnnnnnncagtcgacggtaccggacatatgcccgggaattcggccattacggccggggactctgggcaggatccaacgtcgctccagctgctcttgacgactccacagataccccgaagccatggcaagcaagggcttgcaggacctgaagcaacaggtggaggggaccgcccaggaagccgtgtcagcggccggagcggcagctcagcaagtggtggaccaggccacagaggcggggcagaaagccatggaccagctggccaagaccacccaggaaaccatcgacaagactgctaaccaggcctctgacaccttctctgggattgggaaaaaattcggcctcctgaaatgacagcagggagacttgggtcggcctcctgaaatgacagcagggagacttgggtgaccccccttccaggcgccatctagcacagcctggccctgatctccgggcagccaccacctcctcggtctgccccctcattaaaattcacgttcccaccctgtgtccacttcatgattcctcgcaagctgggcccagtcctctcatcccaagagcagagccaccgtagccggagtcctagcctcccaaattcggaaatccaatccaacggtctcaggaatgttttccatcccgccacgcgcctcccgaagctcccagaccggaggctcaggccccatctcggtaaaatacctgttttctgacaagactaggactcttacatagactgccatgaactacaagaagtatagcattgctcaaatac

SEQ ID NO: 75569 - DNA, 430 bp, Homo Sapiens
cagtcgacggtaccggacatatgcccgggaattcggccattacggccggggactctgggcaggatccaacgtcgctccagctgctcttgacgactccacagataccccgaagccatggcaagcaagggcttgcaggacctgaagcaacaggtggaggggaccgcccaggaagccgccatggaccagctggccaagaccacccaggaaaccatcgacaagactgctaaccaggcctctgacaccttctctgggatcgggaaaaaattcggcctcctgaaatgacagcagggagacttgggtcggactcctgaaatgacagcagggagacttgggtgaccccccttccaggcgccatctagcacagactggccctgatctccgggcagccaccacctcctcggtctgccccctcattaaaattcacgttccc

SEQ ID NO: 75570 - DNA, 1916 bp, Homo Sapiens
ggcgaggcggaggagccggtgctgagcagggacgaggactcggaggaggacgcagactcggaggcggagcgggagacgccgcgggtcacggcagtggcggtgatggcggcggagcccgggcacatggacatgggcgccgaggccctgcccggccccgacgaggccgccgctgccgcagccttcgcagaggtgaccacagtgacagtggccaacgtgggggctgctgcagacaatgtcttcaccacgtctgtggcgaacgcggcatccatctcaggacatgttctgtctggtaggacggcccttcagatcggggacagcctgaacaccgaaaaagcgacactgattgtcgtccacacagatgggagcatcgtggagaccaccgggctgaaaggcccggcagctcccctcaccccaggtcctcagtctcctccaacccctctggctcccggccaagaaaaaggtggaactaaatacaactgggacccttctgtgtacgacagtgagctgcccgtacggtgccggaacatcagcggcactctgtacaagaacaggctcggctcaggcggccggggacggtgcatcaagcagggggagaactggtacagtcccaccgagtttgaggccatggcaggaagagccagcagtaaggactggaaaagaagcattcgctacgcgggccgacccttgcagtgcctcatccaggatgggatcttaaaccctcacgctgcctcttgcacctgtgctgcctgctgcgacgacatgaccttaagtggcccagtcaggctttttgtgccttacaaaaggcgcaagaaggagaatgaactgcccacaactcccgtgaagaaggactcccccaagaacatcacattgcttccagccaccgcggctaccaccttcaccgtgaccccctcgggacagatcacgacctcgggggcactgacctttgaccgagcgtccacggtagaggccactgctgtcatatcagagagtccggcccagggcgacgtcttcgcaggggccacagtccaagaggccagcgtgcagcccccatgcagggccagccaccctgagcctcactaccccggctatcaggacagctgccagatcgcaccgtttccagaagctgcgttgccaacgtcacatcccaaaatagtgttgacatccctgcctgcgctggcggtcccacccccgactcccaccaaagcggcacctcccgcgttggtcaatgggctggagctgtcagagccgcggagctggctgtacctagaagagatggtcaactccttgctcaacacagcgcagcagctgaagacgctgtttgagcaagccaagcatgccagcacctaccgagaagctgccacaaaccaggccaagatccacgctgacgcagagcggaaggagcagtcctgcgttaactgcggccgggaggctatgagcgagtgcaccggctgccacaaggtcaactactgctccaccttctgccaacgcaaggactggaaggatcaccagcacatatgcggccagtcagcagctgtcaccgtccaggcagacgaagtccacgtggctgaaagcgtgatggagaaggtgaccgtgtgaggctccatcggccgccctgggagctggggcccctcgcactcctgtgaggcttttgcaggtcgaaggcccccctgaggactctggggggacgttgagaagaggggtgtgggaaggtaaagaaacttgctggacaagtcattaacacactttaagcgaatggtgccctgggaagcgcactccccctgcccgggccccctgcccgctcgcggacagattttttatccctgggatcatgagcgtccggtcttgcccacagggcctgtgctgcgacgcacatacatacgtgttgtgtctgtcaataaagtgtaaataaggtcaaa

SEQ ID NO: 75571 - DNA, 1015 bp, Homo Sapiens
tcggacgaggggagaatgaactgcccacaactcccgtgaagaaggactcccccaagaacatcacattgcttccagccaccgcggctaccaccttcaccgtgaccccctcgggacagatcacgacctcgggggcactgacctttgaccgagcgtccacggtagaggccactgctgtcatatcagagagtccggcccagggcgacgtcttcgcaggggccacagtccaagaggccagcgtgcagcccccatgcagggccagccaccctgagcctcactaccccggctatcaggacagctgccagatcgcaccgtttccagaagctgcgttgccaacgtcacatcccaaaatagtgttgacatccctgcctgcgctggcggtcccacccccgactcccaccaaagcggcacctcccgcgttggtcaaagggctggagctgtcagagccgcggagctggctgtaccctagaagagatggtcaactccttgctcaacacagcgcagcagctgaagacgctgtttgagcaagccaagcatgccagcacctaccgagaagctgccacaaaccaggccaagatccaacgctgacgcagagcggaaggaggtaaccttggaacaaatgggaagacacgaccctgtgcccgagtaaccccaggccaccctggtgcctgtgcccagctgcgcaagacccaccttggctcacaaggcccctgccccacctttctgcaaaagggagctgtgggaaagtcatttacaaatgaagccttttcctaaagaaaaatgacagcttattggtgttaaaggcgggttttggtttttggaaaataagggtgcttttgttttcacgaaaggggaaaccattttgggggccccttccggcccggtggtgaataccccccccttttcctaggggattatttccctcccctttggccctccccggtacgcggaacatgggccttaattcttttacgcaaagtttgggagaaaacctctcaaaaactagcagaccgttaga

SEQ ID NO: 75572 - DNA, 1807 bp, Homo Sapiens
aaggtagcgaggcctgggtggcgaattcggcacgagggcaggatgcccaggagttcttccttcaccttatcaacatggtggagaggaattgccggagctctgaaaatcctaatgaagtgttccgcttcttggtggaggaaaagatcaagtgcctggccacagagaaggtgaagtacacccagcgagttgactacatcatgcagctgcctgtgcccatggatgcagcccttaacaaagaggagcttctggagtacgaggagaagaagcggcaagccgaagaggagaagatggcactgccagaactggttcgggcccaggtgcccttcagctcttgcctggaggcctacggggcccctgagcaggtcgatgacttctggagcacggccctgcaggccaagtcagtagctgtcaagaccacacgatttgcctcattccctgactacctggtcatccagatcaagaagttcaccttcggcttagactgggtgcccaagaaactggatgtgtccatcgagatgccagaggagctcgacatctcccagttgaggggcacagggctgcagcccggagaggaggagctgccagacattgccccacccctggtcactccggatgagcccaaagcgcccatgctggatgaatcagtcatcatccagctggtggagatgggattccctatggacgcctgccgcaaagctgtctactacacgggcaacagcggggctgaggccgccatgaactgggtcatgtcacacatggatgatccagattttgcaaaccccctcatcctgcctggctctagtgggccgggctccacaagcgcagcagccgacccccctcctgaggactgtgtgaccaccattgtctccatgggcttctcccgggaccaggccttgaaagcgctgcgggccacgaacaatagtttagaacgggctgtggactggatcttcagtcacattgacgacctggatgctgaagctgccatggacatctcagagggccgctcagctgccgactccatctctgagtctgtgccagtgggacctaaaagtcccgggatgggtcctggaaagtatcagctctttgccttcattagtcacatgggcacctctaccatgtgtggtcactacgtctgccacatcaagaaagaaggcagatgggtgatctacaatgaccagaaagtgttgcctccgagaagccgcccaaggacctgggctacatctacttctaccagagagtggccagctaagagcctgcctcaccccttaccaatgagggcaggggaagaccacctggcatgagggagaggggctgagggatggacttcagcccctctgctctgtaccctttttccttttgtccccggcagcagggaagaagctggaggccgtgggagaatggctgggcagagcagaggggcagcgatagactctggggatggagcaggacggggacgggaggggccggccacctgtctgtaaggagactttgttgcttcccctgcccccggaatccacagtgctctgcttctctgtgtcgccccgcccagccccctggtgtggagggaggggtctcgtttgtgcgcgtgggtgtagctttgtgcatcctctcccagtggagcgatcacctgtgcctcccctccccctttgtttgcccctgtgtggttggtcaaggagggatgtgagggaaatagggaccccccgacttgccctcctgcctcagtctttcccccaccctgtctcttccttgtccttctctggaaaatgccaaaatacacgatgtgaataaaagtacaacggctaaaaaa

SEQ ID NO: 75573 - DNA, 855 bp, Homo Sapiens
  misc_feature (628)..(643): n is a, c, g, or t
gtcctcccaccaccccagggggcaggcaggcaggccccctcccgtgcgaaactgttaacttattcagctcgctggctttgcacagcctgtcctgggcccagccctgagccccgggccggcgcaggtgggcgtcacctggggactccccactgtcagcagcagccccgggacaccctacccccagcaaccccagtggttccccttcttggtattaagtgcaattaaagccgtgggtgtcgcattttttccagcggtgggccctcccttgcccccaagctcaagaagggggcactgcccggcccggctgtgaggagggcggcagggggcacggcctccagcttccaaagagcagcgagccgcggagccggggagtgcccacagaccccagcccccgcgcccccgccctccgccggtggtttgtaatggaaccttttctgtgcccctatcttcccggagaccacgcttctcctccgtgccgtgcgacccccaccccatgactattgtgcgattcgtgagcgccgcccgagcggagttggtaacttgttgggtttttttccaaccatcatggccttatctgttccagttttctcagtgttttcagcctgtgagatagatgtttatggcaagnnnnnnnnnnnnnnnntggaaatctgacctattgtataaaaatcactattttgtgtgctccgcgtgctatagcttttggggcggccctgcccagtccccgtgcccacggggctccctctcccggtggtgaaagtgtccacacgtgtggtagtctagtgtgccgagctgttttctacctttttgtagtctttcttaaaacaataaattccgctgtgatatttgcctaaa

SEQ ID NO: 75574 - DNA, 985 bp, Homo Sapiens
  misc_feature (187)..(187): n is a, c, g, or t
tcccgtctttgttgattggcgtacattaccggacagttgctgtcgattatcgatcattgggagtgcctcgggcagatcgcacgaagaacatcaagccactcaacagttcaaataaagaagtgcaagtagcgatgatatatatctgctgtgtatccagtgtcaggacatataagactccaaaagcatntgaagaatgcaatatcaaatagtgtatgtcctctcaaatgaggcattttaattgctacatctatctggacgctcaggttatgatatgtttatgaaaaataagcttcagtattctaatagctacatcctattattcccttttagaaacaagaataacaataagttttaatagttgccatacttagcatgtatcaggtctaatgaaaccaatattgaatctctgataaatattttctgatgttactagctatgggaaattagaactggcacaaccctgacattactaagtggaaatgttaggatttttcggcatcgcatgttagaatctctaaaatttaaacattcctgttaaatgactaaggtttgcttttatcaatatgaattctgaaggccaatatcataccattaactatgaaagcttttaattcctaaaaatagttttagagatattcaagcaatgctctcctaatatccatacgcaagtgtgtttatgacacaaattcactagtctgtttaaaaatgaattctttatattgactggtgttccacatatttcagtaatttctgttatgagaggacttgaaatagcaaattgccacacagttaactggatagaccacgtacgtggtgatcataaccacttggtactacacccagaaactcaaaattgtctttctcctgatgagatatgggtgtccttttgtacgtctaggcctaggtaaccagtggagtgattatattagcaaatgtgtttgtatccagagtcttcctgtcattgtaataaaaaatttatttaaaa

SEQ ID NO: 75575 - DNA, 980 bp, Homo Sapiens
  misc_feature (26)..(26): n is a, c, g, or t
  misc_feature (52)..(52): n is a, c, g, or t
  misc_feature (60)..(60): n is a, c, g, or t
  misc_feature (133)..(133): n is a, c, g, or t
  misc_feature (135)..(135): n is a, c, g, or t
  misc_feature (137)..(137): n is a, c, g, or t
  misc_feature (183)..(183): n is a, c, g, or t
  misc_feature (198)..(198): n is a, c, g, or t
  misc_feature (215)..(215): n is a, c, g, or t
  misc_feature (251)..(251): n is a, c, g, or t
gacgcacggcgagacaactgtctctnttgtgtgtgaggccggatgaccctgngcgtgccntcaccagagtgacctatgctgctgaccagataaccggacacgtgatgacgcctcagcccgacgtgattcatcntntntcagagccagtcaacgacataacatcgcaagcgctgccccctcttntgccccgtctccagnatggagcaaagaattcntacgtgcgggacgatgccatcttcatcaagccattngtggacctgacagggctctaactgccccctactggtgtctggggggtgggggcagccaggcacagccggctcacggagggcccaccacactgggccagggtctcactgtacaagtgggcaggggccgcgcttgggcgcttgggagggtgtcggcctgcagccaagttcactgtcacgggggaaggagccaccagccagtcctcagatttcagagactgcggaggggcttggcagacggtcttagccaagggctgtggtggcattggccgagggtcttcgggtgcttcccagcacaagctgcccttgctgtcctgtgcagtgaagggagaggccctgggtgggggacactcagagtgggagcacatcccagcagtgcccatgtagcaggagcacagtggatggccttgtgtccctcgggcatgacaggcagaaacgagggctgctccaggagaagggcctcctgctggccagagcaaggaaggctgagcagcttggttctcccctctggcccctggagagaagggggagcattcctagacccctgggtgcttgtctgcacagagctctggtctgtgccaccttggccaggctggctgtgggagagggtctggtcccacgccgcctctgctcagaccactgtgtgggaggtgcacagcacagcctgcgggtaaagtgtgagagcttgccatccagctcacgaagacagagttattaaaccattcaaatctc

SEQ ID NO: 75576 - DNA, 815 bp, Homo Sapiens
gcgaaccgcggacgcgtgggtgcaggctggccggtgccaaagcgtgtggccaagctgtcaccgaagaaggcgtagagctcccggtagatgtcggccagggtcaccgaaagagaagggtcctccggccccgcgccccctggcggcagcgggaggccggacccaaagctgggttctgcaccgcccccggaggacgactcttgaaagagaaggctgtcccatggcaggtcgtccaggcgccggcaccccctgccacctgggccacccctgttgggctctgctgcctgggccttcatcttcagcagtcgctctaccgccacctgtaagagccaaggactaagataggcaaaaaattcgaggaacctgggcccatcaaatattccaaagtaagcctgcttggctgctaagctcatgcagggaagggaggctggaaggggacggtactcaccagaatggctccatagactttgtgtccatctgctttgacctgggcattagatactgaataatcatccagcacagcctgcaagtttgtccagtaggtggacaggtgtgggtacaggactcgttctactgcctggaaggaagagaaggaatacagttagcatgtctttgatacttattccctctcaaggaccctttcccatgaaagacctacctttatctctgatcctagacagggctcaatcctcctaaattccctgattggcatattcaaccatatatttatttggaacctactgtatacctaagctaggcattgggaataaagataaggtacaaagggagacaataaaaaatatacccaatatcaaaaa

SEQ ID NO: 75577 - DNA, 1108 bp, Homo Sapiens
  misc_feature (927)..(927): n is a, c, g, or t
attgttaagacaaagggggtgcacttcctggccaggaaacctgagcggtgagactcccagctgcctacatcaaggccccaggacatgcagaaccttcctctagaacccgacccaccaccatgaggtcctgcctgtggagatgcaggcacctgagccaaggcgtccagtggtccttgcttctggctgtcctggtcttctttctcttcgccttgccctcttttattaaggagcctcaaacaaagccttccaggatggtatcaagggctccaggacatctgatgcggtgccaaggcatgggagtgggacgctgacccttcgctattgagtagctgctgaaacagccattgttcctgccccttggctctttcaggtccacctggcttatgtgcatcaacgcacagagaacattaaagaaaggtctctacagtccctggcaaagcctaagtcccaggcacccacaagggcaaggaggacaaccatctatgcagagccagtgccagagaacaatgccctcaacacacaaacccagcccaaggcccacaccaccggagacagaggaaaggaggccaaccaggcaccgccggaggagcaggacaaggtgccccacacagcacagagggcagcatggaagagcccagaaaaagagaaaaccatggtgaacacactgtcacccagaggacttgtggcaggggcaaaggtgtggtagctggaacctgagtgtctgggagctcctgggacaaagacagtggggccttggctgggatccgatggtccaggtggcttccatgtgcaggcaaaggtgaggtacctggaatctgaaggtctgggaggtgacatggcaagggtggtagggtgtcgcctgggccctggggatccaggctgcttccatgccaagacaaaggctggatgggttgactgcagacaggntctgggccctgaacatccctggaacctccttgctttgtcagtgggatattggttggctctcgctgtctaggtgaccttcttgcttgggcaacaggggtggtgactgaaactgtgaaatcagaacaatctccttgggcaagctggagtggtgaacgcgtatgtcccccagtgtcctgccccc

SEQ ID NO: 75578 - DNA, 622 bp, Homo Sapiens
cactagtatggctggaaggcagggcatctcaaaaacatcggaaatgtcagagagactaggaaggcgagaaccttcgggaatttcacagcggctgggaatttcaggaaggttgggcacgtcaggaattttggtaaggcaggcaatgctgggcatttcagctgcaagggaactttcgagcccttccaggacgtggagtggggaaggcccccgttcatccatctccagcccttcctcttcctcctcctcctcttctgaagagtcccggctgggcagggcttggaatgtgagggtttcgctgtcgccaggcacctgggagtctccggggaacttgggaatgtcatgggtggacggccctggatctcgaaggcctcgctgattcagcagttccaggatttcttcagtgattgaggtcccagaggggtccagtggtgggggtccagcatcctccaggttcctcagggggtgcagagcctgaaactggtggctgagattctggagggtagagttccccttcgctgccagcgtgcttgaatccaggcttagcgttctgtgggaacatgacataagggtccttcaccggctctgcggggaggacacagtgatgtcaggagcccagctccca

SEQ ID NO: 75579 - DNA, 1317 bp, Homo Sapiens
  misc_feature (882)..(882): n is a, c, g, or t
  misc_feature (934)..(934): n is a, c, g, or t
aacgggtgatgcggttggagaagacgggtaagtgggaagatggataaatggagggatggaatgccagatggggttagaatgataaagggatgggtgggtgaataaggcagacagttggataagcaaggcagatacgtgagatgatggattggaagatgggtagatggagcgggaaagctagatggagcaatagccagatggataggtggagagatggcagggtgggtgagatgaacggatggtgggagacgtgaactgtataaattgccaagggaatggatttctagtgtctacttgaagcaaagcttcttaacttggctttcctggatgggcatcaagcagttcacacacacgccaagttatagtgggtccattttccaataattctcaaaggagtctgagattccccaagctttcagaaccgctgatttgttctgtgtcagaccttcccattcattgtcttgtcatctcccacagcctccagaatgggaaaatacacatcattgcatgaaagaatcagtattaacaaaacattaatgacattcccttccccatccctgtggatcaaggcaagaagggccattcgccgatgcagataccaggagttggaaggccgcagcagttttgaggcctgcgttcagtgtctggacttccaggtcaagttctgagggtctatggcatctggctgaaatccttgcttcagggaagcctcatgtcctggctcacatgtggaagggggcatcaggagccccctgggccctgtgaaggcccatagattcctgtgtggaggccaagaaagcagggtggttcaaccggacctgggccttggctggccgcaaccgcccacccccgcccacgtggatgttaaccgtcgtggcatanctgagccgcctggctgcgggaggtggtggctggggctgggggggcggcgaanatgcccgtgacgtgggagcagaggaccaggagccccggaaggctgcgggggaccctcccccaggcccctgccaccgagccaggctttggctgatatatgaggctgccaggtatctggagagggcagctgcattgggctccagaagctcacggctggaaggtgggggtctataaggtggcgtcaagtctgaagactccaacctggcaacgtgagaggctaaggagcctcctggtttggacaaaaccatggtggtctgacctggggtgggtgagaggccctgaatgtctagagagcctcctctctcaggtaaaggtgtggcagctggaacatgggcatctatgaggctcttctgctccaacgaaggtgtgagtttttggtcctgt

SEQ ID NO: 75580 - DNA, 396 bp, Homo Sapiens
ggccgccgagcagatacacaggtcaaaaactcacaccttcgttggagcagaagagcctcatagatgcccatgttccagctgccacacctttacctgagagaggaggctctctagacattcagggcctctcacccaccccagttcagaccaccatggttttgtccaaaccaggaggctccttagcctctcacgttgccaggaatctatgggccttcacagggcccagggggctcctgatgcccccttccacatgtgagccaggacatgaggcttccctgaagcaaggatttcagccagatgccatagaccctcagaacttgacctggaagtccagacactgaacgcaggcctcaaaactgctgcggccttccaactcctggtatctgctcgcacgtt

SEQ ID NO: 75581 - DNA, 665 bp, Homo Sapiens
  misc_feature (596)..(596): n is a, c, g, or t
aagttgttccaaaaatcctctttaataatacatgtagccaacattgctgcaatcagtataaaaacaaagttattcctgattttgtataaatgaacacgtcgagagtcaggattataaagcatcaagatacaagtaccaagtgggaggaccaaagacaactcacagtgaagagaaacgcttgagaacaagaaatgtcagagttgtaggacgtggtaacaacccagggtgctgaaacggtcagaggtgcaggtgcagacgcaggcttctgcctctgcaagggcaagggggccgttggtggctggctgcaaaggaccagtgccaggcagcggggcagagagcaccaggggtctcgactctgcaaattgggctttgcagaggattcctgtttcccacctccccacccctctgacagagactgaggagaccacacacgttgacctcctcttcatagccagccatcatttccactccaacattctgctgcgggtgtcattctggaaaataattccttgctgttccttgctcctttcagatcacagcttgcctggtcagaccccttcccaacatgcacagtctgagtccaggaggccctcganagtcaggcacaacacccagatctggtcctcttgggtggcttatgactggatatatccacctcgtgccga

SEQ ID NO: 75582 - DNA, 1006 bp, Homo Sapiens
  misc_feature (51)..(51): n is a, c, g, or t
  misc_feature (160)..(160): n is a, c, g, or t
  misc_feature (168)..(168): n is a, c, g, or t
  misc_feature (170)..(373): n is a, c, g, or t
  misc_feature (411)..(411): n is a, c, g, or t
accacaggctttacgtctgcttgtgctttccaattctctgctatcctgatnttgaacgtataccccttgatggtgtccgtccgcacgaacgacggcgagcgatcatagcgaggagcggagacgccaataccaaaccgccttcccgcgcgtgccgatcatnaatgcagntnnnnnnnnnnnnnnnnnnnnnnnnnnnnnnnnnnnnnnnnnnnnnnnnnnnnnnnnnnnnnnnnnnnnnnnnnnnnnnnnnnnnnnnnnnnnnnnnnnnnnnnnnnnnnnnnnnnnnnnnnnnnnnnnnnnnnnnnnnnnnnnnnnnnnnnnnnnnnnnnnnnnnnnnnnnnnnnnnnnnnnnnnnnnnnnnnnnnnnnnnnnncccaagattcggcacgagcctccttcctcctccttccncggaccctccaccaacctgcatagcccaaatccaagtgatgatggagcagatacgcccttggcacagtcggatgaagaggaggaaaggggtgatggaggggcagagcctggagcctgcagctagcagtgggcccctgcctacagactgaccacgctggctattctccacatgagaccacaggcccagccagagcctgtcgggagaagaccagactctttacttgcagtaggcaccagaggtgggaaggatggtgggattgtgtacctttctaagaattaaccctctcctgctttactgctaattttttcctgctgcaaccctcccaccagtttttggcttactcctgagatatgatttgcaaatgaggagagagaagatgaggttggacaagatgccactgcttttcttagcactcttccctcccctaaaccatcccgtagtcttctaatacagtctctcagacaagtgtctctagatggatgtgaactccttaactcatcaagtaaggtggtactcaagccatgctgcctccttacatcctttttggaacagagcacggtataaataataaactaataataatatgccaaaaaa

SEQ ID NO: 75583 - DNA, 925 bp, Homo Sapiens
  misc_feature (462)..(490): n is a, c, g, or t
  misc_feature (809)..(818): n is a, c, g, or t
ggagccctggaggcgcagccccaccccggccggcgcggctcgctcccacgcccccgccgcggcctcgctggagcggacggactgagtcagagggggcgccagcgctgcaggagctgacatggacccaaatcctcgggccgccctggagcgccagcagctccgccttcgggagcggcaaaaattcttcgaggacattttacagccagagacagagtttgtctttcctctgtcccatctgcatctcgagtcgcagagaccccccataggtagtatctcatccatggaagtgaatgtggacacactggagcaagtagaacttattgaccttggggacccggatgcagcagatgtgttcttgccttgcgaagatcctccaccaaccccccagtcgtctggggtggacaaccatttggaggagctgagcctgccggtgcctacatcagacaggaccacatctaggannnnnnnnnnnnnnnnnnnnnnnnnnnnnaccaacctgcatagcccaaatccaagtgatgatggagcagatacgcccttggcacagtcggatgaagaggaggaaaggggtgatggaggggcagagcctggagcctgcagctagcagtgggcccctgcctacagactgaccacgctggctattctccacatgagaccacaggcccagccagaggcctgtcgggagaagaccagactctttacttgcagtaggcaccagaggcgggaaaggatggggggaatggtggtaccctttctaaaaaataacccctctcctgctcttactgctaagtttgtttcccggcggcaannnnnnnnnnaccaccgttgtttggggctcacctccctgaagaaaatggcctctgcgcccaaggggcgcgaggagaagcaaaaaatgcagggggcgcgaaacgaacaatggccccca

SEQ ID NO: 75584 - DNA, 1009 bp, Homo Sapiens
  misc_feature (496)..(522): n is a, c, g, or t
  misc_feature (769)..(769): n is a, c, g, or t
  misc_feature (873)..(873): n is a, c, g, or t
ggtcaccaagggcagaggtgtccaggccggagccaggggccccactgttgggatgctggctgcagtggggcgccccaagcccaggtcccctctgtcttctctttcgactttgcagctgtacttgttttgctcctctacccgcaggagctgacatggacccaaatcctcgggccgccctggagcgccagcagctccgccttcgggagcggcaaaaattcttcgaggacattttacagccagagacagagtttgtctttcctctgtcccatctgcatctcgagtcgcagagaccccccataggtagtatctcatccatggaagtgaatgtggacacactggagcaagtacaacttattgaccttggggacccggatgcagcacatgtgttcttgccttgcgaagatcctccaccaaccccccagtcgtctggggtggacaaccatttggaggagctgagcctgccggtgcctacatcagacaggaccacatctaggannnnnnnnnnnnnnnnnnnnnnnnnnngcaccaacctgcatagcccaaatccaagtgatgatggagcagatacgcccttggcacagtcggatgaagaggaggaaaggcgtgatggaggggcaaagcctggagcctgcagctagcagtgagcccctgcctacagactgaccacgctggctattctccacatgagaccacaggtccaaccataggctgtcgggatgagaccagactctttacttgcagtacgcaccagaaagagggaacagatggntgggaattgtggtaccctttctaaaatttaacccctctgctggctttactgcgtaatttattccatggctgcaagccttcccaaccagtttttggggcttactnctggaacatatggatgtgcccactcgaggataaggaccagaattgagggttgggcacaaggaaagccaactggcttttttccttaaaccacttctttccccttcccctaaaaaaccatccccggtaaaacgtttcc

SEQ ID NO: 75585 - DNA, 946 bp, Homo Sapiens
cagtcgacggtaccggacatatgcccgggaattcggccattacggccgggcagggcgtaattgagtcaaaggcaggatcaggttccccgccttccagtccaaaaatcccgccaagagagccccagagcagaggaaaatccaaagtggagagaggggaagaaagagaccagtgagtcatccgtccagaagccggggagagcagcagcggcccaagcaggagctgcaagcgagccgggtacctggactcagcggtagcaacctcgccccttgcaacaaaggcagactgagcgccagagaggacgtttccaactcaaaaatgcaggctcaacagtaccagcagcagcgtcgaaaatttgcagctgccttcttggcattcattttcatactggcagctgtggatactgctgaagcagggaagaaagagaaaccagaaaaaaaagtgaagaagtctgactgtggagaatggcagtggagtgtgtgtgtgcccaccagtggagactgtgggctgggcacacgggagggcactcggactggagctgagtgcaagcaaaccatgaagacccagagatgtaagatcccctgcaactggaagaagcaatttggcgcggagtgcaaataccagttccaggcctggggagaatgtgacctgaacacagccctgaagaccagaactggaagtctgaagcgagccctgcacaatgccgaatgccagaagactgtcaccatctccaagccctgtggcaaactgaccaagcccaaacctcaagcagaatctaagaagaagaaaaaggaaggcaagaaacaggagaagatgctggattaaaagatgtcacctgtggaacataaaaaggacatcagcaaacaggatcagttaactattgcatttatatgtaccgtaggctttgtattcaaaaattatctatagctaagtacacaataagcaaaa

SEQ ID NO: 75586 - DNA, 863 bp, Homo Sapiens
  misc_feature (175)..(175): n is a, c, g, or t
  misc_feature (180)..(180): n is a, c, g, or t
  misc_feature (753)..(763): n is a, c, g, or t
tttaaaggaagaaaagatatgtttctcattctaaaatatgcattataatttagcagtcccatttgtgattttgcatatttttaaaagtacttttaaagaagagcaatttccctttaaaaatgtgatggctcagtaccatgtcatgttgcctcctctgggcgctgtaagttaagcncgacntagattaaattggagaaacgtgttaattgtgtggaatgaaaaaatacatatatttttggaaaagcatgatcatgcttgtctagaacacaaggtatggtatatacaatttgcagtgcagtgggcagaatacttctcacagctcaaagataacagtgatcacattcattccataggtagctttacgtgtggctacaacaaattttactagctttttcattgtctttccatgaaacgaagttgagaaaatgattttccctttgcaggttgcacacagttttgtttatgcatttccttaaaattaattgtagactccaggatacaaaccatagtaggcaatacaattttagaatgtaatatatagaggtatatttagcctcttttagaagtcagtggattgaatgtctttttattttaaattttacattcattaaggtgcctcgtttttgactttgtccattaacatttatccatatgcctttgcaataactagattgtgaaaagctaacaagtgttgtaacaataatccattgtttgaggtgcttgcagttgtcttaaaaattaaagtgttttggnnnnnnnnnnnccagacattgccttggtcattgccctatacatgatagaatcaatgaacatttgctatcagagtagtgtcactaaaactaaataccagcattcctgttgca

SEQ ID NO: 75587 - DNA, 578 bp, Homo Sapiens
  misc_feature (97)..(144): n is a, c, g, or t
  misc_feature (243)..(262): n is a, c, g, or t
catttcccttatattatccatcattccttaaggacaattattcttaataatgcttatagaaaatgttctctaattaaacatgccaaaaggaaaaagnnnnnnnnnnnnnnnnnnnnnnnnnnnnnnnnnnnnnnnnnnnnnnnnctaaccggataaccaatttgttataagttggttttcaacaaagaaatttagcagccaagtaaggtttcaagggaatattaacttggtatcagggctacnnnnnnnnnnnnnnnnnnnnacttgcatgtcatccttaatgtctaacatgaaaaatcagcaaagagtatggtttttatcaagaatttgtgttgggagtaaaaactgctttatagctcccaaattaggaagagaagagcagaaatcctctggggcatttaaccatctggcagaattgttgctgcacccttatcccagttataagacagtcaaaatgactatttcctaaatattgtgagtgtatgaaatgtgaaattaaagcaaaaactggagacttttaatgtatttctttaatttgaaatgttttgtggattgtgaaataaaaataaatttatgtc

SEQ ID NO: 75588 - DNA, 648 bp, Homo Sapiens
  misc_feature (94)..(102): n is a, c, g, or t
aaaatgatgaaaatctttaatttttatttagttatacttgtacggacacgtgtatatacaaatacagatcgtatgggtttgtttgtgtgtgggnnnnnnnnngttacattttcttttacgtttatataatgtcagcatttcaaaacagcactcgatgagtaagtgcaaaggaactgcaaagcagggcagtacaagcacaggaccacacggagctggacttcacacccagacgcacacacaatgagtggcttcaatggggtgtcaagagtaagcatggagagcggattttgactcatgggtaacctccgacatgccagcatctattaaactgtacagacaatgggagcaagcccattgtagggagatttgtctcacatcctagcagccctggggccaatgcatgggaaaaactcagtgatgccaaaccagagacagacctgcccattcacagctctgaggggaaataaaacgtgggaggaaggcaagagacacacaaaaaataaacatactaagtaaaaggggggtggtgtaggcaaacgggggtgttggtggaggcggttttcaaaagaaaagtcagtgaccacaactctgagagcaatgaatggaaaggaggagttgaaaactgtttttctaattatttgaaaataa

SEQ ID NO: 75589 - DNA, 875 bp, Homo Sapiens
ggggagagtgccgggcggtcggcgggtcagggcagcccggggcctgacgccatgtcccggaacctgcgcaccgcgctcattttcggcggcttcatctccctgatcggcgccgccttctatcccatctacttccggcccctaatgagattggaggagtacaagaaggaacaagctataaatcgggctggaattgtccaagaggatgtgcagccaccagggttaaaagtgtggtctgatccatttggcaggaaatgagagggctgtcatcagctctgattaagaaaggagatttcttcatgctttcgattctgcatggggtacagccagtcacctcaccagagaatgacggctggagaagaaaactctgtaataccataaataagagtgcttgtaataaaagactgtgcacaaggattaatatttcccttcttaagtatcaaaagaactctggaacaaattataccattaggaaggttttcatgattcagttgattttccaaaaatgaagctatctcacccagctgggtttggaggagcaatctgcttattattctgtcgttaccacttactcaagcgagctgtgatatgaatacaagcaaccagtgggctcgggaaggtccgggtctcttctgccatcttccagataagagatttcagtaaaaaactgccatgctgagctgccttatagagctcttcgaaaatgttcgagttgataaagctctttgaggacaaggtacttcgtgcacctcatgctgaagattgcaccatgttggaaaataaatatgaagcaagtcaaactagatgcatacacttgtgtagaaatcaataatcaattaatagaagtgaaaaaatagacattaaaatgatttatttct

SEQ ID NO: 75590 - DNA, 1155 bp, Homo Sapiens
gagaggctccagtccccgcgagtccagatgcctgtccagcctccaagcaaagacacagaagagatggaagcagagggtgattctgctgctgagatgaatggggaggaggaagagagtgaggaggagcggagcggcagccagacagagtcagaagaggagagctccgagatggatgatgaggactatgagcgacgccgcggagcctcaagattcgcattcaggtggcagggatctacaagggcttctgtctggatgtgatcaggaataagtacgaatgtgagctgcagggagccaaacagcacctggagagtgagaagctgctgctctatgacacgctgcagggggagctgcaggagcggatccagaggctggaggaggaccgccagagcctggacctcagctctgaatggtgggacgacaaactgcacgccagaggcagctccaggtcttgggactccctgccgcccagcaagaggaagaaggcacctctggtttctggcccatacatcgtgtacatgcttcaagagatcgacatcctggaggactggacagccatcaaaaaggctagggcagctgtgtcccctcagaagagaaaatcggatggaccttgaccctgctgttcacagccagggggaccctcagagcagctggcactgcacccaggattctcgtcttcctcctgcagacaggcggacccacaggcccctcagggtctgcccagccaggctcctgtggtgctgctgggccctcccactccatctggcactggtctggactcctcctctgccctcctcgaggcctgcacagctgtggccgtggagctgacctgaccaggcaaggctgctgtctccatccctgagccgcctgccacctcccactcctgaagatccatctcttggggctcccctgacagagaagacagccgaagtcaaagccacatcctcttgctgatgttggatgcaggctgtccggcctcagggccagggagccagtttccactgtgcgggaactctgagtcagacgtgattatctgggggtctgtccaccctggctggatctggaggcaagatgccaggccccccaggtgttctcagggcagttcttggtgtctgcttctcagattccaaggactggaattaaaacctttcctgggac

SEQ ID NO: 75591 - DNA, 992 bp, Homo Sapiens
  misc_feature (928)..(928): n is a, c, g, or t
agctggccaggccctgaaggaggggcagaaggaggagttccagggccaggtcccaaaatggagtgggaggggccccagcagcccccacaggaagccctggctgggcacgaccccagaggggcctggtgggtcccgcctgtcatcccgattttcctcttccggagggggacacagcttgcccctagcctttgtgagggctgtccagtcctccaaggatgtcgatctctggaagcatgtacacgatgtatgggccagaaaccagaggtgccttcttcctcttgctgggcgccagggagtcccaagacctggagctgcctctggcgtgcagtttgtcgtcccaccattcagagctgaggtccaggctctggcggtcctcctccagcctctggatccgctcctgcagctccccctgcagcgtgtcatagagcagcagcttctcactctccaggtgctgtttggctccctgcagctcacattcgtacttattcctgatcacatccagacagaagcccttgtagatccctgccacctgaatgcgaatcttgaggctccgctgcagccccccaaggggctccgtgtattcaggggctctctcagcccccacttcctccagccgcaaccgcagctgactcagtcgttccctgaacaacttctcctttagctccgagaactgcttctccaggtccagcatctcactgacacactcgctgcggcgtcgctcatagtcctcatcatccatctcggagctctcctcttctgactctgtctggctgccgctccgctcctcctcactctcttcctcctccccattcatctcagcagcagaatcaccctctgcttccatctcttctgtgtctttgcttggaggctggacaggcatctggactcgcggggactggagcctctggcctcacgacggagattcccntgagagctgcccgtgttgcctgtaccgcctcggccgattaacaccagcctgctactagctattg

SEQ ID NO: 75592 - DNA, 942 bp, Homo Sapiens
tggctaggtagcgaggctgggggttgaattcggcacgagaaaagggagccgcgcagcgcctacgggagtccggcggcagcagccggtaccggcaaccacgggcagctctcagggaatctccgtcgtgaggccagaggctccagtccccgcgagtccagatgcctgtccagcctccaagcaaagacacagaagagatggaagcagagggtgattctgctgctgagatgaatggggaggaggaagagagtgaggaggagcggagcggcagccagacagagtcagaagaggagagctccgagatggatgatgaggactatgagcgacgccgcagcgagtgtgtcagtgagatgctggacctagagaagcagttctcggagctaaaggagaagttgttcagggaacgactgagtcagctgcggttgcggctggaggaagtgggggctgagagagcccctgaatacacggagccccttggggggctgcagcggagcctcaagattcgcattcaggtggcagggatctacaagggcttctgtctggatgtgatcaggaataagtacgaatgtgagctgcagggagccaaacagcacctggagagtgagaagctgctgctctatgacacgctgcagggggagctgcaggagcggatccagaggctggaggaggaccgccagagcctggacctcagctctgaatggtgggacgacaaactgcacgccagaggcagctccaggtcttgggactccctgccgcccagcaagaggaagaaggcaccctctggtttctggcccatacatcgtgtacatggcttcaagagatcgacatccctggaggactggacagccatcaaaaaagctaagggcagctgggtccccttcgaagaaaaaaatcggatggaccctgaaccctgctgttcaccggccaggggggaccctccgagca

SEQ ID NO: 75593 - DNA, 977 bp, Homo Sapiens
  misc_feature (622)..(622): n is a, c, g, or t
  misc_feature (931)..(931): n is a, c, g, or t
aaggctaggtagcgaggcctgggtggtgaattcggcacgaggaaagggagccgcgcagcgcctacgggagtccggcggcagcagccggtaccggcaaccacgggcagctctcagggaatctccgtcgtgaggccagaggctccagtccccgcgagtccagatgcctgtccagcctccaagcaaagacacagaagagatggaagcagagggtgattctgctgctgagatgaatggggaggaggaagagagtgaggaggagcggagcggcagccagacagagtcagaagaggagagctccgagatggatgatgaggactatgagcgacgccgcagcgagtgtgtcagtgagatgctggacctagagaagcagttctcggagctaaaggagaagttgttcagggaacgactgagtcagctgcggttgcggctggaggaagtgggggctgagagagcccctgaatacacggagccccttggggggctgcagcggagcctcaagattcgcattcaggtggcagggatctacaagggcttctgtctggatgtgatcaggaataagtacgaatgtgagctgcagggagccaaacagcacctggaggtgggcctgattggcacactgggngggtgaggcagggcacaaagcctgaagtggcctcaccccatccgtcctgctgagctattgccccctcttccagagtgagaagctgctgctctatgacacgctgcagggggagctgcaggagcggatccagaaggctggaggaggaccgccagagcctggacctcagctctgaaatggtgggacgacaaactgcacgccagaggcagcttcaggtcttgggactccctgccgcccagcaagaggaagaaagcacctctggtttctggcccatacatcgtgtacatggcttcagagatcgacattcctggnaggactggacagccctcaaaaaggttaaggcagctggtgtcccctc

SEQ ID NO: 75594 - DNA, 1033 bp, Homo Sapiens
aagagcaaaactatacggtctaggtagcgaggcctgggtggtgaattcggcacgaggaagaggagagctccgagatggatgatgaggactatgagcgacgccgcagcggagtgtgtcagtgagatgctggacctagagaagcagttctcggagctaaaggagaagttgttcagggaacgactgagtcagctgcggttgcggctggaggaagtgggggctgagagagcccctgaatacacggagccccttggggggctgcagcggagcctcaagattcgcattcaggtggcagggatctacaagggcttctgtctggatgtgatcaggaataagtacgaatgtgagctgcagggagccaaacagcacctggagagtgagaagctgctgctctatgacacgctgcagggggagctgcaggagcggatccagaggctggaggaggaccgccagagcctggacctcagctctgaatggtgggacgacaaactgcacgccagaggcagctccaggtcttgggactccctgccgcccagcaagaggaagaaggcacctctggtttctggcccatacatcgtgtacatgcttcaagagatcgacatcctggaggactggacagccatcaaaaaggctagggcagctgtgtcccctcagaagagaaaatcggatggaccttgacctgctgttcacagccagggggaccctcagagcagctggactggacccaggattctcgtcttcctcctgcagacaggcggaccacaggccctcagggttctgccagcaggctcctgtggtgctgtgggcctcccactccatctggactggctggatctcctctgcctctcgagctgaacagtgtggcgtggagtgactgaacaggcaggtgtgttcatccctgagcgctgcacttcatccctgaaatcatcctggggtccctgagagaaaaagcgataagccatcctgttttgtgtgtggtgcccctgggcggacggtcaggggggcgtgagattcgggggtccggggttgaaaagcc

SEQ ID NO: 75595 - DNA, 1122 bp, Homo Sapiens
  misc_feature (56)..(56): n is a, c, g, or t
  misc_feature (686)..(706): n is a, c, g, or t
  misc_feature (1047)..(1068): n is a, c, g, or t
ccttcatgcggctccaggaccaatccactatccttctcaggaccctcagaggatgngagctcatgctggaaaacacagcagcccctagcaccttgtcaccactctggggctctgtggaagaaagggcacttaaaactcccagtaaatcttggaataaatatatttttccttcccttgtagtttccatggtagctgaatgtgctcagatgtgagcagtcagagactgacagccatgctttccttatacttgttcaaaggatcgatggaccgtaaataagctgccattaacacatctggttactgctgtaacatgactaataaaaccgaacgcctgttccccttacccgtgtgggggacacgcagatgagtgaattggaatgtccagcagagttaccctcccaattatatgttcattttgtatattttttggtcgggggaaaaattgacctgcagtaaaaaaacctttgaccatttttatgtccattggatactttcctttttatcatcttaaaaaaagataactagtactaatcattgtagtggcctaagtgtgatttaactcttgaagtcacaccctccgaaagatgagtagaaaccagcaccagcacagcccagatcttctctttcctctccttttcctcatttattcctaaaggaatctgaccattttacgtctctacggcccnnnnnnnnnnnnnnnnnnnnnttcctttttattcctgtcaactggatggaaacacaaatttcatggagctgtgtaccatcgaagaaacctggtgtctggcatgaaattactgtaaagaacttcctgtaaaacacgttctttaacaaactgaaatgaaaagcattggagcgtctgaatgaaagacgtgacctcctgctgggactctgatggtcttcagcattcaccttcgtgtgtcttcagtgtctcattgtcatccctgcttctgtttggtcttagagtgtttggatataactgaattgtagatggtaaaggaaatttgatgtgttttttgtttttaaataattaaaacgggtcaatttttnnnnnnnnnnnnnnnnnnnnnngcctacagccgcggccgcaagcttattccctttagttgagggttaattttagct

SEQ ID NO: 75596 - DNA, 883 bp, Homo Sapiens
atatggcagtacgaggctgggtgttaattcggcacgaaggcgttcttccagcgctgtctttttagtaccacatgcgcaggcaggtgatggcggcgctggtcgtatccggggcagcggagcagggcggccgagacggccctggcagaggtcgggcccctcggggccgcgtggccaatcagatcccccctgagatcctgaagaaccctcagctgcaggcagcaatccgggtcctgccttccaactacaactttgagatccccaagaccatctggaggatccaacaagcccaggccaagaaggtggccttgcaaatgccggaaggcctcctcctctttgcctgtaccattgtggatatcttggaaaggttcacggaggccgaagtgatggtgatgggtgacgtgacctacggggcttgctgtgtggatgacttcacagcgagggccctgggagctgacttcttggtgcactacggccacagttgcctgattcccatggacacctcggcccaagacttccgggtgctgtacgtctttgtggacatccggatagacactacacacctcctggactctctccgcctcacctttcccccagccactgcccttgccctggtcagcaccattcagtttgtgtcgaccttgcaggcagccgcccaggagctgaaagccgagtatcgtgtgagtgtcccacagtgcaagcccctgtcccctggagagatcctgggctgcacatccccccgactgtccaaagaggtggaggccgttgtgtatcttggagatggccgcttccatctggagtctgtcatgattgccacccccattgtccccgcttaccgggtatgacccaattatgcaacagtctatccagagaacactatgaccac

SEQ ID NO: 75597 - DNA, 1136 bp, Homo Sapiens
  misc_feature (1047)..(1073): n is a, c, g, or t
  misc_feature (1075)..(1075): n is a, c, g, or t
gggcgcttccggtgcttccgtcgctccttgccgggcataatggccgcgcagcgacccctgcgggtcctgtgcctggcgggcttccggcagagcgagcggggcttccgtgagaagaccggggcgctgaggaaggcgctgcggggtcgcgccgagctcgtgtgcctcagcggcccgcacccggtccccgaccccccgggccccgagggcgccagatcagacttcgggtcctgccctccggaggagcagcctcgaggctggtggttttcagagcaggaggccgacgttttctccgcattggaagagcccgccgtctgcaggggcctggaggaatcactggggatggtggcacaggcactgaacaggctggggccttttgacggccttcttggtttcagccaaggggctgcgctagcagcccttgtgtgtgccctgggccaggcaggcgatccccgcttccccttgccacggtttatcctcttggtgtctggtttctgtccccggggcattgggttcaaggaatccatcctgcaaaggcccttgtcattgccttcgctccatgtttttggggacactgacaaagtcatcccctctcaggagagtgtgcaactggccagccaatttcccggagccatcaccctcacccactctggtggccacttcattccagcagctgcaccccagcgtcaggcctacctcaagttcttggaccagtttgcagagtgaaagatcaagaaatgtctctgctcctacatccagctcctctaggggcagcctccgtcatccatgccctcccaggaccctccactcactgctgtgagtgcgcctcaccagaaccagttaagagacaactatcaattcttgagacccaaattataagggccctgccctgtactgaagaaaaggggagcacaaggccttaatggacattgacttgtgaaaacgcaaacatgaatatggttggagagccctggattaggagggtgacatggggaaggcagaggctggcaccatggtgactgccacataataaagtggtgattttggaannnnnnnnnnnnnnnnnnnnnnnnnnncntgtcgggccgccctcggcccctcgaagaagcttttcctaaaccaattccgttttggcgccg

SEQ ID NO: 75598 - DNA, 1600 bp, Homo Sapiens
gctggaccggtccggaattccttgcatgagatggcggcgctggtcgtatccgccgcagcggagcagggcggccgagacggccctggcagaggtcgggcccctcggggccgcgtggccaatcagatcccccctgagatcctgaagaaccctcagctgcaggcagcaatccgggtcctgccttccaactacaactttgagatccccaagaccatctggaggatccaacaagcccaggccaagaaggtggccttgcaaatgccggaaggcctcctcctctttgcctgtaccattgtggatatcttggaaaggttcacggaggccgaagtgatggtgatgggtgacgtgacctacggggcttgctgtgtggatgacttcacagcgagggccctgggagctgacttcttggtgcactacggccacagttgcctgattcccatggacacctcggcccaagacttccgggtgctgtacgtctttgtggacatccggatagacactacacacctcctggactctctccgcctcacctttcccccagccactgcccttgccctggcagccgcccaggagctgaaagccgagtatcgtgtgagtgtcccacagtgcaagcccctgtcccctggagagatcctgggctgcacatccccccgactgtccaaagaggtggaggccgttgtgtatcttggagatggccgcttccatctggagtctgtcatgattgccaaccccaatgtccccgcttaccggtatgacccatatagcaaagtcctatccagagaacactatgaccaccagcgcatgcaagctgctcgccaagaagccatagccactgcccgctcacacctggaatctcgactccgagccttgggcctttcctttgtgaggctgctgctctctgagatcttccccagcaagcttagcgtacttcccgaggtggatgtgtgggtgcaggtggcatgtccacgtctctccattgactggggcacagccttccccaagccgctgctgacaccctatgaggcggccgtggctctgagggacatttcctggcagcagccctacccgatggacttctacgctggcagctccttggggccctggacggtgaaccacggccaggaccgccgtccccacgccccgggccggcccgcgcgggggaaggtgcaggaggggtccgcgcgtcccccttcggccgtggcttgcgaggactgcagctgcagggacgagaaggtggcgccgctggctccttgacgcgctcccgggcctcagggtcctgccctccggaggagcagcctcgaggctggtggttttcagagcaggaggccgacgttttctccgcattggaagagcccgccgtctgcaggggcctggaagaatccctgggggaaggcggcaccaggccctgaacaggctgggggccttttcgacgccttcttggccttcacccagggggctgcgtccacacccccctttgtgggcgcccttcggtcccggtaaggggaatccccctgttttattttgccccggattcccgcctccttgacggcccgtgctttccccgccctaggcgccgttttgggtcccaccccctccccctcct

SEQ ID NO: 75599 - DNA, 540 bp, Homo Sapiens
  misc_feature (122)..(172): n is a, c, g, or t
cggccgcctaggggaggggagggagggacaataacatctgccagtgtttttctgcccctggattactgaattcagtcctcacgacggcctgtgaagggcacactgtcccctgccacagaagnnnnnnnnnnnnnnnnnnnnnnnnnnnnnnnnnnnnnnnnnnnnnnnnnnntccgctggagaaatcgagacagactccggaatctacgaacataacgaagtgctgcccacccaccccactccactccagacctcacctttgagaaccacgtccaaagcccactctctcccagagcttggtgttacctcatagggtgtcagcagcggcttggggaaggctgtgccccagtcaatggagagacgtggacatgccacctgcacccacctgggaagggaagccaggtcagaccctaggaagggcctcctcgtcgcccaggcagcatgctgaagaacatgacagtgcccccagcacacccattcattaacaggctttatgaatcctaaagtaaagacagtgaccccctgctgtttggaatactg

SEQ ID NO: 75600 - DNA, 1000 bp, Homo Sapiens
  misc_feature (46)..(46): n is a, c, g, or t
  misc_feature (128)..(128): n is a, c, g, or t
  misc_feature (159)..(159): n is a, c, g, or t
  misc_feature (179)..(179): n is a, c, g, or t
  misc_feature (181)..(181): n is a, c, g, or t
  misc_feature (188)..(188): n is a, c, g, or t
  misc_feature (263)..(263): n is a, c, g, or t
ctgtctccgtcgctgggcgtatgtccttgtaggtctatgctaatcncagctagattcgagatcgtcccgtggatccacaggctacccccacactgagtgaggccgcagctgtctgatcttcaatcttncgtgatcgagctcccagcggcgtatgcagtntcatgatgttcggacgccancngagcgcncagacacgacagtcgtgccacttgtgcagcggcgaccgagacttgattggagtccgcgccaggcttgagttgccntcgtgtcctggccagactttgggccgccgcgtacccactgcccgatgccgtgccctacccgaggtggccccagcccagccactcaccgaggcactgagggctctttgccacgtggggctctttgacttcgccttttgtgccttgtttgactgcgaccgccctgtggcgcagaagtcttgtgacctccttctcttcctgagggacaagattgcttcctacagcagcctgcgggaggccaggggcagccccaacactgcctccgcagaggccaccctgccgaggtggcgggcgggtgagcaggcccagcccccaggggaccaggagcctgaggctgtgctggccatgctcaggtccctagacctggagggcctgcggagcacgctggccgagagcagcgaccacgtggaaaagagtccccagtccctcctgcaggacatgctggccacgggaggcttcctgcagggggacgaggccgactgctactgagcagaaccagagtctgccactggggctcaggaccaagggaggcagcaccatgtccttctgtgggacactgccagccccagggctccagcccagcccggtggatcctctggggaagccaggaccaggagagaagcaaggtcaagaaatcccacagtttgatgtattaaagaaatgacttatttctactcaaaataaatggcattgaagtctttctttaaccctttttgagttaatttaataataatgatctg

SEQ ID NO: 75601 - DNA, 362 bp, Homo Sapiens
gcggccgcacagagaagcaggtccacgaacgagtgtgcggcggggatggggtctctctccagcagacaggccacgcggggactcagccgcacactcgttcgtggagaagagtccccagtccctcctgcaggacatgctggccacgggaggcttcctgcagggggacgaggccgactgctactgagcagaaccagagtctgccactggggctcaggaccaagggaggcagcaccatgtccttctgtgggacactgccagccccagggctccagcccagcccggtggatcctctggggaagccaggaccaggagagaagcaaggtcaagaaatcccacagtttgatgtattaaagaaatgactt

SEQ ID NO: 75602 - DNA, 2531 bp, Homo Sapiens
agttagggacctgacctcgcagcacgaccttagcgtctggtccctggggtgtggccgtgtaaccaggcgctaacatggaagggtgccttcgcggaggctatcttgggcctcccctgccgatccccaagctttctgtaggaaccaatcgtggtcctcaggaagaacgaaggagggtcacaaggactttcagccgccacaaagggccggtccaagtcaaacaaggccacaaaaggcgaagtcaaagaaccccaacgtggcaagagagccctcagtgcctctggtgatgctgggctgggggccacctcgcgtagggccacggcaatagggccagttggtacgcggcggccccaaagtcttggccaaggaacacgagggccagctccaggccctgggcgcgggacctccccagtccaaggtctcggctcgccgcctgcagcacagtgggccacgaactgctccgtggtcctggcacgcgtcggcgtggccgtcccgcagccactcagtgaagacttgcatgaccgcccgccgtgggaagccctccgagtctacggagaggatgtgcaggagctccaggaacaggctctgccgggcctctgcatgctcagggctggtgggggcgttgcaggccctggctggacagctgccccatggcggtcactgcactcgctcggacataactctcagggtcctggaggagctgcagggccagctgaggcacctctgaagccaagagtgcgcatctgaagtcagcctgtcctccccagtgcctgctcagctgggtcaggaactcgagggcggagtccctcacctcccagcaggggtggcacaggcgtttctgcagcacagggaacagctctctgaggaactgcgggatgagggggccgagatcagagcagccgggggtcttgggtgagctcaggagccacctgagcgtggcctggaaggccttcttcagaaccgtggggctggagccggggctctcgaggcactccaggaggacagcaagcgcctgcgtcaccagctcctgggggccctgtcccctgggacagcgtccccaaggaagtcgagggctgctcgctggacccggacgcagcccgccagggtccccacagaggtggccccccacactggaggcaggggcagccgagccgtcacagagccgcaggacagtcactgtagcccccagtagagacgcctggggccacggtgaagggcgctggggcagcggctgcagctcctccaggtgagccagggtgcggcacaggaggccggcgcaggacgacttggaggccaggagtgtgtccaccgtcgtggcatcgtctgccgtcccgtccagcaagcctgggggtccgggggcctgaaccgtggccttcaggacacaggccaggggctggagaaggacctggaaggcctgggtcctcagtgcctgtggacagtgctcgagcttcaggatccccaaagccaggggtcccatgtgggtgggacccaggcagctcagagcccgcgccactgtctcccacaggctgccgtcggaagaactgaacacgggagaacgagccacacagagaagcaggtccacgaacgagtgtgcggcggggatggggtctctctccagcagacaggccacgcggggactcagccgcacccacagggcttccgtccaggggctctggcagcgcccgaaggtcgtggtcaggacgttcagggcctgagtgaccttgggggtggccgcggagcacaaggactcttcaacgtgatccatgatcttctgggcacacgcgggccagtcaccccccggcaggcagggctgcccctcggctccacctcgcatggacaaagccaggacgtgcaccaggagctgactggccgccgaggccacaaacaggctggagtctcccgtgcagggagaagatggtgtcgaccgcaccatggtcggccaggaagcgcagggcgctggggtgctgtgccagggagcgcaggccactggatccagccgctgcgcacggtggggacggcccaggttgctcggccgaggggtcctggctccccaaagagccctggtagtaactccccctgctgaagatactggaagcagttttcctgggctgcgaaggttcctgccaggcgcagtgagaaggagaggaccccagaactcaggtcctggactttcagcacatgggacagcagctccaccaggcaggggtgctcctgcagcagcacgacactggactctccttcagagaccgttttaaaccagtccaggagcttctccaaacaggtgtcatctgccaccggctgcctgggatctaccagaacagcacagagagccgggagcagctgggcgcattctgggtccatggtgagaccgcaggcccgctcggttgcgtcctccgccgcaaccacccctcgcccaaggctccgcctccggacagtgccacctgccaggcccggaggaggcggaggacggagacggctggcgtggggaactgagactgcacccctggaggccgctctggaagcctcgagggccc

SEQ ID NO: 75603 - DNA, 740 bp, Homo Sapiens
ctgatgcagggatctaggggcctcactgatcaggccatattttatgctgtgacaccactgccctggtgtccccatttggtggcagtatgccccatacctgcagcaggcctagacgtgacccaaccttgtggggactgtggaacaatccaagagaattgggtgtgtctctcttgctatcaggtctactgtggtcgttacatcaatggccacatgctccaacaccatggaaattctggacacccgctggtcctcagctacatcgacctgtcagcctggtgttactactgtcaggcctatgtccaccaccaggctctcctagatgtgaagaacatcgcccaccagaacaagtttggggaggatatgccccacccacactaagccccagaatacggtccctcttcaccttctgaggcccacgatagaccagctgtagctcattccagcctgtaccttggatgaggggtagcctcccactgcatcccatcctgaatatcctttgcaactccccaagagtgcttatttaagtgttaatacttttaagagaactgcgacgattaattgtggatctccccctgcccattgcctgcttgaggggcaccactactccagcccagaaggaaaggggggcagctcagtggccccaagagggagctgatatcatgaggataacattggcgggaggggagttaactggcaggcatggcaaggttgcatatgtaataaagtacaagctgttaaaa

SEQ ID NO: 75604 - DNA, 1703 bp, Homo Sapiens
ccggctaggtacgaggccctgggtggcgaattcggcacgagggcggaccgaggcgagatggcggccaccgagggggtcggggaggctgcgcaagggggcgagcccgggcagccggcgcaacccccgccccagccgcacccaccgccgccccagcagcagcacaaggaagagatggcggccgaggctggggaagccgtggcgtcccccatggacgacgggtttgtgagcctggactcgccctcctatgtcctgtacagggacagagcagaatgggctgatatagatccggtgccgcagaatgatggccccaatcccgtggtccagatcatttatagtgacaaatttagagatgtttatgattacttccgagctgtcctgcagcgtgatgaaagaagtgaacgagcttttaagctaacccgggatgctattgagttaaatgcagccaattatacagtgtggcatttccggagagttcttttgaagtcacttcagaaggatctacatgaggaaatgaactacatcactgcaataattgaggagcagcccaaaaactatcaagtttggcatcataggcgagtattagtggaatggctaagagatccatctcaggagcttgaatttattgctgatattcttaatcaggatgcaaagaattatcatgcctggcagcatcgacaatgggttattcaggaatttaaactttgggataatgagctgcagtatgtggaccaacttctgaaagaggatgtgagaaataactctgtctggaaccaaagatacttcgttatttctaacaccactggctacaatgatcgtgctgtattggagagagaagtccaatacactctggaaatgattaaactagtaccacataatgaaagtgcatggaactatttgaaagggattttgcaggatcgtggtctttccaaatatcctaatctgttaaatcaattacttgatttacaaccaagtcatagttccccctacctaattgcctttcttgtggatatctatgaagacatgctagaaaatcagtgtgacaataaggaagacattcttaataaagcattagagttatgtgaaatcctagctaaagaaaaggacactataagaaaggaatattggagatacattggaagatcccttcaaagcaaacacagcacagaaaatgactcaccaacaaatgtacagcaataacaccatccagaagaacttgatggaatgcttttattttttattaagggaccctgcaggagtttcacacgagagtggtccttccctttgcctgtggtgtaaaagtgcatcacacaggtattgctttttaacaagaactgatgctccttgggtgctgctgctactcagactagctctaagtaatgtgattcttctaaagcaaagtcattggatgggaggaggaagaaaaagtcccataaaggaacttttgtagtcttatcaacatataatctaatcccttagcatcagctcctccctcagtggtacatgcgtcaagatttgtagcagtaataactgcaggtcacttgtatgtaatggatgtgaggtagccgaagtttggttcagtaagcagggaatacagtcgttccatcagagctggtctgcacactcacattatcttgctatcactgtaaccaactaatgccaaaagaacggttttgtaataaaattatagctgtatctaaaaaaaa

SEQ ID NO: 75605 - DNA, 658 bp, Homo Sapiens
  misc_feature (424)..(432): n is a, c, g, or t
agggcacaccctatacctcctcatctgctcttcccctccctgcccccttctgggcaggtagcagtccctggcctctcccccctggctgatcactctccctcaggcagtggagatctgcgtctggacaccctcagatcctgtcattgcctgcccagagtccttcaggggcacccctctgccttggtgtgcggtccagggctctcacccaggtgccgcaccctctgggctcttctgtccagctcccttgccccatgtgctgtcactgactctccttgggactcgcctgcctgctcagagccctgcagggcttggtcagctgcctgttcagtgtcaacacttccctgcacatcttaaaactgggctttattttcgctgaaggaactgtgttgggacccttgacatctgtcaggtttgcacatgctgnnnnnnnnnctcagcccacgtgttctcccccacgtggggtagcagcaggacagacagtgaatcacagagtctgccctgagcagaggctgctgtccctgggactcctagccatggtcagactgtacaaaacggttttccagaaatgaaatgtaaatccatttttatactgaaaatgttactgaaagtcacttttatgagcatctgccttaataaacagacattgattcccttatca

SEQ ID NO: 75606 - DNA, 772 bp, Homo Sapiens
aacaagaattttctctcagtgtaaaaatgtcaagttttattcctgaaatgaatagcaaagttaagcgtaaaaacgtgaacagcttcagaactataaatgggtatgtatacctttctgctgtctaagggcagagaagggaaagaaagtgtggtgcttatcagaggagacagcagcaagacacattgtgacagaaaaccaagggtatcctgtgtcacagtgaaatgtaatgagggcacctctcctttcaagagacgaagattgaatacatgggaagcacactctccgctgtgtgttgtctaggagaggtgcaccctgtatggaaatatttgggaaggttaagattaagacagggtaaaataaagcaaaggcaaatcacaaagcaagggctaatgttaatatgaaaagtgcagaattcaaggaaaaagcatggggacaaagaagatttttcctctttttggttgctgttcatgtgtagcctacaacagaactataagacctatagacatttatatgaatatttatttgaaaacgtataatatcaaacaatgtaaaagccaatagaaatctcagataattgaatgtatagaaactagcagtttgaaagtgattagttcattatttgctgatcaagcagaaaaataagcatatgaaagatatttaaaatgggattaataaagttgatttaacagatcctattccatgtcctttgaatatttatagaaattaaatggaacaaattagggcatcaggaaaactatacaaaagtctttac

SEQ ID NO: 75607 - DNA, 1187 bp, Homo Sapiens
ccttgaatgaaaaccatgaatttaatgtgacattggggggagcctcatccttccctttttaccacccacccatccagcctgttgtgagttgggtgagggctgcccccagtctccgtcctgcggctctgggtgccatcctgttcctttgagctcagtcagcctcctgggctcgtctctctgtgaatctccttcttgcgtattcatatagtgcttgcttgcgctcctgcaggctctcctgccgggcccaggaagacttggcaaatgttagggctgttggctgaggggtcaccgggccagagctgggaaacttggaggcagaggctgtgggtagggactgagttcccttggtgatgtcttcaggcatgaaagctacggccccctcaagcagattagtgatagtcaagtctacacagccagtcttggccaggtctctctggatgacacccaatggcacatggggcaaaacttccttgactctctgagccagagttgccagttgcacatcaggagaaggaccaggggagggagggaaagaagactgggctgactgggggcgcaatctggggtgtctttgtcgcttcatgtgctctgctttgtcagctggagtgagccgtgtccctgtctggcccaattccttggccaccagctagggagaattggaagactggaagtgtcaagatctcaagctttcctccctctcctcctaagcagggaccccgcctccaccctgtctgtgcacccgaccacctgttgtacacggagtgcaaactcctcattcgcttcccctagttggcgatgaacaggacgaagccacctgcaaagaaacaatccagggctatgttgtgggcacccagggtagaggctgtcaccattccccactttggtacctctttgcatggtgggtgggaaaatagtaaatactgtaaatactttgtgttgcctctgtggtagaaccttgatataaagatctacaaatggacagggcagaggccactaattccttgaccttgaggtgagcctctccccagcgaccaaaatgtgaggacagttaataccttacttgatacaccgtgaaagggacgaaaagtgaccacagcagttctgagacccaggaggcatctgacaccgtctgaggggagggcatgagatgaggcctaagccagggccagggatgggaaatttcccat

SEQ ID NO: 75608 - DNA, 742 bp, Homo Sapiens
gccttgaatgaaaaccatgaatttaatgtgacattgggggagcctcatccttccctttttaccacccacccatccagcctgttgtgagttgggtgagggctgcccccagtctccgtcctgcggctctgggtgccatcctgttcctttgagctcagtcagcctcctgggctcgtctctctgtgaatctccttcttgcgtattcatatagtgcttgcttgcgctcctgcaggctctcctgccgggcccaggaagacttggcaaatgttagggctgttggctgaggggtcaccgggccagagctgggaaactgaggtgatcacaatgtcagagggcttgcggagtcatcatcattaaacacgcatcgaatgccttggaggcagaggctgtgggtagggactgagttcccttggtgatgtcttcaggcatgaaagctacggccccctcaagcagattagtgatagtcaagtctacacagccagtcttggccaggtctctctggatgacacccaatggcacatggggcaaaacttccttgactctctgagccagagttgccagttgcacatcaggagaaggaccaggggagggagggaaagaagactgggctgactgggggcgcaatctggggtgtctttgtcgcttcatgtgctctgctttgtcagctggagtgagccgtgtccctgtctggcccaattcctttggccacagctgttgtacacggagtgcaaactcctcattcgct

SEQ ID NO: 75609 - DNA, 1091 bp, Homo Sapiens
gaatgaaaaccatgaatttaatgtgacattgggggagcctcatccttccctttttaccacccacccatccagcctgttgtgagttgggtgagggctgcccccagtctccgtcctgcggctctgggtgccatcctgttcctttgagctcagtcagcctcctgggctcgtctctctgtgaatctccttcttgcgtattcatatagtgcttgcttgcgctcctgcaggctctcctgccgggcccaggaagacttggcaaatgttagggctgttggctgaggggtcaccgggccaggaacttgggaaactgagggtgaatcacaatgtcaggaggggcttgcggagtcattcatcattaaacacgcatcgaatgcctactttgcaagagaggcactatgctaagggtctcaggatcaaaaaagaaaggtcagggataagggagtacatagcctgcccccaactcaccccaacacttggatctgaccatttcctgggtctcaccttggaggcagaggctgtgggtagggactgagttcccttggtgatgtcttcaggcataaaagatacggccccctcaagcagattagtgatagtcaagtctacacagccagtcttggccaggtctctctggatgacacccaatggcacatggggcaaaacttccttgactctgtgagccagagttgccagttgcacatcaggagaaggaccaggggagggagggaaagaagactgggctgactgggggcgcaatctggggtgtctttgtcgcttcatgtgctctgctttgtcagctggagtgagccgtgtccctgtctggcccaattccttggccaccagctagggagaattggaagactgttgtacacggagtgcaaactcctcattcgcttcccctagttggcgatgaacaggacgaagccaccttacttgatacaccgtgaaagggacgaaaagtgaccacagcagttctgagacccaggaggcatctgacaccgtcacagagaccaggggtctctgaactggcagggtaagaggttgtaccacatcatcgcaggaattccggaccgtaccagctagtttttctcctgggc

SEQ ID NO: 75610 - DNA, 1273 bp, Homo Sapiens
  misc_feature (805)..(813): n is a, c, g, or t
tcagagacccctggtctctgtgacggtgtcagatgcctcctgggtctcagaactactgtggtcacttttcgtccctttcacggtgtatcaagtaaggtggcttcgtcctgttcatcgccaactaggggaagcgaatgaggagtttgcactccgtgtacaacagctggtggccaaggaattgggccagacagggacacggctcactccagctgacaaagcagagcacatgaagcgacaaagacaccccagattgcgcccccagtcagcccagtcttctttccctccctcccctggtccttctcctgatgtgcaactggcaactctggctcagagagtcaaggaagttttgccccatgtgccattgggtgtcatccagagagacctggccaagactggctgtgtagacttgactatcactaatctgcttgagggggccgtagctttcatgcctgaagacatcaccaagggaactcagtccctacccacagcctctgcctccaagtttcccagctctggcccggtgacccctcagccaacagccctaacatttgccaagtcttcctgggcccggcaggagagcctgcaggagcgcaagcaagcactatatgaatacgcaagaaggagattcacagagagacgagcccaggaggctgactgagctcaaaggaacaggatggcacccagagccgcaggacggagactgggggcagccctcacccaactcacaacaggctggatgggtgggtggtaaaaagggaaggatgaggctcccccaatgtcacattaaattcatggttttcattcnnnnnnnnncacccaataccacaacaccacaaaaggggcgcggggccataaagaagatcaccccctcgggggcggcccccgacttaaagcgggcgccccagctttgtgcccaacgagggggccccaagaggaagaccgcaataatcagatatagctaacgtagccgatgtgttaataaccacgcgtgctgcgcacgggtggacacacttgcgtcactcgacgggcgaccccctgggcgacaagcgagcaccccattactcttgtggggtggggggacaatcaggtgcgggccaccctataaccccctacgcagatactatttaagccgcgtccgtaaccgcataattataaacagctacgctggctgatactaaggtggtgccacctcaagctgtaatatgcctactctgtccgtcattacagctattctgcatcacggacgacgactatatgcaaactactcatcagg

SEQ ID NO: 75611 - DNA, 902 bp, Homo Sapiens
gggggaagcgaatgaggagtttgcactccgtgtacaacagctggtggccaaggaattgggccagacagggacacggctcactccagctgacaaagcagagcacatgaagcgacaaagacaccccagattgcgcccccagtcagcccagtcttctttccctccctcccctggtccttctcctgatgtgcaactggcaactctggctcagagagtcaaggaagttttgccccatgtgccattgggtgtcatccagagagacctggccaagactggctgtgtagacttgactatcactaatctgcttgagggggccgtagctttcatgcctgaagacatcaccaagggaactcagtccctacccacagcctctgcctccaagtttcccagctctggcccggtgacccctcagccaacagccctaacatttgccaagtcttcctgggcccggcaggagagcctgcaggagcgcaagcaagcacctatatgaatacccaagaaggagattcacagagagacgagccccaggaggctgactgaactccaaaggaacaggatggcacccagagccgcaagaccggaaaatggggggcagcccctcccccaactccacaaaagggttggatggggggggcgggcaaaaaagggaaggtggagggtccccccaatggcaccatttagattcatggggttttccttccacaggaaaagaaaggacagcgcgacaaaaactgccttgtgcgggccgccctcgggccctccaaaaaagcttttcaacaaccattcccctttgggggcccggggcgcccccgtaagggtaaagtgcaacactggggcccaaagccgtgttctcccaaaggaagaaccggggccccataaaacaggaggcctggggaatctcccac

SEQ ID NO: 75612 - DNA, 1574 bp, Homo Sapiens
  misc_feature (1498)..(1498): n is a, c, g, or t
cggtccggaatttccgggatcacgccggtacctgaagtccttcagaagtgcacgccgggaccaggattccgggaggccgactcctccctgccccacgaatgccgggaattgtggtctccgccggacgcgagttgtgagacggcccaaggggccgcggggtatgctgggaccgctagcccttccggcgcgcctcaggacttcgggtcccctcaccccgggcggatgcccaaagactccgccttcccaagagcccctgcggccgggcgcgaaaatggcggcggcggcgacggccgggcgctcctgaagcagcagttatggagcttccctcagggccggggccggagcggctctttgactcgcaccggcttccgggtgactgcttcctactgctcgtgctgctgctctacgcgccagtcgggttctgcctcctcgtcctgcgcctctttctcgggatccacgtcttcctggtcagctgcgcgctgccagacagcgtccttcgcagattcgtagtgcggaccatgtgtgcggtgctagggctcgtggcccggcaggaggactccggactccgggatcacagtgtcagggtcctcatttccaaccatgtgacacctttcgaccacaacatagtcaatttgcttaccacctgtagcacccctctactcaatagtccccccagctttgtgtgctggtctcggggcttcatggagatgaatgggcggggggagttggtggagtcactcaagagattctgtgcttccacgaggcttccccccactcctctgctgctattccctgaggaagaggccaccaatggccgggaggggctcctgcgcttcagttcctggccattttctatccaagatgtggtacaacctcttaccctgcaagttcagagacccctggtctctgtgacggtgtcagatgcctcctgggtctcagaactgctgtggtcacttttcgtccctttcacggtgtatcaagtaaggtggcttcgtcctgttcatcgccaactaggggaagcgaatgaggagtttgcactccgtgtacaacagctggtggccaaggaattgggccagacagggacacggctcactccagctgacaaagcagagcacatgaagcgacaaagacaccccagattgcgcccccagtcagcccagtcttctttccctccctcccctggtccttctcctgatgtgcaactggcaactctggctcagagagtcaaggaagttttgccccatgtgccattgggtgtcatccagagagacctggccaagactggctgtgtagacttgactatcactaatctgcttgagggggccgtagctttcatgcctgaagacatcaccaaggggaactcagtccctacccacagcctctgcctccaagtttccccagctctggcccgggtgacccctcagccaacaggccctaacatttggccaagttcttcctggggccccggcagggagagcctggcaggaagcgcaaagcnaagcactatatgaaatacgccaggaaagagaattcacaggagagacgagccccaggaggcttgactgaacctcaaa

SEQ ID NO: 75613 - DNA, 1074 bp, Homo Sapiens
gctggtaccggtccggaattcccgggatctgcggccgggcgcgaaaatggcggcggcggcgacggccgggcgctcctgaagcagcagttatggagcttccctcagggccggggccggagcggctctttgactcgcaccggcttccgggtgactgcttcctactgctcgtgctgctgctctacgcgccagtcgggttctgcctcctcgtcctgcgcctctttctcgggatccacgtcttcctggtcagctgcgcgctgccagacagcgtccttcgcagattcgtagtgcggaccatgtgtgcggtgctagggctcgtggcccggcaggaggactccggactccgggatcacagtgtcagggtcctcatttccaaccatgtgacacctttcgaccacaacatagtcaatttgcttaccacctgtagcaccgtgagtgagagcgaggccgagagcgccacggggcggttccctggggcccagctgaaggcccccctgtccccactcgcgttccgcatggaggatactgagccttacccctaaccccgatcctctacccaacatgtcagttttttttgttcattttcctcaatatttttcttcttgctttctcttctcctggttcccagcctctactcaatagtccccccagctttgtgtgctggtctcggggcttcatggagatgaatgggcggggggagttggtggagtcactcaagagattctgtgcttccacgaggcttccccccaatcctctgctgctattccctgaggaagaggccaccaatgggccgggaggggctcctgcgcttcagttcctggccattttctatccaagatgtggtacaacctcttaccctgcaagttcagagacccctggtctcctggtgacggtgtcagatgcctcccggggtctcaaaaactgctgggggcactttttcgtccccttttcacggggtaatcaaagtaaaggtgggctttccgccctggttcatcgcccaactagggggaaaacccaaatggaggggagttttgcacctccgggggacaaacaacttgggtggcccaaggggaattg

SEQ ID NO: 75614 - DNA, 687 bp, Homo Sapiens
cttgtatgaattctaattaagagacattatattcagaattatagcactcatagtgataattttcagaagactataacagcttctttgccacttaaggggtacagagggtgcagctgtttacctgaatgaattcttaaataagtgactactaccactctaattttcctagttgtagctctgttacaggttactgaccgccaagtccatgttccagacattctttgccaacacagattaattacaagagagccacccccaaagtcttagggcgaattgggaaagggccggttaaatgaggaaacaggccattccttggtaaaagtttgtagttttctttcccaatacatcttctttttattgagaacttccatttttatcctgtgttcctcctctgccatctcacactctcgctctatctgctggattttggccacatgcacctcattcatttgtatcagttgcagttgtaagatggacatttgttgatggtgttcttcctcatgcatcttttttaaagcaccttcctgagaggttttgctcctgtagtttttattggctgttattctgacagctgaacacgagggttcaggttgagaggtccctcacatactggaaaatgtatgaactctttctcatcatcgcacagttctctatttgaaacagcacatgattcttgggctgaggcgt

SEQ ID NO: 75615 - DNA, 1712 bp, Homo Sapiens
  misc_feature (160)..(210): n is a, c, g, or t
  misc_feature (591)..(616): n is a, c, g, or t
  misc_feature (655)..(665): n is a, c, g, or t
  misc_feature (1062)..(1476): n is a, c, g, or t
  misc_feature (1489)..(1489): n is a, c, g, or t
  misc_feature (1514)..(1514): n is a, c, g, or t
  misc_feature (1576)..(1576): n is a, c, g, or t
  misc_feature (1591)..(1591): n is a, c, g, or t
  misc_feature (1594)..(1594): n is a, c, g, or t
  misc_feature (1655)..(1655): n is a, c, g, or t
  misc_feature (1663)..(1663): n is a, c, g, or t
atttggtgaggaatccccagcccctagttcatgacccaggattttcctaaggaaaaccagctatgggccaatgttccgttttcctacatggggccccgggccgccgaaacgagtgggtcttagaaagcttctccgaggggccgaggccggccgacaaggnnnnnnnnnnnnnnnnnnnnnnnnnnnnnnnnnnnnnnnnnnnnnnnnnnnaataaaaccaacataacagaatgtagaaatctaaacgaacatttctccctcaaagtagttacatccttagctccaacaaaactactattgttggagacttatttagaactcctgtttgaggaaaggccttaaaaggtggtttatgagccacattagaaaatacccttctaaactttgggctgtttaaaaacagaaaatccatactcagaggatgacaccgagaaaattaaaaaggtgctgcagctctcacggaggttccctaaagacctctagcaagttctgagcaacagcatcaccattggagaaacgtgtagcctcccaggacagccactttccatgggacggcattcatttggatagaaaagttctgctgtctgtttnnnnnnnnnnnnnnnnnnnnnnnnnntcagccacactcctttatagtcacacttgcatttgattnnnnnnnnnnncaacaacaacaacactcacacgtggttcttgtatgaattctaattaagagacattatattcagaattatagcactcatagtgataattttcagaagactataacagcttctttgccacttaaggggtacagagggtgcagctgtttacctgaatgaattcttaaataagtgactactaccactctaattttcctagttgtagctctgttacaggttactgaccgccaagtccatgttccagacattctttgccaacacagattaattacaagagagccacccccaaagtcttagggcgaattgggaaagggccggttaaatgaggaaacaggccattccttggtaaaagtttgtagttttctttcccaatacatcttctcctcgtgccgaattcttnnnnnnnnnnnnnnnnnnnnnnnnnnnnnnnnnnnnnnnnnnnnnnnnnnnnnnnnnnnnnnnnnnnnnnnnnnnnnnnnnnnnnnnnnnnnnnnnnnnnnnnnnnnnnnnnnnnnnnnnnnnnnnnnnnnnnnnnnnnnnnnnnnnnnnnnnnnnnnnnnnnnnnnnnnnnnnnnnnnnnnnnnnnnnnnnnnnnnnnnnnnnnnnnnnnnnnnnnnnnnnnnnnnnnnnnnnnnnnnnnnnnnnnnnnnnnnnnnnnnnnnnnnnnnnnnnnnnnnnnnnnnnnnnnnnnnnnnnnnnnnnnnnnnnnnnnnnnnnnnnnnnnnnnnnnnnnnnnnnnnnnnnnnnnnnnnnnnnnnnnnnnnnnnnnnnnnnnnnnnnnnnnnnnnnnnnnnnnnnnnnnnnnnnnnnnnnnggcaagaacgtanaaggcgcgtgctggcgttttccatngctccgccccctgacgagatcacaaatcgagctaagtcagaggtgcgaaccgacagacatanatacaagcgtccccntgnagtcctcgtcgtctctgttcgacctgcgctacggaactgtcgctttctcttcgggaggtgngcttccanactacgcttagatcccatcgggtggcgtcgtcagctggtggtgacaacc

SEQ ID NO: 75616 - DNA, 1068 bp, Homo Sapiens
  misc_feature (27)..(27): n is a, c, g, or t
  misc_feature (38)..(38): n is a, c, g, or t
  misc_feature (55)..(55): n is a, c, g, or t
  misc_feature (77)..(77): n is a, c, g, or t
  misc_feature (92)..(92): n is a, c, g, or t
  misc_feature (137)..(570): n is a, c, g, or t
cagtaccgtagcgcagtcgacaggagnccagaggagtncaagggacgcctgttcntatgtctgtcggttcgcacctntgacttagctcgatntgtgatctcgtcagggggcggacctatggaaaacgccagcacgcnnnnnnnnnnnnnnnnnnnnnnnnnnnnnnnnnnnnnnnnnnnnnnnnnnnnnnnnnnnnnnnnnnnnnnnnnnnnnnnnnnnnnnnnnnnnnnnnnnnnnnnnnnnnnnnnnnnnnnnnnnnnnnnnnnnnnnnnnnnnnnnnnnnnnnnnnnnnnnnnnnnnnnnnnnnnnnnnnnnnnnnnnnnnnnnnnnnnnnnnnnnnnnnnnnnnnnnnnnnnnnnnnnnnnnnnnnnnnnnnnnnnnnnnnnnnnnnnnnnnnnnnnnnnnnnnnnnnnnnnnnnnnnnnnnnnnnnnnnnnnnnnnnnnnnnnnnnnnnnnnnnnnnnnnnnnnnnnnnnnnnnnnnnnnnnnnnnnnnnnnnnnnnnnnnnnnnnnnnnnnnnnnnnnnnnnnnnnnnnnnnnnnnnnnnnnnnnnnnnnnnnnnnnnnnnnnnaagaattcggcacgaggcttcaagtcatcttttgatcttttaaaaagcaccttcaaacagctgcaccttccatttgcactaggaaatgaaggtagtgatgggattggcaatgttcctggcagatgtttcagcccaaaagctcttctacagaccggtttagagctggtgccctatgagaatattagggagcttttattttaaattgaactttacccttgtccatgcaaggcattcctcctgaatgcatccatgaatttgtttacttttgcgtcaaacatatgagccattgtcatgctcagcctgtgccaccattgctctgtctgatgtatgtaatcatacaagacctgattttggttctaacacagtggtctttgactatcaacattgatgtttttagagatgggttcttctggttgatacagactatgcattgcgtttagcagatggggtaaaactggcctaaaacaagtctttgcagaatacatgccaatttccaaa

SEQ ID NO: 75617 - DNA, 782 bp, Homo Sapiens
  misc_feature (583)..(597): n is a, c, g, or t
tccaccagcgagcgtgggcccagcatcacatttaccgcctggtcagggactgaagggggaccccaaaactggctcaccccccagaacaccctcctcccagggagggtcctccagctcacctcatgcttcttatttggggagagggctgtgatgtaaaggggttgacctcagaggcctaagcaactggggccatcccccccattagaggggcccccaaaacttggttggagagctgaacaggctgggactgaggaaaggataaaccccgatattgggacctcacagtgggtgtctgaaaggacagatcactccggagtatcagggattgtggggacaggagtgagacaaccccccaggtacagcactggcttttcttttcagcccctgacaggccacccccactcctctgcatgtcttggagagcgctagttacacattggcttgtcccctttactttttcccagccacccctccccctgaaatttctgcccctctctaccaccctcactccatgacctgtgagatcacaaagtgaagatgaaccctttctgtgcaggagcagagccaggtgggccctggacannnnnnnnnnnnnnnaatataacgagatatttataagtgggtgctagggtcttgactttatctccgctgcacaagcagtgtgttgaactttctaatctcatccctctcctaagtgagccctgagctagacggtttccttcctcccctctcaaagtttgtttgtttgtgttctgacagaggataaagctattttaccaaaa

SEQ ID NO: 75618 - DNA, 1938 bp, Homo Sapiens
  misc_feature (285)..(285): n is a, c, g, or t
  misc_feature (785)..(785): n is a, c, g, or t
  misc_feature (796)..(796): n is a, c, g, or t
cccttgttttttatttaaaattttcaacctttttccctgccttaaagggggccggagggttcatttttccccatttcttcaaaggttaggggttaggccttccttaggaaacttattggcttcttttgggcccagctggcctagtggtttcccattctggaccccccaggtttactaccccagtttttccttttgccccttccttgccctaacagcaagttccaggccagtccctttccccagcaaatgccaggggcttcatgtgaagaggaactggccacaagnctgaggggaggaggagaacttgtttctgcaggaaggacagcagtgcctccaggctcttgggcatcttcacatgtttctagataaaggacaagctcaactctggagcctctggtaggcagaagaaaggaggcagggagtatggcctgggcttcagataccgctgttctggatggagtgagcaaagggagtccaggcctccactctgctctagagatggcagtgtccaggctcctgattcccaggaagcagggaagctaaaggaaacctggaaaggcactctggagcagcaggatggtcacaataataagcccgacacacagcaggagcaggagccacacaggaacactccctggagagagaaagctatgtagatggcaacagagccagtgactgtgcccaggcctaggaaggtgccggattcacttgacatcgagggccaggaagacgacttcatggcccaacaggacttggtccgaaggggcaagaagttggagccatcnccaggctgtgnaggtagcagggagggggctggcgcaggcgcttgtggggaatttgcactgtgaagagtcgcaggccagcaggctggtctggaacctgcccaaaacctgcagggcctggtagcggtaaggtgtgctggaaaaggtgggtccattttcttgccagtgcagctgtgtcaccagctgatccttctgccacacagaggccttaaggtcccgggccccacggttaccaaactgcccatcagcccctaaagccaggtcttcaatctccccttcgtgggctttgaactccagaaccttctccaggctgggcaccttccagacacggacgtagccatctgttcctccagtggcaagcagggtattatcgtggttgaagcacacaactttctgcagtggatcggagctaaagtctgtctgcaccgcctgcaaattctctaccctgagttctagcccctcgtgctgggtttccgctccacatttcttctctgctggggctgctcccttcctttgtcgaggcccctgctccttggaaccggccttctctgccttgttgccctgctgttgatgtgcctggaagcgcaggagctgacagtgggcatcctgccctgcagcaaggatgtcaccagccagtgccaagttcatggtggcccgtgtctctgtgtcatgggagtgcagcaaggaggcactcaagcgcccattaatcagctctagctgcagaaagtgcacgccattctttatgcctgtcttggcggcgcctcctccgcccgcagcgatgagcagcccagtgctggggtcgacctgaagcgcgtacaacgggaacggagcccggtacagctctggcgcccggcgccggcccatcccgcccggcgcgcgttcactgcccgcaccgcggcacccaggacatgccgcgccgggccttcgactactgccccggcggctggtgaactcggccccgtcgccgccgggagcactccctacccctctcacaccggggagttgccaaaaccctgaccatcagcaggaagccgagcctcagctcggctccgtccaagtcggcggacgcgaaggcggacgcgtggtcgacgataaccaaaattccggaccggtaccatcctctttctttcaacaacgagggcgcaggtaagggagg

SEQ ID NO: 75619 - DNA, 1077 bp, Homo Sapiens
ggaaaccggcagtaactataacggtctctaaggtagcgaggcctgggtggcgaattcggcacgagggtcgtctcctgcctcgatgtcagtgaatccggcaccttcctaggcctgggcacagtcactggctctgttgccatctacatagctttctctctccagtgcctctactacgtgagggaggcccatggcattgtggtgacggatgtggcctttctacctgagaagggtcgtggtccagagctccttgggtcccatgaaactgccctgttctctgtggctgtggacagtcgttgccagctgcatctgttgccctcacggcggagtgttcctgtgtggctcctgctcctgctgtgtgtcgggcttattattgtgaccatcctgctgctccagagtgcctttccaggtttcctttagcttccctgcttcctgggaatcaggagcctggacactgccatctctagagcagagtggaggcctggactccctttgctcactccattcgggtccacagctgaggttgcctctgacaagatgaatgggcactgcctgcccttctagtgaaaaggcttggctatggccctgtgtgactccaggtcccaggaaccttgccttcgtcatctgtggatccatccagaacagcggtatctgaagcccaggccatactccctgcctcctttcttctgcctaccagaggctccagagttgagcttgtccttatctagaaacatgtgaagatgcccaagagcctggaggcactgctgtccttcctgcagaaacagtttctcctcctcccctcagccttgtggccagttcctcttcacatgaagcccctggcatttgctggggaagggactggcctggtacttgctgttagggcaggaaggggcaaaaggaagacttgggtagtaatctgggggttcagatgggtagcactaagccagctggcctaaagatgcaataagttcctaggtagtctacccttaccttgaggaatgggaaaatgaacctcagcccattaggcaggaaaagttgatatttaataaacaaggaaagagtgaactgagaccccaaaaa

SEQ ID NO: 75620 - DNA, 688 bp, Homo Sapiens
  misc_feature (14)..(14): n is a, c, g, or t
  misc_feature (61)..(61): n is a, c, g, or t
  misc_feature (77)..(77): n is a, c, g, or t
atcgctcggctganagagggcatgtaatgccggaagatcgcacagctggccgtgtcctggnaggccacggcgtatgntccaaggacggggtcctgaccgagcccatgatggacgcctgcgtgcaagactttgtccagcagcaccagcagatgatgcgctggctgaagggggagaggcctgggcccgaggacgagcaaccctcatcctgagtccatggggagaccacacctcacggagcctggccgcggacccctcccacccctgcctttgcgggccccgcacatttaggaaatactccccttaataaagtcccacgggggccgcaccgctgtgtctattggctgacacggggcggggtttggggccccctaacgtccccctggggtcaaaggtgacagaaaaggcagaagctggggctttctggaggatttaaccacagaggggtgggcttcacaggaggtggctgccacggcggggccgggtgcccgtgccccatcctgaggccgtgcatacgcgggtgccccttcgcctcccttccctccgccagagctgcctgtggccagacacacggtggagggaagtgcacgcgaaacagacacagcggcttcaaatagatgccgcccctgcccgcgctttgcagctagtccctgcaaaccttgatgatggggctgggcgcggtggctcacgc

SEQ ID NO: 75621 - DNA, 1319 bp, Homo Sapiens
  misc_feature (141)..(181): n is a, c, g, or t
  misc_feature (211)..(225): n is a, c, g, or t
ttttttttcactagaagagaaggtttaataattgataaaaatgtacaaaaatattcaaatcagaaatgctttagaatgtgtaccacgaagtcaatacttctcagtgagtagggaaggcaaaatacttcctcaatagcaggnnnnnnnnnnnnnnnnnnnnnnnnnnnnnnnnnnnnnnnnncaactgttaaagaaaatgtttaagtcaacnnnnnnnnnnnnnnnagacaaggatattgcaactatcacttaaagtctggtggcacattctttagtaggtccttaaggcaatatatttaaattaatttacaatttgatttgatgttaaagtttttttaaacatcacctcaaaatagatgctcaaaataatgccctcacaatagcctttgtaaaatgtattcagatgtttgataaaaaataatggtggctttatattacagtagtgctcattagcaccactataattaagggtctaccaagtttccagcaaaaccacctgtttcttaggagtttcaccataaaagatcacattggctttaaccagttgggtagcgcacaaaaaagcaatttttatcagttgctggtgctttttttgtactactatattatcaaaaaatttttcattagatcttcaaaatccagcttctataaagtaaatcaaatcacctcatgacttagattttagaacaaagtagagacatctgcagttatcagtaaattgccacctttaatccatcctacagtgccctgtgaaagggtcacagaaagacagttatgactgtatgaaaatatgattcttgatacagaatcaaaagttactttcaatttcctttgcttttataaagtccacgataaccatacttaaatgcacgttttttttcctgtgatataattaaaacccagtgttatttcagttgaacttaaaatagagtccctggtctgaatcagactttaaatcatactgtaaacatatatttggtataatttattgatcatcatccagttgctccaaaagggttcttctgcgcttttccaattccccttcactcagttcgctgccagaagtatcccaattaccagaatcctttccagtctttttcttaggcgatttgtgttctgattctgatctttgtctagttctgtctttttcactttcccgatctttttctcttttatccttctctcgctcagcatcggattctggagagtcagatttatgtctcctcttcttacttttcttcttatgcttttttgactttttataacttctctcagactctgcactagaagaatgttctgaagcagaacgagagaaggat

SEQ ID NO: 75622 - DNA, 530 bp, Homo Sapiens
  misc_feature (244)..(304): n is a, c, g, or t
gcacgaggtaaaaaacatcataggaaacgttcccgctctcgatcggggtcagattcagatgatgatgatagccattcaaagaaaaaaagacagcgatcagagtctcgttctgcttcagaacattcttctagtgcagagtctgagagaagttataaaaagtcaaaaaagcataagaagaaaagtaagaagaggagacataaatctgactctccagaatccgatgctgagcgagagaaggataaannnnnnnnnnnnnnnnnnnnnnnnnnnnnnnnnnnnnnnnnnnnnnnnnnnnnnnnnnnnntcgctaagaaaaaagactgaaaggattctggtaattgggatacttctggagcgaactgagtgaaggggaatcggaaaagcgcagaagaaccctttgtggagcaactggatgatgatcaataaattataccaaatatatgtttacagtatgatttaaagtctgattcagaccaggactctattttaagttcaactgaaataacactgggttttaattatatcacagg

SEQ ID NO: 75623 - DNA, 979 bp, Homo Sapiens
ggatgggatacttgaattaatcatgacagcgttacagattgcttcctttattttgttacgtctgttcgcggaagattaaacttaatgaaaatctgttcgtattctctgcatattctctggcaaccttgccccatacttacttatttagcatagtcgagtgctctagtttctgtctctcaggcactcgtaactaaggaccaccattggccattggtagatgtttgattgacttaacaagagagggacaaattttcaatttgtgaaactccaaagcagaaagtattggtgcttgctaccgtgtgaattcttccttagacatgcagagaaaatgtatgcaagagaccaaaaagatggctccaagctatgtcatgttacctgtaataaaatcttttcttctagattctttctatgttggcagataatctccccttgtagcttccactcacttattcttgcattcagagtcacaatgatcatcttacccatgtggtttttgagaaagaaagatcaattctttgtttgcagtaggtaatcttagagatggagatgattgtagaattattcctagatgagtgtcaatttatttaattccattgtcatataaggagtcaaattgtttcttatcatttgttcattgaagaacagagacctgtctggaaaatcgatctctacaaattcaattaaataatgatccccaaatgctgaaaaagtgaaatacagcaattcaacagataatagagcaatgtttagtatattcagctgtatctgtagaaactctttgacgaacctcaatttaaccaatttgatgaatacccagttctcttcttttctagagaaagatagttgcaacctcacctccctcactcaacactttgaatacttattgtttggcaggtcatccacacacttctgcccccactgcattgaattttttgcttatgttgtttataataaaacttttcaattatctcataaaaaa

SEQ ID NO: 75624 - DNA, 918 bp, Homo Sapiens
cacaagtcctgctagtcgcctccgtctgggtaccagccccctattactctgcaggcgtgtgaagaaagaaggaaactagctcggaccgtgcaggtttgtaggtctgttggcctgtaggtttcggcacaagtttcagcgagagaaggagaaaactgccttggttggaaccttgcagattcatcacaagagagctacaagagcctggaagaagctgaagactgctaccctccatccttactcaccctggacctgagagacctcttcaatcagaaatggaaacagagagattctcctggaaacccctgccccataaacggccctctcgaacacaatgggacggaatccacccacaacgcgcttggtttgcagatgtcaaagaatctgcagagggtgctactgaagatccagccttagccaatcaccacctcattgggtgaaagttccagggctcaatccaggaccacactcttattggccaggcaggggctcccacagagctttgagtaacttcttggttgtgcagtctgcaggcaatgttggcattgtaaattcctcccttgcagcctccttcatgtggtgaggggatcacttcagctgcctgctgtggacaaagaacatcaaattacagcatcacgagtgctattgttgcctgtggtggtctccctgtccaagcgggaccgctttgcagagaccagaggcatatcgcggcttgagctgaaaatgcatttgttgcagcttaggttgaattatttttcgtttgctctttcttctacacgcgcctgatggatagtgaacctattcatcaaaaaagtgcactgctcttctgtctattgtaccgacttaacctcttccacccaagtccgcatctgtgtgtatcatcaataaagttgtgtgctttgattggcagaaaagaaaaaa

SEQ ID NO: 75625 - DNA, 880 bp, Homo Sapiens
ctagagcacaagtcctgctagtcgcctccgtctgggtaccagccccctattactctgcaggcgtgtgaagaaagaaggaaactagctcggaccgtgcaggtttgtaggtctgttggcctgtaggtttcggcacaagtttcagcgagagaaggagaaaactgccttggttggaaccttgcagattcatcacaagagagctacaagagcctggaagaagctgaagactgctaccctccatccttactcaccctggacctgagagacctcttcaatcaggtggagcaaggccctctcctgtcctgccccaaggctggcacagacttgagcatgggccgggctcgggaagtgggttggatggcggcaggactgatgatgggggctggtgcctgctactgcgtttacaaactgaccataggaagagatgacagtgagaagctggaggaggagggggaagaggagtgggacgatgaccaggagctggatgaggaggagcctgatatttggtttgattttgaaactatggctcggccctggactgaggatggggattggactgaacctggggccccaggtggcactgaggacaggccctcagggggaggcaaggccaaccgagcacacccaataaaacagcggcattcccctatgaacataaaaatacttggagtgctcaaaattgtaaaaatggcagtggtgttctggacctctccaagtgtcttttcattcagggaaaactgttgttggcgaagccaaggatgcgggctttcatttagccaggatatcaatagccatttggcagcctctcaatggctagaaacacgagcccatccagaccactgttaaagaggcttgtgtgcccggatacttaatgcgaatatga

SEQ ID NO: 75626 - DNA, 717 bp, Homo Sapiens
  misc_feature (36)..(36): n is a, c, g, or t
  misc_feature (98)..(98): n is a, c, g, or t
aagaagtaaattctcactgtaaacttggattgatanacagaaacaattaaaccaaacaaaatcattgccccaaaatttctatctcccaagaattgctntgtgccattttgaattcaggtagttattctgtatatacttagctaactattcagagcttcttcaatctctagtaagcttgaaggtggtgtctgggaagacacagggcagggtgacatttagactctgttcattcttaaaaatagggataagccagaatgatgtgacatctagtatgtggtagatgaagaatcagtggaaattcttaattgcacagactttataatccattatataaagtgtaattccatactttttactgtggcaagggtgtgatgtgattgttaatctttttaatttttgaatccaaactgaatttaaagtgttgaatacttaaatcctcacaagtgaattatgaaccatttgtaaagtgtttctataactctttgtatcatgtgttggtacatcttatcaagttttttctggcatgtaattccattctaaacttatgtaaaatttctattgttgctgtaaatattacacaaatatctattccgtgataaccttcattatcagcatgaaatggttaatttttactgagcacaatgtatttttgaatggatcttcccaaatgtctttaataaaatgcagattttgcactgactgatgtgactgccaaaa

SEQ ID NO: 75627 - DNA, 556 bp, Homo Sapiens
  misc_feature (255)..(271): n is a, c, g, or t
tttaatggataaatccatttatataagggccaaaaccggccaaatggatcaaaggggatgaaactcaaaaaaactgctatgtttgggaggtaatggctgagaaaaggcaggaatgaggctgtgaagtgttgccaatattctacatcttcactttggcagtggttacacaggtgttcacgacataaatatctatcagactgtatacagttttgtccactttttgaatgcatggtatacttcagtaaaagtttactnnnnnnnnnnnnnnnnngacattgtgcttcttgttaccaaaataaaaccatggcagatattttggtaaatattctatttttcccatcttctactgttgctgatgacagggatggtattcaggtgaacactttgtcacttagaatatcatttagctttagcctgtgcagccaatgcagcttcttcacgccacttagctttctttgccaagttccaacttgttaaggattcatgtcgttctacagcccttttggctgacactatcacagcaaagcaggcgataattgtgagtccaatcattatg

SEQ ID NO: 75628 - DNA, 1000 bp, Homo Sapiens
  misc_feature (52)..(104): n is a, c, g, or t
  misc_feature (185)..(203): n is a, c, g, or t
aaactgctatgtttgggaggtaatggctgagaaaaggcaggaatgaggctgnnnnnnnnnnnnnnnnnnnnnnnnnnnnnnnnnnnnnnnnnnnnnnnnnnnnntcacgacataaatatctatcagactgtatacagttttgtccactttttgaatgcatggtatacttcagtaaaagtttactnnnnnnnnnnnnnnnnnnngacattgtgcttcttgttaccaaaataaaaccatggcagatattttggtaaatattctatttttcccatcttctactgttgctgatgacagggatggtattcaggtgaacactttgtcacttagaatatcatttagctttagcctgtgcagccaatgcagcttcttcacgccacttagctttctttgccaagttccaacttgttaaggattcatgtcgttctacagcccttttggctgacactatcacagcaaagcaggcgataattgtgagtccaatcattatgtaacaagctttcactcgagctttgtttcttgcggtgtctatcatttctggcgggatccgaggcgggatctcctccatcgatttgaaacgccctgtccacagcaggattttcttgtcgaactgcgaaggcctgcgctgcgtggggactcggtgaatctccccgtgaccttggggcccagaattgctgggggccccgccgctggagtagcaggggagaccccggggcggaagagccggtgcgggccgtcgcgtggcctcgagaggcgccccggggccgcagcggactgttagcccgcggccaaggcgcagtaggctcccgaccgccctgagcatgctgcccgcttgtcccgcgccgcacccgcacctccggacccagccacaggcgttgtccccgcagctctcctcgtcccgccccggcctgccgcgcgctggagagcctgggacgtgcagctggaacccctggcgctccggacgcgtggtcgacgatatcccgggaatccggaccggtccagc

SEQ ID NO: 75629 - DNA, 977 bp, Homo Sapiens
  misc_feature (811)..(811): n is a, c, g, or t
  misc_feature (852)..(852): n is a, c, g, or t
  misc_feature (873)..(873): n is a, c, g, or t
  misc_feature (959)..(959): n is a, c, g, or t
actgatgcccatgacaagagtcttgatatgcattagccggccggggtgcagggacatgttgcctctgtggtgctgatgctcggtgcggatgttgacctccgccatctagaacacagcaccatcatttacggaagacccacagcatcacccactgcttcgcctctgctggaacaagcaggaccctaactacctggccaccatggccatggatggaatggaggtggtgattctagatgtccgggttccctgcacacctgtcgccaggttaaacaaccatcgagcatgtgtcaatggcattgcttgggccccacattcatcctgccacatctgcactgcagcggatgaccaccaggctctcatctgggacatccagcaaatgccccgagccattgaggaccctatcctggcctacacagctgaaggagagatcaacaatgtgcagtgggcatcaactcagcccgactggatcgccatctgctacaacaactgcctggagatactcagagtgtagtgttggtggcgctgtgcccacgaggcaggggcttttgtatttcctgcctctgccccacccccaaagtaagaagaaacatgtttccagtggccagtatgtctttcattgctttgcacccactgttaccagaagctgctctaggagttcctggccagtcaccccatcgccctctgtggcagactcagtgctgtgtggcgcctcctcagcccagggctgagttttaagattttctctcctttcctcttctcctttggttcctcaattaaaaaatgtgtgtatatttgtttgtcaggcgttgtnttgaggaagcagttcacgcactggctgtgtctattcctctncccaggtgtctctgtttgctncccaaggacaagttcatgtctccgtccatgtccatgttccgggttaagcacttacgttgggaacaaataccaatttggcctttccnccaagtaacaagtgtggt

SEQ ID NO: 75630 - DNA, 1361 bp, Homo Sapiens
cgtccgttcccaagctggtttgaaactaggggtcgggctcggccgtcgtcgttgtttgtcgccgcatccccgcttccgggttaggccgttcctgcccgccccctcctctcctcccttcggacccatagatctcaggctcggctccccgcccgccgcagcccactgttgacccggcccgtactgcggccccgtggccaccatgtccctgcacggcaaacggaaggagatctacaagtatgaagcgccctggacagtctacgcgatgaactggagtgtgcggcccgataagcgctttcgcttggcgctgggcagcttcgtggaggagtacaacaacaaggttcagcttgttggtttagatgaggagagttcagagtttatttgcagaaacacctttgaccacccataccccaccacaaagctcatgtggatccctgacacaaaaggcgtctatccagacctactggcaacaagcggtgactatctccgtgtgtggagggttggtgaaacagagaccaggctggagtgtttgctaaacaataataagaactctgatttctgtgctcccctgacctcctttgactggaatgaggtggatccttatcttttaggtacctcaagcattgatacgacatgcaccatctgggggctggagacagggcaggtgttagggcgagtgaatctcgtgtctggccacgtgaagacccagctgatcgcccatgacaaagaggtctatgatattgcatttagccgggccgggggtggcagggacatgtttgcctctgtgggtgctgatggctcggtgcggatgtttgacctccgccatctagaacacagcaccatcatttacgaagacccacagcatcacccactgcttcgcctctgctggaacaagcaggaccctaactacctggccaccatggccatggatggaatggaggtggtgattctagatgtccgggttccctgcacacctgtcgccaggttaaacaaccatcgagcatgtgtcaatggcattgcttgggccccacattcatcctgccacatctgcactgcagcggatgaccaccaggctctcatctgggacatccagcaaatgccccgagccattgaggaccctatcctggcctacacagctgaaggagagatcaacaatgtgcagtgggcatcaactcagcccgactggatcgccatctgctacaacaactgcctggagatactcagagtgtagtgttggtggcgctgtgcccacgaggcaggggcttttgtatttcctgcctctgccccacccccaaacctcctgtataagaagtaccgtattttctgcccatcatactttgtaataaaacttgaacatgtaaaaa

SEQ ID NO: 75631 - DNA, 2564 bp, Homo Sapiens
  misc_feature (1908)..(1975): n is a, c, g, or t
  misc_feature (1996)..(2074): n is a, c, g, or t
aggctaggtagggcgggggttgaatcggcacgagggtgaaatccttataaatccaggattggctctgagagaactggctaagattcaggaagaaacaaaaaattcagaatccttacgaaattttggccctaattgtcatcaaaacctgtaggattctgatgacaattagggccaaaattttaggaggagatgtaggatgcaggagaaaattaaagtgttttctttatatcagaggaggaaatagtagaggtcagtgaaggtctggggtagggaaacattcagactgtccatgcatggctgtggagtgagactgcccttagcctgggtcagccttcctgggccataaattgggcatccgtgatgctaggtaactgtgggaacaaaatgacagcttagagcagccatgggtgatgtttggtggtaaaaaacctacaggcgtttggggtcccatgattgttccagaccatgactcttcctggttgtgggtttgttacagagcaggagaagcagaggttatgacagttatgcagactttccccctcctttttctcttttctcttcccctgtgcttttccactgtttcttcctgctgccaccgtgggccttgaattcctgggctgtgaagacatgtagcagctgcagggtttaccacacgtgggagggcagcccagtactgtccctctgccttccccactttgagaatatggcagcccctttcattcctggcttggggtaggggagaccattgaagtagaagcctcaacagcagacttttccctttactgtgtgtactccaggacgaagaaggaagatcatgcttgatacttagattggttttcccagggaagagggcggagcagagcaaagtcactgtgaaccctgggccaggccctggctgggccagctcctgagagcgtctcgtgttgcagacccttgcccacttcacccacctgcaccttctccccctctcacagtgtcactgctgctaatggtcaaagtcaaatgtgtggccacatgggatgggccaggtcctctcaggctactttctggatgtcatttttaaaatatggaaacatgcaggtgccttcccaaagaggcttggactggtatatccaacgagaaacaaataagctaaagaaagtttaaactcaagaagaaagatgttgacagtctatgtaacagctggaaagtttataggcacccacctttgggacaacccagtgattatgaacatgtgatatctactatttaaaagaaatgttctcaccttgggttgattgtggtataccatgtgttatgaaaattgttgagctgaagctttgaatcgatttagttgagtctgactcacttgctttggttcctgtgtattttactacccctcttgtcagtgaccttccttccccaccccacccagagtgaatttgtagcatgattgtataaacctctatgtagaaaatggagatttcttgctctgaaatgttaagctctaactgatccatttctgtgtcctttagcctagtatgtctgaacttccattcttgttatatatttaaactttccctctatattataggttttgtggcatccacggtcaggtgtagaggaagctgccccttgcagaactgtactgtaatatttttcttttataaatattttcacaggactgattgtacacagggcttgtaataaaattttaacactgtgctgtgaaacaactatggggaatctccattgaaggctacttcatgggcacctgaaagtggagtgttatagctatgactttctatttcttgtttcctaagtaaattaaacctaattttcaccctttcattctgtttcagcctcctgtataagaagtaccgtattttctgcccatcatactttgtaataaaacttgaacatgtaacnnnnnnnnnnnnnnnnnnnnnnnnnnnnnnnnnnnnnnnnnnnnnnnnnnnnnnnnnnnnnnnnnnnnccccaccaacttctctatcannnnnnnnnnnnnnnnnnnnnnnnnnnnnnnnnnnnnnnnnnnnnnnnnnnnnnnnnnnnnnnnnnnnnnnnnnnnnnngggggcgccggggcccccccaaggggaaaagaggaaacggggcctatatcgggtttttcccaaagaaaaacccggggcccaagaaaaaagggggtgggatttcccccccaataaataaaaacccccccgcgggggcaaaccccagcggttcttctgaaaaaaactccccaaagggggggtttccggaggggccctctaccggggtcctttcacaagagagggggccccaaacgcgaggcctcatttaaataaatatattacgccctcgcccccccgggaacattactttgcgcaaaaaaagtgttgtggaaacttctattataaaaaaatttgcgcgcggcgacgttggaaaacgctctctccccaaactgcgcggttggagaaaccccgtgtacatcccaccgccccgtaatataccccctttttttcgcccgcttgtcgcgaaaaattattttctccccccagggtgggagaaaagcggcggggcgca

SEQ ID NO: 75632 - DNA, 1574 bp, Homo Sapiens
  misc_feature (163)..(384): n is a, c, g, or t
  misc_feature (395)..(395): n is a, c, g, or t
  misc_feature (1012)..(1027): n is a, c, g, or t
gaaaccaccgcgcttacagtctgcattatgcttgcccatgtttctggttcctgatcgtgaaccgatccgcttggtggtgtacgtcccgcaccgacgaccggcgagcggtcatgacgagagcggagacgcccaaacgcaacgccttcccgcgcgtgccgatcannnnnnnnnnnnnnnnnnnnnnnnnnnnnnnnnnnnnnnnnnnnnnnnnnnnnnnnnnnnnnnnnnnnnnnnnnnnnnnnnnnnnnnnnnnnnnnnnnnnnnnnnnnnnnnnnnnnnnnnnnnnnnnnnnnnnnnnnnnnnnnnnnnnnnnnnnnnnnnnnnnnnnnnnnnnnnnnnnnnnnnnnnnnnnnnnnnnnnnnnnnnnnnnnnnnnnnnnnnnnnaggaattcgcnacgaggagccccagcaccttaccctgagtcacgggaacctgagactttgtccaaacctcggctggaaggctggtcttggcactcgacgtcttagctagtggaattatcgcattaagactgtactggggcctttttcatgatgacttgggtctcaatccttggagcagctgaaagaacagctcgggccacctgtggatgcacccacaatgaaatcagaggccacgtgaggtttgcaaggcagagtggcctgcagttttaactcgggcactatggcaatgcagacccaaaccaattgtgccagttctttgctgggtggcaaagtgttttcaggctttgtggtcactcctgatttctgtttggaagcacagttctctctctaaggagaatggaaacttggaaaggcctgtaaaatcggaaagcctgtaaaaggccgtagagtggagatgtataaaaatgtacggtcacccatgttttaggggttgacaccgtggacttttatctcgctcaccaaattcctcacacatacagctcactccctgtgccctcggccatctcaggcaccacaaaatcctcactgcttgaaattcacttatggagtccaacaaacaactttcttnnnnnnnnnnnnnnnnggcagtaaaatctcagaatttctgtgcaacgcttgcaacctgcccacttattaaataaacagaacaccaaaccaaccgaaagctatgcaagtggcaggctgccctgggcagagccctgcctgtctgccagggactacggtggcacgggagcagggcgcgatcatgctggaagaaatgagaggtggtctcattccctgaatctcaaactctcatctcaggagcccccagtcctaacactgtattcagcggctggagttatctggccaggtaaagggacgagggaaggcagacagtcctcaacttcttcctgtgtttctagcagggaaggaacgcaatggcttcagtccctccgcctctaggtaacaaggcaaaggcctccctaacccaggcagacaggatgtggggaaggtcttgtgtcttttcctaactcagaatgagtgagcgggctcccggagaaagactgtcctcttagcacatgaccccgcaggcttctagcaccaaaggctcgctaacacctccgaccctgtctgcaggtagaggggatggg

SEQ ID NO: 75633 - DNA, 1001 bp, Homo Sapiens
  misc_feature (808)..(824): n is a, c, g, or t
attagaaagtgttgtggaaccaaaatgatttcagcgtgagatttgtgtcctagatgccgaggcacaagggtacttatgtgtgagaatttgtaaggagataaagtccacgtggcaacccctaaaacatggtgaccgtacattttttaaatctccactttacgccttttacagctttccgatttacaggcattccaaggttccattctcctaagagagagaactgtgcttccaaacagaaatccagagtgaccacaaagcctgaaaacactttgccacccagcaaagaactggcacaattggtttgggtctgcattgccatagtgcccgagttaaaactgcaggccactctgccttgcaaacctcacgtggcctctgatttcattgtgggtgcatccacaggtggcccgagctgttctttcagctgctccaaggattgagacccaagtcatcatgaaaaaggcccaagtacagtcttaatgcgataaatccactagctaagacgtcgagtgccaagaccagccttccagccgaggtttggacaaagtctcaggttcccgtgactcagggtaaggtgctggggctgccagaggacctgccccagcaagatttttgtcaagagcgagactccatcagcccaggcagacgggagcaggttcttggccagcgtagacagcagcaaacagcagcagggaagccattctcactgcatcctccctgcagtagccacggccaggcccttaggaggagcagtgaccgggggtgtccagaaatatcctgtccctggatggaaactaggtctcgtttggannnnnnnnnnnnnnnnngccgtgttaggaaattatttattaatttacaagacaggttttaactcagccgaggtgggaaatggtgtccctgtccctcccaaagcacagagcacagaaatgaggccgtttacatggcgagtctccgtgctggtgtttaagtcattaaaaagatactcaaagagccccaagaaaaaa

SEQ ID NO: 75634 - DNA, 1063 bp, Homo Sapiens
  misc_feature (873)..(887): n is a, c, g, or t
tcggcagtaactctaacggttctaaggtagcgaggcctgggtggcgaattcggcacgaggccatgggtaccatgcagcccttcaactacgtgaccctgcagtgccttgcggaccgggccctggataagaacaagatcccttacaagggcttcatcccggaagatctggaggcgttcatcgaactgcactgacctgcccagaacgcctgcaccctcacctctcccctctcctgctgagatgggggaaatccggctgcggcatagcagatgctcgttcttgcctccttcaggcaccaatcaggagaagggttctgcctcccatcccctctacctgcagacagggtcggaggtgttagcgagcctttggtgctagaagcctgcggggtcatgtgctaagaggacagtctttctccgggagcccgctcactcattctgagttaggaaaagacacaagaccttccccacatcctgtctgcctgggttagggaggcctttgccttgttacctagaggcggagggactgaagaccattgcgttccttccctgctagaaacacaggaagaagttgaggaccggtctgccttccctcgtccctttacctggaccagataacctccagaccgctgacatacagtgtataggacctgggggcatcctgagatgagagtctgagattcaggcaatgagaccacctctcatttcttccagcatgatcgcgccctgctcccgtgccaccgtagtccctggctgacaggcagggctctgcccagggcagcctgccacttgcatagctttcggttggtttggtgttctgtttatttaataagtgggcaggttgcaagcgttgcacagaaattctgagattttactgccnnnnnnnnnnnnnnnaaaaaagttgtttggttggactccctaagtgaattttcagcagggaaggattttgtggtgcctgagatggccgagggcacaggggagttgaactgtatgtggtgaagaaattgggggaagcgaaataaaagcccacgggggtcaaccccctaaaaccagggggtggaccggtacct

SEQ ID NO: 75635 - DNA, 997 bp, Homo Sapiens
  misc_feature (46)..(46): n is a, c, g, or t
gtacagcagaaaatcttttactagtgtgtgtgtgtatatatataancaattgtaaatttcttttagcccatttttctagactgtctctgtggaatatatttgtgtgtgtgatatatgcatgtgtgtgatggtatgtatggatttaatctaatctaataattgtgccccgcagttgtgccaaagtgcatagtctgagtaaaatctaggtgattgttcatcatgacaacctgcctcagtccattttaacctgtagcaaccttctgcattcataatcttgtaatcatgttcccattacaaatgggatataagaggcagcgtgaaagcagatgagctgtggactagcaatatagggttttgtttggttggttggtttgataaagcagtatttggggtcatattgtttcctgtgctggagcaaaagtcattacactttgaagtattatattgttcttatcctcaattcaatgtggtgatgaaattgccaggttgtctgatatttctttcagacttcgccagacagattgctgataataaattaggtaagataatttgttgggccatattttaggacaggtaaaataacatcaggttccagttgcttgaattgcaaggctaagaagtactgcccttttgtgtgttagcagtcaaatctattattccactggcgcatcatatgcagtgatatatgcctataatataagccataggttcacaccattttgtttagacaattgtctttttttcaagatgctttgtttctttcatatgaaaaaaatgcattttataaattcagaaagtcatagatttctgaaggcgtcaacgtgcattttatttatggactggtaagtaactgtggtttactagcaggaatatttccaatttctacctttactacatcttttcaacaagtaactttgtagaaatgagccagaagccaaggccctgagttggcagtggcccataagtgtaaaataaaagtttacagaaaccttaaaaa

SEQ ID NO: 75636 - DNA, 570 bp, Homo Sapiens
tcggcccgccgggtgggttcctggctggtgtctgctgagggagtggggggcccagccccttctgttctcccccgccaaaccacagtgggagctggggcagggggagagccaggcaatcgggggccaaagatgggggtgctcgcctacagtctgcatctgtagtgccttgtggggtatccaggaacaccctcccagcaggggatgggaaccctgtcccatgaagccctctcctcagctttacttgctcccccgcccttagccttggggagaaatggcccgtggtgggctgaccccccaccctccacacacacagttccatgacccagcgggcccccaggggcatcaggtgctggtcctcctccctcctggcctcgacccctaagggcttcgcccctcccaggggcctgtaactaagtcgggtcctgccaggcagggggcctgtgttctgtgccccttgggagacaggaactggcgagttcaggtggggtggggacagcacagactgttccaccgttgtgcatattgttgcttctgaaccacaaactgtataaatggatggttttttgcaaa

SEQ ID NO: 75637 - DNA, 2039 bp, Homo Sapiens
aggaagcgaggcctgggtggcgatttcggcacgaggctgtaatccagaggaacttccgcaaacacctgcgcatggtcggcagccggagggtgaaggcccagacgttcgctgagcggcgcgagcggagcttcagccggtcctggagcgaccccacccccatgaaagccgacacttcccacgactcccgagacagcagtgacctgcagagctcccactgcacgctggacgaggccttcgaggacctggactgggacactgagaagggcctggaggctgtggcctgcgacaccgaaggcttcgtgccaccaaaggtcatgctcatttcctccaaggtgcccaaggctgagtacatccccactatcatccgccgggatgacccctccatcatccccatcctctacgaccatgagcacgcaaccttcgaggacatccttgaggagatagagaggaagctgaacgtctaccacaagggagccaagatctggaaaatgctgattttctgccagggaggtcctggacacctctatctcctcaagaacaaggtggccacctttgccaaagtggagaaggaagaggacatgattcacttctggaagcggctgagccgcctgatgagcaaagtgaacccagagccgaacgtcatccacatcatgggctgctacattctggggaaccccaatggagagaagctgttccagaacctcaggaccctcatgactccttatagggtcaccttcgagtcacccctggagctctcagcccaagggaagcagatgatcgagacgtactttgacttccggttgtatcgcctgtggaagagccgccagcactcgaagctgctggactttgacgacgtcctgtgaggggcagaggcctccgcccagtcaccatcaggccactccctctgcaccgggacctggggctgggccgcctcgtgctccccgggactgtgtggctccggtctcgcctggagccacttcagggcacctcagacgttgctcaggttccccctgtgggttccggtcctcgctgcacccgtggccgcagaggctgcagtccctgggggccgggaggatcccgccctgtggcccgtggatgctcagcggccaggcactgacctgccatgcctcgcctggaggctcagctgtgggcatccctccatggggttcatagaaataagtgcaatttctacacccccgaaacaattcaaagggaagcagcatttcttgttaactagttaagcactatgctgctagttacagtgtaggcaccccggcccagcagcccagcagcccacatgtgttcaggaccctccctgcccaccccctccctgccgtatcgatcaccagcaccagggtggcccgtgtgcgtggggccagcgtcgccgggctgcccagcctggctctgtctacactggccgagtctctgggtctgtctacactggccgagtctccgactgtctgtgctttcacttacactcctcttgccaccccccatccctgcttacttagacctcagccggcgccggacccggtaggggcagtctgggcagcaggaaggaagggcgcagcgtcccctccttcagaggaggctctgggtggggcctgctccccatccccccaagcccacccagcactctcattgctgctgttgagttcagcttttaccagcctcagtgtggaggctccatcccagcacacaggcctggggcttggcaggggcccagctggggctgggccctgggttttgagaaactcgctggcaccacagtgggcccctggacccggccgcgcagctggtggactgtaggggctcctgactgggcacaggagctcccagcttttgtccacggccagcaggatgggctgtcgtgtatatagctggggcgagggggcaggccccccttgtgcagagccaggggtctgagggcacctggctgtgttcccagctgagggagggctggggcgggggccgggcttggaacgatgtacgataccctcatagtgaccattaaacctgatccttccacgggggcgccg

SEQ ID NO: 75638 - DNA, 1538 bp, Homo Sapiens
ggatgttacgtctcgctccggggcggaaagtgggtcagggccgggccggcggagcgcgcagcgggggctgcagattctttccaccatggccagacgcccccggaacagcagggcctggcacttcgtcctgagtgcagcccgccgagacgcagatgcccgggccgtggctctagcaggctccactaactggggctacgactctgatgggcagcacagcgactcggactccgaccccgagtactccacgctgccgccatccatccccagtgcggtgcccgtgaccggcgagtccttctgtgactgtgctgggcagagcgaggcctccttctgtagcagcctgcactcggcccaccggggcagggactgccgctgcggagaggaagacgagtatttcgactgggtctgggatgacttaaataagtcatcagccaccctgctgagctgtgacaaccgtaaggtcagcttccacatggagtacagctgcggcacagcggccatccggggcaccaaggagctgggggagggccagcacttctgggagatcaagatgacctctcccgtctacggcaccgacatgatggtgggcatcgggacgtcggatgtggacctggacaaataccgccacacgttctgcagcctgctgggcagggatgaggacagctggggcctctcctacacgggcctcctccaccacaagggcgacaagaccagcttctcgtcgcggttcggccagggctccatcattggcgtgcacctggacacctggcacggcacactcacctttttcaagaacaggaagtgtataggtgtggcagccaccaagctgcagaacaagagattctacccgatggtgtgctccacggcggcccggagcagcatgaaggtcacccgctcctgtgccagcgccacttccctccagtacctgtgctgccaccgcctgcgccagctgcggccagactcgggagacacgctggagggtctgccgctgccgccgggcctcaagcaggtgctacacaacaagctgggctgggtcctgagcatgagttgcagccgccgcaaggctccagtgtccgatccccaggcagcgacctccgcccaccccagcagtcgcgagcctcggccctgccagaggaagcgctgccgccggacctgactgacttcccagtggaactgccttcttgggctgggacagcccctttcctctgtcccttctttctctgtcccttccttccagccacactccagggcggagttggatgaggcccgtccggagggagccatctcttgctcccgaggctgggacagtcctttctgtgggggctctagggcccctctgctgctgtgctgggtggggaagcggctgccctgagccccaggtcttgtgggaggctgcgaggacgagagcctggctggagcccgcgttgctgttcccacagggcctcggtttttcctaacttgctctgcatgctgtcagcggctgccccgccgtcatagacttaaaggactgcaataaatgtagagttgatgtctaacaccca

SEQ ID NO: 75639 - DNA, 524 bp, Homo Sapiens
agtcttactgaatgcggtgatccaggagacaggcccaggtttggactggtcctctagcctcagaagcatctttttctccgactgattccgtgttcaggtaatgtctgcctgcctgcctagggcatctccacaccttaggccagccacgtccgcctcgcccgctggaacctacctgcccatcagagtcgtagccccagttagtggagcctgctagagccacggcccgggcatctgcgtctcggcgggctgcactcaggacgaagtgccaggccctgctgttccgggggcgtctggccatggtggaaagaatctagaagaaaacacaggctctgggcaaaggaagactcacagcactcccagccctgagcttccaggctgggccacggacccactcaaagtggggactgcaggggccgcaccggtgcccagccagggctccagaacgcttcaggagcccgtacctcaccccaggatctgagcagctcaataaaacccaggtagatcctgtgaaacgccacccagac

SEQ ID NO: 75640 - DNA, 921 bp, Homo Sapiens
tcaggccgggccggcggagcgcgcagcgggggctgcagattctttccaccatggccagacgcccccggaacagcagggcctggcacttcgtcctgagtgcagcccgccgagacgcagatgcccgggccgtggctctagcaggctccactaactggggctacgactctgatgggcagcacagcgactcggactccgaccccgagtactccacgctgccgccatccatccccagtgcggtgcccgtgaccggcgagtccttctgtgactgtgctgggcagagcgaggcctccttctgtagcagcctgcactcggcccaccggggcagggactgccgctgcggagaggaagacgagtgtgagcgtggggcccagcccctgctgggactgcactgcgggcgggcctgggggtgggcagggcagagccccatggagctctcagggctgccccagcctgggcctctcttgcagatttcgactgggtctgggatgacttaaataagtcatcagccaccctgctgagctgtgacaaccgtaaggtcagcttccacatggagtacagctgcggcacagcggccatccggggcaccaaggagctgggggagggccagcacttctgggagatcaagatgacctctcccgtctacggcaccgacatggtaagttgcttcggcccagggtgcttctgggggaacctggctccggcagcccagccccgcgccctctgcctggcccctgttcctagatgggtgggcatcgggacgtcggatgtggacctggacaaaataccgcaacacgttctgcaggctgctgggcagggatgaggaccgttggggcctctcctacacgggttgcctgagcccagggtgggggcgggccgagcctgggagctcccgggctcactgggacccttggttgccccacg

SEQ ID NO: 75641 - DNA, 919 bp, Homo Sapiens
tgttcatgaaaaaggtgagtgtgccgtgccaggggtccaggtgcacggccaatgatggagccctggccgaaccgcgacgagaagctggtcttgtcgcccttgtggtggaggaggcccgtgtaggagaggcccccagctgtcctcatccctgcccagcaggctgcagaacgtgtggcggtatttgtccaggtccacatccgacgtcccgatgcccaccatcatgtcggtgccgtagacgggagaggtcatcttgatctcccagaagtgctggccctcccccagctccttggtgccccggatggccgctgtgccgcagctgtactccatgtggaagctgaccttacggttgtcacagctcagcagggtggctgatgacttatttaagtcatcccagacccagtcgaaatctgcaagagaggcccaggctggggcagccctgagagctccatggggctctgccctgcccacccccaggcccgcccgcagtgcagtcccagcaggggctgggccccacgctcacactcgtcttcctctccgcagcggcagtccctgccccggtgggccgagtgcaggctgctacagaaggaggcctcgctctgcccagcacagtcacagaaggactcgccggtcacgggcaccgcactggggatggatggcggcagcgtggagtactcggggtcggagtccgagtcgctgtgctgcccatcagagtcgtagccccagttagtggagcctgctagagccacggcccgggcatctgcgtctcggcgggctgcactcaggacgaagtgccaggccctgctgttccgggggcgtctggccatggtggaaagaatctgcagcccccgctgcgcgctccgccggcccggccctgacccactttccgccccggagcatcccgggaattccggaccggtcc

SEQ ID NO: 75642 - DNA, 958 bp, Homo Sapiens
tttttttcctgagaggaagcctgaggttgaccagctctggggtttgtaaggcaggtctgttttctcctaggccctgagttttctgaatctctggttttgctttgttggcaaggagccagggaatcctgacctgagccagaccttaagctctatggttatttagctggccattcaggtataaggcagggtggtgtacctgctggcactatccagatggaggcaccaaacacccacatacctggcccaaccagacttctcccgtgagccaggcaaaggaaattgtcatctgccaactgtcctactcatattcctctcagtccttcttgggggtaagctgattacctgaaggacagctgaacccctggggtagcctcctatccaccactgcttaagtgcctatgggaatgtgggtctgcaccttgtcccctcataggatggtaccaagcatttagtgcacagtggccccatcatagcctgcagcctcatcatttcccatctggacctggtacaaatgcacgtcacaggctcagctcctccccactagcatcttctctaccttcaagaaccaggcagccctgccatgtcacaataggccaggggagtttccaaagatgtgggtggcaaatgcccctatagaaacaccagtacctgaaagcactgtagccctggacctgcctccttccctcggggccatacttctgtttccatctgctgggccaccagccactttagtgacccctgcctacttccttcctgttggatatcatacttccatctggctgcctttgcttaagccatctttgtggtagaggggccctggaattgcagctgtactgaggatgatgttattcacagcccctggcccacccactaatactactgcacagagtcaggatctcacatttcaccccaggctcaactgaggatgtggcttattaaacacggaagtgcaaaaaaa

SEQ ID NO: 75643 - DNA, 846 bp, Homo Sapiens
accggctaaaatggcgtctacgcaattacgtcaggcgtcagatccgcgcacgactagagggcgggaaagatttgagctacgcctgcgcagagttgagaagctgatgtctcctcgacttccaactggaaccttgaacccccacatttctggaccttgagcattcctcaagtaggaagatgtaatgcaccttgacctctttctaaataagacacttccccaataaggggagtgaagagtgaacagtcttcacgtctccacccacttccaaatcccagaggagacagacatcggaggggctgttacctcctccaaaaatgtcttgcatttacccagataatcttccaatggaaatccatggttcaagtgccacctcttcaggaaagccatctgacttcaatcaggtcagccctgacaaaggtcagctagccccttgaggacatcagctttggcctcagggtcctaatggcagcagaaccactgacagagctagaggagtccattgagaccgtggtcaccaccttcttcacctttgcaaggcaggagggccggaaggatagcctcagcgtcaacgagttcaaagagctggttacccagcagttgccccatctgctcaaggatgtgggctctcttgatgagaagatgaagagcttggatgtgaatcaggactcggagctcaagttcaatgagtactggagattgattggggagctggccaaggaaatcaggaagaagaaagacctgaagatcaggaagaagtaaagccgcctggctgagatggggtgggcagggcagagctgatcagggccgagcagaaccgcactcttcccaaataaagcttcctccttg

SEQ ID NO: 75644 - DNA, 619 bp, Homo Sapiens
  misc_feature (232)..(232): n is a, c, g, or t
  misc_feature (260)..(260): n is a, c, g, or t
  misc_feature (277)..(277): n is a, c, g, or t
  misc_feature (316)..(350): n is a, c, g, or t
agggggacaagtacaagctgagcaagaaggagctgaaagagctgctgcaagacggagctctctggcttcctggatgcccagaaggatgtggatgctgtggacaaggtgatgaaggagctagacgagaatggagacggggaggtggacttccaggagtatgtggtgcttgtggctgctctcacagtggcctgtaacaatttcttctgggagaacagttgagcagacagccacnattgcagcgcccttcctctccaccctcncaagacctgcctcttcnccctgcttccacctcaccccacttatccctctccataannnnnnnnnnnnnnnnnnnnnnnnnnnnnnnnnnnagggcgcaagagtagcggtccaagcctgcaactcatctttcattaaaggcttctctctcaccagccatccgatgtctgtctcctctgggatatcttcctacttgaggaatgctcaaggtccagaaatgtgggggttcaaggttccagttggaagtcgaggagacatcagcttctcaactctgcgcaggcgtagctcaaatctttcccgccctctagtcgtgcgcggatctgacgcctgacgtaattgcgtagacgccattttagccggt

SEQ ID NO: 75645 - DNA, 901 bp, Homo Sapiens
ccagtactataacggtcctaaggtagcgaggcctgggtggcgaattcggcacgagggcagtccggggctggagggtaggggcgagggtccccggataccgggtctatcacagtctcgggcagggagtctgaatcttttaggggagtgggcccaagccgggtgcaaaaaacggggaagggccttccctggctccgtcccggccactttgaccgaatcagcctgttctttcccgaccccgtctcctatcccctagaactgccacgtggggatgagatttgctgggctggtagcggcggctgctgcgggaggtcccgcccacgtgaagccagcctaactgagctctggactttggggacagctgtcagtggcctaggccgcaggacaccatgaagcaactgccagtcttggaacctggagacaagcccaggaaagcaacatggtacaccttgactgtccctggagacagcccctgtgctcgagttggccacagctgttcatatttacccccagttggtaatgccaagagagggaaggtcttcattgttgggggagcaaatccaaacagaagcttctcagacgtgcacaccatggatctgggaaaataccagtgggacttagatacctgcaagggcctcttgccccggtatgaacatgctagcttcattccctcctgcacacctgaccgtatctgggtatttggaggtgccaaccaatcaggaaatcgaaattgtctacaagtcctgaatcctgaaaacaggacgtggaccacgccagaaatgaccagccccaccaccatccccaagaacattcaccacatcatcggcaaccattggaaaccagctatatgtcctttgggggcggaaaaaagagttgcccagcccggtgcagacacgaagctgcc

SEQ ID NO: 75646 - DNA, 2108 bp, Homo Sapiens
  misc_feature (690)..(708): n is a, c, g, or t
  misc_feature (715)..(743): n is a, c, g, or t
gggaggcagcagtggatggtgcaggggaaagaggtgggaaggaggtcctgggagggacactggatgtcttaccccaagctgggccttgcagtacctgtggctggctgtgctggttgagcccgaatcgaccacggaaatttgacacctccgggcttggaagcagctctctcctccttccccgctgcttataaacctcagccctgaggctccagctcactctaccccatctccttgccgggtcagccctgacaaaggtcagctagccccttgaggacatcagctttggcctcagggtcctaatggcagcagaaccactgacagagctagaggagtccattgagaccgtggtcaccaccttcttcacctttgcaaggcaggagggccggaaggatagcctcagcgtcaacgagttcaaagagctggttacccagcagttgccccatctgctcaaggatgtgggctctcttgatgagaagatgaagagcttggatgtgaatcaggactcggagctcaagttcaatgagtactggagattgattggggagctggccaaggaaatcaggaagaagaaagacctgaagatcaggaagaagtaaagccgcctggctgagatggggtgggcagggcagagctgatcagggccgagcagaaccgcactcttcccaaataaagcttcctccttgaaacacnnnnnnnnnnnnnnnnnnnctcgagnnnnnnnnnnnnnnnnnnnnnnnnnnnnnttggagggataaaacagctaatggtttacttaactattctgaaagtaactgacaggtaataaaaatgtgggttttattagtccactacagtcacaatacaatcgtcatagatttccccttctgtattcatcccaccaaacaccaaacagagcagtgtagcagtctggctttcctcatgtgagtcaccactgtggctcattactttgtcagctgaatcctctttctcagcttcatggttcagagtgagagagttggaatcttctttctcagaagcacacgtcactggccatggaatgatacacatggaatggtccaatcgtccagggggtagaagagtatcaaatttaagcaaggtccaatgctgctcttctgtgtgatactggtacattgtgtccagtgctcctgcaggagtcattccaccaaagatgtacacatgttttcccatggccacagctgagtgggcagcacagcctgctggagcagccccagtgggatttagcttctgccatttcatgtcacttatatcaatgcagtggaggtcatcatagaatctgtcccccgccaagcctccgtggatgaagagctttgtccctgctgccaccatcacatgaccatgccggggagatggaggatttccaagtgtctctggctgtgaccaggtcagagtgtttgcgtcaaacacatgcagcttcgtgtcctgcacgggctgggcacctctctctccgcccccaaagacatatagctggtttccaatggctgccgatgatgtgtggaatgttcttggggatggtggggggctggtcacttctggcgtggtccacgtcctggtttcaggattcaggacttgtagacaatttcgatttcctgattggttggcacctccaaatacccagatacggtcaggtgtgcaggagggaatgaagctagcatgttcataccggggcaagaggcccttgcaggtatctaagtcccactggtgttttcccagatccatggtgtgcacgtctgagaagcttctgtttggatttgctcccccaacaatgaagaccttccctctcttggcattaccaactgggggtaaatatgaacagctgtggccaactcgagcacaggggctgtctccagggacagtcaaggtgtaccatgttgctttcctgggcttgtctccaggttccaagactggcagttgcttcatggtgtcctgcggcctaggccactgacagctgtccccaaagtccagagctcagttaggctggcttcacgtgggcgggacctcccgcagcagccgccgctaccagcccagcaaatctcatccccacgtggcagttctgcgggacttaggccagtcgcgagccgtgactcccc

SEQ ID NO: 75647 - DNA, 628 bp, Homo Sapiens
gggacatttgcaaccttggccatctgtccagaacctgctcccacctcaggcccaggccaaccgtgcactgctgcaatgggctctgagctggagacggcgatggagaccctcatcaacgtgttccacgcccactcgggcaaagagggggacaagtacaagctgagcaagaaggagctgaaagagctgctgcagacggagctctctggcttcctggatgcccagaaggatgtggatgctgtggacaaggtgatgaaggagctagacgagaatggagacggggaggtggacttccaggagtatgtggtgcttgtggctgctctcacagtggcctgtaacaatttcttctgggagaacagttgagcagacagccacattgggcagcgcccttcctctccaccctcccagacctgcctcttccccctgcttccaactgactgcattattcctcttcttaacaccatggctgatgcccttgcacatggagctgatgtcgactgggtcaaagggggacaagataatgccacaccgagtgatccaggccacagctgctacttctcttctggcctgtgagtatctcatccagaacggggcgaacgtgaaccaagcggacagtgcgggcaggggccag

SEQ ID NO: 75648 - DNA, 1224 bp, Homo Sapiens
  misc_feature (150)..(193): n is a, c, g, or t
ccccccctggtgacccggaaatttcggcgccccgagaggggacttctcccggaaacactctcccccgcgaaaaggggaatacccaggagcgggcccaagggggtttctcttccccggggggggtgtggccccacccccaccgggtttctnnnnnnnnnnnnnnnnnnnnnnnnnnnnnnnnnnnnnnnnnnnnagaaccccttggaatttttttaaccgtgtttgagaagggaggacttttcgggccggggcccgccccaaaggtttcccttgggttcggggggggttccccaaaaacacccaaaaaaaattggggccgcgggcccaacggtttccacaggtgtggctttggtttctggaaccccggggccttaaaaaaattggcgcgggtcttttagcgccaaattttaaccgttccaagggcggttccaggattccccggcgccacggacctaagaagggggcggggaaaagaattttgagggttatgccctggcgccagaagttggagaaagctggatgttctccctggactttccaactgggaacccttgaaccccccacatttctggaccttgagcattcctcaagtaggaagatgtaatgcaccttgacctctttctaaataagacacttccccaaataaggggaggtgagagtgaacagtcttcacgtctccacccacttccagatcccagaggagacagacatcggatggctgaagaaattgttacaggccactgtgagagcagccacaagcaccacatactcctggaagtccacctccccgtctccattctcgtctagctccttcatcaccttgtccacagcatccacatccttctgggcctgtggtgggaggagaggaagagggaggtgtatagggaagggtacagcactgagtcagaggcaagggggtggttgaggagcaggaggcaaagatgagcgagaggaactgcattgaattatgggactcttctaggcctcctcaaaggtcttgagggcttctgttgcctacagcataagctctttcacatccaggaagccagagagctccgtctgcagcagctctttcagctccttcttgctcagcttgtacttgtccccctctttgcccgagtgggcgtggaacacgttgatgagggtctccatcgccgtctccagctcagagcccattgcagcagtgcacggttggcctgggcctgaggtgggagcaggttctgg

SEQ ID NO: 75649 - DNA, 1030 bp, Homo Sapiens
  misc_feature (31)..(31): n is a, c, g, or t
gcctcagtcaggctcgccttgatgacagccnccggggtccaggccagggctcaggacacctggccataggctctgctgccaccctgggctctggtggaatggccaggggaagggagcctgggggagtcgggcacgtggtggcccaggtccagagtgtggatggcaatgcccagtgctgcgactgccgggagccagccccggagtgggccagcatcaaccttggtgtcaccctctgcattcagtgttccggcatccacaggagccttggtgttcacttctccaaagtccagtctctgacccttgactcatgggagccagaactagtgaagctcatgtgtgagctgggaaatgtcatcatcaaccagatctatgaggcccgcgtggaggccatggcagtgaagaaaccaggcccagctgctcccggcaggagaaggaggcctggattcacgctaaatacgtggagaagaagttcctgaccaagctgcctgagattcgagggcgaagaggtggccgggggcgcccaagggggcagcctcctgtgcccccaaagccttccatcaggccccggccagggagcttgagatccaagccagagcccccctctgaggacctgggaagcctgcaccctggggccctactgtttcgagcgtctgggcatcctccatctcttcccaccatggctgatgcccttgcccatggagctgatgtcaactgggtcaatgggggccaagataatgccacaccgctgatccaggccacagctgctaattctcttctggcctgtgagtttctcctccagaacggggcgaacgtgaaccaagcggacagtgcgggccggggcccgctgcaccacgcaaccattcttggcccacacggggctcgcctgcctgttcctgaaacggggagctgatctgggggctcgagactcctgaaggcaggaccctctgaccatcgccatggaaacagccaaccgctgacatcgtcaccctgctacgactgcaaaagatgagggaggctgaagccggcccag

SEQ ID NO: 75650 - DNA, 780 bp, Homo Sapiens
  misc_feature (553)..(553): n is a, c, g, or t
gggagagacgccccgttccaggacccttgtcaccgggagacaggagcggggaggatctgtggggtcctgggttcagcactctgccctgctgccgctgaggagaggtcagccctgacaaaggtcagctagccccttgaggacatcagctttggcctcagggtcctaatggcagcagaaccactgacagagctagaggagtccattgagaccgtggtcaccaccttcttcacctttgcaaggcaggagggccggaaggatagcctcagcgtcaacgagttcaaagagctggttacccagcagttgccccatctgctcaaggatgtgggctctcttgatgagaagatgaagagcttggatgtgaatcaggactcggagcttcaagttcaatgagtactggagattgattggggagctggccaaggaaatcaggaagaagaaagacctgaagatcaggaagaagtaaagccgcctggctgagatggggtgggcagggcagagctgatcagggccgagcagaaccgcactcttccccaataaagcttcctcctcgaanaaaaaaagagcatcccgtgcaaaaaacttggccggccgcctcggcccctcaaaaatctttcttggcccttccctttgcccccggaaaaactttttcttagacccttttcttttgggccgcgggggccccccagtgaggtaaggggacacctggtccataaccgggtttccacaaggggaaacccctgggccctggacacaaggggtcttgggaattcccccccgcat

SEQ ID NO: 75651 - DNA, 536 bp, Homo Sapiens
tctacttgtctgctcaactgttctcccagaaaattgttacaggccactgtgagagcagccacaagcaccacatactcctggaagtccacctccccgtctccattctcgtctagctccttcatcaccttgtccacagcatccacatccttctgggcctgtggtgggaggagaggaagagggaggtgtatagggaagggtacagcactgagtcagaggcaagggggtggttgaggagcaggaggcaaagatgagcgagaggaactgcattgaattatgggactcttctaggcctcctcaaaggtcttgagggcttctgttgcctacagcataagctctttcacatccaggaagccagagagctccgtctgcagcagctctttcagctccttcttgctcagcttgtacttgtccccctctttgcccgagtgggcgtggaacacgttgatgagcggtctccatcgccgtctccagctcagagggagacaaggtagagccgagagacaggtagagccgagagaaccaggtagagccgagac

SEQ ID NO: 75652 - DNA, 492 bp, Homo Sapiens
gtcctgattcacatccaagctcttcatcttctcatcaagagagcccacatccttgagcagatggggcaactgctgggtaaccagctctttgaactcgttgacgctgaggctatccttccggccctcctgccttgcaaaggtgaagaaggtggtgaccacggtctcaatggactcctctagctctgtcagtggttctgctgccattaggaccctgaggccaaagctgatgtcctcaaggggctagctgacctttgtcagggctgacctgtggaagagagaaggagcagagagggagagtcagggagccccaagatgcaggaatggttcagaaggtccctgccttggtgttatcacatcagtctcagcctggagggggcatatggggaaagagggagaggacaggggttgagcttggggcagcagaccaggcaacggcatctcagttttggtgggggcaggagattcagctccagaaaccccctcctctgtagg

SEQ ID NO: 75653 - DNA, 790 bp, Homo Sapiens
agtggccctgcatgaactctacaagtacatcaacaagtactatgaccagatcatcactgccctggaggaggatgcacgggcccagaagatgcagctgggctatcggctccagcagattgcagctgctgtggaaaacaaggtcacagatctataggaacccaggagccacggcctgctgttgcttcagcctggcctgggcagccctggaagctcggaggagaggccaccttcttaggtgcctgtagtgactgacaagcagagttagtggaaggtgactcccagtctcctggtggctctggcctcggccctgctggatccacctcctagacccggggcctcaaggctcatggggtagtacccagcctgctccccgagtccagcgaccctgtgacaccggtctgcagggagttggggactaagggcttccagagagtggctggaagagactccaggcccctggggagactgtactgttcctgaacactggccttggccacactgggattcggagaggaaggaggagagccccatgcttcctgtctgcctcctccaccatccctgacctcagttgagctgcctctggccttgttgctgctgccacatcctaggtctaagagttgaacgcctctcctaggccactacaaactgacccctcagcagggctggctgccacagggctgccctgcctcataggtagccatggtgagggctatctgctgcaggggggtcttggggagagtggtgactccattgacccagcttttcattaaaggataacacactgcactga

SEQ ID NO: 75654 - DNA, 505 bp, Homo Sapiens
  misc_feature (250)..(281): n is a, c, g, or t
ccacgttaccgacgagtgcctggcgcgcctgatgcgctgctgcccacgcctgcgcgcaatgcgcctggagaactgcgcgcgcgtcaccaaccgcacgttggctgccgtggcggcggacgggcgcgcgctgcagacattgcacgtggacttctgccgcaacgtgagcgcggccggcctgcgccgcctgcgcgccgcgtgcccgcgcctggccctgcgggcagagcacagcgccgccatgctgcccgaccannnnnnnnnnnnnnnnnnnnnnnnnnnnnnnntcggcaagctgctgcagcgctagacgccgccccgccgctgcccccggggaaggagcgcagccccagaccgtcctggcttcgaacccagctcttccaccttcagaccaccaccgcatattctgagcctcattttccccgtctgcacagtggggataagaaagcctacctcacgttacgattttatacataggataaacgcaagattaaatggatatttggaaaac

SEQ ID NO: 75655 - DNA, 721 bp, Homo Sapiens
  misc_feature (46)..(46): n is a, c, g, or t
  misc_feature (584)..(596): n is a, c, g, or t
agatccccttccttctgggtgcagactgcacctccggatgcagttntgatgtccatcttccaggagagagacggtctcgggtccagggagtggagggggctgcccctgccgtgcaggtcctggccgatggcgccttaccctgctgccctgggcttttggcctgaagcaaattcctgagtggggggtactggggcctgccgcatcctgtcctgtccactgcccacccccgtgtgctggctccctcacttctggctgcagtgggagccgccagtctgacccttgtcaccgcacgctctgcccccaccccgttgcaagaggtcacaccatgtcagcagccttgcactgaccgcagccggcccccaggcctcagagttctggatgcttccgtgcggctccaacaggcatcgtcttcccttccgcaggtggaggggccgcttcccgcaggcatctgagctctgtgccggggccgtggccatgggaagatgttccacgctgcctcctcctcgagttttcctcggaaacactcttgaatgtctgagtgagggtcctgcttagctctttggcctgtgagatgctttgaaaannnnnnnnnnnnnaagatgaagcaagatgtctgtagcggtaattgcctcacattaaactgtcgccgactgcaggcgcagtgactgctgaatgtaccctgtgtggcgacttggaatcaataaaccatttgtggatcctg

SEQ ID NO: 75656 - DNA, 1019 bp, Homo Sapiens
  misc_feature (408)..(432): n is a, c, g, or t
  misc_feature (895)..(929): n is a, c, g, or t
  misc_feature (933)..(971): n is a, c, g, or t
gccatgtgtgtccgggtcctgggcccgtctggtcctgtgccgttatccttggtcccgtgcctaaacgtgtgtttagaacttctcatgggcccggcgctccacaagattttggtggtgtgccgttgtgtgttgccacttaaaggagcctttctgccatccactgtatttagccagagagggaaggggttgacataaacgaaaaagtggatcaaatagtcaagaacatgatgggcgcggcaatgaactgaaccacttttgctaagtgacagaaaaatattctaatattaaggattatgttacaactctatggaagtaatgcagtgatgcatcttgcatctgttttgtcttgatgacaaaacgcactcttagagtcacaagatcctgccttgtgttagttataaacaaaannnnnnnnnnnnnnnnnnnnnnnnngtaactactatgtgctttaaagaaaattactgtatgattcagcagggttttttcattctttctatcgccatgctgacgtgaatggcttcttagacaggaatcagcaatgaaatgggtgtttagtactgaaaaggcataaaattaaaaataatcatatgtttaaaatcccttaacatttttgtttcaaaaatgattaaggaactcttcatactgtttccttttgtttccatcagcccagagcaactgtggtttcatgggacttaacagttggggattggaggtaaggcttccataaagcataaatcagatgttttcatgctgaggcaggaaaacagaaagccccgtttgccaccccctcttcccaatccttagctaattgttcggaaattttgtcacagctcatagaaaggtccccggccgtaatggccgaattcccgggcatatgtccggtaccgtcgactgnnnnnnnnnnnnnnnnnnnnnnnnnnnnnnnnnnncggnnnnnnnnnnnnnnnnnnnnnnnnnnnnnnnnnnnnnnnctctagacaacttagccgcccctaattaagtggacgtctatgtttcca

SEQ ID NO: 75657 - DNA, 907 bp, Homo Sapiens
gggagagactgcgagaaggaggtcccccacggcccttcaggatgaaagctgcggtgctgaccttggccgtgctcttcctgacggggagccaggctcggcatttctggcagcaagatgaacccccccagagcccctgggatcgagtgaaggacctggccactgtgtacgtggatgtgctcaaagacagcggcagagactatgtgtcccagtttgaaggctccgccttgggaaaacagctaaacctaaagctccttgacaactgggacagcgtgacctccaccttcagcaagctgcgcgaacagctcggccctgtgacccaggagttctgggataacctggaaaaggagacagagggcctgaggcaggagatgagcaaggatctggaggaggtgaaggccaaggtgcagccctacctggacgacttccagaagaagtggcaggaggagatggagctctaccgccagaaggtggagccgctgcgcgcagagctccaagagggcgcgcgccagaagctgcacgagctgcaagagaagctgagcccactgggcgaggagatgcgcgaccgcgcgcgcgcccatgtggacgcgctgcgcacgcatctggccccctacagcgacgagctgcgccagcgcttggccgcgcgccttgaggctctcaaggagaacggcggcgccagactggccgagtaccacgccaaggccaccgagcatctgagcacgctcagcgagaaggccaagcccgcgctcgaggacctccgccaaggcctgctgcccgtgctggagagcttcaaggtcagcttcctgagcgctctcgaggagtacactaagaagctcaacacccagtgaggcgcccgccgccgccccccttcccggtgctcagaataaacgtttccaaagtggaaaaaaaa

SEQ ID NO: 75658 - DNA, 1527 bp, Homo Sapiens
  misc_feature (67)..(67): n is a, c, g, or t
  misc_feature (125)..(125): n is a, c, g, or t
  misc_feature (143)..(143): n is a, c, g, or t
  misc_feature (1417)..(1417): n is a, c, g, or t
gtcggggaagcagtgagttggtgctggagcatgcctttcctgggtgtgccctgtgcattggtcaggngagggggcctctgtcgggctgcctctgatcttcctctgtgtccccacagccgctcctntggaagagctaacaatgngaacctcctgcctccctgatacgttcaccaagctgataaacccccaggaaaacacctgcagcttggaggagtttgtcctccagctggagctgtctgggtatagtcccgaagacctgactgctgccttggagatcttggaagccattatagccacgggttgttttgggattgacaaggaggagctgcgcagacggttctcggccttggagaaggcaggtggtgggcgcaccaggacattcgcagattgcatccaggccctcctggagcagcatcaggtgctggaggtcggtggcaacactgcgcgcctggtagccatgggctctgcctggccttggctcctgcactccgtgcggctgaaagacagagaagacgccgacatccagagagaagacccccaggccagacccctggaggggtcttccagtgaggacagcccccccgaggggcaggcacctccttctcacagcccccggggcaccaagaggcgcgccagctgggccagtgagaatggggagaccgacgccgagggcacccagatgacccctgccaagaggccagcgctccaggactcaaatttggcccccagccttgggcccggagctgaagatggggcagaagcccaggccccatctccacccccagctcttgaagacaccgctgcagcgggagcagcacaggaagaccaagagggtgtcgggttcacagagagtttcggagctgccaacatctcccaggcagcacgggaaagggactgtgagagtgtctgcttcatcggccggccgtggcgtgtcgtggatggccacctgaaccttcctgtatgcaagggtatgatggaggccatgctgtaccacatcatgaccaggcctggcatccccgagagctccctgctgcgccactaccagggggtcctgcagcccgtcgccgtgctggagttgctccagggcctggagtccctcggctgcatccggaagcgctggctgagaaagccaaggcctgtctcgctcttctctacacccgtggtggaagaggtggaagtgccctccagcctggacgagagccccatggctttctatgagcccaccttggactgtaccctccggctgggccgtgtgttcccccacgaggtcaactggaacaagtggatccacctctaggacccctgtgggcgtcccctccctcccagccaccgcctgccacaccactcctgcctgggtggctcgggcagaccccactggtgccctgggccttggggcctgccgaagccctcctgcagncagggggaacgggtgcctttgggccaaaaagttcacaggacttggacacggttttccccccgtggaactgggaaactccctgggaaaaagaagggggcttccccccgaat

SEQ ID NO: 75659 - DNA, 1270 bp, Homo Sapiens
  misc_feature (1160)..(1202): n is a, c, g, or t
  misc_feature (1209)..(1219): n is a, c, g, or t
aaactaaaggctaggtacgaggctgggttgtgaattcggacgagggcgcctccagagggctctgaagaccccagagggttcacagagagtttcggagctgccaacatctcccaggcagcacgggaaagggactgtgagagtgtctgcttcatcggccggccgtggcgtgtcgtggatggccacctgaaccttcctgtatgcaagggtatgatggaggccatgctgtaccacatcatgaccaggcctggcatccccgagagctccctgctgcgccactaccagggggtcctgcagcccgtcgccgtgctggagttgctccagggcctggagtccctcggctgcatccggaagcgctggctgagaaagccaaggcctgtctcgctcttctctacacccgtggtggaagaggtggaagtgccctccagcctggacgagagccccatggctttctatgagcccaccttggactgtaccctccggctgggccgtgtgttcccccacgaggtcaactggaacaagtggatccacctctaggacccctgtgggcgtcccctccctcccagccaccgcctgccacaccactcctgcctggtgctcggcagaccccactgtgccctggccttgggtctgccgagcctcctgcagcaggggacgggtgctttggccagagtcacagactgacacgtttcccactgtactggaactctggaaagaggggctccccgacctgcccatcccccaggctcttctgggccttccccttgggaactggcctcatcacactgggagttggtgcttcttgtctctgggtctccagagtttgccccgcctgtgcacacctcacattccagactctagccatctcggcaggatctcctggctccttgagtgcccaggtgccaccaagaggaagggccttgtgggatacaccttgcagaatagggatcggtgtgccccgctgcgaggggccccccatgggggctgtggcccctccgcaggcaggacatcccaacccctggctgggactgaaccacccagagcggagcggctcccttttcagccttgtgagtcacctggcaggccccagctgggctggctgtccgtgtccctcagcctggctggtgattccttgcaggccagaaatgaagagtccctgtagnnnnnnnnnnnnnnnnnnnnnnnnnnnnnnnnnnnnnnnnnnnctcattnnnnnnnnnnngtccctgtggagtgtacttatttattttttgattaaagggaagtaaaatgc

SEQ ID NO: 75660 - DNA, 1199 bp, Homo Sapiens
  misc_feature (1109)..(1151): n is a, c, g, or t
ggctaggtagcgaggctgggtggtgaattcggcacgaggggcaattggggatgtaaaagatcaaaccaggaaagaggatgaacttaacagcgtggatgacatccactttctggtgcttcagaacctgatccagagcacgctggccctctcagacagtcagatgaagtcctaccagtcattccagactttccgcctctatcgggagtacaaggaccacgttcttgtgaaggccttcatggagtgccagaagaggagcttggtcaaccggcgccgggtcaaccacacgctgggccccaagaagaaccgggccctccccttcgtgccaatgtcctaccagctatcccagacctactacaggatttttacgtggcgatttccaagcaccatctgcacggagtcattccagtttttggacagaatgcgggctgccggcaagttggaccagcctgatcgtttctctttcaaagaccaggataataacgagcccacaaacgacatggtggccttttcactggacggccctggaggaaattgtgtggccgtcctgaccctcttctctctgggcctcatttctgtggatgtcaggatcccaggagcagatcatcgtggtagacagctcaatggtggacgaatgaggtcatcaaaagcttggggaaggacggcagcctggaggatgacgaggatgaagaggatgacttggacgaaggtgtagggggcaagcgccggagcatggaggtgaaacctgcgcaagcctcccacaccaactacctgctgatgaggggctactactcccccggcatcgtcagcacccgcaacctcaaccccaacgacagcattgtggtcaactcctgccagatgaagttccagctccgctgcacccctgtgcccgcccggctcaggcccgctgccgctcctctggaagagctaacaatgggaacctcctgcctccctgatacgttcaccaagctgataaacccccaggaaaacacctgcagcttggaggagtttgtcctcccacctggaacctgtctgggggaataagtccccaaaaaaacctgaatgggtggccttgggagaaatcttgggaaacgcccttttaaaccccaccnnnnnnnnnnnnnnnnnnnnnnnnnnnnnnnnnnnnnnnnnnnactttgttcccccaaaagggggtttctcccgcgggcccctctttgtgg

SEQ ID NO: 75661 - DNA, 1433 bp, Homo Sapiens
  misc_feature (18)..(18): n is a, c, g, or t
  misc_feature (1230)..(1230): n is a, c, g, or t
gagatgctgctccagtgncacagtgactagcaaggggcagccccggggctaggagccagtgcctgcctcgtgggcctgggctgctcagggcactcaacccgccagtcaggggaggccactccactcgtcccccgtcaccagcgtggatggatcccgatgctccccacagaccccgcgtgtctcctgcctccccaggccctcctggagcagcatcaggtgctggaggtcggtggcaacactgcgcgcctggtagccatgggctctgcctggccttggctcctgcactccgtgcggctgaaagacagagaagacgccgacatccagagagaagacccccaggccagacccctggaggggtcttccagtgaggacagcccccccgaggggcaggcacctccttctcacagcccacggggcaccaagaggcgcgccagctgggccagtgagaatggggagaccgacgccgagggcacccagatgacccctgccaagaggccagcgctccaggactcaaattggcccccagccttgggcccggagctgaagatggggcagaagcccaggccccatctccacccccagctcttgaagacaccgctgcagcgggagcagcacaggaagaccaagagggtgtcggtgagttcagttccccaggccaagaagcagctgagcggccaggcgcagcctccagagggctctgaagaccccagagggttcacagagagtttcggagctgccaacatctcccaggcagcacgggaaagggactgtgagagtgtctgcttcatcggccggccgtggcgtgtcgtggatggccacctgaaccttcctgtatgcaagggtatgatggaggccatgctgtaccacatcatgaccaggcctggcatccccgagagctccctgctgcgccactaccagggggtcctgcagcccgtcgccgtgctggagttgctccagggcctggagtccctcggctgcatccggaagcgctggctgagaaagccaaggcctgtctcgctcttctctacacccgtggtggaagaggtggaagtgccctccagcctggacgagagccccatggctttctatgagcccaccttggactgtaccctccggctgggccgtgtgttcccccacgaggtcaactggaacaagtggatccacctctaggacccctgtgggcgtcccctccctcccagccaccgcctgccacaccactcctgcccgggntgctcgggagaaccccctgggcccctgggccttggggtctgccgaagcctcctgcaaccagggggaagggtgcttttgggccagaagtccacagactgaccccgtttcccaacttgtactgggaacttctgggaaaaagggggttccccgaacctggccatttcccccaaggctctttcctgggccctttcccccttggggaa

SEQ ID NO: 75662 - DNA, 704 bp, Homo Sapiens
gacaggagcctccatgacagccacaaggccagcaagacccccctcaagggctgccccgtccacctggtggacagctgcccctggccccactgcaacccctcatgccccaccgtccgagaccagttcacggggcaagagatgaacgtggcccagttcctcatgcacatgggcttcgacatgcagacggtggcccagccgcagggactggagcccagtgagctgctggggatgctgagcaacggaagctaggcagactgtctggaggaggagccggcactgaggggcccagacacccgctgccccagtgccacctcaccccccaccagcaggccctcccgtcttttcgggacagggccccagccgtcccccctgtctgggtctgcccactgccctcctgccccggctttccctgcccctctcccacagcccagccagagacaagggacctgctgtcatccccatctgtggcctgggggtccttccctgacaacgagggggtagccagaagagaagcactggattcctcagtccaccagctcagacagcacccaccggccccacccatcaagcccttttatattattttataaagtgacttttttattactttaattttttaaaaaaaggaaaataagaatatatgatgaatgatattgttttgtaactttttaaaaatgattttaaagagacaaaaaagaacctca

SEQ ID NO: 75663 - DNA, 546 bp, Homo Sapiens
cagtcgacggtaccggacatatgcccgggaattcggccattacggccggggacttcgctgtgaagatggcgtcgggcagcgggacaaaaaacttggactttcgccgaaagtgggacaaagatgaatatgagaaactcgccgagaagaggctcacggaagagagagaaaagaaagatggaaaaccagtgcagcctgtcaagcgagagcttttacggcatagggactacaaggtggacttggaatccaagcttgggaagacaattgtcattaccaagacaacccctcaatctgagactggggaggatattactgcaatgtctgtgactgtgtggtgaaggactccatcaactttctggatcacattaatggaaagaaacatcagagaaacctgggcatgtctactgcgtgtggaacgttccaccctggatcaggtgaagaaacgtactgaggtcaacaagaagcaagatggaagagaagcagaaggattatgatcccgaggaaaggatgaaggagctcagagaagaggaggaaaaggccaaagcgtac

SEQ ID NO: 75664 - DNA, 777 bp, Homo Sapiens
  misc_feature (691)..(704): n is a, c, g, or t
tcgctaggtagcgaggctgggggcgaatcggcacgaggaagatggcgtcgggcagcgggacaaaaaacttggactttcgccgaaagtgggacaaagatgaatatgagaaactcgccgagaagaggctcacggaagagagagaaaagaaagatggaaaaccagtgcagcctgtcaagcgagagcttttacggcatagggactacaaggtggacttggaatccaagcttgggaagacaattgtcattaccaagacaacccctcaatctgagatgggaggatattactgcaatgtctgtgactgtgtggtgaaggactccatcaactttctggatcacattaatggaaagaaacatcagagaaacctgggcatgtctatgcgtgtggaacgttccaccctggatcaggtgaagaaacgttttgaggtcaacaagaagaagatggaagagaagcagaaggattatgattttgaggaaaggatgaaggagctcagagaagaggaggaaaaggccaaagcgtacaagaaagagaaacagaaggagaagaaaaggagggctgaggaggacttgacatttgaggaggacgatgagatggcagctgtgatgggcttctctggctttggttccaccaagaagagttactgaggctttctgtgcttggcctgactttggcctatgctggacctaactttgcnnnnnnnnnnnnnnagtagggggtcatttctttttgggtaatgggaaagttcttaagagtgtcaatggggagggaataaagggtggg

SEQ ID NO: 75665 - DNA, 1541 bp, Homo Sapiens
  misc_feature (481)..(544): n is a, c, g, or t
  misc_feature (685)..(698): n is a, c, g, or t
  misc_feature (1429)..(1468): n is a, c, g, or t
aagtacgaggccgggtgtgtaatcggcacgaggagatggcgtcgggcagcgggacaaaaaacttggactttcgccgaaagtgggacaaagatgaatatgagaaactcgccgagaagaggctcacggaagagagagaaaagaaagatggaaaaccagtgcagcctgtcaagcgagagcttttacggcatagggactacaaggtggacttggaatccaagcttgggaagacaattgtcattaccaagacaacccctcaatctgagatgggaggatattactgcaatgtctgtgactgtgtggtgaaggactccatcaactttctggatcacattaatggaaagaaacatcagagaaacctgggcatgtctatgcgtgtggaacgttccaccctggatcaggtgaagaaacgttttgaggtcaacaagaagaagatggaagagaagcagaaggattatgattttgaggaaaggatgaaggagcnnnnnnnnnnnnnnnnnnnnnnnnnnnnnnnnnnnnnnnnnnnnnnnnnnnnnnnnnnnnnnnnggctgaggaggacttgacatttgaggaggacgatgagatggcagctgtgatgggcttctctggctttggttccaccaagaagagttactgaggctttctgtgcttggcctgactttggcctatgctggacctaactttgcnnnnnnnnnnnnnnagtagggggtcatttctttttgggtaatgggaaagttcttaagagtgtcaatggggagggatagagggtgggggctcatggtttccctctactttgggagagggcacagattgcagaggtaatgctgtggcatattgcttctgcctcagtgtatcactggagtcacaggaccctgcccacctgagttcccaataaagaaaaacctccccttctgaggctgctttcccaaaactccccctgcatctttatctcttcatctatcccacctcttgtctgaacatcccacctttatcctgtgttctgcctttgttttaattttaactcatgttcatcctgcaacagaagcattctctaggtcccagtttccagttgattgcatatccttgatcagccctttttcccatcctgccctatggttctctagccacctgtgcatgcatgtgtatttctgcctggttctatggtgtgtggatgtgtgtgcatgaatctgtcatatagagggggtccgagctggaatcctagagcattgctgccctggggcctgatgttcttggcttcctcagagcatgtaacaggaaattaaatgggatgagtgtttggtgtggtttgtgtctgatgagttttttaacattcaggtgtagattgtttcagcttctcatgtttcattttcctgaagatttatgtttttgtctaccttgtgagcaggcttttggaagaacctgtttgatgcnnnnnnnnnnnnnnnnnnnnnnnnnnnnnnnnnnnnnnnncttattatgggagccttcggtcttagaagctgtttgacatgtataataaatggcattgactgggcctgtttta

SEQ ID NO: 75666 - DNA, 1044 bp, Homo Sapiens
ggcctgggtggcgaattcggcacgaggcttctgggtccagactctgggtggagtgttaatagctctggtgatcctgttggctttgggtttcctgacccatcccgcataggtagagcctcttgttcctaggcatgacctagggaaaaacccagctgccttctctgccctgtgcccactcccttctctactcttccccagcaccatgccaaaaggtcttatctgaaaggtaagaaataaacaatgaaagcgatgaggggaccatttacataaaacacagagcttagacactcttcccctcctatgaaataattggttgttggcaccatctcaccaccgcatatccctcaccccctcggcaagcaccaatccttggtgctgccgtttttaaaatcttccaaatgcctttttttcctcagaggcagagaatgactaagtacggggagcagactcctgttgtgcagactcctgtccccttggtttctgtgtttgtctctctgccatcttaggttgccatgagccatggtgtcaacatgcttagccccctctgtaactgcctccctttagttcaatggacagacctcccaaggcaaaaactaccttctgacttgggttgaggctgggttcccctctattgttcccctatcataagagctaggccaagcctatgggaccttgagtcatgcaggatgggatctgtggtcaaaggacaggcgaggagctgtgggcgcagggcctgccgccactgcctacatcttctctcttccccatcttgcattggaggtcccagaaaacaattagcttctggcaaagggggtacccacttctttccctgttgactttgctgtttcccaggctcctttttgtgtttttataactgtcaccagttagccactgtttaaattgtatatattgttctgaggcgcctggcctgtcccttcagtgagccatgcccacccttgtgttgtagtgagaagctgttgtcacgactaaccttctgtctctgaaattgtttgtttcaaataaagagttaaaattgctcaaaaa

SEQ ID NO: 75667 - DNA, 699 bp, Homo Sapiens
  misc_feature (18)..(18): n is a, c, g, or t
catcatggaccctacagncgccatccccacatccacctgggaggagcagcacctggacgactaaggcacagcggctgtggagactggacctggcgctctgtgggtggctgtgccccaggatgcatccgtgtgttccctgccagcctgccatcccacagaggcaaggaatgaatctggccacccagagaaacagaaggtgcagcttagccctctcagccctccctcgagcaccagcgtggaatgcccgggtaccgtgggtgtcgcaaccatggagcagccaggggaaaagagccctggaccaggacccaggaggctggggttccagtgtggggagtccctgtgagatgatagggtagtcaccttcccaggttcctgggcaccttttggaactggatccagcaacagacaccccccatccatcacataacagtggtcttgtcttgaggagactctcggtcctttaaatgcaaagtagcaatggaggctcccaaccaagaggtcccacctgaaccccagccccctccccatggactagcagtggtgtggcagtgaggggggaaagcgggttgagggagtctcacctgaaaattcacaaaacgcacaggatatgggctgcttccaagcagtatttttttaaactaaaatatagagggatatatttttcctgttataaataaaatgtacattttagaaacttgg

SEQ ID NO: 75668 - DNA, 1508 bp, Homo Sapiens
  misc_feature (64)..(76): n is a, c, g, or t
  misc_feature (88)..(166): n is a, c, g, or t
  misc_feature (619)..(653): n is a, c, g, or t
  misc_feature (717)..(725): n is a, c, g, or t
tgggctcaaggaccacctcccaagtagctgagaccacaggtttgccccatcacacctggccgannnnnnnnnnnnngtagagatgggnnnnnnnnnnnnnnnnnnnnnnnnnnnnnnnnnnnnnnnnnnnnnnnnnnnnnnnnnnnnnnnnnnnnnnnnnnnnnnntaaaccactgcacgcagcctaccctctgcctttttaagatgatgtatttatttaatttttgccatcattggtgcttcaccttcctgcgaaggaaattccagagcctgtatttaagctacctaggcttttacactccctttattgcctttccaaatagtatctcatttggtgtactctagtgtcctatacctcttggaaacgaaagaaggcccaacctacaactaagaagggacaaaccttgaactaagtaagaccttacacacccagaaagaacactgggccctccttcttcagggacaatgcagtagccacttggcttgtggaatttactgaaggctatttcctgtaacttgctagttaacttagttttgtatttcaggcagaggtgcgctctgtaatgttgggcctttgacttcacagtactggagagctgttcacacagatgtttagacnnnnnnnnnnnnnnnnnnnnnnnnnnnnnnnnnnnaacaactctttcacagaggcagtcattttgaaaggttgaaatatttggcctttaccaaagagcnnnnnnnnnccttaagcaaaatcctttcagaaagaaacaaatggggaagggcagattaagaatgcatatgtcccaatccacttctataggagtttaatcatattcacatgagtaaaatgatggaagaactctttaaggtaatcctttgggataaaggatcctgggaagttctctcaggtaaagaaagcttacagcagatttgtaatatatgtctggagagctatttataagaaatttaagaggattgttttgttttcctttattaaagatttaagcctttttactttgcaaaaagaaaactacaaaagttttatagatataactttgctaattttttaaacttttctgaaacgattagctgtagccaaattatgtggttacgttttgctacattagaatttgaaaatgcaatatgtgtggtaaatctactgtttgaaatttataatggtctctgatatgattcgaattttggtaacttttgaaagttattttccccctttagtcatggatttctatttgttttttaatgttaatttttctagaaagcatctgaattgactaggcttttcctatataaaaaactcaaaacttgttaactctgtactttaataaaatttaaaattaaaactgtgttgtttttttctcttctgctagatacatatataattaaagtactcaagttagttgttttgcagagatgttgccttcagatgttaatcaggtctctcaagtttcatggagtctatgctgatcctttaattgacaaataaaagatatatatctgtggtgtgc

SEQ ID NO: 75669 - DNA, 1630 bp, Homo Sapiens
ctatggtgagggagatgcgacacactgccctggatctcaggccagatgagcgtcgctttgctgtcttctccattgctgtctcctcagatggacgagaagtactaggaggggccaatgatggctgcctgtatgtctttgaccgagaacagaaccggcgcacccttcagattgagtcccatgaggatgatgtgaatgcagtggcctttgctgatataagctcccaaatcctgttctctgggggagatgatgccatctgcaaagtgtgggatcgacgcaccatgcgggaggatgaccccaagcctgtgggtgcactggctggacaccaggatggcatcaccttcattgacagcaagggtgatgcccggtatctgatctccaactctaaagaccagaccatcaaactctgggatatccgacgcttttccagccgggaaggcatggaagcttcacgccaggctgccacacagcaaaactgggactatcggtggcagcaagtgcccaaaaaagcctggcggaagctgaagctcccaggggacagctccttgatgacctaccggggccacggagtgctgcacaccctcatccgctgccggttctcccccattcatagcactggccagcagttcatctacagtggctgctccactggcaaagtggttgtgtacgaccttctaagtggccacattgtgaagaagctgaccaaccacaaggcctgtgtgcgtgacgtcagttggcacccctttgaagagaagattgtcagcagttcgtgggacgggaacctgcgtctgtggcagtaccgccaggctgagtacttccaggatgacatgccagaatctgaggaatgtgccagcgcccctgccccagtgccccaatcctctacacccttttcctcaccccagtagatccaacctccagccccatataggggtgaacctcttgataagctctctgcctcctcctccctttctcccttgtggggaatgtttggaggaatcactggcatttgatggggaataacataagcctgggctctgagcctcagctgagccctggaagattctccccatggggcagagtggtctccttacgtgctcacacccagtcagcttgggtccctatctctggccagagtttggcaggactgccattatctggggtgtggcctctgccagcaagagaagtgtcctgggtgtttttaatcatgtttgaatgttaggggttggatcctagagtagatgcctgaggccacatctgaacagacctgtcagccaggcctgccaggtcttcacgttgaggattcaactggccaatcacaggacaggtgtcctggcctttcttcctgaggtctctaggggaggggcatgggtaagggtgtttcctcagcaccctcctggggtggggattatgtctgctgtcatgtctgggtctttagggtaggacaggctgtggtatgagaggcaggagtctccacaaggcttcatgtggccccttatagggcaggccctgccctctgggaaggtcccttcatgctggaggcacacagctttaaggaagtaggttgaagtaggactccttcgtcctctcactggctttggctccctcaataaactgtgtgggaacctgaaaaaaa

SEQ ID NO: 75670 - DNA, 870 bp, Homo Sapiens
tgcacctggacacggagaagaaggtgttcctcttggctggcaggaaacgaaaacggagcaagacagccaattacctcatctccatcgaccctaccaatctgtcccgaggaggggagaatttcatcgggaagctgaggtccaacctcctggggaaccgcttcacggtctttgacaacgggcagaacccacagcgtgggtacagcactaatgtggcaagccttcggcaggagctggcagctgtgatctatgaaaccaacgtgctgggcttccgtggcccccggcgcatgaccgtcatcattcctggcatgagtgcggagaacgagagggtccccatccggccccgaaatgtgagccccgcacctccctggaccctggctccctatgtgagaaacaggagtcggggctcagcttaggaaatagccaactccctgagcacatccatcaccctccaacacaaattcattctggccaactaaggaatggacttggggcttttggaaattgaattccctggaaaccccacgcacgaccaccccgatataacaaaatatacacctggccgggccgcccccggaccctccaaaaaagttttttctaaaacccttcccttttggccgccgcggggccccccccagggtaaatcggaacaccttgggccctcagcttgcctttccctagggaaaaaccatgggcccccggaccaaaagggtcttgggatttcttcccccaattataacaaaccgcccccgggggggcgcaaacccgcagggctctctttgtaacccaccctcccccagcaggggagaactcctccagaaagagccctccctttaattggcgcacccctatatccaatcaacggcggcggcc

SEQ ID NO: 75671 - DNA, 867 bp, Homo Sapiens
  misc_feature (42)..(55): n is a, c, g, or t
aaaaaagagtatatcactttattttcaaacttttatttcatnnnnnnnnnnnnnnctatgtaatgtaaaatatgagatataaaatacttctgtcaatgagacaaaaaaaagttaacaagcttttgttagcccaaatccagtatagcctagcaccatacgtgaggataaaaaactcataatatattttttacccattaattcagagactattacttaggcagccatacattctgtaagctctacaaaaaagtcaaaggaagctataaggttgttgctaaagcttatgtagaaatttttagtccaggacgtgctcctagtatcttaaacaggattctaactgcaatgctgtgccattagccatctgttgaagaaagaaatcacaggaaagctttgttcctctaagtcattcctccgtgaaatgacagaggacattacaaaggccattagatttgttcctaacttctgactccagcagcaactaccaaagaaacatcagaaatgttgatgtacagatcaactcagttcttgcaggtgtaggcagaactgagtctttaattgaatcaaaagtctttaattgaatttactggtgatgaaacattaaattctcaaccaaacttagatcttcagaactgtatgagattctcattttttacttacctaaatctgttattaccaaattgcaaaagttgaaactcctataaaagagtataggcatttttaattaggaatctaacaaaagtaaaacttttcataataatcttcagtcaaaacactagttaaaaatggtaacatttcagccatgctcttgtagatcacacagacaaaaaaaggtaacacattacatgaacaatatttctctccttcctg

SEQ ID NO: 75672 - DNA, 862 bp, Homo Sapiens
tcaggatgcttggatattaattcatctgtgaaaggggctcgttttgtcagattctgtgatgcattcaatattccactcatcacttttgttgatgtccctggctttctacctggcacagcacaggaatacgggggcatcatccggcatggtgccaagcttctctacgcatttgctgaggcaactgtacccaaagtcacagtcatcaccaggaaggcctatggaggtgcctatgatgtcatgagctctaagcacctttgtggtgataccaactatgcctggcccaccgcagagattgcagtcatgggagcaaagggcgctgtggagatcatcttcaaagggcatgagaatgtggaagctgctcaggcagagtacatcgagaagtttgccaaccctttccctgcagcagtgcgagggtttgtggatgacatcatccaaccttcttccacacgtgcccgaatctgctgtgacctggatgtcttggccagcaagaaggtacaacgtccttggagaaaacatgcaaatattccattgtaaacaaatcaaaggaaaagaaaccaagaactgaattactgtctgcccattcacatcccattcctgccttttgcaatcatgaaacctgggaatccaaatagttggataacttagaataactaagtttattaaattctagaaagaatctccaaagagaatagccggcccgaaaaggagggaactttggcgggccccctcggcccctgaaaaagctttccaaacccatttgtttggggccggggggccccactagggaaagggaacatgggccatagccggtttcccaaggaaaatcccgggccatggactaggggcttggaatctcccccac

SEQ ID NO: 75673 - DNA, 1171 bp, Homo Sapiens
  misc_feature (66)..(66): n is a, c, g, or t
  misc_feature (133)..(133): n is a, c, g, or t
  misc_feature (482)..(530): n is a, c, g, or t
agtggggtccccatctttgctgttctcccagcaccctctggtgacctccttcaggtgtgggagggnccccagataaatagggcttgaagtgaatcccccagcaaacccacagcagcccctacagaagagggtnccctgactgtcgaaagaaaaacagaaagcaacaacaacatcaaccaaaaagtcccccacgaaaacctcatctaaaggtcagcagcctcaaagatcaaaatgagacaaactcatgaagatgagaaaggaatgaaaaacccctaacaactcaaaaggccagagtgacttgtttactccaaatgatcacaacacctctacagcaagggcacagtcctgggtggaggttgagatggatgaattgacagaagtaggcttcagaaggtgggtagtagcaaacttcactgagctgaaggagtacgctctaacccaacatattggaacgaatcccagaacttaaagattggttctcnnnnnnnnnnnnnnnnnnnnnnnnnnnnnnnnnnnnnnnnnnnnnnnnncctccaataagtatggggttatatatagaggccaattctacaaatcactggcatccctgaaagggaggtggagaaatcaatgcattgggttagaacatgctcatttagctctgtgaaatttgttattacccaccttctgaaccctacttctgtcagcaaagaagctaagaaccatgttaaaagattacagaagatgctaactagaataaccagtttagagaggaacataaatgaccagagccagctgtaaagcacataaggggaactttgtgatgcaaacacaagtatcaacagctgaattgatcaagcagaaaaaagaatatcagagcttgaagactgtcttgccaaaataaggcaggcagagaagattagagaaaaaagaatgaaaaggaatgaacaaaacctcaaagaactgtggaactatgtaaaagaccaaacctatgactgattggactacctgaaagagacaaggagaatggagccacgttgggaaaacacacttcaagatatcatccagaagaacttccccaacctagcaagacaggccaacattcaaattcaggaaatccagagaaccccagtaagatactccacaagaagatcaaccctcaagacacatagtcatcagattctccaagatc

SEQ ID NO: 75674 - DNA, 706 bp, Homo Sapiens
gtgggggccccgtcgaggcccctctttgcttctgagagtctgttttcatcgacagtcttctactaaatgtacatagcagcttttcagggcaagggtcaccgggattcatctttatgcctccccagcccgagagccaccacctccaccagacccatccacacagttgaatctcatctcaagttctctggtgcccgaccccccacgcacaccgtgctggtctgggcatctcacctgcatccgcacaagtgcctcaggagggtggagtgtctggtgctcggcgttggaggctcagcccacactgtgccgggcagtcgcaggcctcccagatgaatgaagcatgagtgaatcccgatcctgttatcacagcttctccctacgcatcccaggcagaatgttgtgcaaaaaccacaccaggattcgtacatgccagaggactgaacttctgcgtgttgcagataattcatcttcctgaatcactgcggatctaccatggtggttaaccacagaataaacataggggagagcgtaagtgctgtcctaacagaaacttatgcttcttccgttaccctttaaaagtaaagggtactgatttcataattgtgtttctcttgtaaatgagactctcatggaaaaatcagccatgtaggcgatagatttgtatacctttagattaaaatgtcacttcgattatttcaagtgtaaaaaa

SEQ ID NO: 75675 - DNA, 1030 bp, Homo Sapiens
  misc_feature (89)..(89): n is a, c, g, or t
  misc_feature (148)..(149): n is a, c, g, or t
  misc_feature (170)..(170): n is a, c, g, or t
  misc_feature (188)..(188): n is a, c, g, or t
  misc_feature (194)..(195): n is a, c, g, or t
  misc_feature (210)..(210): n is a, c, g, or t
  misc_feature (220)..(220): n is a, c, g, or t
  misc_feature (255)..(255): n is a, c, g, or t
  misc_feature (333)..(333): n is a, c, g, or t
  misc_feature (339)..(339): n is a, c, g, or t
tgaagcgcatgagcgcacgcattatgtgatagtcactcatagcacccgcttacattttgctccgctgtatgtgtttgatgtgagcgganccatttcacacaggaacagctagacatgatacggatttatacgactcactataggattnngccctcgagccagaattcgcnacgagctcaagctgattngatctnntagttgagagtctcntaaagccatntagcccacctccatcaatccctatgtgaggagcanaaccccaggaagccaaaggctcctgtccaccctgacaccacaggccgggggagagtaggacttttaacccccctctcnccttgntagtgacacatgctctgccctctgaggcagtcagcgaaggcaaatggtctgacttctttatgtggtcaacattgtgatagaatttctttataatttgatagagattatattatttttattttattttgagtgggaagaattttaaaacctttttatgtcaattaccatcttgtttctttcacctttgaaacaatggtttgtagcagagatgacattgtagcaacccagaattatgcttttggaatgtggtcctcactgtacaggagaatgtgtaatcttttgttaaaattcccagtgtgcatacattttctggttcctcggtccagttgctaaagttcttagtattttagcctaacatatttatcaccaacttttctttaaaagtgttccttttgtcacttagttactgattttcctgggtttgacataagtattctatgagatgatatatatgctttttttgaaagctgattctcatgaattcaagtagctgagttcctttatgtttcgtttattcactaaagtagctgacacaaaacacaccaaaacctagagcggtagttttatgtaaatgctcatgagtttgtatcaataatataattgttgatccacttataattcgtgcaatactgtatgtatgtagagattgagttgtcaattaaaaaaaatgtggcctctttgtgatcataaa

SEQ ID NO: 75676 - DNA, 1213 bp, Homo Sapiens
  misc_feature (46)..(57): n is a, c, g, or t
  misc_feature (172)..(181): n is a, c, g, or t
  misc_feature (440)..(448): n is a, c, g, or t
gggattgtgttaagccctcttgcgccctttgttttaagggccgagnnnnnnnnnnnnttttttccccccttccgagtttaaaaaaggggggggttcccgcggccggtttttttccccctaaagaaaataaagggggtcgggtcccggcccgggggcgaattggtattttccnnnnnnnnnnagattttttccctgccttttctcccccccaaaaaaatttttccaagggggttttgaaaactctttaaaaggaagaaaatccagggggggaaaccccttgaaacttcccaggggagggctgccatagtgtgagaagtttttctcccaaaaatgaagcagagtggtctggtatgttgctagcatgtgagacaagagattgcatctgctcgctccaagaagatccactttttgacaaacatccatcttcaatttgtcaaagnnnnnnnnngcaaggcgcacttgtgtttgtaccttcctgaacttctccatttgcttgtagaggtctggatcaagctcctgagacacgtccttcatccataatagtgctcctctatattccgtcctgcactgttccatgcggttcaccgtcagccaagtatctgagatggcccgatgccgaaaagtctccacttcttggtgaaatcgacacaaaggatttcgtaaggccaacctttgctgggaagaaaagcagagggcctttcctgtcgcttgcatcatctttcctgctctggttttatcttggaaaccttgggatcgaagaaattttcccagttcgttttcttcttgagacaagaaacatatcctcttttgatagagtacaattgctttcgataagtccagacaggttctctgaattgaatgaaacagctctagcttggcatccaggtccgcgtcagaggcaacaacatgttcatcttccttcttccctgtggctttaataaaggcctgcttcgtctcccaatatttctgttgcatcttatttacaactgacttatcttgagcatatcgatcctgtaagtcccagggataactgcatttgtgtcctgacatgttttcttcttcttctcggagccccggcccccaggagcctcccgccgcggtcggagcgtccctccggatcactcatccgacgtcagcgtcagccgaagcccccaggagaaacccggccgcggtcggagcgtccctcaggaaccggcccttcctgcggcggccg

SEQ ID NO: 75677 - DNA, 658 bp, Homo Sapiens
gggtgtctcacctgagctgactggttcttccttcacaaccttctgagccttctttgggattctggaaggaactcggcgtgagaaacatgtgacttcccctttcccttcccactcgctgcttcccacagggtgacaggctgggctggagaaacagaaatcctcaccctgcgtcttcccaagttagcaggtgtctctggtgttcagtgaggaggacatgtgagtcctggcagaagccatggcccatgtctgcacatccagggaggaggacagaaggcccagctcacatgtgagtcctggcagaagccatggcccatgtctgcacatccagggaggaggacagaaggcccagctcacatgtgagtcctggcagaagccatggcccatgtctgcacatccagggaggaggacagaaggcccagctcacatgtgagtcctggcagaagccatggcccatgtctgcacatccagggaggaggacagaaggcccagctcagtggcccccgccccccaccccccacgcccgaacagcaggggcagagcagccctccttcgaagtgtgtccaagtccgcatttgagccttgttctggggcccagcccaacacctggcttgggctcactgtcctgagttgcagtaaagctataaccttgaatcacaaa

SEQ ID NO: 75678 - DNA, 1127 bp, Homo Sapiens
  misc_feature (868)..(992): n is a, c, g, or t
  misc_feature (1004)..(1017): n is a, c, g, or t
  misc_feature (1024)..(1043): n is a, c, g, or t
gcatagtggacactatagaccagtgtgttaaaaaagcaggctggtacggtccggtatcccgggatatcgtcgacccacgcgtcgggcaccaaatgtaatatctgacactgttaagatgcccaaaagagcaaagttgtagtggagatgcagggtcatttccccatgccatccacagtgttgttagtgagtccacggctgacttgcagtgataaagaaaagcatggagctgtgtctgcagacaatggtggctgcatctgtaagtgcttcagaggcagcagccctggggaaattgatgggtgtggcagtggacctgtgaagagggagaatctagccttcagcctgtccagtgttaaccactagagaaactgagctttatatccttttttaatgcctgtgaattttagcatattgaaacattagagcaaatactcaggggatttttcattaaacatccctcagataatttagctatatatcattagaaagggaaagctatcatttttattttaaaactaaacaaggccatcttataaactgtcaccaaagtcttcccttttttattgcatgtgtgccttgaatttcataaaacattaattcacaatgggggtcagaatgtactcttgttgaaacacttcttgtaccattttatgttcatattatgtttgagagggtaaaaatgtatgagcagcttaactgaagtagaactattcatgatgcttttcacacattgtggcataagatgtaaagtttgtaattaatgttaatttctgtgcattttaatattcttttataattattaatgttaatttctgtgcattttaatattcttttataattatgagcattttaataaattcatttttacaannnnnnnnnnnnnnnnnnnnnnnnnnnnnnnnnnnnnnnnnnnnnnnnnnnnnnnnnnnnnnnnnnnnnnnnnnnnnnnnnnnnnnnnnnnnnnnnnnnnnnnnnnnnnnnnnnnnnnnnnnnnnaattttgggggnnnnnnnnnnnnnnaaaaaannnnnnnnnnnnnnnnnnnnggggccgggcccccaaaggaaaggaaacagggcctatgtttttcccaaggaaacccgggacaaaaaaaggggtgggatcccccc

SEQ ID NO: 75679 - DNA, 2111 bp, Homo Sapiens
tggctaggtacgaggctgggtgttgaattcggcacgaggctggggacgggggccgagtagcgccttccccgggccccgtgaaccggctgcgggtcgcccttggtggtgcagcggccgcagccccccacctgggccctcggtcctgccctcccggcgctgtccatgaactcagtgtcgcctggcctgcctgcgcagtacctggagcagcagccctggagtgactgctgctgcctgcctgtgccctgatggccctgcatggcctgctgggtgtcccatgatggcgccatgacgccctaatcgtgcgctgtggtgtccttcctgtgatgccatgcggccccgctcttggctctcccggggctggccctgagtgagccggacgaagtggacaagttcaatggccaaggttcctgacatgcctggaacaactgtcaatgtacggttggggtggttaaaatgccggaccagctttagcaatgatctccatgcatccacctctgtggccgccgctaccgtttcgagggcgagggtgacatacagcgtttccagcgggactttgtgtcccgcctgtggctcacataccgccgggacttcccgccccttcctgggggctgcctgacctcggactgtggctgggggtgcatgttacgcagcggccagatgatgctggcacagggccttctgctgcatttcctgcccagagactggacatgggccgagggcatgggcctgggcccccctgagctgtcagggtcagcctctcccagccggtaccatgggcctgcccgctggatgcccccacgctgggcccagggtgcccctgagctggagcaggaacgccggcaccggcagattgtgtcctggttcgccgaccacccccgggccccctttggcctacaccggctggtggagcttgggcagagctcaggcaagaaggcaggtgactggtatgggccatcgctagtggcacacatcctcaggaaagccgtggagagctgctccgacgtcacccgcctggtggtgtacgtttctcaggactgcacagtgtacaaggcggatgtggcacgcctggtggccaggccagaccccacagccgagtggaagtctgtggtcatcctggtgcccgtgcgactgggtggcgagactctcaaccccgtgtatgtgccctgcgttgaaggaactcctgcgttgcgagctgtgcctgggcatcatgggtgggaaaccgcgacactcactgtacttcattggctaccaagatgacttcctgctgtacctggaccctcactactgccagcccactgtggatgtcagccaggccgacttccccctggagtccttccactgcacctcgccccgcaagatggcctttgccaagatggacccaagctgtaccgtgggcttctatgctggagacaggaaggagtttgagacactctgctcagagctgaccagggtcctcagctcctcctcagccacagagcggtaccccatgttcaccctggccgagggccatgctcaggaccacagcctggacgacctctgctcccagctcgcccagcccacactccggctccctcgcacagggcggctcctcagggccaaacgccccagctctgaggactttgtgtttttataaagggaggggatgaggggaaagatacaacactatttatttttttatttatgtcatgtcgggtgtgggatcttgagctctggcagtgatgatggtacttcctgttgtcagcccctcaagcccagctgcaaccagtctggggccattcagccagggacagagcccacagagcccatacacctgtctcccaccagcggggccctcctggcagggtagggaaggaggaccccgggcacccccctcagggcctgactcacgtactgtagtttgcactggacgcccgggccctccctgtcccaaagcccccttgggggaactgtggctgctgggggccaataaagctgtgtaacttgatcgtgggtgtggctgggcgcagcgttctgaggggatgtggggtctgggaggtgtctcgaggtgagagctccaagtcacgggaagtttaagtcagcctcagtttccacatccataaaatgggacgact

SEQ ID NO: 75680 - DNA, 830 bp, Homo Sapiens
cggctagtacgaggctggtgttgaatcggcacgaggggccagaccccaacggcctggggccttccggagccagcggccccgctcttggctctcccggggctggcccgagtgagccggacgaagtggacaagttcaaggccaagttcctgacagcctggaacaacgtcaagtacggttgggtggttaaaagccggaccagctttagcaagatctccagcatccacctctgtggccgccgctaccgtttcgagggcgagggtgacatacagcgtttccagcgggactttgtgtcccgcctgtggctcacataccgccgggacttcccgccccttcctgggggctgcctgacctcggactgtggctgggggtgcatgttacgcagcggccagatgatgctggcacagggccttctgctgcatttcctgcccagagactggacatgggccgagggcatgggcctgggcccccctgagctgtcagggtcagcctctcccagccggtaccatgggcctgcccgctggatgcccccacgctgggcccaggtgcccctgagctggagcaggaacgccggcaccggcagattgtgtcctggttcgccgaccacccccgggccccctttggcctacaccggctggtggagcttgggcagagctcaggcaagaaggcaggtgactggaaagccgtggagagctgctccgacgtcacccgcctggtggtgtacgtttctcaggactgcacagtgtacaaggcggatgtggcacgcctggtggccaggcagacccacaggcgagtggaagtctgtggtcatccctggtgcccgtgcgactggg

SEQ ID NO: 75681 - DNA, 1154 bp, Homo Sapiens
aagctagtagaggcctggtgtaaaatcggcacgaggcgacctgcgcgcagcccgcactatggcaaccccgccgcagctaagggctctgctcgtagtcgtcaacgcactgctgcgcaagcgccgctaccacgctgcgttggccgtgcttaagggcttccggaacggggctgtctatggagccaaaatccgggcccctcacgcgctggtcatgacctttctcttccggaatggcagcctccaggagaagctgtgggccatactgcaggccacatatatccactcctggaacctggcacggtttgtgttcacctacaagggtctccgtgccctgcagtcctacatacaaggcaagacctacccagcacacgcattcctggcggccttcctcgggggtatcctggtgtttggagaaaacaataacatcaacagccagatcaacatgtacctgttgtcacgcgtcctgtttgccctgagccgcctggctgtagagaagggctacatccctgaacccaggtgggacccgttcccgctgctcactgcggtggtgtgggggctggtgctgtggctctttgagtatcaccgatccaccctgcagccctcgctgcagtcctccatgacctacctctatgaggacagcaatgtatggcacgacatctcagacttcctcatctataacaagagccgtccctccaattaatgcagccctgaggtgtctggctgtggctcaagatttggccccatgcagaccctcccaaaggatactgccttctcaagatcataggcctcagactccaactggtgttatcccagggttccgtttgctgaagtaaaaacactgattttaaaatcccagtgggtacctttgtatggtggcacaagtggccgaatcaggctgaggaatctacggcttggttccagctgtgcagctgacttctgtgagactggggccagccacactactctctaggcctcaggggtcaaggagctcagaggagggccctgaggtctctttccggtgggtatgttcattcttcaactgttcttatgtcacagagggctccttgctggtgggcagtgggttgtaaatactttttaaaaaacactaagttccttatctcagatgctgttctactggagaagttctagattcccac

SEQ ID NO: 75682 - DNA, 611 bp, Homo Sapiens
ggctttccactatggcttccagcactgtcccggtgagcgctgctggctcggctaatgaaactcccgaaataccggacaacgtgggagattggcttcggggcgtctaccgctttgccactgataggaatgacttccggaggaacttgatactaaatttgggactctttgctgcgggagtttggctggccaggaacttgagtgacattgacctcatggcacctcagccaggggtgtagccaagtagttctaatgccacctgtcgtcttatcatctgattgcagacaaatggaatcctgtgctgaacccgaatcttccaaaaaacagcctacaatctgtgaccaccacaagatgtgccctgatggcagctgaagtttgattcagatgggcacttttcttccccttccctgcctagtttccttttgttccttgagtccacgcagaattccattctctggtcagcagacaggcttaagctaaagtattgcctctattctgtaaagttctgtacatagttcccaagcttctgcagggggtgatttttgctcttgtcctgagaaataacagtgctgttttaaaaaacatttgaaataaataccgcacacaaaggcaaa

SEQ ID NO: 75683 - DNA, 944 bp, Homo Sapiens
  misc_feature (528)..(528): n is a, c, g, or t
  misc_feature (665)..(723): n is a, c, g, or t
  misc_feature (764)..(776): n is a, c, g, or t
  misc_feature (827)..(827): n is a, c, g, or t
  misc_feature (861)..(862): n is a, c, g, or t
  misc_feature (919)..(919): n is a, c, g, or t
  misc_feature (921)..(921): n is a, c, g, or t
cagtcgacggtaccggacatatgcccgggaattcggccattacggccggggcactatggcttccagcactgtcccggtgagcgctgctggctcggctaatgaaactcccgaaataccggacaacgtgggagattggcttcggggcgtctaccgctttgccactgataggaatgacttccggaggaacttgatactaaatttgggactctttgctgcgggagtttggctggccaggaacttgagtgacattgacctcatggcacctcagccaggggtgtagccaagtagacaaatggaatcctgtgctgaacccgaatcttccaaaaaacagcctacaatctgtgaccaccacaagatgtgccctgatggcagctgaagtttgattcagatgggcacttttcttccccttccctgcctagtttccttttgttccttgagtccacgcagaattccattctctggtcagcagacacgcttaagctaaagtattgcctctattctgcaaagttctgtacatagttcccaagnttctgcagggggtgatttttgctcttgtcctgacaaataacagtgctggtttaaacaactttcgaatagttaccgcaccccaacggcagaaaaccacccaacgggcccacaaaccctcaaaccctatcaaacacacnnnnnnnnnnnnnnnnnnnnnnnnnnnnnnnnnnnnnnnnnnnnnnnnnnnnnnnnnnngaaccaagaacacaagaaaccaaggaaaaacagatacactnnnnnnnnnnnnngcgcccacaccaaccttctccggtattttcctctgcgcccccggcccccangaacaaaaccaccaaacaaccccaaacctccccnntcaaaacacacccccgcccacctccccgtggctagaataaccggggccaaaacagancnccgcggggggcacacaccaattc

SEQ ID NO: 75684 - DNA, 1808 bp, Homo Sapiens
tctacctctggcacgcacggcacccactagctgaggtgtagtccagctccgcggctctgagaccagcgtttccgacccggcccggaacaggtgagactggactcgaccgaactgaaggaagggaccaaacctcggtgaactctgcaaccctctcccgaacactccttctcgctgctgccggcggttccagcctgcaaactcagagggggctgcctggatccagtccccagcaggagaaccgacctggggacaaagcggaggcacccaaagggcaggagcaatgccgcctggagactattcgtgatcccaaggacacccctttctccacctgctcctcctcctctgactcggaacctgaaggatttttcttaggcgagcgccttccccagtcctggaagacccccggaagcctccaagcagaggacagcaacgcctctaagacgcactgcaccatgtgctagtggcgcagctcagagaggggatgtgagtgggaggaaaggggtctgtaaagcgggagaacaaggctagcctccccctaacaatcctagactgagacgcagtcaggcgcacgcccgcaagaggcggcgaggtgacaagtttggagtgcgcccccttcagtactgcgcgttctaagacttttggcggagactttcttggcaaaaaccattccccaaagctaagcttcccctgctgagatagcccctacccccacctccacaggctgggacagccccgtaccccaccatcctcctcccaagccaattaaatgatcacagcacgcgtgacagtataccggctggagagccggaggtgggaccgggagcaggggaccgtagaaccggggccgcgctccatacccctcctaagagttcgtggaggcgcagcagagggccgtccctcttccggatgtcggactaagcgaacagcgcccccactgccggccggtagcagccggaagtgccagaccggaggtgcgtcattcaccggcgacgccgatacggttcctccaccgaggcccatgcgaagctttccactatggcttccagcactgtcccggtgagcgctgctggctcggctaatgaaactcccgaaataccggacaacgtgggagattggcttcggggcgtctaccgctttgccactgataggaatgacttccggaggaacttgatactaaatttgggactctttgctgcgggagtttggctggccaggaacttgagtgacattgacctcatggcacctcagccaggggtgtagccaagtagacaaatggaatcctgtgctgaacccgaatcttccaaaaaacagcctacaatctgtgaccaccacaagatgtgccctgatggcagctgaagtttgattcagatgggcacttttcttccccttccctgcctagtttccttttgttccttgagtccacgcagaattccattctctggtcagcagacaggcttaagctaaagtattgcctctattctgtaaagttctgtacatagttcccaagcttctgcagggggtgatttttgctcttgtcctgagaaataacagtgctgttttaaaaaacatttgaaataaataccgcacacaaaggcggaacaagagaaaagcgacaataaagaaaaactctgtcgggccgccttcggcccccaaaaaaactttctagaaccctttcgtttgggcgccgcgggccccattagggcaggggaaacagggcccatacccggctctccgagggaaatcccggcgcccaggaactgagcggctggggtactcccgaacagacacgaaaacccccccgcgcccct

SEQ ID NO: 75685 - DNA, 648 bp, Homo Sapiens
tggctgtaaatcctgctactgggaacgttatgtggaaacattcctgtggaaaaccactcttctcttccccacaatgttgctcacagtatatttgtattggctgtgtagatgggaatttactctgctttactcactttggagaacaggtttggcagttctctaccagtggaccaatcttttcatccccgtgtacctcaccatcagagcaaaaaatattttttggttcccatgattgctttatctactgttgtaacatgaaaggtcacctgcagtggaaatttgaaactacttcaagggtctatgcaacaccgtttgctttccataactacaatggcagcaatgaaatgttgctggcagcagcatctactgatgggaaagtgtggatcttggaatctcagagtggacaattgcaaagtgtttatgaacttcctggagaagtcttctcttctcctgtggtcctggaatcaatgctcattattgggtgtagagataattatgtttattgtctggatttattgggtggcaatcaaaaataatcaaatacagtccttatttgtataacaaatgtgagatatttgaaaatattttaccattatacatcatgtggacttattttatattaaagaagattatattttggctaagaaa

SEQ ID NO: 75686 - DNA, 613 bp, Homo Sapiens
aaagaagccggatgctttttcaccttaggtgaaagtcagtaattggagttaccctttctgaggccctgctttgcagtataactgaggatcaggttgctgttctgtttctgcttcaaaattcaagtcctagaggacagtctgaacaaaagcatcattaaaccagggaaggaccaacctctaagccaaaaactaggcaattatatgaatcctcagaaaaagaaatgagcccagagacctgtgtccccaaacatccgtaaatctcatagtaaggcaggacaggataaccagaaaaaaacaatgtccaactggtggtctggtttctggtctcaatggtaccaaagggatagtcaccacctcaatcaaactgagatccaaaacagcagctgctttcctacaaggaaagacatcaagaactactgagtctgaagggtgacataatcaaccacaagaaaatgttacggtttagcctggcacagtggtgcatgcctgcagtcccaactactggagaggctgaggtgggaggactgcttgggcccaggagttcaaggtcagcctcggcaatataatgagactctgtctctaaaatcaaaaattagagaaatataaaaattat

SEQ ID NO: 75687 - DNA, 487 bp, Homo Sapiens
  misc_feature (138)..(187): n is a, c, g, or t
acaagaaaatgttacggtttagcctggcacagtggtgcatgcctgcagtcccaactactggagaggctgaggtgggaggactgcttgggcccaggagttcaaggtcagcctcggcaatataatgagactctgtctctnnnnnnnnnnnnnnnnnnnnnnnnnnnnnnnnnnnnnnnnnnnnnnnnnngtcatgatagctcaggtttcagagaggatgctgcactactctgggaaaaaagtgaagtgacagctcagccctgacagcaggacctagaagggctgagatgaagaggctgacctgtagagctcagcctggacccacaggaggggtagttgagttcacagagggatactgccatttaagctggttgtgaatggggtggtatgaagaccgactgcactagtattctctccaggttacaaataccatgaccaaactgtgtaatgtgatactaatatgcagaataaagcatattaaaaaacaaaa

SEQ ID NO: 75688 - DNA, 631 bp, Homo Sapiens
gattctgaatttgagtcagtaatagctggtttattccaggattcaaatgtaagtaacttactctcaccaacagtagtcaaaatgagaagcctgctatgctgtggatttatggctcatggactctggatgagttctgcatttatcttcgtggagtgacgaataattgaattggaaaatcatggcatccagaatggaactgcataaaaatctgctggagtgtttccgaaaaaatgaagacctctgggcccttatcccagactttctatttcagtggtccatggaagagcctgcaagcttggcttttccatctcaggacttagctgcagggtctcagggcacactgcagagactcgtcatcctgttgcctggaggtgtgcactggctatttgcagatgagccgccatcccgatgactgcccaatcctcggctgcctgtgctccgggtctccattcatttgaccagcaagacccacatccagcagcaaggactccaccgggatgggagcctggtgcttattctcgaactcagcaatccagcagtgcacctgggtctgtttccagcctggccaatgatattctaagcatgaattattacatattactaattattaaaaattaaatgtaatatcttg

SEQ ID NO: 75689 - DNA, 2779 bp, Homo Sapiens
cggtgctggagcaggacacgcagcgtctacctgggtgcccactcccagcaaggctcagcaaggcctctaccaagtcccgggtcccagccctcagttccagtctcccccagccaagcagacatccaccttctcgaagcagacaccccatcacccgtttcccagcccggccacagacctgtaccaggtgcccccagggcctggaggccctgcccaggatatttaccaggtgccaccttctgccgggatggggcatgacatctaccaggtccccccgtccatggacacacgcagctgggagggcacgaagcccccggcaaaggtggtggtgcccacccgcgtggggcagggctatgtatacgaggccgcccagccggagcaggacgagtacgacatcccgcgacacctgctggccccggggccacaggacatctatgatgtgcccccggttcgggggctgcttcccagccagtatggccaggaggtgtatgacacaccccccatggctgtcaagggtcccaatggccgagacccgttgctggaggtgtatgacgtgccccccagtgtggagaagggcctgccaccgtccaaccaccacgcagtctacgacgttcctccatcggtgagcaaggatgtgcccgatggcccactgctgcgtgaggagacctacgatgtgccccccgccttcgccaaggccaagccctttgacccggcccgcaccccactggtactggctgcgccccctccagactccccgccggccgaggacgtgtatgacgtgccgcccccggctcctgacctctacgacgtgccccctggcttgcggcggcctggcccgggcaccctgtacgatgtgccccgtgaacgggtgcttcctcctgaggtggctgatggtggcgtggtcgacagtggtgtgtatgcggtgcctcccccagctgaacgtgaagccccggcagagggcaagcgcctgtcggcctccagcaccggcagcacacgcagcagccagtctgcgtcctccttggaggtggcagggccgggccgggaacccctggagctggaagttgctgtggaggccctggcacggctgcagcagggtgtgagcgccaccgttgcccaccttctggacctggcaggcagcgccggtgcgactgggagctggcgtagcccctctgagccacaggagccgctggtgcaggacctgcaggctgctgtggccgccgtccagagtgccgtccacgagctgttggagtttgcccgcagcgcggtgggcaatgctgcccacacatctgaccgtgccctgcatgccaagcttagccggcagctgcagaagatggaggacgtgcaccagacgctggtggcacatggtcaggccctcgacgctggccggggaggctctggagccacccttgaggacctggaccggctggtggcctgctcgcgggctgtgcccgaggacgccaagcagctggcctccttcctgcacggcaatgcctcactgctcttcagacggaccaaggccactgccccggggcctgaggggggtggcaccctgcaccccaaccccactgacaagaccagcagcatccagtcacgacccctgccctcaccccctaagttcacctcccaggactcgccagatgggcagtacgagaacagcgaggggggctggatggaggactatgactacgtccacctacaggggaaggaggagtttgagaagacccagaaggagctgctggaaaagggcagcatcacgcggcagggcaagagccagctggagttgcagcagctgaagcagtttgaacgactggaacaggaggtgtcacggcccatagaccacgacctggccaactggacgccagcccaacccctggccccggggcgaacaggcggcctggggccctcggaccggcagctgctgctcttctacctggagcagtgtgaggccaacctgaccacactgaccaacgccgtggacgccttctttaccgccgtggccaccaaccagccgcccaagatctttgtggcgcacagcaagttcgtcatcctcagcgcccacaagctggtgttcatcggggacacactgtcacggcaggccaaggctgctgacgtgcgcagccaggtgacccactacagcaacctgctgtgcgacctcctgcgcggcatcgtggccaccaccaaggccgctgccttgcagtacccatcgccttccgcggcccaggacatggtggagagggtcaaggagctgggccacagcacccagcagttccgccgcgtcctaggccagctggcagccgcctgagggtggtgaccccaggagggaggcaggggaggggtgcggcggtcccagctccctggctcccatgtcaagagtcgctgtgccacaggcttagggacaggaccccagctctgcgtcggtcctggtgccctggatgcccaggaatctgtatatatttatggccgggcagggtgtggggccatgcctcctcaggagccgaagcccaggggccggccagtggccttccccagcatgcaccacgggcccgggttgggtcaccagacggggctggagtgtgagggtcctgcagcctgcaggacctcgtgccaccccgagggctgagcctggtcccacgagggtgccgtgtcccctgacagggccagtgcagtttggtgtgtcctccgcctttccaggagaagaacctgaagaactatttttcgttattggttttccaatcatttgactaagagtctccatttaaataaagtttttaaaaggaagagc

SEQ ID NO: 75690 - DNA, 794 bp, Homo Sapiens
tgcataaagggggggagagtatgaagtcgacggcgcgccgaattcggcacgagggtcatcctcagcgcccacaagctggtgttcatcggggacacactgtcacggcaggccaaggctgctgacgtgcgcagccaggtgacccactacagcaacctgctgtgcgacctcctgcgcggcatcgtggccaccaccaaggccgctgccttgcagtacccatcgccttccgcggcccaggacatggtggagagggtcaaggagctgggccacagcacccagcagttccgccgcgtcctaggccagctggcagccgcctgagggtggtgaccccaggagggaggcaggggaggggtgcggcggtcccagctccctggctcccatgtcaagagtcgctgtgccacaggcttagggacaggaccccagctctgcgtcggtcctggtgccctggatgcccaggaatctgtatatatttatggccgggcagggtgtggggccatgcctcctcaggagccgaagcccaggggccggccagtggccttccccagcatgcaccacgggcccgggttgggtcaccagacggggctggagtgtgagggtcctgcagcctgcaggacctcgtgccaccccgagggctgagcctggtcccacgagggtgccgtgtcccctgacagggccagtgcagtttggtgtgtcctccgccttaccaggagaagaacctgaagaactatttttcgttattggttttccaatcatttgactaagagtctccatttaaataaagtttttaaaaggaagaa

SEQ ID NO: 75691 - DNA, 1298 bp, Homo Sapiens
  misc_feature (28)..(28): n is a, c, g, or t
ctacccaccctcccccaccaaagataangccccctaaggtcctaggtagcgaggcctgggtggcgaatccgacacgaggggacagtccggcgtccgggaacgctcaggagccggaggagccggaaagcgccgggacccctcgcggggcctctgagcggcgcgggcggacccgagcccccagcccgctggcgccgctgcccgccaggccccgggggcggcggccaagatgtccgtgcctaacgtgctggccaaagcgctctatgacaatgtggccgagtccccggatgagctctccttccgcaagggtgacatcatgacggtgctggagcaggacacgcagggcctggacggctggtggctctgctcgctgcatgggcgccagggcatcgtgcctgggaaccgcctcaagatcttggtgggcatgtatgataagaagccagcagggcctggctccggccctcccgccaccccggcccagcctcagcctggcctccatgccccagcgcctccggcctcccagtacacgcccatgctccccaacacctaccagccccagccagacagcgtctacctggtgcccactcccagcaaggctcagcaaggcctctaccaagtcccgggtcccagccctcagttccagtctcccccagccaagcagacatccaccttctcgaagcagacaccccatcacccgtttcccagcccggccacagacctgtaccaggtgcccccagggcctggaggccctgcccaggatatttaccaggtgccaccttctgccgggatggggcatgacatctaccaggtccccccgtccatggacacacgcagctgggagggcacgaagcccccggcaaaaggtggtggtgcccacccgcgtggggcagggctatgtatacgaggccgcccagccggagcaggacgagtacgacatcccgcgacacctgctggccccggggccacaggacatctatgatgtgcccccggttcgggggctgcttcccagccagtatggccaggaggtgtatgacacaccccccatggctgtcaagggtcccaatggccgagacccgttgctggaagtgtatgacgtgccccccagtgtggagaaggcctgcaacgtccaacacacgcatctacacgttctcatcgtgagcaagagtgccgatgccactgctgctgagaactacatgtgccccgcttcgcaagcagccttgaccgcgcaccatgtacgtgcacctcaatccgcgcgagatgtaatgccccggtcgattaaagcccgttgtgctgcgcctaaa

SEQ ID NO: 75692 - DNA, 1150 bp, Homo Sapiens
ggtcctgtgccagcacgtagtagttactcagtagaggtttgctgagtaaaccagaaatcagattatgagtgttcaggggtttgataaaacagcaccacataacgcacacaaagatactccagaaacatttgctgagtacctagtacgtgtgaggtgctgtgaggatagagcagagaggactgtgccccagctgtgatgctggcagaggtgacactaagagggaaatgagatatttggggcagaatccactgggctctcttggccatccgctgccttgggtctgttgaggtgggtgcccaaaggctgccttcttgaccagaacctgctgtgcgcttcacagaacctcctcttcattggaaatgctgggcacattgcagtcagtgagctgctgccaaaacggcgttaagtagaacccccagaggccccgccggttggtgatcaccctcaggtcctgccagggagacacagtgaggaggttggctaaattgctgctttcaggccctggaaataagtcgccaaggcccaggagaaccccggtgagtccgtccagttgaggcagaggcaataacctcccattgctcggccctgcgcctgccccagtcctggcagggggcaccggctcaggaacatgcggcctcctggcatttctcggtatttaactgtctcgctgtcttatccgagtccctaatgaaacgacttgtgtgacaatctgtctgtgccttacgaaagtgtctgtgcactttttatcctttttaaaagcaacttttaaaagtggatggggaggggggctagcatacgtggtagggttctagaaatctgtggtcatcgctgaaatcctttttgcatcatgttttttgatgttggagtgatgaagtgtacatcccccaccccacacaccactacctgtgtacagaccttttaaaacatgtcttctttttctgattcaatactgtgacctctccgatacagtctaatccttggggatctgtaatcaaggttttaaaacctgggaagtgggttgggaagggtttgcactggtcttgagtgttgtgcttttctgtgttgtgtgttttgatttttgtctttttatctgttttatattgacataattttcctgtttaaaaaaaatacaactttggcttgttaaaaa

SEQ ID NO: 75693 - DNA, 1054 bp, Homo Sapiens
  misc_feature (69)..(78): n is a, c, g, or t
  misc_feature (336)..(344): n is a, c, g, or t
  misc_feature (683)..(695): n is a, c, g, or t
gatggggctgtatagattatctgaatcatttgtctaagaggtacattcttccagatggaatcaataacnnnnnnnnnnccaggttcccgtgcttgctatcacagtatcattgttaagtgacacttttgtctctcataacaccatcacactcttccttccaagtctgagctgtgctggggtttgaactaaaagccatatgtggaatattgacatgtgtaagaagcactttcagaatgttgtcctttttaagaaatgattctcaaaataccagtttttattccaaaaatttagagaacaaacccggaatatgaagtgcagattgtaacatggagctannnnnnnnncttaatcccataatacagctcctaaaagttgtgtgggatttgcgttgcataaatagccatgtgaattccacaagaagcaccagggaaagtttagagatttgcggcaatggaccgaagaacgggccaggaagtcctccaatttcctttggtctttccaggagattggactacacattgtaaagactgactgggtttcaactagtcaaaaagcactttcttctgttttcaatccctgttcgatttgtgcttctgtgcttgtaggagagatggccagggtggcagccctcatgcaggttgaagtatatgtagcctcagcctgatattcttggtgcgaaggtnnnnnnnnnnnnntaaataaaaccattggcctggttgagggcgtgaccaccaagacatatatgttgtgcccgtgttcatcctgtgtatttatactgtatatgtagagtctagatttatatactgcaatgtaaaatatatatatatttaccttttttaaagacaatggaaattccaagtagctaaaacttagcttcatttatttaatgccactttaaatgtcttaaatttgtttcctggtggacagccgggtaatgcttttagctgctcgcatgcttgtctttctgcatctccatcatctgtttaccttttggttaaactaataaactagtttgggacttggctggcatgtgctgccagacccaaagggaaaa

SEQ ID NO: 75694 - DNA, 1537 bp, Homo Sapiens
  misc_feature (915)..(1024): n is a, c, g, or t
  misc_feature (1113)..(1122): n is a, c, g, or t
  misc_feature (1343)..(1343): n is a, c, g, or t
  misc_feature (1478)..(1489): n is a, c, g, or t
aaagcggctggtacgctccggatattcccgggatatcgtcgacccacgcgtcggcgaggtcgggttccgggcgcttggagaagatggtgctgcggcggctgctggccgccctgctgcacagcccgcagctggtggaacgtctgtcagagtcgcggcctatccgacgtgcggcgcagctcacggccttcgcactgctgcaggcccagctgcggggccaggacgcggcccgccgcctgcaggacctcgcggctgggcccgtgggctccctgtgccgccgcgctgagcgatttagagacgccttcacccaggagctacgccgcggcctccgaggccgctcggggccaccaccaggtagccagaggggccctggcgcaaacatttaatcctgggctgtgcggggccgaggccgcttgcttttccttccgggctctacagtggcatcaatgtggaggggtcattccgggcactgcgcgcggcttcgaatcccgactgggattgttggcctgcagacatcccacgcataagagcctaggccagaccgcccgctccgttgaagtcttgtgattggacaagacacagtgtggagaaagacccctaagcctaacagagatgaaggtaggctgggtccagacacggcacctacggagagccacggaccgaagccagagagcctttcctctgcaagtgggactgaaactcttgacagatgctgctcaatctgactggtatagcaggacagttaattccagggacgatatggatgaaaagacaaccctacagctgccaaattcctttgattaaatgtgtgagctggttgataggcatgagtgtgatacttctcaggcaagatgtgttaagaataccggggactgtaggcctatggtaataataaacacgtattttatgaaatgaccnnnnnnnnnnnnnnnnnnnnnnnnnnnnnnnnnnnnnnnnnnnnnnnnnnnnnnnnnnnnnnnnnnnnnnnnnnnnnnnnnnnnnnnnnnnnnnnnnnnnnnnnnnnnnncaacacaaaccacacctacaccttcttctttgccggcgcccttcgcccctaaaaaagattttttaaaaccctctttttgtgggcccggnnnnnnnnnntacgcgacagcggaacccgtggccctactccttttcttcccaaaaacaacccccccggccaaaaaccaccatccccccttttgccaccttcccctccacaccaaaatacaaaacccaacctcccccgtcgcgagaaaccccactatagaattccttcttttaaacacacaaaccgctccaaaatccgggatgcccttttgcggcgacctcatacttggggnagtttctaaccaacaccgggggtgttctcccccgcggcgcgccccccaaacctaaaatttttgcggactccccggtccggcgtctatccttatctacgaaaaaagcgccgggaaaaccccctatataaccccttnnnnnnnnnnnngcggacgctctccttatcacaaccgcttttttcccacaaccttacttt

SEQ ID NO: 75695 - DNA, 754 bp, Homo Sapiens
caaggtagcgaggcctgggtggcgaactcgccacgagggcacaaaaggaagtcctggggttgatgtgtttgagcgttaggcgaagtggttccccccatcccccaaacggaaaaatgtcagtatttgctaagctgtagagacctgatgccgtgatgtggcctgttccgcctccacccattacacggggataacgctggggggtggcgggcccacaaaagaggtgctggaggagactctcccacccctggccgggccggggctttggggccggaaggttcacagtacgcggtttgtccgaacgtcacggcttttattgggagttgggggtttggggtgccctgtcaggtgatcagaacattaaaaatggactcaacgtaaaataatcttctggacccttctaggacgacatggccgtgaccggtagtgctagaaaccagtcttcgagcccccagtgccacaccatgtccccccacctgcatacctgtggtctccccctgccaggcaccctgtgctgggcacagggacatccctgccaggcctagagggccttgtgtttttaaggcagtcaaatcttgcagcctggttcagtgccagctccaagggctattgggtagctgcaagggtcaattatgcattcctgtgagtcaggtttttccaacccaggcccttgactctgccctgagcttgcagctggatacaaagtgcaaaaaagcttggctccttctgtattctttaaaaacaaaacaacaacaaa

SEQ ID NO: 75696 - DNA, 610 bp, Homo Sapiens
attccccctttcaatgatgaaacaccccaacaagtattccagaatattctgaaaagagatatcccttggccagaaggtgaagaaaagttatctgataatgctcaaagtgcagtagaaatacttttaaccattgatgatacaaagagagctggaatgaaagagctaaaacgtcatcctctcttcagtgatgtggactgggaaaatctgcagcatcagactatgcctttcatcccccagccagatgatgaaacagatacctcctattttgaagccaggaatactgctcagcacctgaccgtatctggatttagtctgtagcacaaaaattttccttttagtctagcctcgtgttatagaatgaacttgcataattatatactccttaatactagattgatctaagggggaaagatcattatttaacctagttcaatgtgcttttaatgtacgttacagctttcacagagttaaaaggctgaaaggaatatagtcagtaatttatcttaacctcaaaactgtatataaatcttcaaagcttttttcatctatttattttgtttattgcactttatgaaaactgaagcatcaataaaattagaggacactattg

SEQ ID NO: 75697 - DNA, 462 bp, Homo Sapiens
  misc_feature (388)..(389): n is a, c, g, or t
aaaaacaataatggcacatttaaaaaatcaactacagagaaagggccatgtcttcgagtccatgttcacattgtcccacgctgtcgcaccaggatgggccgcatactttgtcctggctgggactgtggcctcttggaagggtactgggccactccagggctcgggtgctgctcctcctggatccactagagggtgaactctgggccctcccagactcctgctcctctggggcccccaggactctggcaacccttccccttgctccaaaccagagccaggagctggagatgttagggaacttatttgcgcccacagggaactcttccagacaaacacattctccatctcatccaggatagacaggacggccccacccgctctctcggcnngtcgcgcctccttgtggcccagcagcagctccatgtggaaagaatagcagtgctcccggaagggaatccactg

SEQ ID NO: 75698 - DNA, 2228 bp, Homo Sapiens
  misc_feature (1880)..(1880): n is a, c, g, or t
  misc_feature (1973)..(1974): n is a, c, g, or t
  misc_feature (2159)..(2172): n is a, c, g, or t
ttaggggcgagagagtatgaagtcacggcgcgccgaattcggcacgaggagttctttgagcaccactccacgtgggcgcaggcgcagcgcatctgcacgtggttccaggccgagctgacctccgtgcacagccaggcggagctagacttcctgagccacaacttgcagaagttctcccgggcccaggagcagcactggtggatcggcctgcacacctctgagagcgatgggcgcttcagatggacagatggttccattataaacttcatctcctgggcaccaggcaaacctcggcctgtcggcaaggacaagaagtgcgtgtacatgacagccagccgagaggactggggggaccagaggtgcctgacagccttgccctacatctgcaagcgcagcaacgtcaccaaagaaacgcagcccccagacctgccaactacagccctggggggctgcccctctgactggatccagttcctcaacaagtgttttcaggtccagggccaggaaccccagagccgggtgaagtggtcagaggcacagttctcctgtgaacagcaagaggcccagctggtcaccatcacaaaccccttagagcaagcattcatcacagccagcctgcccaatgtgacctttgacctttggattggcctccatgcctcgcagagggacttccagtgggtggagcaggagcctttgatgtatgccaactgggcacctggggagccctctggccctagccctgctcccagtggcaacaaaccgaccagctgtgcggtggtcctgcacagcccctcagcccacttcactggccgctgggacgatcggagctgcacggaggagacccatggcttcatctgccagaagggcacggacccctccctgagcccgtccccagcagcgctgccccccgccccgggcactgagctctcctacctcaacggcaccttccggctgcttcagaagccgctgcgctggcacgatgccctcctgctgtgtgagagccacaatgccagcctggcctacgtgcccgacccctacacccaggccttcctcacgcaggctgcccgagggctgcgcacgccgctctggattgggctggctggcgaggagggctctcggcggtactcctgggtctcagaggagccgctgaactacgtgggctggcaggacggggagccgcagcaagccggggggctgtacctacgtaaatgtggacggggcctggcgcaccaccagctgtgacaccaagctgcaaggggctgtgtgtggggttagcagtgggccccctcctccccgaagaataagctaccatggcagctgtccccagggactggcagactccgcgtggattcccttccgggagcactgctattctttccacatggagctgctgctgggccacaaggaggcgcgacagcgctgccagagagcgggtggggccgtcctgtctatcctggatgagatggagaatgtgtttgtctgggagcacctgcagagctatgagggccagagtcggggcgcctggctgggcatgaacttcaaccccaaaggaggcactctggtctggcaggacaacacagctgtgaactactccaactgggggccccccgggcttgggccccagcatgctgagccacaacagctgctactggattcagagcaaacagcgggctatggcgccccggcgcttgcaccaacatcaccatggggtgtcgtctgccaaagcttcctcgtgcttgagcagagcagctttctccccatcagcgcttccagagaacccagcggccctggtggtggtgctgatggcggtgctgctgctcctggccttgctgaccgcagccctcatcctttaccggaggcgccagagcatcgagcgcggngcctttgagggtgcccgctacagccgcagcagctccagccccaccgagccactgagaagaacatcctggtgtcagacatggaaaatgatgagnncacagaatagagcccagcgcgtgggcagggccaaggcgggaggaactggggaactggggccctggggtcagtctggcccccccaccagctgcctgtccagttggcctaatggaagggtggccctggggagtcccctgtttgggaacccgaaactggggcaaaaccctggggctggtggggggggnnnnnnnnnnnnnngagggccttggctttgaaaacccccctttaagtgcaacccgggggccttttcccct

SEQ ID NO: 75699 - DNA, 654 bp, Homo Sapiens
  misc_feature (14)..(14): n is a, c, g, or t
gctctgtgcccctnaccctgctccctctcgccccttctctcccaccccttccttcttgagccgggccctggggattggggagccctcttgttcctgatgagggtcagctgagggggctgagcatccatcactcctgtgcctgctggggtggctgtggggcgtggcaggaggggcctaggtgggttgggcctgagaaccagggcacgggtgtggtgtctgctgggctggagataagactggggagagacaccccaacctcccagggtgggagctgggccgggctgggatgtcatctcctgccgggcgggggagggctctgcccctggaagagtcccctgtggggaccaaaataagttccctaacatctccagctcctggctctggtttggagcaaggggaagggttgccagagtcctgggggccccagaggagcaggagtctgggagggcccagagttcaccctctagtggatccaggaggagcagcacccgagccctggagtggcccagtacccttccaagaggccacagtcccagccaggacaaagtatgcggcccatcctggtgcgacagcgtgggacaatgtgaacatggactcgaagacatggccctttctctgtagttgattttttaaatgtgccattattgtttttaa

SEQ ID NO: 75700 - DNA, 2359 bp, Homo Sapiens
  misc_feature (61)..(78): n is a, c, g, or t
  misc_feature (396)..(396): n is a, c, g, or t
  misc_feature (1534)..(1643): n is a, c, g, or t
  misc_feature (1708)..(1727): n is a, c, g, or t
  misc_feature (1747)..(1790): n is a, c, g, or t
  misc_feature (1815)..(1860): n is a, c, g, or t
  misc_feature (1928)..(1936): n is a, c, g, or t
ccgattgtcacttctgtttattgagttacaagttgagatgtgcaggttcggtggcgccagnnnnnnnnnnnnnnnnnnttgggcaaaaatagctcccagcgccgaggaatggggggtaggaaagggtctcggataacgggatggggcctcgagggtccctgtggggctcgtgggtcccaggatcaagcacggctgacacggaagacagcggggtgggggggcctgccttggccgtggcgttggggggaaggtgaggggagagcttctgtacaaggtcatcttccgtgagggtcccggctgcggccccaaaacgccgatgggccccgcgggacggaagcggagagcggaatgtccgctgggctccctcggatgccacgccccgcccaggcagcctgnggggcgtctccctgacctggccccgcccaccggagcgaacggcccgcccaggtggtctgcgctgcagacctggcgcaggctcgggcctcctcctgctgcggctgtgctcaccaagcgatgccccgccggcccagcggctacttcttgtcttctggaggcgccggcagtggctccggtagagccttgggcgagggctcgggctcccagagcaggaattcgtggagcagcgtgttgaccgtctcagggcattccagcatcaccatgtggctgccctcgtcgatgagcttcaggaatgccaggagcaggatctgcagaagacgcagggctcaagggctggagcggctctgggctccggaatcgcccgcagccggtactgcgggacccactgcggatatggctgtcttggctggatccctgttgggccccacgagtaggtcggcagcgttgctgggtggcaggtggctccagccccgggcctggctggggttcccagacgcctggggcctccccaccccgcagcaggcccggggcaaggctcgcgggaatgagtatcagccgagcaacatcaaacgcaagaacaagcacggctgggtccggcgcctgagcacgccggccggcgtgcaggtcatccttcgccgaatgctcaagggccgcaagtcgctgagccattgaggatcgcgacgcagtcggcgggaccctcatggaagcatcgccctcgcctcggaccttgcctggcgctatttttgcagggagctggggagcaggaacgcctcggacctgagtgctctccatattgtggggttgaagtctggatgggagcttgccaagtccctttttaggctttttaattaggaagcatttcgaacctgcgcaacagaccaaagaacagtacaaagaacatccgtgtacccagtaccctgactaccgactacctacaacccgtccctgccccatcctgagttcttttgaagctgatctcaggcatcggattatttcttctgtaaatatttcagaatgtatctctccaagatgagagctcattaaaagacaattacaaagcttatcacatccaaaagaattatcaataattttgaaatattattaaacgtgtaataaatgttcaaagttccacttgcgnnnnnnnnnnnnnnnnnnnnnnnnnnnnnnnnnnnnnnnnnnnnnnnnnnnnnnnnnnnnnnnnnnnnnnnnnnnnnnnnnnnnnnnnnnnnnnnnnnnnnnnnnnnnnnccgctttaaaaaaccccctggggggggcccaagttttccgccggccccttttttttgttgaagannnnnnnnnnnnnnnnnnnncgccatatataaagcacaannnnnnnnnnnnnnnnnnnnnnnnnnnnnnnnnnnnnnnnnnnnaaaaaggcggcgcactatggggcannnnnnnnnnnnnnnnnnnnnnnnnnnnnnnnnnnnnnnnnnnnnnacaacattattgtggggggacaagctcctttctcctcacagaggagtggtttgggaggggctcccccnnnnnnnnnaacaacaaaacagaactctttttgatgaaaacgagaaatataaggtgggggggaaaaaacaaactacacccctgcgcgatgtgtcccttcgggcccgggggcccaggaaaagaaaatttgttttcttctctcccgtcgggaggaatgatggtatttttttgcgaggaaaaagtatatttctcttcccgccccgcgcgcgggacacgcagcgagaggggcacacccactaacattggtgggggtgcggggcgcgctttaatgataaaaaaatgcgcggggacgacgagccgcggaggggggtgtatttatatttttggggggcggcgcccccaccaacaaacacactcttctctacggacgtgctccctcggtctctcgccgtgtgaaacgtggagaaagacccacccacgcccgctcacccac

SEQ ID NO: 75701 - DNA, 903 bp, Homo Sapiens
  misc_feature (154)..(240): n is a, c, g, or t
  misc_feature (432)..(541): n is a, c, g, or t
  misc_feature (550)..(563): n is a, c, g, or t
  misc_feature (588)..(598): n is a, c, g, or t
  misc_feature (602)..(767): n is a, c, g, or t
  misc_feature (783)..(792): n is a, c, g, or t
cgggaccctcatggaagcatcgccctcgcctcggaccttgcctggcgctatttttgcagggagctggggagcaggaacgcctcggacctgagtgctctccatattgtggggttgaagtctggatgggagcttgccaagtccctttttaggcttnnnnnnnnnnnnnnnnnnnnnnnnnnnnnnnnnnnnnnnnnnnnnnnnnnnnnnnnnnnnnnnnnnnnnnnnnnnnnnnnnnnnnnnacctacaacccgtccctgccccatcctgagttcttttgaagctgatctcaggcatcggattatttcttctgtaaatatttcagaatgtatctctccaagatgagagctcattaaaagacaattacaaagcttatcacatccaaaagaattatcaataattttgaaatattattaaacgtgtaataaatgttnnnnnnnnnnnnnnnnnnnnnnnnnnnnnnnnnnnnnnnnnnnnnnnnnnnnnnnnnnnnnnnnnnnnnnnnnnnnnnnnnnnnnnnnnnnnnnnnnnnnnnnnnnnnnntttgggggnnnnnnnnnnnnnnaaaaaatttttaaaaactttttttnnnnnnnnnnncccnnnnnnnnnnnnnnnnnnnnnnnnnnnnnnnnnnnnnnnnnnnnnnnnnnnnnnnnnnnnnnnnnnnnnnnnnnnnnnnnnnnnnnnnnnnnnnnnnnnnnnnnnnnnnnnnnnnnnnnnnnnnnnnnnnnnnnnnnnnnnnnnnnnnnnnnnnnnnnnnnnnnnnttcaaatttaaattannnnnnnnnnggccccttttgggaaaaggggtggaattttttaaactttcgccccacggggaaccccccccaaaggggttgagaaacctgaatcccccggggaatcacccccttggcccct

SEQ ID NO: 75702 - DNA, 629 bp, Homo Sapiens
ccaggagcctgtccttgcaagatgcaatcatcgttcctgctttttcattgtcattaaattctgtagaaacccattgtcattagctccaagtgtaaatttgggtcaaggagacagaataataatgggaatctcggagttcgacaccatagtgacgttcagcgtcctctgaattgtgctacatcagcgaacaagtcggcgcttgaattggattttgaggttattttaaccatggaattatttttatagaaggggaaaatgtatgtgaaagtctctatttgtgtatttctctcctaaagttgtgtctctttgggaattggatttgatttttattatttaatacctcactttggcccgtcccccctcccaacacttctgtatcctcgccctgccgccccagcctggacgctctgcgtggaagtgcgtgtttgtagcagctcgggcctcatctcagcgctcggatccctcctgctgccagaatccactggcctctgtctcattcttgggttttcctgctgtcttcgtttacgtctctgtccacatgtcagtgtattaaaaccccaatgggttccgtttctccttttcccctctggattttaaataaatatttaaaactgaggcaatggaatgac

SEQ ID NO: 75703 - DNA, 1449 bp, Homo Sapiens
  misc_feature (1102)..(1115): n is a, c, g, or t
aaggcagtactataacggtcctaaggtagcgaggcctgggtggcgaattcggcacgaggactgacctggaaaagcttcgggagcggcgacgggaaggcagcaggaggtggtgcggggacccgaggcgcctcgtacccggccgggctgacgcggccccgctacacacaaagcgcttcagctgcacagggcgctattttccgaaaatgccgcgtctggtcggcgcccaaaatccccaccgaaaagtcccccgtgctgcgcgcggagggacacatggtgtgcgagtgagtcaagctcccagcatccctcccggacccggcctcttcagctcatcgcccgaggattttccgcctctgccctcgtcggcagatcctgctcctacccactccctagctgtgttcccgcggggagagaggggaaagagggtctgatgttttgacgaagggaaagaaaatatgccatttctagcgcttcagccacacaaagaaagcggcggaatgatccgctctcggcgaccgcaagtcccggctcgcccggcgcatgcgcggcagcgggggtgggagctgcggacggccatgtgcgcggcggagaggccgggtggccaccgaaccttcccgcctgttctgcggtgggtaggagtttggaaactaatgttcctgtgctaaccttcgtgtctctgtgacatgactgttgaaagacggagagtgcggaatctttggagttttaagcttgccaactgtgcggcctagcagaatcctgggagacggaaggacagccaagaggctaggatttacctttaagtgtccctagattcaactaggcagactgggacgggagacgctgtgaaggtaccagggaaggaacgagtgaggttccttttccactttttcataaactcaacagtcaggttcatgacgaagatatagatatttctgtagattttttccccaacattctaattatgcctcatgtttcgtagatcctagtaactgcttggattactgccacctcagaggtagagatctgtttttccgtggctggaatgccaaaaattttgttgtattttattaagaaagtagcaaaagtttggagatttgcaaagttnnnnnnnnnnnnnngcattatgaacttaatctagatgtgatttgctaaggaacttaatatattgatatgtttttcacaggggcgtctgggcatggctttcccaacctagtaactgcaacttttagcatcctacatgtaggacttgggaatatgtgagacagcgccaagaatttaatccaggagaattgacaagcttaaatgaaatccatattgcccactgattttgtgcagcttcagataagtaatctttctccacttagccttttgtaacaattgatgtaataaaggtttgtagtctttgtgtaatttattaaagcattgtgcctaaaatagaaaaaaagcatagga

SEQ ID NO: 75704 - DNA, 1438 bp, Homo Sapiens
  misc_feature (49)..(49): n is a, c, g, or t
gtcatggcttaagtccaattatccatcggtagtctcttctatcattcgntattcccatggctgtacctttgttgtgtacagttcaagattgtattctttcttgaccaaaagtaaaatcaaactacatgttcatttcaattaaacagcttctttattagtctgaagacgagtcatagcttccaacttctgtctgtaggcctctgcttcctgttctttctttaggagctgctgtcgatatttttgtgcttctcgatttgcttcatccagctgtttctgaagagcttctctctcttctatttctgcagattccacccggttttcaataatttcgatacattgtctcttagctggtggttcttcacttataacagtttcttcagcaatgtctgttgctggtactgttaatacttgttgtccatctggcatggtcacaatgatgggctgaccaattccactggttggaatagagtgcaaatttccaagctgaattccatctgtaactattgtgatgacttgctgaccccctgaactaactacttgctgaatggcaccatccacagattctgcagtaactacttcttctgtggccactactggagtttctgaagaattggacaatggagcagatgcttcagctaaggcagctaatgtagctaatactgatgtagaagagtttccaaactgaacagcagatacacccgtttcatctgttaggttcaccacccctccaggtccaatgataaactgtggtgttgcagcatgtattgtcacagtgtcaggactctctgggtttgtgttgatttggttctgcatagcaatctgtaatatctctgctaaatcttcatttccattgtctattgaaatatcaaatgcagttttacaaaatttactttgcgtgtgtacatcagcaccatatttgattaaaagttccaccacctcttgatgattgtgttctgtggcccaatggagagctgtcatctttaacatgtcctttgcattgacatcagcaccatgcttaagtaaaacctctactatgctggcatggccctcagaagctgccatatgtaatggtgttcggtccactttggttctggcatctctgctcacaccagctcgcagcagtacctctgtggtggaataatgaccatactgtgctgctagatgaagtggagaagttcccagccagtctgtagtaaagggagctccatttgccatcaaaatacgaacttcatcatcttgacctgctcgtgccgcttctaaaagcttctttcccaaatctaccagggacatctggaaaagcttcgggagcggcgacgggaaggcagcaggaggtggtgcggggacccgaggcgcctcgtacccggccgggctgacgcggccccgctacacacaaagcgcttcagctgcacagggcgctattttccgaaaatgccgcccc

SEQ ID NO: 75705 - DNA, 831 bp, Homo Sapiens
ataggctaggtacgaggcctgggttgcgaattcggcacgaggaggagggggcatggcggatactgtgttgtttgagtttcttcacacggagatggtggctgagctgtgggctcacgaccccgaccccggcccgggggtgagcgccgggctccgtggggaggaagcgggggccaccaagggacagaagatgagcctgtcggtcctggagggtatggggttccgtgtgggccaggctctaggcgagaggctgccccgggagacgctggccttcagggaggagctggatgtcctcaagttcttgtgcaaagacctgtgggtggcggtgttccagaagcagatggacagcctgcgcaccaatcaccaggggacctacgtcctgcaagacaacagcttccccctcctcctcccgatggcctctggcctgcagtatctggaggaagcacccaagttcctggccttcacctgcggcctcctgcgcggcgccctctataccctgggcattgagagcgtggtcaccgcctccgtggcagccctgcccgtctgtaagttccaggtggtgattccgaaatcctaagcctgcctcgcacctgctgagccgcactgctgcccctggcctcaccggcctcaggagacggtggggccgctgcatttcggggtggtcttgggaatcccaggccctaggggtcacatttgctcaggaagtgggtatcaaattgaggtgggggtgtcagaggaggcaaaggggtcccagctgcggtcaggactgtggtgggattcccgcctcggcagcgtcactgcccagtagctgctcaataaaggctgtgtgtgtgg

SEQ ID NO: 75706 - DNA, 866 bp, Homo Sapiens
gtaatttaagtggcatttctatgcaggcagcacagcagactagttaatctattgcttggacttaactagttatcagatcctttgaaaagagaatattaacaatatatgactaatttggggaaaatgaagttttgatttatttgtgtttaaatgctgctgtcagacgattgttcttagacctcctaaatgccccatattaaaagaactcattcataggaaggtgtttcattttggtgtgcaaccctgtcattacgtcaacgcaacgtctaactggacttcccaagataaatggtaccagcgtcctcttaaaagatgccttaatccattccttgaggacagaccttagttgaaatgatagcagaatgtgcttctctctggcagctggccttctgcttctgagttgcacattaatcagattagcctgtattctcttcagtgaattttgataatggcttccagactctttggcgttggagacgcctgttaggatcttcaagtcccatcatagaaaattgaaacacagagttgttctgctgatagttttggggatacgtccatctttttaagggattgctttcatctaattctggcaggacctcaccaaaagatccagcctcatacctacatcagacaaaatatcgccgttgttccttctgtactaaagtattgtgttttgctttggaaacacccactcactttgcaatagccgtgcaagatgaatgcagattacactgatcttatgtgttacaaaattggagaaagtatttaataaaacctgttaatttttatactgacaataaaaatgtttctacagatattaatgttaacaagacaaaataaatgtcacgcaacttaaaaatttaaaa

SEQ ID NO: 75707 - DNA, 1073 bp, Homo Sapiens
  misc_feature (52)..(52): n is a, c, g, or t
  misc_feature (112)..(203): n is a, c, g, or t
  misc_feature (216)..(322): n is a, c, g, or t
  misc_feature (1005)..(1029): n is a, c, g, or t
tttgataccgatacgccttgatgagtgtaccgtcccgcacgaaagaccaggnagcgatcatgagcaggagcggagacgccatacgcaaccgcctctcccgcgcgtgcccgannnnnnnnnnnnnnnnnnnnnnnnnnnnnnnnnnnnnnnnnnnnnnnnnnnnnnnnnnnnnnnnnnnnnnnnnnnnnnnnnnnnnnnnnnnnccagcttaccacnnnnnnnnnnnnnnnnnnnnnnnnnnnnnnnnnnnnnnnnnnnnnnnnnnnnnnnnnnnnnnnnnnnnnnnnnnnnnnnnnnnnnnnnnnnnnnnnnnnnnnnnnnnggccctcgagcccaagattcgggcacggagggagagtacatcaaagtgcagacggacaaaggcacagaggtggccaccaacctggtgttctctgcaccggcatcaagatcaacagctccgcctaccgcaaagcatttgagagcagactagccagcagtggtgctctgagagtgaacgagcacctccaggtggagggccacagcaacgtctacgccattggtgactgtgccgacgtgaggacgcccaagatggcctatcttgccggcctccacgccaacatcgccgtggccaacatcgtcaactctgtgaagcagcggcctctccaggcctacaagccgggtgcactgacgttcctcctgtccatggggagaaatgacggtgtgggccaaatcagtggcttctatgtgggccggctcatggttcggctgaccaagagccgggacctgttcgtctctacgagctggaaaaccatgaggcagtctccaccttgatggagaggccaggcgggagaactaccgcagcaggtgggcgtacggactgcttggcgcatggcacccgcctggcaagtgctagaactaatgctattcttctggaataagatgccaatgatgtggtggctagaaatgcaacttgtataaaacaaaaatgggagagagagaggtattaaacaaataccccccttnnnnnnnnnnnnnnnnnnnnnnnnngcctacagccgcggccgcaagcttattccctttaggtgagggta

SEQ ID NO: 75708 - DNA, 1323 bp, Homo Sapiens
gcggggtcggggaccagcacgagtgctgagtcacgccccgcccgggagcgcctcgggtcagtaactcgggaagacgaccaagcgggagcgggagccggagcgagagcgcgcgggcgcggccgacagtgcctgatttgagatggggtcccaggtctcggtggaatcgggagctctgcacgtggtgattgtgggtgggggctttggcgggatcgcagcagccagccagctgcaggccctgaacgtccccttcatgctggtggacatgaaggactccttccaccacaatgtggctgctctccgagcctccgtggagacagggttcgccaaaaagacattcatttcttactcggtgactttcaaggacaacttccggcaggggctagtagtggggatagacctgaagaaccagatggtgctgctgcagggtggcgaggccctgcccttctctcatcttatcctggccacgggcagcactgggcccttcccgggcaagtttaatgaggtttccagccagcaggccgctatccaggcctatgaggacatggtgaggcaggtccagcgctcacggttcatcgtggtggtgggaggaggctcggctggagtggagatggcagcagagattaaaacagaatatcctgagaaagaggtcactctcattcactcccaagtggccctggctgacaaggagctcctgccctccgtccggcaggaagtgaaggagatcctcctccggaagggcgtgcagctgctgctgagtgagcgggtgagcaatctggaggagctgcctctcaatgagtatcgagagtacatcaaagtgcagacggaccaaggcacagaggtggccaccaacctggtgattctctgcaccggcatcaagatcaacagctccgcctaccgcaaagcatttgagagcagactagccagcagtggtgctctgagagtgaacgagcacctccaggtggagggccacagcaacgtctacgccattggtgactgtgccgacgtgaggacgcccaagatggcctatcttgccggcctccacgccaacatcgccgtggccaacatcgtcaactctgtgaagcagcggcctctcccaggcctacaagccgggtgcactgaccttcctcctgtccatggggagaaatgacggtgtgggccaaatcagtggcttctatgtgggccggctcatggttcggctgaccaagagccgggacctgttcgtctctacgagctggaaaaccatgaggcagtctccaccttgatggagagggcaggcgggagaactaccgcagcaagtgggcgtacggactgcttggcgcatgg

SEQ ID NO: 75709 - DNA, 1046 bp, Homo Sapiens
cagtcgacggtaccggacatatgcccgggaattcggccattacggccggggccagtagcattacgtgtatctggtgccaccttgctgtttagatacaaatcataccgtcttttaaatattttgaagcccatttcagttaaataatgacatgtcatggtcctttggaatcttcatttaaatgttaaatctggaatcaaaatgaagcaaaaaatatctgtctccttttcactttcttcagtacataaatacattatttaatcaataagaattaactgtactaaatcatgtattatgctgttctagttacagcaaacactctttaagaaaaatatccaatacactaaataggtactatagtaatttttagacatggtacccattgatatgcatttaaaccttttactgctgtgttatgttgataacatatataaatattagataatgctaatgcttctgctgctgtcttttctgtaatattctctttcatgctgaatttactatgaccatttataagcagtgcagttaactacagatagcatttcaggacaaaatagatgactcaaaccatttattgcttaaaaaatagcttacgccatgctatgctataagcagcttttatgcacattgacaaatgaagagtaagcttcagcttgctaaaggaaactgtggaaccttttgtaacttttggtgatatggaaaattatttacaaaccgtcaaagaatatgaggaagttgctgtatgacatagtgctggcactgatattatccatcatctctttttggacacttctgtaaatgtgattggattgtttgaaagaagatttaaagtttcaaagttttttgttctgtttttgctttgcatttggagaaaatattgaaagcagggtatgttgtttcattcaccttgaaaaaaccatgagtaaatggggatatagaatctctgaatagctcgctaaaagattcaagcaagggacatgaattttgttccatctatcaataatatccagaagaacaacttttttaaagagtctatagcaaaaagcaaa

SEQ ID NO: 75710 - DNA, 1194 bp, Homo Sapiens
  misc_feature (227)..(280): n is a, c, g, or t
gctggaccggtccggattcccgggatatcgtcgacccacgcgtccggggggcggtggccgaggcgggcgggcgcgcgcgcgaggcttcccctcgtttggcggcggcggcggcttctttgtttcgtgaagagaagcgagacgcccattctgcccccggccccgcgcggaggggcgggggaggcgccgggaagtcgacggcgccggcggctcctgcgtctcgccctttnnnnnnnnnnnnnnnnnnnnnnnnnnnnnnnnnnnnnnnnnnnnnnnnnnnnnntggactcaggaggccactgtctgcagctcccgtgaagatgtccactccagacccacccctgggcggaactcctcggccaggtccttccccgggccctggcccttcccctggagccatgctgggccctagcccgggtccctcgccgggctccgcccacagcatgatggggcccagcccagggccgccctcagcaggacaccccatccccacccaggggcctggagggtaccctcaggacaacatgcaccagatgcacaagcccatggagtccatgcatgagaagggcatgtcggacgacccgcgctacaaccagatgaaaggaatggggatgcggtcagggggccatgctgggatggggcccccgcccagccccatggaccagcactcccaaggttacccctcgcccctgggtggctctgagcatgcctctagtccagttccagccagtggcccgtcttcggggccccagatgtcttccgggccaggaggtgccccgctggatggtgctgacccccaggccttggggcagcagaaccggggcccaaccccatttaaccagaaccagctgcaccagctcagagctcagatcatggcctacaagatgctggccagggggcagcccctccccgacaacctgcagatggcggtgcaggggcaagcggccgatgcccgggatgcagcagcagatgccaacgctacctccaccctcggtgtccgcaacaggacccggccctggccctggccctggccccggcccgggtcacggcccgggcacctccaaattacacgcaggcctcatggtatgggagggcccaaatgcctcccccaggacctcgggcgtgccccggatgcaggcagctctggagggctccagcctgctgagaccagggatgttgtgcccgagcctcaagttc

SEQ ID NO: 75711 - DNA, 1371 bp, Homo Sapiens
tggctagtacgaggctgggtggcgaattcggcacgaggcgtcttcggggccccagatgtcttccgggccaggaggtgccccgctggatggtgctgacccccaggccttggggcagcagaaccggggcccaaccccatttaaccagaaccagctgcaccagctcagagctcagatcatggcctacaagatgctggccagggggcagcccctccccgaccacctgcagatggcggtgcagggcaagcggccgatgcccgggatgcagcagcagatgccaacgctacctccaccctcggtgtccgcaacaggacccggccctggccctggccctggccccggcccgggtcccggcccggcacctccaaattacagcaggcctcatggtatgggagggcccaacatgcctcccccaggaccctcgggcgtgccccccgggatgccaggccagcctcctggagggcctcccaagccctggcctgaaggacccatggcgaatgctgctgcccccacgagcacccctcagaagctgattcccccgcagccaacgggccgcccttcccccgcgccccctgccgtcccacccgccgcctcgcccgtgatgccaccgcagacccagtcccccgggcagccggcccagcccgcgcccatggtgccactgcaccagaagcagagccgcatcacccccatccagaagccgcggggcctcgaccctgtggagatcctgcaggagcgcgagtacaggctgcaggctcgcatcgcacaccgaattcaggaacttgaaaaccttcccgggtccctggccggggatttgcgaaccaaagcgaccattgagctcaaggccctcaggctgctgaacttccagaggcagctgcgccaggaggtggtggtgtgcatgcggagggacacagcgctggagacagccctcaatgctaaggcctacaagcgcagcaagcgccagtccctgcgcgaggcccgcatcactgagaagctggagaagcagcagaagatcgagcaggagcgcaagcgccggcagaagcaccaggaatacctcaatagcattctccagcatgccaaggatttcaaggaatatcacagatccgtcacaggcaaaatccagaagctgaccaaggcagtggccacgtaccatgccaacacggagcgggagcagaagaaagagaacgagcggatcgagaaggagcgcatgcggaggctcatggctgaagatgaggaggggtaccgcaagctcatcgaccagaagaaggacaagcgcctggcctacctcttgcagcagacagacgagtacgtggctaacctcacggagctggtgcggcagcacaaggctgcccaggtcgccaaggagaaaaagaagaa

SEQ ID NO: 75712 - DNA, 729 bp, Homo Sapiens
ccaacaccaacagtaaagcaggaatcaaaggatgtggaagaaaatgttggcctcattgtgtacaatggtgcaatggtagatgtaggaagcctcttgcaaaaattggaaaagagcgaaaaagtaagagctgaggtagaacagaagctgcagttactagaagaaaaaacagatgaagatgaaaaaaccatattaaatttggagaattccaacaaaagcctctctggtgaactcagagaagttaaaaaggaccttagtcagttacaagaaaacttaaagatttcggaaaacatgaatttacaatttgaaaaccaaatgaataagacaatcagaaacttatctacggtaatggatgaaatccacactgttctcaagaaggataatgtaaagaatgaagacaaagatcaaaaatccaaggagaatggtgccagtgtatgataaaatccatgtagtgatgaggaatggtgttaaataatgtaatatataaaaatcatgatataagaatgtttgaaggtgatgcatgtttgattttagtagtataaatgtattttagttcaaatgatgtataaagttttatgaatgtgagtttctgcttttgaaaattgcttgtaattcctagccttcaaattattaaacactccttgagtgaaataattttgcattgcaaagtgttttaggatgaactttgttatagttttaactccaataaagttcatcagtttaattgactgt

SEQ ID NO: 75713 - DNA, 1043 bp, Homo Sapiens
  misc_feature (82)..(116): n is a, c, g, or t
  misc_feature (513)..(575): n is a, c, g, or t
  misc_feature (626)..(660): n is a, c, g, or t
  misc_feature (707)..(960): n is a, c, g, or t
gatgtatagatcactatagggcgctacgccggttacagcgaacgacgagcgcagcgaagtcagtgagcgaggaagcggccgnnnnnnnnnnnnnnnnnnnnnnnnnnnnnnnnnnncagtcgacggtaccggacatatgcccgggaattcggccattacggccggggatcaaaaatccaaggagaatggtccagtgtatgataaaatccatgtagtgatgaggaatggtgttaaataatgtaatatataaaaatcatgatataagaatgtttgaaggtgatgcatgtttgattttagtagtataaatgtattttagttcaaatgatgtataaagttttatgaatgtgagtttctgcttttgaaaattgcttgtaattcctagccttcaaattattaaacactccttgagtgaaataattttgcattgcaaagtgttttaggatgaacttggttatagttttaactccaataaagttcatcagtttaattgactgtagtatttaattaccaaannnnnnnnnnnnnnnnnnnnnnnnnnnnnnnnnnnnnnnnnnnnnnnnnnnnnnnnnnnnnnngttcatctgttaaaatttcagtcaaaatcataaaatagcatgatgcttaannnnnnnnnnnnnnnnnnnnnnnnnnnnnnnnnnnactcatcgacaaaaaatcccctcttgatcagtctctaaaagcattcnnnnnnnnnnnnnnnnnnnnnnnnnnnnnnnnnnnnnnnnnnnnnnnnnnnnnnnnnnnnnnnnnnnnnnnnnnnnnnnnnnnnnnnnnnnnnnnnnnnnnnnnnnnnnnnnnnnnnnnnnnnnnnnnnnnnnnnnnnnnnnnnnnnnnnnnnnnnnnnnnnnnnnnnnnnnnnnnnnnnnnnnnnnnnnnnnnnnnnnnnnnnnnnnnnnnnnnnnnnnnnnnnnnnnnnnnnnnnnnnnnnnnnnnnnnnnngtaactccagctggggacaagatgaaatccatctcgaagaaaaaacacaaataaacaactttcgccctcgccgaaaatttaac

SEQ ID NO: 75714 - DNA, 680 bp, Homo Sapiens
  misc_feature (109)..(248): n is a, c, g, or t
catcacaaaaatttaaatcaaatcacactaagacagcgtccccatccacataaaatgaatgttgccaaaagcaaaaacagaatttttaaaacgcaatcacaagtgtaannnnnnnnnnnnnnnnnnnnnnnnnnnnnnnnnnnnnnnnnnnnnnnnnnnnnnnnnnnnnnnnnnnnnnnnnnnnnnnnnnnnnnnnnnnnnnnnnnnnnnnnnnnnnnnnnnnnnnnnnnnnnnnnnnnnnnnnnnnnaaagtacatggatgtattatgctccctgattacaaatgacatagaagagctatagtggtccaaacaatacggtattgacattaacacaaaaatacagaacaagacacaacgagggaaccaaataccaaacccaaattcatatatgatggacacatttttaacaaatatacccaggggatgggagaccccgggctgccttcggttggggctgcagaagtgtcctggggggacctgcagccacctctcacctgggctctggatggtttctactccatgaggatttccagagtttcccctcagccaccctcagagtcaggggggcttccatggggctacaaccatctgtcccagtctttcctgtctctatgacacaccgtgtgacctgtgtacactgcgagatgtaggtgcgtgcattgacaccgtacagttaag

SEQ ID NO: 75715 - DNA, 1609 bp, Homo Sapiens
  misc_feature (383)..(392): n is a, c, g, or t
  misc_feature (1056)..(1201): n is a, c, g, or t
  misc_feature (1215)..(1321): n is a, c, g, or t
tttttttaaagaaaaaatactttattgtaatttattgaacctttaatatataatatggcaatttttctgggatttaactctaggacatgattgctgctggtatttagcaaaaggctcgggttcacacctagcgctaataaaatgcttttctgaataaaaacatattatcaaacaaaatgaattcaaatatattctttaaaaaattattttaaagtttgttctattcagtctaacacaataaagggagataccatggtttaacgtaattagctgattttatacactgcatatctttaagtccacttaataataagtatattattaagtgatagagaacactcaatatagcgatttttacagaactaggaaataaatttctttcnnnnnnnnnngagacagagtcttgaggaaatacatttctaagaaggatttttacagacactcatctttcatacccaaccacagggtctaactctaaagaggataaaaccaattactttcgtcccaagagctcatgactaatgacagcgtaaatctatgctatcaaaacctgcgtctctcatctgttacgagtattcaggcaggattcaaatattctcaaagaaagaaacacagtgcatgctgtgatcgcctgctcagcaacaacaagcactgcatcccaaactatctcctcccaggaattaaatgaggccagttgtgtacactggcatttcctccactgtggtactgcagaaggtctcagtgtcacaaagaatccttttgtcttctttaatatttatggtcacagctgtcttcccaagttgaccccgactgccagttcaacaagtcagtagcagtcaaaatatggtttgtcctttatctgaattccctcctgataatgttttcttccttctgtcgctaccctctttcaaaattattgtaaaacactgattctttcaaggcgccaattcttccttcttcaccagaatttgaaatagatctgtcatgaacttcttggtaacttccaacatattaatattgaggcagaaagcaacacaatctttaaaaagagccatnnnnnnnnnnnnnnnnnnnnnnnnnnnnnnnnnnnnnnnnnnnnnnnnnnnnnnnnnnnnnnnnnnnnnnnnnnnnnnnnnnnnnnnnnnnnnnnnnnnnnnnnnnnnnnnnnnnnnnnnnnnnnnnnnnnnnnnnnnnnnnnnnncatggtggcacatnnnnnnnnnnnnnnnnnnnnnnnnnnnnnnnnnnnnnnnnnnnnnnnnnnnnnnnnnnnnnnnnnnnnnnnnnnnnnnnnnnnnnnnnnnnnnnnnnnnnnnnnnnntgatgaagtgagactcgtgtgggggcgggggaagacagaggcctggctgcagaaggacgccctctggaagggggactggaagccgaatcccctgacaagcgtcgcggtcctgtctttccgctcgagcttcgttctcccttcaccacccactccgcgcccccacgcaccgatccaccgcggctttatgcctcgtcaccttggcaacagcagcgggctcaggcagtgtcccaccagtttcttgcacccgccagcagcactgacctgcagagtcacgcctcgccatcaacg

SEQ ID NO: 75716 - DNA, 733 bp, Homo Sapiens
cgacactgagcagtggaaaggggctatatgtgtatgaatagaccacattgaaggagcacaatgccctcctgtgttgatgccacttccccagggtggagacagtggaaaagaaccgaggacaggaaaggattgggtaggtgaaggggtcaggggactggtagtcacccaatcttggagaggtgcaaaaagcactgggggctacccgttagctgcatctgccctggctgtttgcccgttcatgtcacaaactgccactactatgtacctgcagtggggttgcagagatgggggagactcaagtcttactccccaggagctcccagggcccaaggaggagaatgctgcctcctttcagtctggtctacacccactttctggtagcctctctgcttcctgtaattctggctgtttttccagactcagctcaaatagtgcccctccttaagcccatccctcgcccccagcctgaggtgatctttccctcctctgaactattagagcagttactgtctgttcagttcgtttggcaggcacacacagtggcataaattctattgttttgaactctgatttaaaattaaattgcagctgggcgtggtggctcatgcttgtaatcccaacacttagggagtcaggagaatcacttgagctcaggagttctagaccaatctgggcaacagagagaccccatctcttttaaataaaaagttaaattgcttaatttcccccgtaa

SEQ ID NO: 75717 - DNA, 1589 bp, Homo Sapiens
agagagtcacggcggatcttatgtctacgatgtgacgatccgtggagaaagtagcagatgggcagattttcatttggggagaatgagggagaaaagaacgggcattccgagccaagagcactgcatgagcaaggagttgggaggttgcttacttgttgaacatatttgttgcgtatttgcatatttgctaaacaggtagtgttaggagctaatccatgaaaggttttcgtaacaccccagggcctgtaaggtttggtgtttccctttcaagatgccactttcagactttattctggctctgaaggacaatccctactttggggctggatttgggctggtgggtgtgggcacagccctggccctggcccggaagggtgtccaactgggcctggtggcattccggcgccattacatgatcacactggaagtccctgctcgagacaggagctatgcctggttgcttagctggctcacccgccacagtacccgtactcagcacctcagtgtcgagacttcgtaccttcagcatgagagtggccgcatttccactaagtttgaatttgtccccagccctggaaaccattttatctggtatcgggggaaatggattcgggtagaacgaagtcgagagatgcagatgatagacttgcagacggggactccttgggaatctgtcaccttcacggccctgggcactgaccgaaaggttttcttcaacatcctggaggaagctcgagagctagccttgcagcaggaggaagggaagaccgtgatgtacacagctgtgggctctgaatggcgtccctttggctatccacgccgccggcgaccactgaattctgtggttctacaacagggtctggctgaccgaattgtcagagacgtccaggaattcatcgataaccccaagtggtacactgacagaggcattccttacagacgtggctacctgctttatgggccccctggttgcggaaagagcagttttatcacagccctggctggggaactggagcacagcatctgcctgctgagcctcacggactccagcctctctgatgaccgactcaaccacctgctgagcgtggccccgcagcagagcctggtactcctggaggatgtggatgctgcttttctcagtcgagacttggctgtggagaacccagtaaagtaccaaggcctaggtcgcctcaccttcagtggactgctcaatgccttggatggtgtggcttccaccgaggcccgcatcgtgttcatgaccaccaaccacgttgacaggctggaccctgccctgatacgcccggggcgagtggacctgaaggagtacgtgggctactgctcacactggcagctgacccagatgttccagaggttctatccagggcaggcaccttccttagctgagaactttgcagaacatgtccttcgagctacaaaccagatcagtcctgcccaggtgcagggctacttcatgctgtataaaaatgaccctgtaggggcaattcacaatgctgagtctctgaggaggtgatcaggctgggctcagctcagctctcctcctctagctcaataaacatttgtcccccttt

SEQ ID NO: 75718 - DNA, 870 bp, Homo Sapiens
gcggggacttcgcaaacactggcaggctcaccctcggtcggcattttggcaagaagcgcctccccaaggccccccgcacctgcccagggtgccccccagagggagcaggcctcccaacagctggagagagcccggcccccagaacaccttccctagaaaaccataaaaacatagatcatttgtcttcaaattcccacggcaaattccgcatttatgggcaaaatgatataaaaatatgaacctaacagaacctgtacaaaaccctaccccccatctttgttgttggtcgtggtggtctgttttgttttttgcttgtggttttggtaaaaattcctgccgtggaagaggcaacctgtacctggggctcagcccttgttagctgccctcgggacagagcgggttctcgggaagggaggggactcgaggtcagccatccctgcccgggagaccccaggatggatctgcgttgagaaccccacacagatcccccacaacccgggctctgccgagaggaaaccattgtaaaagaaaagtcatcctgaatcctgaaagacccctggggcgtgcaggtaagtcccactccactccacaaaaactgcttggctgcaaagaaggcaaggtggacacaaacacaaccggcgccagccccggcccggacaggcgcagcggggccgggctgaacacaacttctgctggtgtctcaagtctgtagcaccaaatgcaaaagggagaaaagtccaaatcaaggtcaaaggcacttgcgttgctgtcgggtggtgacggtcttctggtcaccctggcaccctcgctctgtccaccgcgtggccggccctccctcccccacactccgtctcctctctgagactcccg

SEQ ID NO: 75719 - DNA, 647 bp, Homo Sapiens
cacccagccctcagacgggggcgagtttcagtgcgtcgctggagatgagtgtgcctacttcactgtcaccatcacagacgtctcctcgtggatcgtgtatcccagcggcaaggtgtatgtggcacccgtgcgcctggagcgtgtggtgctgacctgtgagctataccggccctgggcagaggtgcgctggaccaaggatggagaggaggtggtggagagccccgcgctgctcctgcagaaggaagacactgtccgccgcctggtgctgcccgctgtccagctcgaggactccggcgagtacttgtgtgaaattgacgatgagtcggcctccttcactgtcaccgtcacagagtcttaccaaagtcaggacagttcaaataacaatccggagttatgcgtcctcttgaaaaagccgaagacccggcggctctggtcccgcttccccccatggcgacgaacagctggcactgagtagcagctgcccccatagtttggggcccacattcctctgtcccacctccctgccattgctttttgcctctccccagactgcttcagccgctaacctaacctggcccctgtgggcatttgagtttgcgacccctgtgttaaaccaataaacatgcaaataaatgtacagtgacaaa

SEQ ID NO: 75720 - DNA, 551 bp, Homo Sapiens
ctctcctggcttctagagaaaatccagaacttgcgtgcagcttctcctctcagcacactttgggctgggatggcagtggggcataatggagccctgggcgatcgctgaatttcttccctctgcttcctggacacagaggaggtctaacgaccagagtattgccctgccaccactatctctagtctccctagcttggtgccttctcctgcaggagtcagagcagccacattgcttgccttcataccctggaggtggggaagttatccctcttccggtgctttcccatcctgggccactgtatccaggacatcactcccatgccagccctccctggcagcccatgttctcctcttttctcaccccctgactttccctgagaagaatcatctctgccaggtcaactggagtccctggtgactccattctgaggtgtcacaagcaatgaagctatgcaaacaataggagggtgtgacaggggaaccgtagactttatatatgtaattactgttattataatactattgttatattaaatgtatttactcacaaaa

SEQ ID NO: 75721 - DNA, 1344 bp, Homo Sapiens
  misc_feature (78)..(78): n is a, c, g, or t
  misc_feature (104)..(104): n is a, c, g, or t
  misc_feature (117)..(117): n is a, c, g, or t
  misc_feature (148)..(148): n is a, c, g, or t
  misc_feature (178)..(178): n is a, c, g, or t
  misc_feature (195)..(195): n is a, c, g, or t
  misc_feature (210)..(210): n is a, c, g, or t
  misc_feature (257)..(257): n is a, c, g, or t
  misc_feature (1122)..(1168): n is a, c, g, or t
  misc_feature (1254)..(1302): n is a, c, g, or t
ggagtgctatctagcaccccgcttaccttatctccgctgatgtgttggattgagcgatacattcacacaggaacagtntgactgatacgattatacgactcatntagggattgcctncgagccagaatcggcacgaggagggacaccnttgggcaggactcggggggctcaaaggctntgcacgctgtggggccntgtgccttgtctccntgtgttcctttccccccgaagtgatgaaacagtctcacataccaaangctcatcaacagagcagagctgatgccatgagtgaggctgggcgggtgggccctccagagctttgcagggaaccctggaaccctaggaacaaggagcctttgttccaacagagcagagaaggaggttctctatgttcagaccactggagaggatagagaggtaaaaggtggcgacagtttcccttaggggtctgcctggcaggagccacagctcaggagagttgtgagggatgggacggaggctggcgaccaggcgaggcctaggccaggctcgggagacttttctgtgctcctttctacacatgccttaaaccttccttcctgtggggtgcctggaccccttccccatctctggcagctcagagggtctctgctgctctcccctgggaaatcccctcatcctgccctctggctgcctcccagctgggcttgttctctgagggaggttccggagactcatggacttggggctctgcctgtaggaaggaggctgggccggagggaccagccaccattgtctctgttcagccaagtgtgcaagtaggctgcccgccaagagggggcctctgctacccgctgctgcctgccggctgacacactgcctccccagccttcctgctaggccaccctcctcccttcccatgcttgtaaccagctctggggcttgcacctccacaaagtaaggttggcccttggaggccatgtttgggtctccggccagggcctagggctaggccatgcacccaatgggtgcacaataaataacaggtcaacaaagagggaggtgtgtcagtgtgtgaggaagggaggtcaggcagctaggaccacctgcagtgtggcaggcttcatccctctttgctccaannnnnnnnnnnnnnnnnnnnnnnnnnnnnnnnnnnnnnnnnnnnnnntcatgcatatgcaggagtcacacggtcataggccatcaaagctggaggagacctcagaatcattcattcacctacttgctcatttnnnnnnnnnnnnnnnnnnnnnnnnnnnnnnnnnnnnnnnnnnnnnnnnntaccaggggattcacaaatgaattaaacatgtccctgactcc

SEQ ID NO: 75722 - DNA, 424 bp, Homo Sapiens
  misc_feature (286)..(300): n is a, c, g, or t
acaaagtttggagcatggaaacaaatgaaaattgaacctgcttattttttaggatggtgtattgatggccccaacagaactttctaaaatcatgcgataaacatatatgatagtagttgtaaaatgcttcttgttttgaaaatgttgagtaattatcgatagaaattttgctgtccattcatacattccttcaattaactttcattgttaaaaaattgggggattgatgtttggtttggtttgtggggagtgaagaggactactggagggaccttgtttgcttgcnnnnnnnnnnnnnnnaatttatcatcaagtctaggaaaggagtaagttgccgacaattgtcacttttccctcctaagaaagtaacatgttaagattcccacctaccagcctgggtgacagtgagactcccgtctcaaaa

SEQ ID NO: 75723 - DNA, 599 bp, Homo Sapiens
  misc_feature (599)..(599): n is a, c, g, or t
gcagtgacaccgaggtgctcctagccgtctgcaccagagacttcgccgttcgaggctccatccagcaagtcacccacgagcatgagcggcaggactcagccatccacctgcgcgtgagcagactctatcggcagaaaagcagggtcttcgagccggtgcccgagggtgacggccactggcaggggcgcgtcaggacgctgctggagtgtggcgtgcggccggggcatggcgacttcctcttcactggccacatgcacttcggggaggcgcggctcggctgtgccccacgcttcaaggacttccagaggatgtacagggatgcccaggagagggggctgaacccttgtgaggttggcacggactgactccgtgggccgctgcccttcctctcctgatgagtcacaggctgcggtgggcgctgcggtcctggtggggccgtgcggtgagggccgcgcgctgggagccgcgtgccctgggcccaggcctgaccctggtaccgaagctgtggacgttctcgccacactcaaccccatgagcttccagccaaggatgccctggccgattggaaatgctgtaaaatgcaaactaagttattatan

SEQ ID NO: 75724 - DNA, 1186 bp, Homo Sapiens
taggctagtacgaggcctgggtggtgaattcggcacgaggcaactacaagagccaaatactgatcgacaacttattgaaacttctccagttctacaaaaacttactgagtttgaagaagcaattggagtaatttttactcatgttcgacttctggcaagggcattcacattgagaactgtgggatttaaccatctgaccctaggccacaatcagagaatggaattcctaggtgactccataatgcaactggtagccacagagtacttattcattcatttcccagatcatcatgaaggacacttaactttgttgcgaagctctttggtgaataatagaactcaggccaaggtagcggaggagctgggcatgcaggagtacgccataaccaacgacaagaccaagaggcctgtggcgcttcgcaccaagaccttggcggaccttttggaatcatttattgcagcgctgtacattgataaggatttggaatatgttcatactttcatgaatgtctgcttctttccacgattgaaagagttcattttgaatcaggattggaatgaccccaaatcccagcttcagcagtgttgcttgacacttaggacagaaggaaaagagccagacattcctctgtacaagactctgcagacagtgggcccatcccatgcccgaacctacactgtggctgtttatttcaagggagaaagaataggctgtgggaaaggaccaagtattcagcaagcggaaatgggagcagcaatggatgcgcttgaaaaatataattttccccagatggcccatcagaagcggttcatcgaacggaagtacagacaagagttaaaagaaatgaggtgggaaagagagcatcaagagagagagccagatgagactgaagacatcaagaaataaaggagggcatgcaagtgtggagtatttacttgctcagtaactgtgactgttgtctattgagacctagcctagttttcctgcagacaatgaacgaagtgtgctcattgaaataaaatacagagtcaaatcgctattgttgttttaatgatctgtttttagctggatggtctttattacaaagtattagatttttcttctatttaacggaaaacttgactttggtgaatgtgcattacttccttttattttgctctttaaataataaaattcatgaagcat

SEQ ID NO: 75725 - DNA, 1275 bp, Homo Sapiens
  misc_feature (169)..(189): n is a, c, g, or t
  misc_feature (409)..(417): n is a, c, g, or t
  misc_feature (1251)..(1251): n is a, c, g, or t
cgatacaagacgccgcgggccgtaaataatgtgagttttgcgcatttgtggcgtcgcgtctacggacggcctgtcgaggagtcatcgagtgtgtgtttaatcatgcagagctccccgttgtagaggttttgatttgcgtagcgggggttctcaccgccacggaagctcnnnnnnnnnnnnnnnnnnnnntgccatccggactcttgtgttgtccccccccaaggtgaaatcttcttgggggggtttggccaaaaccttttggggggaggtttccgctttatgtcccccgcctttttagagccaggatggcgcctcccagggtctttttgtggggtacttggatcttgccttgggtctgtcaaggcgtttccctccttgggacctttcctcccgcgagggaaccccgcgnnnnnnnnnccacaaggttttccgggaacttgggggtgggtccatattccgcccggcggatttttcaagcacgtttttgccactgaatttggagggcgcaatccgcgaacgccttcaatcccccctgctccggccccttccccttatctggcgggggcggacaactggtaggattgcggtggagccacaagtccctgccggtcccgggtatccagtctgggcaggaaagcagcggcccgtgagccagctctccaggggggctgacggacatcttcctggggaccagcatctcctccagctccagctgggcccccttgcgagggagagaggccgccctacctgggccggccggcgatgtgctgtaaaggggcccgcagacccggctgcccagcactccagagacgggccaaggcgggcggccgcctgcccaaggaacggccctcaacagctgggaagtcaggcgccccaggagcatggtctgtgggcggcggccacaggtcccaggggagctcgacgcggctcaaattgaccgttctgcggccgccctcgggcacttccggtccgtccccaagtcggccccgatcggcagcggccacccggcggttcctacgcacagcgcccgctggcgtcctcgcggcccccgcttctgcattggctcaggccccgccgggcccgaaaggcgacggtttccggttagtggaatcacggtcccagtcctcgcgcggttcctcagctccgcctggtcccttacggaggcaaaaaactacatttcccacaatcccaggggagtgcgggccctggatatacccgcaggtccaaaaatcgtttccggaccacccaggnggccggattcccaacgggccgacc

SEQ ID NO: 75726 - DNA, 588 bp, Homo Sapiens
  misc_feature (195)..(195): n is a, c, g, or t
gccggcctccccgttctgggacctttcggtgcgtccgagcgcaatttcggccgcgtcgggggcttgggagcctcggggcgcgagctgtgttggaagcaaagtcctccttgtgggttggggtggctgagggagaagggaagcgagggtcgcggcgggaccagacgccccagtcccggcccgcccgcgactactganaggcgctgccgcctgacctgaacgggcacttgtgttccagctcccctgggacctgtggccgccgcccacagaccatgctcctggggcgcccgacttcccagctgttgagggccgttccttgggcaggtaggaagccccgcgggggcggatgggaggatgcacacctggttaggagtgcgggtctcagcagctccgctggggcagggccggtggccacacacacactctttcccctctaagcttccgatgctcacagagggaacctcaggggttcaggccaggaatgaggtgcgggggatcctcgctgggacgaacctgctgctcctcaacccgacgggcctgtgtggtctcgcgagcggtgaccgtggcgtctggttttctgcaggcggccgc

SEQ ID NO: 75727 - DNA, 1302 bp, Homo Sapiens
  misc_feature (786)..(847): n is a, c, g, or t
  misc_feature (867)..(875): n is a, c, g, or t
  misc_feature (1093)..(1103): n is a, c, g, or t
ataggctaggtagcgaggcctgggtggtgaattcggcacgaggtgcccgagggcggccgcagaacggtcaatttgagccgcgtcgagctcccctgggacctgtggccgccgcccacagaccatgctcctggggcgcctgacttcccagctgttgagggccgttccttgggcaggcggccgcccgccttggcccgtctctggagtgctgggcagccgggtctgcgggcccctttacagcacatcgccggccggcccaggtagggcggcctctctccctcgcaagggggcccagctggagctggaggagatgctggtccccaggaagatgtccgtcagccccctggagagctggctcacggcccgctgcttcctgcccagactggataccgggaccgcagggactgtggctccaccgcaatcctaccagtgtccgcccagccagataggggaaggggccgagcagggggatgaaggcgtcgcggatgcgcctcaaattcagtgcaaaaacgtgctgaagatccgccggcggaagatgaaccaccacaagtaccggaagctggtgaagaagacgcggttcctgcggaggaaggtccaggagggacgcctgagacgcaagcagatcaagttcgagaaagacctgaggcgcatctggctgaaggcggggctaaaggaagcccccgaaggctggcagacccccaagatctacctgcggggcaaatgagtctggcgccgcccttcccgcccgttgctgctgtgatccgtagtaataaattctcagaggactcnnnnnnnnnnnnnnnnnnnnnnnnnnnnnnnnnnnnnnnnnnnnnnnnnnnnnnnnnnnnnncacaaaaagattccccacannnnnnnnnccacaaagattagggcgggaaccgccggggttttgtgggaaacacgagtgggcccccaattattggtagagccccgggttatttaatagagatagatagccgacacggtggcgcagtggtgtttaaaaccaccgtgtcgtggtcttggtgaaaaaagcgtgtctagatgtaggaacatcttgtcgtgggtaaagagacaaccccttaactgtatgtcnnnnnnnnnnnagaacaatagtggtggacgaaagaattttccttcaaggagatatttatttggacggctctgcaagggaataatttattgaaaatttgtagagggactatcatggggtttaaaaacgatgaggcgtactattatatatgcggtatgtaaaaaatttgtctaatcgggaatattgttattgaggaacattttttagcggac

SEQ ID NO: 75728 - DNA, 844 bp, Homo Sapiens
gaactatacggctaggtgcgaggcctgggtgttgaattcggcacgagggtcaatttgagccgcgtcgaggtcgggcttgggaagggtcagcgggaggcctgagggcgccgggcgctgcggcaggcgggcccggggtccagccgagagggtccgggcgccaggcaacgcgattcgcgcgggggtgaacccggggagggggccggcctccccgttctgggacctttcggcggccgcccgccttggcccgtctctggagtgctgggcagccgggtctgcgggcccctttacagcacatcgccggccggcccaggtagggcggcctctctccctcgcaagggggcccagctggagctggaggagatgctggtccccaggaagatgtccgtcagccccctggagagctggctcacggcccgctgcttcctgcccagactggataccgggaccgcagggactgtggctccaccgcaatcctaccagtgtccgcccagccagataggggaaggggccgagcagggggatgaaggcgtcgcggatgcgcctcaaattcagtgcaaaaacgtgctgaagatccgccggcggaagatgaaccaccacaagtaccggaagctggtgaagaagacgcggttcctgcggaggaaggtccaggagggacgcctgagacgcaagcagatcaagttcgagaaagacctgaggcgcatctggctgaaggcggggctaaaggaagcccccgaaggctggcagacccccaagatctacctgcggggcaaatgagtctggcgccgcccttcccgcccgttgctgctgtgaaccgtagtaataaattctcagaggactcagaaaa

SEQ ID NO: 75729 - DNA, 262 bp, Homo Sapiens
aacctacaactagctctcagttcaggcactgtctaaagccccaggctgggttaggtggtttaggataccaactccccctcaacattttaccttaatccaacagtacagtaattagccgaaacttgcctggtttttcctactagactgtaagccctctagggacagggacagtgtcttattcatctctgtgttcttagtgcagagcctggcccgctgttggtgtttaataaagtgtgttgatctgaaatgcccccgcccaccc

SEQ ID NO: 75730 - DNA, 931 bp, Homo Sapiens
cggtccggaattcccgggatatcgtcgacccacgcgtccggaaatgctggggtgcagcttcaagcttaggaccacccaccatgcctatccaggtgctgaagggcctgaccatcactcattaagaacagaggaggctgcctgttactcctggtgttgcatccctccagacactctgctgtttcctgcctaggcgtggctgcagccatggctaggaaagcgctgccacccacccacctgggccagagctggttctgctcctgctgcagggacactgagctggctatctcggcgcttcgggcaagaactgcaacaggctctcctgggtcctgcaggtgtacagccgggcccctgccttgtgcctcagctctcgagagctgctgctgccgggtgacctgatccaacctgataaggtgccatcttcagctaccactgcaaggccctgagggcaacagcagcacggcactgcccacccggctgctgatggcctggtgccagctgggagtcctcccggcacttcgaggccactgagccacccttccagccccagcccaccatggacaggggtatccagcttcctcctcaacctcgtcctctgcccctgagccagtgacgcccaaggacatgcctgttacccaggtcctgtaccagcactagctggtcaagggcatgacagtgctggaggccgtcttggagatccaggccatcactggcaacaggctgctctccatgggtgccagggcccgccaggccaccaggctcatgctggggacccaacccagtgcacaaggaacttggctgctgaaccacacacccaggaagaaagggggataagtggggctaacaaggggctttcctgcagggctaagggaaggaacccacccccgccttccctatttgggaccaaggccttatggggaaggaacttgtccca

SEQ ID NO: 75731 - DNA, 1061 bp, Homo Sapiens
cacttacggctaggtacgaggctgggtgtgtgaattcggcacgagggttggggtgcagcttcaagcttaggaccacccaccatgcctatccaggtgctgaagggcctgaccatcactcattaagaacagaggaggctgcctgttactcctggtgttgcatccctccagacactctgctgtttcctgcctaggcgtggctgcagccatggctaggaaagcgctgccacccacccacctgggccagagctggttctgctcctgctgcagggacactgagctggctatctcggcgcttcgggcaagaactgcaacaggctctcctgggtcctgcaggtgtacagccgggcccctgccttgtgcctcagctctcgagagctgctgctgccgggtgacctgatccaacctgataaggtgccatcttcagctaccactgcaaggccctgagggcaacagcagcacggcactgcccacccggctgctgatggcctggtgccagctgggagtcctcccggcacttcgaggccactgagccacccttccagccccagcccaccatggacaggggtatccagcttcctcctcaacctcgtcctctgcccctgagccagtgacgcccaaggacatgcctgttacccaggtcctgtaccagcactagctggtcaagggcatgacagtgctggaggccgtcttggagatccaggccatcactggcagcaggctgctctccatggtgccagggccgcaggcaccaggctcatgctgggacccaaccagtgcacaagacttggctggctggcaccaacccaggagcaggtggttagtggctaccaggggctcctgccggctagggaggggcaccccggttcctatgtgacggcttggggggctggccttcgccggggacgtgctgtcccagggaccgccgcgggtccggcgaccgcactggggcgccggtgcctcaagcgcgtgggggactcgtccccccggtgggcgcccccctttggggaggccccctggtctgggtgtcctgcgccttcggctggtctcgttctctgtggttc

SEQ ID NO: 75732 - DNA, 1676 bp, Homo Sapiens
  misc_feature (1416)..(1529): n is a, c, g, or t
taacgcgctaggtacgaggcctggtggtcgaatcggcacgaggagaaatgctggggtgcagcttcaagcttaggaccacccaccatgcctatccaggtgctgaagggcctgaccatcactcattaagaacagaggaggctgcctgttactcctggtgttgcatccctccagacactctgctgtttcctgcctaggcgtggctgcagccatggctaggaaagcgctgccacccacccacctgggccagagctggttctgctcctgctgcagggacactgagctggctatctcggcgcttcgggcaagaactgcaacaggctctcctgggtcctgcaggtgtacagccgggcccctgccttgtgcctcagctctcgagagctgctgctgccgggtgacctgatccaacctgataaggtgccatcttcagctaccactgcaaggccctgagggcaacagcagcacggcactgcccacccggctgctgatggcctggtgccagctgggagtcctcccggcacttcgaggccactgagccacccttccagccccagcccaccatggacaggggtatccagcttcctcctcaacctcgtcctctgcccctgagccagtgacgcccaaggacatgcctgttacccaggtcctgtaccagcactagctggtcaagggcatgacagtgctggaggccgtcttggagatccaggccatcactggcagcaggctgctctccatggtgccagggcccgccaggccaccaggctcatgctgggacccaacccagtgcacaaggacttggctgctgagccacacacccaggagaaggtggataagtgggctaccaagggcttcctgcaggctaggggaggagccacccccgcttccctattgtgaccaggcctatggggaggagctgtccatacgccaccgtgagacctgggcctggctctcaaggacagacaccgcctggcctggtgctccaggggtgaagcaggccagaatcctgggggagctgctcctggtttgagctgcattcaggaagtgcgggacatggtaggggaggcaaaaagccttgggcactaccctccctgtggagctgttcggtgtccgtcgagctagccacaccctgacaccatgttcaagggtaccggaagagaagggtgtctgcccccaacctcccctgtgggtgtcactggccagatgtcatgagggaagcaggccttgtgagtggacactgaccatgagtccctggggggagtgatcccccaggcatcgtgtgccatgttgcacttctgcccaggcagcagggtgggtgggtaccatgggtgcccacccctccaccacatggggccccaaagcactgcaggccaagcagggcaaccccacacccttgacataaaagcatcttgaagcttttannnnnnnnnnnnnnnnnnnnnnnnnnnnnnnnnnnnnnnnnnnnnnnnnnnnnnnnnnnnnnnnnnnnnnnnnnnnnnnnnnnnnnnnnnnnnnnnnnnnnnnnnnnnnnnnnnccctgggggggcccccccgcccctcaaaaaagttttcaaaacctttcgtttgggggcggcggcccccgaggggaaagggaacaggggccaatagtgggttccccaagaaaaccggggccaagaaaaagggggttggaatttcccccc

SEQ ID NO: 75733 - DNA, 1275 bp, Homo Sapiens
tgcggccgcgtgcgcaggcgtacttcctggcttgggaaccacatcgcccgaccgtgctctttatttttcggtggagcagctctgctttctcaggtctctacttacttatataagatggcatcaagaagaaggacctgaccactggcccctgactacatggtctttggaacccgtggcattggaagatgtcagagacatggcacatggatgtgatcttcaaaaactgttacagcctcatctcattggattggtctacacatcaaggtgctggaagtgtcgcatgcccagagatgatgtggaagctctatacccctttcccttctgcccaccttgccctgtgcatctcttcctgaatggcttctcctgaattgtatcctttataataaactggtaaataggaaagagataatatcttctacttaatcctggatactatatctgaagtcagagcatccactccaaagcagagaatttctgaaaaacaaaataatgtcatcatatgatgttagaattttttttcaaatgatggttcctaatacttcacattagaagaactcgaatttgatgaccagtttgagaaacaccagtatatccagattacaagaaaaagcgagtcaaaaggatgatcatgaatataacaacttcgaggaaaacatttaaccaaagaccaaagccttttaaacaactgagagtttttataagaaaaagaccccatacagtagtccccacttattcatgggggatacatttcaagacccacagagaaggcctgaaatcactgatgtaccaaaccctaaccaggttcttaggatgagctactaaatgacaaatgggtgggtagtacatagagtgtagatacaccagacaaagaaatgattcacagcccaggcaggacagagcagatcacacaagatttcatcacagtactcagaaaaccacaccatttaaaagttatgaattgtttatttctggaattttccatataatatttttgaccacagtttcccatggataactgaaaccatgggaagtggaactgtggataaggcaggactactgtaactatgacatcaatggtaggaacctgaagcataattctgctgtagtggattttttcaaaagaaactcatgaatgaaaaataatttattagatataagaaaggatgcatttgtatctcaaactttacttattctggaaataaatgaaaagccaacacctattacataccgacaaaaatgaaaaaataaataaatgtaaagccatagttcagtaaa

SEQ ID NO: 75734 - DNA, 602 bp, Homo Sapiens
tctggctttggaaagacctgtgagggaaaccttcacccagcacccatgccccactttgctgaggccagaggaagggaggcctgaggggcagattggttcatgcctggggtggaggctaagcctggacacagtcagggcggggctggccagctgtgcgagaacacaagccacgcctgcgatggtcctgcacccctggtgtccctgcctggccctcctctggtcacttcaaacatgccctcaggcttggggatgcccttcttccattcccagacagcagtgtgagggtgcagggaccaagatgtcaagctggccgtggagtcgagctggccgacggacccctttcacctggttatgagccgacttctttggtgttctggcctctggcctgggaaaagggcaggagcctagaggaggaaaaaggctggtggacagacccagggtggtcttcaagcctggcccagtgagagtgaggcccccgcacgcaagcctcagccactcccaggggcctttgcagcgtctttttaacctcagaaaatttctcaatctatgtgatttgtgtaatactaatgagctttgggcaataaatacgggatttaaagcaa

SEQ ID NO: 75735 - DNA, 2150 bp, Homo Sapiens
  misc_feature (2076)..(2094): n is a, c, g, or t
tagcgctaggtacgaggcctgggctggtgaattcggcacgagggttggagacgtggggcagcagcagtgccatccgccacactcccctgccgcagcagcgccacgtcagcaaggctgtcctcatcgtgcctggcgcaactcggggagccggaactgcgggacagccgggatgaactgctggccagcatgatggcggtgcgtgaagtgccgcctggacagtagcctgcccccctgtgctgacgcctgtggcatgatcgtggcatgatggtcgttagtgcccgtgatccacccctgatggggcctcccctgaaattccagtactgaagatggatgaactgagcctcgatgctgctggccttggcctccccccagcctgcgggtgactggcgcctcggaggcgggcacgtccctcgttccagccactggcagatgccccctgcatgagacccccgcagagatcgtggatggcggcggtcccccaagcacagctggcgggctctgactcggacctggacagcgatgatgagtttgtcccctacgacatgtcgggggacagagagctgaagagcagcaaggctcctgcctacgtccgggactgcgtggaagccctgaccacgtctgaggacatagagcgctgggaggcagccctgcgggcccttgagggcctggtctacaggagccccacagccactcgggaggtgagcgtggagctggccaaggtgcttctgcatctggaggagaagacctgtgtggtgggatttgcagggctgcgccagagagccctggtggccgtcacggtcacagacccggccccggtggccgactatctgacctcacagttctatgccctcaactacagcctccggcagcgcatggacatcctggatgtgctgactctggctgcccaggagctgtctaggcctgggtgcctcgggaggactccccaacctggctccccaagtcccaacaccccgtgcctgccagaggcagccgtctctcagcctggcagtgccgtggcgtctgactggcgggtggtggtggaggagcggatcagaagcaagacccagcggctctccaagggtggcccgaggcagggcccggcaggcagccccagcagattcaactccgtggccggccacttcttcttccccctccttcagcgctttgacaggcctctggtgaccttcgacctcttgggagaagaccagctggttctcggaaggctggcgcacaccttaggggccctgatgtgcctggctgttaacaccacggtggctgtggccatgggcaaggccctgctggaattcgtgtgggcccttcgcttccacatcgatgcctacgtgcgccaagggctgttgtcggccgtctcctccgtcctgctcagcctgcctgctgcgcgcctgctggaggacctgatggacgagctgctggaagcccggtcctggctggcggacgtggctgagaaagacccggacgaggactgcaggacgctggcactgagggccctgctgcttctgcagagactcaagaacaggctcctcccacccgcgtctccctagtccctggaggcctccccaggaccaccctcgccgacagcaaggcaggcggctgagcagcggcctggagcagcagagccaggctttgtagcgaggccaggtcttcggccgcatccggtacggagagtgcagatgcaggaaggcccggcctgccgctatttatagtgcagccagtccgctaaaaatacactgggcctgggcactgcccgccgggacatggcagcctggacgtggggctggggctgtgggcgctgctggcggggttgactcttccagtgagggcagaaccaggctggcaggaggggaggacggtgtacctgctgctcagagcccccaaggctctcctctgagagccaccaagcaggacagagcagctcttgtcccaggtccctcgggctgagcgccgtgtcaccaggagaatagtgctcacagcccaggcagggtgtgtggctcctggatgggctcgtggggcgggatgggacagggcacgggctctcagaaaataaactgctttattggnnnnnnnnnnnnnnnnnnncctagcaggcggccgcaagcttattccctttagtgagggttattttagcttggcac

SEQ ID NO: 75736 - DNA, 1143 bp, Homo Sapiens
  misc_feature (79)..(113): n is a, c, g, or t
  misc_feature (1054)..(1096): n is a, c, g, or t
aatagatagatcactatagggcgctagctccgcgagccgaacgacgagcgcagcgagtagtgagcgaggaagcggccgnnnnnnnnnnnnnnnnnnnnnnnnnnnnnnnnnnncagtcgacggtaccggacatatgcccgggaattcggccattacggccggggagactcctttcagctaaaggggagatctggatggcatctacttcgtatgactattgcagagtgcccatggaagacggggataagcgctgtaagcttctgctggggataggaattctggtgctcctgatcatcgtgattctgggggtgcccttgattatcttcaccatcaaggccaacagcgaggcctgccgggacggccttcgggcagtgatggagtgtcgcaatgtcacccatctcctgcaacaagagctgaccgaggcccagaagggctttcaggatgtggaggcccaggccgccacctgcaaccacactgtgatggccctaatggcttccctggatgcagagaaggcccaaggacaaaagaaagtggaggagcttgagggagagatcactacattaaaccataagcttcaggacgcgtctgcagaggtggagcgactgagaagagaaaaccaggtcttaagcgtgagaatcgcggacaagaagtactaccccagctcccaggactccagctccgctgcggcgccccagctgctgattgtgctgctgggcctcagcgctctgctgcagtgagatcccaggaagctggcacatcttggaaggtccgtcctgctcggcttttcgcttgaacattcccttgatctcatcagttctgagcgggtcatggggcaacacggttagcggggagagcacggggtagccggagaagggcctctggagcaggtctggaggggccatggggcagtcctgggtgtggggacacagtcgggttgacccagggctgtctccctccagagcctccctccggacaatgagtcccccctcttgtctcccaccctgagattgggcatggggtgcggtgtggggggcatgtgctgcctgttgttatnnnnnnnnnnnnnnnnnnnnnnnnnnnnnnnnnnnnnnnnnnnagctccaaaaaataaacacttcctttgagggagagcacaccttaaaa

SEQ ID NO: 75737 - DNA, 1037 bp, Homo Sapiens
  misc_feature (27)..(27): n is a, c, g, or t
  misc_feature (39)..(39): n is a, c, g, or t
  misc_feature (97)..(97): n is a, c, g, or t
  misc_feature (235)..(291): n is a, c, g, or t
  misc_feature (301)..(301): n is a, c, g, or t
  misc_feature (975)..(993): n is a, c, g, or t
ttataggatgtccattgattagggtgnttaagacagtgngaagctacatcacagatcacttgttatgctatgtgatacacgatgcacataacacatntcaggatatttagaatctagacatttctctaataaagtcatttggaaaaggtactacagcttattgacatcagtaaggtagcatcatacccctgttatttctctgctgcatctacagaaggagtaaactggtgagagnnnnnnnnnnnnnnnnnnnnnnnnnnnnnnnnnnnnnnnnnnnnnnnnnnnnnnnnntgacttgtancatgaagatgttaaaatcggttttaaaaggtgatgtaaatagtgattcccttaatgaaaaatacatattttgtattgttctaatgcaacagaaaagccttttaatctctttggttcctgtatattccatgtataagtgtaaatataatcagacaggtttaaaagttgtgcatgtatgtatacagttgcaagtctggacaaatgtatagaataaaccttttatttaagttgtgattacctgctgcatgaaaagtgcatgggggaccctgtgcatctgtgcatttggcaaaatgtcttaacaaatcagatcagatgttcatcctaacatgacagtattccatttctggacatgacgtctgtggtttaagctttgtgaaagaatgtgctttgattcgaagggtcttaaagaatttttttaatcgtcaaccacttttaaacataaagaattcacacaactactttcatgaattttttaatcccattgcaaacattattccaagagtatcccagtattagcaatactggaatataggcacattaccattcatagtaagaattctggtgtttacacaaccaaatttgatgcgatctgctcagtaatataatttgccatttttattagaaatttaatttcttcatgtgatgtcatgaaactgtacatactgcagtgtgaannnnnnnnnnnnnnnnnnnaatcttttagtgtttacttcctgcagtgaatttgaataaatgag

SEQ ID NO: 75738 - DNA, 1949 bp, Homo Sapiens
  misc_feature (1684)..(1715): n is a, c, g, or t
tacggtccaaggtagcgaggcctgggtggcgatcaccactgccctatgactctcttggttataatgccccgcatcatccctttgctggttacccaccaggttatcccatgcaggcctatgtggatcccagcaaccctaatgctggaaaggtgctcctgcccacacccagcatggacccagtgtgttctcctgctccttatgatcatgctcagcccttggtgggacattctacagaacccctttctgcccctccaccagtaccagtggtgccacatgtggcagctcctgtggaagtttccagttcccagtatgtggcccagagtgatggtgtagtacaccaagactccagcgttgctgtcttgccagtgccggcccccggcccagttcagggacagaattatagtgtttgggattcaaaccaacagtctgtcagtgtacagcagcagtactctcctgcacagtctcaagcaaccatatattatcaaggacagacatgtccaacagtctatggtgtgacatcaccttattcacagacaactccaccaattgtacagagttatgcccagccaagtcttcagtatatccaggggcaacagattttcacagctcatccacaaggagtggtggtacagccagccgcagcagtgactacaatagttgcaccagggcagcctcagcccttgcagccatctgaaatggttgtgacaaataatctcttggatctgccgcccccctctcctcccaaaccaaaaaccattgtcttacctcccaactggaagacagctcgagatccagaagggaagatttattactaccatgtgatcacaaggcagactcagtggggatcctcctacttgggaaagcccaggagatgatgccagccttgagcatgaagctgagatggacctgggaaactccaacatatgatgaaaaccccatgaaggcctcgaaaaagcccaagacagcagaagcagacacctccagtgaactagcaaagaaaagcaaagaagtattcagaaaagagatgtcccagttcatcgtccagtgcctgaacccttaccggaaacctgactgcaaagtgggaagaattaccacaactgaagactttaaacatctggctcgcaagctgactcacggtgttatgaataaggagctgaagtactgtaagaatcctgaggacctggagtgcaatgagaatgtgaaacacaaaaccaaggagtacattaagaagtacatgcagaagtttggggctgtttacaaacccaaagaggacactgaattagagtgactgttgggccagggtgggaggatgggtggtcaggtaagacagactctagggagaggaaatcctgtgggcctttctgtcccacccctgtcagcactgtgctactgatgatacatcaccctggggaattcaaccctgcagatgtcaactgaaggccacaaaaatgaactccatctacaagtgattacctagttgtgagctgttggcatgtggttagaagccatcagaggtgcaagggcttagaaaagaccctggccagacctgactccactcttaaacctgggtcttctccttggcggtgctgtcagcgcacagacccatgcgcatccccacccacaaccctttaccctgatgatctgtattatattttaatgtatatgtgaatatattgaaaataannnnnnnnnnnnnnnnnnnnnnnnnnnnnnnnttttgcttttagcctctacatgctaggatcacaggaagactttgtaaggacagtttaagttctcctgcaaggtttaatttgttatcatgtaaatattccaaagcaggctgccttgtggttttggccagccttgtgctatgttgataagattgatttactgcttaaaatcactttactttatccaatttttactgaactttttatgtaaaaaaataaaatcaattaaagaacttg

SEQ ID NO: 75739 - DNA, 570 bp, Homo Sapiens
ggggagaatggacaacactatgaagctgtggctagaaagggactgtcatgtcccatcctttggccagattgactggggatgtccggacagatgcctgcatgggtggtgagggccacatctgcacacgagccagtggctgcttgcagttcactgctgtgatgccagagtgtgttcaaaggtgactctcctgctcttctggactcttctctcaggcaagaaaggctgcaggctgcctgctatgtgatgcctgagcacaaagccaaggaactgaactaagtctttctgttaagtcctgagtttgtcattggcaggtttacttgtggccagctctctctgcccttgggtgtctgagcaggcagaccagaagaccaggcactggacctgcatgccaaagggactggtcatctcctgaggacctgtacatgaccctgtggactgttccgcacgatccggaacccactttttattcactccccatgtctttggccttcctcttctttctctttccctctgccatcctgacactgatagtttgtcatataaattccccgggttgtgttttttttctag

SEQ ID NO: 75740 - DNA, 966 bp, Homo Sapiens
  misc_feature (80)..(114): n is a, c, g, or t
aatgtatcatcactatagggcgctagcgtcttactgccgaacgacgagcgcagcgaagtattgagcgaggaagcggccgnnnnnnnnnnnnnnnnnnnnnnnnnnnnnnnnnnncagtcgacggtaccggacatatgcccgggaattcggccattacggccggggggagaaggatcctgcagcccgagtcccgtcctcaggcttccccaatccaggggactcggcgccgggacgctgctatggacgacattttcactcagtgccgggagggcaacgcagtcgccgttcgcctgtggctggacaacacggagaacgacctcaaccagggggacgatcatggcttctcccccttgcactgggcctgccgagagggccgctctgctgtggttgagatgttgatcatgcggggggcacggatcaatgtaatgaaccgtggggatgacacccccctgcatctggcagccagtcatggacaccgtgatattgtacagaagctattgcagtacaaggcagacatcaatgcagtgaatgaacacgggaatgtgcccctgcactatgcctgtttttggggccaagatcaagtggcagaggacctggtggcaaatggggcccttgtcagcatctgtaacaagtatggagagatgcctgtggacaaagccaaggcacccctgagagagcttctccgagagcgggcagagaagatgggccagaatctcaaccgtattccatacaaggacacattctggaaggggaccacccgcactcggacccgaaaatggaacccctgaacaaacactctggcattgacttcaaacaacttaacttcctgacgaagctcaacgagaactcactctggagaagctatgggcaggggccgctgggcagggcaatgaccttggtcgtgaagggtgcctgaaagggtccagaactgggcgttccaaggacgagcaggggacctccatgaag

SEQ ID NO: 75741 - DNA, 997 bp, Homo Sapiens
  misc_feature (730)..(738): n is a, c, g, or t
ctgatgatattaaaagttgaagatatttctgcacttgggccctcctctgggagccgcacccacatgactgccctgcctctgaccagtctgttccggggccccctcagccaggtgggaatgacggacacgtactatccaagtgtatgggattaactaatcattgaaggcattcatccgtccatcattggaaagatttacagtgattctgaaggacaggccgtggagttttaggtttcaggggcaagagcagttttcaaaagtctttgagtccagtgtgcacgagtcgacaagcagtacctggcatgcaggagcactcatgggtgagtccgtctcaggtctcgacaattagcagttgtgtgacagtcattctggttccttctgcctgaccctgggagacatatcagtaatggatgtacaaaagcaggtctgttttatgtcttagtataatttcagatgaattgtattgaaaaaatgctgaggaatgaatgtgtcaaaatgggttaactgtgtatattgactttcatgtcgtcatgcatctgtcatgaatgaatgatactttgcactgggctgtacgacagtgaggaccttagggcatgaagcctttttcctggtcccagcagcatctgccctgtgaagtttgttttctcccactgcctccaggccccactgatacccccaaatagatgatgggttatgagaaccagcgaaatcccccatgtcatcagtcttnnnnnnnnnttttacaaatccacgtatttgtcccattcttggagtagttttagtgtatgtctttacattaactactaacagtataaataacttgacatcgtaattgtctgcatcctgtccttgatatttttagcagttccaaatctttgtttttgtatttgtttgctgtgttcatgggcaaagtaagtactttttaatgcagttattttgagagtttggaagataattaccaaaagggtccattatttcataagagttactttgcaaa

SEQ ID NO: 75742 - DNA, 1816 bp, Homo Sapiens
  misc_feature (1755)..(1774): n is a, c, g, or t
cgcggcggacgggagtccccggagaaggatcctgcagcccgagtcccgaggataaagcttggggttcatcctccttccctggatcactccacagtcctcaggcttccccaatccaggggactcggcgccgggacgctgctatggacgacattttcactcagtgccgggagggcaacgcagtcgccgttcgcctgtggctggacaacacggagaacgacctcaaccagggggacgatcatggcttctcccccttgcactgggcctgccgagagggccgctctgctgtggttgagatgttgatcatgcggggggcacggatcaatgtaatgaaccgtggggatgacacccccctgcatctggcagccagtcatggacaccgtgatattgtacagaagctattgcagtacaaggcagacatcaatgcagtgaatgaacacgggaatgtgcccctgcactatgcctgtttttggggccaagatcaagtggcagaggacctggtggcaaatggggcccttgtcagcatctgtaacaagtatggagagatgcctgtggacaaagccaaggcacccctgagagagcttctccgagagcgggcagagaagatgggccagaatctcaaccgtattccatacaaggacacattctggaaggggaccacccgcactcggccccgaaatggaaccctgaacaaacactctggcattgacttcaaacagcttaacttcctgacgaagctcaacgagaatcactctggagagctatggaagggccgctggcagggcaatgacattgtcgtgaaggtgctgaaggttcgagactggagtacaaggaagagcagggacttcaatgaagagtgtccccggctcaggattttctcgcatccaaatgtgctcccagtgctaggtgcctgccagtctccacctgctcctcatcctactctcatcacacactggatgccatatggatccctctacaatgtactacatgaaggcaccaatttcgtcgtggaccagagccaggctgtgaagtttgctttggacatggcaaggggcatggccttcctacacacactagagcccctcatcccacgacatgcactcaatagccgtagtgtaatgattgatgaggacatgactgcccgaattagcatggctgatgtcaagttctctttccaatgtcctggtcgcatgtatgcacctgcctgggtagcccccgaagctctgcagaagaagcctgaagacacaaacagacgctcagcagacatgtggagttttgcagtgcttctgtgggaactggtgacacgggaggtaccctttgctgacctctccaatatggagattggaatgaaggtggcattggaaggccttcggcctaccatcccaccaggtatttcccctcatgtgtgtaagctcatgaagatctgcatgaatgaagaccctgcaaagcgacccaaatttgacatgattgtgcctatccttgagaagatgcaggacaagtaggactggaaggtccttgcctgaactccagaggtgtcgggacatggttgggggaatgcacctccccaaagcagcaggcctctggttgcctcccccgcctccagtcatggtactaccccagccatggggtccatccccttcccccatccctaccactgtggccccaagaggggcgggctcagagctttgtcacttgccacatggtgtctcccaacatgggagggatcagccccgcctgtcacaataaagtttattatgnnnnnnnnnnnnnnnnnnnnctcgagcctcgtggaaaattcgccacccaggctcgctcttag

SEQ ID NO: 75743 - DNA, 3249 bp, Homo Sapiens
  misc_feature (2977)..(3072): n is a, c, g, or t
cggaagagtatgaagtcgacggcgcgccaattcggcacgagggggagggctgcgagccatggcgaccaagacggcgggcgtggggcggtgggaggtagtgaagaagggtcggcggcctggggtcggcgccggcgccggcggccgaggaggcggcaggaaccgcagggcgctcggggaagcaaacggagtgtggaaatacgacctgacccctgcaatccagaccacaagcaccctttatgagcggggctttgagaatatcatgaagcggcagaataaggagcaggtcccaccccctgctgtggaacctaagaaaccagggaacaagaagcagccaaagaaggtggcaactcctcccaaccaaaaccagaagcagggccgcttccgcagcctggaggaagcactgaaagctctggatgtggcagacctgcagaaggaactggacaagagccagagtgtgttctctggaaacccatccatatggttgaaggacctggccagctatctcaactacaagctacaagctcctctaagtgaacccacgctgagccagcatactcatgattatccctacagcctggtgagccgggagctacgtgggatcatccgagggctgctggcgaaggcagcagggtctctggagctcttttttgaccactgtctgttcaccatgttgcaagagctggataagacaccaggggagtcactacatggttaccgcatctgtatccaggccatcctgcaagacaagcccaagattgccacggcaaacctaggcaagttcctggaactgctgaggtcccaccagagccgaccagcaaagtgtctcaccatcatgtgggccctgggtcaagcaggttttgccaacctcaccgagggactgaaagtgtggctggggatcatgctgcctgtgctgggcatcaagtctctgtctccctttgccatcacatacctggatcggctgctcctgatgcatcccaaccctaccaagggcttcggcatgattggccccaaggacttcttcccacttctggactttgcctatatgccgaacaactccctgacacccagcctgcaggagcagctgtgtcagctctacccccgactgaaagtgctggcatttggagcaaagccggattccaccctgcatacctacttcccttctttcctgtccagagccacccctagctgtccccctgagatgaagaaagagctcctgagcagcctgactgagtgcctgacggtggaccccctcagtgccagcgtctggaggcagctgtaccctaagcacctgtcacagtccagccttctgctggagcacttgctcagctcctgggagcagattcccaagaaggtacagaagtctttgcaagaaaccattcagtccctcaagcttaccaaccaggagctgctgaggaagggtagcagtaacaaccaggatgtcgtcacctgtgacatggcctgcaagggcctgttgcagcaggttcagggtcctcggctgccctggacgcggctcctcctgttgctgctggtcttcgctgtaggcttcctgtgccatgacctccggtcacacagctccttccaggcctcccttactggccggttgcttcgatcatctggcttcttacctgctagccaacaagcgtgtgccaagctctactcctacagtctgcaaggctacagctggctgggggagacactgccgctctggggctcccacctgctcaccgtggtgcggcccagcttgcagctggcctgggctcacaccaatgccacagtcagcttcctttctgcccactgtgcctctcaccttgcgtggtttggtgacagtctcaccagtctctctcagaggctacagatccagctccccgattccgtgaatcagctactccgctatctgagagagctgcccctgcttttccaccagaatgtgctgctgccactgtggcacctcttgcttgaggccctggcctgggcccaggagcactgccatgaggcatgcagaggtgaggtgacctgggactgcatgaagacacagctcagtgaggctgtccactggacctggctttgcctacaggacattacagtggctttcttggactgggcacttgccctgatatcccagcagtaggccctgccttcctggccactgatttctgcatgggtagaccatccaagactgcagcgggtagaaggtggcagttcttcatgggagtctttttaacttggtgcctgagttctctcctaggcaagtggccagttgcctccacctcagttcttccatctttggtggggacagggcccagcagcatctcagcctcctacccacaattccactgaacacttttctggccctactgcacatggcccccagcctccatccttgtgctggtagcctctcacaactccgcccttgccctctgccttccacttccttccatctcatttctaaaccccaaacagctcatctctaaaaagatagaactcccagcaggtggcttctgtgttcttctgacaaatgattcctgcttctccagactttagcagcctcctgttcccattcttggtcacagctctagccacagcagaaggaaaggggcttccagaagaatatagcaccgcattgggaaacagcagcctcacctccacctgaagcctgggtgtggctgtcagtggacatggggagctggatggaaatgcctctcacttcaaaatgcccagcctgccccaaatgcctctaagcccctccctgtcccctcccttgtagtcctacttcttccaactttccattccccatcatgctgggggtcttggtcacaaggctcagcttctctccactgtccatccctcctatcatctgtagagcagagcacaggcagttgtgtgccttgggcccagggaaccctccatcaacctgagacaggactcagtatatggttcttgggtatgccctaccaggtggaataaaggacacagattnnnnnnnnnnnnnnnnnnnnnnnnnnnnnnnnnnnnnnnnnnnnnnnnnnnnnnnnnnnnnnnnnnnnnnnnnnnnnnnnnnnnnnnnnnnnnnnngccttggtcgggccgccttgggccccttcaaaaaaactttttctaaaacccttttcgtttgtggccccgggcggcccccctgaagggaaaacgggaaacagtgggtccaataccctgtggttctccaaaagaaagaatccccgtggaccaatgaaatatatgggctctggggatatt

SEQ ID NO: 75744 - DNA, 856 bp, Homo Sapiens
ttaccgcatctgtatccaggccatcctgcaagacaagcccaagattgccacggcaaacctaggcaagttcctggaactgctgaggtcccaccagagccgaccagcaaagtgtctcaccatcatgtgggccctgggtcaagcaggttttgccaacctcaccgagggactgaaagtgtggctggggatcatgctgcctgtgctgggcatcaagtctctgtctccctttgccatcacatacctggatcggctgctcctgatgcatcccaaccttaccaagggcttcggcatgattggccccaaggacttcttcccacttctggactttgcctatatgccgaacaactccctgacacccagcctgcaggagcagctgtgtcagctctacccccgactgaaaatgctggcatttggagcaaagccggattccaccctgcatacctacttcccttctttcctgtccagagccacccctagctgtccccctgagatgaagaaagagagcccattctgaggcttttccttagctccctgttgacagctgcctgccccgctcactcgagcttcaccctcagaagatggatcccaagagacagcacattcagctcctgagcagcctgactgagtgcctgacggtggaccccctcagtgccagcgtctggaggcagctgtaccctaagcacctgtcacagtccagccttctgctggagcacttgctcagctcctgggagcagattcccaagaaaggtacagaagtctttgcaagaaaccattcagtccctcaagcttaccaaccaggagcctgctgaggaaagggtagcagtaaacaaaccaggaatgtcgttcacctgtgacatgg

SEQ ID NO: 75745 - DNA, 293 bp, Homo Sapiens
  misc_feature (161)..(175): n is a, c, g, or t
atccagaaatattttcagcaaaactttccaactgagtggagtctgattaaggatttatttgaaaatggtgggattcattggcccataggtacattggaaaatgtatatctctccagctgtactgtagtgccctgcaggctgtttatatgttcacagttacnnnnnnnnnnnnnnnaaataaaagtcatttaatgtagaatacttttaatttcactttctgtattttaattttgttgaagggctgattgggatttccatgttcttattaaaaatctaacaaatctgtttggaaa

SEQ ID NO: 75746 - DNA, 594 bp, Homo Sapiens
tgggcatccttcccctcaagcctgggctcatggagcccctgcccagggccctcaggtgggcggaaagtccatcccctccgcccttcaggaaggatgctcccgtgtgcaggggtctcctgcctgtgccatccactggggctcgagacaatttcccactcacctgtgaggccggtgtggctgcttcccttgtaaatagttgttctctggtaagaagccaaatatttaagctcacttcttcccagagagaggaagctctgctcaggcctccagcgttggctggccatggccacagccagatggaggagcccatccccaggagactcaggcagtggcctggagaggctttgttctgtaacggtgccttttcttagggtccaggcaggaatgaagccaataatttattgctttccattctgtggtatgatgtgcgtgtgcgtgagtgtgtggcccctgtttattcccctcctgtcaagaatgaagtggattcagttcaggtacttttgagggttgttgtgctgaccctgtggttgtcgctgatgtacacacatttcattatttgccaatggtgcaataaccactgctgaccaacccaaa

SEQ ID NO: 75747 - DNA, 1650 bp, Homo Sapiens
gcttggtacgctcggatttcccgggatatcgtcgacccacgcgtcggacattctgatggaggaggaggagggggtggtgggaggactgtcgggggggtgccctgtacccactgcgggctgcctccgatcccctgctctcttcagtgtcccctgctgtctccaaggccagcattgccgccgctagctagcttcagcatggaagaggagtcctgatcaggcctcacccctcccctgggactttcccacccaggaaaggaggaccagtcaggatgaggccccgccttttcccccaccctcccatgagactgccctgcccaggtatcctgggggaagaggagatgtgatcaggccccacccctgtaatcaggcaaggaggaggagtcagatgaggccctgcaccttccccaaaggaaccgcccagtgcaggtatttcagaaggagaaggctggagaaggacatgagatcagggcctgccccctggggatcacagcctcacccctgcccctgtgggactcatccttgcccaggtgagggaaggagacaggatgaggtctcgaccctgtcccctagggactgtcctagccaggtctcctgggaaagggagatgtcaggatgttgctccatcctttgtcttggaaccaccagtctagtccgtcctggcacagaagaggagtcaagtaatggaggtcccagccctgggggtttaagctctgccccttccccatgaaccctgccctgctctgcccaggcaaggaacagaagtgaggatgagacccagccccttcccctgggaactctcctggccttctaggaatggaggagccaggccccaccccttccctataggaacagcccagcacaggtatttcaggtgtgaaagaatcagtaggaccaggccaccgctagtgcttgtggagatcacagccccacccttgtccctcagcaacatcccatctaagcattccacactgcagggaggagtggtacttaagctcccctgccttaacctgggaccaacctgacctaacctaggagggctctgagccaaccttgctcttggggaaggggacagattatgaaatttcatggatgaattttccagacctatatctggagtgagaggcccccacccttgggcagagtcctgccttcttccttgaggggcagtttgggaaggtgatgggtattagtgggggactgagttcaggttaccagaaccagtacctcagtattctttttcaacatgtagggcaagaggatgaaggaaggggctatcctgggacctccccagcccaggaaaaactggaagccttcccccagcaaggcagaagcttggaggagggttgtaaaagcatattgtaccccctcatttgtttatctgatttttttattgctccgcatactgagaatctaggccaccccaacctctgttccccacccagttcttcatttggaggaatcaccccatttcagagttatcaagagacactcccccctccattcccacccctcatacctacacccaaggttgtcagctttggattgctggggccaggccccatggagggtatactgaggggtctataggtttgtgattaaaataataaaagctaggcgtgtttgatgcgcttttaactttggcaaaaaaaa

SEQ ID NO: 75748 - DNA, 1806 bp, Homo Sapiens
ggaccggtccggaattcccgggatatcgtcgacccacgcgtccgcgcaaaaggctgtccctcccaagacctgggattctgggctcactgagttcacctgcgagtcagccctacctgcactgctctggtctagtacaaacaggctgctggcattgaggtctgctacaatgctgctgctgcacagagctgtggtcctcaggctccaacaggcctgcagactcaagtcaatcccctcaaggatctgcattcaggcctgctccacaaatgattcatttcagccccagcgccccagcctcaccttctctggtgataactccagcacccagggatggagagtcatggggaccctattaggtctcggtgcagtgttggcctatcaggaccatcggtgtagggctgctcaggagtcaacacacatatacactaaggaggaagtacgagatcacagtcactctgcagtgtgccggcaaccgacgctctgagatgactcaggtcaaagaagtaaaaggtctggagtggagaacaggagccatcagcactgcacgctgggctggggcacggctctgtgatgtgttagcccaggctggccaccaactctgtgaaactgaggcccacgtctgctttgagggactggactcagacccctactgggactgcctatggagcatccatccctctggctcggggccatggaccctgaagctgaggtcctgctggcatatgagatgaatgggcagcctctgccacgtgaccacggctttccctgtgcgtgtgggggttcctggagtggtgggtgcccgccatgtcaaatggctgggcagagtgagtgtgcagccagaggaaagttacagccactggcaacggcgggattacaaaggcttctctccatctgtggactgggagactgtagattttgactctgctccatccattcaggaacttcctgtccagtccgccatcacagagccccgggatggagagactgtagaatcaggggaggtgaccatcaagggctatgcatggagtggtggtggcagggctgtgatccgggtggatgtgtctctggatgggggcctaacctggcaggtggctaagctggatggagaggaacagcgccccaggaaggcctgggcatggcgtctgtggcagttgaaagcccctgtgccagctggacaaaaggaactgaacattgtttgtaaggctgtggatgatggttacaatgtgcagccagacaccgtggccccaatctggaacctgcgaggtgttctcagcaatgcctggcatcgtgtccatgtctatgtctccccatgagcatggaaaggagccacctccacccctttccccacccattagcctcactgcttcagaaaaatctttcccacctttcaacttcttggatcacaactctggccttcctaagccatacccaagtacacatatagcacatttcacccaaggaccttccctctttggacactatgttacatacccctcttggcctttgaacctgtgccaggaagtgtgagctgttacagcaaggggctagaagtgaaaaaagtaattctggagacaagcactattttctcttcctaccccacctccatttctaatgcctactgccatcaaggccttgttttgcttttctttttggattgttcagagaaatgtgtgtggcatgtgtaagaaaagtgtatatactatcttatactacctctccaggttgccagagagttgcgaggagagcaaggggcacaaccgtctccctttatagttctacttttctaataaatagtctgtttaagatcat

SEQ ID NO: 75749 - DNA, 608 bp, Homo Sapiens
  misc_feature (18)..(18): n is a, c, g, or t
tgataactccagcacccnagggatggagagtcatggggaccctattaggtctcggtgcagtgttggcctatcaggaccatcggtgtagggctgctcaggagtcaacacacatatacactaaggaggaagtgagtccccacccattagcctcactgcttcagaaaaatctttcccacctttcaacttcttggatcacaactctggccttcctaagccatacccaagtacacattatagcacattttcacccaaaggaccttcccctctttggacacataatgttacataacccctcttggcctttgaacctgtgccaggaagagtgagctgttacagcaaggggctagaagtgaaaaaagtaattctggagacaagcactattttctcttcctaccccacctccatttctaatgcctactgccatcaaggccttgttttgcttttctttttggattgttcagagaaatgtgtgtggcatgtgtaagaaaagtgtatatactatcttatactacctctccaggttgccagagagttgcgaggagagcaaggggcacaaccgtctccctttatagttctacttttctaataaatagtctgtttaagatcat

SEQ ID NO: 75750 - DNA, 647 bp, Homo Sapiens
  misc_feature (209)..(218): n is a, c, g, or t
tgaagatagcaacggaaaactcaaaatggtggcagttcttattaccagttgttagtattgtttctggaaactgcttgccaagacaacatttattaactgttagaacacttgctttatgtttgtgtgtacatattttccacaaatgttataatttatatagtgtggttgaacaggatgcaatcttttgttgtctaaaggtgctgcagttnnnnnnnnnncaaccttttctttcaatatggcatgtagtggagtttttttaactttaaaaacatcaaaaattgttaaaatcattgtgttatctagtagtttataattatcggcttatatttccccatgaatgatcagaactgacatttaattcatgtttgtctcgccatgcttctttactttaacatatttcttttgcagaatgtaaaaggtaatgataattagtttatataagtgtactggctgtaaatgatgctaaatatactttatgcaattaagggcttacagaacatgttgaaactttttttacttttattgggaataaggaatgtttgcacctccacattttattgcttctggatgtgaaatcatgtaattatttctgctgttatataaagtgccatacttttaataaaggaaaatgtacatatgaaatcaaa

SEQ ID NO: 75751 - DNA, 1092 bp, Homo Sapiens
  misc_feature (44)..(84): n is a, c, g, or t
  misc_feature (88)..(122): n is a, c, g, or t
  misc_feature (1021)..(1030): n is a, c, g, or t
caaagacgtatagactcacctatagggcgctagctcgtcacatnnnnnnnnnnnnnnnnnnnnnnnnnnnnnnnnnnnnnnnnnccgnnnnnnnnnnnnnnnnnnnnnnnnnnnnnnnnnnncagtcgacggtaccggacatatgcccgggaattcggccattacggccggggagcactgcctggctccacgtgcctcctggtctcagtatggcgctgtcctgggttcttacagtcctgagcctcctacctctgctggaagcccagatcccattgtgtgccaacctagtaccggtgcccatcaccaacgccaccctggaccggatcactggcaagtggttttatatcgcatcggcctttcgaaacgaggagtacaataagtcggttcaggagatccaagcaaccttcttttacttcacccccaacaagacagaggacacgatctttctcagagagtaccagacccgacaggaccagtgcatctataacaccacctacctgaatgtccagcgggaaaatgggaccatctccagatacgtgggaggccaagagcatttcgctcacttgctgatcctcagggacaccaagacctacatgcttgcttttgacgtgaacgatgagaagaactgggggctgtctgtctatgctgacaagccagagacgaccaaggagcaactgggagagttctacgaagctctcgactgcttgcgcattcccaagtcagatgtcgtgtacaccgattggaaaaaggataagtgtgagccactggagaagcagcacgagaaggagaggaaacaggaggagggggaatcctagcaggacacagccttggatcaggacagagacttgggggccatcctgcccctccaacccgacatgtgtacctcagctttttccctcacttgcatcaataaagcttctgtggtttgcaacagggtcaaaaaaataatacacattattaataataaaaatttttggggcggttgggccttagaaaaagttttttaacacattttgttgtnnnnnnnnnncccagttggttgtgcaaagtgggcaaaggggtgtccaggaaaatgggcaaagaaatggggga

SEQ ID NO: 75752 - DNA, 1024 bp, Homo Sapiens
  misc_feature (146)..(146): n is a, c, g, or t
  misc_feature (218)..(218): n is a, c, g, or t
  misc_feature (259)..(259): n is a, c, g, or t
  misc_feature (300)..(300): n is a, c, g, or t
  misc_feature (318)..(318): n is a, c, g, or t
  misc_feature (371)..(371): n is a, c, g, or t
cgatacccgaggtttaaccccggagttggctgtgccaacccccttgttcaaaaccggttcctgctttgcaagacttaatttgtgagtacgtgacagagcaagcggacaggtacttccacacattgtgcagaacttgtcaacaaggntacgtgcggacggagactgtgcgcgccgcccccctatgactgccggtggagcccggccagcaggaggagtantaccgccagctcgcagggctggtgaggagatgcacgctgcntatggaagcctgtctccctcatggccacagcctcggctgtntacacttgctctatttcntgctgcgccagccccaggcctggaagaccgctttattgatgcttcatctctcntggggctccctgggtggctccatcaagcccatgctggtcttggcctcaggtgacaaccagggcatccccatcatgtccagcatcaagctgaaagaggagcagcgcataaccacccacctccccctggatgtttccctctcgcatggcgtggcctgaggaccacgtgttcatttccacacccagcttcaactacacaggccgtgacttccaacgcttctttgcagacctgcactttgaggaaggctggtacatgtggctgcagtcacgtgacctcctggcaggactcccagcacctggtgtggaagtatactgtctttacggcgtgggcctgcccacgccccgcacctacatctacgaccacggcttcccctacacggaccctgtgggtgtgctctatgaggatggtgatgacacggtggcgacccgcagcaccgagctctgtggcctgtggcagggccgccagccacagcctgtgcacctgctgcccctgcacgggatacagcatctcaacatggtcttcagcaacctgaccctggagcacatcaatgccatcctgctgggtgcctaccgccagggtccccctgcatccccgactgccagcccagagcccccgcctcctgaataaagaccttcctttgctcccgtaaaaaaaa

SEQ ID NO: 75753 - DNA, 2404 bp, Homo Sapiens
tgtgacatataaacagtggtaaaaaagaggctggtaccggtcggaattcccgggatatcgtcgaccacgcgtcgcggacgcgtgggcgagtggacgccgtcgcgaccgccatgcagctgacggtgaaggcgctgcagggccgcgagtgcagcctgcaggtgccagaggacgagctggtgtccacgctgaagcagctggtctccgagaagctgaacgtcccagtgcgccagcagcggctgctgttcaagggcaaggccctggcagatgggaaacgactctcggattatagcatcgggcccaactccaagctcaacctagtggtcaaacccctggagaaggtgctactagaagaaggcgaggcccagaggctggccgactccccacccccgcaggtctggcagctgatctccaaagtcttggcccgccacttcagtgcggcagatgccagcagggtcctggaacagctacagagggattacgagaggtccctgagtcgcctgacgctggacgacatcgaacggttggccagccgcttcctgcaccctgaagtgactgagacaatggagaagggcttctccaaatagaattctcggagcatggggaggtgcccaacgccaggctaccgctgcatgtcgcactaagtgtgttctcctgttgcagttgggctcatcatcgtcatagctggcatgtacctggctctggccaggtgctaggcactcctcacagcttgacctgggtttgcttccacaccctcagaagaggagagccggcacagcagaggcaccggcgatgaagtggcacagccccagtcggaatccagcggcttctgaaagtgccttggtgtgagaaggaggaaggggccgcttggagagctgggctctcgcatgtcatgtttagcccactgagaatataccctcaggtgactccctcccgatcctgaaagggaaagcagctgtcacctgacttctggcgggtccaacatagccctcagcttacctctgcaggaggccgagtgacagccagccctggaaccccccgaccccgcagctgctgcagccagtgtgccagtgtgcgttcgacaaatggaaaagcagattggggccagggagtcagcaaggcaccccagctctgtgatgtgactttgggcgagtctcagtgccacttggtccccagccatggactctatacagtgagggccactcaccgacctgagtcagtgtcctctgtctcacagggcccctctcccttctgttcagtaaacaaactgaagccaaaaatgaagccgtggccaagcgtgacccagagatggggtgtcctggcccttagtgacacagctcctctctggggcaccctatctgcttgtctcgtccaggaagcgttagggctgatgggtgactcagcaaggcagtgtcagagctgggactgggcgtaggcctttgtcctcatccccagcactggcctccctgtggaagatgaacatatcccagccacctgtgtacaggggctcactttgtgtgctccttgttgcctgagaagaaaccttggggtgccagggtgggggcagaagcatgggctgggttccggttcatcctcctccaccctgccgtgtgtgtgggcacaagaggacatctaaccacctgctccttggaggaggcccccaggggtggtagaggctggaaggaagccacatcaggaggacgccactccggcccttcacccttgccaagtgagctgctcacagtgtggtcagggctgcgcgtgctggaggccctcctgcctgggccttgtggggcaaatattgggtccccaggctggaaagatggacagaggcccaatgggtgaaggctttgaagagcacacagaagcccctggccccccacgagagctggagagccatgtatatggcttcaaagccacctacggcagggacacactcgtgagcatgtgtggcctgcagttcaggtgatacatttaccagtgttcttgtttgtgtggtgccaggaaattgattttggaaaaagtgaaataacattaaaggtgaatgtgaggcttctacttttatccaaaaggagctatattagctaggctgtttctgatatccaatcattggtttaacaataaaggcaatttgtttaatcagttaacggaaatttcttggcttatgaaagtgaaaagtccagtggtattggcattggcagcaggtgagcaatttcacccagtgtcttctgcctccctctgcgttggtatctgctacatcccaggccaccacctccgaggatgaaaagatggctgcctgcagcttccacggaatccctccctcactgccagagcagcatcttctctgtgtaccacctctgctgtctcagatgcccccagcaaataaacactcttctcgttggtcaaa

SEQ ID NO: 75754 - DNA, 542 bp, Homo Sapiens
ggcaagcatctatgtgttcaattcgaaatgcaacaatgacagatgtacaactttaccactcttaaagaaactaacatgccatccattattctccatgtgggaaacattcagtaaacttctaaaaccaaacacaggactctgggatatccccacacccccagcaacaggctgtgacaggctttgatctcaatcaaatgccactgtacacagaacataaaaacaggctcaggatgctgcatgtcactctgacatatcacattatttcaaattactctgtcacttactcacaaacaaaagtctccactatggcatgattgagagagaaaataattcactttatataaataacagctaagaacaacatactgtgaacagtttccagagtttgaacattcagcacaatcaattcttacttcttgggaaaaaaatatcttacctatcttttctgttacagtatgccttcttggagaaaatattttagtggtaacatcattttctggggcatttggttaattttgaaagatgattatgccacatgaacc

SEQ ID NO: 75755 - DNA, 778 bp, Homo Sapiens
tgctgaggaatggttcacgccaagagtgcagagttgaacaaggaggtgtctaccaccactgccatgattcagaccagcaagacagagatcacggagctcaggcgcacgctccaaggcctggagattgagctgcagtcccagctgagcatgaaagcggggctggagaacacggtggcagagacggagtgccgctatgccctgcagctgcagcagatccagggactcatcagcagcatcgaggcccagctgagcgagctccgcagtgagatggagtgccagaaccaagagtacaagatgctgctggacatcaagacacgtctggagcaggagatcgccacctaccgcagcctgctcgagggccaggacgccaagatgattggtttcccttcctcagcaggaagcgtcagcccccgtagcacctctgttaccacgacttctagtgcctctgttaccaccacctctaatgcctctggtcgccgcacttctgatgtccgtaggccttaaatctgcctggcgtcccctccctctgtcttcagcacccagaggaggagagagccggcagttccctgcaggagagaggaggggctgctggacccaaggctcagtccctctgctctcaggaccccctgtcctgactctctcctgatggtgggccctctgtgctcttctcttcctgtcggatctctctcctctctgacctggatacgctttggtttctcaacttctctaccccaaagaaaagattattcaataaagtttcctgcctttctgcaaacat

SEQ ID NO: 75756 - DNA, 983 bp, Homo Sapiens
  misc_feature (114)..(114): n is a, c, g, or t
  misc_feature (180)..(180): n is a, c, g, or t
  misc_feature (197)..(197): n is a, c, g, or t
  misc_feature (208)..(208): n is a, c, g, or t
  misc_feature (218)..(218): n is a, c, g, or t
  misc_feature (269)..(269): n is a, c, g, or t
  misc_feature (283)..(283): n is a, c, g, or t
  misc_feature (321)..(321): n is a, c, g, or t
  misc_feature (505)..(505): n is a, c, g, or t
  misc_feature (530)..(530): n is a, c, g, or t
ccggcgacgtccatgacgctggcaccatatgatgtctctgcacccgctacatttgtccgtctttgttgattggcgtacatcacacagacgttgactgtccgattatcgatcctntaggattgcctcgagccagaatcgcacgagtgaatgtagccgagcattccccgaggacagtagccntgcctcagtacccttgncatgccacctngtcgctgtcncagatgatgttcccttcctcagcagtaagggaacagccccgtgtgtagggngggcagagtagccntcccattcactgccccaatgcgggtgggagctgcgggngagggagggagccagtgctgggctctcccagtgtagggagggggaagagctggggtggaaagtgtcattcgctcactgattttccttttgaaactgatggctctgccccacagagctatttggctgtcttgggaagagccatctttggggacaataaagagtctccatccacgcaccacctgantaatgaggagtttgtgagccctccnaggggggccctgccctgtcctgaggtgggtcttctccagcctgagcatgtcttgtctcttgtttcccaggaagcgtcagcccccgtagcacctctgttaccacgacttctagtgcctctgttaccaccacctctaatgcctctggtcgccgcacttctgatgtccgtaggccttaaatctgcctggcgtcccctccctctgtcttcagcacccagaggaggagagagccggcagttccctgcaggagagaggaggggctgctggacccaaggctcagtccctctgctctcaggaccccctgtcctgactctctcctgatggtgggccctctgtgctcttctcttcctgtcggatctctctcctctctgacctggatacgctttggtttctcaacttctctaccccaaagaaaagattattcaataaagtttcctgcctttctgcaaacataaa

SEQ ID NO: 75757 - DNA, 784 bp, Homo Sapiens
agttgcttctgtgtcagaaaataaaggactgtttgaagaggcagcaaagctgtatgaccttgccaagaatgctgacaaggtactggagctgatgaacaaactgctgagccctgtcgtcccccagatcagtgccccgcaatccaacaaggagaggctgaagaacatggcactctccattgccgaacggtatagggctcaaggaataagcgcaaataaatttgtggactccacgttctatcttcttttggacttgatcaccttttttgacgagtatcatagtggtcatattgatagagcttttgatatcattgagcgcttgaagctggtgcccctgaatcaggaaagtgtggaagagagagtggctgccttcagaaatttcagtgatgaaatcaggcacaacctctcagaagtgcttcttgccaccatgaacatcttgttcacacagtttaagaggctcaaggggacaagtccatcctcgtcatccaggccccagcgagtcatcgaggaccgcgactctcaactccgaagtcaagcccgcactctgattacctttgctggaatgataccataccgaacgtctggggacaccaatgcgaggctggtgcagatggaggtcctcatgaattaagtgccatgctttgtgggagtctgggtcggcacactgtcagtacatcaggcacatgggcccactaggctggggtttctggttttgtttctgttgtgttttgttttggtttctgtattatgtatttttgtcaacgccaataaatttctttgatttgcc

SEQ ID NO: 75758 - DNA, 691 bp, Homo Sapiens
  misc_feature (43)..(43): n is a, c, g, or t
  misc_feature (55)..(55): n is a, c, g, or t
  misc_feature (65)..(88): n is a, c, g, or t
  misc_feature (364)..(372): n is a, c, g, or t
accacatttcccttcctccctctaattctacccacatgatctntattccttcctntcgccaattnnnnnnnnnnnnnnnnnnnnnnnntctgtagatcttgtcactaaaatctaatttatatcaaatttatgagagaaagtattttcctaattatggtcaaataaatttggttaacatcctagtgattctctttctatataataaggcaattacagttttcaaagcattaagtctaacataactttaaacattctcttaggtttcaagacacttctatttaatattcattggggaaaagttgtccagctatcagctaagaaaacacatgcaaatatggttgtgtaaagttaagggttataaggnnnnnnnnntcagtagaattacataatactaaagttgcagttgaaagaatatccaagtatgtgttggtagttactaaaagaattatagctgttattgccttgtatttatagcccttgtttcaggttttatgattcaagtcttagtccaatctttcttttggacatttgcaatatttaccagttgtgttttgtgtagtctgaatttgctttctgtagttgagcaaacgtcttaaaaagtcatttgtaatttattaaattactttctatgatgttctatagagcaaatggaagtttaattattttttattaaacatattctttgactacc

SEQ ID NO: 75759 - DNA, 569 bp, Homo Sapiens
  misc_feature (14)..(14): n is a, c, g, or t
ggcctcagggcgcntagaaggcgaggacgcagacctgaaggcggccggtgagcggggcgggttctgctgggtcgggaagaaaaataattctgcaaggtattttgttttttattaattcgcgcttggccacctcatctgtaaagagattctaaaagcaagatctggaaaagtgcttcgtagactccttgacggagtttgcctcctttgtacgctgcgtgaacatgcctcacctttaagagagtcttaaaggtaaagacacgaaaacacttcctccagggaccttcccgaaaacgttctggctctcatctggtgcggcatgtgtccactttgcctttaaggagttcttaaaggcaagggcctggaagtgctgttcctgagatggattctcttgacttaccagtccaccacggcacttcccctttaaggttattaaaggtaaggggtggacagactttctgcattcagataatgagcagtggcaaccccttttggccagggccaggggggcaccagcaaggggccaccctttcccttttcaataaataatttttgtactgcctctgttcaaa

SEQ ID NO: 75760 - DNA, 768 bp, Homo Sapiens
  misc_feature (34)..(34): n is a, c, g, or t
gaagcagttgatataatggtttatacttaaaagnatagacatggtgccatgaagttggggagttgggtgaatatcccattctagttacagaggagctttccttaaatgccctttaacttctaggttttgttcaagaagttcattttctgagtaaaagttattttcatatatgttgggggaaaattaactcatctaaaaagaatcttattaggtatttgaactctaaaactaacagataagacagatatgtaccttattagagcaccagaactaatttgctaagtcttttgtttagtcctgcaagactgatgcttaatacacagtctgttctcctgtgtctaggtcaggaactccagtttgcttttctgttttgtgtcctggtagcagctgttgagtaactttcattggaggttgggaaggaagtgaggagaaagtgttcttgtttagtgttttatttcctataataggatgctgcctaacccagttcatctctatgtcctgttcactgaatattccgggtaattgaaagaaaatataatggatgggctccattaaaaccagctcaaaaataaattcttgtcagtaaagatttcttgtcaagatgtcttggattgcacttttgttgaggaaagacagtgtaaatagttaaagaatgttgataaaattgaaacatttggttgtggaattgtgtgtggttttagagggtttctgtttgtgaaatgtatgtattaaaaataataaaattccagaaactaacattgtaaaaaa

SEQ ID NO: 75761 - DNA, 651 bp, Homo Sapiens
gtggtaccggtccggaattctccggatatcgtcgacccacgcgtccgcttattttaaagaaaatcttatatagtacattttacaaaaattataaaaaatgaattagtactggcgaggactaaatgaaacaataatttttcattttgataactagctttccaggtggacttagccataggaaaatattactaatgtaatttaacaaattgctgcatgtattccatttaaaaatatgtttaaattgtcctaaaacaaaataattttctccctaggagtatgcatttggctacagtgttttgaaacagaaaccttagaataggtcattggtatgggctgaactgtgtatcccccaattcatttgttgaggtcctaactcccatttcttttgaatgtgactgttcggagatgaggcctttaaagaggtgacttaagttcaaaggaggctgttagtctaatccaacatggtgtcctttggacataagagataccagcaatgtgtgcacagaacaaagaccaggagaggacacagtgagaaggcagttatctgcaagcaaagagagaggcttcagaagaaacaaaatcaccagcaccttgatctttgacttctaatctccagaatagtgagaaataaatttctgttgttaagccgtc

SEQ ID NO: 75762 - DNA, 779 bp, Homo Sapiens
caaggcagacttggcccgctgccgagaagtctctgtggaagagggccgcgcctgcgctgtggtgttcgactgtaaattcatcgagacatccgccacgctgcagcacaatgtggccgagctcttcggagggcgtggtgcgccaactgcgcttgcgccgccgggacagtgcggccaaggaacccccagcaccccgacggccggccagcctagcccagcgcgctcgtcgcttcctggcacgcctgacagcccgcagcgcacgccgccgggcactcaaggcccgctccaagtcctgccacaatctggccgtgctctgaagccccccgcccttctgagagttggcgggtcactgaggtgcattctgggctccagggacgccactgcggggcaaaggcgccgttacctggagtctgcatcatgggtcttgcttgcctgctgccctgatggcctgagcatcccccagatccaagcctgggggatcccgggaaagcgatggacagacagacgatggggccgaagccccaagctgggcacaaagtagttttttacgtggtgggtgtctttttgtaaaaaaatcttccttgtccctgggctctggccaaccctcagaaaccctcacaataaaccagaccagaaggatgtcccatctgaatgcccagacctctccatctcggctcttccaggcgtctccacctactgccctcccatctacacttgactgtagactggtctcgcctgctggcctgggcgtcagggcgcatcaataaagtacttggaccagt

SEQ ID NO: 75763 - DNA, 1403 bp, Homo Sapiens
  misc_feature (35)..(35): n is a, c, g, or t
gactaaatagatgtcattaatatcatgcttcatcntactgtgcatagatgacccatggcacacaaagtatatgtataatattgcaatattgtacttccatctttaaaagtatgccaaagacttcataatgaattcaccatatttaaggaataaggcaaattaatgtttatccgaaatcaaaatgagattggataattcctggaatctgatttctgtaagtttcagtcctaaagggaccttaaatatctactagaacgaagtacagtgtatttctcagattacatgacattagtcaaccaatttagttgtaacacaaagtgagaaagccttaggtgttgaaggagtgtgaaaataaaaatctcttttcatgcagtttctgcttcattttccaaggattataatatgctgagtaaacttttggcactaaggaagccagctacaggccacgtaatgaaaactattcagaaaacagttcagcaaatactactatttgaatacagttcaaatcgtatttatataaatactctgcctacattatttaacccaaactggattattcaccattctttgaagatgccttgtgttttctgttatctacttctgctcgtgcagtttacttacaccttcaccctttcaaatcctaactcttcttcaaggcctgattcagattttaactttttaaaggctatctgaatcattcaaggagaagataccctgtctctcataaaaacacttagagcaaactaccactattaaatcacttattgcatactgcctcagagccatgtgtccagttattctggtttttatctggtacccacacacacataatacttagtacatttccttatatgtaaataattagtaatgtaacacatcgagtgaatgaaattgtgattagcaaagtatgacagctaaaaacaaaggaaattttgtatagtttaagtttttgtacagcagaaggtaatggaaaatatttgcaacatatgacagtgtttttaatgtcttaagtatatgaagaatttgtttcaattggtaagaaaagaccaactgaaaaataggcaaaacataccaaatttcgattcacaaaaagatacaaatggccaacaaaacatgaaacaccttgaaccccattggttacaaaaaatacaaataaaaacaatgctgactgacaataaaaataatgtacatcttgctattagcagagttgtggggaaatcctgtcatattttggtgaatagaatatgagttggtatatcacttttagggggccatttggcaatatcaaaaaccttgaaacgtaagtataaacttcagtttgttcgtataacctgtcattcacatattgagtgcctactatgtcctaaatattggaataacactaataaagctcataaggggct

SEQ ID NO: 75764 - DNA, 249 bp, Homo Sapiens
  misc_feature (79)..(96): n is a, c, g, or t
ttttctggctaattttgttttttaatgagaaacatctgagttgtacatatcacaaacagcttcaagtttctgtaccaannnnnnnnnnnnnnnnnngccgtggccaaacagttaaaacccaaagcaaagcatcactttggatgtgaaaaagtcttagaaaattaacttacaaaaacatccctatcaagtcggtagtttggcatttactttacattagtcaaaagctccagctaaaatctaatttttttt

SEQ ID NO: 75765 - DNA, 618 bp, Homo Sapiens
tgtggttccaaggatgagagcaggggttggagccatggccttctgggaacctatggagaaagggaatccaaggaagcagccaaggctgctcgcagcttccctgagctgcacctcttgctaaccccaccatcacactgccaccctgccctagggtctcactagtaccaagtgggtcagcacagggctgaggatggggctcctatccaccctggccagcacccagcttagtgctggactagcccagaaacttgaatgggaccctgagagagccaggggtcccctgagcgcccctaggggctttctgtctgccccagggtgctccatggatctccctgtggcagcaggcatggagagtcagggctgccttcatggcagtaggctctaagtgggtgactggccacaggccgagaaaagggtacagcctctaggtggggttcccaaagaacccttcaggctggactgagctgctctcccacagggtttctgtgcagctggattttctctgttgcatacatgcctggcatctgtctccccttgttcctgagtgccccacatggggctctgagcaggctgtatctggattctggcaataaaagtactctggatgctgtaaaaaaa

SEQ ID NO: 75766 - DNA, 1449 bp, Homo Sapiens
  misc_feature (1166)..(1190): n is a, c, g, or t
tgagatacagctgtgagcccggaatgggtatgggacacccatgacttcaaatgctgtgcgcatggaagctgtgagcggaatgtgggggtcatcgtgcagccatccgtgtaaccctgattctcctgggaatcttggtttttggcatctgttttgcctatagccgaggccactttgacagaacaaagaaagggacttcgagtaagaaggtgatttacagccagcctagtggcccgaagtgaaggagaattcaaacagacctcgtcattcctggtgtgagcctggtcggctcaccgcctatcatctgcatttgccttactcaggtgctaccggactctggcccctgatgtctgtagtttcacaggatgccttatttgtcttctacaccccacagggccccctacttcttcggatgtgtttttaataatgtcagctatgtgccccatcctccttcatgccctccctccctttcctaccactgctgagtggcctggaacttgtttaaagtgttattccccatttctttgagggatcaggaaggaatcctgggtatgccattgacttcccttctaagtagacagcaaaaatggcgggggtcgcaggaatctgcactcaactgcccacctggctggcagggatctttgaataggtatcttgagcttggttctgggctctttccttgtgtactgacgaccagggccagctgttctagagcgggaattagaggctagagcggctgaaatggttgtttggtgatgacactggggtccttccatctctggggcccactctcttctgtcttcccatgggaagtgccactgggatccctctgccctgtcctcctgaatacaagctgactgacattgactgtgtctgtggaaaatgggagctcttgttgtggagagcatagtaaattttcagagaacttgaagccaaaaggatttaaaaccgctgctctaaagaaaagaaaactggaggctgggcgcagtggctcacgcctataatcccagaggctgaggcaggcggatcacctgaggtcaggagttcaagatcagcctgaccaacatggagaaaccctactaaaaatacaaagttagccaggcatggtggtgcatgcctgtaatcccagctgctcaggagcctggcaacaagagcaaaactccagctcnnnnnnnnnnnnnnnnnnnnnnnnnctggagctggtggcttaggccatcacccttcccttggctggaactactggacagacccttttgagatgtgcctgtggtgctgtggagatgtgtgtagtggtcttagctctttgttgagcttgtgtgtgtgttgtgtagtcttagctgtatgctgaaattgggcgtgtgttggagggcttcttagctctttggtgagattgtatttctatgtgtttgtatcagctgaatgttgctggaaataaacccttggattgtcaaa

SEQ ID NO: 75767 - DNA, 830 bp, Homo Sapiens
  misc_feature (338)..(354): n is a, c, g, or t
  misc_feature (392)..(578): n is a, c, g, or t
tgagccaccgtgcctagccaaggatgagatttttaaagtatgtttcagttctgtgtcatggttggaagacagagtaggaaggatatggaaaaggtcatggggaagcagaggtgattcatggctctgtgaatttgaggtgaatggttccttattgtctaggccacttgtgaagaatatgagtcagttattgccagccttggaatttacttctctagcttacaatggaccttttgaactggaaaacaccttgtctgcattcactttaaaatgtcaaaactaatttttataataaatgtttattttcacattgaagagggaaaagactgtccccaaaacgnnnnnnnnnnnnnnnnnggcccgcgtatgcggccgctcctcgtgccgaattcttnnnnnnnnnnnnnnnnnnnnnnnnnnnnnnnnnnnnnnnnnnnnnnnnnnnnnnnnnnnnnnnnnnnnnnnnnnnnnnnnnnnnnnnnnnnnnnnnnnnnnnnnnnnnnnnnnnnnnnnnnnnnnnnnnnnnnnnnnnnnnnnnnnnnnnnnnnnnnnnnnnnnnnnnnnnnnnnnnnnnnnnnnnngtttcaattcggaaactgtcgtgcaggtggataaaggaacggccaaccgcggggaaagcggtttgctatgggggtcttccgctcccgcccatacccctggcccgtctttcggtggggaacggacactcaccaagggggaaagggttccaaaatcacgggaacccagaaaaaaggggcaaggcacaaaggcagacgtgaaaggcgttcgggtttcaaggccgccctgaagacaaatcgctcaaccgggggaag

SEQ ID NO: 75768 - DNA, 1099 bp, Homo Sapiens
cttggccacagcctggagccactcctgctgggcagcccacagggtccctgggcggagggcaggagcatccagttggagttgacaacaggaggcagaggcatcatggagggtccccggggatggctggtgctctgtgtgctggccatatcgctggcctctatggtgaccgaggacttgtgccgagcaccagacgggaagaaaggggaggcaggaagacctggcagacgggggcggccaggcctcaagggggagcaaggggagccgggggcccctggcatccggacaggcatccaaggccttaaaggagaccaggggaacctgggccctctggaaaccccggcaaggtgggctacccagggcccagcggccccctcggggcccgtggcatcccgggaattaaaggcaccaagggcagcccaggaaacatcaaggaccagccgaggccagccttctccgccattcggcggaaccccccaatggggggcaacgtggtcatcttcgacacggtcatcaccaaccaggaagaaccgtaccagaaccactccggccgattcgtctgcactgtacccggctactactacttcaccttccaggtgctgtcccagtgggaaatctgcctgtccatcgtctcctcctcaaggggccaggtccgacgctccctgggcttctgtgacaccaccaacaaggggctcttccaggtggtgtcagggggcatggtgcttcagctgcagcagggtgaccaggtctgggttgaaaaagaccccaaaaagggtcacatttaccagggctctgaggccgacagcgtcttcagcggcttcctcatcttcccatctgcctgagccagggaaggaccccctcccccacccacctctctggcttccatgctccgcctgtaaaatgggggcgctattgcttcagctgctgaagggagggggctggctctgagagccccaggactggctgccccgtgacacatgctctaagaagctcgtttcttagacctcttcctggaataaacatctgtgtctgtgtctgctgaacatgagcttcagttgctactcggagcattgagagggaggcctaagaataataacaatcc

SEQ ID NO: 75769 - DNA, 1125 bp, Homo Sapiens
  misc_feature (959)..(959): n is a, c, g, or t
cagtcgacggtaccggacatatgcccgggaatttcggccattacggccggggagcccacagggttccctggtgcggagtggcagcgagcatcagttggagtgacaacaggaggcagaggcatcatggagggtccccggggatggctggtgctctgtgtgctggccatatcgctggcctctatggtgaccgaggacttgtgccgagcaccagacgggaagaaaggggaggcaggaagacctggcagacgggggcggccaggcctcaagggggagcaaggggagccgggggcccctggcatccggacaggcatccaaggccttaaaggacaccagggggaacctgggccctctggaaaccccggcaaggtgggctacccagggcccagcggccccctcggagcccgtggcatcccgggaattaaaggcaccaagggcagcccaggaaacatcaaggaccagccgaggccagccttctccgcccattcggcggaaccccccaatggggggcaaccgtgctcatcttcgacacggtcatcaccaaccaggaagaaccgtaccagaaccactccggccgattcgtctgcactgtacccggcaactactacttcaccttccaggtgctgtcccagtgggaacatccgcctgtccatcgttctcctcctcaaggggccaggtccgacgctccctgagcttctgtgaccccaccacccaggggttctctcccggggtgtcagggggcccgccgcttcccctgccgtccggtgcaccacgtctgggtttgaaaaccacccccaaaagggtcacatttactacgggctctgagggcggacacagccctccagcgggtttccttctctttcccattctgccttgacccctgggaaagggcaccacttttccccccaccacccctctcctgggctttaccctggctccccctcccgcaaaacacgggcgcnccccttctcggccttccccttgcctgttcggcgagccggagcctcgaccccgtctcccatctctcctcccccctgttcccccacccctataccctgtgatcacaaaacaccctttcccattgtctccattaccacttccccgctgttctaccttgcgttctctacc

SEQ ID NO: 75770 - DNA, 1090 bp, Homo Sapiens
  misc_feature (118)..(118): n is a, c, g, or t
  misc_feature (127)..(127): n is a, c, g, or t
ctgaccctaaacctccttcagatctctggcccaggctcaagccctagagatgggcaggtcctaggggctgggagctgcctgctgccatagcacacctttagctaggttggcccgagtnaggcctctntgctgtcctgccctggtgcatggccttagctttctaggccactgggagttgtggctgggcttcccatcttccacagagacatctccctgtgggatgggcagatgggcctggccttgagaaaggcattggccattggttgccatggtgaccagggaccacgttgctgcctgtgaaatgctgagtgagcgagtaagggaggaggggcgattgagggttcacctctgccttggggaggctgatttctcacacactggctgccctctcattctcactcctccttgggccctgaggctgctggatccagtctgcctgcctccctgtgcagtccagccctgccttgctgcagccccagcccagatggcactcagcgctctcccctgagggagtccctgggcctagccatcccctcactattcccgacccaaagggtgacttttcatctgaacttaaggtgggagatatttttaacttttttccactttggaaaatgtcactgtgacaaaagccagcatactttccctgcacccatctgctcaccagatctcaggcaggaaagcccctctctgttgaagtcaggggctatcttttggtatacttgtgtgaaagtggctggttgggagcagagctaagtggcttcccattaacctgaggtctctttctttactctgggtcagacctgaggttggggaaggcgactgagccatgctcagaatgtctggtcctggcttgggcctgagtagggcagagagggcctttcatggctgatcagagcttaccagccccaccccaccatggtagccttagggtgctgagtgcctgatactgcctgacaagtgcctgacacgcagcctagttccttcctggcccctctctcactggctgggaaaccctagaccatgtcagataggacaacactgctgggttttacatccagatagtaataaacaccatttcatcattttc

SEQ ID NO: 75771 - DNA, 1012 bp, Homo Sapiens
  misc_feature (103)..(104): n is a, c, g, or t
  misc_feature (166)..(166): n is a, c, g, or t
  misc_feature (225)..(225): n is a, c, g, or t
  misc_feature (227)..(227): n is a, c, g, or t
  misc_feature (238)..(639): n is a, c, g, or t
  misc_feature (682)..(699): n is a, c, g, or t
ggacgagactcaccgaatggatctacagcgagtagggaagccacgctccgaggagaagccgacagttccgtagcgcaggtcgaacagaggcgcacgagagctnncaggagaacgcttgttcttatagtctgtccgttcgccactctgactgagctcgattttgtgngctcgtcagggggcgagcctatgaaaaacccagcaacgcgccttttacggttcctgccntntgctgccttgnnnnnnnnnnnnnnnnnnnnnnnnnnnnnnnnnnnnnnnnnnnnnnnnnnnnnnnnnnnnnnnnnnnnnnnnnnnnnnnnnnnnnnnnnnnnnnnnnnnnnnnnnnnnnnnnnnnnnnnnnnnnnnnnnnnnnnnnnnnnnnnnnnnnnnnnnnnnnnnnnnnnnnnnnnnnnnnnnnnnnnnnnnnnnnnnnnnnnnnnnnnnnnnnnnnnnnnnnnnnnnnnnnnnnnnnnnnnnnnnnnnnnnnnnnnnnnnnnnnnnnnnnnnnnnnnnnnnnnnnnnnnnnnnnnnnnnnnnnnnnnnnnnnnnnnnnnnnnnnnnnnnnnnnnnnnnnnnnnnnnnnnnnnnnnnnnnnnnnnnnnnnnnnnnnnnnnnnnnnnnnnnnnnnnnnnnnnnnnnnnnaagaattcggcacgaggtgttggagcggccgcggctgtaggcnnnnnnnnnnnnnnnnnnggcaaatgtttacattcaattaaggggaaaaagtagaaccagcacaaatgagtggcagttgctggagcataactgcttcaataaatcttcatcttggggtaattacaggcaagtcattttcacatcctcttgaggttcagagcatcagaatgaactctatgaatacatgtgtaagtgccagacagctgaatctttatcaggtattgtaaagatacacatatgatatgtttattaaaattgaaataatgtaaaacacatgaataaatttgcaaaaccaagatcacagtacaccatatgcactctggtaccttaa

SEQ ID NO: 75772 - DNA, 598 bp, Homo Sapiens
caccacagagttaaaatatttaatgacaaaattagggtttgttgtaatagtgaatcaatagagcaggtgttacttatctctgaattaaacaaaaattatatttgacatctcagagaacttctgaagaataactgtatgacagacatcagtagtgtcacaatttctaaaattaagagctaaacctatctttaatgccccttatttagagcatcctgtaaataattttaaatagatgcacaacctttgctagccacaaaagtagtattaaaacagttttcactgtaacttaagtctaacacgtaatctgaacttcttcagagcttgaaaaaaggtaactactgatcatgttacattttacaaatacattctttaatatgaaacattaacctgaataactgcatactttctgtacacaggtatctaataatactagtgagaaatactacagctatattccaggaagaagtggtaatactggaaagtttctttcctttttgagttgtctatacaataagtccttcacagaaatatagtatcccaaaattcatgagagaagtgcagaaatgaaacaaatgaaatgtcttctgacaagctcaac

SEQ ID NO: 75773 - DNA, 2818 bp, Homo Sapiens
  misc_feature (984)..(984): n is a, c, g, or t
ggcagtaactataacggttctaaggtagcgaggcctgggtggcgaattcggcacgagggcaccctggacaccaaggagaatctggaggggacactgaggagacgttccctaaggcgcagtaacagtatctccaagtcccctggccccagctccccaaaggagcccctgctgttcagccgtgacatcagccgctcagaatcccttcgttgttccagcagctattcacagcagatcttccggccctgtgacctaatccatggggaggtcctggggaagggcttctttgggcaggctatcaaggtgacacacaaagccacgggcaaagtgatggtcatgaaagagttaattcgatgtgatgaggagacccagaaaacttttctgactgaggtgaaagtgatgcgcagcctggaccaccccaatgtgctcaagttcattggtgtgctgtacaaggataagaagctgaacctcctgacagagtacattgaggggggcacactgaaggactttctgcgcagtatggatccgttcccctggcagcagaaggtcaggtttgccaaaggaatcgcctccggaatggcctatttgcactctatgtgcatcatccaccgggatctgaactcgcacaactgcctcatcaagtcggacaagactgtggtggtggcagactttgggctgtcacggctcatagtggaagagaggaacaagggcccccatggagaaggccaccaccaagaaacgcaccttgcgcaacaacgaccgcaagaagcgctacacggtggtgggaaacccctactggatggcccctgagatgctgaacggaaagagctatgatgagacggtggatatcttctcctttgggatcgttctctgtgagatcattgggcaggtgtatgcagatcctgactgccttccccgaacactggactttggcctcaacgtgaagcttttctgggagaagtttgttcccacagattgtcccccggnccttcttccccctggccgccatctgctgcagactggagcctgagagcagaccagcattctcgaaattggaagactcctttgagcccctctccctgtacctggggggagctgggcatccccgctgcctgcaaacctggagggagttggaccacactgtgagcatgcagtacggcctgacccgggactcacctccctagccctggcccagccccctgcaggggggtgttctacagccagcattgcccctctgtgccccattcctgctgtgagcagggccatccgggcttcctgtggattggcggaatgtttagaagcagaacaagccattcctattacctccccaggaggcaagtgggcgcagcaccagggaaatgtatctccacaggttctggggcctagttactgtctgtaaatccaatacttgcctgaaagctgtgaagaagaaaaaaacccctggcctttgggccaggaggaatctgttactcgaatccacccaggaactccctggcagtggattgtgggaggctcttgcttacactaatcagcgtgacctggacctgctgggcaggatcccagggtgaacctgcctgtgaactctgaagtcactagtccagctgggtgcaggaggacttcaagtgtgtggacgaaagaaagactgatggctcaaagggtgtgaaaaagtcagtgatgctccccctttctactccagatcctgtccttcctggagcaaggttgagggagtaggttttgaagagtcccttaatatgtggtggaacaggccaggagttagagaaagggctggcttctgtttacctgctcactggctctagccagcccagggaccacatcaatgtgagaggaagcctccacctcatgttttcaaacttaatactggagactggctgagaacttacggacaacatcctttctgtctgaaacaaacagtcacaagcaaaggaagaggctgggggactagaaagaggccctgccctctagaaagctcagatcttggcttctgttactcatactcgggtgggctccttagtcagatgcctaaaacattttgcctaaagctcgatgggttctggaggacagtgtggcttgtcacaggcctagagtctgagggaggggagtgggagtctcagcaatctcttggtcttggcttcatggcaaccactgctcacccttcaacatgcctggtttaggcagcagcttgggctgggaagaggtggtggcagagtctcaaagctgagatgctgagagagatagctccctgagctgggccatctgacttctacctcccatgtttgctctcccaactcattagctcctgggcagcatcctcctgagccacatgtgcaggtactggaaaacctccatcttggctcccagagctctaggaactcttcatcacaactagatttgcctcttctaagtgtctatgagcttgcaccatatttaataaattgggaatgggtttggggtattaatgcaatgtgtggtggttgtattggagcagggggaattgataaaggagagtggttgctgttaatattatcttatctattgggtggtatgtgaaatattgtacatagacctgatgagttgtgggaccagatgtcatctctggtcagagtttacttgctatatagactgtacttatgtgtgaagtttgcaagcttgctttagggctgagccctggactcccagcagcagcacagttcagcattgtgtggctggttgtttcctggctgtccccagcaagtgtaggagtggtgggcctgaactgggccattgatcagactaaataaattaagcagttaacataactggc

SEQ ID NO: 75774 - DNA, 1277 bp, Homo Sapiens
  misc_feature (83)..(117): n is a, c, g, or t
aagaactgtatcggatcactatagggcgctagctcttgcgagcgaacgacgagcgcaggagtagtgagcgaggaagcggccgnnnnnnnnnnnnnnnnnnnnnnnnnnnnnnnnnnncagtcgacggtaccggacatatgcccgggaattcggccattacggtccgggagctttcaggcaagtattggatttacagacagtaactaggccccagaacctgtggagatacatttccctggtgctgcgcccacttgcctcctggggaggtaataggaatggcttgttctgcttctaaacattccgccaatccacaggaagcccggacggccctgctcacagcaggaatggggcacagaggggcaatgctggctgtagaacacccccctgcagggggctgggccagggctagggaggtgagtcccgggtcaggccgtactgcatgctcacagtgtggtccaactcctccagtctctgcaggcagcgggatgcccagctcccccaggtacagggagagggcctcaaaggagtcctccaatttcgagaatgctggtctagaaggaaaacgaggtaaattagaggcaggtggaacatgagcagggccatggggtgggtggaagggatctaggctcagctacttcctggttgtataacgtcaggcaaactccttcacctagtagtgcctctgtgagaaatgggcataatgttaccggtacctcatatatttgctataaagattaggtaacactataacaaggctggactagctggagttaatacttaaaaacaataggagaaaaacttccctcccatatcttagagaaaatgcagttatcaaaggtggaatcggaaacaccaggctcctagtgccacggaaatggcttggctgccccggaagcctaagacagctcaggcttactcctcctcctccatgtttatgcttaaatgtcatgtcacctcagtgaggcctgctctgacgaccatatttaaaattgcaactggtaccctgaacaatcgtctttacttgtcttgactctttttccatagcatctgccacattctaatattcaatatagtttacttattgtatctactgtatgatacagtagataccatgctagaatctatgttctatgagggtaagcacctttattttgttcgctgctgtaacccaagtgtttagaactgtacctagcacacagtaggcattcaatactgtatatatatattttttaataaattaaagatatttagaatgacaagaggtattagaaaacaaa

SEQ ID NO: 75775 - DNA, 572 bp, Homo Sapiens
gaaagccacacttattcttttcagtaacctgctagtgcacaggctgtactttaggtacttaaaatatgcactagaataaatttgcaaggccctaaaatatcactgttatttttggagtaattcagtataggttcgtttaaaagagatttttataacttcagacatgcatcagtaggaaataacttgagaaattcatatggttatgttacaaattcatattctgttactacagtaaacgttaagagttttaaacagttaagattgtacaatttttcttcttttctatattacaagggccccagtgttaatgtcttagattttcagtatttgaacttatttttttaaattctgtcattgagataagaataattcaggtagcatctgaaattttaatgaatgtataattggcatatcatggaaaattaaccagaaagtatcagttcttaaaagttatgcctagaaattatgtaaagctaaactactggttagaaagtattcagtgtaatattgtattaatttgttaaattctaaacttgaatttcaataaaattttaaagctaattgtaaaaaaa

SEQ ID NO: 75776 - DNA, 1208 bp, Homo Sapiens
  misc_feature (171)..(171): n is a, c, g, or t
  misc_feature (191)..(191): n is a, c, g, or t
  misc_feature (393)..(401): n is a, c, g, or t
  misc_feature (980)..(989): n is a, c, g, or t
  misc_feature (1151)..(1160): n is a, c, g, or t
cgtccggatgaagcggcatagccacgcattattgatagctcatcatagcacccagttacacttatgctccgctctatgtgttggaatgtagcgtaacattcacacaggaacagtatgactgatacgatttatacgaccactataggatttgccctcgagccagaattcgcnacgagtttactttgtcattntcatcaagcacagagggaccaatgcaacaagaacacaaatgtgaaatcatgggctgactgagacaattctgtccatgtaaagatcctctggaaaaagactccgagagttataactactgtagtataaatataggaactaagttaaacttgtacatttctgttgatcacgccgttatgttgcctcaaatagttttagaagagnnnnnnnnntatatccttgttttccacactatgtgtgttgttcccaaaagaatgactgttttggttcatcagtgaattcaccatccaggagagactgtggtatatattttaaacctgttgggccaatgagaaaagaaccacactggagatcatgatgaacttttggctgaacctcatcactcgaactccagcttcaagaatgtgttttcatgcccggcctttgttcctccataaatgtgtcctttagtttcaaacagatctttatagttcgtgcttcataagccaattcttattattatttttgggggactcttcttcaaagagcttgccaatgaagatttaaagacagagcaggagcttcttccaggagttctgagccttggttgtggacaaaacaatcttaagttgggcagctttcctcaacacaaaaaaaagttattaatggtcattgaaccataactaggactttatcagaaactcaaagcttgggggataaaaaggagcaagagaatactgtaacaaacttcgtacagagttcggtctattaattgtttcatgttagatattctatgtgtttacctcaattgnnnnnnnnnngaatgtttttgctagtatcagatctgctgtggaattggtattgtatgtccatgaattcttcttttctcagcacgtgttcctcactagaagaaaatgctgttacctttaagctttgtcaaatttacattaaaatacttgtatgaggactgtgacgttatgttnnnnnnnnnnggtgttaagtcacaaaaagcggtaataaatatttcatttttgattttt

SEQ ID NO: 75777 - DNA, 966 bp, Homo Sapiens
  misc_feature (12)..(20): n is a, c, g, or t
  misc_feature (698)..(698): n is a, c, g, or t
  misc_feature (737)..(737): n is a, c, g, or t
accagttaaaannnnnnnnnaatttcaagggaagaggctttaacatgagaaatacaatatatcccagtccattatctacatattcttcattttggccatgaggtcttccaagctttcaccagaatcttccactgttaactcagtgacagaatcttcttgcttttttggaattgtgtatgccactgtaattccttcaggtaagtctggaactggacctgaaaaatttttcagttcctcttctgaaacctcagataccagctcaataccccattcattatcttcatggattatctcttcctcttcttgtataacctcttgtttaggcagtgctgctacctttttcttatattcctcctgctgcttcctgcaatttctgtcatcacactgaggatttggcttcatggacatagtaggaaaaaaatcctgcattgcattgtatccaaggtaaaaactaacagtaccaaaatttaacagaaactttaacacgttttgtactaagatcccagcaaccacacccatagtggtaggaagactggctgcacaaacaccttctcgtttcagagtcttttcatcaatatttgcagcaactacaagtggtggagcacacgcaaaacaagcagattctccaggaattataagctgtatatgccctgaaactgcattttcactgaccccagattccatccatgtttgtccangttcattacaagctgtatttattgtcattcgagcttcanatttgtcacacagcttagaactagatcacaggttttcttcttctacccacattacttatctatcatgaatgttgaagtctcgtgcgaattctggctcgagggcaattccctaatgagtcgattaatcgtatcagtcatactgttctgtgtgaatgtatcgctcaatcaacacatcagcggagaaagtgtagctggggctatgatgacactcaatatgctggctctgcgc

SEQ ID NO: 75778 - DNA, 1005 bp, Homo Sapiens
  misc_feature (109)..(109): n is a, c, g, or t
  misc_feature (119)..(119): n is a, c, g, or t
  misc_feature (126)..(126): n is a, c, g, or t
  misc_feature (159)..(159): n is a, c, g, or t
  misc_feature (177)..(177): n is a, c, g, or t
  misc_feature (217)..(217): n is a, c, g, or t
  misc_feature (229)..(229): n is a, c, g, or t
  misc_feature (272)..(272): n is a, c, g, or t
  misc_feature (280)..(327): n is a, c, g, or t
caccatatgtgatgtcatcatagccccagctacactttctccgctgatgtgttgattgagcgatacattcacacagaacagtatgactgatacgattatacgactcctntaggatttgncctcggnccagatcgcacgagggcaaggcagcaatcttgntgtgatatttctgatttnccagaaatcaagcagagattgagctctgattcagtaactntgagagtcgtcntctcagaaaagccggagcctcaacagaaagctcctttagttcntcgtcctnnnnnnnnnnnnnnnnnnnnnnnnnnnnnnnnnnnnnnnnnnnnnnnnccggagccagaggaggagatcctgggatcagatgatgaggagcaagaggaccctgcggactactgcaaaggtggatatcatccagtgaaaattggagacctcttcaatggccggtatcatgttattagaaagcttggatgggggcacttctctactgtctggctgtgctgggatatgcaggggaaaagatttgttgcaatgaaagttgtaaaaagtgcccagcattatacggagacagccttggatgaaataaaattgctcaaatgtgttcgagaaagtgatcccagtgacccaaacaaagacatggtggtccagctcattgacgacttcaagatttcaggcatgaatgggatacatgtctgcatggtcttcgaagtacttggccaccatctcctcaagtggatcatcaaatccaactatcaaggcctcccagtacgttgtgtgaagagtatcattcgacaggtccttcaagggttagattacttacacagtaagtgcaagatcattcatactgacataaagccggaaaatatcttgatgtgtgtggatgatgcatatgtgagaagaatggcagctgaggccactgagtggcagaaagcaggtgctcctcctccttcagggtctgcagtgagtacggctccacagcagaaacctataggaaaaatatctaaaaacaaa

SEQ ID NO: 75779 - DNA, 1007 bp, Homo Sapiens
gaggggcatatagtacaactaattagaaccacgcgtgttttacaaaacagagcagggctgtacggttcggatattccgggatatgtcgaccacgcgtcgggagacgtgtctgtctgtgaggcgctgggtggggtcccaggctctgggctaggaaggcagcggcgaggtgcctccccacgtacccctcgcgggcccagccgagcaacgtggggcgaaggcggcggcgaagtgaccgggctgggagcgttggcggccggagtcccagccatggcggagtctgtggagcgcctgcagcagcgggtccaggagctgggagcgggaacttgcccaggagaggagtctgcaggtcccgaggagcggcgacggagggggcggccgggtccgcatcgagaagatgagctcagaggtggtggattcgaatccctacagccgcttgatggcattgaaacgaatgggaattgtaagcgactatgagaaaatccgtacctttgccgtagcaatagtaggtgtgggtggagtaggtagtgtgactgctgaaatgctgacaagatgtggcattggtaagttgctactctttgattatgacaagggtggaacctagccaatatgaatagacttttcttccaacctcatcaaggcaggattaagtaaagttcaagcagcagaacatactctgaggaacattaatcctgatgttctttttgaagtacacaactattaatataaccacagtggaaaactttcaacatttcatggatagaataagtaatggtgggttagaagaaggaaaacctgttgatctagttcttagctgtgtggacaattttgaagctcgaatgacaataaatacagcttgtaatgaacttggacaaacatggatgggaatctggggtcagtgaaaatgcagtttcagggcgtatacagcttataattcctgggagaatcctgcttggttttgcgtgggctccacccactttgtagttgctgccaaatattggatgaaaagt

SEQ ID NO: 75780 - DNA, 1551 bp, Homo Sapiens
  misc_feature (82)..(116): n is a, c, g, or t
tttcataactaatagggcggctaagctcgtcgcagccgaacgaccgagcgcagcgaagatcagtgagacgaggaagcggcgnnnnnnnnnnnnnnnnnnnnnnnnnnnnnnnnnnncagtcgacggtaccggacatatgcccgggaattcggccattacggccggggggcgtgggtagaggtgcgcgcctgggacctgaacatggacttcccgtgcctctggctagggctgttgctgcctttggtagctgcgctggatttcaactaccaccgccaggaagggatggaagcgtttttgaagactgttgcccaaaactacagttctgtcactcacttacacagtattgggaaatctgtgaaaggtagaaacctgtgggttcttgttgtggggcggtttccaaaggaacacagaattgggattccagagttcaaatacgtggcaaatatgcatggagatgagactgttgggcgggagctgctgctccatctgattgactatctcgtaaccagtgatggcaaagaccctgaaatcacaaatctgatcaatagtacccggatacacatcatgccttccatgaacccagatggatttgaagccgtcaaaaagcctgactgttattacagcatcggaagggaaaattataaccagtatgacttgaatcgaaatttccccgatgcttttgaatataataatgtctcaaggcagcctgaaactgtggcagtcatgaagtggctgaaaacagagacgtttgtcctctctgcaaacctccatggtggtgccctcgtggccagttacccatttgataatggtgttcaagcaactggggcattatactcccgaagcttaacgcctgatgatgatgtttttcaatatcttgcacatacctatgcttcaagaaatcccaacatgaagaaaggagacgagtgtaaaaacaaaatgaactttcctaatggtgttacaaatggatactcttggtatccactccaaggtggaatgcaagattacaactacatctgggcccagtgttttgaaattacgttggagctgtcatgctgtaaatatcctcgtgaggagaagcttccatccttttggaataataacaaagcctcattaattgaatatataaagcaggtgcacctaggtgtaaagggtcaaggttttgatcagaatgggaaatccattacccaatgtaattgtggaagtccaagacagaaaacatatctgcccctatagaaccaacaaatatggagagtattatctccttctcttgcctgggtcttatataataaatgttacagtccctggacatgatccacacatcacaaaggtgattattccggagaaatcccagaacttcagtgctcttaaaaaggatattctacttccattccaagggcaattggattctatcccagtatcaaatccttcatgcccaatgattcctctatacagaaatttgccagaccactcagctgcaacaaagcctagtttgttcttatttttagtgagtcttttgcacatattcttcaaataaagtaaaatgtgaaactc

SEQ ID NO: 75781 - DNA, 663 bp, Homo Sapiens
catcactgtcaaacccacactgtattccatgcccagcgctgccacgtgaatgtactctgctcacttccttcctggattacccatagccccacctcatcctcctacccttgctttcctccctgaagtcagagagatcctactcaagagataagtgctcctgacagcccttattacagaactgaagtactctccttagcttcagctctgtgcccacgtgccttggctttggatacaaggtactacagcactttgtccactctccaggcttacctgtgtcattccacatgcacatcttagaaaatgccagccttagagaattctccctagccccaaaatgtctttgcccagtgcaattccttcttcctgtattacccctttccctccttcacactatctgcctggctaattcttatttatccttagttcaagtatggccttttctgggaaggtgaccctccttggccaccccttgcatatactttgatgccctagggcacaccccctttatttccctcatagaaacagccttctgtaaattgttccatgacaacctgtatttcaatttgtaagaaatttgcatgtactgtgagctccccaacgtcaggagactgacccttttgatatcattgctaagcctcattaaatgaatgaatgaaaatgaaa

SEQ ID NO: 75782 - DNA, 1086 bp, Homo Sapiens
  misc_feature (299)..(316): n is a, c, g, or t
  misc_feature (830)..(867): n is a, c, g, or t
cagtcgacggtaccggacatatgcccgggaattcggccattacggccgggtactctttttaggctaaaaacctgaaaggaaaccatttctattacagcgagaataattcacccttagaagtccagttttcttccttttttgaaataatatgtttgtattaaggtaactgtgttactcctactgcatccaaagctcactaatctctgaggttttaggagatttatctactctcctctaattggtagggttgactttcccaggacattgctaaggttagcccctgaaggcaataatatttnnnnnnnnnnnnnnnnnnggattccacatagctccaaaagtcaggtaaaagctggagggaattagagatagcaaggaaagatcaaggattaacttgcaagctctattttctctaatatctggatctaggaaaattgtctaccgccttgtctgctggatcactcatcacctacgcattgtataaaaggctacccaaaaagaaattgttaacaaggaatgttaacaagcctgtaaaagctaataaacaacagactgtggtgtttgctttcagtttactcctggcaagcagaagtaagagcgtaagtcatcaacttcctaggtggctgtagggaacacctcctacagtaagcctatagggacaaaaactggtatgggaatcacaagtgtgagcaccattatcattaccttcctccacatgctctcatttgtggaaaaattaatctaggcctctcgaaaaccctatggaatctgccttttcatgtccaggaaccctgtgggctttttctgattgctgcttgatagtgctaacctannnnnnnnnnnnnnnnnnnnnnnnnnnnnnnnnnnnnntgtcaacctcctcagtgaaggtcatacagtataaacagccatactatacagccatatatctgaaaactttcttggcttaattgtgcttctagaacattctaaatgaaaagggttaatgtcatttaaaaagtaaagcaatggaaattattagcatgctttgatttatagataatggctaagattgatgcttggtaaaaccctaattttcctgttttaatg

SEQ ID NO: 75783 - DNA, 550 bp, Homo Sapiens
taggctccgccctctgcacgccgctcacggaagtggagccagaatccacagatgtcattatccatctgcacactttgtttactacccagaaggcaagaatattgcattttaaaagtgcccggacttttgttctttcttatcacaaatgacttggaaagctccgaccactcatgtttaccccaagtgaaagtcccattcaaagccttgcttcctggagagctttgagattctggtacaaaaggcattttataagcacaaagtggaaaagcatcattcatattcatttgctgctgcggcatttctccctggaatcttcctcttgtctgtcaacattgggcaaaaggactggcctcatctacattacagatatccttgtgatggtctggaggtaggaaaaggacacccagcacaagagtgagaagggaaactcaagctctcctgttggagagtctcaggcttctttatccataaaactgattggacataattggtgtgggtttatgatttgttttggaaaaacctgagtatgaaatcaatactgtgctttgtg

SEQ ID NO: 75784 - DNA, 994 bp, Homo Sapiens
  misc_feature (813)..(841): n is a, c, g, or t
gcggccgcggcggtggggcgcaggccgccgcgcgagtgaatcgaggcggcgggcccatccggaaccggccggccatcgcccgcggcgcggccggcggaggcggcaggaaccgaccggcgccctacagcaggccaaaacaacttcccgacaagtggcagcacgatcttttcgacagtggcttcggcggtggtgccggcgtggagacaggtgggaaactgctggtgtccaatctggattttggagtctcagacgccgatattcaggaactctttgctgaatttggaacgctgaagaaggcggctgtgcactatgatcgctctggtcgcagcttaggaacagcagacgtgcactttgagcggaaggcagatgccctgaaggccatgaagcagtacaacggcgtccctctggatggccgccccatgaacattcagcttgtcacgtcacagattgacgcacagcggaggcctgcacagagcgtaaacagaggtggcatgactagaaaccgtggcgctggaggttttggtggtggtggaggcacccggagaggcacccgcggaggcgcccgtggaagaggcagaggtgccggcaggaattcaaagcagcagctttcggcagaggagctggatgcccagctggacgcctataatgcgagaatggacaccagttaaacagaccagcaaatccgcgtgcggaacaggacccaggcgtctcctcttgctccctggttggggggcggtggctggggctgtgcggccaatgatggatttgtttcttttatgttttaaaataggatttaaaaactcatgtaaaggnnnnnnnnnnnnnnnnnnnnnnnnnnnnnaattctgaaacagacctgttttgtaccgagttatttttgggataaattttactggttgctgttgtggagaaggtggcgtttccaccttttccataataaaatagaaatgtgtgtatcgactaaagacttgaattctcaaaaataaaacatgtc

SEQ ID NO: 75785 - DNA, 1936 bp, Homo Sapiens
gtgatcttcacgtccgacaacgggatccccttccccagcggcaggaccaacctgtactggccgggcactgctgaacccttactggtgtcatccccggagcacccaaaacgctggggccaagtcagcgaggcctacgtgagcctcctagaggaaaagaatgaggctcagagaggtgaagtaagctgctcaggattgcacagctgacctcacgcccaccatcttggattggttctcgatcccgtaccccagctacgccatctttggctcgaagaccatccacctcactggccggtccctcctgccggcgctggaggccgagcccctctgggccaccgtctttggcagccagagccaccacgaggtcaccatgtcctaccccatgcgctccgtgcagcaccggcacttccgcctcgtgcacaacctcaacttcaagatgccctttcccatcgaccaggacttctacgtctcacccaccttccaggacctcctgaaccgcaccacagctggtcagcccacgggctggtacaaggacctccgtcattactactaccgggcgcgctgggagctctacgaccggagccgggacccccacgagacccagaacctggccaccgacccgcactttgctcagcttctggagatgcttcgggaccagctggccaagtggcagtgggagacccacgacccctgggtgtgcgcccccgacggcgtcctggaggagaagctctctccccagtgccagcccctccacaatgagctgtgaccatcccaggaggcctgtgcacacatcccaggcatgtcccagacacatcccacacgtgtccgtgtggccggccagcctggggagtagtggcaacagcccttccgtccacactcccatccaaggagggttcttccttcctgtggggtcactcttgccattgcctggagggggaccagagcatgtgaccagagcatgtgcccagcccctccaccaccaggggcactgccgtcatggcaggggacacagttgtccttgtgtctgaaccatgtcccagcacgggaattctagacatacgtggtctgcggacagggcagtgcccccagcccatgacaagggagtcttgttttctggcttggtttggggacctgcaaatgggaggcctgaggccctcttcaggctttggcagccacagatacttctgaacccttcacagagagcaggcaggggcttcggtgccgcgtgggcagtacgcaggtcccaccgacactcacctgggagcacggcgcctggctcttaccagcgtctggcctagaggaagcctttgagcgacctttgggcaggtttctgcttcttctgttttgccccatggtcaagtccctgttccccaggcaggtttcagctgattggcagcaggctccctgagtgatgagcttgaacctgtggtgtttctgggcagaagcttatcttttttgagagtgtccgaagatgaaggcatggcgatgcccgtcctctggcttgggttaattcttcggtgacactggcattgctgggtggtgatgcccgtcctctggcttgggttaattcttcggtgacactggcgttgctgggtggcaatgcccgtcctctggcttgggttaattcttcggtgacactggcgttgctgggtggcgatgcccgtcctctggcttgggttaattcttggatgacgtcggcgttgctgggagaatgtgccgttcctgccctgcctccacccacctcgggagcagaagcccggcctggacacccctcggcctggacacccctcgaaggagagggcgcttccttgagtaggtgggctccccttgcccttccctccctatcactccatactggggtgggctggaggaggccacaggccagctattgtaaaagctttttattttagtaaaatatacagaagttctttttctgaaa

SEQ ID NO: 75786 - DNA, 1403 bp, Homo Sapiens
  misc_feature (40)..(40): n is a, c, g, or t
  misc_feature (1104)..(1207): n is a, c, g, or t
  misc_feature (1241)..(1242): n is a, c, g, or t
  misc_feature (1301)..(1339): n is a, c, g, or t
acaggaccaggttgtcaaaccgcaggctgataaacgacgngcagtaactataacggtcctaaggtagcgaggcctgggtggcgaattcggcacgaggctgaaccttgtggatctggacgtcctgggaatgtactggccgtggacactggacaacagtgtgtacctgtggagtgcaagctctggtgacatcctgcagcttttgcaaatggagcagcctggggaatatatatcctctgtggcctggatcaaagagggcaactacttggctgtgggcaccagcagtgctgaggtgcagctatgggatgtgcagcagcagaaacggcttcgaaatatgaccgagtcacgttctgcccgagtgggctccctaagctggaacagctatatcctgtccagtggttcacgttctggccacatccaccaccatgatgttcgggtagcagaacaccatgtggccacactgagtggccacagccaggaagtgtgtgggctgcgctgggccccagatggacgacatttggccagtggtggtaatgataacttggtcaatgtgtggcctagtgctcctggagagggtggctgggttcctctgcagacattcacccagcatcaaggggctgtcaaggccgtagcatggtgtccctggcagtccaatgtcctggcaacaggagggggcaccagtgatcgacacattcgcatctggaatgtgtgctctggggcctgtctgagtgccgtggatgcccattcccaggtgtgctccatcctctggtctccccattacaaggagctcatctcaggccatggctttgcacagaaccagctagttatttggaagtacccaaccatggccaaggtggctgaactcaaaggtcacacatcccgggtcctgagtctgaccatgagcccagatggggccacagtggcatccgcagcagcagatgagaccctgaggctatggcgctgttttgagttggaccctgcgcggcggcgggagcgggagaaggccagtgcagccaaaagcagcctcatccaccaaggcatccgctgaagaccaacccatcacctcagttgttttttatttttctaataaagtcatgtctcccttcnnnnnnnnnnnnnnnnnnnnnnnnnnnnnnnnnnnnnnnnnnnnnnnnnnnnnnnnnnnnnnnnnnnnnnnnnnnnnnnnnnnnnnnnnnnnnnnnnnnnnnnntttccatagaaacacccctaaaaaggaccaaacnnattttttttgtgggggccccctccggcccccaaaaaaattttttaaaaccattcttttnnnnnnnnnnnnnnnnnnnnnnnnnnnnnnnnnnnnnnncaaaaaagttgttttcccaaagaaaacaccggggcacaagaacaaggggttgggttatcccccc

SEQ ID NO: 75787 - DNA, 1461 bp, Homo Sapiens
gccagtaactataacggttctaaggtagcgaggcctgggtggcgaattcggcacgagggccaggcgtgttaaagccggtcggaactgctccggagggcacgggctccgtaggcaccaactgcaaggacccctccccctgcgggcgctcccatggcacagttcgcgttcgagagtgacctgcactcgctgcttcagctggatgcacccatccccaatgcaccccctgcgcgctggcagcgcaaagccaaggaagccgcaggcccggccccctcacccatgcgggccgccaaccgatcccacagcgccggcaggactccgggccgaactcctggcaaatccagttccaaggttcagaccactcctagcaaacctggcggtgaccgctatatcccccatcgcagtgctgcccagatggaggtggccagcttcctcctgagcaaggagaaccagcctgaaaacagccagacgcccaccaagaaggaacatcagaaagcctgggctttgaacctgaacggttttgatgtagaggaagccaagatccttcggctcagtggaaaaccacaaaatgcgccagagggttatcagaacagactgaaagtactctacagccaaaaggccactcctggctccagccggaagacctgccgttacattccttccctgccagaccgtatcctggatgcgcctgaaatccgaaatgactattacctgaaccttgtggattggagttctgggaatgtactggccgtggcactggacaacagtgtgtacctgtggagtgcaagctctggtgacatcctgcagcttttgcaaatggagcagcctggggaatatatatcctctgtggcctggatcaaagagggcaactacttggctgtgggcaccagcagtgctgaggtgcagctatgggatgtgcagcagcagaaacggcttcgaaatatgaccagtcactctgcccgagtgggctccctaagctggaacagctatatcctgtccagtggttcacgttctggccacatccaccaccatgatgttcgggtagcagaacaccatgtggcccacactgagtggccacagccaggaagtgtgtgggctgcgctgggccccagatggacgacatttgggccagtggtggtaaatgataacttggtcaatgtgtggcctaacgctcctggagaaggtgggctgggttcctctgcaaacattcacccaacatcaaagggctgtcaaggccctaccatggtgtccctggcaggccaatgtcctggcaaacacgaggggggcaccagggatcgacacattccccatctggaaagtgggcctctggggcccggtccgaatggcctggaatgcccctttccccagggggggcccccatcctctggggcttccccgtttaaagggagccttcttttcacggcctaggggctttttcaacacaaacccgccttagtttttttg

SEQ ID NO: 75788 - DNA, 1435 bp, Homo Sapiens
  misc_feature (1160)..(1160): n is a, c, g, or t
  misc_feature (1168)..(1168): n is a, c, g, or t
  misc_feature (1300)..(1300): n is a, c, g, or t
  misc_feature (1324)..(1324): n is a, c, g, or t
ccacgagggagaccgtcgcctcctttcctccagggctccgtaggcaccaactgcaaggacccctccccctgcgggcgctcccatggcacagttcgcgttcgagagtgacctgcactcgctgcttcagctggatgcacccatccccaatgcaccccctgcgcgctggcagcgcaaagccaaggaagccgcaggcccggccccctcacccatgcgggccgccaaccgatcccacagcgccggcaggactccgggccgaactcctggcaaatccagttccaaggttcagaccactcctagcaaacctggcggtgaccgctatatcccccatcgcagtgctgcccagatggaggtggccagcttcctcctgagcaaggagaaccagcctgaaaacagccagacgcccaccaagaaggaacatcagaaagcctgggctttgaacctgaacggttttgatgtagaggaagccaagatccttcggctcagtggaaaaccacaaaatgcgccagagggttatcagaacagactgaaagtactctacagccaaaaggccactcctggctccagccggaagacctgccgttacattccttccctgccagaccgtatcctggatgcgcctgaaatccgaaatgactattacctgaaccttgtggattggagttctgggaatgtactggccgtggcactggacaacagtgtgtacctgtggagtgcaagctctggtgacatcctgcagcttttgcaaatggagcagcctggggaatatatatcctctgtggcctggatcaaagagggcaactacttggctgtgggcaccagcagtgctgaggtgcagctatgggatgtgcagcagcagaaacggcttcgaaatatgaccagtcactctgcccgagtgggctccctaagctggaacagctatatcctgtcccagtggttcacgttctggccacatccaccaccatgatgttcgggtagcagaacaccatgtggccacactgagtggccacagccaggaagtgtgtgggctgcgctgggccccaaatggacgacatgtggccaggggtggtaatgataacttggtcaatgtgtggcccaatgctcctgaagagggtggctgggttccctcggcagacattcacccagcatcaaggggctgtcanggccgtancatggtgtccctggcagtcaatgtcctggcacaggagggggcacagtgatcgaacatcgcatctggatgtgtgctctgggctgtctgatgcgtggatgccatcccagtgtgtcatctctggtctccatacangagtcatccaggcatgcttgcaanacactagtattggataccacatgcaggtgtgatcaagcaaatccggctgatcgcataccaagggcaatgatccacaaataactgagtaggcgttgattgctgccggcgacg

SEQ ID NO: 75789 - DNA, 1450 bp, Homo Sapiens
cgagcgggaaacagagagccggagccggatcccgatcccgagtccgagccgccgccgccatgagctgccccgtgcccgcctgctgcgcgctgctgctagtcctggggctctgccgggcgcgtccccggaacgcactgctgctcctcgcggatgacggaggctttgagagtggcgcgtacaacaacagcgccatcgccaccccgcacctggacgccttggcccgccgcagcctcctctttcgcaatgccttcacctcggtcagcagctgctctcccagccgcgccagcctcctcactggcctgccccagcatcagaatgggatgtacgggctgcaccaggacgtgcaccacttcaactccttcgacaaggtgcggagcctgccgctgctgctcagccaagctggtgtgcgcacaggcatcatcgggaagaagcacgtggggccggagaccgtgtacccgtttgactttgcgtacacggaggagaatggctccgtcctccaggtggggcggaacatcactagaattaagctgctcgtccggaaattcctgcagactcaggatgaccggcctttcttcctctacgtcgccttccacgacccccaccgctgtgggcactcccagccccagtacggaaccttctgtgagaagtttggcaacggagagagcggcatgggtcgtatcccagactggaccccccaggcctacgacccactgggacgtgctggtgccttacttcgtccccaacaccccggcagcccgagccgacctggccgctcagtacaccaccgtcggccgcatggaccaaggagttggactggtgctccaggagctgcggtgacgcccggtgtcctgaacgacacactggtggatcttcacgtcccgacaacgggatccccggccccagcggcaggaccaacctgtactggccgggcactgctgaacccttactggtgtcatccccggagcacccaaaacgctggggccaagtcagcgaggcctacgtgagcctcctaggtatgcctttgtctgtctccgtcaggaaaggtgtgggagtggatctgggacgggcccatgacctgtcagattctgctccacacccattacctaatgtggctctcatatcatctgggtgaggaagggactgtcactcccactctacagaggaaaagacatgaggctcagagtaggtgaagtaagctgctcaggattgcacatgctggtaagcactaagctaggattctcgcctggatcctgctgctttcaaaaccattgccttttccccgcctacctccgatgagcttcagaatcacctgggatgcttgttaatatccaaattgcaaatcccagggtgtccgattcagtagatcttggcgggctcaagaatttgcatgtctgacaagttcccaggtgatgccgatactgtcgggctagtcgggggggtaccgagctcg

SEQ ID NO: 75790 - DNA, 383 bp, Homo Sapiens
gtgcgctcgctccagcgcggcaggagggaccggccagtgaggtggatggtcttctgagccaaagatggcgtagctggggtacgggatcgagaaccaatccaagatggtgggcgtgaggtctggaagggacgcggcatctcagagcagcagagccctcagcacacaggagctgccctcggaagggccgaacctacgccactctgggcggctcccttctccaatccaatcagcagcgggaggtgccttgtcgagccgacacctctcaccgccacgtcatctctctgggcctcagtgccttgaatggtataacaagaggccctgattcggtgacatttaggatccttctaaaatcccatggactggaaaagaagtctcctttttgc

SEQ ID NO: 75791 - DNA, 1783 bp, Homo Sapiens
cggtccggaattcccgggatgggtgcttcactatggcgacggtgggggctccgcggcacttctgccgctgcgcctgcttctgcaccgataacttgtacgtggcgcgctatgggctgcacgtgcgcttccgaggcgagcagcagctgcgccgggactacggcccgatcctgcgcagccgaggctgtgttagcgccaaggacttccagcagctgttagcagagcttgagcaggaggtggagcggcggcagcggctggggcaggagtcagcagctaggaaagccctcatcgcgagttcctaccacccggcacggcctgaggtctacgactcactgcaggatgcagctctggcccccgagttcctggccgtgactgagtacagcgtgtccccagacgcagacctcaagggccttctccagcggctggagacagtatcggaggagaagcgcatctaccgggtgcctgttttcacagcgcccttctgccaggccctgctggaagagctggagcacttcgagcaatcggacatgcctaaggggaggcccaacaccatgaacaactacggggtgctgctgcacgagctcgggctggacgagccgctgatgacaccactgcgggagcgcttcctgcagccgctgatggccctgctgtaccctgactgtggcgggggccggctcgacagccaccgggcctttgtggtcaaatacgcaccgggccaggacctggagctgggctgccactatgataatgccgagctcaccctcaatgtggccttgggcaaggtcttcacagggggcgccctgtattttgggggcctcttccaggcacccacagccctgacggagcccctggaggtggagcacgtggtgggccagggtgtcctccaccgtggcggccagctgcatggagcccggcccttgggcactggtgagcgttggaaccttgtcgtctggctccgagcctctgctgtgcgcaacagcctctgtcccatgtgctgccgtgagcccgacctggtggacgatgagggcttcggtgatggcttcacccgagaggagcccgccacggtggatgtatgtgcgctcacctgagcttgcttgggcccagtgtgggggtggcaggcaggtgagggctccgttgccttggtctgggggcagaaataaaatccccgcagcctactgcacttcttggctcaacggtgtgccagcttctgggtcattctatgggcaaagatgctgccttagttcaggtttgtcagaagcagggtctggaatggggcttcagcgagggagtcagggaagcaggggaggggagggagcagctgggcaaggaagtggcttcagaggacgtccagcctcagctggccccacggagagctccaggcagagcccacagtaccacagtgtgcccacaccaccggttactggctcctggatgagggggccagagaggagtgaataacttcccagacacttacctccagggcagggtgccttccagtagccaagggaagcctccagagagcacagatgtgaaccctcagcagcaggcatcaccccccagtggactcgggtgggccaccagtagcatcttctagatggcagaggggtgaatggcagggccaggaaccaggctgcccgggttcccattctgcttctgccacttccagctgtgtggctttaggtgagccttcaccttttggtgccttcgtttcctcatttagcacctacctcctagagctgttttgggagtcaaatgcgctgacgtatataaagtgctttgcaagatc

SEQ ID NO: 75792 - DNA, 406 bp, Homo Sapiens
ggtgcgtgataatagcaagttatcttagttgaaaatagagattcattcattaaagaatattaaatcttttgtgcccaagtgccttaataaataagtagaatcttaacttttctgataagcattccagtaaaagctaatgtacatagatatgccttgagccactgtttctactttcacccttctctccacacatattgccacgtctgctgtgtagttacctgcttacatgtacagccatttcaataaatgtattcttttaacattttatcttttaaatttcaaataggaatttatagttggtaaaaataaaaattttaaagtgatttaatattgtcattttcatgttctcaatattgttatagatccactgagaaaatgtcaaataaaatctaatatttcaaaggtg

SEQ ID NO: 75793 - DNA, 445 bp, Homo Sapiens
  misc_feature (16)..(16): n is a, c, g, or t
  misc_feature (26)..(26): n is a, c, g, or t
  misc_feature (55)..(55): n is a, c, g, or t
  misc_feature (66)..(66): n is a, c, g, or t
gggggaaccaaaattngcaaaacctnttgcttgctgcctaggaaggccaagggcntggtttcctangttcccagttttgcttctagcaaagtggaccccatccaatagacccatctgagcctgtttcctcatcagttagatgtggggactcaatcacacggctcttcaagtccggctcccatatttcctaattgcaagccaaatttaatgtaccttgttccacaataattttttattaaaaaaatcctattacaaaataagacatactttaactattgtcatttgcctctttcacatcatgaatttgctttatgtgctggaaaaaacatcacatagctatcacagggcctggacctctaaaattttgcaaaaacaaaaggttctaagatgatttcaggaaataatgtgaacatgtaataaaatggaaatgaaatatggaatccta

SEQ ID NO: 75794 - DNA, 1044 bp, Homo Sapiens
  misc_feature (110)..(144): n is a, c, g, or t
  misc_feature (153)..(399): n is a, c, g, or t
  misc_feature (940)..(958): n is a, c, g, or t
tgagttcagagtcggggatccacgccaggtcgggagcacagccgctccccaaacccagcaaaccggcagagagccggtttcccagcagccggagccctgcaggagaggcnnnnnnnnnnnnnnnnnnnnnnnnnnnnnnnnnnngagacagannnnnnnnnnnnnnnnnnnnnnnnnnnnnnnnnnnnnnnnnnnnnnnnnnnnnnnnnnnnnnnnnnnnnnnnnnnnnnnnnnnnnnnnnnnnnnnnnnnnnnnnnnnnnnnnnnnnnnnnnnnnnnnnnnnnnnnnnnnnnnnnnnnnnnnnnnnnnnnnnnnnnnnnnnnnnnnnnnnnnnnnnnnnnnnnnnnnnnnnnnnnnnnnnnnnnnnnnnnnnnnnnnnnnnnnnnnnnnnnnnnnnnnaataggtgtcagccaccgcgcccagcctggagtggccttttatgagaggggacccgtcaaatctgtgccttatggaggggtccggcagcggccacaattgtcttgtcccctcaccccccaactccccctggaacacctctcccaggcaagacattttcacagcaccattcacaacggttgggccaaaaagaaacttttccttcatcatttcctgcactcgctgaccacaactttggacaccccaggctgccacccctccccacccgttcacccccaggatgctgttgctgtaggacgcctgctgccctggagccctccccaggatgtgagccagtcccctcgctggtacggaatgccgctgggtgcccggaggcggccatggtgtctcgatggacggcagccaggatggagcacccatgggtctcacggccatgcttcagggtcttcaggtcctgcccccggccagtctgccaagaggcacccccttccccagcctctcgcctgcactgatgcagacaaaatctcacctggcaggcccaannnnnnnnnnnnnnnnnnngccgtgtgtggctcctcgccgcatcgttggggttttgttatgtgaaaatatcctggaaataaatacatgtttctgcacaaaaaaaa

SEQ ID NO: 75795 - DNA, 1026 bp, Homo Sapiens
  misc_feature (75)..(75): n is a, c, g, or t
  misc_feature (102)..(102): n is a, c, g, or t
  misc_feature (110)..(110): n is a, c, g, or t
  misc_feature (123)..(123): n is a, c, g, or t
tctccgctgttgtgttgatgtgacgatacattccacaggacagctagactgatacgatttatacgactcctatanggattggccctcgagccagaaatcgcnacgagcgnttgtgatgatgtngaggaagatgccatcatcgtggatgacatcattgatgatgttgacagctttcttgctgcagcagagaccctgaaggaaagaggtgcatataagatctttgtgatggcaactcatggcttgttgtctcctgacgccccccggcggattgaagagtctgccattgatgaggtggtggtcaccaatacaattccacatgaagtccagaagctccagtgccccaagattaaaactgtggatatcagcatgatcctttcagaggcgatccgtcggatccacaatggggagtccatgtcctaccttttcagaaacataggcttagatgactgagttttcctttaggaaaactcccgagggccaaactggaaacataagagtgactgctcggtgggatggatttcacaggaaccgtcatgcttgttcctccctctcccctgtaacctcacttcttattgattcctaagaagatagaccaactttttatgtcggtttgggtgtttgtgagtttggggagcaatttttataaaagaaaaactttattctcctcttttgaaaaggtaagacctcgttttagttgtaactgtttaaaaaataacacttggaataagatttgtaagctcacaaagccttcttccaaagttgcttgagccaagtgcttaaaaagttaataaaataaaatgatctgtatgatacctgcaattgaaaagccgaaaagattatactgtcaagtccagtaaatgacatttttagagatgcttttgtagacaagcatatggaatatgtgattgtatttattttctgcaactaaaaaaggaataaaaacttgtgtttgtgtgtttttctaaaactttgtgttttggcaatcgttttataactaaaataaaatgaaagctaaatctaaaaaaa

SEQ ID NO: 75796 - DNA, 919 bp, Homo Sapiens
aagagccatcctggggtagaggcgttggagggtaatctgctgaagccttgggccccaattgggctgccttccacgggaggccaggcagaagagccctggaatgagcttgccacttgcccccccagagcttaggagtcttttgcagactttgggaacccacacaaaaggcagtacagctgaagccccaggccccctcaggggctcgttcgggtggtgggtcgggccccaacctcaactgcagtatgtagatgctcttggctatgtcagtctttttcccttgctgctgcgactgctggaccccacctcatcccgccttgggcccctgctggacattctagccgacagccgccatctctggagcccctttggtttacgctcccttgcagcctccagctccttttatggccagcgcaattcagagcatgatcccccctactggcggggtgctgtgtggctcaatgtcaactacctggctttgggagcactccaccactatgggcatctggagggtcctcaccaggctcgggctgccaaactccacggtgagctccgtgccaacgtggtaggcaatgtatggcgccagtaccaggctacaggctttctttgggagcagtacagtgaccgcgatgggcgaggcatgggctgccgccctttccacggctggaccagccttgtcttactggccatggctgaagactactgaagggagggagaggaggggagccaagacactcatgccactctggctctgaagggacaaaggcttctggcttttgcccccagccccttggataccagtaattcaaaccttcctcatttcatctcaggtgtctccttgctgtcatcccacatagccctggggtgaatgtgaatccagagtctatttttctaaataaattggaaaaaacattttgaactc

SEQ ID NO: 75797 - DNA, 997 bp, Homo Sapiens
  misc_feature (76)..(76): n is a, c, g, or t
  misc_feature (119)..(119): n is a, c, g, or t
  misc_feature (150)..(150): n is a, c, g, or t
  misc_feature (158)..(158): n is a, c, g, or t
  misc_feature (200)..(200): n is a, c, g, or t
  misc_feature (208)..(208): n is a, c, g, or t
catgtcgtcggttatgcccagactcgtcccgatcctttcacacgctatgagccggacatcggttgatatgaacgtntggaatcaagcagtttcagtgcgtgcgtcccccagtccgcatngaggcgccttgcccagctcagccagcgcgcncaggagcncaggaggacgcttgccggacaccagctccgcggctgccgccngacccccntatgagacgccgccgccagcgggggcgctcgggagccagggaccgccgcgtcgccgattagaggacgaggaggagagatccgcacgcaaccgaaaggtccttcggggttgcgccgccggcttcctggaggggtcggaggtgaggctgcagcccctgcgggcgggtgtggatgcctcccagccaccttcccagacttgcggcctcaccgcgggcccagtgcccaggctggagcgcacactttggtccgcgcgccagagacgctgagagtccgcactggcatcaccttctgagtttctgatgctgatttgtcgttgcgaagtttctcgtttcttcctctgacctccgaggtccccgctgcaccacggggttgctctgttctcctgtccggcccagactcttctgtgtggcgccgccgaagccaccgttagcgcgagctgctccgttcgccctgcccacggcctgcgtggctggggccgagtcccaggggccgcacggagggcacagtctcctgtcaggctcggagaggtcaggagaccgaccccaccactaactttggagaaaatgtgggtttgctttttaaaggaatcctatatctagtcctatatatcaaacctctaactgacgtttcttttcgaggaagtggcttggtgggtgcagcccccgccggttccgttgacgctggcaccttctgttgattttttaagccacatgctatgatgaataaactgatttattttctaccattactgaacattaggacaaacacaaaataaaaaacaaaacacagac

SEQ ID NO: 75798 - DNA, 733 bp, Homo Sapiens
  misc_feature (332)..(332): n is a, c, g, or t
  misc_feature (451)..(584): n is a, c, g, or t
  misc_feature (591)..(608): n is a, c, g, or t
gccaggcttacatcttcccagagaactatgctgccacttcacatccactcaccacatcccacctacagactaccacctttcgagatcaggaccaacctggaaaatgccagagttggctatgccttttcagacattgatttggacagctcaccaacccctgaaggggccgttcagcctggttagttttctacctactccgagtgtcctcccctgccccaccagattgctgcaggggcgcggtgtgcctggcagccaaattgttgacacttcttttttcctatgcactggttttacacagctgtcatttttctttcaaaattgcagcagtcccnacagatgtgtgcatttggacaaatagtacttaaaaacaaaacaaacaagcactcagcccagctcctcaatactacctggaaaaagcattggcattattttcaataaatatcaagcactnnnnnnnnnnnnnnnnnnnnnnnnnnnnnnnnnnnnnnnnnnnnnnnnnnnnnnnnnnnnnnnnnnnnnnnnnnnnnnnnnnnnnnnnnnnnnnnnnnnnnnnnnnnnnnnnnnnnnnnnnnnnnnnnnnnnnnctggggnnnnnnnnnnnnnnnnnnaaaaaattttttaaaacttttcttttggcggggcggggccccaaaggggaaaggaaacaggggcccataattgttttcccaaaaaaaacccggggaattaaataaggggtgtggattccccccac

SEQ ID NO: 75799 - DNA, 644 bp, Homo Sapiens
aagaggtcaaatgcaggactgatttctaagcttgcaatctatctaaatgcagatgctaatttagagtgcataattattacacaagtacagacctaggttagggcttaaatttcattatgtgcaataaaaaggttaagtgatggttaagcaaggtgtagattatccttacctctcctaatgacatgggctcacattggcattcctttcatacttttacgtataaagtgggcagttgtttctgaatgactgttgctggagcctcaggcctgctttgtgcttggtgctttccagactttctcctttattcctatcaccatatacgtactcacaaaagagcagtgtaaaccaggtattacatttccacaagggaaagtagaaccaggaatagccacatgatacttaccgaaagcttcactttccctatagagaaagcaagcaacatgaatcttctgatttggggcccagcctgctgctgtatacagaggttggcattattggtgatagaaatgtctgataggagtcttttaattatactctggagtgtggaggtggagtgcaaggctgcttcctttattactgcaagtgttattttctattatctcaggtttcgttttgtgtaataaactgcttctaattaaaaaaaa

SEQ ID NO: 75800 - DNA, 1375 bp, Homo Sapiens
  misc_feature (1335)..(1335): n is a, c, g, or t
gaagaagaaggtttatacacactgtacacacatttacaatggctttggaggatagcagtgctgcgaaaagggcttcaggaggatccggcctgggacaggattgaggtatgttgcagcctccagggcctggggtctcctgcatgaagaatacccctccccatttgactgtgaactttttggcctggattctggagaacagatttccaggattgtcagccagaaggcagacagatgcaggcacctaccaagacctgacctcaggaagtggccctgccctacagcccagttgctcagccagggctgaaggccatggggcccaagcacccttgcttcagtgccagcccctggaaggaacctcacaacagggatacagcaaggacactccagttcccccagtcctgccatggtgctaccctgagggacagggatggagacagggcagccaggtttgccaggacctgcatagcgggcccaagactgcccttcctcttaagtcatgccaaagcctccctgcccagtctgagacagtcgctggcaggtgaccacgacctgcgtggccctcccggcagttgtcatggtggttgtaccccaccccatccccctgaggagacatgggctcagtcccatgcctggtgcccacagccacaaagatggccatgggtctctagcctgatattcgtggcctggcaggggtcagcacccctgagggcatccaagccatggtcagaggaaagtgttggcaggctcggcacagccaaagaagtcaggacccacgagacgggggaagccttccagagccttcaccttcacagggtcaaacttccagtagaggcggccgcgcaggaagtaggcatagccatcagcatcctggaaggcagcgtcgatctcagagggcacccctctccagtcagtggccctgcggggcacgggactgtctacacgccgggtgctggggtggaaacgccagtagtccctgcctcggaagaagtagatcttgttcttctcgggaccccagaccaaggcagcatggaccgggaacctcaccaggcccagctcggtgaggggtgcggggcccaggactggcttttcaccgtcgtacacccagtactgagcaccttggaagaaccaaatgtggccctgggcatcctcgaaggcagcgtccacagggctgggcagtccctgccagtggcgagaggccaatgctgggtagccgggctgcagctggcccccacggaggcgccacacaaagcccgctttgaagaaaaagagctcgcctcggatggtggagaccgcgtcaaaggaggcctcacaggcatctggccgggcgtctggctnccacggtgcaaatcttcatgtgtctatcccaccctggggc

SEQ ID NO: 75801 - DNA, 1417 bp, Homo Sapiens
  misc_feature (51)..(51): n is a, c, g, or t
  misc_feature (53)..(53): n is a, c, g, or t
  misc_feature (210)..(210): n is a, c, g, or t
  misc_feature (242)..(242): n is a, c, g, or t
gcccgacccatctgatgggctgagtgccgcaaccgacagaagaggttcatncnttctggcgggcgctgggagaagacggacctcacctacaggatccttcggttcccatggcagttggtgcaggagcaggtgcggcagacgatggcagaggcctaaaggtatggagcgatgtgacgccactcacctttactgaggtgcacgagggccgtnttgacatcatgatcgacttcgccaggtactgnatgggggacgacctgccgtttgatgggcctgggggcatcctggcccatgccttcttccccaagactcaccgagaaggggatgtccacttcgactatgatgagacctggactatcggggatgaccagggcacagacctgctgcaggtggcagcccatgaatttggccacgtgctggggctgcagcacacaacagcagccaaggccctgatgtccgccttctacacctttcgctacccactgagtctcagcccagatgactgcaggggcgttcaacacctatatggccagccctggcccactgtcacctccaggaccccagccctgggcccccaggctgggatagacaccaatgagattgcaccgctggagccagacgccccgccagatgcctgtgaggcctcctttgacgcggtctccaccatccgaggcgagctctttttcttcaaagcgggctttgtgtggcgcctccgtgggggccagctgcagcccggctacccagcattggcctctcgccactggcagggactgcccagccctgtggacgctgccttcgaggatgcccagggccacatttggttcttccaagagctgggatttccatcctcaactggcagagatgagagcctggagcattgcagatgccagggacttcacaaatgaaggcacagcatgggaaaccctgcgtgggttccagggcagtccagcctgcagggccccagggagtgggtccagtaggcatttgtcacagccaaatgcccagtggaaggagcagccgcccaggcagccctctactgatgagagtaacctcacccgtgcactagtttacagagcattcactgccccagcttatcccaggcctcccgcttccctctgccgggtgggggtgcttgaccagcattattggcctgcatgttttactgatgaggaaactgaagctgggagaatctttgtggtaggggtcaagcaagtcccacagtggcgggggcatggcaatgggggggctggggaaggtccctggcagccttcccctctccgggaaggggctcaattactggggggtacgaacgggtgaaaaaacccagtccttggggcccggaacccctttaaccaaacttggggcctttggtgaaaggtccccgggtccatggctgccctttgggcttgggggtcccccg

SEQ ID NO: 75802 - DNA, 456 bp, Homo Sapiens
  misc_feature (347)..(400): n is a, c, g, or t
  misc_feature (437)..(437): n is a, c, g, or t
gccatcagcatcctggaaggcagcgtccatctcagagggcacccctctccagtcagtggccctgcggggcacgggactgtctacacgccgggtgctggggtggaaacgccagtagtccctgcctcggaagaagtacatcttgttcttctcgggaccccagaccaaggcagcatggaccgggaacctcaccaggcccagctcggtgaggggtgcggggcccaggactggcttttcaccgtcgtacacccagtactgagcacctgccggagagggaaggctgcaaggacctgcccagccaccactgccatgccccgccactgtggacctgcttgacccctaccacagannnnnnnnnnnnnnnnnnnnnnnnnnnnnnnnnnnnnnnnnnnnnnnnnnnnnntcagcaccccacccgcagagggaagcgggaggcctgngataagctggggcagtgaa

SEQ ID NO: 75803 - DNA, 470 bp, Homo Sapiens
ctttaggtcttcttctccagccaagggcatcggagtggaaaattacaatttaatttttcgggattcctctggaggattaaaaaagtttctttcgcatttgcaatgccatgctcccttgctcttggtcctgttttctacggtactcattcttcaggcattttctcaactcccgatcaacatcattacaataaccaaaaaatttcagaatgttgtgatttttgtgacattccttaagcaagttaatcaagacgttgcattcttcagtgtgcaagtgtggagataagtcaggatgcatctttaggagatgaggatggatcacagcagtgcaacccgactcgtggccacaccgggagaactgaaagcgcagtagccgcggagacgcccgacccgaaggccggctgctagggagcagacagctgaaccgcttgccagacgccgaaacccagtgacgccctccaccgctccaccgt

SEQ ID NO: 75804 - DNA, 1119 bp, Homo Sapiens
  misc_feature (615)..(616): n is a, c, g, or t
  misc_feature (697)..(872): n is a, c, g, or t
  misc_feature (888)..(902): n is a, c, g, or t
cagagtaggggggagccgggagcacggtggagcggtggagggcgtcactgggtttcggcgtctggcaagcggttcagctgtctgctccctagcagccggccttcgggtcgggcgtctccgccggctactgccgcttcagttctcccggtgtggccacgagtcggcacaacattctgaaattttttggttattgtaatgatgttgatcgggagttgagaaaatgcctgaagaatgagtacatagaaaacaggaccaagagcagggagcatggcattgcaatgcgaaagaaactttttaatcctccagaggaatccgaaaaataaattgtattttcactcgatgccttggctgagagaagacctaaagactctgggttgatacctgaaagaatcctgtcttatttggtctccataatcctttgaatggaaagtgacctgtgagagattgaaccatggagaaatatgaaaaccctggattctgagtatttgttgggcagggcgtttagtactgtctcccctttaccagcaaacctgacttcaccatgtttattccctttgcctacaaccagttaatatctgagtaacttatctccttcaataaaataatttaaatacnnaaaacaaacaaccccccctatcctacaccacacaacccccccgtaaccataccaccatattcaccacccttaactcacccnnnnnnnnnnnnnnnnnnnnnnnnnnnnnnnnnnnnnnnnnnnnnnnnnnnnnnnnnnnnnnnnnnnnnnnnnnnnnnnnnnnnnnnnnnnnnnnnnnnnnnnnnnnnnnnnnnnnnnnnnnnnnnnnnnnnnnnnnnnnnnnnnnnnnnnnnnnnnnnnnnnnnnnnnnnnnnnnagaacgccggtaatannnnnnnnnnnnnnntttgattctccttcccgcctatttccaattcctcctatgccgcatctacccacgctctcccgatttcgccccgaaatatgtgagtaacttgtagcactcgatgatcgtctatccatcacatcacccacccccccgcatgaccattttaccaattacgcgttcgtggcccgcaccgctcccttcccccccaataccgagggatactcccactttgccg

SEQ ID NO: 75805 - DNA, 948 bp, Homo Sapiens
cgaaggtcgccgagccccccacgccgctcttcttagaagtgtgcaaccttgcaccagtagtggacttacacataggctccgttaggacctggcttatgtgctcggcttgtggcttagacgctgccgtgccccagtggactcactgtgcctccccccacgacggacggaaatgggcccctccaggacaggcggcgcatgcgccttggggcccgcgggcggcgggggcggggagccgggagcacggtggagcggtggagggcgtcactgggtttcggcgtctggcaagcggttcagctgtctgctccctagcagccggccttcgggtcgggcgtctccgccggctactgccgcttcagttctcccggtgtggccacgagtcgggttgcactgctgtgatccatcctcatctcctaaagatgcatcctgacttatctccacacttgcacactgaagaatgcaacgtcttgattaacttgcttaaggaatgtcacaaaaatcacaacattctgaaattttttggttattgtaatgatgttgatcgggagttgagaaaatgcctgaagaatgagtacgtagaaaacaggaccaagagcagggagcatggcattgcaatgcgaaagaaactttttaatcctccagaggaatccgaaaaataaattgtattttcactcgatgccttggctgagagaagacctaaagactctgggttgatacctgaaagaatcctgtcttatttggtctccataatcctttgaatggaaagtgacctgtgagagattgaaccatggagaaatatgaaaaccctggattctgagtatttgttgggcagggcgtttagtactgtctcccctttaccagcaaacctgacttcaccatgtttattccctttgcctacaaccagttaatatctgagtaacttatctccttcaataaaataatttaaataaa

SEQ ID NO: 75806 - DNA, 660 bp, Homo Sapiens
ataaacagtgtcacctgcaaaacaagccatacagatgtcatgactgtggaaagtgttttcggcagctcgcgtatcttgttgaacataagaggattcacaccaaagaaaaaccttataaatgtagcaaatgtgaaaaaacgtttagtcagaattcaacccttattcgacatcaggtgatccatagtggagaaaaacgccataaatgccttgagtgtggaaaagcctttggccggcattcaacccttctatgtcatcaacagattcacagtaaaccgaacacccataaatgcagtgaatgtggacagtcctttggtaggaatgtggatctcattcagcatcaaagaatccatacaaaggaggaattctttcaatgtggagaatgtgggaaaacgtttagttttaagaggaatctttttcgacatcaggtcattcacactggaagccaaccctaccaatgtgtcatatgtggaaaatctttcaagtggcacacaagctttattaagcaccagggcactcacaaaggacagatatccacatgatgttaattggaaagcagtcattggagaactagaacttataaacctctacttcaagtgtgtatcacgtaattgtttccatgaaaagcaataaatgtaacaaagggtttttctatgggaaaaa

SEQ ID NO: 75807 - DNA, 656 bp, Homo Sapiens
  misc_feature (84)..(84): n is a, c, g, or t
ctctgtgacctcaggtgacccacatgagctggtagcctcagtttcctcatctgtaaaatgagctctaatgactttgtgactctntggtgtggccctggagcctggggccacggtggagttcctggccggccttgccacttgacaactcctttaaggcttcccccttaacacgggatccctgtggtggtgtttgggagttgcctggaggcaactccaagcctggcccccagctgaagcatggcaatctggctgctctctacagggacccccaagcgctgtgggtggagggcaggggtcgggggggttgaccttcttgggtcttcacatggcctaggccagtcctccggtcagactggtgtcaggcaccgtggtgcaaaattcctcttctggcccctccagtacccagagaaactggctgggccattaactgctgcagcaccaagggtggtagaaagagctgtgaagagcccccaaaccagtaccaggacacctgggttctcctgtgacctggggcacagttcttgccctctaggccttgatttccccacctgcaagtggggatgccagccccggctctgcctccttcatgaggctctggaagactggccaaaggttgtggaggagcttgtgaacttgattaaagtgtcgtaacatgg

SEQ ID NO: 75808 - DNA, 1700 bp, Homo Sapiens
  misc_feature (1470)..(1470): n is a, c, g, or t
  misc_feature (1477)..(1477): n is a, c, g, or t
gcagtaactctacggtttaaggtagcgaggcctgcgtggcgaattcggcacgagcctcggccgcgctgccccgaatactcggcgcgggtgcccgggccccgtcgcgctggttgggctttctcgggaaggcgaccccccggcctgctcggccgagccgcaggacgcttggaagcgcgacggcccttatgatccgcgagtcggaggacagcaccgatttcaacgacaagattttgaatgagcccctcaagcactctgacttcttcaatgtcaaggaactgttttccgtgagaagcctcttcgatgcccgagtccatctgggacacaaagctggctgtcggcacaggtttatggagccgtacatctttgggagccgcctggaccacgacatcatcgacctggaacagacagccacgcacctccagctggccttgaacttcaccgcccacatggcctaccgcaagggcatcatcttgtttataagccgcaaccggcagttctcgtacctgattgagaacatggcccgtgactgtggcgagtacgcccacactcgctacttcaggggcggcatgctgaccaacgcgcgcctcctctttggccccacggtccgcctgccggacctcatcatcttcctgcacacgctcaacaacatctttgagccacacgtggccgtgagagacgcagccaagatgaacatccccacagtgggcatcgtggacaccaactgcaacccctgcctcatcacctaccctgtacccggcaatgacgactctccgctggctgtgcacctctactgcaggctcttccagacggccatcacccgggccaaggagaagcggcagcaggttgaggctctctatcgcctgcagggccagaaggagcccggggaccaggggccagcccaccctcctggggctgacatgagccattccctgtgatgttcactctcctcccaaagcaaaccacagccaagcctgtctgagctgggagtccccttccccagccctgggtcagcggcatcctcagtcgttgttacttactcagctgatgtcacagtgcagacatccaccgttccaccacagaaccagtggctgagcggaccaacgttgccatgtgcgtttgctctgtggggaacagagcacagagggtgagcgacatgtgcagaacggccccttggctgcagttaggacctcagtggctggtatggccaagctgctagaagatgctgctgtccctgtgatcccagcagccctcccttcaccgtgacccctgacctttgtcaggaaggtgcagtttttcttctcaatctaaatgcctttcaggtgggccgcttccttggctacctggttccagggggctgttttgtaatgagatgctgctggcaggccactcagaggctcccagctgggttggtgggacagccaggccagatgacctgattccagcaaaaataaaactcagatttggggccgncaacccnagcgttcctgaaaaaaatcaaacatggtcggcccggcctcggctcctcggaggaaagcttttctagaaccatttccattttggggccgcggcgggggcccccagttaaggggtaaaggggaaaaccaatgggcccaataaagcgtggttttcccctaagggaagaaatcccctggggccacgtggaacttaggggcctttggggattctcccccaccccaatt

SEQ ID NO: 75809 - DNA, 896 bp, Homo Sapiens
cggcatagtgactataaacagtggtataaaaagcaggctgtacggtccggaatcacgggatatcgtcgacccacgcgtcgcccagccatggcgacatcctcggccgcgctgccccgaatactcggcgcgggtgcccgggccccgtcgcgctggttgggctttctcgggaaggcgaccccccggacctgctcggccgagccgcaggacgcttggaagcgcgacggcccttatgatccgcgagtcggaggacagcaccgatttcaacgacaagattttgaatgagcccctcaagcactctgacttcttcaatgtcaaggaactgttttccgtgagaagcctcttcgatgcccgagtccatctgggacacaaagctggctgtcggcacaggtttatggagccgtacatctttgggagccgcctggaccacgacatcatcgacctggaacagacagccacgcacctccagctggccttgaacttcaccgcccacatggcctaccgcaagggcatcatcttgtttataagccgcaaccggcagttctcgtacctgattgagaacatggcccgtgactgtggcgagtacgcccacactcgctacttcaggggcggcatgctgaccaacgcgcgcctcctctttggccccacggtccgcctgccggacctcatcatcttcctgcacacgctcaaaaacatcttttgagccaaacgtggccgtgagagaagcagcaagatgaacatccccacagtgggcatcgtggacaccaactggaaccctgctcatcaactaacctgtacccggatgacgatctccgtggtgtgcactctactgggggtctccgaaggctcaccggccagggaacggccgttgaggctcatgctgaggccaaggccggacg

SEQ ID NO: 75810 - DNA, 791 bp, Homo Sapiens
tactataacagtggtacaaaaagcaggctggtacggccggattacccgggatatcgtcgacccacgcgtccgcccagccatggcgacatcctcggccgcgctgccccgaatactcggcgcgggtgcccgggccccgtcgcgctggttgggctttctcgggaaggcgaccccccggcctgctcggccgagccgcaggacgcttggaagcgcgacggcccttatgatccgcgagtcggaggacagcaccgatttcaacgacaagattttgaatgagcccctcaagcactctgacttcttcaatgtcaaggaactgttttccgtgagaagcctcttcgatgcccgagtccatctgggacacaaagctggctgtcggcacaggtttatggagccgcacatctttgggagccgcctggaccacgacatcatctgacctggaacagacagccacgcacctccagctggccttgaaccttcaccgcccacatggcctaccgcaagggcatcatcttgtttataagccgcaaccggcagttctcgtacctgattgagaacatggcccgtgactgtggcgagtacgcccacactcgctacttcaggggcggcatgctgaccaacgcgcgcctcctctttggccccacggtccgcctgtccggactcatcatcttcctgcacacgctcaacaacatctttgagccacacgtggccgtgagagacgcagcaagatgaacatccccacagtgggcatcgtggacaccaatgcaaccctgcctcatcactaccctgtacccgga

SEQ ID NO: 75811 - DNA, 206 bp, Homo Sapiens
  misc_feature (52)..(67): n is a, c, g, or t
ttttaaatgttcacagtccctgctttatttccatttgttcacacacgctttnnnnnnnnnnnnnnnncacatgcactcacacaatacccaaacatcagaattagaagggcataaaacagggggctttataggctgaaaaatatcctagacttcagaacagaataccaatcaaatattgaaaattcctttgttcaaaacacaaagat

SEQ ID NO: 75812 - DNA, 623 bp, Homo Sapiens
aaccaaattcttagagatactatagaatccaaatgagaactgaattggacctcaagtcttctattcctactaatagagttctttgtgatggtaactgctgtgtcgtttgttttccacaagttgggatggattcatgtcgatacatccccatgcccttgacctcttctggcattctcctgtgctctgacaaactgagccagccttttagatctacatgaataaacaaactattttaccaagaaaaatctcagcttgcttactgcttaattaaaaacctacaatttacacacctccctgccttcaagactgtgagctttggatagccctgcttaaatgtttgtcaacaacaagagtcgtaatgtgtcagtacattgtagctcctttgaaatttaactctttctgtgttacatgaattgttttaaggagtccggcaaacatgtttcttcacttccatgagaatggtgccaagtgtcagactctaatgagccctcagctcaggttttaatttctattgaatgctaacattcttctgattttttggtatcttttataatcatatcggtttctgctgtattaatgacaattattcatgaaaataaaaaatgaaatattttgtatactta

SEQ ID NO: 75813 - DNA, 746 bp, Homo Sapiens
ctgacgagacggaagaccctgagcccaactaggaaggtgagccatacgtcgccatcaagccctacactgctgtgagggggaccgaggtgtccctgctcgagggtgagctgtttgaggtcattcacaagctcctggacggctggtgggtcatcagaaaagacgacgtcacaggctacttcccgtccatgtacctgcaaaagtcagggcaagacgtgtcccaggcccaacgccagatcaagcggggggcgccgccccgcaggtcgtccatccgcaacgcgcacagcatccaccagcggtcgcggaagcgcctcagccaggacgcctatcgccgcaacagcgtccgttttctgcagcagcgacgccgccaggcgcggccgggaccgcagagccccgggagcccgctcgaggaggagcggcagacgcagcgctttaaaccgcagccggcggtgcccccgcggccgagcgccgacctcatcctgaaccgctgcagcgagagcaccaagcggaagctggcgtctgccgtctgaggctggagcgcagtccccagctagcgtctcggcccttgccgccccgtgcctgtacatacgtgttctatagagcctggcgtctggacgccgagggcagccccgacccctgtccagcgcggctcccgccaccctcaataaatgttgcttggagtggaccgaggctctgcaggaatgcagggagggccgggctccgccccagggttatttataagttgaaaa

SEQ ID NO: 75814 - DNA, 617 bp, Homo Sapiens
  misc_feature (32)..(32): n is a, c, g, or t
atcgcacctaaattattattatattaaaagangcagagtatgagagacaggtacatggtccagtaggaagagaagcagccctgattctaccacttaaggtgatgtatgatcttaggctggacacttctctccctcatccgttttcctcttcaacataatgaaatagacttgaaagtctctaaggctctatcagttctgacattctaggcttcatatacattaagttgagccatatgtaatcactgtgtttgtaggttagaaacagctgagtatcgtagtttcatatatggttccagctaatacatgcaatgtggctggtgaacacttctgaattcagaaactatcccagatctcagctagaaccatccactgttctgtttgtccagtttcaacttaagggatctccatgcggtccctggaagtacccattgaaacctgcgtatttgtgtatagcagaactctgaaataatattctgatagcagttatctctgaggaattgggttataggtgattttccctttccgcatgataaatttatgtaatatttgactgacttgaccgtaagtatgttacttgtataataaaaggaaaaaaggtacttctattttgaaaaaat

SEQ ID NO: 75815 - DNA, 1360 bp, Homo Sapiens
  misc_feature (102)..(102): n is a, c, g, or t
  misc_feature (126)..(126): n is a, c, g, or t
  misc_feature (139)..(139): n is a, c, g, or t
  misc_feature (141)..(141): n is a, c, g, or t
  misc_feature (156)..(156): n is a, c, g, or t
  misc_feature (232)..(232): n is a, c, g, or t
gcatgcatttcggattgatctccagctgcttaaaccggcaatgaatcatgctgatcactgtattttatccagtctcgatgatgttatgacaaaatgattccntgagtgttgagcctgtacctcacntatttcccattcncnaacatgaacatttcnccagcatgatgtgccaatcgctagagtgatcctaaaattggaaagtaaagatattgtcatactttccgcagtgacntgagagaagagtcctgtgctcatggcaagggacaagcacccaccagagcttcaggtggcatttgctgactgtgctgctgatatcaaatctgcgtatgaaagccaacccatcagacagactgctcaggattggccagccacctctctcaactgtatagctatcctctttttaagggctgggagaactcaggaagcctggaaaatgttggggcttttcaggaagcataataagattcctagaagtgagttgctgaatgagcttatggacagtgcaaaagtgtctaacagcccttcccaggccattgaagtagtagagctggcaagtgccttcagcttacctatttgtgagggcctcaccccagagagtaatgagtgattttgcaatcaaccaggaacaaaaggaagccctaagtaatctaactgcattgaccagtgacagtgatactgacagcagcagtgacagcgacagtgacaccagtgaaggcaaatgaaagtggagattcaggagcagcaatggtctcaccatagctgctggaatcacacctgagaactgagatataccaatatttaacattgttacaaagaagaaaagatacagatttggtgaatttgttactgtgaggtacagtcagtacacagctgacttatgtagatttaagctgctaatatgctacttaaccatctattaatgcaccattaaaggcttagcatttaagtagcaacattgcggttttcagacacatggtgaggtccatggctcttgtcatcaggataagcctgcacacctagagtgtcggtgagctgacctcacgatgctgtcctcgtgcgattgccctctcctgctgctggacttctgcctttgttggcctgatgtgctgctgtgatgctggtccttcatcttaggtgttcatgcagttctaacacagttggggttgggtcaatagtttcccaatttcaggatatttcgatgtcagaaataacgcatcttaggaatgactaaacaagataatggcagtttaggctgcacaactggtaaaatgactgtagataaatgttgtaattagtgtacacgtttgtatttttgttaatatagccgctgccatagttttctaacttgaacagccatgaa

SEQ ID NO: 75816 - DNA, 3137 bp, Homo Sapiens
  misc_feature (45)..(45): n is a, c, g, or t
  misc_feature (118)..(118): n is a, c, g, or t
  misc_feature (136)..(343): n is a, c, g, or t
  misc_feature (603)..(643): n is a, c, g, or t
  misc_feature (2283)..(2308): n is a, c, g, or t
ttccctgatcttgatacgtatacgcctttgatgactgtacgttcncgcagcgacgaccgagccaggagtcatgagcgagagcggagacgccatacgcaaacgcctctcccgcgcgtgncgattcataatgcagctnnnnnnnnnnnnnnnnnnnnnnnnnnnnnnnnnnnnnnnnnnnnnnnnnnnnnnnnnnnnnnnnnnnnnnnnnnnnnnnnnnnnnnnnnnnnnnnnnnnnnnnnnnnnnnnnnnnnnnnnnnnnnnnnnnnnnnnnnnnnnnnnnnnnnnnnnnnnnnnnnnnnnnnnnnnnnnnnnnnnnnnnnnnnnnnnnnnnnnnnnnnnnnnnaagaattcggcactaggtttattttgaattacaaaaaagaagtgtgatggcaccttgtccaccctgtcgtgattattccagtgagatgttactgttctgctctgaagaagatactgtcagacgaatcctgcatttccttcagctggcatgcatgcctttggactcatggacagagttctttggattgtcactgaattttcaatgtttaatcagtatggatctgatcttcgcatgatcttttttgtgaatgctaacaccannnnnnnnnnnnnnnnnnnnnnnnnnnnnnnnnnnnnnnnnactgccgaccccctgccttacgattttattggaaagcaaggacctgctattatttgttaatttgccatcatttatgtatattttggaaggtatgagacccacaagcacaatgatcatttttatttgtttgtttgtttgaaacttcagcagaatagatatctgcatgctttatgaagttgttgcttcggtaagagcccatgggatgccagaaattaacatttctttgctgccatgggctgatgatgctgctattagataaagtttagctgtggcaccaagtcacatcattttcatagaaaaagattacttgtagcttattttagaagtatgaccttttggtctgtttgattgattgattagaattgcaataaaagaaaagcttgcattcataaggcattcattctgttgtaaatgttcaatatatttattttgagagcaaggacctgtggttgtaaacaggtgtggttacaggtgtggttatgtatctgagtgttgcggtcatactctcctccagtccaatcctgagcatcttcatcttattaattagctgttcgtttctttgtgcactcattcttttatttttacttctttttaatgttatggtatccagttgtttccagtagcagtttcttgaacttctggcctgtactactaactgcagacctccagagtcactggcctttctgtgctctacatattattttaggggccacatcagttgccaagagcaacatacataccgacctggctgaattattgccagtgaaaacaacctgtacgaagcctttgctcaggttctaaaatatgtttgtccttgcacgaattttgtatatttcaaatatttctgtaaaggtttcttcttttctgttagagtgtggtgttaagccagagtcagtggtttgtgttctcattaaaatgtttgtttaaatcctatgtccaattcaagcctatctaactacatttggtaggattaacatttcatataacaaatggggcttaattaaaaactttaacttggaataaaggaacagggatcactttatcttctgccttcatttaccttagtccaagattcttgcaaaacaggcaactgaacaaacattaggtttatgtaggtaaaatgtgaaagcatttctcctccactttttaaaatttaatttacccagtacagcggggcaccagattacttgatctttgtattttgcagttttgagcctttgtgtcaatcccaagcacagagaggatctgccaaggaaaaacatgtgcatcttcggagtagacattttgcagtttgtttaataacaacttctaaagtaagttgaattcatccattgtcactgattcaccaagtggatgttgcattgtggaatttgcctgagtactgttgtcattctgctcagccaggcacggtcagtttcttggccagggacattgctatgtgctgtgtgcaagctctttagaagagagattggattttcttggcattatcagcactcatgctatttagtctacttctattttgactgactctttaaattagtacaatttttctacttgtcatataactcctggaacaatagtacgggaagccgtgatccttttccctgactcatgattttagtctttttccaaatcgctgnnnnnnnnnnnnnnnnnnnnnnnnnngctgctccaacgaccagcatgtgttggagcagatctccatggtaagccaaaagtggacttgtcagcctataactactctgcagctgccactaactctacaggcacagtaactacactttatacaggagcacatgccaaagtgcctgggaggtgccaataaaatcaagaaataagaaaactacaaaaaaagatacggtattaaccttggacataatttttttagggaggcagctttcccacttttataaagggggttgtaaatctcaagaggtcatttgttccccatagcagcatatctcatttttaaattgaagcgaattaaataggattttactactcaacattcattatactgttaatctttgctgaaatatatgctaacaaatgttaagcaagggaaactgaagacttagtcatgtggattgttagcagtgatctgcattctgtaaaagaggtactttcccatgatgtaggcatgaagtggtgccagtaagcgtagagcggaaatgttgactttagttaacattgggtttagcatttccagtgcagcattatcagtgggcctttaaaaatacttcgtaagtacattagctttcactttgttgttaaattatagcagactcattatagagaacaagtttgccttgattttgtttaaaatgacttctgctaagcacccagaagataaaattgacatatttttataatataagcatactttttttgtacattgtgttcattcttgaataaaatgagttctgtgttggcttgtagatactaaaaagaaagtattgattttgattcaataaatgttttctttcaatcctga

SEQ ID NO: 75817 - DNA, 958 bp, Homo Sapiens
ctacacacgacaaatactttgatataatctaggataataaaatagttgaacaactttttaagatttatatttgtatagaaacaatctgtggaactcctcccctcaaaatgaaggtgtctaaaaacagtgattcatcagcattgctttaaataattgtttggttaaaagttgtggtttccattctcaaccgaaatgcgtctccatgcagttttccttgggtccaaagcttaaggccttgggaagggggccaagaaaaaaagaatggccactctcctttctgtccttcccttgtgtggaggacagtgattgaaacaggggagttaaaaagccaggaagaaaagaaatcaattgcacatctctagttcgcaagcgtcaaagtcacaacaagtctgtacacaacaactctctatctgtagatatgaaattccatcatgatagcacagcgcctgcttgcccctaaatgttcctttcttctgctaatcatgtcagttactatggatgggctgtggccataagttctccctcaagggctggtccttctgtcaccttgaagtgtcagcccctgaattatgccacttggatgctatgtcttgatacccaataaaggtctaccatcccctaagaaatcccttaccccaccctcaaacccccaaagtgcctaagagtgaagacgaagatgccatggagacggcgtcttcagtgaacacctccccaaagatgcccggggactcgggcctatatcatcccattgatcttagtccactcgtagatgtcctgttcgcacactatgtcagagttgatgaggaggtatctgtcacctacacagaaatgcttctgacaggcggcgcacttgaaacattccaggtgatacactttgtctttcacccgcattgtcatctcataggcacgaatccgcttgtcacaggatgcgcagagaccgtcttgcccaaaaagcctg

SEQ ID NO: 75818 - DNA, 1057 bp, Homo Sapiens
  misc_feature (168)..(168): n is a, c, g, or t
ggggagacactactcctacttatcttgctcataaagccttttctggtgggatattaaggccctggtgtcttacagaaaccatcacgtatgtcgcagcagcatttcacccctgaagtctctaaactctgagcctgaaaagatttgtatttaatacacataacatttttnagttcaatctgcctttcctatttgtcccagtttttgcttggttttagtttggaggggaacttaagtacacagatccttatctctccccatcccctagcctcacaaaacacagttgagagtcttttaagtacctgagctctcgaagctacccagaactgaactagactcccctaccttagactggtaccctcaaacacaggactgaagcttaattgggaatttggctttatggagaaaagaatctttttcaaagtttgtgtcggaaggggagggtgaggtttgcccactgtctctgcaggaaggctccggcttaatctaggaagtagattccagctgcacgatgaggaacacattagcttttgggatcaaaccaggaatatgaatctgtaattattaagctcattgccaacccacaagatatgtttctgaaaacctgtagtttcttaatttaagtccatccccttcattaacgctacagttgtgactcacactgatcccaaacttttaagtgctaaatattaacatttagcattaactgtcttgtcaagcgaaaggccttctctacaacctagtccatctcacttctggtgctacctgagttggacagaattctagctcatggttgctaggaaagctaggcctctgatcatagaagcagatagcttcagtcccagtctaggcctagataaatgactcttattaccacaacccttattattttccaatttcctttctcacatactgtacacaggtagtattttcaatgtgaatccaaagcttgtctggttctctgaaaataattttttcccctttaggttctttacattgtgataatgctgtatttaaagagaatatttaaatgtaatattaaagaaatattcaaaagaaa

SEQ ID NO: 75819 - DNA, 657 bp, Homo Sapiens
cagtggcctttctctgctccctctcagggtactgagcactttctgccttgtcctggagctatctgggtccattgcctgaccccccactcacctgtgtgctccccgtaggtagggccacttctgactgtgtgtccccagatccagcctggggttggggtaggattagtggcctgagtgaggagaggaaggccagctcccagaggactttactgaaccgtactgtgaatatgtccaagtcccaaagccaggtgaggtcagaccccactgcctgaggaagagggctggatgcagggccagctcaacctgaacaatcccctcccactcggcctttcctgtggggccttcaccagcctgctggggtcactgtcgtgcacttggctgcgtggctggttctattggccctaggtgctgctctgttgggtgggatgggagggggtaaagggagccaggagcactgggttctccctgagaacactgggcacaagagtactggcctcttctatccctggcactgtcctttgcacttgtttggtggccccaatgtgagtcgctgtaaaaaatgctgccgttactattttctaagaaatgacttttctgtgaaccaacagtaacaaaaacctcagtaaccaaaataaagttctatattttaaaaaaggc

SEQ ID NO: 75820 - DNA, 1372 bp, Homo Sapiens
ggcctgggtggcgaattcggcacgaggcacaggtcacctgcacgccagggcctgccctccccgcccggcactccccactcaccatcctacgcgggccccaaagctgtcgccttcatccacacggacctcccagagccaccgccctcgctgaccgtgcagagggaccaccctcagctgaagactcccccaagtaagcttaatgggcagtccccgggcctggcccggctgggacctgccaccggccccccagggccctctgccagccctacacggcacacgctggttaagaaggtgtccggcgtgggtgggaccacctacgagatctcggtgtgaggactgactgccacacatccgccatggtgccacggggaccaggaccccgcagcgcaccccccctccccaccaacttctctgccccagggacccgaggccaccccagcctggtgtggacccatcggcgggagagagtgccacgcctccacagcttgccccaagcgctctgcctgcccgtccactcatctgcccatggggaagtcggctcactgggacaagggccactgggctggtctgtgtctgggcctgtcccatggctggggcagtgagggggcccagtcagcctctttggggcaccctctctcagccaggcttggcccactgccatcacccagcaccccagatcaccgccaggccagcccccaacggtcccccttacggacagggtcccagagatggacagaggcacccagggcccccaccgtccttctgacacagcctgtggggctcccggaccgagtgtcccccgccaggctactcctaactaacgcgttgcctttcacggaccccgctggaagcttgtagcttggcaaggctgatgcttctgccctggcctgctctgggtggtggtggataggtggacagacggccagccagccagctgtggccgggggcccggctccatgtgtcccgtgtctgtgtgctgtgctgccgcgccgtgtctgatgtgtcagtgctccggccgccgctgtccctttcatcaaagccttaacctttgctttatgctcttgtgggaggcgacgggggggcaggcgggagcaggcacgggggtgatgctgccacagggggctggtgacacccagagccccctccccagccctcaggccctccctgccaaactggagaaccccaccccaaggcatgccacgtccgcagccccggcctggctgcggtgctcgcgccgtgggaaagcacactggggaggggtcagtgcttcccttggtgtcagggacctgagagtaagcacatgacagcgtctgcttgcgttgtgtctgttttatgtttttatatctacatctatatatctataattttaata

SEQ ID NO: 75821 - DNA, 1390 bp, Homo Sapiens
  misc_feature (79)..(113): n is a, c, g, or t
  misc_feature (1205)..(1223): n is a, c, g, or t
aaccctgtatgacactatagagggctccgcgtattagcgaacgacgagcgcagcgagtatgtgagcgaggaagcggcgnnnnnnnnnnnnnnnnnnnnnnnnnnnnnnnnnnncagtcgacggtaccggacatatgcccgggaattcggccattacggccgggtccagagacaacaccaactgagatatgtgggtccaagccatgttcaggatggatctttacacctgattgaacagttaaacccctgtgactaagcactggcacctccatcacatctgtcatgttaggccaggcacttgaaataaaggacttctgatgttccccacaaccctgccaagtggaaattgtgatccccattttataaaggggcaatttaaggcttagagagtttaaatgatttgtccaaagcaggaaaggaggaggatgggagggccaaggcagggtcagcttggggcagggaaaggctgtggcccacgcacttgtgcaggaccagcaatctcattctccatgctgcctttccttgccctccagggcctccttggcaatgcatttgatggccaccagcttctgcgtcctcttatcttctgccaggatcacctccgagaaggcccccctatcgggagaggggattcacaaggtgaagaactggaaccccagcttccctccagcctctcctccattccctatgggttctgtgaccactgctggaccaaggacgtggatgaccctcccctagtcactcatccatcccctggctccagagatggtcacatgacccaggcctggccagtcaaagtagtctctcccctggccacagtaattggtcatgtgatgcaagccagcttactagcactttgagaatgagtctcctgttgagctggtaggatgtaagcctggagctaatggcgatcatctttgccaccacctggggagagcctgcttgggaatgaaattaacacaaaggaagtccaacctgagaaatggccaaatatatttcctgataacattatgtggccctctggatccagccatgcctgaggtctacccctgggcttttggattatgtgtacagttggttcatccctttttctgctaattcgagtcatggctaatttaacaccctttagaaccttaaagaaccatcagcatcacccgggaacttttttagaaatgcaaaatctctactgctttggatcctgggtcnnnnnnnnnnnnnnnnnnngaaatgcaaaactttaggccctgccccagatttactaaatcaatctgcagtttaacaaaatcctcaggtgatttgtatgctcattgaactttaagaagcagtgttttagaacaggttcttaaaaaggaacaaataaactcatttaactaaagttaactgaataaaaa

SEQ ID NO: 75822 - DNA, 780 bp, Homo Sapiens
ggtggcccaggcacgcagcggtgaggacctgcggccacagctcggcgccaaccaccgcgggcctcccagccagccccgtcggcggggcagccgcaggagccctggctgtggtcggggggcagtgggccatgctgggggcagtggaaggccccaggtggaagcaggcggaggacattagagacatctacgacttccgagatgttctgggcacgggggccttctcggaggtgatcctggcagaagataagaggacgcagaagctggtggccatcaaatgcattgccaaggaggccctggagggcaaggaaggcagcatggagaatgagattgctgtcctgcacaagatcaagcaccccaacattgtagccctggatgacatctatgagagtgggggccacctctacctcatcatgcagctggtgtcgggtggggagctctttgaccgtattgtggaaaaaggcttctacacggagcgggacgccagccgcctcatcttccaggtgctggatgctgtgaaatacctgcatgacctgggcattgtacaccgggatctcaagccagagaatctgctgtactacagcctggattgaagactccaaaatcatgatctccgactttggcctctccaagatggaggacccgggcagtgtgctcttcaccggcttgtggaactccgggatacgttggccccttgaagtcctgtgccagaagcctaaagcaaggctgtggattgctggtcataggtgtcatcgcttacatcttgctcttgggtaccctcct

SEQ ID NO: 75823 - DNA, 724 bp, Homo Sapiens
gaaggcgccggaagctactgtgaccctcccggtcttcattggcaatattgctgtgaaccatgccccagtgagcccccggccaggcctggggctgcctcctggggccccacccctggtggtgccttccgcaccaccccaggaggaggctgaggctgaggctgcggctggcggcccccacttcttggaccccgtcttcctctccaccaagagccattcgcagcggcagcccctgctggccaccttgagttctgtgcctggtgcgccggagccctgccctcaggatggcagccctgcctcacacccgctgcaccctcccttgtgcatttcaacaggtgccactgtcccctactttgcagagggctccggggggccagtgcccactaccagcaccttgattcttcctccagagtacagttcttggggctacccctatgaggccccaccgtcttatgagcagagctgcggcggcgtggaacccagcctgacccctgagagctgaccccgtgctgccttctccaggcaggcctggcctctgccctgggactggggcgcccagggcctcgtgccttctctcttggcctagcctggcccactcaggacctgcccagcctctgccagctcctctggcatccgccctcttctccctggggctggggtgggggtggcagggagctgggacctggagagacaactcctgtaaataaaacactttatttgtaaaaaa

SEQ ID NO: 75824 - DNA, 644 bp, Homo Sapiens
  misc_feature (158)..(158): n is a, c, g, or t
tgaggctgaggctgcggctggcggcccccacttcttggaccccgtcttcctctccaccaagagccattcgcagcggcagcccctgctggccaccttgagttctgtgcctggtgcgccggagccctgccctcatgatggcagccatgcctcacacccgntgcaccatcccttgtgcatttcaacaggtgccactgtcccctactttgcagagggctccggggggccagtgcccactaccagcaccttgattcttcctccagagtacagttcttggggctacccctatggtgagtcgacagccagggcttggcagggaggggacgccaagagccccacgcagaccctgctttcttcccgcagaggccccaccgtcttatgagcagagctgcggcggcgtggaacccagcctgacccctgagagctgaccccgtgctgccttctccaggcaggcctggcctctgccctgggactggggcgcccagggcctcgtgccttctctcttggcctagcctggcccactcaggacctgcccagcctctgccagctcctctggcatccgccctcttctccctggggctggggtgggggtggcagggagctgggacctggagagacaactcctgtaaataaaacactttatttgt

SEQ ID NO: 75825 - DNA, 991 bp, Homo Sapiens
  misc_feature (49)..(49): n is a, c, g, or t
  misc_feature (98)..(98): n is a, c, g, or t
  misc_feature (110)..(110): n is a, c, g, or t
  misc_feature (197)..(197): n is a, c, g, or t
  misc_feature (203)..(203): n is a, c, g, or t
  misc_feature (248)..(248): n is a, c, g, or t
  misc_feature (251)..(251): n is a, c, g, or t
  misc_feature (254)..(254): n is a, c, g, or t
  misc_feature (351)..(351): n is a, c, g, or t
  misc_feature (363)..(363): n is a, c, g, or t
  misc_feature (368)..(405): n is a, c, g, or t
  misc_feature (572)..(572): n is a, c, g, or t
ggtgtcccaccccagcacttaccccgcgtatgtgtgggcagcatgcagngcatcggagttggaccagtcagcaagacaccagcctgtgtgccagtttntgcagaagttcntatagccaagcgtggatccacggagtacgaccatgcggagtggaggtgcggcgtcaagcctgcgcgggcgcagtgcacgacagatcntgtgcntgcctgccccagtcgccctgccgggtgcaccccatccacatcgantantantacagtctctctgaagcgccggaagctactgtgaccctcccggtcttcattggcaatattgctgtgacccatgccccagtgagcccccggccagccntgggctgcctcntgggnnnnnnnnnnnnnnnnnnnnnnnnnnnnnnnnnnnnnnggaggaggctgaggctgaggctgcggctggcggcccccacttcttggaccccgtcttcctctccaccaagagccattcgcagcggcagcccctgctggccaccttgagttctgtgcctggtgcgccggagccctgccctcaggatggcagccctgcctcacacccgntgcaccctcccttgtgcatttcaacaggtgccactgtcccctactttgcagagggctccggggggccagtgcccactaccagcaccttgattcttcctccagagtacagttcttggggctacccctatgaggccccaccgtcttatgagcagagctgcggcggcgtggaacccagcctgacccctgagagctgaccccgtgctgccttctccaggcaggcctggcctctgccctgggactggggcgcccagggcctcgtgccttctctcttggcctagcctggcccactcaggacctgcccagcctctgccagctcctctggcatccgccctcttctccctggggctggggtgggggtggcagggagctgggacctggagagacaactcctgtaaataaaacactttatttgtaaaaaa

SEQ ID NO: 75826 - DNA, 1528 bp, Homo Sapiens
agtaactataacggtccttaaggtagcgaggcctgggtggcgaattcggcacgaggcgcgggcggcgggcgggggcgtcgctgcgcggctggccggtgaggccgcggcatggggcgagtgcagctcttcgagatcagcctgagccacggccgcgtcgtctacagccccggggagccgttggctgggaccgtgcgcgtgcgcctgggggcaccgctgccgttccgagccatccgggtgacctgcataggttcctgcggggtctccaacaaggctaatgacacagcgtgggtagtggaggagggttacttcaacagttccctgtcgctggcagacaaggggagcctgcccgctggagagcacagcttccccttccagttcctgcttcctgccactgcacccacgtcctttgagggtcctttcgggaagatcgtgcaccaggtgagggccgccatccacacgccacggttttccaaggatcacaagtgcagcctcgtgttctatatcttgagccccttgaacctgaacagcatcccagacattgagcaacccaacgtggcctctgccaccaagaagttctcctacaagctggtgaagacgggcagcgtggtcctcacagccagcactgatctccgcggctatgtggtggggcaggcactgcagctgcatgccgacgttgagaaccagtcaggcaaggacaccagccctgtggtggccagtctgctgcagaaagtgtcctataaggccaagcgctggatccacgacgtacggaccattgcggaggtggagggtgcgggcgtcaaggcctggcggcgggcgcagtggcacgagcagatcctggtgcctgccttgccccagtcggccctgccgggctgcagcctcatccacatcgactactacttacaggtctctctgaaggcgccggaagctactgtgaccctcccggtcttcattggcaatattgctgtgacccatgccccagtgagcccccggccaggcctggggctgcctcctggggccccacccctggtggtccttccgcaccaccccaggaggaggctgaggctgaggctgcggctggcggcccccacttcttggaccccgtcttcctctccaccaagagccattcgcagcggcagcccctgctggccaccttgagttctgtgcctggtgcgccggagccctgccctcaggattgcagccctgcctcacacccgctgcaccctcccttgtgcatttcaacagaggccccaccgtcttatgagtagagctgcggcggcgtggaacccagcctgacccctgagagctgaccccgtgctgccttctccaggcaggcctggcctctgccctgggactggggcgcccagggcctcgtgccttctctcttggcctagcctggcccactcaggacctgcccagcctctgccagctcctctggcatccgccctcttctccctggggctggggtgggggtggcagggagctgggacctggagagacaactcctgtaaataaaacactttatttgtag

SEQ ID NO: 75827 - DNA, 678 bp, Homo Sapiens
atgatgagacataattaagggtcatctacaatggacaattttcaaggtgctgatgtgatgtcacaacctccgctacatcctgagtaagtcagtgtccccaacagcagatgaggctgggtctttcctcatttctgcttctgggatgacatcagtgggagagttgaagatctgagaattctaaaggaaatgttctctgatgggaggagagagggaacttatttcccttcaaagtagtttgcttcttaagaccactcctccctccagaatgtctttaaccagacatcatttcagaaggtggggcagctgcttccttaggaagagtgggcctgatagctcaaccaactcctttagcatgtaaactcacagaaggcaagaacccctttttttagactttccaaatgcatcctgcaaagagagagatagctgatagggactgacaagcacactgtttagataagaagcaattagccttttatatctgtgctctatacattttctatgtgcagcatctttcctaacttgttgtggttcccgggtggcaggtgcacagctgggagggactgccggctgtttcgtacaacattcttgccaattcccttgaggagaaaattcttcacatggcttctgcatgtacaaaatttgggcagcaaaacatgattaaagtcagtttgaaaatgg

SEQ ID NO: 75828 - DNA, 1113 bp, Homo Sapiens
  misc_feature (24)..(24): n is a, c, g, or t
tgcggatccacgctgctgtcaccntggattcaccctgttactcgggaccagttcctggtggtaggggccgaggaaggcatctacacactcaacctgcatgaactgcatgaggatacgctggagaagctgatttcacatcgctgctcctggctctactgcgtgaacaacgtgctgctgtcactctcagggaaatccacgcacatctgggcccatgacctcccaggcctgtttgagcagcggaggctacagcaacaggttcccctctccatccccaccaaccgcctcacccagcgcatcatccccaggcgctttgctctgtccaccaagattcctgacaccaaaggctgcttgcagtgtcgtgtggtgcggaacccctacacgggtgccaccttcctgctggacgccctgcccaccagcctgctcctgctgcagtggtatgagccgctgcagaagtttctgctgctgaagaacttctccagccctctgcccagcccagctgggatgctggagccgctggtgctggccttctggagccatgggatgcaaggccgaagcctggataccaatgaggtgacccaggagatcacagatgaaacaaggatcttccgagtgcttggggcccacagagacatcatcctggagagcattcccactgacaacccagaggcgcacagcaacctctacatcctcacgggccaccagagcacctactaagagcagcgggcctgtccaggggctccccgccccaccccacgccttagctgcaggcccttttgggcaaaggggcccatcctagaccagaggagcccaggccctggccctgctggggctgaaggtcagaagtaatcctgagaaatgtttcaggcctggggagggaggggagcccccgacgcctctgcaataactggaccagggggagctgctgtcactcccccatccccgaggcagcccagtccctagtgcccaaggcagggaccctgggcctgggccatccattccattttgttccacatttcctttctactctttctgccaagagcctgcccctgcatttgtcctgggaaacacggtatttaagagagaactatattggtattaaagctggtttgtttt

SEQ ID NO: 75829 - DNA, 1794 bp, Homo Sapiens
  misc_feature (43)..(77): n is a, c, g, or t
  misc_feature (218)..(357): n is a, c, g, or t
aaacgaccgagcgcagcgcagtatgtgagcgaggaagcggcgnnnnnnnnnnnnnnnnnnnnnnnnnnnnnnnnnnncagtcgacggtaccggacatatgcccgggaattcggccattacggccgggggccattctcctgccccagcctctcctgagtagctggaactacaggtgcccgccaccacgcccagctaattttttctatttttagtcatgnnnnnnnnnnnnnnnnnnnnnnnnnnnnnnnnnnnnnnnnnnnnnnnnnnnnnnnnnnnnnnnnnnnnnnnnnnnnnnnnnnnnnnnnnnnnnnnnnnnnnnnnnnnnnnnnnnnnnnnnnnnnnnnnnnnnnnnnnnnnctatagaaatcaatctttttgactcttctcacttttatctccccatgcccaaggtttgcctgttccataacactcactcccttcccccttgctaatcagaagccatctcctctcagtgtctgatctctgctcttcatacatgattacagtcatggggtagagagtgcttgctaaattatgcagttaatcctatggtgctttaattttcaggccttcaaaaaacacttgtacagtgatgtgcagatttttaaacagttgaacttccttgtactacagtttttgtattgacagccaaatttgtctttcattcttcagattgtgaataaagtgatttttacagggcttccagcaaagtttttcctttcatctaaggcttgtagaaccctagcttatatagctgcttacatgagaaatgcaaaatctgtattcaccatgactttagtaacaaaggtaaagttttttagtagtgccaaggcaagaggaacaatcttggtggtagtactaagttttgtcaatattgtggtttcctgattgtattgttggctttctctctgagcattgaggtatactagaagtagagcttctcaaacataatatcattacctcataagcattaacaaatcaggcccaaagagcgtaagtcctagaaatttgttttaaagcagccctagtcatggtgctggtgctaccgccttgttttaggagcctgcctcctgtcagtatgaaaccctcacctgaaaaatgccagcctggacaccaaacactgagccccttcaacaggcacattatttccccctgagatccataagggaatttagtttctactattgtagagttctgaaaagaggtaaaatagtagtcctttggtcatcctatttttgctttcaattttgatatttcagactgtaaaaggccttgggggatgatagtacatgtggtagcagtaatttttttgaagcaactgcactgacattcatttgagttttctctcattatcagattctgttccaaacaagtattctgtagatccaaatggattaccagtgtgctacagacttcttattatagaacagcattctattctacatcaaaaatagtttgtgtaagttagttttggttaccatctaaaatatttttaaatgttctttacataaaaatttatgttgtgttttaaaatccttaggggctttatctatttttctaagtcagttaactgtacttctaaaaaaagtattttgtatctacttttgtaacttcgtcagaataaaatattattgacaggcagaaataagagacacaacacactaaaaaactttttggcggcgcacgggcccgaaaaagtctttaaacccattgttgtgggcggggccattggtagcgacacgggcaaagggtgcccaggaaaccgggccagaagggcgggttcttccaataacg

SEQ ID NO: 75830 - DNA, 1007 bp, Homo Sapiens
cagtcgacggtaccggacatatgcccgggaattcggccattacggccggggcagtgtgaatagcaaggacagacaccttcaatttgtgaaatcaaagaactgatgcactatatagaacgaatttgggtttttaaagaaatattaaaagttaggtactgtaagtgttcttaaaacctgtaaacttcattctgtgggctagtggtgtgggacaaaatattcctaatgaaaggaagtaccaattagttgatttgttggtggcattccccttttgggaaagcaatgtaaggttatgtctgtgtatgtcattcacacttaggcaagcatacacaggcacatggctttaagaaccacactgatgccttgataattaaaaagaatacaagcattccatgtacacatgttaattagcagttagtgactgggccaacactttctcataaaaattggccttttacatgttgtctaattatcatttttccccaaattttgcgttgtaggactactgttcgaagatttttggaagaatactgagaacggcataaagtgaagatcgacatttaaaaaatgaggtgaaagaaagctatagtggcatagaaaaagtataaagctcagttagtttttttattattattattattaaaagttaattcaggactgatgtgacctaccagatttcagaacatgtgttaatagtatatatgccactgaaaacttaggtcctgtatcatacttttttctttaagactttttaagaaatattacttaaacatgtggcttgctcagtgtttaattgcaagttttcaatcttggactttgaaaacaggattaaacgttagtattcgtgtgaatcagactaagtgggatttcatttttacaactctgctctacttagcctttggatttagaagtaaaaataaagtatctctgactttctgttacaaagttgattgtctctgtcattgaaaagttttagtattaatctttttctaataaagttattgactctg

SEQ ID NO: 75831 - DNA, 908 bp, Homo Sapiens
tcggctaggtacgaggcctgggtggtgaattcggcacgaggggcgacaaaatggctgcccgagggagacgggcggagcctcagggccgggaggctccgggccccgcgggcggtggcggtggcgggagccgttgggctgagtcgggatcggggacgtcgcccgagagcggggacgaggaggtgtcgggcgcgggttcgagcccggtgtcgggcggcgtgaacttgttcgccaacgacggcagcttcctggagctgttcaagcggaagatggaggaggagcagcggcagcggcaggaggagccgcccccgggtccgcagcgacccgaccagtcggccgccgccgctggccccggggatccgaagaggaagggcggtccgggctccacacttagcttcgtgggcaaacgcagaggcgggaacaaactagccctcaagacgggaatagtagccaagaagcagaagacggaggatgaggtattaacaagtaaaggtgacgcgtgggccaagtacatggcagaagtgaaaaagtacaaagctcaccagtgcggtgacgatgataaaactcggcccctggtgaaatgacgcccctcccccacctgcccatggcctgggactctctgcgatgtacataactatttaatgcagcggcagcggcgacagccttccctgagaggacttaaaagcagaaggaaaccgagatgcttcccgcagccgtggacgattctccaggactctttttttaccttgagcacttgcctcgtgagacttcatagaacagtggtttactgtcccccccttctcacctcctcattctctctggctctttctgtcttcctcttctcaccctcctccctccccttagccatcacttctgggaagtaaagaacttgacttagtgccggaaaaaaa

SEQ ID NO: 75832 - DNA, 896 bp, Homo Sapiens
taggctaggtacgaggctgggtggtgaattcggcacgaggctggcgacaaaatggctgccgagggagacgggcggagcctcagggccgggaggctccgggccccgcgggcggtggcggtggcgggagccgttgggctgagtcgggatcggggacgtcgcccgagagcggggacgaggaggtgtcgggcgcgggttcgagcccggtgtcgggcggcgtgaacttgttcgccaacgacggcagcttcctggagctgttcaagcggaagatggaggaggagcagcggcagcggcaggaggagccgcccccgggtccgcagcgacccgaccagtcggccgccgccgctggccccggggatccgaagaggaagggcggtccgggctccacacttagcttcgtgggcaaacgcagaggcgggaacaaactagccctcaagacgggaatagtacccaagaagcagaagacggaggatgaggtattaacaagtaaaggtgacgcgtgggccaagtacatggcagaagtgaaaaagtacaaagctcaccagtgcggtgacgatgataaaactcggcccctggtgaaatgacgcccctcccccacctgcccatggcctgggactctctgcgatgtacataactatttaatgcagcggcagcggcgacagccttccctgagaggacttaaaagcagaaggaaaccgagatgcttcccgcagccgtggacgattctccaggacttcttttttttaccttgagcacttgcctcgtgagactttcatagaacagtggtttactgtcccccccttctaactcctcaatctctctggctctttctgtcttcctcttctaaccctctccctcccttagcatcactctggaaagtaagacttgattagtgcggg

SEQ ID NO: 75833 - DNA, 1140 bp, Homo Sapiens
ggctccaaagagtgatcactacaccattcaaagagatctcgatgggacctgctccctccataccacagcctccaccctagatgatgatgggaattatacaattatggctgcaaaccctcagggccgcatcagttgtactggacggctaatggtacaggctgtcaaccaaagaggtcgaagtccccggtctccctcaggccatcctcatgtcagaaggcctcgttctagatcaagggacagtggagacgaaaatgaaccaattcaggagcgattcttcagacctcacttcttgcaggctcctggagatctgactgttcaagaaggaaaactctgcagaatggactgcaaagtcagtgggttaccaaccccagatctaagctggcaactagatggaaagcccgtacgccctgacagtgctcacaagatgctggtgcgtgagaacggggtgcactctctgatcatagagccagtcacgtcacgtgatgccggcatctacacatgtatagctaccaaccgagcaggacagaactcattcagcctggagcttgtggttgctgctaaagaagcacacaaaccccctgtgtttattgagaagctccaaaacacaggaattgctgatgggtacccagtgcggctggaatgtcgtgtattgggagtgccaccacctcagatattttggaagaaagaaaatgaatcactcactcacagcactgaccgagtgagcatgcaccaggacaaccacggctacatctgcctgctcattcagggagccacaaaagaagatgctgggtggtatactgtgtcagccaagaatgaagcagggattgtgtcctgtactgccaggctggacgtttacacccagtggcatcagcagtcacagagcaccaagccaaaaaaagtacggccctcagccagtcgctatgcagcactttcggaccagggactagacatcaaagcagcgttccaacctgaggccaacccatctcacctgacactgaatactgccttggtagaaagtgaggacctgtaatccagcattcttgttaaagctgaaacactgaaacagccattgccttgaccaacatattcctttgtcacattatgtaaaaggcagaaacatacctttgactataagaaatt

SEQ ID NO: 75834 - DNA, 846 bp, Homo Sapiens
cccccatctttgctagtaatctagagctggcttcggcttctgctgagtttggccctgagcagcagaaggaactgaacaaagccctggaagtctggagtgtgggccctcccctgaagcctctgatgtttgagaaggatgatgacagcaacttccatgtggactttgtggtagcggcagctagcctgagatgtcagaactacgggattccaccggtcaaccgtgcccagagcaagcgaattgtgggccagattatcccagccattgccaccactacagcagctgtggcaggcctgttgggcctggagctgtataaggtggtgagtgggccacggcctcgtagtgcctttcgccacagctacctacatctggctgaaaactacctcatccgctatatgccttttgccccagccatccagacgttccatcacctgaagtggacctcttgggaccgtctgaaggtaccagctgggcagcctgagaggaccctggagtcgctgctggctcatcttcaggagcagcacgggttgagggtgaggatcctgctgcacggctcagccctgctctatgcggccggatggtcacctgaaaagcaggcccagcacctgcccctcagggtgacagaactggttcagcagctgacaggccaggcacctgctcctgggcagcgggtgttggtgctagagctgagctgtgagggtgacgacgaggacactgccttcccacctctgcactatgagctgtgacaaggcagccaccctgtcacctagctcaatggagccccggatcccaagccctgcattgtaagcccacagtaggcactcaataaatgcttgttaaaggaaaaaa

SEQ ID NO: 75835 - DNA, 749 bp, Homo Sapiens
aaaaaaaacggggaaaggtaactaaaaacttaaggaaagataaactgaacaagaatgctcagacagcaggcaaatctccccaattagaaacgaagtgaatagacccaattgaatgagatgaattctaagcaatagatggattgaataataagctggaggacattaataacatgttctggaaggcatacatttcttcaacccaaaggaaaaaaaatgacagaaagaaactacagggaagaacattaaaaactgtgcaagaaacttatgtttcacatatgaagcaacctcagatgtggcatggttttgaacagttgccgaaagtgtgagaaagggaatctgtttgaatattggcacatggatcaagactctggagtcggtgatgagaaaatccaatcagagcattccactttgctattcattgaaccaggtagccaacagaagagttaaaaattagtgatatgactatattcagggggaaggagagctgaggggggcggcaggaagtcagcagaaaatgcctcatgtcattaagtcaagaaatagtaataaaggcatgttattgaaaaagggggtgtaatctctaaacaagcacgtgtagaagtttgtgtttctgatttggggaagcaagagttgagaaggagagacagttctattacttttcattatatgtcctttttctactgtttgatttttaaaaactatacacatgtattgcttttgcttcgattaaaaatcaagacattaaaatg

SEQ ID NO: 75836 - DNA, 538 bp, Homo Sapiens
ttttttttaatttaaagatagaatttattctctgatggtttactcatgcaaactgcacataaaagaaaatagtacagtttgtgtaacattgcaaatataaggactgaaaatgctaggtacagaagtagtatgacatcctgaaagtcaaaatggaatttgtgtttatacaactaataatgatttttatttgctcagtacagactgatttacaatgaaagttttgctaaccttggtaagcttgttaaccgtttacatgacttcttacatctatgtagttttattttacagttgcaagaattctgttaccaaagaaccttaacttgcataagtaataagatgaaagaaaaatgtactgaaggacttaagagtgaaaaattgaggcttttcctaacccattcaaactacaataaaaaatagccttcttgcagaattcatattttgtgcctttgagataactccttagaataatgatatcaaaatcatgatttgaaaaactgattactttaaaataatgaaattagttaaaaattaaaaattt

SEQ ID NO: 75837 - DNA, 595 bp, Homo Sapiens
acacatggctgtgcagaccaggaggcccacagatggactgagtgctgggaaggggcgactgcgaggggtatcaaccccccgagtctctccctgaaggggagcaccgggcgagtgcatgtgctactgctgctacaggcctgtctatctgtttgtctgtctgtgtgtctgtgacagtcagggaaggatgcctcggagctgaggtggggtgagacagagtgggagagattacggcatggcatggaggggcccaaggagcaggggctgttgacaaaggccttaccaggaagggttaggacactgaccattctagaaatgggtttcgaatggcacaacactttctatttcacaaaagaccaaaagccagaggccccaggctctgtgctgatgaacagcctggctgagccctggccctggcaggtttagggcccatttggggccccctccttctctgtcagggctggggtgctctgtctgggaatgagggagttaaccaagtttggtgcaggagcaggggcagggggccactgtagtgagcgtggagaaatttggaaacacctatttcttaactcaaataaagtccagtttgtacctaaaa

SEQ ID NO: 75838 - DNA, 1674 bp, Homo Sapiens
  misc_feature (98)..(98): n is a, c, g, or t
  misc_feature (792)..(828): n is a, c, g, or t
tcgagcggccaggggcactgtgagtatctcctggccgtgggctgcctgggtggggtctggagctgagtgcagggatgcgctcagctcgctgaagaagntgcttccctgagtagcccgcatggtcagggagagccatggagagacaaggagcccggaaaaccggtctcctactccctccctccagtactgcgagaactgtgacacccacttccaagattccaaccaccgcacatccactgctcacctgctgtcactgtcgcagggtcctcagcctcccaaccttccacttggggtgcccatctccagcccgggcttcaaactgctgctgagggggggctgggagccaggaatggggctgggaccccggggtgagggccgtgccaatcccatccccactgtcctcaagagggaccaggaaggactaggctacagatcagcaccccagccccgagtgacacatttcccagcttgggatacccgagctgtggctgggagggagagaccccctcgggtggccacactgagctggagggaggagagaaggagggaggagaaagacagggcttgggagcgggatctaaggacttacatgaacctcgagttctgactttggtaaagtctgaccctagtctgctgctgaagtctgaacttgggcctctgacctgggccctttgacttccccttcctgggatctgctcagatgcagatcctgaagtttttggtcaataggctctgtcttcgtgagagacgggctgagagtcagaaataaatcaaccatttgtggtttattcnnnnnnnnnnnnnnnnnnnnnnnnnnnnnnnnnnnnncttttggggcacgcgccagcgcgacgccaccgaagaagaatctttctagagacaacaccaatcgacgtagaggagcggcgcggcgaggcccccaatggggtgacaggtgacaaactgcgtggtccgaacgcaactgacgtgtcccacgtgcgagaaaaccgcgctgggacgaagcacagaacgaggcgaggggccatctccacaccagaaatacaaagaacaccgccgcggcgggcacaccacacgcggggcaggcccgaggaacaagaacaccccacagagcagggagcccccggcgagagaatcaaaacgagcggaacacataacaaaaggaggggacacccaaagacaacagctggccgaaaaacataaaaacgatgatgggcgcccaaacggcagagggagaaccaccagcaacaagcacgagaacacacatatccagacgactttgcctcgaacacataatcggcacacaaaggaactaacgacgagtctagaacgccaccgtgtacggctatacagccactcaactatcacttagagacacccgaacccaaaaaatcatgaaaatcactcaactactgcagacgatttaatgacacagagatgaagtgctctagcaaatataaggagagcgcaaagcggaggcagagaaaggaagcggcgggacagcagcggcagaagagcgcggagcggggcgcgcgacaagcgacgagctgggacgaggcaggaatagcagccatcaggagagcgcgggacaagtggctgagagacagcacacgcgggacaaaagcgacggaagggggagcgcgacggaggaggggcccggacaggagagggaagccc

SEQ ID NO: 75839 - DNA, 423 bp, Homo Sapiens
gagccggcggcctcgcccgcggggccggaggagcctggagagcccgcggggctgggggagctcggggagcctgcgggaccgggggagcccgaagggccaggggatcccgcggcggcgccagcggaggcggaggagcaggcggtggaggcgaggcaggaagaggagcaggacttggatggtgagaaggggccatcatcggaagggcctgaggaggaggacggagaaggcttctccttcaaatacagccccgggaagctgaggggaaaccagtacaagaagatgatgaccaaagaggagctggaggaggagcagagagttcagaaggaacagctggctgccatcttcaagctcatgaaagacaacaaggagacgtttggcgagatgtccgacggcgacgtgcaggagcagctccggctctacgac

SEQ ID NO: 75840 - DNA, 1981 bp, Homo Sapiens
  misc_feature (1720)..(1845): n is a, c, g, or t
  misc_feature (1856)..(1868): n is a, c, g, or t
  misc_feature (1909)..(1929): n is a, c, g, or t
gcggccgcgagcccggagcctgcccgcgcgcccccggaacccgcgctcccggccgaggccaccggggccccggcgccgtcccgcccctgcgcccccgagccggcggcctcgcccgcggggccggaggagcctggagagcccgcggggctgggggagctcggggagcctgcgggaccgggggagcccgaagggccaggggatcccgcggcggcgccagcggaggcggaggagcaggcggtggaggcgaggcaggaagaggagcaggacttggatggtgagaaggggccatcatcggaagggcctgaggaggaggacggagaaggcttctccttcaaatacagccccgggaagctgaggggaaaccagtacaagaagatgatgaccaaagaggagctggaggaggagcagagaactgaagaataacgaagttatccttagcgtcctcctaaaggcttttccttttggcatcttaaaagcttgagagataaaacggaaaccccagagaggagtctgggcaggctcccagggtgcatgctgcctccataaatctgctgagctctagaccctcaatcaggacttgtcccttggctagcaggatcctgggaacacctttggccctgccctgtgtagagatgttcatgtctgttcctgtgggtcactttgttaagctgaagagttttaagaggtagagctcagaccctggactgggatttttcttaccactcaaacttgctatccacacaccctgcacaccttagataaaaagaacattttaaaagcagagttcactttcactccagtctcccctcttttgccctcactgaagccaaaccacagaagactttgaggaatgagagacaaatgaggtagagctcacctgtgctcaccagctccgtcagggtggtcagccgacccctttccctgggaaccccacttctctctgtggctggcttggttgtcgggggtgagatgccatattgattacagggcagcaaagaaccagtaccaggaatttacttgaccattccccttatttttcatctagaggaatctcggattcagccctttcattgctaagacaccttttcactgaggttcttaccagctcagccaaatctccactctgctatagcagaagcaataatgtttgctttaaaaagatttcttgacctatgccttttcttagaaagtttgatagattagttagaacttcagatcatcagatcagtctcaaatgggtttcttggaattttatatttgacaatatttatactataccaaactcatttgcagttcttaggtttgttggttaaaacatttttttaaagcagtaagtttatagaaaatgttttcatttaatggaaggctggggaatgtccagcatcaacccctatggcatgcattcccagtggccttctcatctgggcctggaacctttggttcagggcttaggggagaacaggccacatggcaacagccacacagtcattgccttcaacacagagccacgtgtccccaaacagcaatagtcatgcccttgtccaggctgggatctaattgatacaataggtcgttgactccctcctagtagagctatctaggtttgtctggaaagtttccgaccctggcttataggcaccacacctcatgtactcctcatggcttggatctctgtattcagcctttgttcagtccaataaactttgagtagatgatctcnnnnnnnnnnnnnnnnnnnnnnnnnnnnnnnnnnnnnnnnnnnnnnnnnnnnnnnnnnnnnnnnnnnnnnnnnnnnnnnnnnnnnnnnnnnnnnnnnnnnnnnnnnnnnnnnnnnnnnnnnnnnnnttttgggcggnnnnnnnnnnnnnaaaatcccaaaaatttgggggtctcccgggaaacctccacnnnnnnnnnnnnnnnnnnnnnatcaaaagaaaaagattttcaaaccccccttggggacccggaaggaacttcc

SEQ ID NO: 75841 - DNA, 678 bp, Homo Sapiens
  misc_feature (410)..(444): n is a, c, g, or t
  misc_feature (667)..(667): n is a, c, g, or t
agttgtgaaagtagttcgtatatatttagaaaaatgtttacttttaataaactattcatttaataaatgtattaactgagcactaaataatgctcaaaggatcatagatttttttcctccacactaagcccatgggacatgaagaatatctgggtgcttccaggatataaggaaggaatgtgccttttcccactcctggcctttgggtactgtcctgagcatgggatgctggggcaggggctgccttggccatcttgccatctgcatggcagtggcagaggatagctgagggaaaggactagagagccctggagctgccgccttgctctgtgagaagccccttccaatggagatttgaattacttgcaacttgttggcctgcctctccaccccacccccatctgttcccnnnnnnnnnnnnnnnnnnnnnnnnnnnnnnnnnnnactcatgctccctgactatgccctcacagattctgatttgactggtcctgggtgcaacggggctggcatgagacgactaaaaactccccaggtgaatccaatgagcaaccaggctaaggaccagtgatctaactgtaagtcattctcttcttttcgctttgtaattttatgtttccacctcatactgtggttggctacatctgtttcttccctctcctactanaatgtaggctc

SEQ ID NO: 75842 - DNA, 820 bp, Homo Sapiens
ttcaagtcataaactctaaatttaaattgccttgttttccttccaactgctcgggccctttccccaccatgtttccgggcactgcgcaggctgagctcaagggaaatttctttgaacgatggctttttctctagccttgtttctgtccagcgtcattacagacctggctgaaatcacagtggatttcagagaaagccagaattaaacacgataaaaatttaaaaaataactacttcataaatatttattatttacattaggggcaatcttttagtctgaagagtttttatacaagttgatgaaatgtacaagcagtgagaagagactccagcagtttaaagaagggcaaaattagaatgcaacgaagatataaaatacattaaacaaaaataatttgcacaaaagcaaacaggacatgatagaaacctttttcttaaaaaatataaggtatttcacaaaagcctgaacattttacatgttagtactaaaaacgggggaaggagggaagcttcatatattcttatcacaaaaatatttaccggtactccaactggagttttcttttatgttattctgattatcttactatagagggaaaggggctgaaaactgtatacagactctatcatccttaaattacagttgaggcagtttgtacattatcttctcatctaatacctcaatgaaaaggccctggagagaataaaggaaatcaaaagggaagatgtacgctctttattaataatacttgtcactggtattagagaagtggaggaggggccagagcgactggttccacttttattttttcatgcttgtg

SEQ ID NO: 75843 - DNA, 942 bp, Homo Sapiens
  misc_feature (120)..(120): n is a, c, g, or t
  misc_feature (122)..(122): n is a, c, g, or t
  misc_feature (176)..(176): n is a, c, g, or t
  misc_feature (220)..(220): n is a, c, g, or t
ttaatatgatgatctatgcttggatgacgatgacgatcgacttggtggatggatagttgctgtgatgtcactgtgcatgttcctgcacgtggccagctggcccaggatctctgttcatangnaagagaatgcatggcatccactaggagaggatagagagaattgctcgccttgcncacaggagcagaggcagacctgggatgccccagtttctcttcangggatggatagtgacctgtcttcattttgcacaggtaagagagtagttagctaacctatgggaattatactgtggggccttgtgagctgcttctaagaggctaacctggaaactaagctcagaggcaaggtaataaagcacttcagggcttgctccccaagtgggcctgatttagcaggtggtcctgcgggcgtccaggtcagcaccttcctgtagggcactggggctagggtcacagcccctaactcataaagcaatcaaagaaccattagaaagggctcattaagccttttggacacaggaccccagagaggaaaaagtgacttgcccaaggtcgtaagcaagctactggcatggcaagagcccagcttcctgacggagcgcaacatttctccactgcactgtgctagcagctcagcagggcctctaacctgtgatgtcacactcaagaggccttggcagctcctagccatagagcttcctttccagaacccttccactgcccaatgtggagacaggggttagtggggctttctatggagccatctgctttggggacctagacctcaggtggtctcttggtgttagtgatgctggagaagagaatattactggtttctacttttctataaaggcatttctctatatacatgttttatatacctcattctgacacctgcatatagtgtgggaaattgctctgcatttgacttaattaaaaa

SEQ ID NO: 75844 - DNA, 624 bp, Homo Sapiens
gcggaagaaatatatatatgtggaagattacgagcagggtcttgctagtgagctggaccagtgaggcctaccccacacctgggctctccacagccccatcaaagaacagagaggaggaggagggagaaatggccaccacatcaccccagagaaatttctggaatctgattgagtctccactccacaagcactcagggttccccagcagctcctgtgtgttgtgtgcaggatctgtttgcccactcggcccaggaggtcagcagtctgttcttggctgggtcaactctgcttttcccgcaacctggggttgtcgggggagcgctggcccgacgcagtggcactgctgtggctttcagggctggagctggctttgctcagaagcctcctgtctccagctctctccaggacaggcccagtcctctgaggcacggcggctctgttcaagcactttatgcggcaggggaggccgcctggctgcagtcactagacttgtagcaggcctgggctgcaggcttccccccgaccattccctgcagccatgcggcagagctggcatttctcctcagagaagcgctgtgctaaggtgatcgaggaccagacattaaagcgtgattttcttaaaaa

SEQ ID NO: 75845 - DNA, 773 bp, Homo Sapiens
  misc_feature (25)..(25): n is a, c, g, or t
gctcccagccatcagccacaacagnacctcccggcccaagatgtccctggtgatgcctgccatggcccccaatgagaccctgtcaggccgtggggccccgggggactatgaggagatgatgcagatcgagtgtgaggtcatggacaccagggtgattcacatcaagacctccacagtgcccccctcgctccgaaaacagccatccccaaccccaggcaatgccacaggtggccccttgccagtctctgcagccagccaggcccaccaggcctcccaccagcccctctacctcaatcatccctgacctctgccattcacactgacttagaacggggggagggggtaccaggtggccaggtgggactgtttcaaatttccctgatccccaggcttggggcaattggtaaaggaaagagcaggtgtgggggttaagcacttatttgaggtgggggtgttcacctctcttctcatcccttttcagaatatagggctcctctcattcctgtgaacccccagtcctggcttctttgtttgaggggattgtgtgaggttcagttgtggggtgggtggtgagctgctgcatattttttattttgtttctctagtgttatggcagtggaggtgggaatttagtccccaggtgggacaagggaagttttttcattttggagctagttactgggagtaagggagggtggggtgggggggagttcaggtttatgtgtgtgcatttcttttttattattattaaataaacaacttggagggagttg

SEQ ID NO: 75846 - DNA, 1044 bp, Homo Sapiens
agccaggaaaagcagggcaggtccgaaggtgagggcaagccacaaggcgagggcaagccagcctcccaggcaaagccagagagccagccgcgggccgccgaaaagcgcccggctgaagattatgtgccccggaaagcaaaaagaaaaaccgacagggggacggacgattcccccaaggactctcaggaggacttacaggaaaggcatctgagcagtgaggagatgatgagagaatgtggagatgtgtcaagggctcaagaggagctaaggaaaaaacagaaaatgggtggttttcattggatgcaaagagatgtacaggatccattcgccccaaggggacaacggggtgtcaggggagtgaggggtggaggtaggggccagaggggcttacacgatatcccatacctttaatgcctttggccttccattctgatttctctgatgagaatattgctggccctgctttccctggtaggtatttgccaggcccaatgctttaaccttaagctgatactttgctttagatgtcagtctcgttaccagcagccttttgacccaactacggcgctctatattttagtagaggattttcacccatgtgcatggaaaagatgttcatgacacattgtaaaaaataaataaataaagaacagtttgcagaacctcgtatacggttatcagccaatatttataaaaatgtaaatgtttgtataatgcatttctgcgcaaagaaaaccctgaaagcatgtacactaaaaagcaggcaatggttattcctgaagggtagccaagaataggtctcacctgtattcaaaaatgagtcctaccacctcttgtatgtacctccatgatattcctctgctgctgtgcacatccctatgtcttccctaggtcgagccaggtcagtgggcactgttgctaggtcctctatcatgttcctgggtcttctaacatgagtgctgggtctgcatactcagacccatactaaaatataatactaaatatttgtcatactgaaaaataaataaaagctgaatacaatac

SEQ ID NO: 75847 - DNA, 633 bp, Homo Sapiens
ccccagagtcagggtgctccctggcatggttgctcctcgtactcttagacccaccagctgttttctccagataggaacaggggtaggagaaatctttctcagaaatccatctcttctgatttcagattattctctaggcggagaaaaacttcccgtctttaaagttcttagagaagatgtatttattgtatactaatcctccagcacctgctccactccttattataaaatgtcatatccaaagaacagatgctgtcactgatgcctgatgagccagtagtttaagcttccttgtctcatcagtggtacagaatatctcatggactacctcccacttagttttctcaaaattatctcacttaaaataggaaaactgctgctgtgtgtgatgctttttttaaaagtgaatttctaagttgatgactaagtctgtccaacagaaacatacagggaattataacttctgtgagactgactgtcagtcattccatctttgcaaaccactggcacacagaagcagaagctttggaagacaaaaaaagcaccctttgattcagccaaagactgactttaacagacgcaaaatgctatatacatgaaggtgtttgctgcaattttatctataatagcaaa

SEQ ID NO: 75848 - DNA, 1232 bp, Homo Sapiens
  misc_feature (86)..(94): n is a, c, g, or t
  misc_feature (990)..(1012): n is a, c, g, or t
cccatggggtgcgatggattcgggggacgcggggatggttacccactaattgttacccgcccctggtcgcctgttcacccgctcannnnnnnnntgtttgttttgcccgaggtcgccccaatgtttagctccgtgggacttcccgcacccggttgaggaataagggcgggttcgcgagaaggttggaaaacgtgcgaagccacggtttatttgagagggggcgccgtttgtttccggtaagagaggaccgccagcgtgccttaaagcgtctgtctcccaggtccgggagaggacccgcctccggtccaggggggatgggactggttaaggagccagccgcaagtttatgtgaagaaggttttaatcggaaaaggggaagggcagaattcaaggtgcaggttcataccccaatggcatttgaaacagaccatcctggcatttctggaccgcaagagacttggacgtcggcaacaagacatgaaaggtctaccttcatgtaatgggtcctccttcagaagagagccctcagctactctgtgaatgacttgcatagctgcaactgtaatctcgaaggtgtcactttgttatttacaagatgcttcttaaatgggctgctcctgagctcagtgtcaaggtgattcaactgtagtgccagacaatgatttacacagctcagataattgacctgtccagttaacagatcattgcttcataagtttttaaattattttaatttaatattctttagtagaaatagtccacaaaaacattttcttgaatttaaatatacaacttttatatcatgtatcaaaccagattttatattcaaacgatcacattttaaattctgtacataacagtaagcgcactagtcaaaagacatttatgtttgaaatgtcatttagatcaaacacaagggtcaaagcccaggacaagtaaagttttatacttaaagagtactaaagggccagtgtgcagatgggtggattnnnnnnnnnnnnnnnnnnnnnnntagtactaaagggcttacttcaggcaaaagtgttcctgacgtaccaaaaagtaagatatagtttattttcatgcctccctgctcctagtaatgtatgttttgtgctgaactggcagctatcccaatgtgaaatgtattttggatgtatctggtgtcatttttctattaagaccaagtataatgtttgtttgtaaagcaataaatcttgacttgaaatcag

SEQ ID NO: 75849 - DNA, 1006 bp, Homo Sapiens
  misc_feature (60)..(89): n is a, c, g, or t
  misc_feature (360)..(371): n is a, c, g, or t
  misc_feature (730)..(764): n is a, c, g, or t
  misc_feature (902)..(916): n is a, c, g, or t
tggctttcccagtccttgcatcaacgggatgccacatttcataactgtttttaatggttnnnnnnnnnnnnnnnnnnnnnnnnnnnnnnttctgaaggacaaaaaaggtgactgctgaactgtgtgtggtttattgttgtacattcacaatcttgcaggagccaagaagttcgcagttgtgaacagaccctgttcactggagaggcctgtgcagtagagtgtagaccctttcatgtactgtactgtacacctgatactgtaaacatactgtaataataatgtctcacatggaaacagaaaacgctgggtcagcagcaagctgtagtttttaaaaatgtttttagttaaacgttgaggagnnnnnnnnnnnngcttttcccccaaagtatcatgtgtgaacctacaacaccctgacctctttctctcctccttgattgtatgaataaccctgagatcacctcttagaactggttttaacctttagctgcagcggctacgctgccacgtgtgtatatatatgacgttgtacattgcacatacccttggatccccacagtttggtcctcctcccagctacccctttatagtatgacgagttaacaagttggtgacctgcacaaagcgagacacagctatttaatctcttgccagatatcgcccctcttggtgcgatgctgtacaggtctctgtaaaaagtccttgctgtctcagcagccaatcaacttatagnnnnnnnnnnnnnnnnnnnnnnnnnnnnnnnnnnntctttctaatcgaggtgtgaaaaagttctaggttcagttgaagttctgatgaagaaacacaattgagattttttcagtgataaaatctgcatatttgtatttcaacaatgtagctaaaacttgatgtaaattcctccnnnnnnnnnnnnnnnggcttaatgaatatcatttattcagtatgaaatctttatactatatgttccacgtgttaagaataaatgtacattaaatcttggtaaaaa

SEQ ID NO: 75850 - DNA, 1935 bp, Homo Sapiens
caggcgcgctgctgataagagcctgcgggtttgcagagaagcgcagcagcgcgcaggtcctcaccagagctctggtggccacctctgtcccgccatgctgctcaccgacagtggccaggcccacagcaccaagaggcttgggccacaaagtaaagggtcgcggagcctcgccggccgccatgtggagctgcagctggttcaacggcacagggctggtggaggagctgcctgcctgccaggacctgcagctggggctgtcactgttgtcgctgctgggcctggtggtgggcgtgccagtgggcctgtgctacaacgccctgctggtgctggccaacctacacagcaaggccagcatgaccatgccggacgtgtactttgtcaacatggcagtggcaggcctggtgctcagcgccctggcccctgtgcacctgctcggccccccgagctcccggtgggcgctgtggagtgtgggcggcgaagtccacgtggcactgcagatccccttcaatgtgtcctcactggtggccatgtactccaccgccctgctgagcctcgaccactacatcgagcgtgcactgccgcggacctacatggccagcgtgtacaacacgcggcacgtgtgcggcttcgtgtggggtggcgcgctgctgaccagcttctcctcgctgctcttctacatctgcagccatgtgtccacccgcgcgctagagtgcgccaagatgcagaacgcagaagctgccgacgccacgctggtgttcatcggctacgtggtgccagcactggccaccctctacgcgctggtgctactctcccgcgtccgcagggaggacacgcccctggaccgggacacgggccggctggagccctcggcacacaggctgctggtggccaccgtgtgcacgcagtttgggctctggacgccacactatctgatcctgctggggcacacggtcatcatctcgcgagggaagcccgtggacgcacactacctggggctactgcactttgtgaaggatttctccaaactcctggccttctccagcagctttgtgacaccacttctgctaccgcttacatgaaccagagcttccccagcaagctccaacgtggctgatgaaaaagctgccctgcggggaccggcactgctccccggaccacatgggggtgcagcaggtgctggcgtaagcggcccagccctcctggggagactgtgactctggtggacgcagagcactttagttaccctggacgctccccacatccttccagaaggagacgagctgctggaagagaagcaggaggggtgtttttcttgaagtttcctttttcccacaaatgccactcttgggcacaaggctgtggtccccgtggctggcatctggcttgagtctccccgaggcctgtgcgtctcccaaacacgcagctcaaggtccacatctgcaaaagcctcctcgccttcagcctcctcagcattcagtttgtcaatgaagtgatgaaagcttagagccagtatttatactttgtggttaaaatacttgattcccccttgtttgttttacaaaaacagatgtttcctagaaaaatgacaaatagtaaaatgaacaaaaccctacgaaagaatggcaacagccagggtggccgggccctgccagtgggcggcgtgtgctagcaaggcctgccgggtgtgccgcagtcaccacagggttctgagaacatttcacagaagtgcctgagacgcggagacatggctggtgttaaatggagctattcaatagcagtgacgcgctctcctcagccaccaaatgtccctgacaccctccccagcccccacagataacatcagctgaggtttttttcagtatgaacctgtcctaaatcaattcctcaaagtgtgcacaaaactaaagaatataaataaacaaaagaaaggtgaaa

SEQ ID NO: 75851 - DNA, 758 bp, Homo Sapiens
  misc_feature (188)..(188): n is a, c, g, or t
  misc_feature (534)..(568): n is a, c, g, or t
ccctcatcttgcccatgccttctactgccaggagattgcacccatttcaaccctagggcggggcagtggggcaaggatgaccagcagaagggggtaagctctgttcacttcccctgcctccacagaacgaagccacggattccgttatcttcctccagttttgttccttctccagcctcagttccacncaggtgtcaggactgcatgggggcctggggcaggcagaggagtcaggccagggtccctgacggagcagcactcagcatgtgagtgaggccacagaaaaactctgccccactgcttcttacctcacgggggtggctttcagggattctttagcgcagcagattaaaatcttgccacagtcgagaaattgacaacaagcttccatgctgtacatggttctctttttctctcttttatttttaaaaagaaaacccagaaagatgtaccagatttgtgtaaatgagggtatgccagaaggtggccagttttgctttatgatcttatgaaggaagatttgtgaccctacgnnnnnnnnnnnnnnnnnnnnnnnnnnnnnnnnnnncccgaaccaacaacgggactttgtttatattgcaaataaatattattttttctttaaaatgagtcgtgtccgataagggcttggggcctgggaaggaggggaaggagtgctgtcgacaggcatcctagtgcctgctctgtgtgaggcactggcctggttctgcttggggtctgctggccacttagactaa

SEQ ID NO: 75852 - DNA, 600 bp, Homo Sapiens
catgcagaacaagctttactcagaggaacagcaaatggccccctcccatccctgctggccagggagatccgccctccccgctcctccccagccctgggatggcgcggtccatcccctcatcgggatcctcgcgctcactgctccgtcgtggggtgcggcacagagtccacgcaccctcgagggcggccctggcgccgtgggcgccgctccagggccctgcgtgtgacggtgcagcagcggctctggatggcgcccggcgaaggtcgggtgggcacggtggggggaggggcggtggcctgggagggttcagggaagccccgggcctcacccgccgggtcgtctcctccacggaaccccgtcccgctcaggagagcgcccagcccttccggccgcagcagcaccgcggggagtaggcccgcccggtcgccgtacctgcatagccaccagccgcggtctgacgtttccaacacgcgcacgcgcgcccccgcgggcacggacagctcatctgcgcggctgctctcgtaggcgcgggaagcacagaactggggaccgctggctccctcctcggccgattcaaccccagcctcgtactaagcctaa

SEQ ID NO: 75853 - DNA, 1249 bp, Homo Sapiens
tgcatgtgacactatagacagtggtgtaaaaaaagcaggctggtaccggtccggaattcccgggatatcgtcgacccacgcgtccgtccgaattcggtggcgccacgtccgcccgtctccgccttctgcatcgcggcttcggcggcttccacctagacacctaacagtcgcggagccggccgcgtcgtgagggggtcggcacggggagtcgggcggtcttgtgcatcttggctacctgtgggtcgaagatgtcggacatcggagactggttcaggagcatcccggcgatcacgcgctattggttcgccgccaccgtcgccgtgcccttggtcggcaaactcggcctcatcagcccggcctacctcttcctctggcccgaagccttcctttatcgctttcagatttggaggccaatcactgccaccttttatttccctgtgggtccaggaactggatttctttatttggtcaatttatatttcttatatcagtattctacgcgacttgaaacaggagcttttgatgggaggccagcagactatttattcatgctcctctttaactggatttgcatcgtgattactggcttagcaatggatatgcagttgctgatgattcctctgatcatgtcagtactttatgtctgggcccagctgaacagagacatgattgtatcattttggtttggaacacgatttaaggcctgctatttaccctgggttatccttggattcaactatatcatcggaggctcggtaatcaatgagcttattggaaatctggttggacatctttattttttcctaatgttcagatacccaatggacttgggaggaagaaattttctatccacacctcagttttttgtaccgctggctgcccagtaggagaggaggagtatcaggatttggtgtgccccctgctagcatgaggcgagctgctgatcagaatggcggaggcgggagacacaactggggccagggctttcgacttggagaccagtgaaggggcggcctcgggcagccgctcctctcaagccacatttcctcccagtgctgggtgcgcttaacaactgcgttctggctaacactgttggacctgacccacactgaatgtagtctttcagtacgagacaaagtttcttaaatcccgaagaaaaatataagtgttccacaagtttcacgattctcattcaagtccttactgctgtgaagaacaaataccaactgtgcaaattgcaaaactgaaa

SEQ ID NO: 75854 - DNA, 1171 bp, Homo Sapiens
  misc_feature (888)..(947): n is a, c, g, or t
gatttataaaatctttactcactaactttacgaatgaaagaaaacaattccatccctctcacaaaaaggacatcttttaagctttcctcccaatctaacctccatgggatctcagaaattccaattcttataactcaaatccccacagtggtgtagatgcattaactccccggggacagcaatctgaggcaggcaggttcattaaacaaacatgttctgtgccctctggcagagagggaaaagagcagatggagggactggatccgactcttgtagacagggatgtctagaatggcacagatcatgtcaatgtactctgccaggctgcaatcaatctctgccgtgggcaggcttaccttgcccaaaagctctttcaaactccggggggaccattcctgcatcaggcgtgtcaatgtcggggcatggggcctggtgtagtgcacagtcgcagggggccttagaaccggtgtaattcagagatgctctcaatccacgtgtcaatggctttgggattcttttctgcatcttctaggctttttactttcatatgttgtgtgatgttgtgctgcttagaattctctgttaaccagagtgagagcaccgtagggtctgactgctttgtagaaggttcatccaataccaataggccaaggttgtcaggctttccatcaggacgtgggacctttaagaatgcatcaatatccccgacagctgggataaaatcaggaatgaaaggcttcagtttgtggtccaggtcaatcaactgaggtgtgtacctactgatgtactggaagagttccttaatttcagcagaaactggcaaatgctcatagtctgcagggtcataggccccttccagaggggctccatgctcttcatcatcatcannnnnnnnnnnnnnnnnnnnnnnnnnnnnnnnnnnnnnnnnnnnnnnnnnnnnnnnnnnnctaaagccccgttgaggtgtcaactgtgaggtcttcttcttctcctttctgtgcttctggctctctctgtaccatcccaccctctcaagtacatgagaaggggtctggtggcacttgagacttgcaggggcaggtggaacagggtccatgtctttgcctctgtggcctggagcccccggccgtaatggccgaattcccgggcatatgtccggtaccgtcgactg

SEQ ID NO: 75855 - DNA, 836 bp, Homo Sapiens
  misc_feature (408)..(436): n is a, c, g, or t
cagtcgacggtaccggacatatgcccgggaattcggccattacggccgggggcctagcgactgacaacaggctggttgcttggcgtggaatcctaaagtggcctggctttgagactggagtgagaccccagccctaggctggggttctttccattatagaggagacggattcagaagggctacagaccaaggttgttgaaaacaaacatatgatgagcgtctagagattaacgactccgaagaggttgcaagtatttatactccaaccccaagacaccaaggacttcctcgttctgcccatcttcctaacaaggctatggtgatacagcagtgatgagtatgaagaggaaaataacaaggagacgaagaagacctcacagttgacacctcaaggggctttagtgaaannnnnnnnnnnnnnnnnnnnnnnnnnnnntcatctgaaactggattctgattctgatgatgatgatgaagagcatggagcccctctggaaggggcctattgaccctgcagactatgagcattggccagtttctgctgaaattaacgaactcttcccagtacatcagtaggtacacacctcagttgattgacctggaccacaaactgaagcctttcattcctgattttatcccagctgtcggggatattgatgcattcttaaaggtcccacgtcctgatggaaagcctgacaaccttggcctattggtattggatgaaccttctacaaagcagtcagaccctacggtgctctcactctggttaacagagaattctaagcagcacaacatcacacaacatatgaaagtaaaaagcctacagccgcggccgc

SEQ ID NO: 75856 - DNA, 1198 bp, Homo Sapiens
  misc_feature (91)..(91): n is a, c, g, or t
  misc_feature (117)..(118): n is a, c, g, or t
  misc_feature (127)..(127): n is a, c, g, or t
  misc_feature (156)..(156): n is a, c, g, or t
  misc_feature (159)..(159): n is a, c, g, or t
  misc_feature (171)..(171): n is a, c, g, or t
  misc_feature (284)..(284): n is a, c, g, or t
gattccagaacatagaccactcatgatgcctgacccaactgaccttcatcctatttcccacttcggatatgatcatctaaagtccacgtcngatgaagcctacacctgctatgtatnngatgacctntacaagcatcagacctacgtgcttcactntgntaacagagattntaagcagcacaacatcacacaacatatgaaagtaaaaagcctagaagatgcagaaaagaatcccaaagccattgacacgtggattgagagcatctctgaataacaccgttctnaagccccctgcgactgtgcactacaccaggcccatgcccgacattgacacgctgatgcaggaatggtccccggagtttgaagagcttttgggcaaggtaagcctgcccacggcagagattgattgcagcctggcagagtacattgacatgatctgtgccattctagacatccctgtctacaagagtcggatccagtccctccatctgctcttttccctctactcagaattcaagaactcacagcattttaaagctctcgctgaaggcaagaaagcattcactccttcatccaattccacctcccaagctggagacatggagacattaaccttcagctgagacacttcccaagctgctgtttcaaggctgagctggcccctctgccccagctgagatggacagatcgttgtcagctacttgatgtccttgcccatgccacagcttggctcaggggcagtgcatgtcctgctgccctctctgccagagggcacagaacatgtttgtttaatgaacctgcctgcctcagattgctgtccccggggagttaatgcatctacaccactgtggggatttgagttataagaattggaatttctgagatcccatggaggttagattgggaggaaagcttaaaagatgtcctttttgtgagagggatggaattgttttctttcattcgtaaagttagtgagtaaagattttataaatcaaatgctctattatattgtcagattattctgctatttaatatgaaagagaaaaggctgactgagcataacgcagagacacaggaactttgcttagtaatgggcattaaatgaagagtagttaaagcaaacaaattttgtgaaataaaatgaaaccccaatcctccaagattggcagtcgaggggaatcatttttcctctggaatt

SEQ ID NO: 75857 - DNA, 899 bp, Homo Sapiens
  misc_feature (79)..(80): n is a, c, g, or t
  misc_feature (86)..(86): n is a, c, g, or t
  misc_feature (89)..(89): n is a, c, g, or t
  misc_feature (91)..(91): n is a, c, g, or t
  misc_feature (247)..(247): n is a, c, g, or t
  misc_feature (402)..(402): n is a, c, g, or t
  misc_feature (459)..(518): n is a, c, g, or t
  misc_feature (555)..(555): n is a, c, g, or t
ggcacgaggagagccttcgcgggtgaggcttaacgcgcaggaggtctcacgagagtggaagcaactctcgcgaattttnnaaaatnttntnttatctttttgcctagcgactgacaacaggctggttgcttggcgtggaatcctaaagtggcctggctttgagactggagtgagaccccagccctaggctggggttctttccattatagaggagacggattcagaagggctacagaccaaggttgtntgaaaaccagacatatgatgagcgtctagagattaacgactccgaagaggttgcaagtatttatactccaaccccaagacaccaaggacttcctcgttctgcccatcttcctaacaaggctatggctgataacagcagtgatgagtgtgaagagngaaaataacaaggagaagaagaagacctcacagttgacacctcaacggggctttagnnnnnnnnnnnnnnnnnnnnnnnnnnnnnnnnnnnnnnnnnnnnnnnnnnnnnnnnnnnntgatgatgatgaagagcatggagcccctctggaaggngcctatgaccctgcagactatgagcatttgcccagttctgctgaaattaaggacctcttccagtacatcagtaggtacacacctcagttggattgacctgggacacaaactgaaagccttttcatccctgattttattcccagctgccgggggatattgaatgcattcctttaaaggtccccaccgtccctggagggaaaaagccttgaacaaccctgggccctatttggtatttgggattgaacccttcttaccaaggcaggcccgaaccccctacggggggcctccctcaccccgtgggttaacccgaaaaaaatccctaagggcggcgcccaaacttttcc

SEQ ID NO: 75858 - DNA, 661 bp, Homo Sapiens
ggaatgggaagaaactggtatccaagcttaaattcttgctatacagaaactatgtatgatttaggctatttctgaagggcacagggaagggggaacaaatatcttcacttcagttttatttgtgaattacatgtttcatgaatccatttggcacagagacacaaggaagaaaacactagtaaccatctttccactagttcatagactgagaaacagtaaatacctttcctttccacttttaccctgtgttctttgaacatcatttgtgcagattctgccctcaatgaggaccaaataaagatgatttttgtgcttagcagtttaaggtatatggctgcatatgcaaaactctttcccaattcagtcgctacttttacttctgccctttctatccatcgtcttcattttgtgtgtacagtgctgtgtgtaagcttatcagtgtgtttttttatttgtatcagtcatgaaagtcctgttaggtatccagagttctatttatctagctgtacagactctttcagaggtttaacgtgctgcttccgatgtgccacctgcagtagtggatcatgtggagtgaaaggcaaatcttacagcttaatgtataaactctcaccaaaggaacaatcgctgtttccaataaatattgcaaaagccagaaaga

SEQ ID NO: 75859 - DNA, 1210 bp, Homo Sapiens
gctaggacgaggctgggtgtgaatcggcacgagggccagctgctgaccagaatgtcatcatggctgccctgagcaaacacgccaatgtcaagatcttctccgagaagctgttgttgctcctgaacagaggggatgaccctgtgcgcatcttcaaacatgagccacagccaccacactctgtcctcaagttcctgcaggacgtgtttggcagcccggccacagctgccatcttctaccacacagacatgatggctctcattgacatcactgtgcggcacatcgcagacctgtcaccaggagacaagctgcgcatggagtacctctccctgatgcatgctatagtccgcaccacaccctacctgcagcaccgccaccggctacccgacctgcaggccatactgcgacgcatcctgaatgaggaggagacctcaccccagtgccagatggaccgcatgattgtccgagagatgtgcaaggaattcctggtgctgggggaggctcccagctagcaccttgctgtcctcccttccctgcagctccagtcagtgtgcaggggactcaggggcttggccctaagaatgttttgcactgacagtgggaggggataaggtggcagaaggaacctgagcaggacccccacctgaagtagaacttaagagaggggccaagtgtaggattggggaccatggtctgggagctgttctggggcagggggaatatgcaagctaaagcccctctataccctggtaggcttcctcttcagcatgcccccctcttcaccccacacccatgtgtacactcagagtcctgctgccgctccaggctggaccagacccccatccccacccctcctggtctgtatcctgggcctcagcaagccatgcccctggggtgaggggaggcatctcccaccagctctattctttgccttagctttgcagtgagtgctgctcatgtcctcccctccacccgcacatgggggtcgctgcccttcactcctacccccagaggccttggccaagctgctgctttgaaagcgggatcttggagacaggccatccatcctggagcctcatggaacaggatgatggcactgagaaagccaatgaccgaatctcttttctctgtaaaaatgtagactgaaaagccatgtgtattttcctatgtgctgtagctctcctttggaaataaatcacaggcatctggaaaa

SEQ ID NO: 75860 - DNA, 631 bp, Homo Sapiens
  misc_feature (245)..(245): n is a, c, g, or t
  misc_feature (289)..(289): n is a, c, g, or t
  misc_feature (511)..(511): n is a, c, g, or t
  misc_feature (523)..(523): n is a, c, g, or t
ggcgagcacaagacggagaccggagaaggagaatatttcctctttacgacggggagacggtctccggaaaggtgagcttgccctcaagaacccaacaagcggctggagcaccagggcatcaagatcgagttcatcgggcagatcgaactctactacgatcgcgggaaccaccatgagtttgtgtccctggtgaaggacctggcccggcctggagagatcacccagtcgcaggccttcgactttgngagtttacccaacgtggagaagccgtatgagtcctacacagggncagaatgtgaagctacgcttatttccttcgtgctaccatcagccgccgcctcaaatgatgttgtcaaagagatggacattgtagttcacacactcagcacatacccagagctgaactcttccatcaagatggaggttgggattgaggactgtctgcacattgaatttgagtacaataaatccaacttcagctgtttcccgctactgctaagaacaatctcangaataccattcncattatcatgtgctccctccatctgtgtcttcagaaatcaaagcgacgaaaccaaatattggccatgatttgctgcttcctccctgaactaaaatgaattatagcaaa

SEQ ID NO: 75861 - DNA, 3749 bp, Homo Sapiens
cgcgacacttacggctaggtacgaggcatgggtgttaaattcggcacgaggcggtgcgttgacctgccggaggctgggcagctcgcagcgctgctcggcgctggaccccacccggcaggcgcaggccacccacacccggctctgtgcggctgccccccgcagcattgcacggccgaccctcgcccgcccactgccaccggccgcgggactggctgggactggctctggccgagggcacgtgctcctctgcgtgctttgtctgctctgggctgcctgcagccctgcagcctgccagccttcccccgtgcctgtggcccctttccccctgttggatgcctggcttgtcctgtccggctgctccacttgcacctgtgctggcaagctggctggacgccatgtgcagcccccgctggctggcctgagctgcgctcgcgcaatcgggccctctggccttctttacctaagggcatgccctgctgcccctggtgcgaggcgagcggtccttaccgagacccgcccggcccggcggtgcgatgagcttcttcggcttcgggcagagcgtggaggtggaaatccttctgaacgatgcagagagtaggaagcgggccgagcacaagacggaggacgggaagaaggagaaatatttcctcttctacgacggggagacggtctccgggaaggtgagccttgccctcaagaaccccaacaagcggctggagcaccagggcatcaagatcgagttcatcgggcagatcgaactctactacgatcgcgggaaccaccatgagtttgtgtccctggtgaaggacctggcccggcctggagagatcacccagtcgcaggccttcgactttgagtttacccacgtggagaagccgtatgagtcctacacagggcagaatgtgaagctacgctatttccttcgtgctaccatcagccgccgcctcaatgatgttgtcaaagagatggacattgtagttcacacactcagcacatacccagagctgaactcttccatcaagatggaggttgggattgaggactgtctgcacattgaatttgagtacaataaatccaaataccacttgaaagatgtcattgtagggaagatatacttcctgctggtgagaatcaaaatcaagcacatggagatagacatcatcaagcgagaaacgacgggtacaggccccaacgtgtaccatgagaatgacacgatagccaagtacgagatcatggacggggcaccagtgcgaggagagtccatcccgatccggctcttcctggccgggtatgagctcacgcccaccatgcgggacatcaacaagaagttctctgtgcgctattacctcaacctggtgctgatagacgaggaggagcggcgctacttcaagcagcaggaagtggtgttgtggcggaagggtgacatcgtacggaagagcatgtcccaccaggcggcatcgcctcacagcgctttgagggcaccacctccctgggtgaggtgcggacccccagccagctgtctgacaacaactgcaggcagtaggcccccagggccgagaagatgctgggcacccacccagcacccccatctaccaacaccagcggctgggggcgggggcggaccttgtgaggctcagttgacccgttacttgcaacctgaaaacaaatcatgtttttgacttaaattcttttctctggagaacccaaggggcttggggtgggaagcagtctctccttgggattctgcggccgatgtgggatagaagaggtagcatcctggaagccagcctctctggggaacatgagcccccttcctcggggggctgccttgcgtcttagaggagggagagcagagagcacgcatccttgggctcctggctctctgagcttcctgatacaggatctgagcatgtccctgggattctgagctgccaacagggccctgggtagtcacatcttgtactcccctttgctgtcccggaggtagtggcaggagttgggccagcccccactaagtggcaggggaagactcacgattgggaagctacctctttgggaatcttggatgtggtgatctcaagttcccacaggccacctccttctggccactcactgctgggacccaggcacctcccttctccatcctctctggattgtcagtaatgtcctggaacagaagcctgtaggatggccttgggcacggagaagccctggggtcagtgtcgtgcacggatggcggcagtgttgaacccaggaggctgaacccggcccaccacggaagatgagtgcatggcaaccgcctgccttcacgtcgctccacttggtaaccccaaggtctgggctgttctaggtattgcttcacgtgccccagcaagcccttaacaagagggcctggttccctgaagaaccaatcccaggaaggggccttgatccctccgccttgctgagagtgaaccctcgtctctcctcaccctccatttcatttctgggaattggggcttagtttcgaacctttggcaaggctgttcttactaatgcccaagcccctttacccctctccctataggttacacaggggagaccagggcctcggcagaagactgctgccacacttccgaatcattctgcttgccaaataggtcatcttcaccagttgactgacccaagtttaggaccattggtatcgtgtgtttaaaaaacacatataaaaaaactcttgtgaatattcttgttatgctagagaggaaggtacttctccctctacggctctgcgctggggcctatggtagtaaagttgtttactgtcctttttctgcttcccctggaaatgacaggcattactctcccattggcctcccttccctttatagaaagaccaagcaggccccactggccaagaggtacggtatttggcagtctgagttctcagtaatttggaaagtaaaggagttggttcctgtgtcacctttcagttagtgtgggaaaggaagacttctgttttcctgagatcagtgcagtctcaggcctttggcagggctcatggatcagagctgagactggagggagaggcatttcgggtagcctaggagggcgactggcggcagcagaaccgaggaaggcaaggttgtttcccccacgctgtgtcctgtgttcaggtgcgacacacaatcctcatgggaacaggatcacccatgcgctgcccttgatgatcaaggttggggcttaagtggataagggaggcaagttctgggttccttgccttttcagagcatgaggtcaggctctgtatccctccttttcctagctgatattctaactagaagcatttgtcaattcctttgcctcccaactgacaacacacgttcattttccaaccttcctaacatcttaaacctttcttctgggagaactagaagacagaatttgctttgattctctcaggcgctgtgcacaagccaggtcttctgttttctctttcttactctacccacattcttgccttctctatccaactgtgaaagtgaggggaggctcctgtccccctctcttaaggtccccaaacctgggagtgcataggtactaaatcaagcagtgcaacttgtaattaagcagctgcagtgtttacatgtttcttaatgtgtcatcttttcaatggctgtattaaaagaagaacgtttgttttaatggtctttctgattaaagaaagcccctgtggctttggaggcattgtgcccacggtccaccaaaaa

SEQ ID NO: 75862 - DNA, 598 bp, Homo Sapiens
aggaagtgaagcaggactagaagagccatcaggagccaacggggatgggaagcaaggagcctgcagtcagcattgtcactgggtagccccctctggcattactacctcagggtcggctagacatgcacagcagtttgggcaccagcattcaaataaaaaatcttggatgaaaaaccacaactagtaggcttagcttaagtgtgtttgtgaggtatgcacatgtgtatgtatgcaggtagaagatgggaagctctgaagcatgaaaccagttaggtcaacccatcacactgggttgcttatggccccagtctgagctccttgtatccttggacaaatgccttcctgtgttccctcttccttcatgtaacttgagccgagatgcctattctcacactgtaggaaggaatcacaccaacccaaacctaagtgcttcaggcttcgctgagtgagacgtttattcaaaacaaagattattgttttcatggttaggtgggattcaacaaggtttcatttatccctaattctgataagtcagtcttgagattttcccccaaggttgctttttccctccttggtcacttataccctcagctaaacc

SEQ ID NO: 75863 - DNA, 1351 bp, Homo Sapiens
acacaacatgcagaggcactgaagtgaccatgtcattttcaagtgtcaagaatgtagacagtgtttcagtaccaaagtctaaaataaactaaaattatgaattttttataggtgatacatttggattcttctcaactttgaaactgtttagcacagttccattgtattatataagaagacactgtatccaacaagactggctgtacattgaaaagctttatggaccagccaacttatttaaccatattcagcctgttccgtgggggctgttctgtggttccaggtattttcaagcctgtgattaacttctcatggcttgtcacttaaaagtccctaaatttgagagacttaaagggcaccttgaaatacatttgtggagttttgatccaacttatggtggaagagccccataggaagactgttttgagtggccaaccattcccacccactgcataattcagcagaaactagaggagcagggcgtgtactgattggaattgaaacgcttattctgtctacctatcagctaactcattagcagccaagcccttaggcagcttagtgtgaaaatacaatgttaactgcttgtttctctgtgaggttagtgggaacctcttggataagcctattgggattaatctaaatgatgtgatgatttgattcaggtatagcccaaattagtaaggggctttagctgtaaactgaaaacaatattcacaccctctcctgggcctgtaaggtctaaggtgagaatttcaggatggaaaatgcaatgtaaagcttccacaggaaagtattcgggtatgtaaggtgttatttctgaccagagccctagttctgcaataaccaaaaccaaggagtataaataacaatcaggctctgggggaatagaaagcaggctttagacaatctgtccatttctacagtaaaattggagtgagtgtgtatatctacttaaaacttaatagaagtgacttctactttttgggctattccagaagtattttaaaattattatttaaaattttgaagccccatttcaaatcttgccgaccttagttcaaagccccctgagagatcacttttagaattgaggatttgttaaaatggcaagtcatttcatttgtgttaaaaagaaaatacccaaaaggaaggagggagccctgtttgccttgagataaacggccttggcattttctggcattaatgtagaaataatgttcctatgatgacatattttcaaagaaacactttcttatttactgtgtggtgtaaaatgttgctaaatgtgttgttacattatgtcactgctgaaagtaatttgcactataataaaggaattttctacaaa

SEQ ID NO: 75864 - DNA, 1058 bp, Homo Sapiens
tcggcatgaggggaagctgagtccagagcgatgctgctgaagacagtgctcttgctgggacatgtggcccaggtgctgatgctggacaatgggctcctgcagacaccacccatgggctggctggcctgggaacgcttccgctgcaacattaactgtgatgaggacccaaagaactgcataagtgaacagctcttcatggagatggctgaccggatggcacaggatggatggcgggacatgggctacacatacctcaacattgatgactgctggatcggtggtcgcgatgccagtggccgcctgatgccggatcccaaagcgcttccctcatggcattcccttcctggcctctacttccatgtgcgcagccccacagacgttgctgagcaactcgccagcctcctgagctccatgcccatcaggactctagcctctgaccttgctgttgactctgaaatcaggatttggaagttttcgaattaggagtagagagatctgacctcttgccaggaatgcccatggatcatgtgattggcttttctacccatagagggccttgcagcctgataccacctgggagtgagggtcacaaaggagaccttggctccctcaggtcaccaataaacctgttctttaatcaagtagttgtaatatggacctggggtacctttagttagggactctggtggcactacacggggtgctggattcaaatctcacctctatggatgatgtctggcatcgtctggcccctccttttccaaagtgaccagaagattgtacttcctagagatgccagacttgcctcacacccaggagctgcccctgctgtgcctggtatgctggcagtggtgatggtgacaacacaatgaggccaagtagcaatgctcccaggtcctgcagcttgtgctctgcccagcagtgcccctggcccagcacctcagcctgctcttctctctggtggctccaccccaacccctacttcttttcctttatttctctcccaacctggctgcaaaggaggttcatattccccagatgtgtccaggttgggagag

SEQ ID NO: 75865 - DNA, 1078 bp, Homo Sapiens
ggctggaccggtccggaatttcgggaccaggactactgcagccagtggccggccctgggcactggaatgaccctgacatgctgctcattgggaactttggtctcagcttagagcaatcccgggcccagatggccctgtggacggtgctggcagcccccctcttgatgtccacagacctgcgtaccatctccgcccagaacatggacattctgcagaatccactcatgatcaaaatcaaccaggatcccttaggcatccagggacgcaggattcacaaggaaaaatctctcatcgaagtgtacatgcggcctctgtccaacaaggctagcgccttagtcttcttcagctgcaggaccgatatgccttatcgctaccactcctcccttggccagctgaacttcaccgggtctgtgatatatgaggcccaggacgtctactcaggtgacatcatcagtggcctccgagatgaaaccaacttcacagtgatcatcaacccttcaggggtagtgatgtggtacctgtatcccatcaagaacctggagatgtcccagcagtgaggagctgggacatgtgacaggctgtggtggcaccactgagcctagaccatggagccttggcatgcccagggcaagtggggaggttctctgctccccaggcctgctcggtgactgaccccatcatacccaaagtgcaatctcacggccaggttctatgccctgtccaagcgtaaaccctcttggaaacttcttttggggcaattttcctgtggccttcctggcctctacttccatgtgcgcagccccacagacgttgctgagcaactcgccagcctcctgagctccatgcccatcaggactctagcctctgaccttgctgttgactctgaaatcaggatttggaagttttcgaattaggagtagagagatctgacctcttgcccaggaatgcccatggatcatgtgattggcttttctacccatagagggccttgcagcctgataccaacctgggagtgagggtcacaaaggagaccttggctccctcaggtcaccaataaacctgttctttaatcaagtag

SEQ ID NO: 75866 - DNA, 882 bp, Homo Sapiens
cggattcgagtcagaagcggcggcaggtctgaacgcttcgagcccaacacatacagctgatacacgcagaccagatctggtcaggtcctcggaagctgagtccagagcgatgctgctgaagacagtgctcttgctgggacatgtggcccaggtgctgatgctggacaatgggctcctgcagacaccacccatgggctggctggcctgggaacgcttccgctgcaacattaactgtgatgaggacccaaagaactgcataagtgaacagctcttcatggagatggctgaccggatggcacaggatggatggcgggacatgggctacacatacctcaacattgatgactgctggatcggtggtcgcgatgccagtggccgcctgatgccagatcccaagcgcttccctcatggcattcctttcctggctgactacgttcactccctgggcctgaagttgggtatctacgcggacatgggcaacttcacctgcatgggttacccaggcaccacactggacaaggtggtccaggatgctcagaccttcgccgagtggaaggtagacatgctcaagctggatggctgcttctccacccccgaggagcgggcccaggggtaccccaagatggctgctgccctgaatgccacaggccgccccatcgccttctcctgcagctggccagcctatgacaggcggcctccccccaaggggtgaacctacagtctgcatggcggacatctgcaacctctggcgtaactatgatgacatccaaggactcctggtgggagccgtgctctccatcctgaattgggttcggtggagcacccaggacatactggcagccaggtggccgggcccctggggcactggggaatgaacccctg

SEQ ID NO: 75867 - DNA, 1706 bp, Homo Sapiens
cctttctaattggttttttcctgggagacttaactggtttaattgcttagccctggtgcctcagccacctctcatctgtagggtgagactcaagtccaggcaccaagacacaccagcacccccaacaccatgcggggatcattggcctgaaacttggccagagaaagctccagtcctgggcctgtaagagtgggcgctgggagtgtctgaagccggcacggtgtcccctgcgttgtcggcccttgcaggtgaagtgtgtgtcgttcccccactttcccccgaatggcacccacggcctcctgctggagcccctcccgggcccccctcagggagcagaactctgcgtgtgtgcgaggttcagcctggccagcctggagctccagctcaccctggggtgtggatggatgtagaagtgggtggggatgggggagcatcacaggggccaggaccccccaggtgcacaggggaggccagagaaagaggccccagccccagggagttctgtggcctcaagagaaggtggacaaggggctggcaccaccaagcagcaggtttggctgagattagtcttggtgtgggctgaggccttgggtactgtttggcctaaggatgggcgttgtgcctccagacaggggcagggacctctagccagcaccacaccccctccgtgtccttgatacaaaatacatacacatataaaaataatactccatgcattgtgggtgggcttcccctccgcaggccccagcccaaggcagctgggcctagctgtcctcccccctcctctgattcatggaatgaaacttgttcatgagttcttccagctccgacccactttgctgcttctccaggaaggccttctgcatggtgagctggctgtacacgcggacgccctcctcgccgcacactttcttcagctcctccttgttgagggagaagagctgcggcccggtcaggatgcccaggttctccacgatccgcgggctgaaggccttggcttccagccaggcgcggacctcgtccggacccgactcgtaggtgagcggctggctcacgggctggctgcgctccacgcggaagtgcctctgtggctgcgccctgatgttgctgattttccggatgagctcgtcgttgacctcgtccatgtgctgcatgagctcgtctttgttccccgggaagcttgggggtagcttgtgggtcgggctggcggggccccagtacttctgaccggcctgctcgaacggggcgccggcgtcctccggtcgcgcctcgcctaggatgttgcagggcacgtaccccgcctggccgctgcggctgcgcagcttccaccactgccggccgtcctccagcacctctaggacctcatccttgagcaccgatagctcgttggcatttcgggctgtgaagtcatacaggatcttgacgtacttggccatggctggtgttggctggtagcccctgtgagtatgtggggagctgactggtggtagggcatcccccgggggggtgggctctgaagtggggctgtgcttctgggagtttcttatggactgtcggctcactggactcacctcctcgatgggggcagacgccagcccctccacctcccagggggcctcctgcagcacatccacaggaggctcccagccgctgtggaactgggcacgtagaggggcacctgtggctcccgcggccactcggaacgg

SEQ ID NO: 75868 - DNA, 258 bp, Homo Sapiens
gcggccgcctactactactactatacggctgcgagaagacgacagaaggggacaccgtgccggcttcagacactcccagcgcccactcttacaggcccaggactggagctttctctggccaagtttcaggccaatgatccccgcatggtgttgggggtgctggtgtgtcttggtgcctggacttgagtctcaccctacagatgagaggtggctgaggcaccagggctaagcaattaaaccagttaagtctccccaaac

SEQ ID NO: 75869 - DNA, 581 bp, Homo Sapiens
attagaaaactactcggatgctccaatgacaccaaaacagattctgcaggtcatagaggcagaaggactaaaggaaatgagaagtgggacttcccctctcgcatgcctcaatgctatgctacattccaattcaagaggaggagaggggttgttttataaactgcctggccgaatcagccttttcacgctcaaggtgtgagccactgcaccaggccccttcatcttaattttaatatatctttgaataaacaccattgtatgaacctgctgtaagcttgggagtggtctgttagtctacagcttgtgtctgagatgtgctaattgaatatttgctcagtacctcatcttaactgcctttggctttatgttgcttatccttcatagtatcttgttcattggccttttacatccataggcatcacttctctgatattcgttgtgctcttttaatggattaatggtttgcttggttggttcctctagttagactgtaaactccttgagagcagagtctgtattttattaattacccacagtactaggtacatagttgccttcaataaatatatatttaatgaacg

SEQ ID NO: 75870 - DNA, 560 bp, Homo Sapiens
  misc_feature (411)..(411): n is a, c, g, or t
cactgcacacggaatgcctagtcccctcccgacccagccagctgcaggcacgggggacctggatagttaagggcttttccaaacatgcatccatttactgacacttcctgaaccgactgaccctgaggaggccgcttagtgctgctttgcttttcatcaccgttcccgcaacagttggacggaggtccccggttgctggtcaaggtccccatggcttgttctctgggaacctgacttttagatgttttggaatcaggagcccccaacacaggcaagtccaccccataataaccctgccagtgccagggtgggctggggactctggcacagtgatgccgggcgccaggacagcagcactcccgctgcacacagacggcctaggggtggcgctcagaccccaccctacgctcnatctctggaaggggcagccctgagtggtcactggtcagggcagtgccaagcctgctgtgtccttcctccacaaggtccccccaccgctcagtgtcagcgggtgacgtgtgttcttttgagtccttgtatgaataaaaggctggaaacct

SEQ ID NO: 75871 - DNA, 1423 bp, Homo Sapiens
aacggccataactactaacggttttaaggtagcgaggctgggtggcgaattcggcacgaggccccgcacgggctgtctgggtgtcgccatccaggtctggcagagcctctgagatgatgcatgatgccctcccctcagcgcaggctgcagagcccggccccacctccctgcgcccttgaggggccccagcgtctgcagggtgacgcctgagacagcaccactgctgaggagtctgaggactgtcctcccacagacctgcagtgaggggccctccatgcgcagatgaggggccactgacccacctgcgcttctgctggaggaggggaagctgggcccaaaggcccaggaggcagcgtgggctctgccaatgtgggctgcccctcgcacacagggctcacagggcaggccttgctggggtccaggctgttggaggaccccgagggctgaggagcagccaggacccgcctgctcccatcctcacccagatcaggaaccaggtcctccctgttcacggtgacacaggtcagggctcagagtgaccctcggctgtcacctgctcacagggatgctggtggctggtgagaccccgcactgcacacgggaatgcctaggtcccttcccgacccagccagctgcagggcacggggacctggatagttaagggcttttccaaacatgcatccatttactgacacttcctgtccttgttcatggagagctgttcgctcctcccagatggcttcggagggccgcagggcccaccttggaccctggtgacctcctgtcactcactgaggccatcagggccctgccccaggcctggacgggccctccttccctcctgtgccccagctgccaggtggccctggggaggggtggtgtggtgttgggaaggggtcctgcagggggaggaggacttggagggtctgggggcagctgtcctgaaccgactgaccctgaggaggccgcttagtgctgctttgcttttcatcaccgtcccgcacagtggacggaggtccccggttgctggtcaggtccccatggcttgttctctggaacctgactttagatgttttgggatcaggagcccccaacacaggcaagtccaccccataataaccctgccagtgccagggtgggctggggactctggcacagtgatgccgggcgccaggacagcagcactcccgctgcacacagacggcctaggggtggcgctcagaccccaccctacgctcatctctggaaggggcagccctgagtggtcactggtcagggcagtggccaagcctgctgtgtccttcctccacaaggtccccccaccgctcagtgtcagcgggtgacgtgtgttcttttgagtccttgtatgaataaaaggctggaaacctacagcagggcgaggcctcgagaggagagagaaaaa

SEQ ID NO: 75872 - DNA, 1533 bp, Homo Sapiens
cggcatgtactatgaccagggttaaaaaagcaggctggtaccggtccggaattcccgggatatcgtcgacccacgcgtcgggctgggcagggagcggcagcagcgagccggggaccccggcgccgcccgcgcgcggtgggactggggctgcggtcccggccgggtggcgggctcctgggacacgtgaccggggcggcgagcgggccgggcggacgggcttccgcctgggccgggcgcggccccctctgagcgcccgcctccccgcaggccccgtctgaggtctggcagtcagagacagccgggcgcccacggcccgagcgcccacggcagcaccatgcccgcactcctggagcgccccaagctttccaacgccatggccagggcgctgcaccggcacattatgatggagcgggagcgcaagcggcaggaggaagaagaggtggataagatgatggaacacgaagatgaaggaacgaacaggagacgaacggcaacgacacaacacggacgactggaacgacgagaactgtcattagacggagaccaaggaacaaattctgaagttggaggagaagcttttggctctaccaggaagagaagcaccagcttttcctgcagctcaagaaagttttacatgaggaagaaaaacggaggcgaaaggaacagagtgacctgaccaccctgacatcagctgcataccagcagagcctgactgttcacacaggaactcatctcctcagcatgcaggctgagcactaaagaaaccaccagatcgaacaggcaccctcatggcagctcacagaccccaacaattcagcatcatgaagcccttctccctttctagggagccctggaggacacaatcgcccaggcaccctcatggcagctgacagagccaaacaaatgttggaccccaagtgcttacgacccggcactacgtgggctcagcagctgcttttgcagggacaccagagcatggacaattccaaggcagtcctggtggtgcctatgggactgctcagcccccacctcactatgggcccacacagccagcttatagtcctagtcagcagctcagagctccttcggcattccctgcagtgcagtacctatctcagccacagccacagccctatgctgtgcatggccactttcagcccactcagacaggtttcctccagcctggtggtgccctgtccttgcaaaagcagatggaacatgctaaccagcagactggcttctccgactcatcctctctgcgccccatgcacccccaggctctgcatccagcccctggactccttgcttccccccagctccctgtgcagatgcagccagcaggaaagtcgggctttgcagctaccagccaacctggccctcggctccccttcatccaacacagccagaacccgcgattctaccacaagtgaccatcagattatatcttcaacaccacaccccccaccccatcgtgggtgagggtatcccctgtgtgtcccaggccaataaaatctacctgccactgccaaaaaa

SEQ ID NO: 75873 - DNA, 822 bp, Homo Sapiens
ggagttgtaggcgagttctcattctccttccttagacccggcactacgtgggctcagcagctgcttttgcagggacaccagagcatggacaattccaaggcagtcctggtggtgcctatgggactgctcagcccccacctcactatgggcccacacagccagcttatagtcctagtcagcagctcagaggtgagtaataggagggatggggcttggccttcctcaaggtcaaaggaggaatgccattcagtaaaagattttaatggctctgtcttttcctttctcagctccttcggcattccctgcagtgcagtacctatctcagccacagccacagccctatgctgtgcatggccactttcagcccactcagacaggtgataacatcccatgcagggagctctagctctcaggtcctcccctccctgtttcattctcatctcacatgcccctcttccccacctaggtttcctccagcctggtggtgccctgtccttgcaaaagcagatggaacatgctaaccagcagactggcttctccgactcatcctctctgcgccccatgcacccccaggctctgcatccagcccctggactccttgcttccccccagctccctgtgcagatgcagccagcagggaaagtcgggctttgcagctaccagccaacctggccctcggctccccttcatccaacacagccagaacccgcgattctaccacaagtgaccatcagattatatcttcaacaccacaccccccaccccatcgtgggtgagggtatcccctgtgtgtcccaggccaataaaatctacctgccactg

SEQ ID NO: 75874 - DNA, 1393 bp, Homo Sapiens
aaaaaagaaagaggtttaatggactcacagttccatgtggctaggaaggcctcacaatcatggcagaaggcgaaagccacatcttaaatgacagcagaaaaaaagagaaatgagaaccaagggaaaggggtttcaccttataaaaccatcagatcccatgagacttaatcactatcataagaacaatatgggagaaaccaaccccatgattcaattatctcccaccaggtccctcccacaacacatgggaattatgggagcctacaattcaagatgcagatttaggtggagacacagagccaaaccatatcattctacccctggcccctcccaaatctcatgtcctcacatttcaaaaccaatcataccttcccaacagtccccctaaagtcttaactcatttcagcattaacccaaaagtccacagtccaaagtctcatctgagacaaggcaagtcccttccacctatgagcctgtaaaatcaaaagcaagctagttacttcctagatacaatgggggtacaggtattgagtaaatacagctattccaaatgggagaaattggccaaaacaaaggggttacagagcccatgcaagtccgaaatccagcagggcagtaaaattttaaagctccagaataatctcctttgactccaggtctcacatccaggtcatactgatgcaagaagtgggttcccatgctcttgcgcagctctgcccctgtggctttgtacggtacagcctccctcctggctgctttcacggctgttgttcagagcctgcggcttttccaggtgcacggtgccagctgtacgtggatctaccattctgggggtctggaggacggtggacctcttcttccagctccaactaggcagtgcccccaacaaggaactctgcgtggggggcctccccacaccaacaattttcccctttctggcacctgccccttaaccaagagggtttactcctcccccccggttccagcctgcaaaaaagggtcccttcctacgccccctgggcgaggcaaaaacctttctgtggcgccctcggggggccattggcgccgggcgcatatttcccgagtcaacattcccttcccgcggaaaaacactaaggcgccggaaacgggtttttacctcaaacattcattcccactcttatttttagccttttctcggggggcgaaccccggccgagggccttctaaaccggggtccccgtcggtgaaagctatgttccccaccgggcccttgggagaggctttccccattttccctgttatagtcctatagacaatcaccaaaaacgcgttaatgcgccgcggccccctcggtttaccatcactaacgaagcacgggagaaacgggcctatagcaaaatccccgaaaacc

SEQ ID NO: 75875 - DNA, 664 bp, Homo Sapiens
aatttatgaagaaaaagaggtttaatgaactcacagttccatgtggctgggaggcctcacaatcatggtggaaggcaaaaggcacatcttacatggcagcagacaagagagaatgagagccaagcaaaaggggaaaccccttattaaaccatcagatctcgtgagacttattcactaccaccagaacagtatgggagaaactgcccctatgattcaattatctcccaccaggtccctcccacaattatgggagctacaatttaaggtgatatttggatggggacacagccaaaccatatcattctccccctggcccctcccaaatctcatgacctcgcatttaaaaaccaatcatgccttcccaacagtcccccaaagtcttaactcatttcagcattaactcaaaagtccacactccaaagtctcatctgaaacaaggcaagtcccttccacctatgagcctgtaaaatcaaaagcaagttagttacttcctagatacaacggaggtacaggcattggctaaatacacccattccaaatgggagaaactggccaaaacaaaggggctaaaggccccatgcaagtccaaaatccagcagggcagtcaaatcttaaagctccaaaatggtctcctttgactccatgtctcacatccaggtcacac

SEQ ID NO: 75876 - DNA, 1473 bp, Homo Sapiens
cagtcgacggtaccggacatatgcccgggaattcggccattacggccggggtaaatagtgaactaaaactttggcagatcagcaacattgctgagcctgttttttaagctaatgtgtattcttactaatgttcctatcaagaatggatttgtaatatatgctgtctatttctaatgttcacattcatattttgaggttctatcttattttaatagagaacagacttctcaaaaaatcttcagaagcagcttattattgaaatatcgaaatattgaaataaacccggtggggttagattactcatctgtccaccaagtgggacatttgcatggactgggggcttaaaggacttagaagagacctgtaagtaaatcctgaaaatgagccaatccccacttgaatggttactggagtaaacccacctttaccaccccaattacagcacccgaggccgataaaccaacttggctctggttcatttttcttttcttcatttgtgatgctcagattcaaaatgtgtgttctacactgttacaggcttctcttttgtttgattaaagattttagtcctacttttgtatggacacattagaatattcagagaccaaaatagaagaatttgctgttagatatttttcagaagtcagcagatttgtggcaaatcatttatttgcctttttaaaaattcatttaagcagttcagagagtagactactcagaaaattatttcacgtaattgtctaagaggtcaatattttttaatgcatattgaatcaaataaagtgctctaaagaaattattatacaaattccttgggttgtttcttttcttaaacaagggggtgggggtaaacaggaatatgattcaggctttctggttgtgtatttaaagagtattgatttattattactatgatttactttattcctggcttccttttcacttttctttcaatttttaaaaaataatttaagccgttgaaaatataccaaactgttgaaacattttactcaaattttaaattcctaaaaatgttttttaataagagggagaaaattatttaaaaatacttatgcctatgccaatttccctcttttttcacaaaatccatgatttcagtttgtaagtagacatatatctaagggcacatttttggaaagtgaggaatagcagcagtataacttcattttgtcaggcctttgagttctaatattttgtattgctcttcaaatggatccttttaaaaaaattgtagataatgagtcactaaatagattctgccaactgaggggagaaacattttaagtaaatattttcagtatttggggccttaacaaaataattgtgtttccttaacaattacatgttagatagagttaggtttgcggttcttaagcattggttaaacgcatttaaaagccacttttttgtcacattaatagcctccacttctgttcaagaataatgtatact

SEQ ID NO: 75877 - DNA, 747 bp, Homo Sapiens
  misc_feature (592)..(592): n is a, c, g, or t
  misc_feature (660)..(660): n is a, c, g, or t
  misc_feature (699)..(699): n is a, c, g, or t
cttttccatttcgttgaaatatttacagcaatggggaaggaggaggagagaggaaggagtaagagggccccctagggaaagatccaagcccaggacccactccccagggagatccagacccaaaatctgctccccagatagccgagcccacaggactgggaactgcccaaatatggccacccctgtgggctgggggccctgcggggagttgtgcttcatcaggagtcgccccaagggagggggtcattgggtgcactgggaggcagagggggcaggtttgcttgcggggcagggaccaagagcaaggggaaaggagcttcagagaaagttcaacctttaaaccaccagccaccaccgcccagtccccctgccctgcggccttttcccagtctccagggagcagggaattacagcgcaggaggaacctgtccatctgtcctgcctcactgctccctctgggtgcagccggcagcatttctggctgcggagaggagcagctaacaggttccatccagtgggggcctttggcaacctcagaagctgcccctccctgcccaggaaactaaagccctcatttcccttcacagggtanaagggtgggagaggggagagtctggaagtgggctgcaccttccaagttctccctcctcactcccctgnggtcctctgggctctcctcactacacttcccccaaatanagctggtgcgtgtggctggtgggaaacctgtctgtgaacctggcactc

SEQ ID NO: 75878 - DNA, 636 bp, Homo Sapiens
  misc_feature (47)..(153): n is a, c, g, or t
gagacaagagtctcgctctgttgccaggttggagtacagtggcacannnnnnnnnnnnnnnnnnnnnnnnnnnnnnnnnnnnnnnnnnnnnnnnnnnnnnnnnnnnnnnnnnnnnnnnnnnnnnnnnnnnnnnnnnnnnnnnnnnnnnnnnnnatttttagtagagacagggtttcactgtgtcggacaggatggtctcaatctcctgatctcgtgatccgcccgcctccacctcccaaagcatagcaactcttataagagtgtctcgctttcctcctatgtttgtatgtgctaagctttttgccttgggaatactcttcccaaactttccactttgtatgttccacatcccctagagctatgatctatttgttcttcaatacttaagtttaatcactctcttgcctagtctgaataactttcctttgtacctctacaacaccttgtacatatgtctatcagagcttttattgttctctattacatgcttgcttgctttactcactaaaaattcagttcgtagagatcagctgtctcatatctacattcttgggtccatacaatctacagagtcaagtagtgctttatacttgctgatatagtaaagtcactggcttttagtgagagtggaatcag

SEQ ID NO: 75879 - DNA, 1626 bp, Homo Sapiens
gataaaacatgattctctgggctccagatgaagagtcaggagtttggctagaacaggttcgagtaggtgaagtaggtgggaatactttgggattttatgattgccagttcaatgaagatggctccatgatcattgctcatgctttccacggagcgttgcacctttggaaacagaatacagttaacccaagagagtggactccagagattgtcatttcaggacactttgatggtgtccaagacctagtctgggatccagaaggagaatttattatcactgttggtactgatcagacaactagactttttgctccatggaagagaaaagaccaatcacaggtgacttggcatgaaattgcaaggcctcagatacatgggtatgacctgaaatgtttggcaatgattaatcggtttcagtttgtatctggagcagatgaaaaagttcttcgggttttttctgcacctcggaattttgtggaaaatttttgtgccattacaggacaatcactgaatcatgtgctctgtaatcaagatagtgatcttccagaaggagccactgtccctgcattgggattatcaaataaagctgtctttcagggagatatagcttctcagccttctgatgaagaggagctgttaactagtactggttttgagtatcagcaggtggcctttcagccctccatacttactgagcctcccactgaggatcatcttctgcagaatactttgtggcctgaagttcaaaaactatatgggcacggttatgaaatattttgtgttacttgtaacagttcaaagactctgcttgcctcagcttgtaaggcagctaagaaagagcatgcagctatcattctttggaacactacatcttggaaacaggtgcagaatttagttttccacagtttgacagtcacgcagatggccttctcacctaatgagaagttcttactagctgtttccagagatcgaacctggtcattgtggaaaaagcaggatacaatctcacctgagttcgagccagtttttagtctttttgccttcaccaacaaaattacttctgtgcacagtagaattatttggtcttgtgattggagtcctgacagcaagtatttcttcactgggagtcgagacaaaaaggtggttgtctggggtgagtgtgactccactgatgactgtattgagcacaacattggcccctgctcctcagtcctggacgtgggtggggctgtgacagctgtcagcgtctgcccagtgctccacccttctcaacgatacgtggttgcagtaggattggagtgtggaaagatttgcttatatacctggaaaaagactgatcaagttccagaaataaatgactggacccactgtgtagaaacaagtcaaagccaaagtcatacactggctatcagaaaattatgctggaagaattgcagtggaaaaactgaacagaaggaagcagaaggtgctgagtggttacactttgcaagctgtggtgaagatcacactgtgaagatacacagagtcaataaatgtgcactgtaatggacttaataactacatgcttgcagtcactggtatcttaaaatattatcatgtaaacaggtcatctttaccttcataactg

SEQ ID NO: 75880 - DNA, 683 bp, Homo Sapiens
  misc_feature (103)..(103): n is a, c, g, or t
  misc_feature (130)..(130): n is a, c, g, or t
accgtgcgcgtgcctgtgcggtgcccgaggagctgagctgcccgcagagggaaggcgcagacgccctgtggatgccactctgcccatcaagtgccgagattcngaggtccgaggggccacggcggggggnggcctctccttggcacccttgaatctgggagatgccgagaccggctttctgacgcagagcaacctgctgagtgtggctgggcgtctgggtctggactggccagccgtggccctgcacctgggggtgtcctaccgggaggtgcagcgcatccggcacgagttccgggatgatctggatgagcagatccgtcacatgctcttctcctgggctgagcgccaggctgggcagccaggggctgtggggctcctggtgcaggccctggagcagagtgaccggcaggacgtggctgaagaggtgcgcgcagtcttggagctcggccgccgcaagtaccaggacagcatccgacgcatgggcttggcccccaaggaccccgctctgcctggctcctcggctccacagcccccagagcctgcccaggcctaggccccacagacttttaggctggcccagatattccccagtggatgggcagagcccccaccttcaagtctctccagtgtgtggggacgggtccctgtgagcaacaaaactgcactgtttctttcaaaaaaaa

SEQ ID NO: 75881 - DNA, 1316 bp, Homo Sapiens
  misc_feature (760)..(760): n is a, c, g, or t
  misc_feature (790)..(808): n is a, c, g, or t
  misc_feature (848)..(879): n is a, c, g, or t
cagtcgacggtaccggacatatgcccgggaattcggccattacggccgggatattaacaatgtttattttggatgaatggaattctagatgactttaattttctttatatcagtatttttcagattttctatatgctttccttttaaaatcagattttagtttttaaaaaactgatacatccattttgatataccatgtattcacactttaaaaaatacacatagcagagtatcggaaagtatgtaccaaaacattgatctggctaccactgggagtcaggatcatgagttcatcttcttccttcttactgcttttccaaacattctccagtaagcaggtactacatttataatggaaggaattttttaaaaaattttaagctgtacactttcaagtaagatctgaattctaatgctggcttgtgcctcttactatgtggtttggtcattatagataatgcccagtttcagtttccccatctttgaaaaggagataatatgttatctcttgggagtagttctgaatatgaagtgtgttgatacaagaagcactgacaatgtttctgtttcttaaatttaaaactggcctggtttgccttttttatcaagagagcttaacagataaaaaatgaaattagtctattttctacttgccagcagagtatctgtcttattttaggatgcagtgtgaaacttaccattcaactgaacaactagttgtcaactaatgaaaataaaacattttctctaagcaaacccngaaaatcaaaccccatccaacacctctgtnnnnnnnnnnnnnnnnnnnacagtgccgcactacgacccaccccactaatcaactagtnnnnnnnnnnnnnnnnnnnnnnnnnnnnnnnntgtgcgttgctccgcagaggtttgaccgcgccgtaagccccctcgtcttgctgtgtgaatagccccggcttgcccaccccaatttccctccacccaaccagaccagtcggctccgcgggtgaccgccgctcgcctgagctgaccggcctgcccagtcaatcgctttatcgccgccgcctctttctcccacaccatgagtaaccccctcgtccttgaccccccagtgtattggcttgtctcgctctcaccctcgctggattacccctccgatctcctacatgctatcatcgccgccccgccgcgagcacttttcctctctttaccccaccacgtttgttgacgcgggccctttttcctctcccctcgcgatgtttcaccgcccgccgactctctcgccccacccagccccgcatcgtgtcttctctggtgcgggtcgc

SEQ ID NO: 75882 - DNA, 570 bp, Homo Sapiens
  misc_feature (408)..(441): n is a, c, g, or t
aagatttccatcatattgataaatttatatttttatttttcatttcacttgaaaaaaattagctaatttttaccaatgaaatggtaaaaatagaggcaactataacttaaaattacacagcttcttaatgttttattcatagcattctttatacatcagaagcttcactgatatttaatttactgcagcatcctgtaggtgaagcacaaaaattacattaaacaaagaaacaaaagcacttttgactttttaaaattatatgtgtatttatatccagttgacaaatagcatcacaattattactgtataaaaaactaaaaatcaccatggaagctaaggcctaaattctcattccaattgttcccttttgttgatacctaagagatattaattagattccagtacctnnnnnnnnnnnnnnnnnnnnnnnnnnnnnnnnnncccaggtctacattatttacatacagtatgggaaaaaaagctgctttttggctaacttagattgcggttacctgcagtatttacactgtaaatgttaaggggaagaagcactactaacaaataccattt

SEQ ID NO: 75883 - DNA, 1169 bp, Homo Sapiens
gcacgcctgggtggcaattcggacgaggacctactgatcgaaagatagaaaatattccacataggggaaaaaaaacttcctataggcatgaaaatgcatgtttttaatccaatagactctcttgagcctgagggatccattacagtttcaatgggtattgacttttgtgattctactcagactgccagtttccagttgtgtaccaaggatgattgcttcaatgttaatattcagccacctgttggagaactgcttttacctgtggccatgtcagagaaagattttaagaaagagcaaggagtgctaacaggaatgaatgaaacttctgctgtaatcattgctgcaccacagaatttcactccctctgtgatctttcagaaggttgtaaatgtagccaatgtaggtgcagtcccttctggccaggataatatacacaggtttgcagctaaaactgtgcacagtgggtcattgatgctagtcacagtggaactgaaggaaggctctacagcccagcttatcataaacactgagaaaactgtgattggctctgttctgctgcgggaactgaagcctgtcctgtctcaggggtaacctgcttacatctggactttagaatctggcacacaacaaaagtgcctggcatccactactgctgcctttcatttataataatagcccttccatctggcagtgggggtagaatacactcttgacattcttgtctcctgctttagaatgctagtgtgtatctatcatgtatgcaatactttccccctttttgctttgctaaccaaagagcatatattttactgtcagttgtctcaactcttgaatccatgtggcgttttctctgtcctgctgcttcttttggcctcctcgttttccttctctttttcgacaatggtagacatgaatgagatatttaaagttcattggaaatcttcttccctacagcagtaagcaaaaattagcaaagagatagtctaaatggcctctcagcttggtatgtgaaaatgagatcacatactttttaaatccaaatacaaaagcatagtctctgcaagattttgttctttgaatttcttgatattgtaattgattattgataactgtcatcatgaaattatctctcaataataagataaataaactagcatatgaatcataaa

SEQ ID NO: 75884 - DNA, 1143 bp, Homo Sapiens
  misc_feature (134)..(159): n is a, c, g, or t
tggcgaggcaggagtgcgggggagggagtggtccttagctgaatgcgcctgcgttgtggcggcctccggcgccccaaggtactttctccccagcaaggaatccgcgtgcgcgtaagcagtattgttgattagtnnnnnnnnnnnnnnnnnnnnnnnnnngaaaagcgacccctagtggtgcaccggtgcggaccagaaaattgcacgctttcttgaaagaggcatttaccgagcgcccaatgtatgcctggcactgggctgggtgctgccacctaagcgagcacgaccaatgcagtctatcagggaggcccagatcgccaagcagcggacccctgcggcccgccatgccactcccggctcctagagcgccgctcagcacaccgtgagcgcccaataactgttgggcttcaatgacgccgcggagccggccccgtccccgcgctcccgcccctcccgccagggcagcccgggagcccagacgttgacgctgcagggagagggtggtgggcgcagccgctagggggcgcggcggggcggagcgcacctttccgcgggccgcggggatggcggcgcagggcgtagggcctgggccggggtcggcggcgcccccggggctggaggcggcccggcagaagctggcgctgcggcggaagaaggtgctgagcaccgaggagatggagctgtacgagctggcgcaggcggcgggcggcgctatcgaccccgacgtgttcaagatcctggtggacctgctgaagctgaacgtggcccccctcgccgtcttccagatgctcaagtccatgtgtgccgggcagaggctagcgagcgagccccaggaccctgcggccgtgtctctgcccacgtcgagcgtgcccgagacccgagggagaaacaaaggcagcgctgccctcgggggagcattggccctggcggaacgcagcaaccgcgaaggatccagccagaggatgccacgccagcccagcgctaccaggctgcccaaggggggcgggcctgggaagagccctacacggggcagcacctaggatggggcagagacttgttgcatctttgtccccagcaaaggctacatgttacctccttcaattgataataaacctttctgagatgcagagggtccaggtcaga

SEQ ID NO: 75885 - DNA, 847 bp, Homo Sapiens
  misc_feature (485)..(490): n is a, c, g, or t
  misc_feature (492)..(551): n is a, c, g, or t
  misc_feature (554)..(582): n is a, c, g, or t
gaagacaaatggcgaggcaggagtgcgggggagggagtggtccttagctgaatgcgcctgcgttgtggcggcctccggcgccccaaggatcctggtggacctgctgaagctgaacgtggcccccctcgccgtcttccagatgctcaagtccatgtgtgccgggcagaggctagcgagcgagccccaggaccctgcggccgtgtctctgcccacgtcgagcgtgcccgagacccgagggagaaacaaaggcagcgctgccctcgggggagcattggccctggcggaacgcagcagccgcgaaggatccagccagaggatgccacgccagcccagcgctaccaggctgcccaaggggggcgggcctgggaagagccctacacggggcagcacctaggatggggcagagacttgttgcatctttgtccccagcaaaggctacatgttacctccttcaattgataataaacctttctgagatgcaaaannnnnnannnnnnnnnnnnnnnnnnnnnnnnnnnnnnnnnnnnnnnnnnnnnnnnnnnnnnnnnnnngcnnnnnnnnnnnnnnnnnnnnnnnnnnnnnccttgttcggccgcccctcggcccctcgaagaagcttctctaaaccattcgttttgggcgcgcgggcccccgttaggtaaagggaacatgggccatagctggtttcccaagggaaaaccctgggccatgaattaaggggcttgggattccccccccaataaaaaaacgccccggggggaaaacgaaggggttcgtgaacaaattccaaaatgggggtttcgggagggccatttaactgggttcctactcaaccgggaggtcccag

SEQ ID NO: 75886 - DNA, 630 bp, Homo Sapiens
  misc_feature (556)..(578): n is a, c, g, or t
cttaacacacatccgacgaatgaatgaagggtgcctcagtaccggtgctccaagtcctgcgatgctaagtgcttttctcctctgagtcttagcaatggacaattccaatacctccacacaggacactagagtaagaaaccttcacagttagaacgcagtgctgtgcggaggccttaacttgagttctgttttgcacctggatttaccagcacatcaaagctgcttcgcaagccccctcatcagcagggctcatgtgggggagctgctgatggagtcctcgctgctcatgcccacagccctcccagagtgctatgcgagtggctgccgtgcagttgggggtggggcgtggtgtttagacacagataggagtccagggtatgactgatggagccccggcccacgtgaccagcaaggtcagaggcccagccagattccatcctggggaagcaaatgaattctcagaggaagtggtctgtgtctgcatgaactgctctcaaaccaacaaataggcttctcttggcaactgactcgtgacaaagggttcaagattgtttgnnnnnnnnnnnnnnnnnnnnnnnacagccaggcagtaggtcctggaaaagtaaatatattaattttccaataaaa

SEQ ID NO: 75887 - DNA, 801 bp, Homo Sapiens
aacttgctcctgcacctctggatagtgatatgccacttttagatagctaaatccccaggaagtggacttaacatgtatatattcatcaaaatgatgaactatttattttaaagtatcatttggtactttttttgtaaattgctttgttttgtttaatcagatactgtggaataaaagcaccttttgcttttctcactaaccacacactcttgcagagctttcaggtgttactcagctgcatagttacgcagatgtaatgcacattattggcgtatctttaagttggattcaaatggccatttttctccaattttggtaaattggatatcttttttttacaaatacgaccattaacctcagttaaatttttgtttgttttcctgtttgatgctgtctatttgcattgagtgtaagtcatttgaactaatggtataactcctaaagctttctctgctccagttatttttattaaatatttttcacttggcttatttttaaaactgggaacataaagtgcctgtatcttgtaaaacttcatttgtttcttttggttcagagaagttcatttatgttcaaagacgtttattcatgttcaacaggaaagacaaagtgtacgtgaatgctcgctgtctgatagggttccagctccatatatatagaaagatcgggggtgggatgggatggagtgagccccatccagttagttggactagttttaaataaaggttttccggtttgtgtttttttgaaccatactgtttagtaaaataaatacaatgaatgttgagtactagtgaaaaa

SEQ ID NO: 75888 - DNA, 1962 bp, Homo Sapiens
cagtcgacggtaccggacatatgcccgggaattcggccattacggccgggggggacatgccgggagttgcagtaccctcaggaaggtagcgtcttgatctgcgtggcgtggttctgtgccttgggaagagatgaatgggaagcggccagcggagcccggcccagcccgggtgggaaaaaagggaaagaaggaggtgatggcggagttttcggacgctgttacggaagaaaccttgaaaaagcaggtggctgaggcctggagccgcaggacgccgttcagtcacgaagtcattgtcatggacatggacccttttcttcactgtgtgatcccaaacttcatccaaagccaagacttcttagaagggcttcagaaggaactgatgaacttggacttccatgagaagtataatgatttatataagttccagcagtctgatgatttgaagaagagaagagagcctcacatctccactttaaggaaaattctgtttgaagatttccggtcctggctttctgatatttctaaaattgacctggaatcaaccattgacatgtcctgtgctaaatatgaattcactgatgccctgctgtgccatgatgatgagctggaagggcgccggattgccttcatcctgtacctggttcctccctgggacaggagcatgggtggtaccctggacctgtacagcattgatgaacactttcagccgaagcagattgtcaagtctcttatcccttcgtggaacaaactgggttttctttgaagtatctcctgtgtcctttcaccaggtgtctgaagtgctgtctgaagaaaagtcacgtttgtctaataagtggctggtttcatggtccatcattgactcgggcctcccaactactttgaaccccccatacctcggagccctcacatcccacaagatcatgagattttgtatgattggatcaaccctacttatctggacatggattaccaagttcaaattcaagaagagtttgaagaaagttctgaaattctcctgaaggagtttcttaagcctgagaaattcacgaaagtctgtgaggccttggagcatggacatgtggaatggagcagccgaggtccccctaacaaaaggttttatgagaaagctgaggagagtaagcttcctgagatattgaaggagtgcatgaagttatttcgctctgaggcactattctttgctgctctccaaattcacaggccggaagcttcatttcttggccccttcggaagaagatgagatgaatgataaaaaagaggcagaaaccactgatatcactgaagaagggactagccatagtcctcctgagccagagaataatcagatggccatcagcaacaacagccaacagagcaatgagcagacagacccagagccagaggaaaatgaaacaaagaaagaatcaagtgttcccatgtgccaaggggaactgaggcattggaagaccggtcactacactttaattcatgaccatagcaaggctgaatttgccctagacttaattctgtactgtggctgtgaaggctgggagccagaatatggcggttttacttcttacattgccaaaggtgaagatgaagagctgctaacagtgaatccagaaagcaattctttggcattggtctacagagacagagagactctgaaatttgtcaagcatattaaccaccgaagcctggaacaaaagaaaaccttcccaaacagaacaggtttctgggacttttcattcatctattatgaatgacagcactgggcaaagctgaacaaaaatgtgacccttcgtaattactgggaagtctgaaagagctaagcatggagtcaaggagaactacatggtagcttgcctgacagtgttcttaaaactggttgtcttttactaggactcataatgattgtcctcaaccgagaccttgagcttgcagctaagtacttatctcttgatt

SEQ ID NO: 75889 - DNA, 758 bp, Homo Sapiens
  misc_feature (74)..(74): n is a, c, g, or t
  misc_feature (121)..(121): n is a, c, g, or t
agtgctagttaaggtggatgaatatcattcagtgcatcagaagctcagtgctgatatggctgatcattctaatntgatccgaagtttgctggtcggagctgaggatgctcgtctgatgagngacatgaaaacaatgaagagtcgttatatggaactctatgaccttaatagagacttgctaaatggatataaaattcgctgtaacaatcacacagagctgttgggaaacctcaaagcagtaaatcaagcaattcaaagagcaggtcgtctgcgggttggaaaaccaaagaaccaggtgatcactgcttgtcgggatgcaattcgaagcaataacatcaacacactgttcaaaatcatgcgagtggggacagcttcttcctaggtgaggaaaatacaggtcatgaagttcctggcaaagattttctgttaaaaacctatgctggtttgctttggatcacaccctggtgaaccccgggtgctaagaatgaaaataaccttggtgagttgtacaaattaaagacaaagaactacatgtgaagatagacttgctttctatttttaaatcagtagtagtactgttgctgaataatactaggtttttatggaataggatgaatgcttttgaagtattagggcttcagagtccaattttgcttatttatggtatataaatacatatttttttcttgaaattgcaattgagtttgtacttttcaaatagattatctactttttcattaaaatgtaaagatgttaaa

SEQ ID NO: 75890 - DNA, 1054 bp, Homo Sapiens
  misc_feature (158)..(158): n is a, c, g, or t
  misc_feature (196)..(196): n is a, c, g, or t
  misc_feature (201)..(201): n is a, c, g, or t
  misc_feature (228)..(228): n is a, c, g, or t
  misc_feature (946)..(1012): n is a, c, g, or t
gggaacatccccgaagtgactgtcgatatcgcccttagattgcctggccagatcgcagagaatttctgagattctacctgagatcagaagtttgagcctgacatgactgtgatgacacgagtcccctacaaagttatgagaaagtgagagatagctcnggatatgaggatgcatgagtattcctctgagcatatcntctgnctccactcacagcctgaagctcattcntgcccctcggaagagatgagtgatgataaaaagagcagaacccactgattcactgaagaaggaatagccatagtcctcctgagccagagaaaatcagatgccatcagcaacaacagccaacagagcaatgagcagacagacccagagccagagggaaaatgaaacaaaggaaagaatcaagtgttcccatgtgccaaggggaactgaggcattggaagaccggtcactacactttaattcatgaccatagcaaggctgaatttgccctagacttaattctgtactgtggctgtgaaggctgggagccagaatatggcggttttacttcttacattgccaaaggtgaagatgaagagctgctaacagtgaatccagaaagcaattctttggcattggtctacagagacagagagactctgaaatttgtcaagcatattaaccaccgaagcctggaacaaaagaaaaccttcccaaacagaacaggtttctgggacttttcattcatctattatgaatgacagcactgggcaaagctgaacaaaaatgtgacccttcgtaattactgggaagtctgaaagagctaagcatggagtcaaggagaactacatggtagcttgcctgacagtgttcttaaaactggttgtcttttactaggactcataatgattgtcctcaaccgagaccttgagcttgcagctacgtacttatctcttgattnnnnnnnnnnnnnnnnnnnnnnnnnnnnnnnnnnnnnnnnnnnnnnnnnnnnnnnnnnnnnnnnnnngaccgcgtatgcggccgcaagcttattccctttagttgaggg

SEQ ID NO: 75891 - DNA, 761 bp, Homo Sapiens
  misc_feature (33)..(33): n is a, c, g, or t
  misc_feature (491)..(526): n is a, c, g, or t
cgcgtcccgcctcgccccacgcgcggctcgcgnttcgtttccccagacctgctcgcagcaccctgctgtcttcccggtccggcccgctgcccgcggcgccagcaccatgctcttctattcttttttcaagtcccttgtgggcaaggatgtggtcgtggaactaaagaatgacctgagcatctgtggaaccctccattctgtggatcagtatctcaacatcaaactaactgacatcagtgtcacagaccctgagaaataccctcacatgttatcagtgaagaactgcttcattcggggctcagtggtccgatacgtgcagctgccagcagatgaggtcgacacacagttgctacaggatgcggcaaggaaggaagccctgcagcagaaacagtgatggctcctcctcctcttcccctccctctttcattggtgacccataaccccaagtcccagcccagaacccctaacccccaatacttgaaggggttttnnnnnnnnnnnnnnnnnnnnnnnnnnnnnnnnnnnnaagggatgagtggatgagaggagtaatagggaacagctatcctctcttgagaaggggaggataagtaggctgggaaacttcaaagccttcccagtccccagcacctgcctttctcactacttctctggagatggtaggagagtttcctaggtctttccagggcagcatgtgattcatttggggatggaaggaatctgtcccgcatcgggaataaaatttatggatggaaaacaaa

SEQ ID NO: 75892 - DNA, 1358 bp, Homo Sapiens
  misc_feature (213)..(239): n is a, c, g, or t
tggaccggtccggaattcccgggatatcgtcgacccacgcgtccgtttcacctgcttgatggatgtctgcagagtgctctctaagagtccacctcagtgcctcgtgtgctcagtggtcatgggaaggagcgaaggaaccatccttggttctcccagcttggttgtgtagcaatccctcagcattgtttttctcagcttcttggcaaaaattannnnnnnnnnnnnnnnnnnnnnnnnnngaaggataaactggcttgcctgtggaccctccccggctctggggccagtcgagagccactgagggacccagcactcagagacacaacacacatgtgtagctgcttctggctgagtgtgtttcctgtcaccaatggcctgtttggctggacgatgcctcggcttgaccttttttgaaaagtgctggttagttcccgcccctggtaaacctggggtaggtgggggttctgtcttaactcgaggggcacctgggatccaggacgcttctagggggctctggctgcccgtgttaatgaaggacagcgcttccgcgagcaccctgggaactgggtcttgggtagcaaagccctcccagagaaaagatgggcacaactaaggctttcctgagcaggaagggggtgaagaccaatcccttcctttggtcctttggtacgcaccccctcagagctgagatggaagacatggctagttcttttcagccttgtggagcctgtcagtcgccatcatacctcgagtgagccccagctagataatgacttgtccaagatggcacacgtgggaaagttgatctgcaccagaacccggatgactgtcaccttgaagcatcctgttctccttctgtgctgtcccaggaagtgtctggcgggcgtgggcagcacagctctacactgtacgattcactagggcatcctgcgagcctcactagccttctggttcatgcctttgacaagcatttttgtgccccctctgcttactgtgacagtcgatgatgaatcttgcgttgccattttctgctgtgggtaactgcgtgcagtgtcttgccttgctttctcttcttactgtcccacagcttggtttcatgttacaaacagaaaagctcgaggctcccaccccgccacatcccaacttcatttccccctcactgtagcccatttccaccccaccacaaagttgccacaggttttctttgtatagaatatttattttgaagctctattttaatagtatttattttagaaagtctactattgtaagagttcttctgtttgtgaagaaaaaaacaagttaaaaactgaatgtactgatttagaaaatatatataaatatatattgttaaatat

SEQ ID NO: 75893 - DNA, 524 bp, Homo Sapiens
  misc_feature (64)..(92): n is a, c, g, or t
  misc_feature (111)..(154): n is a, c, g, or t
  misc_feature (293)..(314): n is a, c, g, or t
  misc_feature (396)..(417): n is a, c, g, or t
agtacaaagttttagtttctttttcatgatgtggtaactacgaagtgatggtagatttaaatannnnnnnnnnnnnnnnnnnnnnnnnnnnncattagggccatatctccnnnnnnnnnnnnnnnnnnnnnnnnnnnnnnnnnnnnnnnnnnnngagggtaatgtacaagtttctgtatgtataaagtcatgctcgatttcaggagagcagctgatcacaatttgcttcatgaatcaaggtgtggaaatggttatatatggattgatttagaaaatggttaccagtacagtcnnnnnnnnnnnnnnnnnnnnnntacaactaaaaggaagaaacacaacttcaaagatttttcagtgatgagaatccacatttgtatttcaagataatgtagtttnnnnnnnnnnnnnnnnnnnnnncttgatgtaaattcctccttttcctctggcttaatgaatatcatttattcagtataaaatctttatatgttccacatgttaagaataaatgtacattaaatcttgtt

SEQ ID NO: 75894 - DNA, 2327 bp, Homo Sapiens
  misc_feature (39)..(39): n is a, c, g, or t
  misc_feature (64)..(797): n is a, c, g, or t
  misc_feature (815)..(831): n is a, c, g, or t
  misc_feature (1486)..(1496): n is a, c, g, or t
  misc_feature (1796)..(1808): n is a, c, g, or t
  misc_feature (2267)..(2284): n is a, c, g, or t
tatctgtaccagtgctgcgccagtgcgatagtcgttctnacgggtggactcagacgtagtaccnnnnnnnnnnnnnnnnnnnnnnnnnnnnnnnnnnnnnnnnnnnnnnnnnnnnnnnnnnnnnnnnnnnnnnnnnnnnnnnnnnnnnnnnnnnnnnnnnnnnnnnnnnnnnnnnnnnnnnnnnnnnnnnnnnnnnnnnnnnnnnnnnnnnnnnnnnnnnnnnnnnnnnnnnnnnnnnnnnnnnnnnnnnnnnnnnnnnnnnnnnnnnnnnnnnnnnnnnnnnnnnnnnnnnnnnnnnnnnnnnnnnnnnnnnnnnnnnnnnnnnnnnnnnnnnnnnnnnnnnnnnnnnnnnnnnnnnnnnnnnnnnnnnnnnnnnnnnnnnnnnnnnnnnnnnnnnnnnnnnnnnnnnnnnnnnnnnnnnnnnnnnnnnnnnnnnnnnnnnnnnnnnnnnnnnnnnnnnnnnnnnnnnnnnnnnnnnnnnnnnnnnnnnnnnnnnnnnnnnnnnnnnnnnnnnnnnnnnnnnnnnnnnnnnnnnnnnnnnnnnnnnnnnnnnnnnnnnnnnnnnnnnnnnnnnnnnnnnnnnnnnnnnnnnnnnnnnnnnnnnnnnnnnnnnnnnnnnnnnnnnnnnnnnnnnnnnnnnnnnnnnnnnnnnnnnnnnnnnnnnnnnnnnnnnnnnnnnnnnnnnnnnnnnnnnnnnnnnnnnnnnnnnnnnnnnnnnnnnnnnnnnnnnnnnnnnnnnnnnnnnnnnnnnnnnnnnnnnnnnnnnnnnnnnnnnnnnnnnnnnnnnnnnnnnnnnnaagaattcggcacgaggnnnnnnnnnnnnnnnnngtaggctgaatcgtctcaaacttgtcattctgaacaaggtgataaaaagatggaggaaaaaaattcaggcaacttccagaagaaggctgcaaacatgcttcagcaatctggttctaagaatacaggagctaagaaaagaaaaatcgatgatgcctgatatgactgttactaaattttctaattaaagatggtttatgcatgtatatgccattatttttgtagttagacaatagtttttaaaagaatttcatagatattttatatgtatggatctatattttcagagcttatctctgaagatctaaacttttgagaatgtttgaaaattagagatcatgaattatataattttccagtataaaacaagggaaaaatttttatgtaaaaccctttaaatgtaaaatatttgagaataagttcatacaatcgtcttaagttttttatgcctttatatacttagctatattttttcttttgacataactatctttttgaaagcaatattatactgacagaggctcactgagtgatactttaagttaaatatgtagatcaaggatgtccaatcttttggcttccctgagccacactggaagaagaattgtcttgggccgcacataaaatatgctaacactgatgatagctgatgagcttnnnnnnnnnnnttgcaagaaaaatctcatgttttaagaaagtttacaaaaaatgtaaaatatttgagaataagttcatgtaattgtcttaagttttttatgcctttatatacttagctatattttttcttttgacataaccatctttttgaaagcaatattatactgacagaggttcactgagtgatactttaagttaaatatgtagatcagggatgtccaatcttttggcttccctgagccacattggaagaagaattgtcttgggccgcacataaaatatgctaacactgacgatagctgatgagcttnnnnnnnnnnnnnttgcaagaaaaatctcatgttttaagaaagtttacagatttgtgttgggctgcattcaaagctgttctgggctgcattagacccgtgggctagagttggacaagcttgtagatgatttcaggttataaaaccagaagtacaattcaacaaaaaaggagtaagtcatcaatataaatattagcaaacgagatattgctacatctctatttaaagtaaaatacaaccgattttaaagttcctgaaaccatagccatattttgacatttcacaaagaatggttctagtctactagagtacatttggctaagtagataacttacctaaatttgctccaaagctaaatcacaagtaaacatatttatgtttaaaacacagaaataaataacttaagatttttatctaagcggtcagtgttgtgttggaaagatatatctataaataaactttgaactgatttcnnnnnnnnnnnnnnnnnngctgtcgcggccgcagcttatcccttaggagcgcccccagttg

SEQ ID NO: 75895 - DNA, 613 bp, Homo Sapiens
ttcggcacgagggcggcagctgtgacccacctgcctcctccgcagagcaatggcggtgtctgccgggtccgcgcggacctcgcccagctcagataaagtacagaaagacaaggctgaactgatctcagggcccaggcaggacagccgaatagggaaactcttgggttttgagtggacagatttgtccagttggcggaggctggtgaccctgctgaatcgaccaacggaccctgcaagcttagctgtctttcgttttctttttgggttcttgatggtgctaaacattccccaggagcgggggctcagctctctggaccggaaataccttgatgggctggatgtgtgccgcttccccctgctggatgccctacgcccactgccacttgactggataggatcttgtctacaccatcatgtttctgggtgaggggaactgtgggaaatattgactggcctgccagaaacacagaaatagaagcatgctggtgaatggtcaaagtctttggcaccttatttcacttctgctgtgatcaatttcatgctgttgacctgtgtgtcacttaagctgtgatcccataattctttttaaaatattaaaataacatttaatttt

SEQ ID NO: 75896 - DNA, 1446 bp, Homo Sapiens
  misc_feature (77)..(111): n is a, c, g, or t
  misc_feature (800)..(812): n is a, c, g, or t
tcgatcactatagggcgctacgtctgtatagccgaacgaaccgagcgcagcgagtcattgagcgaggaagcggccgnnnnnnnnnnnnnnnnnnnnnnnnnnnnnnnnnnncagtcgacggtaccggacatatgcccgggaattcggccattacggccgggggaatttttctttctttctgtgctttattactaataagtccaatgagtgagtagtagctagatgactagtatgtagttttatattttggtaaaattatttgccctttcagaaatgcctcatctaaagatacatgataattttggagttggaaggggccttagaggctctccagctctgcttcttgcccattgccaaatactgaaatggaagcccgtcttacctggggtcactaactggttggttaactgagctaagaatagactgtgggtctcctcacttgtggcccagtgctctttctgctatacaaaatgtctaatctcagatttttcttctgctgcttgactgcttcatctggatgaactacaaaaaacccatgattaacggtttatgaattcaagtaataattagatctctctttgcacagacttacttaacttccttattggatatgcttgtaacacataaacacaaagcacttttcaaacatgatgcacttttatctttgtgaataatttactgtcctttcctcctgggatatgagaaacattttaaaaaacgtatttaacagaagagagcaaataaagatatatcaggaaggatgtattaggtatttacttaaatgtttataatatctggannnnnnnnnnnnngttactcacagaactggtgttgtttgctgtttttatttctctaattgttgcagagttctgcctgttacaaagctacagaactgtattgtttttattttccttcttgagcacatgttaacaaactaagcttcacattagagtgatgtcataatgtaaaatgtttgcattgtggttaggtattgaagtttatgtcctgtctgtgtaaagattcatcttttattgtaaatatttagactttaccacagaaatattggaacagtttgctttataagattaaaaagcatccttcagaatggagcttgccttgtgcttagaaataatatgttgaactattttgcaatatactattttaaatctaaattctgtcacttcgctgcctttttaaaatagtgtggtatttcaaatattgctagagctattttcctgaaatacatttgcaaaataaggctgctttgtaatcaaggaatatttttattgattgaaggaaatgactgtactgcgattcaaaagtaaacttattttattatacagattatttcttaaaaactctatttataccttaacatgaaatccatgaccacaccaaacttggttattcataatttttcctgttaaatataaaacactgtaagtt

SEQ ID NO: 75897 - DNA, 617 bp, Homo Sapiens
  misc_feature (508)..(508): n is a, c, g, or t
  misc_feature (526)..(526): n is a, c, g, or t
ctgtttgaatcattatattgggctcctcatttaattttaagtaattcaaaacaattcaaaatgttgctttattgccccacaaacaagcattttcaaacaatgttatagcatatgtatactgtcaatatcttaaaaattaatgtatttataaatatatcggaaaaatatggttatgcaataatgtacttttaagaaatggtatatcagaccaagattacctgatgatgcatcagaaggcttgatagcttttatatttagtaacagaaaaattgtttcattttatcatttatttttcgtcaaagtttttataagcatatatgaattaagtattcattagttcattgatatgaccattgaccatttttaaaagtctaaattgtaatatgttaactcctgatggcttgctgtcaataaattatttttttcctatgatcagtttactctgggaaacactgccatagtcaaagggatatctccaacccaaagttcaaactaaatacttccattngtgtaagatgccacattnttgaagcacagagaaatatctggcagctttgtagtttgaagccattcaaacgggtgctatgtttcagttgcactgatgtgttactattttt

SEQ ID NO: 75898 - DNA, 1118 bp, Homo Sapiens
  misc_feature (414)..(426): n is a, c, g, or t
accgaggcctgggtggcgattccgacgaggctcatcactgctcccccgtgcgtattagaatgcatgtaaggtcttcttgtgtcctgatgaaaaatatgtgcttgaaatgagaaactttgatctctgcttactaatgtgccccatgtccaagtccaacctgcctgtgcatgacctgatcattacatggctgtggttcctaagcctgttgctgaagtcattgtcgctcagcaatagggtgcagttttccaggaataggcatttgcctaattcctggcatgacactctagtgacttcctggtgaggcccagcctgtcctggtacagcagggtcttgctgtaactcagacattccaagggtatgggaagccatattcacacctcacgctctggacatgatttagggaagcagggacannnnnnnnnnnnnacctttgggatcagcctccgccattccaagtcaacactcttcttgagcagaccgtgatttggaagagaggcacctgctggaaaccacacttcttgaaacagcctgggtgacggtcctttaggcagcctgccgccgtctctgtcccggttcaccttgccgagagaggcgcgtctgccccaccctcaaaccctgtggggcctgatggtgctcacgactcttcctgcaaagggaactgaagacctccacattaagtggctttttaacatgaaaaacacggcagctgtagctcccgagctactctcttgccagcattttcacattttgcctttctcgtggtagaagccagtacagagaaattctgtggtgggaacattcgaggtgtcaccctgcagagctatggtgaggtgtggataaggcttaggtgccaggctgtaagcattctgagctgggcttgttgtttttaagtcctgtatatgtatgtagtagtttgggtgtgtatatatagtagcatttcaaaatggacgtactggtttaacctcctatccttggagagcagctggctctccaccttgttacacattatgttagagaggtagcgagctgctctgctatatgccttaagccaatatttactcatcaggtcattattttttacaatggccatggaataaaccatttttacaaaaataaaa

SEQ ID NO: 75899 - DNA, 1066 bp, Homo Sapiens
  misc_feature (469)..(485): n is a, c, g, or t
agtcctggaaaatcaaaataaactctaatagaagattaaaaatttgaaggactttttccaataaaagtgtttgattcctaagaaagaaaaatttttgtggacatgcataaaaattaaatggatttcctagtggagttttataaattaaaaggtcaaaactgaagctttttatttaggcttttccaaatcaaggataaatatcttacgcacgatatctagtgacagaggagaaagtggaaaatgacctcaaggaagctacgggcacaactggaagctttgtagaaattaaacatattcaaggagcaagaaatgaactttcagcagtctaaattttctaaataaccaatagttgccaatctaaaatggcagagaagatgaaatttgataaactgaattttttttaaaaatccatttaccctacaggtttgcatttgtttgctgaaatttacctttttttagttatatatannnnnnnnnnnnnnnnnaatttctgccaataaattctaaattacaaaggtaagagaaaacctagtacattactaaatatataaagtatatgttctgattatgtatacttgttctagtgtcaagtctttttaagtgggtttttaaaagtttgttattggacttgaatggatttttgagactaggttaattatttttgaggtcttatcctaaaaggcatctaaggtacatgaatggagtatggtgattttataacattttttatcagaatggaaaaagaactgtttaaaagtttgatacttttaaatagttggtttttttgcttactctggtaatgattttctacaaatacataataaattgtttttttgattctatattctgtatgcagttgaatatccattacttattctgctgtgcctttaaaagaatggaatggtttacaggcccccttaaaatattattttttaaaaaaaccctttctgaaagatacattaccaaaagtttttttcccaagaaaggatttttattaatccacattttaatataaatggtaaaggggttttaatccagaaaatccctattaaattaaggtaattac

SEQ ID NO: 75900 - DNA, 1250 bp, Homo Sapiens
gagtgatgacagcgataggctagtcagaaaagtaggtgttaaacgtccccgtagagtggttgaagatgaaggttcttcagtggaaatggagcaaaagactcctgaaaaaacattagctgcacaaaagcgagaaaaacttcagaagctcaaagaactctcaaaacaaagatctcgtgagagacgcagtagtggtagagattttgaggactctgaaaaggaatcttgcccaagcagtgatgaagttgatgaggaggaagaagaggataattatgaatctgatgaagatggagatgattatattatcgatgactttgtagtgcaagatgaggagggtgatgaagagaataaaaaccaacaaggagaaaaattgactacatcacaactgaaattagtaaaacagaattctctttattcttttagtgaccactatactcattttgaaagagttgtgaaggctcttctgatcaacgctttagatgaatcttttctgggaacattatatgatggcacaaggcaaaaatcatatgcaaaagatatgctaacatctcttcattatttggataacccgctttgttcagcctcgtctagagagcttggtatctagaagtcgttggaaagagcaatataaggagcgagtagaaaattattctaatgtaagtattcatttgaagaatcctgaaaactgttcctgccaggcttgtggactgcatcgctactgtaaatattcagtgcatttatcaggagagttgtataacaccaggaccatgcaaatagataatttcatgtcacatgataaacaggtgttcactgttggcagaatttgtgccagccgtaccagaatttatcataaactgaaacattttaaattcaaactataccaggaatgttgcaccattgcaatgacagaagaagttgaagatgaacaagttaaagaaacagtggaaagaattttcaggcggtcaaaagaaaatggctggattaaggagaaatatggtcaacttgaagaatatctcaattttgcggattactttcaagaagagaagtttgagttgtaacacatttccatcagagaagattttttaaattcctgtaaatgtgaagatcatgattcttgtttttctgtatcatgtgacatgtttgtacattttatctatatcttcatggcaaaatattttgtttaaaacatgattatcttaattcctgtgaagtggcactctacactctaattaaacttttatctgatgtacaaa

SEQ ID NO: 75901 - DNA, 679 bp, Homo Sapiens
aaaaaggaggaaacaaaagctcagaggcaggccccaggtgcgctcgcccgcgggggtgcggcgcggacgaccgaagaaaaccacgacttcctggaaaatcttcaccgtaaatattaatctctttggcatgaagaggaaaacactgcagctaatttttcatgggataacaaaaatataaactgcaatttcttttattttttccctttcgatggtctttttaaacgaggagtaaagatttcaacgccaggtccattttccaaattttgtaccagaaccttgaggatgcttgtctctcgcgcgcttctccgcagaccgaaccctctccggaactcagagctgttcacccaagtcagcggaggaggcctcctgggacttgagcctgagggtggcgaagaaccctaggcagagatcatcaacttggtaccgatgagtgacgcggagcttgaacattccagcgacttgctccagggccactcccagttaagaggctgagtgttaactgcaagaggctgagtgttaacatcaccgttggctccaggaaccgaaccgggtttggatacagacccagtcacaccatccatgaaaagctgtttctataatatgaaaaattgttaaatgacgctttagtaaaagccatttaaagatcttttctaataaatttttcatctttccaaacaaa

SEQ ID NO: 75902 - DNA, 659 bp, Homo Sapiens
  misc_feature (11)..(11): n is a, c, g, or t
  misc_feature (33)..(33): n is a, c, g, or t
gtgggacaatntaattgaatcaccgcagccttntaatacagaagaaacggacgtgactgtcaccctcagcccgccagcaagggcgctgaggaagtcattaatccttcgaaactctgaaaagaaaccagtgttgaagtctggacagaaagccttaaaaaagtgacagcaccaatgcagctgctcagtgtacccgccgtgggctgtcagggtcagtggcttctttctagatgaaaggagcagaggcgagccgacgccaccgtcacagagaaccagccgagaaggaaaggccccacgatgctcctgctgcgctgcccccacagccggccgctcccccgacggctcacacaggcagcacctcactgccctgtggctggaggggcattgcaaggagcgccccccagccccaggcacccccggcttagggtgtacgtatcacccagccctgtgctggcagcacgttaccaaccagcctgcgtgaagacctgtcaactgtcgtgtgtgaattccttaaattcggtttaaatagtccattaaagatctgtttagaaaatacctttgaaaaacgagggtaactttaaaaaatggaaactttcaaatccatttatatttttattataaacaaaacttaattaaaagtttaacaaactggctgaaaactc

SEQ ID NO: 75903 - DNA, 960 bp, Homo Sapiens
  misc_feature (56)..(73): n is a, c, g, or t
  misc_feature (784)..(792): n is a, c, g, or t
taggtagcgaggcctgggtggcgaattccgcacgagggagagaactagtctcgagnnnnnnnnnnnnnnnnnncttgaccagctcttagatgatggtggtgtttatctccctgttctcggcagctcgaaaagaaaggcatgcagagattgctgcccaagcctgggtgctcctggggagtcctgcgttacaggaagcagctgcatgatctgctgtgcagtggggttgtcgtggggagaaccctccctggcctctcctggtgcgggctccacgctgtcagtgaggctcacctcacaaagatcttcggagagagggaggaggggatcggagcgccatgcgagcctcccctgctcctgcctgctcaccctgcctgaaggttctactggccatcctgcttgtcagcacacacaagctcttggggggctggggctcctagagtgggctcatcagcagggttctgggcagtggccaggaacttgccatgtccctcattgtggtctctcacaagccgcaacacctgcccctgcatctccagcaggttcaccttcatctcctcccggtcctgggccagcctgacgatctcctcctcctcccggagccgcatctttgacactgtcccctggctcccatatggggtgatgtactttccccaagcccctggggcatggggctgctgcttctggcttcttcctgggacaaggccactggggcgaccagggggctggacgaccaccccttggcgtcctcctggggcactgggcaccccgggaaagcccgaaaatggannnnnnnnntcgcagattggccaggagatccctgcggagcggctggagaagagcggccagtggctattcgcggaacagacccgcgcgtgcggcggggtttcactgggccccccctaaaatgaagcctccggcggagaaattttatcgcacgggcgcgctgttcgccagcttctcgcg

SEQ ID NO: 75904 - DNA, 657 bp, Homo Sapiens
acaactggtgagtcggctggacggtgccgctgactgtaacatgtaaagcaggcactgagcaccacctgcctggcagtccagggtcatggagagccacagacagcaccctgcttgtgacttcactggcccaactcatcctggaccccttgagcaagaccatggctggattccaggaactggtggagtggaagtggatccaggaaaatgccgtgtgaagggaggactcagatgcactccctgtggtctgggctcaaccagccaaaagagcaacaaagactccagaacccactctacctcctcaatcccttggccatctgtggagccccagagctgcggctgtggcaaggcctgtttctgcgctggacctgctcacctgagcctgcagaagctgcatgggggaagagtgtggcaaatagtgacaggaagggagaagacagaagcctctcagccaactgcttcagccgagcccctattctaagcactggctccttggatagcagctgagatgttcctgaaacctctgcaggccccttaggacctttacaccttggatgagggtgcctgcaacccaggttagccaaaagtactgagggtcttaagtttgaagtgtccaaagtatagggaggtctcaataataaaagtctccatgatcagcaa

SEQ ID NO: 75905 - DNA, 812 bp, Homo Sapiens
cagagtctggccttctgctgggccccgggtctctcactggcagaatggagttctcggagctgatccatacgggctgagcccaagcagagtttctacggggcccggaggcgcccccgcttcgcggcacggtgtgagtcaccgtccaccacctgctcctgtcgccagggcccgcgtcctctccggacctgtggctgctgctgttgcgtagcgtcgactccttcgagaagcaggcctgagattgggcgactcctggcacttcctcccgcccgaactctactgcaagagagtacgctcgcgaagtgggcgcggtcgtaggggcccgggaaggctggaacgcgccgggcctggaagaggcgcgcggacagggcactccctgggtgccctagacctggcctctctcctccctgcgctgcagaccaacgcgtggcggctgagcgaggcttctgctacgctccagccagcccctaactggtccccagaagcggcgctgctacagggaccaggagctgctgcgaactgcgctggcgggggctcgtccttgggcgcggggcttcatcatggacacgctctcggcccaggccgcgaaacaagcccgcgtgactggcggaggcccagagaccaagcccgctaacctggctggttgcactggtccctggaagagcactgagccccgtgcgctgccacagcggccggcttcagacatgcgcagacgatccgcacacaatgcggcaatcaggctcccctgacatgaccccgagccccagcaggaggtgccccgtcactaactaacccaacttcacacggcgtcccct

SEQ ID NO: 75906 - DNA, 640 bp, Homo Sapiens
ctggagagagaggagaccccagggagggaaaggagagtcagtgggacaagcctatagccttgtctcaaagtatttgggccccagagcagcaaggtggcaggaatcccagcctaaagatgagacagaggcaccgggaccagagcacccaggaatcctgacccctggcctgagtaccatctcgacctaggtgccacaaagcccctgggcagcggcccagcatgagtgggctccatcaaaaggccagccacaccctagtcagcctgggaaccctaggggaggcatacagccagcatttctctgctggaacagggggaagctgtgttcctccagccccctgcccctcccccatggggaaggcgtggtgggggccgggaaaagggtgagtgggaaaggcagcccaacaaagcctcagcccagctcccaggagcagctccctggttgtttcgccaaccaggcacttcctgggaatactaccaggcctctgcaaagccccttttctcctcccctcgcagtgcctaggaagaaggacatcgtgaaaatggaagaggagctggaagtgaaagcccacctgcctaagaaggcagcctaatgcagaggccctagcctgtcccccatgtccgccccaaccgcatcacccgtt

SEQ ID NO: 75907 - DNA, 475 bp, Homo Sapiens
cgccgtcggttcaagagagcctaaagatagtaatgagcagcttgagtcttaagtttttgaatacaccgatggaaggtgacaaagattctttgcttggccaaactttagtcagactcctcaaccttctcgtaggtttatctgtgcatttccttggaaaatccagttagaaccctctaccctcaatatctgatcaggttcctcatcctctaccatccaaggtgatgtctgatcaccttgacctattttcagcaagaaacccctttactcctgaagttccttcttagtaattttttatccagtgaccccaagctttttgttccttggctataaattcccacttgcccatgctgtatttagagttgagcccactctctctctcctaattcagaatcccattgccatggttgctatacctatcctgatggtccggaataaaatctgtcttactgtgctttaataaatatcattaattttt

SEQ ID NO: 75908 - DNA, 1403 bp, Homo Sapiens
  misc_feature (1344)..(1362): n is a, c, g, or t
  misc_feature (1383)..(1383): n is a, c, g, or t
gagcgaggcctgggtggcgaattccgcacgaggcggggcgcggctcggagcgcgaaacatggcggggcaggacgctggctgcggccgtggcggcgacgactactcagaggacgaaggcgacagcagcgtgtccaggcggctgtggaggtgttcgggaagctgaaggacctaaactgccccttcctcgagggtctgtatatcacagagccaaagacaattcaggaactgctgtgcagcccctcagagtaccgcttggagatcctagagtggatgtgtacccgggtctggccctcactgcaggacaggttcagctcactgaaaggggtcccaacagaggtgaagatccaagaaatgacgaagctgggccacgagctgatgctgtgtgcgccagatgaccaggagctcctcaagggctgtgcctgcgcccagaagcagctacacttcatggaccagttgctcgataccatccggagcctgaccattgggtgctccagttgctcgagcctgatggagcacttcgaggacaccagggagaagaacgaggccttgctgggggagctcttctctagcccccacctgcagatgctcctgaatccagagtgcgacccgtggcccctggacatgcagcccctcctcaacaagcagagtgatgactggcagtgggccagtgcctctgccaagtccgaggaggaggagaagctggcggagcttgccaggcagctgcaggagagtgctgccaagttgcacgcgcttagaacggagtactttgcacagcatgagcaaggggctgctgcgggcgcagccgacatcagcaccctagaccagaagctgcgtctggtcacttccgacttccaccagctaatcttggcttttctccaagtctacgacgacgagctgggcgagtgctgccagcgcccaggccctgacctccacccgtgcggccccatcatccaggccacgcaccagaatctgacttcctacagccaactgctgcaagtggtcatggcagttgctgacacctctgcgaaggccgtggagaccgtgaagaagcagcaaggcgagcagatctgctggggtggcagcagctccgtcatgagtctagctaccaagatgaatgaactaatggagaaatagaaagtcttcagtgatggcctacgccaaagcacaggatggggcgggcaggaagccctctcccaagatcgagttggccgaggatggatgattgtggcagcagaagccgttgcagcccccacgttgtgctctaggcagggacctttggcccctttggggagggagagacagacgggcggtttgacttggacacaaagaaagccttggtttctnnnnnnnnnnnnnnnnnnncctgagaggcggccgcaagcnttattcccttgtagtgaggg

SEQ ID NO: 75909 - DNA, 628 bp, Homo Sapiens
tcggtctacctgtcttgccatgagcctgctacagacaggatgagaggaagtgggctcgtcaatgttgcttgtttcgttgttccacatgtgagatccccagaggccaacctaaaaagccggctttagttacgatgactacagttcccacgtgcgcaactctgcccttggctcaaggattccgtgatgttcattttggttttctaagcgagaggctccgagccttccaacctctgactggctggtcctgtgagacccctcgatcagggatgctgctgcaagtggtcatggcagttgctgacacctctgcgaaggccgtggagaccgtgaagaagcagcaaggcgagcagatctgctggggtggcagcagctccgtcatgagtctagctaccaagatgaatgaactaatggagaaatagaaagtcttcagtgatggcctacgccaaagcacaggatggggcgggcaggaagccctctcccaagatcgagttggccgaggatggatgattgtggcagcagaagccgttgcagccccacgttgtgctctaggcagggacctttggcccctttggggagggagagacagacgggcggtttgacttggacacaaagaaagccttggtttctaaaa

SEQ ID NO: 75910 - DNA, 989 bp, Homo Sapiens
  misc_feature (45)..(118): n is a, c, g, or t
aagaagagacagggtttcaccgtgttagccaggatggtcttgatnnnnnnnnnnnnnnnnnnnnnnnnnnnnnnnnnnnnnnnnnnnnnnnnnnnnnnnnnnnnnnnnnnnnnnnnnncaagaatttttttatcgataacatagtgagctctctgcctcttcggaacgatgtccactttgcttatgatcaacccaagcaggactcttctctccctggacgcctctcccctggtctggaatcttccagttctgccagaattggcctttcccagatgctgcaaacttccagttgaacccctttttctgtgtggcccctggggctgcgagaccaaaatccatgagttctgtgtaccctagacctttggaaggtgagagcagggccctgagaaaaggcagccacctcctctccctggctgaacccctgccaccctactcctcaccagaattgtcagtggcctttcaccacagtggtccttcctgcctgagccctgcactgtcccagaccacacagaagtctggtcacctctgggcgcctgggatggtcaccgaagagaagcacgctgtccccgtctctcctggcttctgccagaaaatcgaacaagtgcaattaacacactgttactgccgaagcctgaaactcccaggacttgtccttgatccttccagaaaccaccaggtccggcacttggagccccccggagagggacctcccagccgagccctcaaagaactccatgaaatcaggaactgcttgatgaaatgtatctccttgtacctggaagatgaagcccaaacacccacacctctgtctcccccagggctcgggatgtctccagcagcccggccacgcagcttcccaggtgggctcggggaggtgggagcagggaccatctctgtcccctccaccctcactccatccacctcggagaccaccctcccccagccagatacggaataaaactacagacgcagacgtcggaaaaaaataa

SEQ ID NO: 75911 - DNA, 999 bp, Homo Sapiens
  misc_feature (777)..(840): n is a, c, g, or t
cttacggtctaggtacgaggcctgggttgtgaattcggcacgaggggcggcgtccgtgcgacaggcacgcagcctactaggtgtggcggcgaccctggccccgggttcccgtggctaccgggcgcggccgcccccgcgccgcaggccgggaccccggtggccagaccccgaggacctcctgaccccgcggtggcagctgggaccgcgctacgcggctaagcagttcgcgcgttacggcgccgcctccggggtggtccccggttcgttatggccgtcgccggagcagctgcgggagctggaggccgaagaacgcgaatggtacccgagcctggcgaccatgcaggagtcgctgcgggtgaagcagctggccgaagagcagaagcgtcgggagagggagcagcacatcgcagagtgcatggccaagatgccacagatgattgtgaactggcagcagcagcagcgggagaactgggagaaggcccaggctgacaaggagaggagggcccgactgcaggctgaggcccaggagctcctgggctaccaggtggacccaaggagtgcccgcttccaggagctgctccagggacctagacgaagcaaggagcgcaagcgcctcacggaggacaaaacagaaacggaaagcaagggaggcgcagagcatgtgcattggcttgcagctgtgggcttcaagacccagcagactctggcggcaaccaggctccttgaggctatgtcacttccaactaaagctgatactggcagtaaccccttaatgannnnnnnnnnnnnnnnnnnnnnnnnnnnnnnnnnnnnnnnnnnnnnnnnnnnnnnnnnnnnnnngtgaggaacataatacagagacagagaaacaacaccctacaacaacgaacaaaccacataacagttccccccacccaacaccctttttcaacagagagactaaaaggagtccacaaaagagggagcagataacgacgaacggaccatcacaacagacac

SEQ ID NO: 75912 - DNA, 774 bp, Homo Sapiens
tggccagtaactataacggtccttaaggtagcgaggcctgggtggcgaactcggcacgaggcaggcacgcagcctactaggtgtggcggcgaccctggccccgggttcccgtggctaccgggcgcggccgcccccgcgccgcaggccgggaccccggtggccagaccccgaggacctcctgaccccgcggtggcagctgggaccgcgctacgcggctaagcagttcgcgcgttacggcgccgcctccggggtggtccccggttcgttatggccgtcgccggagcagctgcgggagctggaggccgaagaacgcgaatggtacccgagcctggcgaccatgcaggagtcgctgcgggtgaagcagctggccgaagagcagaagcgtcgggagagggagcagcacatcgcagagtgcatggccaagatgccacagatgattgtgaactggcagcagcagcagcgggagaactgggagaaggcccaggctgacaaggagaggagggcccgactgcaggctgaggcccaggagctcctgggctaccaggtggacccaaggagtgcccgcttccaggagctgctccaggacctagagaagaaggagcgcaagcgcctcaaggaggaaaaacagaaacggaagaaggaggcgcgagctgctgcattggctgcagctgtggctcaagacccagcagcctctggggcacccagctcctgaggctttgtcccttcccaataaagcctgctacctggcagtacccctgaaaaaacatagtgaaa

SEQ ID NO: 75913 - DNA, 998 bp, Homo Sapiens
  misc_feature (53)..(68): n is a, c, g, or t
  misc_feature (127)..(142): n is a, c, g, or t
  misc_feature (438)..(463): n is a, c, g, or t
  misc_feature (913)..(913): n is a, c, g, or t
  misc_feature (933)..(933): n is a, c, g, or t
  misc_feature (960)..(960): n is a, c, g, or t
cagttcaaaccccttgtattaatatggaattaaatgttccaatttagtatttnnnnnnnnnnnnnnnngactctccctgaccccggcccctccccagccccacaaagaaaacttcttaaaatttttnnnnnnnnnnnnnnnnggcagctctgggcaattcactttatcttccctccccccatgaaaaggaagatgctaacagacactaggaggttgaaggcgaaggagaccctcgctgggggctgcttgttcgcatgtctaagtgttgggtgtggttccctgtatgagcttgggtggggtagtctggggtgtgatacccatagatgtgtagggaagtggatgagcaaaatcagtaactcttggtgagagacggggtgtgggggccccaagggggaccccatgaactggccgctccacagtaactatcacaggctcttnnnnnnnnnnnnnnnnnnnnnnnnnnggaaggaagaaagaagtctcagaatgtcctcaggtgtcccatccccagtccccagtggacggcacagcccaggagctctagcccaggctggtgatgttggcacggccaccggggggcgccacgatacgctgggtggtgcggcggggaatgttgtcatcaatctgagcaccagacaaactgaatccagactggtgcaggttccggacaggtggggcctgctgcttggcaggagacgtcttggccgaggaggctggagtgactgtcttgggcgtcacagacacttcacacacaggtccgtcatacaggccacgaggaacccctctcagctcagccagcctgctccttgccttgatacgcttgtaaacaaaatcagggaagggcttccggggaatgtagcgtccagagccttcggtgacatgcagggtgccgtcctccaggacaatcttcccnctggctgatgaccaccagtnggggagccgcggcactccatgccttcnaagatgttgtactcgagagagctgttgtgtgtcttggc

SEQ ID NO: 75914 - DNA, 893 bp, Homo Sapiens
gcaggtagtaatacatatttttatctagaaaagaaatttggtttacagaggcataaacatttagtagttacgtttatcaatgtttgtttcataagagaagcctcagtttcttcactgagtcatctgtacattttttattccttaccatcaataattctcaggactgtcagacgcctttacaagaaacatgtagggtttttttccccccaatttgagtacatactactgttaactgcaaaattctaaagaagtcagttgccatttgtcaaacaattcgcccaaggtacaccgatttgggatacttttctttcagagccggccactgaacaatgaagtaatctgagagatgaaacagaatctttccggacatggataacgtttctacacggcagatgctttcaacgtagacaatgatcactttctttattcctagtatcccaaggagaagggcagatacacagataggaacacatgttcctggtccgttacacaacaccaaatctggcttcaccctgtgaattaggggaaaggagagccacatggagtgcaaggtggtgaaaacggtggagggccaggactgctgaacctcccggcttcttggaattcggtgaatgtagtatttggtatacatgttactagggtctctatcagctcgatctagttcaaaagaatttattttattggcactcatttcatcagtgtcagcaatgacataatgtctaggtgagtaggcattggacaagctcccaagcagcctcaggatctcagtggtatgcccaccggacccagccactaccaagatactgagagactcccggggcgtaacgtccatggaacgaagcactacccatattcgcaggattaggaaaaccgccacagctcctgcggccgca

SEQ ID NO: 75915 - DNA, 740 bp, Homo Sapiens
  misc_feature (44)..(44): n is a, c, g, or t
cagccaatgacttgccccctgcagaggcatccccgctgtcagcncaggatgctggtgtgcaggcgcccccagtggcggcctgcaaggctgtggccaccagtccgtccctggaagcgcctgcagccctgcatgtgttcccagaggtaactctggggtccagcctggaggaggcgccgtcccctgtgcgggatgtgcgatgggatgctgagggcatgacatgggaggtgtacggagctgcagtggacccggaggtgctcggtgtggccatccagaagcacctggagatgcagtttgagcagctgcagcgggcgcccgccagcgaggacagcctgtctgtggagggccggagggggccgctgcgggctgtcatgcagtccctgcggcgccccagctgctgcggctgctccggcgcggcccccgagtgaggagctgtggcccttggagctggcctgggcccactgacttagtcctagacctgggccagggacagtgggggctccgtgccccctggacccaccggcagctgggcacatctctcacccgaatatcggctgcctccagaccacaggactgcagcctggggcttccggccccacacagctgggctgttttcttaagggcttgatttccaagggccacatctctgcaccttccaggctctgaactttgagacagggctttagcactgtgcagaggggagatcctgagttttctgtaaaaaatgaccttttgttcactcc

SEQ ID NO: 75916 - DNA, 1641 bp, Homo Sapiens
  misc_feature (1228)..(1528): n is a, c, g, or t
agggcgcagcagcaccgggcggagagggctaccatggggaaaatcgcgctgcaactcaaagccacgctggagaacatcaccaacctccggcccgtgggcgaggacttccggtggtacctgaagatgaaatgtggcaactgtggtgagatttcggacaagtggcagtacatccggctgatggacagtgtggcactgaaggggggccgtggcagtgcttccatggtccagaagtgcaagctgtgtgcaagagaaaattccatcgagattttaagcagcaccatcaagccttacaatgctgaagacaatgagaacttcaagacaatagtggagtttgagtgccggggccttgaaccagttgatttccagccgcaggctgggtttgctgctgaaggtgtggagtcagggacagccttcagtgacattaatctgcaggagaaggactggactgactatgatgaaaaggcccaggagtctgtgggaatctatgaggtcacccaccagtttgtgaagtgctgatccctcttccttcccagttgcccttaagaactgagaaaggacaaagtactctaagcagcagagcccacagaggctcgttcctttgacccttgtctcctggtggctatacgaaaccttcacaatctgcatgctggactttattacagcttcccaagccccatcaataaagcccctgttcacgctgcactggtgcatgaaggtgaagtaaggaggcagctactccctccacaaataagaattcgtgcagcagcagttcactccttaggaaaatgaagagtatttttaaggagatggtatctccccagtcaagggcaagtttacagagatgaaaccgcgatcccaccatcactcaatgagccagaagccaatggtgacgtactgttacctgaacttactgaacttgctgttggaaagatctttgtgaggattaggaattaggttaaaagaaattaagaaccatcttcaagcaaaaattaaactttatttctgcttaaacaataaatacacctgagttagttttccaaacctttcctcctgattaaatgcccttaaaacttaaatctcttgttatcttcagttgtgatgtagtcccaagtggaaattacgtttagctttaaaaccatgaatgtaaagctcaagcctgtagctggctgcctaggcagcttatgattagtttcacagaatagcacccactggctacacaggccccagnnnnnnnnnnnnnnnnnnnnnnnnnnnnnnnnnnnnnnnnnnnnnnnnnnnnnnnnnnnnnnnnnnnnnnnnnnnnnnnnnnnnnnnnnnnnnnnnnnnnnnnnnnnnnnnnnnnnnnnnnnnnnnnnnnnnnnnnnnnnnnnnnnnnnnnnnnnnnnnnnnnnnnnnnnnnnnnnnnnnnnnnnnnnnnnnnnnnnnnnnnnnnnnnnnnnnnnnnnnnnnnnnnnnnnnnnnnnnnnnnnnnnnnnnnnnnnnnnnnnnnnnnnnnnnnnnnnnnnnnnnnnnnnnnnnnnnnnnnnnntcccagttttcatgatgaggaagtgatggtagcttttcatctgcccagaagttaacttttgatcccggccgtaatggccgaattcccgggcatatgtccggtaccgtcgactg

SEQ ID NO: 75917 - DNA, 935 bp, Homo Sapiens
gatattccgcataatagggacatttggtgcaataagaccatagagagaatggcctcagcaagccccccgaccactctgctttgtttagctttatgttcccaacaggccctgtatgtcaattggtataagcacttgatcactctattgttactctatttgttctgtctccttcactcgattccgcttcttcaagccaaagaacagattctcccaagtaagccctggtattcaggcttcaaaatcctgggaaaccaaagtagtccggaggcagcttcccgaaaacagggcttttgagaggtacagaaggatgctgggatttttgaccaggagtaaaacagagcagaagctctgggatctggaagagtgaagagcctcgaactgctggggaaggggaggcctctgtagaccatgccactagggtaccagctttaccagtgtgggagggctaaggaagggtggattacgcacaaaattaaactatttcacaataaagaaaaccaaatcaataaacgaaaggcgaactattcaccttattaaataatcacaagcgtcccttcaagtagcatttcgtttagtgtccatttacagaccacgaaatatttaacacagggaagaactacaaaatgaagctttccaagactgccaattagagataaaccaatacactttaatagaaagcaaacgtaaaattctaactaggaaaaccccgaacacttaatgtgcctggttaaatattttctcatactgccggagagaaggctccggttcagcactgagatcaggacgggcctcctctccccgggccccgccccggccgcaccttcaggtaccaccggaagtcctcgcccacgggccggaggttggtgatgttctccagcgtggctttgagttgcagcgcgattttccccatggtagccctctccgcccggtgctgg

SEQ ID NO: 75918 - DNA, 1358 bp, Homo Sapiens
cagtcgacggtagcggacatatgcccgggaattcggccattacggccggggggagtggccgtaagctgggctcctccgggggttggtttttaagagtgctggggcctggaggtctgtaatacaaaagctgcgcgtcccttaatttcctcggcggtttatgtgaagaaccagctcagtgggactctacagattaaaccaggggttttcaatgaatacagaaccatatggttcaaatcctacaggacgatcttttcctgtttgaacagaataaagagtttcaggtacccttgggcgagactgtacagtacttcccaaaccactgtcgacagcggtgaggtaaaaaccttcttggccctggctcacaaatggtgggatgaacaaggagtatatgcacctcttcattccatgaatgacctgagggtgccatttattagggacaatcttctggaaacaagttcctaatcaccagccaggaaaacctttgttggggatgaagattcttgacgttggctgtggtggtgggctgttaactgaacctctagggcggcttggggcttcagttattggaatcgaccctgtggatgagaacattaaaacagcacaatgccataaatcatttgatccagtcctggataagagaatagagtacagagtgtgttccctggaagagattgtggaagagactgcagaaacatttgatgctgttgtagcttctgaagttgtagaacatgtgattgatctagaaacatttttacagtgctgctgtcaagtgttaaaacccggtggttctttattcattactacaatcaacaaaacacaactttcctatgccttgggaattgttttttcagagcaaattgcaggtattgtaccaaaaggtactcatacatgggagaagtttgtttcacctgaaacactagagagcattctggaatcaaatggtctgtcagttcaaacagtggtaggaatgctctataaccccttctcaggttactggcattggagtgaaaataccagccttaactatgcagctcatgctgtgaaatccagggtccaggaacacccagcctctgctgagtttgttttaaagggagaaacagaagagctccaagctaatgcctgcaccaatccagctgtgcatgaaaagctgaagaaatgaattgtttctgagaactatagtaatatggcttggatatctgatgttttcaaatacaagaaatgtacaatttatcctttgagagagaatcatgaagaaaagaaggtcaataaaaagggctaaaaccttggacaaaagtttttgttatttcgtctaatagctactttcaagggattctgtgaataaaaagttttgtcaagat

SEQ ID NO: 75919 - DNA, 910 bp, Homo Sapiens
  misc_feature (675)..(685): n is a, c, g, or t
aatccaggccaacatgtatgtaaattaaatttttagataattgattatctctttgtactacttgagatttgattatgagatgtgcatattgctttgggaagagctcgaggaaggaaataattctctcctttgttttgaacctcaaactagataaaccctaggaattgcttaactgcaacaagtaattttcattcccacaaaaacctgaggcagctcttttgcccagagcgttccctgtagccacccccaccccacttgcccttggttctttagaaggagcacacacatcccttgattcctccctgatgtggtaaactggcacactccaggggtctaaaacataaaacagttgtgtttagggaaccttaagtcatgcagacatgactgttctctttgtacaagtgtgaatcaaaatatgtatctctttttcagagtctggttaagctatgtcattgtctactgcatagtttcctgagtctgtttgtaaagtgcttatggctaacagttcagttctgtatttgttgacaggtaaataagtggagttgagtgccatctttgaaaaaattaccctctagctctaacactgaaaataataataaattgtagatctctgcaactaagtttaaagcagtgtgactgtgttgcttaaatatcaagtattgtttataaccaccnnnnnnnnnnngccctggtagttttttggcaccttatgtttaaatcagattcttagatttggagtagacctgaccttgttatttattagataacattttgaatgtatccattggatttctaaaatgtattgtgaatttctcagacaaacaggatttatgctggagctctgttttgcttagaaataaaatatttagtagtttatttctgctctaattaaaatgtcaagaatgccaaa

SEQ ID NO: 75920 - DNA, 1811 bp, Homo Sapiens
  misc_feature (43)..(55): n is a, c, g, or t
  misc_feature (1690)..(1724): n is a, c, g, or t
cacagtaacaagcaaggaatgttttattgtgtacattttctcnnnnnnnnnnnnncccacaaaaacagaacccacaaataggagcaaagaacagttttctagcatctctgggatacacagggcaccatatcttatagaaacatagctagtacaagaacaaagtgtactaattaacattaccccttgcttccccagtcaaaaaaggctatagagaaaaacactttaaattgtactctaatacaaatttgttgcacaattaaacttcaacttactcaaagagttattgtattgtaaactgcagaaaatagaataggcattcaataaatctgctcacaattaacaattaagcaatagacacttgaataaatatagcatgtattacttatttgttaagccttacacttacgatgagcagatggtttatcactatatagtaacagattttttttacactttaggagataccatatccaataacggaagtagaagtactttaacgaaaactgattttagaaaaatatctccttgggtctgagctactatggtatttattacatatttgggtcagtttcaccagtttaaaaatataggtactaacaaactgaattctttcatgggagaacaaagtaatacattctagagcaataatatttctttatatcctttaggtagcaggacagagctaggacatagtaaagagatttacgatgtaatgaataatttgtttctacctaatgctataggggtattgctatcatttgaactaagaaagaacaattttaaaacttgtttataatgaagaatcggcatttccttaccacatatatactagatgtaaatataaggagtcttctctaatagtctgtattccttaatccctatctgtacaaatttagcctgcatattcaggaattggaacaaccagtaaactgttacttgaaagaactaatttaaatgatccatttaagagaaatgcagtcaaaataaggcaataaccatcagcctatctgtacttttcttctgtgcctactcagtaaaattgagaaaataatttttgcccacttctataaaaatatcaccccatttgctacctagcatatgagagagacaagactagcctgtcacgtttgtctctaaaaagaaaaatgataggcctggtggagagcaagctatatggaaacatcagcctttccttttctaagatacgtcactccaattcttccttaaatataaacttcctccttgatttatattaaccccttaggaggcactataataactttatgttcccatggaacatagggtttttcaagaatttcttaaaataaaaaaggtttgaaagctatggagtaaactcagcagctgtgatattccgttcaatctaccacagatgtcaaacggtcacattttacagaagtcaaaggaaaacaaaaccacagttctgcactcttccacagggcaaggaattgatcatattctattttcctttcaggaattcataaaatccctaggatagcacctttgtatgggctgaaccattaactgaactaaaattaatacaggaagcttaacattcaacattgtgcttgaacaaaacttaccactactcaatttttcttccaaactatgttagtaatacccggccgtaatggccgaattcccgggcatatgtccggtcaccgtcgactgnnnnnnnnnnnnnnnnnnnnnnnnnnnnnnnnnnncgccgcttcctcgctcactacttcgctgcgctcgtcgttcggctgcggacgagctgagcgccctatagtgagtctatacaatccttt

SEQ ID NO: 75921 - DNA, 1419 bp, Homo Sapiens
  misc_feature (111)..(111): n is a, c, g, or t
  misc_feature (698)..(730): n is a, c, g, or t
  misc_feature (732)..(780): n is a, c, g, or t
  misc_feature (836)..(845): n is a, c, g, or t
  misc_feature (885)..(900): n is a, c, g, or t
  misc_feature (942)..(950): n is a, c, g, or t
  misc_feature (991)..(1002): n is a, c, g, or t
  misc_feature (1193)..(1193): n is a, c, g, or t
  misc_feature (1387)..(1387): n is a, c, g, or t
agctgggtggtggaggcccggaggcacatcctggccatcctgcaggactgcccgtccctgcggccccccatcgaccacctgtgtgagctgctgccgcgcctgcaggcccgntactactccatcgcctcatcctccaaggtccaccccaactctgtgcacatctgtgcggtggttgtggagtacgagaccaaggccggccgcatcaacaagggcgtggccaccaactggctgcgggccaaggagcctgccggggagaacggcggccgtgcgctggtgcccatgttcgtgcgcaagtcccagttccgcctgcccttcaaggccaccacgcctgcctgccccacccaccccacagactccggcctgtaatcagctctcctggctccctcccgtagtctcctgggtgtgtttggcttggccttggcatgggcgcaggcccagtgacaaagactcctctgggcctggggtgcatcctcctcagcccccaggccaggtgaggtccaccggcccctggcagcacagcccagggcctgcatgggggcaccgggctccatgcctctggaggcctctggccctcggtggctgcacagaagggctctttctctctgctgagctgggcccagcccctccacgtgatttccagtgagtgtaaataattttaaataacctctggcccttggaataaagttctgttttctgtnnnnnnnnnnnnnnnnnnnnnnnnnnnnnnnnncnnnnnnnnnnnnnnnnnnnnnnnnnnnnnnnnnnnnnnnnnnnnnnnnnccccatgtgatatccgaaattcgcaaaaaaactaactaaacctaccctttgggcgnnnnnnnnnngccctcaaaaaacgtttctttaaaacatttccgggttggnnnnnnnnnnnnnnnngtgtaggtaaagggaaactggggccccacatcccgtctcccnnnnnnnnncccggggcacaagaacaaaggggcttgtggatccccccccnnnnnnnnnnnncccccccgccgcgggaaacacccgacgccttttctagacacaaaacccccagaagggggagtctcccgagaagggacttcttcacgggaaccccctaccacacgagagggactccccaacaggcgaaatccccgcatatacacacaaaatttaaaagccccccctggcgccgcgggcccatcttttttctnataagtgctcggtggcggcggtaatattcccctttatagcacgctattccttcgccctggaccagcgggtataatgcccctcttccgagaaaagccgcgcggctgcgacgtagacaacccctcaatatattcgccgccctcgtgggaggcaacacccacccaccaccctgttgatccacagcaatcgtcttggnacgaatatataacactatactgtcgcccgccc

SEQ ID NO: 75922 - DNA, 2466 bp, Homo Sapiens
gccctgcccaggtgcccgcagagagcagccgggctgccagcgtttcatgatcaacatgggagactcccacgtggacaccagctccaccgtgtccgaggcggtggccgaagaagtatctcttttcagcatgacggacatgattctgttttcgctcatcgtgggtctcctaacctactggttcctcttcagaaagaaaaaagaagaagtccccgagttcaccaaaattcagacattgacctcctctgtcagagagagcagctttgtggaaaagatgaagaaaacggggaggaacatcatcgtgttctacggctcccagacggggactgcagaggagtttgccaaccgcctgtccaaggacgcccaccgctacgggatgcgaggcatgtcagcggaccctgaggagtatgacctggccgacctgagcagcctgccagagatcgacaacgccctggtggttttctgcatggccacctacggtgagggagaccccaccgacaatgcccaggacttctacgactggctgcaggagacagacgtggatctctctggggtcaagttcgcggtgtttggtcttgggaacaagacctacgagcacttcaatgccatgggcaagtacgtggacaagcggctggagcagctcggcgcccagcgcatctttgagctggggttgggcgacgacgatgggaacttggaggaggacttcatcacctggcgagagcagttctggccggccgtgtgtgaacactttggggtggaagccactggcgaggagtccagcattcgccagtacgagcttgtggtccacaccgacatagatgcggccaaggtgtacatgggggagatgggccggctgaagagctacgagaaccagaagcccccctttgatgccaagaatccgttcctggctgcagtcaccaccaaccggaagctgaaccagggaaccgagcgccacctcatgcacctggaattggacatctcggactccaaaatcaggtatgaatctggggaccacgtggctgtgtacccagccaacgactctgctctcgtcaaccagctgggcaaaatcctgggtgccgacctggacgtcgtcatgtccctgaacaacctggatgaggagtccaacaagaagcacccattcccgtgccctacgtcctaccgcacggccctcacctactacctggacatcaccaacccgccgcgtaccaacgtgctgtacgagctggcgcagtacgcctcggagccctcggagcaggagctgctgcgcaagatggcctcctcctccggcgagggcaaggagctgtacctgagctgggtggtggaggcccggaggcacatcctggccatcctgcaggactgcccgtccctgcggccccccatcgaccacctgtgtgagctgctgccgcgcctgcaggcccgctactactccatcgcctcatcctccaaggtccaccccaactctgtgcacatctgtgcggtggttgtggagtacgagaccaaggccggccgcatcaacaagggcgtggccaccaactggctgcgggccaaggagcctgccggggagaacggcggccgtgcgctggtgcccatgttcgtgcgcaagtcccagttccgcctgcccttcaaggccaccacgcctgtcatcatggtgggccccggcaccggggtggcacccttcataggcttcatccaggagcgggcctggctgcgacagcagggcaaggaggtgggggagacgctgctgtactacggctgccgccgctcggatgaggactacctgtaccgggaggagctggcgcagttccacagggacggtgcgctcacccagctcaacgtggccttctcccgggagcagtcccacaaggtctacgtccagcacctgctaaagcaagaccgagagcacctgtggaagttgatcgaaggcggtgcccacatctacgtctgtggggatgcacggaacatggccagggatgtgcagaacaccttctacgacatcgtggctgagctcggggccatggagcacgcgcaggcggtggactacatcaagaaactgatgaccaagggccgctactccctggacgtgtggagctaggggcctgcctgccccacccaccccacagactccggcctgtaatcagctctcctggctccctcccgtagtctcctgggtgtgtttggcttggccttggcatgggcgcaggcccagtgacaaagactcctctgggcctggggtgcatcctcctcagcccccaggccaggtgaggtccaccggcccctggcagcacagcccagggcctgcatgggggcaccgggctccatgcctctggaggcctctggccctcggtggctgcacagaagggctctttctctctgctgagctgggcccagcccctccacgtgatttccagtgagtgtaaataattttaaataacctctggcccttggaataaagttctgttttctgtaaaa

SEQ ID NO: 75923 - DNA, 895 bp, Homo Sapiens
aggctggaccggtccggattcccgggatgccgggctgccgcgtttctgatcaacatgggagactcccacgtggacaccagctccaccgtgtccgaggcggtggccgaagaagtatctcttttcagcatgacggacatgattctgttttcgctcatcgtgggtctcctaacctactggttcctcttcagaaagaaaaaagaagaagtccccgagttcaccaaaattcagacattgacctcctctgtcagagagagcagctttgtggaaaagatgaagaaaacggggaggaacatcatcgtgttctacggctcccagacggggactgcagaggagtttgccaaccgcctgtccaaggacgcccaccgctacgggatgcgaggcatgtcagcggaccctgaggagtatgacctggccgacctgagcagcctgccagagatcgacaacgccctggtggttttctgcatggccacctacggtgagggagaccccaccgacaatgcccaggacttctacgactggctgcaggagacagacgtggatctctctggggtcaagttcgcggtgtttggtcttgggaacaagacctacgagcacttcaatgccatgggcaagtacgtggacaagcggctggagcagctcggcgcccagcgcatctttgagctggggttgggcgacgacgatgggaacttggaggaggacttcatcacctggcgagagcagttctggcccggccgtgtgtgaacactttgggggtggaagccactgggcgaggagtccagcattccgccagtaacgagcttgtgggtccacacccgacatagatggcgggccaaggtggttcaatggggggggaatatggggcccggcctgaactaagcttcccaaaaaccccgaa
